United States Patent Application Publication US 2012/0070457 A1 - sequence listing, part 9

SEQ ID NO: 53416 - DNA, 606 bp, Neisseria meningitidis
atgattttgctgcatttggattttttgtctgccttactgtatgcggcggtttttctgtttctgatattccgcgcaggaatgttgcaatggttttgggcgagtattatgctgtggctgggcatatcggttttgggggcaaagctgatgcccggcatatggggaatgacccgcgccgcgcccttgttcatcccccatttttacctgactttgggcagcatattttttttcatcgggcattggaaccggaaaacggatggaaacggatggcaggcagaccccgaacatcctctgctcgggctgtttgccgtcagtaatgtatcgatgacgcttgcttttgtcggaatatgtgcgttggtgcattattgcttttcgggaacggttcaagtgtttgtgtttgcggcactgctcaaactttatgcgctgaagccggtttattggttcgtgttgcagtttgtgctgatggcggttgcctatgtccaccgctgcggtatagaccggcagccgccgtcaacgttcggcggctcgcagctgcgactcggcgggttgacagcagcgttgatgcaggtctcggtactggtgctgctgctttcagaaattggaagataa

SEQ ID NO: 53417 - DNA, 1341 bp, Neisseria meningitidis; identical to SEQ ID NO: 43673

SEQ ID NO: 53418 - DNA, 720 bp, Neisseria meningitidis; identical to SEQ ID NO: 42501

SEQ ID NO: 53419 - DNA, 1296 bp, Neisseria meningitidis; identical to SEQ ID NO: 42475

SEQ ID NO: 53420 - DNA, 1125 bp, Neisseria meningitidis
atgcagaatacttcctttgataatgaatccgattatagcgacgattcagactttgcgtcagcttccgaaactgaaaaccgtatcggtctgaccgttccgctcgagcttgcaggcgggcggttggatgcggtattggcgaaacttctgcccgactactcgcgcagccgcctgacatcatggattaaagaaggcgcggttattgtaaacgataaaccttcgcaacccaaagacaaaatgataggcggcgagcaaatttgtgtaaccgtccgtccgagtgaggaaaatctggcgtttgttccagagcctatggctttggatattgtttacgaagacgataccgtcatcgtcgtcaacaaaccggccggactggtggtgcatccggcggcgggcaactggacggggacgctgctcaacggcctgttggcgcactgtcccgaattgagccaagtaccgcgcgcgggcatcgtacaccgtttggacaaggaaaccagcgggctgatggtggttgccaaaaccctgccggcgcaaaattccctcgtgaggcagcttcaagagcgcacggtcaaacgcatctaccgcgccgtcgccaacggcatcgtccccttcgacggtaaaatcgaaacccaaatcggacgcgatccgcacaaccgcctgaaaatggcagtcgtcaaattcggcggcaaaccagccgttacccacgtcaaagtgttggaacgctatcttacccacagctatatcgaatgctcgctcgaaacgggcaggacgcaccaaatccgcgtccatatgcgcgaggccaaccatccgcttgccgccgacccggtttacggcaacccgcgccatccgtgcggcgacacggtgaaagaagccgttaaaagtttgggtgcgcgtcaggcgttgcacgcctaccgcttgagtttcacccatccggaaagcggcgaaaccgtttcgtttgaagcaccgattccaaacgacatatatcatttgttatccgtcctccgtcttgaagccggtttggattcgtctttgagcaatgaagaagaatggcaggacaaattcggcgcggacgacgacgatgattggaacgaagacgactatgatgtcgaagtggtttatgtaagggagtga

SEQ ID NO: 53421 - DNA, 540 bp, Neisseria meningitidis; identical to SEQ ID NO: 40430

SEQ ID NO: 53422 - DNA, 483 bp, Neisseria meningitidis; identical to SEQ ID NO: 42582

SEQ ID NO: 53423 - DNA, 1341 bp, Neisseria meningitidis
ttgcacacccttctagcttttatcttcgccatcctgattttggtcagcctgcacgagttcggacactacatcgttgccagattgtgcggcgtcaaagtcgtacgcttttccgtcggcttcggcaaaccgtttttcacccgaaagcgcggcgacaccgaatggtgcctcgccccgattccgttgggcggttacgtcaaaatggtcgatacgcgcgaaggcgaagtatcagaagccgatttaccctacgcttttgacaaacaacaccccgccaagcgcatcgccatcgtcgccgccggcccactgaccaacctcgcactggcggttttgctgtacggactgagcttttccttcggcgtaaccgaactgcgcccctacgtcggcacagtcgaacccgacaccattgccgcccgcgccggcttccaaagcggcgacaaaatacaatccgtcaacggcacacccgttgcagattggggcagcgcgcaaaccgaaatcgtcctcaacctcgaagccggcaaagtcgccgtcggcgttcagacggcatcgggcgcgcaaaccgtccgcaccatcgatgccgcaggcacgccggaagccggtaaaatcgcaaaaaaccaaggctacatcggactgatgccctttaaaatcacaaccgttgccggcggcgtggaaaaaggcagccccgccgaaaaagcaggcctgaaaccgggcgacaggctgactgccgccgacggcaaacccatcgcctcatggcaagaatgggcaaacctgacccgccaaagccccggcaaaaaaatcaccctgaactacgaacgcgccggacaaacccataccgccgacatccgccccgatactgtcgaacagtccgaccacaccctgatcgggcgcgtcggcctccgtccgcagccggacagggcgtgggacgcgcaaatccgccgcagctaccgtccgtctgttgtccgcgcattcggcatgggctgggaaaaaaccgtttcccactcgtggacaaccctcaaatttttcggcaaactaatcagcggcaacgcctccgtcagccatatttccgggccgctgaccattgccgacattgccggacagtccgccgaactcggcttgcaaagttatttggaatttttagcactggtcagcatcagcctcggcgtgctgaacctactgcccgtccctgttttggacggcgggcacctcgtgttttatactgccgaatggatacgcggcaaacctttgggcgaacgcgtccaaaacatcggtttgcgcttcgggctcgccctcatgatgctgatgatggcggtcgccttcttcaacgacgttacccggctgctcggttag

SEQ ID NO: 53424 - DNA, 1392 bp, Neisseria meningitidis; identical to SEQ ID NO: 44003

SEQ ID NO: 53425 - DNA, 1344 bp, Neisseria meningitidis
atgagccaaaaccataccattctgcaatccctccccgtcggtcagaaagtcggcatcgccttctccggcggtcttgatacctctgccgcgctgttgtggatgaaactcaaaggcgcgctgccttatgcctacactgccaacctcggccagcccgacgaagacgactacaacgccattcccaaaaaagcgatggaatacggtgcggaaaacgcccgcttaatcgactgccgcgcgcagttggcacacgaaggcatcgccgccatccaatgcggcgcgtttcacgtttccaccggcggcatcgcctatttcaacaccacgcctctgggccgcgccgtaaccggcactatgcttgtttccgcaatgaaagaagacgatgtgaatatttggggcgacggcagcacctacaaaggcaacgacatcgagcgtttctaccgctacggtttgctcaccaatcccgcgctgaaaatctacaaaccctggctcgatcagcaatttatcgacgaactcggcggccgtcacgaaatgagcgaatttctgattgccaacggcttcaactacaaaatgtcggtggaaaaagcctactccaccgattccaatatgttgggtgccacccacgaagccaaagacttggaatttttgaactcgggcatcaaaatcgtcaaacccattatgggcgttgccttttgggacgaaaacgtcgaagtcagcccggaagaagtcagcgtacgctttgaagaaggcgtgccggttgcactaaacggcaaagaatacgccgatcccgtcgaactcttcctcgaagccaaccgcatcggcggccgccacggcttgggtatgagcgaccaaatcgaaaaccgcatcatcgaagccaaatcgcgcggcatctacgaagccccgggtatggcgttgttccacatcgcctacgagcgtttggtcaccggcatccacaacgaagacaccatcgaacaataccgcatcaacggcctgcgcctcggccgcctgctctaccaaggccgctggttcgacagccaagccctgatgttgcgcgaaaccgcacaacgctgggttgccaaagccgttaccggcgaagttaccctcgaactgcggcgcggcaacgactactcaattctgaacaccgaatcgcccaacctgacctaccaacctgaacgcctgagtatggaaaaagtcgaagacgctgcgttcactccgctcgaccgcatcggacagctcacgatgcgcaacctcgacatcaccgacacccgcgtcaaactgggtatctactcgcaaagcggtttgctctcgctgggcgaaggttcggtattgccgcagttgggcaataagcaataa

SEQ ID NO: 53426 - DNA, 438 bp, Neisseria meningitidis; identical to SEQ ID NO: 43598

SEQ ID NO: 53427 - DNA, 1212 bp, Neisseria meningitidis; identical to SEQ ID NO: 43211

SEQ ID NO: 53428 - DNA, 666 bp, Neisseria meningitidis; identical to SEQ ID NO: 43628

SEQ ID NO: 53429 - DNA, 1431 bp, Neisseria meningitidis; identical to SEQ ID NO: 42921

SEQ ID NO: 53430 - DNA, 1776 bp, Neisseria meningitidis; identical to SEQ ID NO: 43875

SEQ ID NO: 53431 - DNA, 192 bp, Neisseria meningitidis; identical to SEQ ID NO: 37615

SEQ ID NO: 53432 - DNA, 1497 bp, Neisseria meningitidis; identical to SEQ ID NO: 43659

SEQ ID NO: 53433 - DNA, 1143 bp, Neisseria meningitidis; identical to SEQ ID NO: 43801

SEQ ID NO: 53434 - DNA, 633 bp, Neisseria meningitidis; identical to SEQ ID NO: 41857

SEQ ID NO: 53435 - DNA, 2157 bp, Neisseria meningitidis; identical to SEQ ID NO: 42189

SEQ ID NO: 53436 - DNA, 2850 bp, Neisseria meningitidis
atgtgcaaccatcatccccaacattcgcacgacaacgacaccatccgcatccgcggcgcgcgcacgcataatttgaaaaacatcgatttagacattccgcgccacaaactcgtggtggtaacaggattgtcgggcagcggcaagtcgtcgctggcgtttgacacgctgtatgccgaagggcaacggcgttatgtcgagagcctttccgcctatgcgcggcagtttttgcagatgatggacaaacccgatgtcgatttaattgaaggtctgtcgcctgcaatttccatcgagcaaaaatccaccagccacaacccacgctccaccgtcggtacggtaactgaaatccacgactatctgcgtcttttatacgcccgtgtcggtaccccgtattgtcccgaacacaagctgccgctgtcgagccaaaccgtatcgcagatggtcgatgccgtattgaaactgccggaagacacgcgtgtgatgattcttgcccccaccgtgcgcgagcgtaagggcgagtttgtcgatttctttgccgacttgcaggcgcagggttttgcgcgggtgcgcgtggacggcgaggtctatcagttggacgaagtgccgaagctggaaaaaaacatcaagcacaatatcgacgtggtcatcgaccgcgtgaaagtgaaggcggacatcaagcagcggctggcggaaagttttgaaaccgcgctgcgccacggcaacgagcgtgcgctggcgatggagatggacagcggcgaagaacattggttttccgcacgtttcgcctgccccgtgtgttcgtacagcctgcccgaattagagcctcgccttttttcgttcaacaacccgatgggttcctgcccgacttgcgacggcttgggcaacaccaatttcttcgaccccgaaaaagtggtcgcccatcccgaattgtcgctggcaacaggtgcgattgacggttgggacaagcgcaaccaattctatttccaaatgattcaatcattggcgcggcattacggtttcgatgtgcaggctgcttgggaaacactacctgaaaaagtgaaaaaagttgtgctgcacggctcaggcaaagaagtcattgatttcacttacctgtccgaacgcggcaccaccttcaaccgcagccacgcctttgaaggcatcatccccaatctcgaacgccgctaccgcgaaaccgacagcgaaaccgtgcgcgaaaaactgcgcgaataccaaaaccaccgcgcctgcccaagctgcggcggcgcacgtttgcgcaaagaagcccgctacgtttacgtcagcggtgagccgttgcacgaagtttccgcctggccgctcaccaaaacccaccaattctttgaaacactggatttagacggcaacaaaaaacaaatcgccgaaaaaatcctcaaagaaatcaccgaacgcctcggcttcctgattaacgtcgggctggattacctgaatttaagccgctccgccgaaaccctctccggcggcgaagcccagcgcatccgcctcgccagccaaatcggcagcggcctgaccggcgtgatgtatgtactggacgaaccctccatcggcctgcaccagcgtgacaatgaccgcctgctggccaccctcaaacgcctgcgcgatttgggcaacagcgtgattgtggtcgaacacgacgaagacgccatccgcgaagccgatttcgtggtcgatatgggccccggcgcaggcgaacacggaggcaacgtactgattgccgacacgcccgaaaacgtcgcccaatgcgaaaactccgttaccggacaatacctcagcggcaaaaaatccattgccgtgccgtctgaacgcacgcccgtcaatcccgaccggatgctcgtcctcaaaggcgcacgcggcaacaatctcaaaaacgttacccttgagctgccgctcggtttgattacctgcatcaccggcgtgtccggcagcggcaaatccaccctgattaacgacaccctcgccaaaattaccgcccgcgaactcaaccgcgcccaagaagaacccgccccattcgacgacatccacggcctcgaacacctcgacaaagtcatcaacgtcgatcagtcccccatcggccgtactcctcgctccaaccccgccacctacaccggcctgttcacccctatccgcgaactcttcgccggcgtccccctctctcgcgaacgcggctacaacgtcggcagattctccttcaatgtcaaaggcggccgctgcgaagcctgccaaggcgacggcgtgattaaagtcgaaatgcacttcctgcccgacgtgtacgtcccctgcgaagtctgccacggcaaacgctacaaccgcgaaacgctcgaaatccaatacaaaggcaaaaacatcagccaagtcctcgacatgaccgtcgaagaagcccgcgaatttttcgacgccgtccccaccgtatcgcgcaaactgcaaaccctgatggacgtaggcctaggctatatccgcctcggacagtccgccaccaccctctccggcggcgaagcccaacgcgtgaaactcgccttggaactctccaaacgcgacaccggcagaacgctctacatcctcgacgaacccaccaccggcctgcacttcgccgacatcgccctgctgctggaagtcataggccgtctgaaaggcaaaggcaactcgatagtgattatcgagcataatctggatgtgattaaaacagcggattggattgtggacttggggccggaaggcggagatggcggggggaggattattgctaaaggtagtcctgaacaggtggcgaaagttaaggggagttatactgggaagtatttgaaggtggttttgaggtaa

SEQ ID NO: 53437 - DNA, 159 bp, Neisseria meningitidis; identical to SEQ ID NO: 43356

SEQ ID NO: 53438 - DNA, 375 bp, Neisseria meningitidis; identical to SEQ ID NO: 42701

SEQ ID NO: 53439 - DNA, 252 bp, Neisseria meningitidis; identical to SEQ ID NO: 42716

SEQ ID NO: 53440 - DNA, 1569 bp, Neisseria meningitidis
atggcaaaaaagaacaataaaactaaaatccaaaagcccgaagctgcattgcagacggacgtggctcaaattacggcgaccggtcgggttatcgccgagcatccgtccaattttattacgccgcaaaagatgcgggccctcttcgaggacgcagaaagcggcgacatccgcgcccaacacgagcttttcgcggacattgaggagcgcgacagcgacatcgcggcaaatatggggacgcgcaaacgcgcgctgctgacgctcaactggcgcgtcgccccgccgcgaaatgcgacgcccgaagaagaaaagctgtccgaccaagcctacgaaatgatggacagcctgcctaccctcgaagacctgattatggatttgatggacgcggtagggcacggattttctgcgttggaggtcgagtgggtattttcagacggcctttacctaccccgaaactttatccaccgcccgcaaagctggttcaaatgggacaaagacaacgggctgctgctgcgtacccgcgaaaatccggaaggcgaagcgttgtggccgctgggctgggtcgttcatacccaaaaatcgcgcagcgtccagcaggcgcgcaacgggcttttccgcacgctttcctggctgtatatgttcaaacactacgccgtccacgattttgccgagtttttggagctgtacggcatgcccatccgtatcggcaaatacggcgcgggcgcaaccaaagaggaaaaaaacaccctgcttcgagcggtggcggaaatcggtcacaacgcggcaggcatcatgccagaaggtatggaaatagagctccacaacgcggcaaacggtacgacggcaaccagcaatccgtttttgcagatggccgactggtgcgaaaaatcggcggcgcggctgattttggggcaaacgctgaccagcggtgcggacggaaaatccagcaccaacgcgctgggcaatatccacaacgaggtacgccgcgatttgctggtgtcggacgcaaaacaggtggcgcaaaccatcacaagccaaatcatcggaccgttcctgcaaatcaactatccccatgccgacccaaaccgcgtgccgaaatttgaatttgacacgcgcgagccgaaagacatcgcggtctttgccgacgctatcccgaaactggtggatgtcggcgtacaaatccccgaaagctgggtgcgcgacaaactggtcattccagatgtgcaggagggtgaggctgtgttggtgcggcaggtaccggacaatccggtaaacagaactgcattggcggctttatccgcccacaccgtaccatctaaggctacgggcaggcatcaggaaatattggacggcgcgttggatgacgcgctggttgagcccgatttcaattctcagctcaacccgatggtgcgtcaggcggttgccgcacttaatgcttgcaacagctacgaggaggcagatgccgcactgaatgcgctttatccgaatttggacaacgcgaaactgcgtacctatatgcagcaggccttgtttatcagcgatattttgggacaagaccatgcccgcgcctga

SEQ ID NO: 53441 - DNA, 2058 bp, Neisseria meningitidis; identical to SEQ ID NO: 43262

SEQ ID NO: 53442 - DNA, 852 bp, Neisseria meningitidis; identical to SEQ ID NO: 42611

SEQ ID NO: 53443 - DNA, 1227 bp, Neisseria meningitidis
atgaataccgataacctgcacgacatcttggacgaaatggttcaagtgtattctcaaaaaaaacaaagccgatccgaaaccccggccgaaatcggcgcacacttccacccgctgctcgaccgcctgtgcgaaaccgcagaagcacaaaacgcgtccgacatccttatcagcaaaggattcccgccctcgttgaaaatcaacagcgcattaaccccgcagccgcaaaaggcgctgacgggcgaggaaaccgccgccatcgccgcatcgacgatgaacgccgaacaatcggaaatattccggcgcgacggcgaaatcaactactccgtccagtcgcgcagcggcacgcgctaccgcgccaacgcctaccacagccaaggcagcgcaggtttggttttgcggcgcatcaaccacgtcatcccgcaaatgcaggaattgggcctgcccgaaaaactcaaagacctcgccgtcgcaccgcgcgggctgctgattatcgtcgggcctaccggttcgggcaaatccaccacgatggcgactatgctcgaacaccgcaacaaaaccctgcccagccatatcgttaccatcgaagacccgattgaatttatctacaaaccgcgccgctgcatctttacccagcgcgaaatcggcgtcgacaccataaactggcagacggcggtacaaaacgctatgcgccaatcccccgacgtggtctgcatcggcgaagtccgcagcagggaaagtatggaatacgcgatgcagctcgcccaaaccggccacctgtgcatttttacgctccacgccaacaccgcgccgcagtcgctcgaacgcatactcaacttctaccccaaagaacagcacaaccaaatactgatcgacatcgccctcaacctgaccggcatcatctgccaacgcctcgccctcaaacaagacaaaacgggcaggacggcggttgtcgacttgctcatcaacacgcccgccatccaagacttcatcctgaagggcgacctgatgaacatcagtaaaatcatggaaaccgccaaaaccgacggaatgcagacgatggatcaaaaccttttcgaactgtaccgtcacggcatcatcagttacgaagaagccctgcgccagtccgtttccgccaacaacctgcgattgcacatccaactgcacaaagaaggcaaaacgcccgaactcctttacgacagggtcaacggtctcaacctcatttcctga

SEQ ID NO: 53444 - DNA, 852 bp, Neisseria meningitidis
atgaacactttgaaatttaccaaaatgcacggtttgggcaacgattttatggtgattgacgcggtcagtcaggattttacccccgaggacgcgccgattgcggcatgggcggaccgtttccggggcgtgggcttcgaccagcttttggtggtcgggcgttcggaaaccgaaggcgtggatttccgttaccgtattttcaatgccgacggcagcgaggtcgggcaatgcggcaacggagcgcgttgttttgcccgttttgttgcagacaagggtttgaccgataagaaagaaatttgtgttgaaacggcaaatggcgttatttttccgaaattgtccgataacggtatggttacggtcaatatgggcaaaccgaagtttatgccgtctgaaataccgtttgtccccgaatcgggcgagggggatgatgcctgtatttacggggtgcatctcgaatccggcattcagcctgtcagctgcgtcaatatgggcaacccccatgcggtgattgtggtcgatgacgtggaatgcgcgccggtgcgcgaaaccggttcgcttatcgaaccgcacaggcagtttcccgaacgcgtcaacgtcggctttatgcagattgtcagccgaaccgcgattcgtttgcgcgtgttcgagcgcggcgtgggcgaaacccaagcgtgcggtacgggcgcgtgtgcggctgtggtggcgggtatccgtctggggttgttggatgaagggaaaacggtagaggtgattttgccgggcggaactttatatatcgaatgggcctgcggcggcgatgtgatgatgaccggccctgcggaaaccgtgtttgaaggcgagttggcgtattcatga

SEQ ID NO: 53445 - DNA, 966 bp, Neisseria meningitidis
atgagctacacgcaactgacccaaggcgaacgataccacatccaatacctgtcccgccactgcaccgtcaccgaaatcgccaaacagctgaaccgccacaaaagcaccatcagccgcgaaatcagacggcaccgcacccaagggcagcaatacagcgccgaaaaagcccagcggcaaagccggactatcaaacagcgtaagcgacaaccctataagctcgattcgcagctgattcagcacatcgacccctttatccgccgcaaactcagtcccgaacaagtatgcgcctacctgtgcaaacaccaccagatcacgctccaccacagcaccatttaccgctaccttcgccaagacaaaagcaacggcagcacgttgtggcaacatctcagaatatgcagcaaaccctaccgcaaacgctacggcagcacatggaccagaggcaaagtacccaaccgtgtcggcatagaaaaccgacccgctatcgtcgaccagaaatcccgtatcggcgattgggaagccgacaccattgtcggcaaaggacagaaaagcgcattattgaccttggtcgaacgcgttacccgctacaccatcatctgcaaattggatagcctcaaagccgaagacactgcccgggcagctgttagggcattaaaggcacataaagacagggtgcacaccattaccatggataacggcaaagagttctaccaacacaccaaaataaccaaagcattgaaagcggagacttatttttgtcgtccttaccattcttgggagaaagggctgaatgagaacaccaacggactcatccggcaatacttccccaaacaaaccgatttccgtaacatcagtgatcgggagatacgcagggttcaagatgagttgaaccaccgaccaagaaaaacacttggctacgaaacgccaagtgttttattcttgaatctgttccaaccactaatacactag

SEQ ID NO: 53446 - DNA, 117 bp, Neisseria meningitidis; identical to SEQ ID NO: 43182

SEQ ID NO: 53447 - DNA, 1248 bp, Neisseria meningitidis; identical to SEQ ID NO: 42888

SEQ ID NO: 53448 - DNA, 1131 bp, Neisseria meningitidis; identical to SEQ ID NO: 42815

SEQ ID NO: 53449 - DNA, 177 bp, Neisseria meningitidis; identical to SEQ ID NO: 38352

SEQ ID NO: 53450 - DNA, 1041 bp, Neisseria meningitidis; identical to SEQ ID NO: 43301

SEQ ID NO: 53451 - DNA, 690 bp, Neisseria meningitidis; identical to SEQ ID NO: 42774

SEQ ID NO: 53452 - DNA, 318 bp, Neisseria meningitidis; identical to SEQ ID NO: 42427

SEQ ID NO: 53453 - DNA, 2061 bp, Neisseria meningitidis; identical to SEQ ID NO: 43455

SEQ ID NO: 53454 - DNA, 2424 bp, Neisseria meningitidis
ttggcaacccttcctttgcgggatgtcgtcgtttacccgcatatggttctgccgctgtttgtcggcagaccgaaatccatcgccgcactggaaaacgccattacccgcgaggagccggttttcctgttggcgcaaaccgatgcggcggtagaagaaccgattgccgccgacctgtatcagaccggtacggtcgcacaagtcctgcaagtgttgaaactacccgacggcacggtaaaagtattggtcgaagggctgtatcgcggacgtgttctgaccattgaagacacgggcggtctgttcgtttcccatatagagacggtcgtggaagaagacacgggcggcaataccgacctcgaagccgtgcgccgcaccctgttggcgcagtttgaacaatacgccaaactcaataaaaaaatccccgccgaaattatcggcagcatcaacggcattgccgaaaacagccggctaaccgatacggtcgcagcgcatttgcagttgaaactggcgcaacgccaacagattttggaaattcccgaaatcggcaaacggatggaattcctgctggcacagctggaatccgaactcgacattatgcaggccgaaaaacgcatacgcggacgcgtcaaacgccaaatggaaaaatcccagcgcgaatattatctgaacgaacagattaaagcgatacacaaagaactgggcgaagaagacgaaaacggcgaactggatgccttggaagcagatatcaaaaaggcgggtatgaccaaagaagcggaagaaaaatgcctgtccgaactgaaaaagctcaaaatgatgccaccgatgtctgcggaatccaccgtcgtacgcaactacatcgacactttgctcgagctgccgtggaagaaaaaatcccgcgtcagcaaagacatcgccaaagccggactggtgctggatgccgaccactacggcctggaaaaagtcaaagaacggattttggaatacctcgccgtccaaaaacgtatggacaaactcaaaggcccgattctgtgcctggtcggccctccgggcgtgggcaaaacctctttgggcgaatccatcgccaaagcaacggggcggaaatatgtccgcatggctttgggcggcgtgcgcgacgaaagcgaaatcaggggacaccgccgcacctatatcggctctatgcccggtaagattttgcagaatatggcaaaagccggcgtgaaaaaccccttgttcctgctcgacgaaatcgacaaattgggtaacgacttccgaggcgatcccgccagcgcgttgctcgaagtgctcgatcccgaacaaaacaacaagtttgccgatcattatgcggaagtggattacgatttgagtgatgtgatgtttatcgccacatccaatagtctgaatattccgactccgttgctcgaccgtatggaaatcatccgtctgtccggctataccgaagacgaaaaaatcaatatcgcgatgcagtacctcgtaccgaagcaaatgaagcgcaacggtgtaaaagaaggggaattggcaatcgaagaaagcgcggtgcgcgatattatccgttattacacccgagaggcgggcgtgcgttcgctcgaccgcgaaattgccaaaatctgccgcaaggtggtgatgcagattaccttggacgaagataagaagaggttgtctgaaaccaagaaaaccagcaaagccaaacctaaagcggttaaagtaaatgagaaaaatctgcacgactatttgggtgtgcgccgcttcgattacggcgttgccgaaagcgaaaaccgtatcgggcaggttaccggtttggcgtggacggaagtcggcggcgaattgctgaccgtcgaagccgcagcattgccgggtaagggcgtgattcagtgcaccggccagttgggcgatgtgatgaaggaatccgtgtccgcagcgtggtcggttgtccgctcccgtgcggaatcagtgggtttggctcctgatttttacgagaaaaaagacatccacatccacgttcccgaaggcgcgacgccgaaagacggccctagtgcgggtattgcgatgaccttggcggcggtatctgcctttaccaaaatcccggtacgcgccgatgtggcgatgacgggcgaaattaccctgcgcggcgaagttttgcccatcggcggtttgaaggaaaaactgttggccgccttgcgcggcggcatcaaacacgtcctgattccgaaagacaacgtcaaagacttggaagaaatccctgaaaacgtgaaaaccggcctgaccatccatccggtcaaatggatagacgaggtattggctctgggtttggaaagccagcctgagccttgggcagaaccttctggtgcggaagcggcggcggaatccgcttcaaaaccaaaaccccgcagcagggcaaccaaacattga

SEQ ID NO: 53455 - DNA, 543 bp, Neisseria meningitidis; identical to SEQ ID NO: 38476

SEQ ID NO: 53456 - DNA, 333 bp, Neisseria meningitidis; identical to SEQ ID NO: 43845

SEQ ID NO: 53457 - DNA, 201 bp, Neisseria meningitidis; identical to SEQ ID NO: 43708

SEQ ID NO: 53458 - DNA, 4140 bp, Neisseria meningitidis
atgacctaccccatccccaaaccccgtgaaaaatcccgttggcccaatctttcgcaaggctcgctgcccttggctttggcgcgttatctgccgcataagcagctcaaggttgtcttgactcaagatgcggaacaggcgctacgccttcagacggcatggctgtttttccgtccgcacgatacggcggtgttcttgccggactgggaaacgctgccttacgagcgtttttcgccgcatcaggatttagtgtcggagcgcttgtcggcattgtggcagattaaaagcggcgcggcggacgtgttgttcgtgccggttgctacggcgatgcagaagctgccgcctgtgccgtttttggcggggcgcacgttttggctgaaaacagggcagactttggatataggccgtctgaaaagcgatttggtggatgcaggttataaccatgtttcccacgttgttgcggcaggcgagttcgctgtgcgcggcggcattgtcgatttgttccccatgggcagcgaaatgccctaccgcatcgatttgtttgacgatgaaatcgacagcatcaaaacctttgatacggacacgcagcgcaccatctcccccgtttccgaaatccgcctgctgccggcgcacgaattccccaccgacagcgaggcgcaaaaaatcttccgcagccgcttccgcgaggaagtcgatggtaatccgaacgatgcggctgtgtacaaagccgtcagcaacggtcatttcggcgcgggcgtggaatactacctgccgctgttttttgaaaacgagttggaaacgctgtttgactatatcggcgaagatgcgctgtttgtctctttagacgatgttcatgccgaggcaaaccgtttttggagcgatgtcaaatcgcgttacgcgatggcgcagggcgacgaaacctatccgcctttgcttccacagtatttgtatctctctgccgatgtgttcgcaggccgtctgaaaaactacggacaggtgctgcccgatgtttccggcaaggaatacaccctgcccgaccttgccgtcaaccgccaagcagatgagccgttgcaggcattgaaggattttcagacggcgtttgacggacggattttgctgtgcgccgaaagtttgggacggcgcgaaactatgctcggtttcttgcagcaaaacggtttgaaagccaaacccgtgtccgactggcagggctttttatcggcacacgagccgctgatgattacagtggcgccgttggcatacgggttcaaactgggcggactgcaatcgccgaaccaacagcaacctactccctcccccgtgggggagggttggggagagggcaaagcagttgccgctcaaactgaattttccgcagccgcaataaaccctctccctagccctctcccacaggagagggaacaaagtgcagccgccgtttcagacagtctgaaagcagccgccgtttcaaccgaaagcagcctgcccctcggtacaagtaatctgcacgggcaaatccgacagcaacctgccccttcccccgtgggggagggttggggagagggcaaagcagttgccgctcaaaccgaatttcccgcatccgcaacaaaccctctccctagccctctcccacaggagagggaacaaagtgcagccgccgtttcagacgacctgaaaaccaaaagcagcctgcatcccgtcgcaaataatctgcacgggcaaatccgacagcaacctactccctcccccgtgggggagggttggggagagggcaaagcagttgccgctcaaaccgaattttccgcagccgcaacaaaccctctccctagccctctcccacaggagagggaacaaagtgcagccgtcgtttcagacagtctgaaagcagccgccgtttcaaccgaaagcagcctgccccccggtaaaagtaatctgcacgggcaaatccaacagcaacctgccccctcccccgtgggggagggttggggagagggcaaagcagttgccgctcaaagtgccatcgccgtcatcaccgaatccgatctctaccaatacgtcgcccgttcgcgcatccacaaccgccgcaagaaacacgccgccgtttcagacgggctgttgcgcgaccttgccgaaatcaatatcggcgaccccgtcgtgcacgaagaacacggcatcgggcggtatatgggcttggtaacgatggacttgggcggcgaaaccaacgaaatgatgttgctcgaatacgcaggcgaagcgcagctttatgtgcctgtttcgcaactgcatttaatcagccgctactccggtcaggcgcatgaaaacattgccctgcacaagctcggcagtggcgcgtggaacaaggcgaagcgcaaagccgccgaaaaagcgcgcgacaccgccgccgaattgctcaacctctacgcccaacgcgccgcccaatcgggacacaagtttgaaatcaacgagttggactatcaggcgtttgccgacggcttcggctacgaggaaaccgaagaccaggccgccgccatcgccgccgtgattaaagatttgacgcaagcgaagccgatggatcgccttgtgtgcggcgatgtcggcttcggcaaaaccgaagtcgccctgcgcgccgcgtttgtggcggtgatgggcggcaaacaggtcgccgtacttgctccgaccacgcttttggtcgagcagcacgcgcaaaacttcgccgaccgtttcgccgatttccccgtgaaagtcgccagcctttcgcgtttcaacaacagcaaagccaccaaagccgcgctggaaggcatggcagacggcacggtcgatattgttatcggtacgcacaaactggtgcaggacgacatcaaattcaaaaacttaggtttagtgattatcgacgaagaacaccgcttcggcgtgcgccagaaagagcagctcaaacgcctgcgcgccaatgtcgacatcctcaccatgaccgccacaccgattccgcgcactttaagtatggcgttggaaggactgcgcgacttctcgctgattaccaccgcgcccagccgccgcctctccgtcaaaacctttgtcaaaccctttagcgaaggcagcgtgcgcgaagccgtattgcgcgaactcaaacgcggaggacaggtatttttcctgcacaatgaagtggataccatcgaaaacatgcgtgagcggctggaaaccctgctgcccgaagcccgcatcggcgtggcgcacggacaactgcgcgagcgcgagctggaacaagtcatgcgcgactttttgcagcaacgatttaacgtgttgctctgttccaccatcatcgaaaccggtatcgacattcccaacgccaacaccatcatcatcaaccgtgccgacaaattcggattggcgcagctgcaccagcttcgcgggcgcgtcggacgcagccaccaccaagcctacgcctacctgctcacgcccgaatacatcaccaaagacgcagaaaaacgcctcgacgccatcgcggcagcagacgaactcggcgcaggtttcaccctcgccatgcaggatttggaaatccgcggcgcaggcgaaatcctcggcgaagggcagtccggcgaaatgatacaggtcggcttcacgctctacaccgaaatgctcaaacaagccgtgcgcgatctcaaaaaaggccgccaacccgacctcgacgcgccgctgggcatcaccaccgaaatcaaactgcacagccccgccctactgcccgaaagctactgccccgacatccacgagcgtctcgtcctctacaaacgcctcgccgtctgcgaaaccgtgcagcaaatcaacgccatacacgaagaactcgtcgaccgcttcggcctgcccgaacaacccgtcaaaacccttatcgaaagccaccacctgcggcttatggcaaaagaattgggtatcgatgccattgatgcggccggcgaagcggtaacggtaaccttcggtaaaaacaataatgtcgatccaaccgaaatcatcctgctgattcagaacgacaaaaaataccgccttgccggcgccgataagctgcggtttaccgcagagatggaaaatatcgaggtcagaatcaacaccgtaaaaaacgttttaaaaaccttgcaaaacagatgcctgcccaaataa

SEQ ID NO: 53459 - DNA, 801 bp, Neisseria meningitidis
atgaaaaagaccatttttaacattaccaaaatggactgcccgtccgaagaacagctcattcgcatgcgtttaaaagatgtgtctgatatttatgaattacagtttgatattgctgggcggtgcttaaccgtctatcacgataatcaagatacaacgattttacaagtacttgaaccgcttaattttgatagtcatatcatttccaccgaagtgattgttgataagatagtgtttaacaagcctgatgagcacttagaaaaaagattattatatcaagtgctcatgattaactttgtgttttttatcatagagtgttcggttggtatttttgctaattctatggggctgattgctgatagtctagatatgctggcggacagctttgtctatatattggcgctatcagccattggtatgacgctggcgtataaaaaacgtgtggcatttttggcggggataacgcagataatattggcgttatttggggtgatagaagtgattaggcgttttatcggtgctgagcagctgcccaattatcaactgatgattggcacggcatttttggcattgattgcaaactggctgtgcttatatctactgagcaaaaatcaaaataaagaaatccatatcaaagccagcatgatttttacatccaatgacattatcatcaatatcggtgtgatagcggcgggagcattgacgttattgactcattctagctatcctgatttaatcattggcatgattgtctttgtcattgtactatttggtgccagaaatattttaaaattggcaaaataa

SEQ ID NO: 53460 - DNA, 456 bp, Neisseria meningitidis; identical to SEQ ID NO: 43393

SEQ ID NO: 53461 - DNA, 465 bp, Neisseria meningitidis
atgaaagaactagataaaatcgatttccgcatccttaagatccttcaacagaatgcccgcatcccgatgacggagcttgccgagaaggtaggcttgtccaccacgcccgttacagagagggtgcgccgtttggagcgggaacattatatttccggttatcacgcccatctcaatccccatctgttgggcaaacctttattggtttttgtcgagctgaagctgcaatccaaatcgggcaatattttcgaagatttcaaaaaagaagtgctgaaaattccgcaaattatggaatgccacttggtgtcgggcgaatacgactatctgattaaagtacgtttgcccgatatgtctgcctatcgggatatgctaggcaatatcctattgcaactgcctgccgcttcggagagtaggagttatgttgtgatggaggaggtcaaagaaaatccggttttggatttggattga

SEQ ID NO: 53462 - DNA, 1260 bp, Neisseria meningitidis; identical to SEQ ID NO: 42957

SEQ ID NO: 53463 - DNA, 594 bp, Neisseria meningitidis; identical to SEQ ID NO: 43835

SEQ ID NO: 53464 - DNA, 567 bp, Neisseria meningitidis; identical to SEQ ID NO: 43403

SEQ ID NO: 53465 - DNA, 1866 bp, Neisseria meningitidis
atgatagaaaaactgactttcggactgtttaaaaaagaagacgcgcgcagctttatgcgcctgatggcgtacgtccgcccctacaaaatccgcatcgttgccgccctgattgccattttcggcgttgccgccaccgaaagctaccttgccgccttcatcgcccccctgattaaccacggcttttccgcacctgccgcgccgcccgagctgtctgccgccgccggcatcatttccaccctgcaaaactggcgcgaacagtttacctatatggtttgggggacggaaaacaaaatctggaccgtcccgctcttcctcatcatcctcgtcgtcatccgtggcatctgccgctttaccagcacctatctgatgacttgggtctccgtgatgaccatcagcaaaatccgcaaagatatgtttgccaaaatgctgaccctttcctcccgctaccatcaggaaacgccgtccggcaccgtactgatgaatatgctcaacctgaccgaacagtcggtcagcaacgccagcgacatcttcaccgtcctcacgcgcgacacgatgatcgttaccggcctgaccatcgtcctgctttacctcaactggcagctcagcctcatcgtcgtcctgatgttccccctgctctccctgctctcgcgctactaccgcgaccgtctgaaacacgtcatttccgactcgcaaaaaagcataggcacgatgaacaacgtgattgccgaaacccatcagggacaccgcgtcgtcaagctgttcaacgggcaggcgcaggcggcaaaccggttcgacgcggtcaaccgcaccatcgtccgcctcagcaaaaaaatcacgcaggcaacggcggcacattccccgttcagcgaactgatcgcctcgatcgccctcgccgtcgtcatcttcatcgccctgtggcaaagccaaaacggctacaccaccatcggcgaatttatggcattcatcgtcgcgatgctgcaaatgtacgcccccatcaaaagccttgccaacatcagcatccctatgcagacgatgttcctcgccgccgacggtgtatgtgcatttctcgacaccccgcccgaacaggacaagggcacgctcgcaccgcagcgtgtcgaagggcgcatcagcttccgcaacgtcgatgtcgaataccgttcagacggcatcaaagccctcgacaacttcaacctcgacatcagacaaggcgaacgcgtcgccctggtcggacgttccggcagcggcaaatccaccgtcgtcaacctgctgccccgctttgtcgaaccgtctgccggcaacatctgcatagacggtatcgacatcgccgacatcaaactcgactgcctgcgcgcccaattcgccctcgtctcccaagacgtattcctgtttgacgacaccctgtttgaaaacgtccgatacagccgtcccgacgcgggcgaagccgaagtcctgttcgccctccaaaccgccaacctgcaaagcctgattgacagctccccgctcggactgcaccagcccatcggatcgaacggcagcaacttatccggcggacagcggcaacgcgtcgccattgcccgcgccattttgaaagacgcgccgatattattattggacgaagccaccagcgcattagacaacgaatccgaacgcctcgtccaacaggcgctcgaacgcctgatggaaaaccgcaccggcatcatcgtcgcccaccgcctgaccaccatcgaaggggccgaccgcatcatcgtgatggacgacggcaaaatcatcgaacaaggcacacacgaacaactgatgtcccaaaacggttactacacgatgttacgcaatatctcaaacaaagatgccgccgtccggacggcataa

SEQ ID NO: 53466 - DNA, 1575 bp, Neisseria meningitidis; identical to SEQ ID NO: 43669

SEQ ID NO: 53467 - DNA, 1056 bp, Neisseria meningitidis; identical to SEQ ID NO: 42642

SEQ ID NO: 53468 - DNA, 1815 bp, Neisseria meningitidis; identical to SEQ ID NO: 43831

SEQ ID NO: 53469 - DNA, 867 bp, Neisseria meningitidis; identical to SEQ ID NO: 43809

SEQ ID NO: 53470 - DNA, 840 bp, Neisseria meningitidis
atgaccgccacagccgccgccatagaccgcctgcttccccaaacccaatgccgcgaatgcggctacgacggctgcctgccctacgcacaggcagtcgcaacaggcgaagcgtacaacctctgcgccccgggcggagaaaccgtcattcgggacatttccgccctgctcggcaaaccctttgtcgcacctgccaaaacccaagccaaagcactcgcccggatagacgaaaccgcctgtatcggctgcaccgcctgcatccgcgcctgccctgccgatgccattatgggcgcgggcaaacttatgcacaccgtcatcgccgacgaatgcaccggctgcggactctgcgtcgccccctgccccgtcgactgcatccatatgcagcccgttgccgacaccgtcctgccccgcgcgcgccgcttcagcctgtccgccgacagccgttttgccgccgccgaacacgcgcgcacgcgctacctcaaacgcaacgaacgcaaacagcgcgaagccgacgaacgcaaggccatgcttgccgaacgcgaagccgccgtccgcaacgcgcgtccgcaaacgcccgacacaccgaaaaaaccgacgtttaaccctgccgacctcatcgccaaagccatggcaaaagcgcaaacccaacaagaccgcctcgccgccgccgacaaccgcaaagactatcaggcgaaacagatagccgaagcccgcgaacgcgccgagttgcgccgcgcccaacgcgatatgaaatacggcagcgacagcgaaaaagccgccgccctcgaatatctcaaacaatacaaagccaaacaggaagccgcacagaataccgcctcctga

SEQ ID NO: 53471 - DNA, 669 bp, Neisseria meningitidis; identical to SEQ ID NO: 39678

SEQ ID NO: 53472 - DNA, 177 bp, Neisseria meningitidis; identical to SEQ ID NO: 42525

SEQ ID NO: 53473 - DNA, 1677 bp, Neisseria meningitidis
atgtcccaacaatacgtctattctatgctgcgcgtgagcaaggttgtgccgccgcagaaaaccatcattaaagatatttccctttctttcttccccggcgcgaaaatcggcctgctcggtttgaacggcgcgggcaagtccaccgtgctgcggattatggcgggcgtggataaggaatttgagggcgaagccgtgccgatgggcggcatcaaaatcggctacctgccgcaagagcctgagcttgatccggaaaaaaccgtgcgcgaggaagtggaaagcggtttgggcgaagtggctgccgcgcagaaacgtttggaagaagtgtatgccgagtacgccaatcctgatgcggattttgacgcgttggcagaagagcagggccgcttggaagcgattattgcggcaggttcgtccacgggcggcggtgcggaacacgaattggaaatcgccgccgacgcgctgcgcctgccggaatgggatgccaaaatcgataatttgtccggcggtgaaaaacgccgcgttgccttgtgcaaactcttgttgagcaagcccgatatgcttttgctggacgagccgaccaaccacttggatgcggaatcggtcgagtggctggagcaatttctcgtgcgcttccccggcacagtcgttgcggtaacgcacgaccgctacttcctcgacaacgccgccgaatggattttggaactcgaccgcggccatggtattccgtggaaaggcaattactcgtcttggctggagcagaaagaaaaacgcttggaaaacgaggcaaaatccgaagccgcgcgcgtgaaggcgatgaagcaggaattggaatgggtgcgccaaaatgccaaaggccgccaagccaagtccaaagcgcgtttggctcgttttgaagaaatgagcaactacgaataccaaaaacgcaatgaaacgcaggaaatctttattcccgttgccgagcgtttgggtaacgaagtgattgaatttgtaaatgtttccaaatcgttcggcgataaagtgctgattgacgatttgagcttcaaagtgcctgcgggcgcgattgtcggcatcatcggcccgaacggcgcgggtaaatctacgctgttcaaaatgatttcgggcaaagagcagcctgattccggcgaggtgaaaatcggacaaaccgtgaaaatgagcttgattgaccaaagccgcgaaggtttgcaaaacgacaaaaccgtgttcgacaacattgccgaaggccgcgacattttgcaggttggtcagtttgaaattcccgcccgccaatatttggggcgtttcaacttcaaaggcagcgaccaaagcaaaattgcaggtcaattgtctggcggcgaacgcggtcgtctgcacttggcaaaaaccttgttgagcggcggcaatgtattgctgctggatgaaccgtctaacgaccttgacgtggaaaccctgcgcgcgttggaagacgcattgttggaatttgccggcagcgtgatggtgatttcgcacgaccgttggttcctcgaccgcatcgccacgcatatcttggcgtgtgaaggcgactctaaatgggtgttcttcgacggcaactatcaggaatacgaagccgacaagaaacgccgtttgggcgaagaaggcgcgaaaccgaaacgcatcaaatacaaaccggtaacgcgttaa

SEQ ID NO: 53474 - DNA, 1143 bp, Neisseria meningitidis; identical to SEQ ID NO: 42265

SEQ ID NO: 53475 - DNA, 378 bp, Neisseria meningitidis
gtgaacaaaaccctcatcctcgccctttccgccctcctcggccttgccgcgtgcagtgccgaacgcgtttcactgttcccctcgtacaaactcaaaatcatacagggcaacgaactcgaaccgcgcgccgttgccgccctccgccccggcatgaccaaagaccaagtcctgctcctgctcggcagccccatactgcgcgacgcattccataccgaccgctgggactataccttcaacacctcccgcaacggcatcatcaaagaacgcagcaatctgaccgtctattttgaaaacggcgtactcgtccgcaccgaaggcgacgtcctgcaaaacgctgccgaagccctcaaagaccgccaaaacacagacaaaccataa

SEQ ID NO: 53476 - DNA, 393 bp, Neisseria meningitidis; identical to SEQ ID NO: 43161

SEQ ID NO: 53477 - DNA, 1407 bp, Neisseria meningitidis; identical to SEQ ID NO: 38418

SEQ ID NO: 53478 - DNA, 615 bp, Neisseria meningitidis; identical to SEQ ID NO: 43050

SEQ ID NO: 53479 - DNA, 357 bp, Neisseria meningitidis; identical to SEQ ID NO: 43505

SEQ ID NO: 53480 - DNA, 966 bp, Neisseria meningitidis
atgagctacacgcaactgacccaaggcgaacgataccacatccaatacctgtcccgccactgcaccgtcaccgaaatcgccaaacagcttaaccgccacaaaagcaccatcagccgcgaaatcagacggcaccgcacccaagggcagcaatacagcgccgaaaaagcccagcggcaaagccggactatcaaacagcgtaagcgacaaccctataagctcgattcgcagctgattcagcacatcgacccccttatccgccgcaaactcagtcccgaacaagtatgcgcctacctgtgcaaacaccaccagatcacgctccaccacagcaccatttaccgctaccttcgccaagacaaaagcaacggcagcacgttgtggcaacatctcagaatatgcagcaaaccctaccgcaaacgctacggcagcacatggaccagaggcaaagtacccaaccgtgtcggcatagaaaaccgacccgctatcgtcgaccagaaatcccgtatcggcgattgggaagccgacaccattgtcggcaaaggacagaaaagcgcattattgaccttggtcgaacgcgttacccgctacaccatcatctgcaaattggatagcctcaaagccgaagacactgcccgggcagctgttaggacattaaaggcacataaagacagggtgcacaccatcaccatggataacggcaaagagttctaccaacacaccaaaataaccaaagcattgaaagcggagacttatttttgtcgcccttaccattcttgggagaaagggctgaatgagaacaccaacggactcatccggcaatacttccccaaacaaaccgatttccgtaacatcagtgatcgggagatacgcagggttcaagatgagttgaaccaccgaccaagaaaaacacttggctacgaaacgccaagtgttttattcttgaatctgttccaaccactaatacactag

SEQ ID NO: 53481 - DNA, 966 bp, Neisseria meningitidis; identical to SEQ ID NO: 43388

SEQ ID NO: 53482 - DNA, 462 bp, Neisseria meningitidis; identical to SEQ ID NO: 43691

SEQ ID NO: 53483 - DNA, 567 bp, Neisseria meningitidis; identical to SEQ ID NO: 43197

SEQ ID NO: 53484 - DNA, 1008 bp, Neisseria meningitidis
atgagcaccttctttcaacaaaccgcccaagccatgattgccaaacacatcgaccgcttcccgctattgaagttggaccgggtgattgattggcagctgatcgaacaatacctgaaccgtcaaaaaacccgttaccttagagaccaccgcggccgtcctgcctatcccctgctgtccatgttcaaagccgtcctgctcggacaatggcacagcctctccgatcccgaactcgaacacagcctcattacccgcatcgatttcaacctgttttgccgttttgacgaactgagcatccccgattacagcaccttatgccgctaccgcaaccggctggcgcaagacaataccctgtctgaactgttggaactgattaaccgccaactgaccgaaaaaggtttaaaaatagagaaagcatccgctgccgtcgttgacgccaccattattcagaccgccggcagcaaacagcgtcaggccatagaagttgacgaagaaggacaaatcagcggtcaaaccacaccgagtaaggacagcgatgcccgttggataaagaaaaacggcctctacaaactcggttacaaacaacatacccgtaccgatgcagaaggctatatcgagaaactgcacattacccccgccaatgcccatgagtgcaaacacctgtcgccgttgttggaaggtctgcccaaaggtacgaccgtctatgccgacaaaggctatgacagtgcggaaaaccggcaacatctggaagaacatcagttgcaggacggcattatgcgcaaagcctgccgcaaccgcccgctgtcggaagtgcaaaccaagcgtaaccgatatttgtcgaagacccgttatgtggtcgaacaaagcttcggtacgctgcaccgtaaattccgctatgcccgggcagcctatttcggactgattaaagtgagtgcgcaaagccatctgaaggcgatgtgtttgaacctgttgaaagccgccaacaggctaagtgcgcccgctgccgcctaa

SEQ ID NO: 53485 - DNA, 420 bp, Neisseria meningitidis; identical to SEQ ID NO: 37099

SEQ ID NO: 53486 - DNA, 840 bp, Neisseria meningitidis; identical to SEQ ID NO: 43752

SEQ ID NO: 53487 - DNA, 1500 bp, Neisseria meningitidis; identical to SEQ ID NO: 42341

SEQ ID NO: 53488 - DNA, 258 bp, Neisseria meningitidis; identical to SEQ ID NO: 43891

SEQ ID NO: 53489 - DNA, 237 bp, Neisseria meningitidis; identical to SEQ ID NO: 50090

SEQ ID NO: 53490 - DNA, 372 bp, Neisseria meningitidis; identical to SEQ ID NO: 43386

SEQ ID NO: 53491 - DNA, 942 bp, Neisseria meningitidis; identical to SEQ ID NO: 43207

SEQ ID NO: 53492 - DNA, 939 bp, Neisseria meningitidis; identical to SEQ ID NO: 42264

SEQ ID NO: 53493 - DNA, 1098 bp, Neisseria meningitidis; identical to SEQ ID NO: 42824

SEQ ID NO: 53494 - DNA, 144 bp, Neisseria meningitidis
ttggatgatgccgcgaatatcatccatacggttaccccaccaatttttattggtgtatcgttaatcatttatttcaaaaaagttatttattatcatattatcagggagcaggtcgttaaaaaaaaccccctcaaattccattaa

SEQ ID NO: 53495 - DNA, 654 bp, Neisseria meningitidis
atgaagataacgcactgcaaattaaagaaaaaagtacagaaagaactgctccgtttttttgtgctggaagttaccgcccgttctgccgccgatattttgggtatccatcccaattcggcagtactgttctaccgtaaaatccgcacggttatcaaccatcatttggccttggctgccgatgaggtttttgagggccctgtcgagccggacgaaagcgatttcggcggacggcgtaaaggcagacgtggtcgcggtgcggcaggaaaagtggttgtcttcggcattctgaaacgcaacggacgggtctataccgttgtcgtagataatgccaagtctgaaacgttactccctgtcatcaaaaagaaaatcatgccggacagtattgtttataccgatagtctgagcagctgcgacaagttggacgtgagcggttttatccattaccgcatcaaccattccaaggaatttgcagaccgtcagaaccacattaacggcattgagaatttttggaatcaggcaaaacgcgtcttgcgaaaatacaacggaatcgatcgtaaatctttcccgctgttcttgaaagaatgcgaatttcgatttaacttcggcacaccgtctcaacagcttaaaatcctgcgggattggtgtggaatttag

SEQ ID NO: 53496 - DNA, 219 bp, Neisseria meningitidis; identical to SEQ ID NO: 40879

SEQ ID NO: 53497 - DNA, 1566 bp, Neisseria meningitidis; identical to SEQ ID NO: 42664

SEQ ID NO: 53498 - DNA, 273 bp, Neisseria meningitidis; identical to SEQ ID NO: 41596

SEQ ID NO: 53499 - DNA, 705 bp, Neisseria meningitidis; identical to SEQ ID NO: 42711

SEQ ID NO: 53500 - DNA, 1272 bp, Neisseria meningitidis; identical to SEQ ID NO: 42571

SEQ ID NO: 53501 - DNA, 423 bp, Neisseria meningitidis; identical to SEQ ID NO: 42186

SEQ ID NO: 53502 - DNA, 1185 bp, Neisseria meningitidis
atgagtttacacagcgacatcctcgtcgtcggcgcaggcccggcgggtttaagttttgcagccgaacttgccggcagcggtttgaaagttaccctgatcgaacgcagcccactgactgttctgcaaaatcctccatatgacggacgcgaaatcgccctgacccatttttcccgcgaaatcatgcagcgtttgggtatgtgggacaaaattcccgaaaacgaaatctaccctttgcgcgatgccaaagtgctgaacggacgttccgactaccagctccactttccccaaccgactgaagcgcgcggcgaacctgccgactgtttgggctatctgatttccaaccacaatatccgccgcgccgcctatgaagtcgtatcacaactcgacaatgtcagcattctgaccgatacggttgtcaaagaagtcaaaacatctgacaacgaagcacaagtcattttggaaaacggcaaaatactgactgcacgcctgcttttggcggcagacagccgcttctcgcaaacccgtcgacaactcggtatctcctccgatatgcacgattacagccgaaccatgttcgtctgccgtatgaaacataccctttccaaccaacataccgcttacgaatgcttccattacggacgcaccatcgcactgctgccgctggaagagcacctgaccaataccgtcattaccgtcgataccgataaaatcaacagcgttcaaaacctttcgcccgaagaattggcggcaagcgtaaaagaacagctcaagggcaggctcggcgatatggaattggtcagcagcatccaccattacccccttgtcggcatgattgccaaacgtttctacggcaaacgcagcgcgctgattggcgatgccgccgtcggtatgcaccccgttacagcacacggtttcaacttggggctttccagcgcagatattttggcaaaactgatactcgaagccgaacagcgcggtcaagacatcggtgcatcttcattattggaaaaatacagcagcaaacatatgctgcacgcccatccgctttatcacggaaccaatatgatgctgaaactgtttaccaatgagaccgcaccggcaaaactgttgcgcggcttggtattgcgtgccagcaacaatttcccaccgctgaagaaactgatcaccaaacaactgaccggttga

SEQ ID NO: 53503 - DNA, 372 bp, Neisseria meningitidis; identical to SEQ ID NO: 42820

SEQ ID NO: 53504 - DNA, 1584 bp, Neisseria meningitidis; identical to SEQ ID NO: 43674

SEQ ID NO: 53505 - DNA, 1452 bp, Neisseria meningitidis; identical to SEQ ID NO: 42712

SEQ ID NO: 53506 - DNA, 378 bp, Neisseria meningitidis; identical to SEQ ID NO: 43966

SEQ ID NO: 53507 - DNA, 648 bp, Neisseria meningitidis; identical to SEQ ID NO: 43595

SEQ ID NO: 53508 - DNA, 1176 bp, Neisseria meningitidis; identical to SEQ ID NO: 43396

SEQ ID NO: 53509 - DNA, 135 bp, Neisseria meningitidis
atgaaacgcacttatcaaccttccgttaccaaacgcaaacgcacccacggcttcctggtgcgctccaaaacgcgcggcggccgcgcagtattggccgcacgccgtgccaaaggccgcaaacgcctggcggtataa

SEQ ID NO: 53510 - DNA, 1788 bp, Neisseria meningitidis; identical to SEQ ID NO: 42681

SEQ ID NO: 53511 - DNA, 501 bp, Neisseria meningitidis
atggcggatttgcagaaaaattttcaaacttcgttccgtgatgcgatggcatcttgcgcggcaggcgttcatgtcatcacgacagacggtgcggcagggcgttacggcattacaatgacggcggtcgcgccggttaccgacgagccgccgaccgtgatgctgtgcatcaaccggagtgcgcgaatcattccgatcctgtcggaaaacggcagcctctgcatcaatacgctggcggacgaacatcaggatgttgccgaacattttgccgggctgaccggcctgtcgcccgaagagcggtttgcctaccacatctggcatcgcggcaaaacgggacaacttgaaatagagggcgcgttggcgcacctgcacgggcatattgtcggcaaacatgaaatcggcacgcattttgtgttttacgtcaggctcgacgaaatcaaaaactgcgggtgcaaacgccccgcgctgctgtatttcagacggcagtttagatttttagactga

SEQ ID NO: 53512 - DNA, 828 bp, Neisseria meningitidis
atgaaacccgatatttatgctttgctggaacgcgccctgctttcgggcgacccagatgaaaaaggacggctgacggatgaggcgtttgccgccgttcaaaatgcggacggggcggaaacaaacgcaccgccggcggacttcccccgcgcgggacgaccggacaagcctgttttggtcgcgccgtcgcagctgacgccacgcaaaatgaacacaaccgaaggctatgcggcgatgctgcacgcgattgcgcatatcgaattcaacgccatcaatctggctttggacgcggcataccgtttccgcacgctgccgtttcagtttgtccgcgactgggtgaaagtggcgaaggaagaggtgtaccatttccgcctgatgcgcgaaaggctgcgcgctttcggcttcgattacggcgattttgaagcacacaatcatttatgggatatggcatacaaaaccgcctacgatcctttgttgcgtatggctttagtgccgcgcgttttggaagcgcgcgggctggacgttacgcccggcatacgcgcgaaggtggcgcagcgcggtgattcggaaacctgcggcgtgttggacatcatttaccgcgacgaagtgggacacgtcgccatcggcaaccggtggtatcaacacctttgccgcgaacgcggtttggagcctgtcgccctgttccgcagcctgattgcccgttacgatatgtttatcttccggggctatgtgaacatcgaagcgcgcgaaaaagcaggcttcagccgctttgaattggatatgttggaagatttcgagcagggtttgaaacaaaataaacatgccgtctga

SEQ ID NO: 53513 - DNA, 999 bp, Neisseria meningitidis
gtggcggcacatatcggacgcattgatacggacgcgcctttgaaacccctgtacgtcatccacggcgaggaagaactgttgcgtatcgaggcattggacgcattgagggcggcggcgaagaaacaaggttaccttaatcgggaagtttatacggcagacaatgccttcgattggaacgagctgctgcaaaccgcaggcagtgcgggtctgtttgccgatttgaagctgttggaactgcatatccctaacggcaagcccggcaaaaccggcggcgaggcgttgcaggattttgccgcccgattgccggaagatacggtaacgctggttttgctgcccaaactggagaaaacccagctccagtccaaatggtttgccgcattggcggcaaagggggaagtgtgggaagccaaaccggtcggcgcggcggctttgccccaatggatacgcggacggctggacaaaatcggtttgggtatcgaggcagacgcattggcactgtttgctgagcgcgtggaaggcaatctgttggcggcgcgtcaggaaatcgacaagctcgggctgctgtatccgaaagggcataccgtcaatatcgatgaggcgcaaaccgccgttgccaacgtcgcccgcttcgacgcgttccaactggcaggcgcgtggatgaagggcgatgtcctgcgcgtatgcaggcttttggacggattgcgggaagagggcgaagaaccggtgctgttgctgtgggcggttgccgaagacgtgcggacgctgatccggcttgctgccgccctgaagcaggggcagagcatccaatccgtccgcaacagcctcaggctttggggcgacaagcagacgctcgcaccgcttgcggtcaagcggatttccgtcgtccgcctgcttgacgcgctcaaaacctgcgcccaaatcgaccgaatcatcaaaggtgcggaagacggcgacgcatggacggtattcaaacggcttgtcgtgtcgctggcggaataa

SEQ ID NO: 53514 - DNA, 1407 bp, Neisseria meningitidis; identical to SEQ ID NO: 43854

SEQ ID NO: 53515 - DNA, 1419 bp, Neisseria meningitidis; identical to SEQ ID NO: 42601

SEQ ID NO: 53516 - DNA, 252 bp, Neisseria meningitidis; identical to SEQ ID NO: 41525

SEQ ID NO: 53517 - DNA, 1335 bp, Neisseria meningitidis; identical to SEQ ID NO: 43442

SEQ ID NO: 53518 - DNA, 1644 bp, Neisseria meningitidis; identical to SEQ ID NO: 44022

SEQ ID NO: 53519 - DNA, 402 bp, Neisseria meningitidis; identical to SEQ ID NO: 37561

SEQ ID NO: 53520 - DNA, 1074 bp, Neisseria meningitidis; identical to SEQ ID NO: 42745

SEQ ID NO: 53521 - DNA, 1209 bp, Neisseria meningitidis; identical to SEQ ID NO: 38616

SEQ ID NO: 53522 - DNA, 567 bp, Neisseria meningitidis
atgttattgcaaaacatccttccattcgcccattgccttttgcggaaggcacttcccgaaggcggcaatgctttggacggcaccgccggcaacggacacgacacccttttcctcgcacaaaccgcaggcatccgggggaaagtgtgggcattcgacatccagccgcaagccctgagccgcactcgatgccgtctgaaagaagcgagatacgagaatgtgcaactcatcttagacggacacgaaaacctgaaacaatatgtttcagaaccactaaatgccgccattttcaactttggctggctgcccggcggagataaaagccttaccacccatacggaaaccagcattcccgccctttgcgcaaccctctccctgctgaaagaaggcggtatgcttattgccgtcctctatccgggacacgaaaacggcaaacaggaggcagaagcaatcgaacaatgggcaaaaaacctgcctcaagaacagtttgccgttttgcgttacggctttaccaaccggaaaaacagcccgccctatcttttggcatttgaaaaactgcgtcaaaaataa

SEQ ID NO: 53523 - DNA, 1200 bp, Neisseria meningitidis
atgttaccgaatacaccgcgccgcgccgtttatgccggcagtttcgatccgcccacattggggcatctgtggatgatacggcaggcgcaatctatgtttgacgaactcatcgtcgccatcggcattaaccccgacaaacgcagcacctataccgtcgctgaaaggcaggatatgttgtgcgatattactaaaatgtttcccaacgtcagaaccgatgtatttgaaaaccgatttctggtgcattacgcccgtgaggtagatgcaggattcatcgtgcgcggcatccgttctgcttcggattacgaatacgaacgttccatgcgccatatcaacagcgacctcgcccccgaaatatccacgtattcctcatgccgccgcgcgaaatcgccgaagtgtcgtccactatggtcaaaggactggtcgggccggaaggctggacggaaacgatccaccgctacgtgccgcaagctgtgtacgaaaaaatccttgccgaacatcaacacgaaaattgaacccttctatttttgcaaggcatatatggatatgttggaaattttgttccgccatcaagacttcgtcgccatcaacaaaccgggcggcatatccgtccaccaagacagcggcgagaccggactggcccgaacactcgccatacagttgggcgtagagcgtgtgtggctgctgcaccgattggacaaacagaccagcggcattttactgtttgccctcaacaaagaaagcgcgtccgcccttagcggacagtttgccggcaaaagcatcaaaaaaacctatttggcactgtccgaccgcaagccgtccaaaaagcagggttggattaaaggcggaatggaaaaatccagatgtggaatgtggaagttgacgcgcaatacagaaaatatcgccgttacccgattccacagcatcagtatcgccgaaaaactgcggctgttcatcctagaaccgcatacgggcaaaacgcaccaattgagagtggcgatgaaaagtttgggcagtccgattctgggcgacagcttatacggcggaacagaatccgaaaccatgtttctgtatgcatggaaaatacaatttgactaccaaaaccgacaaatcgaaattgttgcacccttaaaaaacgaatggcagactgaaaatatccatcgggcactggaagaattctgtatggaaaataaaattgactga

SEQ ID NO: 53524 - DNA, 354 bp, Neisseria meningitidis; identical to SEQ ID NO: 42785

SEQ ID NO: 53525 - DNA, 1011 bp, Neisseria meningitidis; identical to SEQ ID NO: 43684

SEQ ID NO: 53526 - DNA, 1146 bp, Neisseria meningitidis; identical to SEQ ID NO: 42792

SEQ ID NO: 53527 - DNA, 789 bp, Neisseria meningitidis; identical to SEQ ID NO: 42692

SEQ ID NO: 53528 - DNA, 141 bp, Neisseria meningitidis; identical to SEQ ID NO: 42905

SEQ ID NO: 53529 - DNA, 1869 bp, Neisseria meningitidis
atgagccaagccttaccctaccgcccggacatcgacacattgcgcgccgccgccgtcttgtccgtcatcgtgttccatatcgaaaaggattggctgccgggcgggtttctcggtgtcgatatattctttgtgatttcaggctttttgatgacgacgattcttcaccgcgaaatgtcggggggggggaggttttccctgaaggcattttatatccgccgcatcaagcggattctgcccgcatttttcgccgtattggcggcaacgctggcaggcggcttctttttattcaccaaagatgatttctttcttttgtggaaatccgcgctgaccgccttgggtttcgcctctaacctgtattttgcaagggggaaggattatttcgatcccgcgcaggaagaaaagcccctgctgcacatctggtctttgtcggtcgaagaacaattttactttgtctttccgatactgctgctgcttgtcgcccgcaaaagcctgcgcgtacagttcggcttccttgccgcactgtgtgccttaagccttgccgcctcctttataccttccgcgctcgataaatattacctgccccacctgcgcgcctgcgaattactgataggatcgctgaccgccgtgtggatgcgctgccggcaacctgccgtcggcagacgctgtgccgccgtcggcgcattgtttgccgtgtgcatattgtcaacctgcctgttttcctattcggaacaaaccgcctatttcccgggccccgccgctttgattccctgtctggctgttgccgcgctgatttatttcaatcattacgaacacccgcttaaaaaatttttccaatcgaaaatcactgttgccgccggtttgatttcctattcgctttatctgtggcattggccgatattggcctttatgcgctatatcggcccggacaacctgccgccttattcgccggcggcggcggtcgtcctgatattgctgctttccctgttttcttaccactgcatcgaaaaaccgtttaaaaaatggcaaggttcgttcgcacaatccgttttatggatttatgccttgcctatgctcattttgggggcgggctcgttttttgcgatgagactgccgtttatggcgcaatacgaccgcttggggctgacgcgttccaacacctcctgccacaacaataccggcaaacaatgcctatggggggatacggaaaaacagccggaactgctggttttgggcgactcccacgccgaccattacaaaacattcttcgatgccgtgggcaaaaaagaaaaatggtccgccactatggtttccgccgacgcttgcgcctatgtggaaggctacgcgtcccgtgtgttccaaaactgggcagcctgccgcgccgtttatcgctatgccgaagaacacctgccccggtattcaaaagtggttttggcgatgcgctggggcagccaaatgcccgaaaacagccgctcccttgcctatgatgccggttttttccaaaaattcgaccgtatgctgcataaactctcgtccgaaaaacaagccgtttacctgatggcggacaaccttgcctcgtcttacaacgtccagcgcgcctatatcttgtcttcacgcataccgggttaccgccaagccctgcgcccggacgacgaaagcaccctgaaagccaatgcacgcatcagggaattggcagccaaataccccaacgtctatattattgatgccgccgcctatatccccgcagattttcaaatcggcggattgccggtttactcggacaaagaccacatcaacccttacggcggcacggaattggcaaagcgtttttccgaaaaacaacggtttctcgatacgcgccataaccattga

SEQ ID NO: 53530 - DNA, 315 bp, Neisseria meningitidis; identical to SEQ ID NO: 43522

SEQ ID NO: 53531 - DNA, 774 bp, Neisseria meningitidis; identical to SEQ ID NO: 42606

SEQ ID NO: 53532 - DNA, 264 bp, Neisseria meningitidis; identical to SEQ ID NO: 40271

SEQ ID NO: 53533 - DNA, 642 bp, Neisseria meningitidis; identical to SEQ ID NO: 43682

SEQ ID NO: 53534 - DNA, 303 bp, Neisseria meningitidis; identical to SEQ ID NO: 37201

SEQ ID NO: 53535 - DNA, 480 bp, Neisseria meningitidis
atgccggaaagtattttcaaacagatttcccttgatattttgaaactgcatcgggactctgtttattcgctgcttgccacttctggctgcaactgtcaggtgcatgaagcggcgtatgtcaacatcgacggcaaatattatattgcgctttcatgcgagcccgaggtgggggaagtcaaaacaggcattttgctgattgaggatgaaagccgcaaccttcgtttgagctgggtcggcagtgcgcgggaacttgaccgcaaggatagtgtctataagcgtgccttgtccgcgttgtctagaaagctggggcggtgtaaggacaggctgcatatggcggttcaaccgtttttgttggagctggtgccggagaaaggcagattttctgtcggcgatgaagaagtttggatttctcgaaacgatttagtgagggctttatatcctgtcggatacagtatgcggcaggcagtgtttcagatttaa

SEQ ID NO: 53536 - DNA, 519 bp, Neisseria meningitidis
atgcgccttttccccatcgccgccgccctgacgcttgccgcctgcggtactgtgcaaagcacacaatatttcgtgttgcccgacagccgctacatccgccctgcaacgcaaggcggcgaaaccgccgtcgaagtccgccttgccgaaccgctcaaacgcggcggactggtctatcaaaccgacccctaccgcctcaacaccgcacaaaaccacgtttgggcggacaccttggacgatatgctcgaagcggcgttgagcaatgcattcaaccgtttggacagcacacgcatctttgttcctgcctcacgcagcggcagtaccgaaaaatggacggtctatattgacgcattccaaggcagctacacgggcaaaaccctcatcagcggctacgccgtcctacccgacggtacgaacagacccttccatatcgaaaccgaacagcagggtgacggctacgccgcgatgaccgccgcactcgaacagggactgaaacaggcggcgcaacagatggtcgagtaa

SEQ ID NO: 53537 - DNA, 810 bp, Neisseria meningitidis
atgagaccatatgctactactatttatcaactttttattttgtttattgggagtgtttttactatgacctcatgtgaacctgtgaatgaaaagacagatcaaaaagcagtaagtgcgcaacaggctaaagaacaaaccagtttcaacaatcccgagccaatgacaggatttgaacatacggttacatttgattttcagggcaccaaaatggttatcccttatggctatcttgcacggtatacgcaagacaatgccacaaaatggctttccgacacgcccgggcaggatgcttactccattaatttgatagagattagcgtctattacaaaaaaaccgaccaaggctgggttcttgagccatacaaccagcaaaacaaagcgcactttatccaatttctacgcgacggtttggatagcgtggacgatattgttatccgaaaagatgcgtgtagtttaagcacgactatgggagaaagattgcttacttacggggttaaaaaaatgccatctgcctatcctgaatacgaggcttatgaagataaaagacatattcctgaaaatccatattttcatgaattttactatattaaaaaaggagaaaatccggcgattattactcatcggaactatcataggtatggagagaacgattacagcactagcgtaggttcctgtattaacggtttcacggtacggtattacccgtttattcgggaaaagcagcagctcacacagcaggagttggtaggttatcaccaacaagtagagcaattggtacagagttttgtaaacaatccaagtaaaaaataa

SEQ ID NO: 53538 - DNA, 801 bp, Neisseria meningitidis; identical to SEQ ID NO: 44925

SEQ ID NO: 53539 - DNA, 1254 bp, Neisseria meningitidis
atgcagacttatctcgtcggcggtgccgtccgcgattatcttttgggcttgcccgtcaaagaccgcgattgggtggtcgtcggcgcagacgcacaaaccatgctggcgcaaggcttccagccggtcggcaaagattttcccgtgtttctccatcccgaaacacacgaagaatacgccctcgcccgcaccgagcgcaaaaccgccaaaggttacgtcggtttcagtttccacgccgacaaagacgttacgctggagcaggatttgatgcgccgcgacctgaccatcaacgcgatggcgcaagatgcggacggcaagattatcgaccctttcggcggacaacgggatttggcggcaggcattttgcgccacgtttccccagcctttgccgaagaccccgtccgcatcctgcgtactgcccgctttgccgcgcgttacaagtttgaaatcgccgaagaaaccataaagctgatgcggcagatggtggaaaacggcgaagcggacgcattggttgccgaacgcgtctggcaggagtttgcgaaaggtttgatggaaaaaaatccgcgcaaaatgattgaagtgttgcgcgaatgcggcgcgctcaaagtcttgctgcccgaagtcaatgccctcttcggcgtgccgcaacgcgccgactaccatcccgaaatcgacagcggcatccataccctgatgacgctgcaacgcgccgccgatatgggcttgagcctgcccgaacgctatgccgccctgctgcacgacttgggcaaagccaaaacaccgtccgacatcctgccgcgccaccacggacacgacctcgccggtgtcgaacccgtgcgcgaagtcaatcagcggctgcgtgcgccgaaacattgcgccgagcttgccgaattggtttgccgttggcacattattttccaccaagtcggacagcttaaaagccaaaccattctgaacgttttgaaaaaaaccgacgctttcagacgacccgaacgctttcagacggcattgaacgtctgcattgccgacacgcaaggccgtctgaaccgcgaacacacgccctacccgcaacgcgcgcactggctcgccttactcgaagccgccaatcaggcggattcgggcaaaatcgccgccgaatgccgctcgcagggaaaagcgcaccttatcgccgaacaaatcgaccgggcgcggctggcacaaatcgccccattgcaaaaagcgtttcgagcggcgcaagacaaaacagaaaaacattaa

SEQ ID NO: 53540 - DNA, 1620 bp, Neisseria meningitidis
atggacaatctcgtatgggacggcattcccgacatccgcacactcgaccaagccatccgcaaacacgcacccccgctcaacctgattatctgcctccccgataatcagattcccgattttcaaaccgcacaagatgcttcggacgcggaatgccgtctgaagcaccgtttggatcaggcaatgcagtgcctccagttcgacagcatcaacctcatcgaacacatcctgcccgatgtccgcttctggctggttcccccttcacgcacccaccacctgcacgaacatttccaccacatttcctggcagaccgaagccatcccgcaaaccgaaagcaagcccgacaaaccctggtttgcacttccacaaacatccgaacggcaaaaaccggaacacatcctcgttatcggcgcgggcatatccggcgcggcaaccgcccacgccttagcatcacacggcatttccgttaccgtattggaagcccgaaaagccgcccaagccgccagcggcaaccgccaagggctgctctacgccaaaatctcgccgcacgacaccgaacaaaccgaactgctgcttgccggctacggctacaccaaacgcctgctcggacatatcctgcccgaatccgaaacctggggcggcaacggcatcatccacctcaattacagccgcaccgaacaacaacgcaatcacgaattgggtttgcaaaaacaccataaccacctctaccgcagcatcacgcaggcagaagccgaaaaaatcgccggtatcccactgtccgtcccatacgaccacccttcatgcggactctactggcaacacggcgtatggctcaatccacccgcattcgtccgcaccctcctcaaccatccgctcattggactacacgaagacacaccgttaaccgacatttcccacgacggggaaaagtggattgcaagcacgccaaacggcacatttaccgccacacacatcatctactgcaccggtgcgaacagcccctacctacccgaaaccaacctcgccaccctgcccctcaggcaaatacgcggacaaaccggcctcacaccgtccaccccgttttccgaacaactgcgttgcgccgtttcaggcgaaagctacatcagcccgtcgtggcacggactgcactgctacggcgcgagttttattcccaacagcagccataccggatggaacgaagccgaagaagcctcaaaccgccaagcattggcacaccttaaccccgccctttccgaatcattgtttgccgccaacccaaacccccaaaaacaccaagggcacgccgccatacgctgcgacagccccgaccaccttcccctagtcggcgcactcggcgacattgccgctatgcaacaaacttacgccaaactcgcgctggacaaaaactaccgcatcgatgccccctgcccgtacctgcccaatgcctacgccaacaccgcccacggcacacgcgggcttgccaccgcccccatctgcgccgccgccgttgcagccgaaatcctaggcttgccccatcccctctcaaaacgcctgcgccacgccctacaccccaaccgcgccatcatccgcgccatcgtcagaaggaaggatctaaccccttaa

SEQ ID NO: 53541 - DNA, 270 bp, Neisseria meningitidis; identical to SEQ ID NO: 40667

SEQ ID NO: 53542 - DNA, 1554 bp, Neisseria meningitidis
atgacacagaccaaccgcgttatcattttcgacaccaccctgcgcgacggcgaacaatcgcccggcgccgctatgaccaaagaggaaaaaatccgcgtcgcccgccagctggaaaaattgggtgtggacatcatcgaagcgggttttgccgctgccagcccgggcgatttcgaggcggtcaatgcgattgcgaaaaccattaccaaatcaacggtctgttcattgtcccgcgccatcgagcgggacatccgtcaggcgggtgaggccgttgcgcccgcgccgaaaaaacgcatccacaccttcatcgccaccagccccatccatatggagtacaaattgaagatgaagccgaagcaggtgattgaggcggcggtcaaagcggtgaaaatcgctcgtgaatacaccgacgatgtggaattttcctgcgaagacgcgttgcgttcggaaatcgatttccttgccgaaatctgcggcgcggtgattgaagcgggcgcgaccaccatcaatattcccgataccgtcggctattccatcccgtataaaaccgaagaatttttccgcgaactgattgccaaaacgcccaacggcggcaaagtcgtttggtcggcacactgccacaacgatttgggcttggcggttgccaattcgcttgccgcattaaaaggcggcgcgcgtcaggtggaatgtactgtcaacggcttgggcgaacgtgcaggcaatgcttcggttgaagaaatcgtgatggcgttgaaagtgcgccacgacttgttcggcttggaaaccggcatcgataccacgcaaatcgtgccttcgtccaaactggtgtccaccattacgggctatcccgtgcagcccaacaaagccattgtcggtgccaatgccttttcgcatgaatcgggcatccatcaggacggggtgctgaaacaccgcgaaacttacgagattatgtccgccgaatcggtcggctgggcaacaaaccgtttgagcttgggcaaattgtccggccgcaacgccttcaaaaccaagctggcggatttgggcatcgagttggaaagcgaagaggcactgaacgcggcatttgcacgcttcaaagaactcgccgacaaaaaacgcgaaatcttcgatgaagacctgcacgcactggtatccgacgaaatgggcagcatgaatgccgagagctacaaattcatctcccaaaaaatcagcaccgaaaccggagaagaaccgcgcgccgacatcgtgttcagcatcaaaggtgaagaaaaacgcgcttccgcaaccggttccggccccgtggatgcgattttcaaagcgattgaaagcgtggcgcaaagcggcgcggctttgcagatttattccgtcaacgccgtcacgcaaggtacggaaagccagggcgaaaccagcgtccgtctggcgcgcggcaaccgcgtcgtcaacggtcagggcgcggataccgacgttttggtcgccaccgccaaagcctacctttccgctttgagcaagctggaatttagtgccgccaaaccgaaagcgcagggcagcggtacgatttga

SEQ ID NO: 53543 - DNA, 378 bp, Neisseria meningitidis; identical to SEQ ID NO: 36526

SEQ ID NO: 53544 - DNA, 1779 bp, Neisseria meningitidis; identical to SEQ ID NO: 43528

SEQ ID NO: 53545 - DNA, 1806 bp, Neisseria meningitidis
atgaaaaaactgatttgcctgttcgccgtatttttgatgttgtgcggacgagctttcgcgctggatgcgaacgatctgctgccgccggaaaaggcattcgtgccggagcttgccgttgccgacgacggtgtgaacgtccgtttcaggattgccgacggatactatatgtatcaggcgaaaatcgtcggcaagaccgatccggcggatttgttgggacagccttctttcagcaagggcgaagagaaggaagacgagtttttcggcaggcagacggtttaccatcacgaggcgcaggttgcctttccttatgcaaaggctgtcggcgaaccgtataaattggttttgacctatcagggctgtgccgaagccggcgtgtgctatccgcccgtggataccgagtttgatattttcggcaacggcacttaccatccgcaaaccgacgaaccggcatccgccaaagaccgctttttgcagccttcctctcaaaacggcagcggggcgctgccgcccccgaagggggatgagggcggcgacagccgtttcaagctgtcttgggatacgctcaacgccaatcttttggcgttttttctcgctggtttgggcctgagttttaccgcctgtatgtatcccctgttgccgattgtttccagtattgtggtcggcgacaaaaaggcgggcaaggcgcgggcgtttgtgctgtccgtcgtttatgttcagggtttggctctgacttatacgctggtcggcattgttgccggactgacgggcgcactgctgaccgtatggttgcagcaggcttgggtggtattggcggcatcggctttaatggtcgtcttggcactgtctatgttcgggctgttcaacatccagcttcccaacgccgtgcagtcgtattttcagaatcaaagcagcaggctttcaggcggtaaaatcgtttccgtctttattatgggcatattgtccgcgctgattgtcgggccgtgcgtcgccccgccgctggcatttgctttgggctacatcggtcagacgggcgatgcggttttaggcggtttggcactttacactttggcgttgggcaccggcgttccgctgattgccatcggcacgttcggcgggcatatcctgcctaaggcaggcgattggatgaatgccgtcaaatacgcattcggcttcatcctgctagccgtcgccgtttacctcgccacgccgcacttgccctattatctcgtcgtcgcgctgtacacgctgctgatgctggttcctgcctttatgctgctggtcaacggacgcaggcagaaacgccgtccgaaagctgtggcattcgcattgggcggtatattgctgataggcggcgcgtggttcggctggcagggcgcaaacggcaaaacgaccgcgctgcaccatttcctgaccctcaatccaccagccgaagcaggcaaatcttcggaacacggcaaaatgtttgccgatactgccgcgctgaaggcagcgatggatacggcgttgaaagaacatcccgacaaacccgtcgttttggatttttatgccgactggtgcatttcctgcaaagaaatggcggcttacacgctcaatcagccggaagtgcatcaggcagtcgatatggaacgctttttccaaatcgacgtaaccgccaacacgcccgaacatcaggcgttgttgaaagaatacggtctgttcgggccgccgggcgtgtttgtcgtccgctccgacggcagccgcagcgagccgctgctgggttttgtcaaagcagacaagtttatcgagtggtatgaacaaaaccgctga

SEQ ID NO: 53546 - DNA, 864 bp, Neisseria meningitidis; identical to SEQ ID NO: 37464

SEQ ID NO: 53547 - DNA, 285 bp, Neisseria meningitidis; identical to SEQ ID NO: 43893

SEQ ID NO: 53548 - DNA, 1176 bp, Neisseria meningitidis; identical to SEQ ID NO: 42387

SEQ ID NO: 53549 - DNA, 978 bp, Neisseria meningitidis; identical to SEQ ID NO: 43268

SEQ ID NO: 53550 - DNA, 378 bp, Neisseria meningitidis
ttgcgtcaggatatgagcgagcagacggcattggccgtgtgtgccgacggtgtggaaacggcattggcggaagcggcatcactgttggaagagggatgcgggtcggttttggttttggcggcggacgatccgctgccggaaggatatgccgtatcggcgactcgcgcgccgtttgcttatgctttggcgatggttctgaccaaagggacgcgttacagcctgactttgtctgcttcggacgatatgccgtctgaagccggtatgctgcccgaggcatattggagcggtttggaatgggtgcgctttctgctgaacggcagtcgagaatgccgccgggtatatcgcaatcgtgaatggctgtggcagcggaatggataa

SEQ ID NO: 53551 - DNA, 693 bp, Neisseria meningitidis
gtgcaggcggatttagcttatgccgccgaacgcattacccacgattatccgaaagcaaccggtgcaaacaacacaagcacagtaagcgattatttcagaaacatccgtgcgcattccatccacccccgggtgtcggtcggctacgatttcggcggctggaggatagcggcagattatgccagttacagaaaatggaacaacaataaatattccgtaaacacaaaagagttgcaaaaaaacaatagcagtggcatctggcaagaactgaagacggaaaatcaggaaaacggtacattccacgccgcttcttctctcggcttatccgccatttacgatttcaaactcaacgataaattcgataaattcaaaccctatatcggtgcgcgcgtcgcctacggacacgttaaacatcaggttcattcggtgagaaaagaaaccacgactactttcagtccaccagcgcaaggcgctacagtgccaggcaaaatcgtacaaggtccgaccaacaaacctgcctatcacgaaagcaacagtatcagcagcttaggtcttggtgtcatcgccggtgtcggtttcgacatcacacccaagctgactttagacaccggataccgttaccacaactggggacgcttggaaaacacccgcttcaaaacccacgaagtctcattgggcatgcgctaccacttctga

SEQ ID NO: 53552 - DNA, 861 bp, Neisseria meningitidis; identical to SEQ ID NO: 43500

SEQ ID NO: 53553 - DNA, 4374 bp, Neisseria meningitidis; identical to SEQ ID NO: 43165

SEQ ID NO: 53554 - DNA, 444 bp, Neisseria meningitidis; identical to SEQ ID NO: 42093

SEQ ID NO: 53555 - DNA, 621 bp, Neisseria meningitidis; identical to SEQ ID NO: 42837

SEQ ID NO: 53556 - DNA, 1446 bp, Neisseria meningitidis; identical to SEQ ID NO: 43120

SEQ ID NO: 53557 - DNA, 1254 bp, Neisseria meningitidis
atgcgtaaacccagaatcacctatttggatgtttgggcaaacgatgaaagaatcggtactttggaaaagggggccatgtatcggttcgcatacgacaatcccaattcttcgttgctgggcctgcattatcaagacagaagcaaggtatatatcagcaacaatatgccgcatatctttgcacagtattttccggaaggctttttggatgcacacatcacaagcaaatatgcttttcatgatgcgccttttgaagacaatgagatgctgcgcttggcaattctgtgcagagagactttgggtcggatacatgtgcgctgtaatgacccgctttttaatgaatggattgacgggttggagatgaaaaatccaagaatattgactgaacgggatttgctgggcataaatgcccgacaggtttttcagcaatatatggcagaaatcttccatcacggccgtttcgtcagtgtatccgggatacagcagaagatgtccttagatgccatccgcagaaataccaagcaaactgcctcatatattgccaaaggttttgatgcatccgaatatccttgcttggctgccaatgaatttttatgcatgcagaccatcaaacaagccggcattgccgttgcacagaccagcctgtcggaagattcatcagtcttattggtacgtcggtttgatgtcagtgaacagggttattttttagggatggaagactttaccagtctgcgccagtattcggtagaagataaatataaaggcagttatgcggctattgcacagattatccgacagatatccggcagaccagatgaagatttaatccatttctttaatcagcttgctgccagttgcatattgaaaaacggcgatgcacacctcaaaaatttttcagtactctatcatgacgaatacgatgttcgtcttgcacctgtctatgatgtattggatacatcaatatacagggttggaacacaaggaatttttgatgcttatgacgatacgctggcattaaacctgactaaccacggtaagaaaacatatccttccaagaatacattgttggattttgctgagaaatattgcgatttgggaagagaagatgcatcctttatgatagatacaatcgttcaagctaaagaacaggttcttgttaaatactcggatgtattgcgtgagaatgaatggttggcgcagaagtggcattttatcccggatgaaaatgaagaaggtctaccgtttacattccggtag

SEQ ID NO: 53558 - DNA, 756 bp, Neisseria meningitidis; identical to SEQ ID NO: 43635

SEQ ID NO: 53559 - DNA, 321 bp, Neisseria meningitidis; identical to SEQ ID NO: 38688

SEQ ID NO: 53560 - DNA, 291 bp, Neisseria meningitidis; identical to SEQ ID NO: 42317

SEQ ID NO: 53561 - DNA, 534 bp, Neisseria meningitidis; identical to SEQ ID NO: 43773

SEQ ID NO: 53562 - DNA, 906 bp, Neisseria meningitidis; identical to SEQ ID NO: 43866

SEQ ID NO: 53563 - DNA, 1458 bp, Neisseria meningitidis; identical to SEQ ID NO: 42549

SEQ ID NO: 53564 - DNA, 1518 bp, Neisseria meningitidis
atgttgtatttcagatacggctttttggttgtttggtgtgcggcaggtgtttctgccgcctatggggcggatgcgcccgcgattttggatgacaaggcattgttgcaggtgcagcggtcggtgtcggataagtgggcggaatcagattggaaagttgaaaatgatgccccgcgcgtggttgacggggattttttgttggcgcatccgaaaatgttggaacatagtttgcgcgacgcgctcaacggcaatcaggcggatttaatcgcttcgttggcggatttgtatgccaagctgccggattatgacgcggttttgtacggcagggcgcgggctttgctggcgaaattggcgggaaggccggcggaggcggtggcgcggtatcgggaactgcacggggaaaatgcggcagacgagcggattttgctggatttggcggcggcggagtttgacgatttccggctgaagtcggcagaaaggcattttgcggaggcggcaaaattggatttgccggcaccggttttggaaaatgtggggcgttttcggaaaaaaacggaggggctgacgggctggcgtttttcgggcggcatcagtccggcggtcaatagaaatgccaataatgccgcgccgcaatattgccggcaaaacggaggccggcagatatgcagtgtcagccgggcggagcgggcggcagggttgaattatgaaatcgaggcggaaaagctgacgccgttggcagataatcattatttgttgttccgttccaatatcggcggcacgagctattatttcagtaaaaaatcagcttatgatgacgggttcggcagggcgtatttgggttggcagtataaaaatgcacggcagacggcggggattttgccgttttatcaggtgcagttgtcgggcagcgacggctttgatgcgaaaacaaaacgggtaaacaaccgccgcctgccgccgtatatgctggcgcacggagtcggcgtgcagctgtcccatacttaccgcccaaacccgggatggcaattttcggtcgcgctggaacattaccgccaacgctaccgcgaacaggatagggcggaatacaataacggcaggcaggacgggttttatgtttcgtcggcaaaacgtttgggcgaatcggcaactgtgttcggcggctggcagtttgtgcggtttgtgccgaaacgcgaaacggtgggcggcgcggtcaataatgccgcctaccggcgcaacggtgtttatgccggttgggcgcaggagtggcggcagttgggcggtttgaacagtcgggtttccgcgtcttatgcccgccgcaactataagggcattgcggctttctcgacagaggcgcaacgcaaccgcgaatggaatgtctcgctggctttgagccacgacaagttgtcgtacaaaggtatcgtgccggcgttgaattatcgtttcggcaggacggaaagtaatgtgccgtatgcgaaacgccgcaacagcgaggtgtttgtgtcggcggattggcggttttga

SEQ ID NO: 53565 - DNA, 1089 bp, Neisseria meningitidis; identical to SEQ ID NO: 42891

SEQ ID NO: 53566 - DNA, 1023 bp, Neisseria meningitidis
ttggcagccgatcgaaccatacctgaaccgtcaaaaacccgttacctcagagattaccgcggccgtcccgcctatcccctgttgtccatgttcaaagccgtcctgctcggacaatggcacagcctctccgatcccgaactcgaacacagcctcatcacccgcatcgacttcaacctgttttgccgttttgacgaactgagcattcccgattacagcaccttatgccgctaccgcaactggttggcgcaagacaacaccctgtccgaattattggaactgatcaaccgccaactgaccgaaaaaggcttaaaagtagagaaagcatccgccgccgtcattgatgccaccattattcagaccgccggcagcacacagcgtcaggtcatagaagtcgatgaagaaggacaaatcaacggccaaaccacaccgagtaaggacagcgatgcccgttggatcaagaaaaacggcctctacaaactcggttacaaacaacatacccgtaccgatgcggaaggctatatcgagaaactgcacattacccccgccaatgcccatgagtgcaaacacctgccgcctttgttggaaggactgcccaaaggtacgaccgtctatgccgacaaaggctatgacagtgcggaaaaccggcaacatctggaagaacatcagttgttggacggcattatgcgcaaagcctgccgcaaccgtccgctgacggaaacgcaaaccaaacgtaaccgatatttatcgaagacccgttatagtggattaaatttaaatcaggacaaggcgacgaagccgcagacagtacaaatagtacggcaaggcgaggcaacgccgtactggtttaaatttaatccactatatgtggtcgaacagagcttcggtacgctgcaccgtaaattccgctatgcgcgggcagcctatttcggactgattaaagtgagtgcgcaaagccacctgaaggcgatctgtttgaacctgttgaaagcggccaacaggttaagtgcgcccgctgccgcctaa

SEQ ID NO: 53567 - DNA, 531 bp, Neisseria meningitidis; identical to SEQ ID NO: 42442

SEQ ID NO: 53568 - DNA, 450 bp, Neisseria meningitidis
atggacgtacaactccccatcgaagccaaagacatccaaaaactcatcccccaccgctatccgtttctccagctcgaccgcatcaccgccttcgagccgatgaaaaccctgaccgcgattaaaaacgtcaccataaacgaaccccagttccaaggccatttccccgacctgcccgtgatgcccggcgtactcatcatcgaagcgatggcgcaggcgtgcggcacgttggcgattttgagcgaaggcgggcgcaaagaaaacgaattcttcttcttcgccggcatagacgaagcccgtttcaaacgccaagtcatccccggcgaccaactcgtctttgaagtcgagctgctgaccagccggcgcggcatcggcaaattcaacgccgttgccaaagtggacgggcaagttgccgtcgaagccatcatcatgtgtgccaaacgcgtggtttga

SEQ ID NO: 53569 - DNA, 234 bp, Neisseria meningitidis; identical to SEQ ID NO: 42120

SEQ ID NO: 53570 - DNA, 564 bp, Neisseria meningitidis
gtgcaggataaaaacaacctctgctggctcgatatggaaatgacggggctgaatcccgaaaccgaccgcattatcgaagtcgcgatgattattaccgactcggatttgaatgtgttggcgcaatccgaagtttacgccgtccaccaaagcgacgacgtgctgaacaaaatggacgaatggaacaccgccacacacggcaggacggggctgacacagcgcgtacgcgaatcgtcgcataccgaagccgaagtcgaacagaaactgctggactttatgtcggaatgggtacccggacgcgccacgccgatgtgcggcaactccatccaccaagaccggcgttttatggtcaaatatatgccgaaactggaaaactacttccactaccgcaacctcgacgtttccacgctgaaagaactcgccaaacgctggaatccgcccgttgccaaaagcgtcgtcaaacgcggttcgcacaaggcattggacgacattttggagagcatcgaagaaatgcgccactaccgcgaacactttctgatttccgccccgagagccgaagcgcaataa

SEQ ID NO: 53571 - DNA, 759 bp, Neisseria meningitidis
atgaaaatcacccccgtcaaagccctaaccgacaactacatctggatgatacagcacggcaaccatgccgtctgcgtcgacccttccgaaccctcgcccgtcttggaattcctcgtccgcaaccgcctcatgcttgcccaaacatgggtaacgcacccccatcccgaccacgagggcggtgcggcggcactctggcgcggctacatggaatcgcccgtttacggcgaatccgacatcgaagcagcaacccacaccgtaaccgccggcacccaattcaccttcggcgacggacaggttaccgtttgggcaacacccggccacacagaccgccacaccagctaccttctcgaaacttcagacggcatacacgtcttttgcggcgacacccttttttccgccggctgcggacgcgtgtttaccggcacaatcgaacagctttacgacagcttccaacgcttcaaccgcctgcctgaaaacaccctgttctacccggcacacgaatacaccgccgccaacctgcgtttcgccgcccatatcgagccggacaacgccgacattcagacggcattgaaagcggcagaacgcacgcccaccctgcccgttaccctcgcgcacgaacgccgcgtcaatccgtttttgcgcgtcgacctgccgcacgtcagagaccgcgccgaggcattgagcgggaaaacgttaaacagcagcctcgatacctttgtcgcgctgcgtgaacttaaaaaccaataccggacgaaataa

SEQ ID NO: 53572 - DNA, 1026 bp, Neisseria meningitidis
atggattatcagggtaagaaagaccgattggaagaagttatcggtctttccgaagaccccgaactttggaacgacccgaaacgcgcccaagaaatcggcaaagagcgcaaaatcctcgaaggcatcgtgttgacgctcgacaacatcgcttcgggcatcgaagacaaccgcatgctgattgaaatgaccgtcgaagaaaacgacgaagaaggttttgccgccgtgcaggaagacgtagcggggctggaaaaacagatggcggatttggagttcaaacggatgttcaaccagcccgccgacccgaacaactgctttatcgacatcaccgcaggcgcgggcggtacggaagcggaagactgggcgggtatgctgttccgtatgtacagccgctacgccgagcgcaaaggcttcagaatcgaaatccttgaagaagacgacggcgaaatcgcaggcatcaaccgcgccaccatccgtgtggaaggcgaatacgcttatggtttgctgcgtaccgaaaccggcgttcaccgcttggtgcgttactcgccgtttgactcgaacaacaaacgccatacctcgtttgcctccgtgttcgtttaccctgaaatcgacgattccatcgaaatcgaaatcaaccccgccgatttgcgcatcgacacctatcgcgcatcgggtgcgggcggtcagcacatcaataaaaccgactccgccgtgcgcattacccacgagccgacggggattgtggtgcaatgtcaaaacgaccgttcgcaacacgccaacaaagccgctgcgatggaaatgttgaagtccaaactgtatgaattggaaatgcgcaaacgcaatgaagagaaacaggcgttggaagaaggtaaatccgatgtaggttggggcagccaaatccgttcgtatgttttggattcctcacgtatcaaagacttgcgtacaggctacgaagtcggcaacaccaaagccgtattggatggcgacttggacggcttcatcgaagccagcctgaaacagggcgtgtag

SEQ ID NO: 53573 - DNA, 1122 bp, Neisseria meningitidis; identical to SEQ ID NO: 36484

SEQ ID NO: 53574 - DNA, 600 bp, Neisseria meningitidis; identical to SEQ ID NO: 44985

SEQ ID NO: 53575 - DNA, 1410 bp, Neisseria meningitidis; identical to SEQ ID NO: 44014

SEQ ID NO: 53576 - DNA, 420 bp, Neisseria meningitidis
atgaatctcgtgaaactgctggcgaataactggcaaccgattgccattatcgcgcttgtcggcacgggcttggctgtgtcgcaccatcaaggctacaagtcggcatttgcgaagcagcaggcggtcatcgacaagatggagcgcgacaaggcgcaagccctgctgttgtcggctcaaaactatgcgcgcgaactggaactggcacgcgcggaagctaaaaaatatgaagtcaaggcgcacgctgtcggcatggctttggcgaaaaaacaggcggaagtcagccgtctgaaaacggaaaataaaaaggaaatcgaaaatgtccttactcaagaccgtaaaaatgcaagcggcggttgcattgacggctttggctctcacggcctgcagctctacaaccgcgccctcggctacggaaattaa

SEQ ID NO: 53577 - DNA, 555 bp, Neisseria meningitidis; identical to SEQ ID NO: 39520

SEQ ID NO: 53578 - DNA, 384 bp, Neisseria meningitidis; identical to SEQ ID NO: 42923

SEQ ID NO: 53579 - DNA, 1596 bp, Neisseria meningitidis; identical to SEQ ID NO: 42497

SEQ ID NO: 53580 - DNA, 330 bp, Neisseria meningitidis; identical to SEQ ID NO: 42495

SEQ ID NO: 53581 - DNA, 672 bp, Neisseria meningitidis; identical to SEQ ID NO: 43305

SEQ ID NO: 53582 - DNA, 2625 bp, Neisseria meningitidis
atgaaaacctccgaactgcgccaaaaattcctaaaattttttgaaaccaaaggccacaccgtcgtccgctcttccagcctcgtgccgcacgacgacccgaccctgctgtttaccaacgcgggcatgaaccagtttaaagacgtattcttaggtttcgacaaacgcccgtacagccgcgccaccaccgcgcaaaaatgcgtacgcgcaggcggcaaacacaacgacttggaaaacgtcggctacaccgcccgccaccacaccttctttgaaatgatgggcaacttctccttcggcgactacttcaaacgcgacgccatccacttcgcttgggaatttctgacttcccccgaatggctcaacatccctaaagacaaactgttggcgaccgtttacgcggaagacgacgaagcctacaacatctggttgaacgaaatcggtatgccgtccgagcgcatcgtccgcatcggcgacaacaaaggcgcgaaatacgcatccgacaacttctggcaaatgggcgacaccggcccttgcggcccctgctccgaaattttctacgaccacggcgaagaaatctggggcggcattcccggcagtcccgaagaagacggcgaccgctggatcgaaatttggaactgcgtatttatgcagttcaaccgcgacgaacaaggcaatatgaacccgcttcccaaaccttccgtcgataccggtatgggcttggaacgcatagccgccgtcatgcagcatgttcacagcaactacgaaatcgacttgttccaagacctgctcaaagccgttgcccgcgaaaccggcgcgccgttcagtatggaagaacccagcctgaaagtcatcgccgaccacatccgctcctgctcgttcctgattgcagacggcgtcttgccttccaacgaaggccgcggctacgtattgcgccgcattatccgccgcgccgtgcgccacggttacaaactgggtcaaagcaaaccgttcttccacaaactcgttgccgatttggtcaaagagatgggcggtgcctaccctgaattgaaagaaaaacaagcccaaatcgaagaagcattgaaaaacgaagaaagccgttttgcccaaacgctggaaaccggtatggctttgttggaaaacgcgctggtcaaaggcggcaaaacactcggcggcgaaatcatcttcaaactctacgatacctacggtttcccatacgacttgactgccgacatctgccgcgaacgcaatatcgaaccggacgaagcaggcttcgagcgcgaaatggaagcccaacgcgcacgcgcacgcgccgcccaaagcttcaaagccaacgcccaactgccttatgacggtcaagacaccgagtttaaaggttatagcgaacgccaaaccgaatccaaagtcctcgccctctacaaagacggcgagcaagtcaacgaattgaacgaaggcgacagcggcgcagtcgtcatcgactttaccccgttctatgcagaatccggcggccaagtcggcgatgtcggctatatcttctcaggcgaaaaccgctttgaagtacgcgatacccaaaaaatcaaagcggccgtattcggtcaattcggcgtacaaacttcaggccgtctgaaagtcggcgacagcgttaccgccaaagtggacgacgaaatccgcaatgccaatatgcgcaaccacagcgcaacccacttgatgcacaaagccctgcgcgatgtattgggcagacacgtcgaacaaaaaggctctttggttaccgccgaatccacccgtttcgacatttcccatccccaagcggtaactgccgaagaaattgccgaagtagaacgccgcgtcaacgaagccattttggcgaacgttgccgtcaatgcagccattatgagcatggaagacgcgcaaaaaaccggcgcgatgatgctcttcggcgaaaaatacggcgaagaagtgcgcgtactgcaaatgggcggtttctctaccgaattgtgcggcggcacacacgtttcacgcaccggcgacatcggcctcttcaaaatcatcagcgaaggcggtattgccgcaggcgtgcgccgtatcgaagccatcaccggcctgaacgcactcaaatgggcgcaagagcaagagcgtttggtgaaagacattattgccgaaaccaaagcccaaaccgaaaaagacgtactggcaaaaatccaagcaggcgcggcacacgccaaagcattggaaaaagaattggcacgcgccaaagccgaactcgccgtccacgcaggcgccaaactcttggacgatgcaaaagacttgggcgcagccaaactcgttgccgcccaaatcgaagccgacgcagccgccctgcgcgaaatcgttaccgatttaaccggtaaatccgacaacgccgtgattcttttagcggcagtaaacgacggcaaagtctccctgtgcgccggcgtatccaaaccgttgaccggcaaagtgaaagcaggcgatctggttaaatttgcagccgaacaagtcggcggcaaaggcggcggcagaccagatttggcgcaagccggcggcacggatgccgacaaattgcccgccgtgttggatagcgtgaaagactgggtcggcgcgaagctggtttga

SEQ ID NO: 53583 - DNA, 924 bp, Neisseria meningitidis; identical to SEQ ID NO: 42636

SEQ ID NO: 53584 - DNA, 1308 bp, Neisseria meningitidis; identical to SEQ ID NO: 40815

SEQ ID NO: 53585 - DNA, 627 bp, Neisseria meningitidis; identical to SEQ ID NO: 42699

SEQ ID NO: 53586 - DNA, 777 bp, Neisseria meningitidis; identical to SEQ ID NO: 42961

SEQ ID NO: 53587 - DNA, 1773 bp, Neisseria meningitidis
atgatactgccagcccgtttttcagacggcatcagcctttccctacgcctgaaactcctgaccggagtgtgggtcgggttggcggcattgtctgtcgttttgacactgctgctctctttgcgtctggaaaacgcggcctccgtcatcgaagaggcgggcaacttgagaatgcaggcataccgtctggcatacatggcgggtgaaggctcgccccgtgcgcaaattgacaatcaggttgccgaatttgaaaaaagcctgaatcgtatttcacaaagtgatgccatccatccgctgattccttcggacacccctcttgcttatgatttgatacaatccatgctgattatagattggcaggcacacatcctccccccgctccagtcctaccggcgaccgactcaggtcgatctctaccgctttgccggaaacatcgaactgtttttgcaggcattggaaaatgccaacgaaaaaaacacatggtggctcaggcgttttcaatgggcaattatgttgatgacgctggtgtcgtctgtactgatgctgttttggcaccagatttgggttatccggccgctgcaggcgttaagggaaggtgcggaacgcatcggacggaggtgtttcgatattccggttcccgaaggcggtacgccggaattcaaacaggtcgggcgttgtttcaatcaaatgggcggcaggttgaaaattttatatgatgatttggaaggacaagtcgccgagcagacacgcagtctcgaaaaacaaaatcaaaacctgaccctgctgtaccaaactacacgggacctgcaccaatcctacataccgcaacaggctgcagaacattttctaaaccgtatcctgcccgccgtaggagcagattccggcagagtttgtttggacggcggatccgatgtttatgtttccattcatcatgcggattgcggcacagcagcttcggatttggggaagtaccatgaggaaatcttccccattgagtaccagaacgaaacattgggcaggctgttgctcagctttccaaacggcatttctcttgatgaagacgaccgcatcctgcttcaaacactaggcaggcaattgggcgtatcgcttgccggcgcaaaacaggaggaagaaaaacgcctgcttgcagtattgcaggaacgcaacctgattgcgcaaggattacatgacagcatcgcacaagcattaacgttcctaaacctacaggtacagatgctggaaaccgcctttgccgaaaacaaacgggaggaagccgcagaaaacatcggcttcatcaaaacaggcgtgcaggaatgttatgaagatgtccgcgaactgctgctcaacttccgtaccaaaatcagcaataaagaatttcccgaagccgttgccgacctattcgcccgctttacgcaacaaaccgggataacggtcgaaaccgcctgggaaaacggttcattcctgccgcctcaggaagcgcagctccaaatgatttttatcctgcaggaaagcctgtccaacatccgcaaacacgcccgcgccacccatgtaaaattcaccctttccgaacacggcggacgctttaccatgaccatccaagacaacggacaaggtttcgacacggagaaaataggagaacctacgggcagccatgtcggactgcacatcatgcaggagcgtgccaagcgcatccatgccgttttagaaatccgttcccaaccccaacagggaaccaccgtctcattgacgggtgcatctgaagaaagcttgaaatga

SEQ ID NO: 53588 - DNA, 525 bp, Neisseria meningitidis; identical to SEQ ID NO: 43288

SEQ ID NO: 53589 - DNA, 174 bp, Neisseria meningitidis; identical to SEQ ID NO: 38300

SEQ ID NO: 53590 - DNA, 1443 bp, Neisseria meningitidis
atgaactggtctgatttgaatttaatgcccgccatgcccgaaatcgtgctgctgtcgctgctggtgttattgttgctggcggacttgtgggtcagtgatgacaaacgccggtggacgcattacggcgcgttggcaacggtggcggttacggctgtggtgcagttggcggtgtgggaacagggcagcacgtcttcgttcaacgggatgtatattgcagacggtatgtcgcgtttggcaaaaatggttttatatgccttgacctttgccctgtttgtctatgccaagccctacaaccaagtgcgcggtatttttaaaggcgagttttacaccctgtcattgtttgccctgttgggtatgagtgtgatggtgagcgcggggcattttttaactgcctatatcggtttggaactcttgtcgcttgccctttacgccctgattgccctgcgccgcgattccggctttgccgccgaagccgccttgaaatattttgttttgggcgcgctggcatccggcctgctgctctacggtatttctatggtttacggcgcaaccggttcgctggaatttgccggcgtgctcgcctcttccttcaatgaagaagccaacgaatggctgttgaaactgggtttggtgtttatcgtcgtcgccgtcgcgttcaaactcggtgcggtgccgttccatatgtgggtgcccgacgtgtatcacggcgcgcccacttctgttaccgccttggtcggcactgccccgaaaatcgccgccgtcgttttcactttccgcatcctcgttaccgggctgggaaccgtgcatcatgactggtctctgatgtttgccctgcttgccgccgcctcgctgctggtcggcaaccttgccgccatcatgcagaccaatatcaaacgtatgttcgcctattccaccgtatcgcatatgggtttcatcctgttggcgtttatggcgggcgcggtcggctttgcggcgggcctctattacgccattacctacgcgctgatggcggcggcagggttcggagtgttgatggtgttgtcggacggggacaacgagtgcgaaaacatcagcgatttggcagggttgaaccaacaccgcgtatggcttgcctttttgatgctgctggttatgttctctatggcgggcattccgccgctgatgggtttttacgccaaattcggcgtgattatggcactcttgaaacaaggccatgtttggttgtctgtatttgccgtcatcatgtcgctgattggtgcgttctactacctgcgcgtggtcaaagtcatctacttcgatgtgcctgatcatgaccagccggtcggcagcaactatgccgccaaatttgttctgacggtcaatgccttcttgctgctcctgtggggcatcatgccgcaaaccgttatcgactggtgcgccaaggcgttggagaacacgctgtaa

SEQ ID NO: 53591 - DNA, 291 bp, Neisseria meningitidis; identical to SEQ ID NO: 36866

SEQ ID NO: 53592 - DNA, 318 bp, Neisseria meningitidis; identical to SEQ ID NO: 42427

SEQ ID NO: 53593 - DNA, 1257 bp, Neisseria meningitidis; identical to SEQ ID NO: 43860

SEQ ID NO: 53594 - DNA, 447 bp, Neisseria meningitidis; identical to SEQ ID NO: 50949

SEQ ID NO: 53595 - DNA, 246 bp, Neisseria meningitidis; identical to SEQ ID NO: 39751

SEQ ID NO: 53596 - DNA, 360 bp, Neisseria meningitidis; identical to SEQ ID NO: 42556

SEQ ID NO: 53597 - DNA, 501 bp, Neisseria meningitidis; identical to SEQ ID NO: 37165

SEQ ID NO: 53598 - DNA, 906 bp, Neisseria meningitidis; identical to SEQ ID NO: 43973

SEQ ID NO: 53599 - DNA, 447 bp, Neisseria meningitidis; identical to SEQ ID NO: 42843

SEQ ID NO: 53600 - DNA, 1404 bp, Neisseria meningitidis
atggatactacattgaaaaccaccttgacttctgttgcagcagcctttgcattgtctgcctgcaccatgattccccaatacgagcagcccaaagtcgaagttgccgaaacgttcaaaaacgataccgccgacagcggcatccgcgccgtcgatttaggttggcatgactattttgccgacccgcgcctgcaaaagctgatcgacatcgcactcgagcgcaataccagtttgcgtaccgccgtattgaacagcgaaatctaccgcaaacaatacatgattgagcgcaacaacctcctgcccacgcttgccgccaatgcgaacgactcgcgccaaggcagcttgagcggcggcaatgtaagcagcagctacaaagtcggactgggtgcggcatcttacgaactcgatctgttcgggcgtgtacgcagcagcagcgaggcggcactgcaaggctatttcgccagcaccgccaaccgcgatgcggcacatttgagcctgattgccaccgttgccaaagcctatttcaacgaacgttacgccgaagaagcgatgtctttggcgcaacgtgttttgaaaacgcgcgaggaaacctacaagctgtccgaattacgttacaaggcaggcgtgatttccgccgtcgccctacgtcagcaggaagccctgatcgaatctgccaaagccgattatgcccatgccgcgcgcagccgcgaacaggcgcgcaatgccttggcaaccttgattaaccaaccgatacccgaagacctgcctgccggtttgccgctggacaagcagttttttgttgaaaaactgccggccggtttgagttccgaagtattgctcgaccgtcccgatatccgtgctgccgaacacgcgctcaaacaggcaaacgccaatatcggtgcggcacgcgccgcctttttcccatccatccgcctgaccggaaccgtcggtacgggttctgccgaattgggtgggttgttcaaaagcggcacgggcgtttggtcgttcgcgccgtctattaccctgccgatttttacctggggtacgaacaaggcgaaccttgatgtagccaagctgcgccaacaggtacaaatcgttgcctatgaatccgccgtccaatccgcatttcaagacgtggcaaacgcattggcggcgcgcgagcagctggataaagcctatgacgctttaagcaaacaaagccgcgcctctaaagaagcgttgcgcttggtcggcctgcgttacaagcacggcgtatccggcgcgctcgacttgctcgatgcggaacgcagcagctatgcggcggagggtgcggctttgtcggcacaactgacccgcgccgaaaaccttgccgatttgtacaaggcactcggcggcggattgaaacgggatacccaaaccgacaaataa

SEQ ID NO: 53601 - DNA, 933 bp, Neisseria meningitidis; identical to SEQ ID NO: 43321

SEQ ID NO: 53602 - DNA, 456 bp, Neisseria meningitidis; identical to SEQ ID NO: 42518

SEQ ID NO: 53603 - DNA, 1647 bp, Neisseria meningitidis; identical to SEQ ID NO: 43616

SEQ ID NO: 53604 - DNA, 165 bp, Neisseria meningitidis; identical to SEQ ID NO: 42784

SEQ ID NO: 53605 - DNA, 621 bp, Neisseria meningitidis; identical to SEQ ID NO: 37903

SEQ ID NO: 53606 - DNA, 1854 bp, Neisseria meningitidis; identical to SEQ ID NO: 42349

SEQ ID NO: 53607 - DNA, 936 bp, Neisseria meningitidis; identical to SEQ ID NO: 42339

SEQ ID NO: 53608 - DNA, 210 bp, Neisseria meningitidis; identical to SEQ ID NO: 43366

SEQ ID NO: 53609 - DNA, 1746 bp, Neisseria meningitidis
atgcaagtaaatattcagattccctatatactgcccagatgcgtgcgtgctgaagacaccccctacgcttgctatttgaaacagctccaagtcaccaaagacgtcaactggaaccaggtacaactggcgtacgacaaatgggactataaacaggaaggcttaaccggagccggagcagcgattattgcgctggctgttaccgtggttactgcgggcgcgggagccggagccgcactgggcttaaacggcgcggccgcagcggcaaccgatgccgcattcgcctcgctggccagccaggcttccgtatcgctcatcaacaataaaggcgatgtcggtaaaaccctgaaggagctgggcagaagccgcacagtgaaaaaactggttgtagcagcggccatcgcaggcgtatccaacaaaatcggtgcttcctcccttgccacttggagcgaaaccccttgggtaaacaacctcaacgtcaacttggctaatgcgggcagtgccgcgctgattaacaccgccgttaacggcggcagtctgaaagacaatctggaagcgaatatccttgcggctttggtgaatactgcgcatggagaggcagcaagtaaaatcaaacaattggatcagcactacattacccacaagattgcccatgccatagcgggctgtgcggctgcggcggcgaataagggcaagtgtcaggatggtgcgataggagcggcggtcggtgaaatcctcggcgaagccctgctggacggcagagacccgggcagcctgaatgtgaaagaccgggcaaaaatcattgctaaggcgaagctggcagcagggacggttgcggcgttgagtaagggggatgtgaatgctgcggcgaatgcggctgctgtggcggtagagagtaatgcgcttagcaaggaaagaatggataaattgacaaaatgcctttccggtaaaacttgttctactacgatggaaaaagtaaatgccatcaaaaaggatgaacaatttagcaaagtaattgatacggaaattcaaaaagtctgttctaggaacccattgggcgatggttgcagaaacggcattaatatgtctattaaatatattgccatgcctgctgcgtggaagtatatgcctacggatgtatcacgggttgccaaagaagtttttggctatttatataactcacaaggggcatctacaagatttgacaagtatttcaacaccattgacaatcgtgcagatttctttgctgccagcaatctttatgagcaaaatttgggttcaaaagcacgatggtttggtggagctgattttgtatcgcgtgctgctataactgggttaggggcagacggagaagcttcttatataacttttgcggcaggtaaagttgttggtaatcctccaatttatgaatggagggctgcgtcaggcaatgcactgatagtaaatggattttataattttagagacttgttcaataaaaaaactaatcctagggagtgggatattcaacagttgaaaagcgagcaaaagttattacagcctattcaccaaaaatatttgagtaatgagaaggattatttgtcattgattaaaggggtaacatcaaataagatattttcaataattccaaatcctttagatgagaggaaaaaaatagaggatggaattaatatgttagattacaaatctagaattaaatatggttgtaagcttatgggatattctgagaaacagggatgcaagccatga

SEQ ID NO: 53610 - DNA, 1188 bp, Neisseria meningitidis; identical to SEQ ID NO: 42605

SEQ ID NO: 53611 - DNA, 1032 bp, Neisseria meningitidis; identical to SEQ ID NO: 43767

SEQ ID NO: 53612 - DNA, 198 bp, Neisseria meningitidis; identical to SEQ ID NO: 43865

SEQ ID NO: 53613 - DNA, 1410 bp, Neisseria meningitidis
atgaaatacatcagcacgcgcggcgaaaccgcacacaaaccgttcagcgaagttttattgatggggcttgcccccgacggcggcctgatgctgccggaacattatccgcaaatcgggcgcgaaaccttggacaaatggcgcggtttagcttatcccgaattggcgtttgaaattatgcgcctgtttgttacggatattccggaggacgatttgcgcgacattctgaaccgtacttacacggaagcggcgttcggtactaaggaaatcacccccgtccgcacgctttcagacggcatcaaaatccaagccttgtccaacggcccgacgctggcgttcaaagatatggcaatgcagtttttgggcaatgcgtttgaatatgttttaaacaaagaaggcaaaaaactcaatatcttgggcgcgaccagcggcgatacgggttcggctgcggaatatgccttgcgcggcaaaaagggcgtgaacgtatttatgttgtcgcccgacggtaaaatgagcgcgttccaacgcgcgcaaatgtacagcctgcaagacgagaatatccacaatatcgccgtgaagggaatgtttgacgactgtcaggatattgtgaaggcggtgcagaacgatgccgcgttcaaggaaaaataccatatcggtacggtcaactcgatcaactggggacgcatcgtcgcgcaagtggtttattactttgcaggctatttcaacgccacttcaagcaatgacgaaaccgtcagcttctgcgtaccgagcggcaacttcggcaatgtttgcgcgggacacattgccaaacaaatgggcctgcctatccgccgcctgattgtcgcgaccaatgaaaacgatgtgttggacgagtttttcaaaaccggtgcataccgcccgcgcaacagcgcgcatacttatgtaacctccagcccgtctatggacatttccaaagcgtccaacttcgagcgtttcgtgttcgacctgatggatcgcgatcctgcggaaatcaatacgctgtgggcggaagtggctgcaggcaaaggctttgacctgcgatttgccttggacaaagtcggtggcaaatacggttttacctctggcaaatccacccacgccgaccgcctcgccaccatcaagcaggtttacgagcaagaccaagaactcatcgacccgcacactgccgacggcgtaaaagtcgcccgcgaagtgcgcgaagaaggtgaaatggtggtttgtttggaaaccgcgttggcggcgaaattcgatgcgaccatacgcgaagccgtcggcgatgccgccattccgcgccctgccgcgctggaaggtttggaaaacctgccgcagcgcgtgcaaaccgtgccgaacagtgcggatgcggtaaaaggcatcatcgaacaaacccttgcctga

SEQ ID NO: 53614 - DNA, 1539 bp, Neisseria meningitidis; identical to SEQ ID NO: 42599

SEQ ID NO: 53615 - DNA, 723 bp, Neisseria meningitidis
atgaaacccgcctatttcatttccgacctgcatttgagcgaaaagcagcccgaactgaccgcgctgttgctgcgttttttacgttcttccgccgccaggcaggcgcgggcggtttacattttgggcgatttgtttgatttttgggtgggcgatgacgaagtttccgagttgaatacttcggttgcgcgtgaaatcaggaaattgtccgacaaaggcgttgccgtgttcttcgtcaggggcaaccgcgacttcctgatcggtcagaatttttgccggcaggcgggcatgacgctgctgccggattactcggttttggacttgttcggctgcaaaaccctcatctgccacggcgacactctgtgtacagatgacagggcataccaacgtttccgcaaaatcgtgcatcggaagcggctgcaaaaactgttcctaatgctgcccctgaagtggcgcacgcgccttgccaccaaaatcaggcgtgtcagcaaaatggaaaaacaggtcaagcccgccgatattatggatgtcaatgccgcctttaccgcgcggcaggtacgcgccttcggtgcggaaaggctgatacacggacacacccaccgcgagcatatccatcacgaaaacggctttacccgcatcgttttgggcgactggcataacgactatgcttcaatcctccgcgtggacggggacggcgcggtattcgtgccgctggaaaaatactga

SEQ ID NO: 53616 - DNA, 777 bp, Neisseria meningitidis; identical to SEQ ID NO: 43723

SEQ ID NO: 53617 - DNA, 606 bp, Neisseria meningitidis; identical to SEQ ID NO: 42995

SEQ ID NO: 53618 - DNA, 1194 bp, Neisseria meningitidis; identical to SEQ ID NO: 42794

SEQ ID NO: 53619 - DNA, 747 bp, Neisseria meningitidis; identical to SEQ ID NO: 42509

SEQ ID NO: 53620 - DNA, 573 bp, Neisseria meningitidis; identical to SEQ ID NO: 43310

SEQ ID NO: 53621 - DNA, 540 bp, Neisseria meningitidis; identical to SEQ ID NO: 43924

SEQ ID NO: 53622 - DNA, 567 bp, Neisseria meningitidis; identical to SEQ ID NO: 41361

SEQ ID NO: 53623 - DNA, 1434 bp, Neisseria meningitidis; identical to SEQ ID NO: 43858

SEQ ID NO: 53624 - DNA, 618 bp, Neisseria meningitidis; identical to SEQ ID NO: 42714

SEQ ID NO: 53625 - DNA, 708 bp, Neisseria meningitidis; identical to SEQ ID NO: 42117

SEQ ID NO: 53626 - DNA, 183 bp, Neisseria meningitidis; identical to SEQ ID NO: 39725

SEQ ID NO: 53627 - DNA, 1131 bp, Neisseria meningitidis
atgattaaaatcagcacccgcttcgatgccggctcggtcgtcgtcaaagacctgaccgatccttccaacatccgcctcgccctgcgtcccgacaacgcctccgattttgcacaatggttctacttccggctgcaaggcgcggcatatcaaaactgcatcatgcattttgaaaacgcggcagaagccgcctacccgaaaggctgggaaggctatcaggcgtgtgcctcatacgaccgccgcaactggttccgcgtaccgacttcctacgaaaacggcgtactgaccgtcaatcatactccgctgtccaacagcgtgtattacgcctatttcgaaccttactccgaagaacagcatttaaacctcctcggcgacgcgcaaggcagcggcctgtgccgcatcgacgacttgggcagcaccgtgcaagggcgcgacatcaatctgctgaccataggcaatcaggtcgaaagcgatttgaaaatctggattaccgcccgccagcatccgggagaaaccatggcggaatggtttatcgaggggctgctcggcagattactcgacccgcaagaccctaccgcccgcgccttgctcgaccgcgccacgttctatatcgtccccaatatgaaccccgacggttcggcactgggcaaccttcgtaccaacgccgccggcgcgaacctcaaccgcgagtgggaaaacccgacggtagaaaaaagcccggaagtgttcttcgtgcgcgaaaaaatgctggaaaccggagtggatttgtttttggacatccacggcgacgaagggctgccctttgtctttgtcgcaggtacggaaggcgtgccgaactacaatccgcgcatcgccgcgttggaagcgcagtttaaaaatgcccttttaaacgccagccccgatttccaagacgaatacggttacgaaaaagatgcgccgggcgaagcgaatatgaccttggcgaccaactgggtcggcaaccgtttcaactgccttgcctatacgctggaaatgccgttcaaagacaatgccaatctgcccgacgacgacttcggctggaacggtcagcgttctttacggctgggcgaagccgcgttgtccgctatcctcaacgtcatcggcgatttgcgctga

SEQ ID NO: 53628 - DNA, 2586 bp, Neisseria meningitidis; identical to SEQ ID NO: 43570

SEQ ID NO: 53629 - DNA, 888 bp, Neisseria meningitidis; identical to SEQ ID NO: 43589

SEQ ID NO: 53630 - DNA, 1035 bp, Neisseria meningitidis; identical to SEQ ID NO: 43693

SEQ ID NO: 53631 - DNA, 717 bp, Neisseria meningitidis; identical to SEQ ID NO: 43534

SEQ ID NO: 53632 - DNA, 360 bp, Neisseria meningitidis; identical to SEQ ID NO: 42278

SEQ ID NO: 53633 - DNA, 408 bp, Neisseria meningitidis; identical to SEQ ID NO: 43781

SEQ ID NO: 53634 - DNA, 1272 bp, Neisseria meningitidis; identical to SEQ ID NO: 43901

SEQ ID NO: 53635 - DNA, 753 bp, Neisseria meningitidis
atggcaaaccaaagacccatctacggcttccacgccgtcaacgcccgattgtggcaaaaccccaaatccatcgtcgaactctacatccaagaaggcaaatcagacgcacgcacgcgcgaagtgttggaaaaggcggcaaacgaaaacatccgcgtatattttgccgatgccgaccgcctcaacgccatcagcaaaggcgcgcgccatcagggcgtggtcggatttatcgatgcctccaaaaaccacgtccacctcgaagacgtattggaaaacctcagcgaaccgccgctgctgctgatactcgacggcatcaccgatccgcacaacctcggcgcgtgcctgcgtaccgccgacgcaatgggcgtacacgccgtcatcgcaccgaaagacaaaagcgcggggctgaacgccaccgtcagcaaagtcgcctgcggtgcggcggaaaccgtcccctatatcaccgtaaccaacctcgcccgcaccctgcgcgaattgaaagaatacggcatttggattatcggcaccgatatgagcggcgagtccgacctttaccattgcaatctgcccgacagcgcggcgtgggtaatgggcaacgaaggcgacggtatgcgccgcctcacgcgcgaacattgcgacatgctggtgtctatacccatgttcggcacagtcgaaagcatgaacgtctccgtgtctgccggaatggtattaagtgaaacacgccgacaacgcgtattaaaaaacgaaaaagtataa

SEQ ID NO: 53636 - DNA, 426 bp, Neisseria meningitidis; identical to SEQ ID NO: 42184

SEQ ID NO: 53637 - DNA, 420 bp, Neisseria meningitidis; identical to SEQ ID NO: 42466

SEQ ID NO: 53638 - DNA, 1413 bp, Neisseria meningitidis; identical to SEQ ID NO: 42382

SEQ ID NO: 53639 - DNA, 810 bp, Neisseria meningitidis
atgacaccgctcaaaatcgctatcgccggcgtcaacggccgcatggggcgcgtattggttgaagccgtcaacaaccatcccgacaccgtcctttccggcgcgctcgaacactcgggctcagaagccctcgggctggacgcaggctacgccgtcggactcaaaaccggcatcgccatttcagacgacgttgacgccgttctcgcacaaagcgacgtactcatcgacttcacccgccccgagccgaccctcaaacacctgcaaaaatgcgttgaaaaacaagtcaacatcatcatcggcacaacaggcttcgacgatgcgggcaaagccgccatccaagccgcaggcgaaaaaacaggcgttgtcttcgccgccaacttcagcgtcggcgtcaacctcaccttccacctcctcgacaccgtcgcccgcgtattaaacgaaggctacgacatcgaaatcattgaaggccaccaccgccacaaagtcgatgcccccagcggcaccgcgttacgcatgggtgaagtcatcgccggcgcgctcggccgcgacctcaaacaatgcgccgtttacggccgtgaaggccacaccggtccgcgcgatccgtccaccatcggctttgccaccgtccgcgcaggcgacatcgtcggcgaccacaccgccctcttcgccaccgacggcgaacgcgtggaaatcacccacaaagccagcagccgcatgacctttgccgccggtgccgtccgcgccgcagtttgggtaaacggcaaaacgggtttgtacgatatgcaggatgtactcgggctgaacaaccgttaa

SEQ ID NO: 53640 - DNA, 537 bp, Neisseria meningitidis; identical to SEQ ID NO: 42644

SEQ ID NO: 53641 - DNA, 510 bp, Neisseria meningitidis; identical to SEQ ID NO: 40753

SEQ ID NO: 53642 - DNA, 1677 bp, Neisseria meningitidis; identical to SEQ ID NO: 43007

SEQ ID NO: 53643 - DNA, 1104 bp, Neisseria meningitidis
atgaatacgacagcaaacccttccaatatcatcgtcgggctctccggcggtgtcgattcttccgtaaccgccgccctgctcaagcagcagggttatcaagtgcgcggtgtgttcatgcagaactgggaagacgacgacaacgacgaatattgcagcatcaaacaggattcgttcgatgccatcgccgttgccgatattatcggcatcgatatcgacatcgttaatttcgccgcgcaatataaagacaaagtctttgcttattttcttcaggaatacagtgcggggcgcacgccgaatccggatgtgttgtgcaacgccgaaatcaaattcaaatgctttttggactacgccgtagggcagggcgcggataccatcgccaccggccactatgcgcgcaaagaagttcgcaacggcgtgcattacctgctcaaaggtttggatcgaaacaaagaccaaagctatttcctctaccgcctcaagcctttccaactcgagcgcgcgatttttccgttgggcggtttggaaaaacccgaagtgcgccgccttgccgccgagttcaaactgccgaccgccgctaaaaaagacagcacgggcatctgtttcatcggcgaacgcccgtttcgcgagtttctgcagaaatacctgccgaccgacaatggtaaaatggttacgcccgaagggaaaaccgtcggcgaacacgtcgggctgatgttctacacgctcggacagcgcaaaggtttgggcattggcggcgcgggcgaaccgtggtttgttgcggctaaagatttgacgaaaaacgaactgattgtcgtgcaaggacacgaccatccgctgctttatacccgcagccttgtgatgaacgatttgagtttcacgctgcccgaacgcccgaaggcaggacgctatacctgcaaaacgcgttaccgtatggcggacgcgccttgtgagttgcgctatttggatgatgaaaccgccgagctggtgtttgacgaaccgcaatgggcggttacgccgggtcagtccgccgtgctgtacgacggcgatatctgtttgggcggcggtatcatccaaacgaccgacaaacccgtcatcatcacacgataa

SEQ ID NO: 53644 - DNA, 390 bp, Neisseria meningitidis; identical to SEQ ID NO: 43243

SEQ ID NO: 53645 - DNA, 387 bp, Neisseria meningitidis; identical to SEQ ID NO: 43778

SEQ ID NO: 53646 - DNA, 2472 bp, Neisseria meningitidis
atgaaaaaaacctgtttccactgcggtctggatgttcccgaacacctccacctgactgtccgttacgaaaacgaagaccgcgaaacctgctgcgccggctgtcaggcggtcgcacaaagcattattgacgcgggcttgggcagttattacaaacaacgcaccgccgacgcgcaaaaaaccgagctgccgccccaagaaatcctcgaccaaatccgcctgtacgacctgcccgaagtccagtccgactttgtggaaacccacggcggcacgcgcgaggcggttttaatgctcggcggcatcacctgcgccgcctgcgtctggctgatcgaacagcagcttttgcgtacagacggcattgtccgcatcgacctcaattacagcacgcaccgctgccgcgtcgtctgggacgacggcaaaatccgcctttccgacattctgttgaaaatcaggcagataggctacaccgccgcaccctatgacgcgcaaaaaatcgaagccgccaaccaaaaagaacgcaaacaatacatcgtccgcctcgccgttgccgggctggggatgatgcagacgatgatgttcgcgctgccgacctacctttacggcagcgacatcgaacccgatttcctgcaaatcctccattggggcggctttttaatggtgctgcccgtcgtattctattgcgccgtcccgttttatcaaggcgcgctgcgcgacttgaaaaaccgccgcgtcggcatggatacgccgattaccgtcgccatcatcatgacctttatcgccggcgtttacagccttgcgacaaatgcggggcaggggatgtatttcgaatccatcgcgatgctgctgtttttcctgctgggcggacgctttatggaacacattgcccgccgtaaggcaggcgatgccgccgagaggctggtgaagctgattcctgcgttttgccatcatatgcccgattaccccgatacgcaggaaacctgcgaggcagctgtcgtcaaattgaaggcgggcgatatcgtgctggtcaaaccgggcgaaaccatccccgttgacggcacggtgctggaaggaagcagtgccgtcaacgaatctatgctgaccggcgagagcctgcccgtcgccaaaatgccgtctgaaaaagtaaccgccggcacactcaacacgcaaagccccctgattatacgcaccgaccgcaccggcggcggcacgcgactgtcgcacatcgtccgcctgctcgaccgcgccttagcgcaaaaaccgcgcactgccgagttggcggaacaatacgcctcgtctttcatattcggcgaactcctgcttgccgtccccgtcttcatcggctggacgctgtacgccgacgcgcacaccgcattgtggattaccgtcgccctgctggtcattacctgcccctgcgccttatcgcttgccacgccgaccgcgctggcagcttctaccggtacgctggcgcgcgaaggcattttaatcggcggaaagcaggcaatcgaaaccctcgcccaaaccaccgacatcatcttcgacaaaaccggcacgctgacccaaggcaaacccgccgtccgccgtatctcattgttgagaggcacagacgaagcctttgttctcgcggtggcgcaggctttagaacaacagtccgaacatccccttgcccgcgccatcctcaactgccgtgtttcaagcggcagcgtccccgacatcgctattaaacaacgcctcaaccgcatcggcgaaggcgtgggcgcgcaactgaccgtcaacggcgaaacacaggtttgggcattgggcagggcatcctatgtcgccgaaatttcaggtaaagaaccgcaaacagaaggcggcggcagcgcggtttacctcggcagtcaaagcggtttccaagccgtgttctacctgaccgaccccttgaaagacagcgcggcggaggcggtgcggcagttggcaggcaaaaacctgaccctgcacatcctcagcggcgaccgcgaaaccgccgttgccgaaaccgcacgcgccctgggtgtcgcgcactaccgcgcccaagccatgcccgaggacaaactggaatacgtcaaagccttgcaaaaagaagggaaaaaagtgctgatgataggcgacggcatcaacgacgcgcccgttttggcgcaggcagacgtatccgccgccgcagcgggcgggacggatattgcgagggacggcgcggacattgtgttattgaacgaagatttgcgtaccgtcgcccacctgctcgatcaggcgcggcgcacccgccatattatccggcaaaacctgatatgggcgggcgcgtacaatatcattgccgtaccgcttgccgttttgggctatgtccaaccgtggattgccgcactgggtatgagcttcagttcgctggtcgtattgggcaatgctatgcggcttcacaagcaggtggacatgccgtctgaaaaaatgccgtccgaacaatga

SEQ ID NO: 53647 - DNA, 1155 bp, Neisseria meningitidis; identical to SEQ ID NO: 42732

SEQ ID NO: 53648 - DNA, 1068 bp, Neisseria meningitidis; identical to SEQ ID NO: 42520

SEQ ID NO: 53649 - DNA, 717 bp, Neisseria meningitidis
atgttgttccgtaaaacgaccgccgccgttttggcggcaaccttgatgctgaacggctgtacgttgatgttgtggggaatgaacaacccggtcagcgaaacaatcacccgcaaacacgttgacaaagaccaaatccgcgccttcggtgtggttgccgaagacaatgcccaattggaaaagggcagcctggtgatgatgggcggaaaatactggttcgtcgtcaatcccgaagattcggcgaagctgacgggcattttgaaggcagggctggacaaacccttccaaatagttgaggataccccgagctatgctcgccaccaagccctgccggtcaaactcgaatcgcctggcagccagaatttcagtaccgaaggcctttgcctgcgctacgataccgacaagcctgccgacatcgccaagctgaaacagctcgggtttgaagcggtcaaactcgacaatcggaccatttacacgcgctgcgtatccgccaaaggcaaatactacgccacaccgcaaaaactgaacgccgattaccattttgagcaaagtgtgcctgccgatatttattacacggttactgaagaacataccgacaaatccaagctgtttgcaaatatcttatatacgcccccctttttgatactggatgcggcgggcgcggtactggccttgcctgcggcggctctgggtgcggtcgtggatgccgcccgcaaatga

SEQ ID NO: 53650 - DNA, 435 bp, Neisseria meningitidis
atgaactttgctttatccgtcattatgttgaccctcgcctctttcctgcccgtcccgcctgccggagccgccgtctttacttggaaggacggcggcggcaacagctattcggatgtaccgaaacagcttcatcccgaccaaagccaaatcttaaacctgcggacgcgccaaaccaaaccggcggtcaaacccgcccaagccgacgcagggaagcgcacagacggcgcggcacaggaaaacaatcccgacactgccgagaaaaaccggcagcttgaggaagaaaagaaaagaattgccgaaaccgaacggcagaacaaagaagaaaactgccggatttcaaaaatgaacctgaaggcggtgggaaattcaaatgcaaaaaacaaggatgatttgattcggaaatacaataacgccgtaaacaaatactgccgttaa

SEQ ID NO: 53651 - DNA, 1812 bp, Neisseria meningitidis; identical to SEQ ID NO: 42629

SEQ ID NO: 53652 - DNA, 1713 bp, Neisseria meningitidis
atgaaagccagccaattctttatctctactttaaaagaagcccctgccgaagccgcgcttgccagccacaagctgatgattcgcgccggcctgattaaggccaacgcatcgggtctttatacttggatgccgatggggctgcgcgtgttacgcaaagtcgaaaacgtcgtgcgcgaggaaatggcgcgcgcgggcagcgtggagttgctgatgccggtggtgcagcctgccgagctgtggcaggaatccggccgctgggagttttacggtaaagaactgctgcgcctgaaagaccgccacgaccgcgatttctgcatgggcccgacctgcgaggaagtcatcgccgacatcgtgcgcaaagaaatcaacagctacaaacagctgccgaaaaacttttaccacatccaaaccaaattccgcgacgaagtgcgcccgcgcttcggcgtgatgcgcgcgcgcgagtttgtgatgaaagacgcttattccttccacgccgactatgcctcgctccagacgacctatcaagatatgtatgatgcttattgccgcatctttacccgactaggcttggcgttccgacccgttgctgcggataccggcagcatcggcggtaccggttcgcacgagtttcaagtgttggcggaaagcggcgaagatgtgattgcatacagcgacacttccgattacgccgccaatatcgagttagcgccgaccttgccgctcaaaggcgaacgtgcagccgctcaggcagaactcgtcaaagtacacacgccaaacgtcaaaaccattgattcattggttgatttcctcagtattccgattgaaaaaacactgaaatccatcgtggttgaaggcgaaaacgaaggcgaacttatcctgctgctgttacgcggcgaccatgaatttaacgacatcaaagccgagaaactcgcgggcgtgaaatcgccgctgacgatggcaagccctgccgcgattgtcgaacagttcggcgcaaacggcggctctctcggccctgtcggttttgcaggcaaagtctatgccgatttcgctaccgaaaaaggcgcggactgggtcatcggcgcaaacgaagacgactaccactataccggcttcaatttcggccgcgacgctgccgaacctgagtttgtcgatttgcgcaacgtcgtcgagggcgacgaaagccccgacgggcaaggccgtctgaaactggcgcgcggcattgaagtcggacacgttttccaattgcgcgacaaatacacccaagccatgaacgtaagcttccttgacaacaacggcaaatcgcaaattatggaaatgggctgctacggcatcggcatcacccgcgtcgttgccgccgccatcgagcagaataacgacgaaaaaggcatcatctggaccaaagcaatggcgccgtttgaagtcgttatcgtgccgatgaactacaaaaaatcagacaccgtacgcgaagccgccgacaaaatctatgccgaattgctggcggcaggcgcagacgtcctcctcgacgaccgcgacgaacgcgcaggcgtgttgctgaacgattccgagctgttgggtattccgcaccgcatcgtcatcggcgaccgcgccttgaaagaaggcaatgtcgaatacgccgaacgccgcgacaacgaagcgcaggcagttgcaatcggagaaattgttgcacgtgtaacagcttcattaaatgcgtaa

SEQ ID NO: 53653 - DNA, 237 bp, Neisseria meningitidis; identical to SEQ ID NO: 42409

SEQ ID NO: 53654 - DNA, 1389 bp, Neisseria meningitidis; identical to SEQ ID NO: 42459

SEQ ID NO: 53655 - DNA, 618 bp, Neisseria meningitidis
atgccctatacggaagatatgcgcccaggcgataccgctaatccttatggtgcgtccaaagcgatggtggaacggatgttaaccgacatccaaaaagccgatccgcgctggagcgtgattttgttgcgctatttcaacccgatcggcgcgcatgaaagcggcttgattggcgagcagccaaacggcatcccgaataatttgttgccttatatctgccaagtggcggcaggcaaactgccgcaattggcggtatttggcgatgactaccctacccccgacggcacggggatgcgtgactatattcatgtgatggatttggcagaaggccatgtcgcggctatgcaggcaaaaagtaatgtagcaggcacgcatttgctgaacttaggctccggccgcgcttcttcggtgttggaaatcatccgcgcatttgaagcagcttcgggtttgacgattccgtatgaagtcaaaccgcgccgtgccggtgatttggcgtgcttctatgccgacccttcctatacaaaggcgcaaatcggctggcaaacccagcgtgatttaacccaaatgatggaagactcatggcgctgggtgagtaataatccgaatggctacgacgattaa

SEQ ID NO: 53656 - DNA, 1380 bp, Neisseria meningitidis
atgcaagattacggtatttccgtttgcctgacactgacgccctatttgcaacatgaactattttcggctatgaaatcctatttttccaaatatatcctacccgtttcactttttaccttgccactatccctttccccatccgtttcggcttttacgctgcctgaagcatggcgggcggcgcagcaacattcggctgattttcaagcgtcccattaccagcgtgatgcagtgcgcgcacggcaacaacaagccaaggccgcattccttccccatgtatccgccaatgccagctaccagcgccagccgccatcgatttcttccacccgcgaaacacagggatggagcgtgcaggtgggacaaaccttatttgacgctgccaaatttgcacaataccgccaaagcaggttcgatacgcaggctgcagaacagcgtttcgatgcggcacgcgaagaattgctgttgaaagttgccgaaagttatttcaacgttttactcagccgagacaccgttgccgcccatgcggcggaaaaagaggcttatgcccagcaggtaaggcaggcgcaggctttattcaataaaggtgctgccaccgcgctggatattcacgaagccaaagccggttacgacaatgccctggcccaagaaatcgccgtattggctgagaaacaaacctatgaaaaccagttgaacgactacaccgacctggatagcaaacaaatcgaggccatagataccgccaacctgttggcacgctatctgcccaagctggaacgttacagtctggatgaatggcagcgcattgccttatccaacaatcatgaataccggatgcagcagcttgccctgcaaagcagcggacaggcgcttcgggcagcacagaacagccgctatcccaccgtttctgcccatgtcggctatcagaataacctctacacttcatctgcgcagaataatgactaccactatcggggcaaagggatgagcgtcggcgtacagttgaatttgccgctttataccggcggagaattgtcgggcaaaatccatgaagccgaagcgcaatacggggccgccgaagcacagctgaccgcaaccgagcggcacatcaaactcgccgtacgccaggcttataccgaaagcggtgcggcgcgttaccaaatcatggcgcaagaacgggttttggaaagcagccgtttgaaactgaaatcgaccgaaaccggccaacaatacggcatccgcaaccggctggaagtaatacgggcgcggcaggaagtcgcccaagcagaacagaaactggctcaagcacggtataaattcatgctggcttatttgcgcttggtgaaagagagcgggttagggttggaaacggtatttgcggaataa

SEQ ID NO: 53657 - DNA, 294 bp, Neisseria meningitidis; identical to SEQ ID NO: 37088

SEQ ID NO: 53658 - DNA, 954 bp, Neisseria meningitidis; identical to SEQ ID NO: 43782

SEQ ID NO: 53659 - DNA, 285 bp, Neisseria meningitidis; identical to SEQ ID NO: 42100

SEQ ID NO: 53660 - DNA, 627 bp, Neisseria meningitidis
atgaaaaacatcgtcatcctgatttctggacgcggcagcaatatgcaggcaatcgtcaatgccgccattcacaacgtccgcattgccgccgtgttgagcaacagcgaaacggctgccggtttgcaatgggcggccgaacgcggcatcccgaccgatagcctgaatcataaaaactttacatcccggcttgccttcgataccgccatgatggagaaaatcgacgcatatcaacccgacttggtggttttggcaggttttatgcggattctgacccccgagttttgcgcccgttacgaaggcaggctgatgaacattcacccgtccatccttccctcgtttaccggacttcatacgcacgaacgcgctttggaggcgggctgccgcgttgccggctgcaccatccatttcgttactgccgaactggattgcggcccgattgtatcgcaaggggttgtgccgatactcgacggcgatacggcagacgatattgccgcacgggttttggctgtcgagcataaactttatccgaaagccgttgccgattttgccgccggccgcctgattattgagggaaaccgcgtcagaaattcggaaaacgccgatgccgcccgttttctgacggcgtaa

SEQ ID NO: 53661 - DNA, 942 bp, Neisseria meningitidis; identical to SEQ ID NO: 43207

SEQ ID NO: 53662 - DNA, 708 bp, Neisseria meningitidis; identical to SEQ ID NO: 43156

SEQ ID NO: 53663 - DNA, 2973 bp, Neisseria meningitidis
atgaacgagcgaaaccagcccgaggtaaagcggaatgggcaatattcaacaataaaggacaaagacagggagcgcgaatatactcatcagggcacaagaggaggaggctctgtctcattcaacaatagcgatgagcttgtttctcgacaaagcggtactgccgtttttggcacagccacctacctgccgccctacggcaaggtttccggttttgatgccgacgggctggaagagcgcaacaatgccgccggttggattcgtaccacccgcatcgcgctggcaggctacagctacgccgatgtcgtatgcagaagcgccacaggctgtcccaaacttgtctataaaacccaatttaccttcggtaattccggtttggcaaaaaaggcaaacggcggcgggctggatatatacgtagacaaaagccgcgacaattcgcccatttacaaattgaaggatcatccttggttgggcgtgtctttcaatttgagcgccaagggtaccgccaacgatggtaagacaatcaacaaatttgatgaaaagaatagtaataacaacctcgtctataccacggaaagcggcgatatttccttgggcaacaggcatcgcgaaacgaccgccatggcctattatctgaacgccaagctgcacctgctggataaaaaacagattcaaaatatcaccgacaaaacagtgcagttgggtgtcttgaagccgagcatcgatgtgcggcaaggaaatacggggattgccggcttgctaaagttttgggctaggtgggacattaaagataccgggcagattccagtcaagctcggcctgcagcaagtcaaagcaggccgctgcatcaccacaccgaaccccaatcccaaatccaaagccccttcgccggcactgactgcccccgcgctgtggttcggacctgtgcaaaatggcaaggtgcagatgtattccgcttcggtttccacctaccccgacagttcgagcagccgcattttccttcaaaatctgaaaagaaaaaacgaccccaacaaacccggccgctattccctcgcagacttgagtgagaatgagattaaaagtaaagagccgagtttcacaagtcggcaaaccgtcatccgattggataaaggcgtacatcagatcaaacttcaaggcaatgaggtcgccaattttaatggaaatgacggcaaaaacgacactttcggcattgttagtgaagggagcttcatgcctgatgccagcgagtggaaaaaagtattgctgccttggacggttcgtgcttccaatgatgacggtcaatttaacacattcaacaaagaagaaaaagacggcaagccaaaatacagccaaaaataccgcagccgcgacaacggcaagcacgagcgcaatttgggcgacatcgtcaacagccccatcgtggcggtcggcgagtatttggctacttccgccaacgacgggatggtgcatatcttcaaacaaagcggcggggacaagcgcagctacaatctgaagctcagttatatcccgggtacgatgccgcgcaaggatattcaaaacaccgaatccacccttgccaaagagctgcgcgcctttgccgaaaaaagctatgtgggcgaccgctacggcgtggacggcggctttgtcttgcgcaaagtcgaacggaacgggaaagaccatgtgtttatgttcggcgcgatgggctttggcggcagaggcgcgtatgccttggatttaagcaaaatcgacagcggcaacggcaacctggcagacgtttccctgtttgatgtcaaacatgacaagaatggcaataacggcgtgaaattaggctacaccgtcggcacgccgcaaatcggcaaaacccacgacggcaaatacgccgctttcctcgcctccggttatgcgactaaagacattaccagcggcgacaataaaaccgcgctgtatgtgtatgatttggaaagcagcggcacgctgattaaaaaaatcgaagtacccggtgacaagggcgggctttcgtcccccacgctggtggataaagatttggacggcacggtcgatatcgcctatgccggcgatcgcggcggcagtatgtaccgctttgatttgagcaatcaagatcctaatcaatggtctgtacgcgccatttttgaaggcacaaaaccgattacttccgcgcccgctatttcccaactgaaagacaaacgcgtggttatcttcggcacgggcagtgatttgagtgaggatgatgtactcagtacgagcgaacaatatatttacggtatcttcgacgacgatacggtggcgaataacgtaaatgtaaaactcagcggtttgggaggcgggctgctcgagcaagagcttaagcaggaggataaaaccttattcctgaccgattacaagcgatccgacggatcgggcagcaaagggtgggtagtgaaattgaagggcggacagcgcgttaccgtcaaaccgaccgtggtattgcgtaccgcctttgtaaccatccataaatatacgggtacggacaaatgcggcgcggaaaccgccattttgggtatcaataccgccgacggcggcaagctgaccaagaaaagcgcgcgcccgattgtgccggccgagaatcaggctgtcgcgcaatattccggccataagaaaggcatcaacggcaaatccatccctataggttgtatgcaaaaaggcaatgaaatcgtctgcccgaacggatatgtttacgacaaaccggttaatgtgcgttatctggatgaaaagaaaacagacggattttcaacaacggcagacggcgatgcgggcggcagcggtatagaccccgccggcaagcgttccggcaaaaacaaccgctgcttctcccaaaaaggggtgcgcaccctgctgatgaacgatttggacagcttggacattaccggcccgacgtgcggtatgaaacgaatcagctggcgtgaagtcttctactga

SEQ ID NO: 53664 - DNA, 6702 bp, Neisseria meningitidis
gtgaccggtgccgcttctgtttcttctgcccgggcagccttcggtttccgtatggctgccttttctgtcatgttggctttgggtgttgctgcgttttcccctgcccctgcttccggcatcattgccgacaaatccgcccctaaaaaccaacaagccgttattcttcagacagcaaacggtttgccgcaagtcaatattcaaactccgtcatcccaaggcgtttctgttaaccgattcaagcagttcgatgttgatgaaaaaggcgtaatactaaacaacagccgcagcaatacgcaaacgcaactcggtggatggattcaaggcaatccccatctggcacgcggcgaagcgcgggtaattgtgaaccagattgacagcagtaatccttcgttgttgaacggttatatcgaagtcggcggcaaacgcgccgaagtagtcgttgccaatccgtcgggcatccgtgtgaatggcggcggattgattaatgccgcttcggttacgctgacttcgggcgttcctgttttgaataacggcaatctgacgggctttgatgtttcttcgggtaaagtcgtgattgggggcaaaggtttggatacctctgatgccgattacacccgtatccttagtcgtgctgctgaaatcaatgcgggcgtttggggtaaagatgtcaaggtggtttcgggtaagaacaaattggattttgacggctctcttgccaaaacagcttctgcgccatcttcttcggattctgttactcctaccgttgccatcgacaccgccacactgggtgggatgtacgcagacaaaatcactttaatcagcaccgacaacggcgccgtaatccgcaacaagggtcggatttttgccgcaacaggcggcgttacgttaagcgcagacggcaaattgagcaacagcggttcgattgatgctgccgaaatcaccatttccgctcaaaccgttgataaccgccaaggctttatccgcagcggcaaaggcagtgtattgaaggtttcagacggcataaataatcaagcaggcttaatcggctcggccggtttgctggatattcgcgatacaggcaaaagcagcctgcatatcaataacacagacggcacgattattgcgggcaaagatgtttccttacaggcaaaatcactggacaacgacggcatattaaccgccgcacgcgatgtttccgtttctcttcatgatgattttgccggcaaacgcgatattgaagccggacgcacactcacgttctccacccaaggccgtctgaaaaacacccgcatcatacaggcaggcgataccgtatccctgaccgccgcccaaatcgacaacactgtctccggtaaaatccaatccggaaaccgcaccgggttaaacggcaaaaacggcatcaccaacaggggtttaatcaacagcaacggtataacgctgctgcaaaccgaagccaagtcggacaatgccggcacgggcagaatttacggcagccgtgtggcagttgaggcagataccttgttgaaccgggaagaaacggtcaacggcgaaaccaaagcggcggtaattgcagcgcgggagcggttggatattggagcgcgggaaattgagaaccgagaggcggcattattgtccagctccggcgatcttcatatcggttctgcattgaatggaagccgacaggtgcaaggagcaaatacatcactgcacaaccgcagtgcggcaatcgaatcatcaggcaatatccgtatcgctacaaaagatttgcagaataccaatgagcatctgcgtttccatacggaagaaacccatcgcgaacaccgtatcgaatatcaggcggaaggcagaacagaacgctatccggaaggttctcaaaaagagttgggctgggaaatatttgaagatgagtctttacatatgcggactccggacggcagcccccactctgtctggtacaaatacgattacgaacgaatcaccgccgagagcaaaattaccgaatccaagcccggtcaaatcatcagtggcggcaatttggttttagatgccgccaagctgaaaaatcataacagccggattattgccggcggcagattgatcgtcggtacgcccgaatccgcattggacaatgatgaaactttgggaacaaaaaccataaccgataaaggggacttgcaccgttaccaccgtcatcacaagaaagggcgggattctacgggatacagtcggtctccctacgaaccggcccccgaagtcagctccatccgtatgggtatttcagcctataaaggctatgcgccccaacaggcatctgatatacccggcactgttgtacccgttgttgctgaaaacggcatccatcctacatttactctgccgaacagcagcttgtttgccattgcgccaaacaacaaaggctatttgattgaaaccgaccctgcctttaccgactaccgcaaatggctgggcagcggctatatgcttgccgcactgcaacaagacccgaaccatatccacaagcgtttgggcgacggctattacgagcagaaactggtaaacgaacaaatcgccaagctgacaggctaccgccgcttggacggttataccaatgacgaagagcaattcaaggctttgatggataacggcattaccatagccaaagaattgcagcttactccgggtattgccctgtctgccgaacaggttgcccgtctgacttccgacattgtttggctggaaaacgagaccgttaccctgcccgacgggacaactcaaaccgtattgaaacccaaagtctatgtccgcgcacgccccaaagatatgaacggacaaggggcgttgctgtccggcagcgttgttgatatcggcagcggcgccattgaaaaccggggcggcttaattgccgggcgcgaagcactaattttaaacgcacagaatattaaaaatctgcaaggtgatttgcagggcaaaaacatcttcgccgcagcaggcagcgacattacgaataccggcagcatcggcgcagaaaacgccctgctgctcaaagcgagtaacaatatagaaagccgcagcgagacccgcagcaatcagaatgagcaaggctcggtacgcaatatcggccgggtggcaggcatttatctgaccggcaggcagaatggaagcgtcttgctggatgcaggcaacaatatcgtcctgacggcttccgaattgaccaatcaatctgaagacggtcaaaccgtactgaatgccggcggcgacatccgctcggatacgacgggcatttcccgcaatcagaacactatctttgattccgacaactatgtgattcgcaaagaacaaaacgaagtcggcagcaccatccgcacccggggcaatctcagtctgaatgcaaaaggagacatccgtatccgtgcagcagaggtcggcagcgaacaaggccgtctgaaactggcagccggacgggatatcaaagtcgaagccggcaaagcccataccgaaaccgaagatgccctgaaatacaccggtagaagcgggggcggcatcaaacagaagatgacccgccatctcaagaaccaaaacggacaagccgtatccggcacgctggacggcaaagaaatcattctggtttcaggacgcgatattaccgttactggcagcaatatcattgcagacaaccataccattctctcggcaaaaaacaatatcgtccttaaagcagccgaaacacgcagccgcagtgccgaaatgaacaaaaaagaaaaatccggactgatgggcagcggcggcatcggctttacggcgggcagcaaaaaagacacgcaaaccaaccgatccgagaccgtcagccacacagaaagcgtcgtcggcagcctgaacggcaataccctgatttcggcaggaaaacattacacccaaaccggttcgaccatatcctcgccccaaggcgatgtcggcatttcctccggaaaaatcagcatcgatgccgcacaaaaccgttacagccaagagagtaagcaggtttacgaacaaaaaggcgtaaccgtcgccattagcgttccggttgtgaataccgtaatgggcgcggttgacgccgtaaaagcagtccaaaccgtcggcaaaagcaaaaacagccgggtcaatgccatggctgctgccaacgccttgaataaaggagtagattccggcgtggcactctataatgccgcccgaaatcccaaaaaagcagccggtcagggcatcagtgtctccgttacctacggcgaacagaagaacacctccgaaagccgcatcaaaggcacgcaggtgcaagagggcaaaatcaccggcggcggcaaagtttccctgactgcttcaggcgcaggcaaagactcccgcatcacgattaccggctccgatgtgtacggcggcaaaggaacacgcctcaaagcagaaaatgccgttcagattgaagccgcccgccaaacgcatcaggaacgcagcgaaaacaaatccgcaggctttaatgccggagtcgccatcgccatcaacaaaggcatcagtttcggcttcacagccggagcaaactacggcaaaggttacggcaacggcgacgaaaccgcctaccgcaacagccatatcggcagcaaagacagccaaaccgctattgaaagcggtggcgataccgtcatcaaaggcgggcagcttaaaggcaaaggcgttggcgtaacggcagagagtctgcatatcgaaagtttgcaggataccgccgtgtttaaaggcaaacaggaaaatgtttccgcccaagttacggtaggctacggctttagtgtcggtggcagctataaccgctcgaaaagcagctcggattatgcatccgtcaacgagcaaagcggtatctttgcaggaggagacggctatcggattcgcgtaaacggcaaaaccggattggtcggcgccgctgttgtttcagatgccgacaaatcaaaaaacctgctgaaaacaagcgaaatctggcataaagatattcaaaaccatgcttcggcggctgcttccgccttgggcttgagcggcggtttttcatacagcccgaagcctaccagcggacagtattccaccaaaaaagaagcagaaatcggtaaaatcggcggcaaaccggtcagcctgatgcgttttgaccaggtttcggcgaaagacgacgagttgaacgaaaaatatcgaagtgagcgtattgaaaaaggggaaacctttaaagaggcaaatttaaatcaaaacaacgccggcggcttgaaattcggtttgaagcaaaacgatatacacagcaacgacaaatacgccttggcaaaaatgggtttgggcaatctgttgggcaatgccaaagaatcagaaagccgccaatccattacccgctccgtcatcagtgagggagattggcaaattgcttccgcgcagggcaggaaaaatattgccggtattgaaaaaggcacttcatccgcacataaggcattggcaaaagcagaccgcgaaggcttgctgaaagaagtcgaactcaatagggatgttgccaaagagtttatcaatgagacgctgatcggcggcattgcagacgaagcctaccgcagccagtttattgcagaacaccgcctgatgacctttaaaatggatgaaaacggcgagccgattgaagataagcagcttgaagaggatataaataaacagtttgacaactcagtaaagttgaaaaaagaatttgcctcatttaaagattattgggaagcctataaagccattgggggaaatatctacgaattgcgcgaagtatccgaccaggaacggaaaaatctgaaaactgcccgttacaccgacccggagaccggcaaaaccgttgaaaaaatcgttgtcggcgtcaacggcattttcaataatatacaagcagccgccaaatttgccgcccaacaatatgtggggcgtttcaatcccgagaaaaaccgatatgaacgcacctatgaaaatgtttatttcctgcacaatccggaaaccaatgggcggggcttttcaaaattgcccgaaatcgccgttgcggcctttcataaaatgctcgaaggggcaaaaataggcaataagaccgttatcggcttgagcaattcaggcttggctttaggcaatatcatggaagactacgggaaggataaaaacggcctgtttgtcggctcgcacagccgtggaaccctggtggtcgacaatgtactcaataccttgaatacccaagccaatcgggataagaaaattttatccaataccgaactgaaaatggtcggccctgccgccaacgttgtccgggcagataaaaggctgtttcaactgcagcagggggtaacgacacccagaacggcagatttcgcccgtcagtccatccaaatagaaaaccacgaattagaccttatcggcatgctgattggcagaaatccggcaacagtcggaaccaatacccggcaaaaaagccaatggcaggctataagggatattataggggattacacctcgccgcataattgctacggtatggctaataaacaatgtgtaacagatggttatcgagaccctgaaaataaacaaacccaaagtccgacaggtgtatttgaaagaggagtgtccaacgaaatcgaaattatgtaccgtcctgtacgcatttatgatctgcaacatccgaaaggaaaaacaaaatga

SEQ ID NO: 53665 - DNA, 609 bp, Neisseria meningitidis; identical to SEQ ID NO: 42710

SEQ ID NO: 53666 - DNA, 975 bp, Neisseria meningitidis; identical to SEQ ID NO: 36944

SEQ ID NO: 53667 - DNA, 1155 bp, Neisseria meningitidis; identical to SEQ ID NO: 43414

SEQ ID NO: 53668 - DNA, 2595 bp, Neisseria meningitidis; identical to SEQ ID NO: 42550

SEQ ID NO: 53669 - DNA, 966 bp, Neisseria meningitidis; identical to SEQ ID NO: 43203

SEQ ID NO: 53670 - DNA, 1452 bp, Neisseria meningitidis; identical to SEQ ID NO: 43847

SEQ ID NO: 53671 - DNA, 2262 bp, Neisseria meningitidis; identical to SEQ ID NO: 43082

SEQ ID NO: 53672 - DNA, 3435 bp, Neisseria meningitidis; identical to SEQ ID NO: 43337

SEQ ID NO: 53673 - DNA, 1143 bp, Neisseria meningitidis; identical to SEQ ID NO: 42697

SEQ ID NO: 53674 - DNA, 258 bp, Neisseria meningitidis; identical to SEQ ID NO: 42260

SEQ ID NO: 53675 - DNA, 2391 bp, Neisseria meningitidis
atgactgaacaaaaacacgaagaatacggcgccgacagcattcaggtgctcgaaggcttggaagcggtacgcaaacgccccggcatgtacatcggcgacacgcaggacggcagcggtctgcaccacatggtgttcgaagtattggacaacgccattgacgaagcactcgccggacattgcgacaaaatcacggtaacgatacacgccgaccattccgtcagcgtcgccgacaacgggcgcggtatgcccaccggcatccacccgaaagaaggacgctccgccgccgaagtcatcatgaccgtattgcacgcgggcggtaaattcgacaacaacagctacaaaatctccggcggcctgcacggcgtgggcgtgtccgtcgtcaacgcgctgtccgactgggtaacgctgaccatctaccgcgacggcaaagaacacttcgtccgcttcgtgcgcggcgaaaccgaagagccgctgaaaattgtcggcgattccgataaaaaaggcacgaccgtgcgcttcctcgccagtacggaaaccttcggcaacgtcgaatacagcttcgacatccttgccaaacgcatccgcgaactttccttcctgaacaacggcgtggacatcgaattgaccgacgagcgcgacggcaaacacgaaagcttcgccctttccggcggcgtggcgggtttcgtgcaatacatgaaccgcaaaaaaacgccgttgcacgaaaaaatcttctacgcgttcggcgaaaaagacggcatgagcgtcgaatgcgcgatgcaatggaatgacagctatcaagaaagcgtgcagtgtttcaccaacaacatcccgcaacgtgatggcggtactcacctgaccgcactgcgccaagtgatgacccgcaccatcaacaactatatcgaagccaacgaagtcgccaaaaaagccaaagtggaaaccgcaggcgacgatatgcgcgagggtttgacctgcgtgttgtccgtcaaactgcccgaccccaaattctcgtcccaaaccaaagacaaactggtttccggcgaaatcggccccgttgtcaacgaagtcatcagccaagccctgaccgacttcctcgaagaaaatccgaacgaagccaaaatcatcaccggcaaaatcgtcgatgccgcccgcgcgcgcgaagccgcccgcaaagcacgcgaaatcacccgccgcaaaggcgtgatggacggcttgggactgcccggcaaactcgccgactgccaagaaaaagaccctgccctgtccgaactctacctcgtcgagggcgactccgcaggcggttccgccatgcaaggccgcgaccgcaaattccaagcgattttgccgctcaaaggtaaaattttgaacgtcgaaaaagcacgttttgaaaaaatgctggccagccaagaagtcgccacgctgattaccgctttgggcgcgggcatcggcaaagaagaattcaatgccgaaaaactgcgttaccaccgcatcatcatcatgaccgatgccgacgtggacggcgcgcacatccgcaccctgctcctgaccttcttctaccgccaaatgcccgagctggtcgagcgcggctacatctatatcgcccagccgcctttgtataaagcgaaatacggcaaacaggaacgttacctcaaggacgagttggaaaaagaccaatggctgctcggtcttgccttggaaaaagccaaaatcatttcagacggccgcaccatcgaaggcgcagaacttgccgacaccgccaaacaattcctgttggcaaaaaccgtcatcgaacaggaaagccgcttcgtagacgaactcgtcctgcgcgccatgctacacgcgtcgcccattgatttgacgtcgtctgaaaacgccgataaagccgttgccgaactttccggtctgcttgacgaaaaagaagtcgccctcgaacgcatcgaaggtcatgaaggacaccggttcatcaaaatcacgcgcaagctgcacggcaacgtcatggtcagctacatcgaacccaagttcctcaacagcaaagcctaccaaaccctcacccaaaccgccgccgcgctcaaaggcatggtcggcgagggtgccaagctttacaaaggcgaaaacgggtacgacgcggacagctttgaaaccgctttggacatcttgatgagcgttgcccaaaaaggtatgtccatccaacgatacaaaggcttgggcgagatgaaccccgagcagctgtgggaaaccacgatggatcccgccgtgcgccgcctgttgaaagtgcgcatcgaagatgccattgccgccgacgaagtgttcgttacgctgatgggcgacgaggtcgagccgcgccgtgcctttatcgaaaacaacgcgctgattgcccaaaatatcgacgcataa

SEQ ID NO: 53676 - DNA, 804 bp, Neisseria meningitidis; identical to SEQ ID NO: 43864

SEQ ID NO: 53677 - DNA, 957 bp, Neisseria meningitidis
atgaaagaatttgacttcatcaaacggtatttgcaaacaggcacggataatgatgtcgtattgggcataggcgacgatgcggcgattgtccgcccgcgtgaaggcttcgatttgtgtttcagtgcggatatgcttttgaaggacaggcatttttttgcagatgtcaaacctgaagacttggcttggaaggttttggccgtcaatatttcagatatggcggcgatgggtgcgataccgcgttgggtgttgctgagcgcggctttgcccgaattggatgaggtatggctgaaacggttttgcggcagctttttcggtttggcaaaaaagtttggcgtaacgttaatcggcggcgatacgaccaagggcgatatggcgttcaatgtaaccattatcggcgaattgccgaagggtagggcgttgcggcgtgatgcggcggttgcgggcgacgatatttgggtgtcggggcgtatcggtatggcggcggcggctttgaactgccgtctgaaacggtgtgtgttgccagatgaagtgtttgccgaatgcgaacaaaagctgctccatcctgaaccaagggttgggctggggcttgcgctgttgccgtttgccagggcggcgcaggatgtttcagacggcctcgcgcaagatttggggcatatcctgaccgcttctggcaagggtgcggaaatttgggccgattcgctgccgtctttatccgtattgaaagatattttgccccgagcgcaatggctgtcttatactttggcgggcggcgacgattacgagctggtgtttaccgcgccggaaagttgccgcagccgcgtatttgatgcggcggaacggtgcggcgtgccggtaacgcgcatcggcaaaatcaacggaggatgccgtctgaaggttttagatgccgacggcagggaattggaactacattctttaggattcgatcattttggctga

SEQ ID NO: 53678 - DNA, 2940 bp, Neisseria meningitidis; identical to SEQ ID NO: 43390

SEQ ID NO: 53679 - DNA, 747 bp, Neisseria meningitidis; identical to SEQ ID NO: 42743

SEQ ID NO: 53680 - DNA, 423 bp, Neisseria meningitidis; identical to SEQ ID NO: 43334

SEQ ID NO: 53681 - DNA, 1503 bp, Neisseria meningitidis
atgcaagtaaatattcagattccctatatactgcccagatgcgtgcgtgctgaagacaccccctacgcttgctatttgaaacagctccaagtcaccaaagacgtcaactggaaccaggtacaactggcgtacgacaaatgggactataaacaggaaggcttaaccggagccggagcagcgattattgcgctggctgttaccgtggttactgcgggcgcgggagccggagccgcactgggcttaaacggcgcggccgcagcggcaaccgatgccgcattcgcctcgctggccagccaggcttccgtatcgctcatcaacaataaaggcgatgtcggtaaaaccctgaaggagctgggcagaagccgcacagtgaaaaaactggttgtagcagcggccatcgcaggcgtatccaacaaaatcggtgcttcctcccttgccacttggagcgaaaccccttgggtaaacaacctcaacgtcaacttggctaatgcgggcagtgccgcgctgattaacaccgccgttaacggcggcagtctgaaagacaatctggaagcgaatatccttgcggctttggtgaatactgcgcatggagaggcagcaagtaaaatcaaacaattggatcagcactacattgcccataagattgcccatgccatagcgggctgtgcggcagcggcggcgaataagggcaagtgtcaggacggcgcgattggtgcggtcgtgggggagattgtcggggaggctttggttaagaataccgatttcagcggtatgactgcttctgaaattgaaaaagctaaagcgaatattactgcgtatgcaaaattggtagccggagcgactgtaggtgttacaggaggcaatgttgatgtggcggcaaatgcttccgaaacagctgttaaaaataatgcattagatattatttgggatattggcaacctcgtatgggacggcggtaaatggatttacgccaaatctattggcgataagcagatggctcgagaagcggcgattgattttggtgtggatgccgccgcagctgccgttccctttgttccggcaggtgcgactaaaatcagccgaggcggggcttatgttctgaaggcgggagacgaagcagttgatacggctaaagccatacaggaaattcagaagcagaccggaatcaagcttacttatgataaggttaataaggtttggacaacaccggcggggttagattatgggttagatgctaagcatggtaataggattaaacatgttttagcccatacaattccaaatccaaacaaacctgttcattctgtttttaatgtgtcccgtaaagaagttttgcctttggttgatgaagcttggagaatgaaaggaaatcctttgccaaatgattcatccgtatatcttgtagatatgaagaaacctattggaacaaaaggagaaacaaaagtgcggattgttgtgcaaaaaggaacaaataaaatcatttctgcatatcctcagaaataa

SEQ ID NO: 53682 - DNA, 1728 bp, Neisseria meningitidis; identical to SEQ ID NO: 42763

SEQ ID NO: 53683 - DNA, 816 bp, Neisseria meningitidis; identical to SEQ ID NO: 51788

SEQ ID NO: 53684 - DNA, 720 bp, Neisseria meningitidis; identical to SEQ ID NO: 42552

SEQ ID NO: 53685 - DNA, 3834 bp, Neisseria meningitidis
atgaccacgactaccgcccctcagcgtattcgggaaatcccctacaactatacttcctacaccgaccgcgaaatcgtcatccgattattgggcgacgaagcgtggcaaatcctgcaagacctgcgcggtcaacgcaaaaccgggcgttcggcgcggatgctgtttgaagtgttgggtgatatttgggtggtcgtgcgcaatccgtatctggtcgatgacttgctggagcacccaaaacgccgcgccgcgctggtacgtgaaatgcgccaccgcttaaatgaaatccgcaaacgccgcgacgataatcggcaagtggatgtgttggttgccgcagcagaaaaagcagtcgagcgttttgatagcagttttgatgaaaccagccaaaaacggcggcagattttggagcgtttgagcaaaatcaccaagccgcacaatattatgttcgacgggctggcgcgggtaacgcacgttaccgatgcaaccgactggcgcgtggagtatccgtttgtcgtcgtcaatcccgacacggaggctgaaatcgcgcctttggtgcgcgccttaatcgagctggatttggtcattattccgcgcggcggcggcacgggttataccggcggcgcgattcctttggacgcaaacagcgcagtcatcaataccgaaaaactcgacaagcatcgtggtgttgaatacgttgagctggcaggcttggacggcaagcatccgattatccggtgcggcgcgggcgtggttacgcggcgggtggaagaaaccgcgcatcaggcaggtttggtgttcgccgtcgatccgacttctgccgacgcgtcatgcgtgggcggtaatgtggcgatgaacgcgggcggcaaaaaagccgtgctgtgggggacggcgttggacaacctcgcctactggaacatggttaaccctcaaggcgaatggctgcgtatcgagcgcgtgcgccacaatttcggcaaaatccacgacgaagaaaccgccgtgttcgacgttcacacgctggattcagacggcatcaatatcgttaaaaccgaacgcttggaaatccccggccacaaattccgcaaagtcggtttgggcaaagacgttaccgacaaattcttgagcggcctgcccggcgtgcaaaaagaaggtacagacggcatcatcaccagcgttgccttcgtgttgcataaaatgccgaaatacacgcgcaccgtgtgtatggagtttttcggtacggtcgccaccgccacgccatctattgtcgaaatccgcgactttttgcttgcccatgaaagcgtgcggctggcgggtttggaacatttggactggcgttatgtccgcgccgtcggctacgccaccaaagcggcgggcaagggacgaccgaaaatggttttgctggcagacgtggtttcagacgacgaagccgccgtagaggcagccgccgaacacatctgtgaactcgcacgcgcccgcgacggcgaaggctttatcgccgtatcgcccgaagcccgcaaaaccttctggctcgaccgcagccgcaccgccgccatcgccaaacataccaacgcctttaaaatcaacgaagacgtggtcatcccgctcgaaaggctcggcgagtattcggacggcatcgaacgcatcaacattgagctttccatccaaaacaagctcaaactctgtgccgccttggagcaatatctttcgggcaaactccccatcgacaaaatgggcactgacctgccgaccgccgaactgttgggcgaacgcggcaaacacgccctggcccacgtttccgccgtcaaaacgcgttgggaatggctgctcgccaatcttgacacgccgcttgccgactacaaagcccgctacggcgcagccgtccacgccgcacccgaagccaaaaacaatgaaagctgctttattgccttccgcgatttccgcctgcgcgtgtctgtcaaagcggacgtaatgaaaccgctttctgaaatcttcagcggcaaaaccgacaccaaaattatccaaggcttgggaaaaatccacgcaaaaaccgtacgcagccgcgtctttgtcgccctgcatatgcacgccggcgacggtaacgttcacaccaatattccggttaactcagacgatgccgaaatgcttcagacggcataccgctcagtcgaacgcattatgaaaatcgcccgttcgcttaacggcgtgatttccggcgaacacggcatcggcattaccaagctcgaatttttaagcgacgaagaaatgcagccgttttgggactacaaaaaccaagtcgatccgaaacacaccttcaaccgtcacaaactgatgaaaggctcggacttacgcaacgcctacacgccgtccttcgagctgttgggcgcggaatcgctgattatggaaaaatcaaacctcggcacgattgccgattccgtcaaagactgcctgcgctgcggcaaatgcaaacccgtctgctctactcacgttccgcgtgccaacctgctgtacagcccccgcaacaaaatcctcggcgtgggcttattgatcgaagccttcttatacgaagaacaaacccgccgcggcgtttccatcaaacactttgaagaactcatggacatcggcgaccactgcaccgtgtgccaccgctgcgtcaaaccctgccccgtcaacatcgacttcggcgacgttaccgtagccgtccgcaactatcttgccgattccggccacaaacgatttgcgcctgccgcagctatgggtatggcgtttttgaacgccaccggcccgaaaaccatcaaagcccttcgcgccgccatgatacagatcggcttcccagcgcagaatttcgcctacaaaatcggcaaacttcttccaatcggcacgaaaaagcaaaaagccgaacccaaggcaaccgtcggcaaagccccgattaaagaacaggttatccatttcatcaaccgcccactgcccaaaaacgtacccgccaaaacaccgcgctccttattgggcatcgaagacggcaaaagcatccccatcatccgcaaccccgccgcgcccgaagatgccgaagccgtgttctacttcccgggttgcggctctgagcgtctgttcagccaaatcggacttgccgttcaagccatgctctggcacgtcggcgtacaaaccgtcctgccgcccggctatatgtgttgcggctatccgcaagacgcaggcggcaataaggcaaaagccgaagaaatgagcaccaacaaccgcgtggctttccaccgtatggcgaacaccctcaactacctcgacatcaaaaccgtcgtcgtcagttgcggcacttgttacgaccagctcgaaaaataccgctttgaagaaatcttccccggctgccgaatcatcgacatccacgaatacctgctcgaaaaaggcgtgaaactcgacggcgtaaaaggtcagcaatacctctaccacgacccctgccatacccccatcaaaaccatgaacgccacccaaatggccagcagcctgatggggcagaaagtcgttttaagcgaccgctgctgcggcgaatccggtatgtttgccgtcaaacggccagacatcgccactcaggtcaagttccgcaaacaagaggaaatcgagaaaaacctcaaagagctgccgcagggcgaacccgtcaaaatgctgacctcctgccccgcctgcctgcaaggcttgagccgctacgccgacgacaacaatatgcctgccgactacatcgtcatcgaaatggcgaaatacatcctcggcgaaaactggctggatgagtttgtaaaaaaagccaacaacggcggtgtagagaaagtgttgctgtaa

SEQ ID NO: 53686 - DNA, 375 bp, Neisseria meningitidis
ttggctgaaggtcaaaaatcagccgtcaccgagtattacctgaatcacggcgaatggcccggcaacaacagttctgccggcgtggcaacctccgccaacatcaaaggcaaatatgttgagaaagttgaagtcaaaaacggcgtcgttaccgccacaatgctttcaaccggcgtaaacaaagaaatcaaaggcaaaaaactctccctgtgggccaagcgtcaagacggttcggtaaaatggttctacggacagccggttaagcgcgacaacgccagcgccgacgccgtcaaagccgacaccgccgccaacggcaagcagatcgacaccaagcacctgccgtcaacagcatcgacaagaaaatcgacaccaaactag

SEQ ID NO: 53687 - DNA, 807 bp, Neisseria meningitidis; identical to SEQ ID NO: 43597

SEQ ID NO: 53688 - DNA, 354 bp, Neisseria meningitidis; identical to SEQ ID NO: 39616

SEQ ID NO: 53689 - DNA, 3024 bp, Neisseria meningitidis
atgaacgcgcaaaatctgcccgaggtaaagtggggggatcaatatcagtcattgacgcacaaaagcaatgaacgcgaagttatccatacgagtggttttggtttggcaaaaaagagcattagtttctcattcaataataccgatgaagttgttgctgaaaaaaaagatactgtcgttttcggcgcggcgacctacctgccgccctacggaaaggtttccggttttgataccgctaagctgaccgagcgcaaaaatgcccttgatcagattggtacgaccaaaacggggctggtaggctacagctacgaaggtagcacatgctccagcggaggttgtcctacagttgcctatagaacccaatttaccttcggcaattccagtttggcaaaaaagacaaacggcggcgggctggatatatacgaagacaaaagccgcgacaattcgcccatttacaaattgaaggatcatccttggttgggcgtgtctttcaatttgggcggagagagctccttcaaaccaaagagacaaggttctttggtatcttcttttagcgaggacgtgacgcagcaaaatggtgcgggcagccaacacaaagacaaaaacctcgtttatacgacagacgattacaagagtcagaataataaaaaccatcaggacaaacaccacgccgtcgccttttatctgaacgccaagctgcacctgctggataaaaaacacattaaaaatatcgtgcaaggtaaaacagttaatttgggtatcttgaaaacacgcatcgagccgacggaagcatggaaaagacggaatagtaacttttttaacggtagttggacgtatgaagagaaaggaacagtcagcgtcaaactcaaattgccggaagtcaaagcaggccgctgcatcaacgcaaataaccccaataagagtaccaaagccccttcccccgcactgactgcccccgcgctgtggttcggacctgtgcaaaatggcaaggtgcagatgtattccgcttcggtttccacctaccccgacagttcgagcagccgcattttccttcaaaatctgaaaagaaaaaacgaccccaacaaacccggccgctattccctcgcagacttgagtgagaatgagattaaaagtaaagagccgagtttcacaagtcggcaaaccgtcatccgattggataaaggcgtacatcagatcaaacttcaaggcaatgaggtcgccaattttaatggaaatgacggcaaaaacgacactttcggcattgttagtgaagggagcttcatgcctgatgccagcgagtggaaaaaagtattgctgccttggacggttcgtgcttccaatgatgacggtcaatttaacacattcaacaaagaagaaaaagacggcaagccaaaatacagccaaaaataccgcagccgcgacaacggcaagcacgagcgcaatttgggcgacatcgtcaacagccccatcgtggcggtcggcgagtatttggctacttccgccaacgacgggatggtgcatatcttcaaacaaagcggcggggacaagcgcagctacaatctgaagctcagttatatcccgggtacgatgccgcgcaaggatattcaaaacaccgaatccacccttgccaaagagctgcgcgcctttgccgaaaaaagctatgtgggcgaccgctacggcgtggacggcggctttgtcttgcgcaaagtcgaacggaacgggaaagaccatgtgtttatgttcggcgcgatgggctttggcggcagaggcgcgtatgccttggatttaagcaaaatcgacagcggcaacggcaacctggcagacgtttccctgtttgatgtcaaacatgacaagaatggcaataacggcgtgaaattaggctacaccgtcggcacgccgcaaatcggcaaaacccacgacggcaaatacgccgctttcctcgcctccggttatgcgactaaagacattaccagcggcgacaataaaaccgcgctgtatgtgtatgatttggaaagcagcggcacgctgattaaaaaaatcgaagtacccggtgacaagggcgggctttcgtcccccacgctggtggataaagatttggacggcacggtcgatatcgcctatgccggcgatcgcggcggcagtatgtaccgctttgatttgagcaatcaagatcctaatcaatggtctgtacgcgccatttttgaaggcacaaaaccgattacttccgcgcccgctatttcccaactgaaagacaaacgcgtggttatcttcggcacgggcagtgatttgagtgaggatgatgtactcagtacgagcgaacaatatatttacggtatcttcgacgacgatacggtggcgaataacgtaaatgtaaaactcagcggtttgggaggcgggctgctcgagcaagagcttaagcaggaggataaaaccttattcctgaccgattacaagcgatccgacggatcgggcagcaaagggtgggtagtgaaattgaagggcggacagcgcgttaccgtcaaaccgaccgtggtattgcgtaccgcctttgtaaccatccataaatatacgggtacggacaaatgcggcgcggaaaccgccattttgggtatcaataccgccgacggcggcaagctgaccaagaaaagcgcgcgcccgattgtgccggccgagaatcaggctgtcgcgcaatattccggccataagaaaggcatcaacggcaaatccatccctataggttgtatgcaaaaaggcaatgaaatcgtctgcccgaacggatatgtttacgacaaaccggttaatgtgcgttatctggatgaaaagaaaacagacggattttcaacaacggcagacggcgatgcgggcggcagcggtatagaccccgccggcaagcgttccggcaaaaacaaccgctgcttctcccaaaaaggggtgcgcaccctgctgatgaacgatttggacagcttggacattaccggcccgacgtgcggtatgaaacgaatcagctggcgtgaagtcttctactga

SEQ ID NO: 53690 - DNA, 288 bp, Neisseria meningitidis; identical to SEQ ID NO: 36767

SEQ ID NO: 53691 - DNA, 1203 bp, Neisseria meningitidis
atgaagaactaccacgcgcccgacgagaagggctttttcggcgaacacggcgggctgttcgtgtccgagaccctgattccggctttgcaagagctggcggatgcctataaggcagcgaaaaacgatcctgaattttgggaagcgttccgccatgatttgaaacattatgtcggcaggcccagccccgtttaccacgccgcgcggttgtccgaacatctgggcggcgcgcaaatctggttgaagcgcgaagacttgaaccacaccggcgcgcacaaagtcaacaacaccatcggtcaggcactgttggcaaaacgcatgggtaaaaaacgcgtcatcgccgaaaccggcgcgggtcagcacggcgtggcgagtgccaccgttgccgcacgcttcggtatgacttgcgacgtgtatatgggcgcggacgacatccaacgccaaatgcccaacgtgttccgtatgaaattattgggtgcgaacgtggttggtgtagaaagcggcagccgcacgctgaaagacgcgatgaacgaagccatgcgcgaatgggtcgcccgcgtggacgacacgttctacatcatcggtaccgccgccggccccgcgccgtatcccgaaatggtgcgcgatttccaatgcgtgattggcaacgaagctaaagcgcagatgcaggaagccatcggcagacagcccgacgttgccgttgcctgcgtgggcggcggatcgaacgccattggtttgttccacccgtatatcggcgaagaaaacgtgcgcctcgtcggcgtggaggctggcggtttgggcgtgaacacccccgatcacgccgcgccgattacttcgggctcaccgattggcgtattgcacggtttccgcagctatctgatgcaggacgaaaacggtcaagtcttgggtacacactctgtttccgcaggcttggattaccccggcatcggcccggaacacagccatctgcacgacatcaagcgcgtcgaatacaccgtcgctaaagacgacgaagcactcgaagcctttgatttgctctgccgcttcgagggaatcatccccgcgctcgaatccagccacgccgttgcttgggcggtgaaaaacgcgccgaaaatgggcaaagaccaagtgattctggtcaacctatccggtcgtggcgacaaagacatcaataccgtcgcgaagctcaaagggattaaactgtaa

SEQ ID NO: 53692 - DNA, 603 bp, Neisseria meningitidis; identical to SEQ ID NO: 43475

SEQ ID NO: 53693 - DNA, 582 bp, Neisseria meningitidis; identical to SEQ ID NO: 39245

SEQ ID NO: 53694 - DNA, 240 bp, Neisseria meningitidis; identical to SEQ ID NO: 37009

SEQ ID NO: 53695 - DNA, 627 bp, Neisseria meningitidis
atgacgcaagaacgtttacccgaatttttcgaccgcgccccgacgctgaccgtacaagacccgcttgccgcattcctcggcgcggccgaaaacggcatcctcacttaccgctacgccgatgccgtgcgcctgtgcggacattcctgcccgaccgtcgcgggcgcgtacctgatggttatcaaaggtctgaaagccctttacggagaagagctgcccgaacgcggcggcatcgaagccgccatgcagggagcgcgcgacgaaggcacggtcggcgtaaccgcgtccgtcgtccaacttctcaccggcgcagcccccgaaaccggcttcggaggcatcggaatgcagggacgcttcgcccgccgcaacctcttatcctttggtgcaggcgaaatcaacggcacactgaccctgcgccgcaaagacaacggcaaaaccgtcgccgtcagcctcaacgccgccctgcaacccttcgcacccgaaatgcgcgaacttatgcccaaaaccgtcggcggcagcgcaagcgcagaagaactcgaacgcttcggacaactctggcaggcacgcgttaaagcatttttgaccgaatcggcggacgacccgcagttcgtcatcgtccgcgaagtgtga

SEQ ID NO: 53696 - DNA, 1116 bp, Neisseria meningitidis; identical to SEQ ID NO: 43437

SEQ ID NO: 53697 - DNA, 300 bp, Neisseria meningitidis
gtgttaaaaaacgggcagttcgctttgttttgcaagggtacccaaccaatcggttatatctcatgggcttattttgatgaagtggcgcaggcgcattatttagaatctgaccgccatttgcgtgacaacagcgattggaactgtggcgacaatatttggctgattcaatggtttgcgccattgggacacagtcatcaaatgcgctcagctgtgcgccagttatttcctagtacgacagtacgcgccttgtatcataaagggagcgataagggtttgagaattttaacttttaaaacttga

SEQ ID NO: 53698 - DNA, 231 bp, Neisseria meningitidis; identical to SEQ ID NO: 38440

SEQ ID NO: 53699 - DNA, 1065 bp, Neisseria meningitidis; identical to SEQ ID NO: 43265

SEQ ID NO: 53700 - DNA, 432 bp, Neisseria meningitidis; identical to SEQ ID NO: 43713

SEQ ID NO: 53701 - DNA, 1413 bp, Neisseria meningitidis
ttgttgtttgaatttaaagagaataaaatgattgttgcttctcgctggcccttgctggaaaaggtatttttacggtttggaatgcctgttgccgtggttgatttggaatcgacgggcggcaatctgtatgaagacagggtaaccgaagtggctttggtcaagtttgagcagggaagggtggtgaggcatgagtggttggttaatcctcaaaaaccgattccgcagtttgtggcggggctgacggggatttcagacggcatggttgccgatgcgcctgtttttgcagagattgccggcgagttgttttcggtattgaagggttgtgtgctggttgcacataacagccgtttcgactatacgtttttaaagcatgagtttcatcgtgcgggtatcggattttcatcgcctgctttgtgcagtgtgcagctgtcccggtgtctgtatccgcaattttacaagcacagcctggacagtatcatcgaaaggttggggattgttgtggaagacaggcatcgtgcgatggcggatgtatcggcattgtgtgattatttggaatacagtctgtcggaacacggggttgaggcatggatcaggcagtgtttccgtttgatgaatccgaaaccgctgcctgccgcgctgcccgaacggttgagggaacagttgtacggtttgcctgacggtatgggggtgctggcttgtttcgacggcggagggaaagtaaattatatcggtacgtttgaacgggtatatagcgagatttcggctttattggactccggaaaagccccgtttgattggtgcaatacggaggaagtccgtttttttcccgcattgggcagcctgcatgcatataagattaaagcggaattggtcgggcgttatcattcggattgttatgtgtctgccaaaaatctgcttaaaacatttacgaccgtcaggtttgaaaaaggttcagacggcatgttgaatgcgaaaacagcggctttgaaaaacggtgtgacggataatccgcctaccggattatttgccaataaaaaggcagcgagacgggctttgtcgtcgtgggcggaaacatacggattgtgtcctgccgcagccggtatccttccggacggttatgcagaggatgagccttgtcccgtatatgtttcaggccgatgcgataaggcgtgcggccgttctgacgaacaggttttggcgtttgcacacaagttgcctgttttggattggggaaaaatgcatgaggtggaaattaccgaaaccgatcctttgacgggggaaaaagtcgttctgcacggaatgggcggcgcattggaaatggatgacgggctttggtatttcgataaagatttaccggatgcgtttaaggcgaagtttaaaacggacaggaaaaatattaaggaaatcggttaa

SEQ ID NO: 53702 - DNA, 1233 bp, Neisseria meningitidis; identical to SEQ ID NO: 42516

SEQ ID NO: 53703 - DNA, 876 bp, Neisseria meningitidis
atgccgaccgtccgttttaccgaatccgtcagcaaacaagaccttgatgctctgttcgagtgggcaaaagcaagttacggtgcagaaagttgctggaaaacgctgtatctgaacggtctgcctttgggcaacctgtcgccggaatgggtggaacgcgtcaaaaaagactgggaggcaggctgctcggagtcttcagacggcatttttctgaatgcggacggctggcctgatatgggcggacgcttacagcacctcgccctcggttggcactgtgcggggctgttggacggctggcgcaacgagtgtttcgacctgaccgacggcggcggcaaccccttgttcacgctcgaacgcgccgctttccgtcctttcggactgctcagccgcgccgtccatctcaacggtctgaccgaatcggacggccgatggcatttctggataggcaggcgcagtccgcacaaagcagtcgatcccaacaaactcgacaatactgccgccggcggtgtttccggcggcgaaatgccgtctgaagccgtgtgtcgcgaaagcagcgaagaagccggtttggataaaacgctgcttccgctcatccgcccggtatcgcagctgcacagcctgcgctccgtcagccggggtgtacacaatgaaatcctgtatgtattcgatgccgtcctgcccgaaaccttcctgcctgaaaatcaggatggcgaagtggcgggttttgagaaaatggacatcggcggtctgttggatgccatgttgtcgggaaacatgatgcacgacgcgcaactggttacgctggacgcgttttgccgttacggtctgattgatgccgcccatccgctgtccgagtggctggacggcatacgtttatag

SEQ ID NO: 53704 - DNA, 354 bp, Neisseria meningitidis; identical to SEQ ID NO: 36723

SEQ ID NO: 53705 - DNA, 840 bp, Neisseria meningitidis; identical to SEQ ID NO: 36521

SEQ ID NO: 53706 - DNA, 564 bp, Neisseria meningitidis
atgaccgatttagaaaccaaacgccttgaaacacaggcgatgcttgaaaacgccgatcttttgttcgaccaaggccaatgccgtgccgcactgcaaaaagtggcggacgagattacgcgtgatttgggcggcaaatatccgctgctgctgcccgtgatgggcggcgcggtggtgtttacggggcagttgctgccgctgttgcgttttcccttagattttgattatgttcacgtttcccgttacggcgacaagctggagggcggcgcgttcaactggaagcgtatgcccgatgcggaacaaatccggggcaggcacgtcgtcgtgctggacgatattttggacgaagggcatacgatgtccgccattcaagccaaacttttggaaatgggtgcggcaagctgccgtgcggcggtgttcgccaacaagctgattgacaaacccaagcctatccgagccgattatgtcggactggatgtgccgaaccgttatgttttcggttacggcatggatgcggcgggctgctggcgcaatctgggcgagatttacgcattgggcggaaaataa

SEQ ID NO: 53707 - DNA, 948 bp, Neisseria meningitidis; identical to SEQ ID NO: 42869

SEQ ID NO: 53708 - DNA, 1113 bp, Neisseria meningitidis
atgagcaccttcttccggcaaaccgcgcaagccatgattgccaaacacatcaaccgtttcccgctattgaagttggaccaagtgattgattggcagccgatcgagcagtacctgaaccgtcaaaaaacccgttacctccgagaccaccgcggccgtcccgcctatcccctgctatccatgttcaaagccgtcctgctcggacaatggcacagcctctccgatcccgaactcgaacacagcctcattacccgcatcgatttcaacctgttttgccgttttgacgaactgagcatccccgattacagcaccttatgccgctaccgcaaccggctggcgcaagacgacaccctgtccgaactgttggaactgattaaccgccaactgaccgaaaaaggcttaaaagtagagaaagcatccgccgccgtcgttgacgccaccattattcagaccgtcggcagcaaacagcgccaggctatagaagtcgatgaggaaggacaaatcaacggccaaaccacaccgagtaaggacagcgatgcccgttggataaagaaaaacggcctctacaaactcggttacaaacaacatacccgtaccgatgcggaaggctatatcgagaaactgcacattacccccgccaatgcccatgagtgcaaacacctgccgcctttgttggaaggactgcccaaaggtacgaccgtctatgccgacaaaggctacgacagtgcggaaaaccggcaacatctggaagaacatcagttgcaggacggcattatgcgcaaagcctgccgcaaccgtccgctgacggaaacgcaaaccaaacgcaaccggtatttgtcgaagacccgttatagtggattaaatttaaatcaggacaaggcgacgaagccgcagacagtacaaatagtacggcaaggcgaggcaacgccgtactggtttaaatttaatccactatatgtggtcgaacagagcttcggtacgctgcaccgtaaattccgctacgctcgggcagcctatttcggactgattaaagtgagtgcgcaaagccatctgaaggcgatgtgtttgaaccttttgaaagcggccaacaggctaagtgcgcccgctgccgcctaa

SEQ ID NO: 53709 - DNA, 876 bp, Neisseria meningitidis; identical to SEQ ID NO: 43812

SEQ ID NO: 53710 - DNA, 483 bp, Neisseria meningitidis; identical to SEQ ID NO: 42793

SEQ ID NO: 53711 - DNA, 798 bp, Neisseria meningitidis; identical to SEQ ID NO: 43358

SEQ ID NO: 53712 - DNA, 867 bp, Neisseria meningitidis; identical to SEQ ID NO: 43238

SEQ ID NO: 53713 - DNA, 1110 bp, Neisseria meningitidis; identical to SEQ ID NO: 43246

SEQ ID NO: 53714 - DNA, 1341 bp, Neisseria meningitidis; identical to SEQ ID NO: 42947

SEQ ID NO: 53715 - DNA, 801 bp, Neisseria meningitidis; identical to SEQ ID NO: 42985

SEQ ID NO: 53716 - DNA, 210 bp, Neisseria meningitidis; identical to SEQ ID NO: 43717

SEQ ID NO: 53717 - DNA, 441 bp, Neisseria meningitidis
atgatgcagactttccgaaaaatcagcctgtatgccgcaaccttgtggctcggtatgcagattatggcgggttatatcgccgcgccggtgctgttcaaaatgctgcccaaaatgcaggcgggcgaaattgccggcgtattgttcgacatcctctcttggagcgggcttgccgtttggggcgcggtactggctgccgcctttgccgccctaacccggcggcaaaccgccctgctgctttttttattgtccgcccttgccgccaaccaatttttggttacccccgttatcgaggcactgaaatacgggcatgaaaattggctgttgtcgtttgtaggcggatccttcggaatgtggcacggtatttccagtattgtttttatggcggccgccctactttcgatttacttaagttggcggctttccggcaaagatgccgtctga

SEQ ID NO: 53718 - DNA, 1518 bp, Neisseria meningitidis; identical to SEQ ID NO: 42254

SEQ ID NO: 53719 - DNA, 498 bp, Neisseria meningitidis; identical to SEQ ID NO: 45274

SEQ ID NO: 53720 - DNA, 1119 bp, Neisseria meningitidis
ttgggcggacgtttccaagcggttgaatacaccaataagaaaaaatcacgcggaacggcagccggagctagcaaggtagaagtgaaggcaaacggaaatattgagcatcaattggcatcgtttacagccgactatcccaattcttgggagaactctgccaacttggatgccaatatcaaagtcaacagcctggctttgtccgacaccttgggcttcgtggataacaaataccgcctgactttgggcggacgtttccaaacagtcgaatataccgacaaaaaatcacagagcggcgatgccaaacgtttcagcccgatgctgatggcggcgtgggtgccgcaacctgatttggttgtgtacggcaactatatggaagacttggagcctgccgacatcaaaaccgatgattccggcgaaacgacaatggcgaaaccgcgtgtcagccgccagtttgaagtgggcgtgcgtaaaaactggggcaatttcgtaaccacgttaaacgcgttccaaatcaaacgcccgggctactggcgcggtcatacaactaccaagacaacaaaaggggtaacaacaacgctgacctatggcaataattctgatttcgcccgctataaggcgcaaggcggcgcggccggcgacgagcaaggtatggaacgcaatcgcggtattgagttcaacacctacgcgaacttgctcaacaatactttgcgtccgactttgggtctgatgtatctgcaatcgaccgtgaaagagtatccaaattcacgcgatatgctggttaacggcgtacaagtcgccaatccgcgcgtaattgccaaagcaggtttggaatgggatacaccgtttgccaaaggcttgactttaaacggtaatgtttcgtatttcggcaagtctgaccaagacacgcaaaaacaatacgccttcccgtcctataccttgattgacgtaggcgcgcgctacaaaaccaagcttggcaaaaacactctgaccgtcagcagctcggtggaaaacctgttcaacaaaaactattggcaggtacagcgcggccaatacgaccgcagcttcgccgtcgtcggtatgccgcgcacttactggctgaaggcggaattggatttctga

SEQ ID NO: 53721 - DNA, 705 bp, Neisseria meningitidis; identical to SEQ ID NO: 42604

SEQ ID NO: 53722 - DNA, 387 bp, Neisseria meningitidis; identical to SEQ ID NO: 43061

SEQ ID NO: 53723 - DNA, 1194 bp, Neisseria meningitidis; identical to SEQ ID NO: 42892

SEQ ID NO: 53724 - DNA, 786 bp, Neisseria meningitidis
atgggttttctgcaaggcaaaaaaattctgattaccggcatgatttccgagcgttccatcgcttacggcatcgccaaagcctgccgcgaacaaggcgcggaactggcgtttacctacgttgtggacaaactggaagagcgcgtccgcaaaatggcggcggaattggattccgaacttgtattccgctgcgatgtcgccagcgacgacgaaatcaaccaagtgttcgccgacttgggcaaacattgggacggcttggacggtttggtgcattccatcggttttgcgccgaaagaagccttgagcggcgacttcctcgacagcatcagccgcgaagcgttcaacaccgcacacgaaatttccgcatacagcctgcccgcgttggcaaaagccgcccgtccgatgatgcgcggcagaaattccgccatcgtcgccctgagctacttgggcgcggtgcgcgcgattccgaattacaacgtgatgggtatggcaaaagccagccttgaggcaggcatccgctttaccgctgcctgtctgggtaaagagggcatccgctgcaacggtatttccgccggcccgattaaaacgcttgccgcctccggcatcgccgatttcggcaaactcttgggacacgtcgccgcccacaacccgctccgccgcaacgttaccattgaagaagtcggcaataccgccgccttcctgctgtccgacctgtcgtccggcattaccggcgaaatcacttacgttgacggcggttacagcattaatgccttgagcaccgagggataa

SEQ ID NO: 53725 - DNA, 918 bp, Neisseria meningitidis; identical to SEQ ID NO: 37376

SEQ ID NO: 53726 - DNA, 1515 bp, Neisseria meningitidis
atgactacctccaaatgccctgtaacccatctgaccatgaacaacggcgcgcctgttgccgacaatcaaaacagcctgaccgccggtcctcgcggccctctgctggcgcaggatttgtggctgaatgaaaaactcgccgacttcgtgcgcgaagtcatccccgaacgccgtatgcacgccaaaggttcgggcgcgttcggtacgtttaccgtaacgcacgacatcaccaaatacacccgcgccaaaatcttcagcgaagtcggcaaaaaaaccgagatgttcgcccgtttcaccaccgtggcaggcgaacgcggcgcagccgatgcagaacgcgacatccgcggttttgccttgaaattttataccgaagaaggcaactgggatgtggtcggcaacaacacgcccgtgttcttcctgcgcgacccgcgtaagttccccgacctgaacaaagccgtcaaacgcgacccgcgcaccaatatgcgctctgccacaaacaactgggacttctggacgctgctgcccgaagcactgcaccaagttaccatcgtgatgagcgaccgcggcatccccgccggctaccgccatatgcacggcttcggttcgcatacctacagcttctggaacgaagcaggcgagcgtttttgggtgaaattccatttccgcacccaacaaggcattaaaaacctgaccaacgaagaagccgccaaaatcatcgccgacgaccgcgaaagccatcagcgcgacttatacgaagccatcgaacgcggcgagtttccgaaatggacgatgtacatccaagtcatgcctgaagcagacgcggaaaaagtaccttatcatccgtttgacttgaccaaagtttggccgaaaaaagactatccgctgattgaagtgggcgaattcgagttgaaccgcaatcccgaaaacttcttcgccgatgtggaacaatccgccttcgcaccgagcaacctcgttcccggtgtcggcgccagcccagataaaatgctgcaagcgcgtttgttcaattacgccgacgcacaacgctaccgtttgggcgtaaacttccgccaaattcccgtcaatcgtccgcgttgccctgttcacagcaaccagcgcgacgggcaaggccgcgccgacggcaactacggcagcctgccgcactacgaacccaacagcttcggccaatggcagcaacaacccgacttcgccgaaccgcctttgaaaatcaacggcgacgcggcacactgggactaccgccaagacgatgacgactatttcagccaaccgcgcgccctgttcaacctgatgaacgacgcgcagaaacaggcattgttcggcaacaccgccgccgcaatgggcgacgcgcccgacttcatcaaataccgccatatccgcaactgctaccgttgcgacccggcatacggcgaaggcgtggccaaagcccttggactgactgtcgaagatgcccaagccgcccgcgcgaccgatcccgcactgggtcaggctggtttgctgtaa

SEQ ID NO: 53727 - DNA, 1170 bp, Neisseria meningitidis
atgagcaaaaaactccatccgcaaacgctcgccatacgcggcggcaaagaacaaaccgaataccgcgaacacaatcaggcattgtttctgaccagcagcttcatgtgggacaacgcccaacacgctgccgatttgttttcaaaaaaaatcaaagggttcacttatacccgtaccgccaacccgaccacagccgcctttgaaaaacgcatcgccgctttggaaggtgcggaacgcgcggtcgccacttcggcgggtatgtctgcgattcaggcggcgtttttcacctttttgcaggcgggcgaccatgtgatttccagccgcagcctgttcggcacgaccgtcggctttatcaataacatcgttgccaaattcggcatcgaagtgagccacgtgtcgccgactgatataaacgaatggaaagccgccgtcaaagccaataccaaactgctgtttttggaaacgccgtccaaccccttaggcgaagtggccgacttggaagccttggcggaattggcgcacggcatcggcgcgctcttggtggtggacaacagcctgctgtcgcccgtcggctcgcagcctttgaaacacggtgcggatatttccgtttcctccgcgaccaaagccatagacggacacgggcgtgtgatgggcggcgtgttggcgggttcggaagagttgttggcgcaggtcgccatgtattgcaactcttgcgggctggcgatgtcgccgtttaatgcgtggcagttgttgagcggcgtggaaaccctgtcgctgcgtatggaaaaacagttcgacaacgccctgaaaatcgcacaatggctgcaagcgcagccgcaggttcaagccgtgtactacaccggattgtccgaccatcctcaggcggcgcttatccgcaaacagcaaaacggcggcggcatcgtcatcggctttgaagttgccgatcaagaagcggcgtggaaagttgtggacggcgtggaactcttttcccgcaccgccaacctcggtgacgtgcgctcgaccattacccacccgtggacaaccacgcacggcaggatgcagcccgaagaaaaactcgccgccaacatccgccccggattggtgcgcctgtcggtcggtttggaatatgttggcgatttgattgacgatttgaaacaggcactcgcacgctga

SEQ ID NO: 53728 - DNA, 1293 bp, Neisseria meningitidis; identical to SEQ ID NO: 43149

SEQ ID NO: 53729 - DNA, 1170 bp, Neisseria meningitidis; identical to SEQ ID NO: 42962

SEQ ID NO: 53730 - DNA, 966 bp, Neisseria meningitidis
atgagctacacgcaactgacccagggcgaacgataccacatccaatacctgtcccgccactgcaccgtcaccgaaatcgccaaacagctgaaccgccacaaaagcaccatcagccgcgaaatcagacggcaccgcacccaagggcagcaatacagcgccgaaaaagcccagcggcaaagccggactatcaaacagcgtaagcgacaaccctataagctcgattcgcagctgattcagcacatcgacccctttatccgccgcaaactcagtcccgaacaagtatgcgcctacctgtgcaaacaccaccagatcacgctccaccacagcaccatttaccgctaccttcgccaagacaaaagcaacggcagcacgttgtggcaacatctcagaatatgcagcaaaccctaccgcaaacgctacggcagcacatggaccagaggcaaagtacccaaccgtgtcggcatagaaaaccgacccgctatcgtcgaccagaaatcccgtatcggcgattgggaagccgacaccattgtcggcaaaggacagaaaagcgcattattgaccttggtcgaacgcgttacccgctacaccatcatctgcaaattggatagcctcaaagccgaagacactgcccgggcagctgttagggcattaaaggcacataaagacagggtgcacaccattaccatggataacggcaaagagttctaccaacacaccaaaataaccaaagcattgaaagcggagacttatttttgtcgtccttaccattcttgggagaaagggctgaatgagaacaccaacggactcatccggcaatacttccccaaacaaaccgatttccgtaacatcagtgatcgggagatacgcagggttcaagatgagttgaaccaccgaccaagaaaaacacttggctacgaaacgccaagtgttttattcttgaatctgttccaaccactggtaccttag

SEQ ID NO: 53731 - DNA, 1458 bp, Neisseria meningitidis; identical to SEQ ID NO: 42380

SEQ ID NO: 53732 - DNA, 249 bp, Neisseria meningitidis; identical to SEQ ID NO: 39195

SEQ ID NO: 53733 - DNA, 255 bp, Neisseria meningitidis; identical to SEQ ID NO: 43080

SEQ ID NO: 53734 - DNA, 1467 bp, Neisseria meningitidis; identical to SEQ ID NO: 43542

SEQ ID NO: 53735 - DNA, 552 bp, Neisseria meningitidis; identical to SEQ ID NO: 43927

SEQ ID NO: 53736 - DNA, 468 bp, Neisseria meningitidis
atggcacaaacgcgacgcgaagccaaagcagaaatcatacctttccaagcacctaccctgccggttgcgccggtatacagcccgccgcagcttacagggccgaacgcattcgacttccgccgcatggaaaccgacaaaaaaggggaaaatgcccccgacaccaagcgtattaaagaaacgctggaaaaattcagtttggaaaatatgcgttatgtcggcattttgaagtccggacagaaagtctccggcttcatcgaggctgaaggttatgtctacactgtcggtgtcggcaactatttgggacaaaactacggtagaatcgaaagcattaccgacgacagcatcgtcctgaacgagctaatagaagacagcacgggcaactgggtttcccgtaaagcagaactgctgttgaattcttccgacaaaaacaccgaacaagcggcagcacctgccgcagaacaaaattaa

SEQ ID NO: 53737 - DNA, 966 bp, Neisseria meningitidis; identical to SEQ ID NO: 42327

SEQ ID NO: 53738 - DNA, 477 bp, Neisseria meningitidis
atggaacacctatttgggaaatggctgcccgacttgcccacccccatttcagacggcatcagcctgccgatggtgcggctgctgcacacccggtcgctgaccgccgcattgcgcgccttgccgcatacattttcggtggaactgctgaaactgggcgaattggagacggaatgcggagggaggctggtgcgcgaagttttgttgaagctggacggtatccctgttgtcgcggcaaggagcgagtgccgtatcggttcggcgttttggcaaaacattttggactgcggcacgcgtcctttgggcgagcgtctgtttcaagccgatttggaaggggcgcgttcggcgtttgagtttgccgtttccggcgaaggatgcggacggtactttgccgcgcggcgttctcggttttcccgtcacggcgaggaaatgctgctgaccgagtattttctgcccgaactgaaacgctttatcggataa

SEQ ID NO: 53739 - DNA, 1977 bp, Neisseria meningitidis; identical to SEQ ID NO: 42799

SEQ ID NO: 53740 - DNA, 1167 bp, Neisseria meningitidis; identical to SEQ ID NO: 43763

SEQ ID NO: 53741 - DNA, 858 bp, Neisseria meningitidis
atgaattacgccctagacgcattatggtggaaacttaccagccaacccgtccgcgaccttgcctcgctgctgactgcgccgcctttgtggcaaagcggctgcgaattgagcgtgcgagaactactgggagaacacggtttccgttaccttttggcattggatgccgatcccacgcggctgacggattacctcgcccaacgcgccccgttcggccaccgtctcggcatttatgccgaagagctgctggctttttggtttgccaatgcaccgcacgccgaactgctcgcgcacaacctcacggtttccggttcggacggcaatacgcaaggcgcggcggattttgtggcaaggcttaacggcaaaccctaccatatcgagctgacctgcaaatattacggcggcgacacggacagtcccgaagggatgcgcggattcgaccccaaagacacgctgttgggaaaagccgccaaactgaccgcccaactcggtctgccgcacacttcagacggcatccggaccttgcggcagcacggtttgccgcttaacgtaaaacccgtttccatcgtgcgcggcatcggattttttccacacggtttccatgcttttgagccaccgcttaatccatacggttggcgcggcatctatattcaagattgggcggaatacgggtttaaacgccaagaagtccgctaccatctgctcgaccgtatggcctacctcgcgcctgcgcgtgtcgccgaaaccgaaacattgaacgcaaccgaaatccgccgtatcgaccaaggcttgattgccgttttggaatgtcggccggacggcttttggcacgaaatcgaacgcattatgaaggccgtctga

SEQ ID NO: 53742 - DNA, 951 bp, Neisseria meningitidis; identical to SEQ ID NO: 42789

SEQ ID NO: 53743 - DNA, 516 bp, Neisseria meningitidis; identical to SEQ ID NO: 42639

SEQ ID NO: 53744 - DNA, 516 bp, Neisseria meningitidis; identical to SEQ ID NO: 43362

SEQ ID NO: 53745 - DNA, 1329 bp, Neisseria meningitidis; identical to SEQ ID NO: 42671

SEQ ID NO: 53746 - DNA, 1050 bp, Neisseria meningitidis; identical to SEQ ID NO: 42725

SEQ ID NO: 53747 - DNA, 939 bp, Neisseria meningitidis; identical to SEQ ID NO: 43137

SEQ ID NO: 53748 - DNA, 825 bp, Neisseria meningitidis; identical to SEQ ID NO: 43571

SEQ ID NO: 53749 - DNA, 324 bp, Neisseria meningitidis
atggacaactgtattttctgcaaaatcgccgccaaagacattccggcgcaaaccgtctatgaagacggcgaaatggtttgtttcaaagacatcaaccccgctgctccggttcatctgctgctgattcccaaagtccatttcgattcgttggcacacgccgcgcccgaacatcagatgctgctgggcaaaatgatgttgaaagttcccgaaatcgccaaagcggcaggactggcagacggcttcaaaaccctgatcaataccggaaaaggcggcggacaagaggtcttccacctgcatatacacatcatgggtacacccgtataa

SEQ ID NO: 53750 - DNA, 1287 bp, Neisseria meningitidis
atgatttacatcgtactgtttctagctgtcgtcctcgccgttgtcgcctacaacatgtatcaggaaaaccaataccgcaaaaaagtgcgcgaccagttcggacactccgacaaagatgccctgctcaacagcaaaaccagccatgtccgcgacggcaaaccgtccggcgggtcagtcatgatgccgaaaccccaaccggcggtcaaaaaaacggcaaaaccccaagaccccgccatgcgcaacctgcaagaacaggatgccgtctacatcgccaagcagaaacaggcaaaagcctccccgttcaaaaccgaaatcgaaaccgccttggaagaaagcggcattatcggcaactccgcccacaccgtttccgaaccccaaaccggacattccgcaccgaaacctgccgacgcgccggcaaaacctgcacccgttccgcaaacacctgcaaaaccgctgattacgctcaaagaactgtcaaaagtcgaattaccctggtttgacgtgcgcttcgacttcatctcctatatcgcgctgaccgaagccaaagaactgcacgcactgccgcgcctttccaaccgctgccgctaccagattgtcggctgcaccatggacgaccatttccagattgccgaacccatcccgggcatccgctatcaggcatttatcgtgggtattcaggcagtcagccgcaacggacttgcctcgcaggaagaactctccgcattcaaccgccaggtggacgcattcgcacaaagcatgggcggtcagacgctgcacaccgaccttgccgcctttatcgaagtggcttccgcactggacgcattctgcgcgcgcgtcgaccagaccatcgccatccatttggtttccccgaccagcatcagcggcgtagaactgcgttccgccgtaacgggcgtgggtttcgttttggaagacgacggcgcgttccactataccgacacgtcgggctcgaccatgttctccatctgctcgctcaacaacgagccgtttaccaacgcccttttggacaaccagtcctacaaaggcttcagtatgctgctcgacatcccgcactctccggcaggcgaaaaaaccttcgacgatttgtttatggatttggcggtacgcctgtccggccagttgaacctgaatctggtcaacgacaaaatggaagaagtttcgacccaatggctcaaagacgtgcgcacttatgtattggcgcgtcagtccgagatgctcaaagtcggtatcgaaccgggcggcaaaaccgcattgcgcctgttctcctaa

SEQ ID NO: 53751 - DNA, 324 bp, Neisseria meningitidis; identical to SEQ ID NO: 43376

SEQ ID NO: 53752 - DNA, 285 bp, Neisseria meningitidis; identical to SEQ ID NO: 42876

SEQ ID NO: 53753 - DNA, 1050 bp, Neisseria meningitidis; identical to SEQ ID NO: 38313

SEQ ID NO: 53754 - DNA, 2007 bp, Neisseria meningitidis
atggctgatatgaagaaaattacccctcaaaacctgcgccccctgctttcggaaagcttgggacataccgattttgtcaacgtcctcaacgcactgattaaatttttgcgccgtggcggcaaaaaatgtgcgggggaacgtttcgacctgattatcgacacattcaaacaagacagggaattactgtcccgcttcagccggtgtttttacatttggctcgcgcaaatacacatttatccggcactcatcaaactcggcatcttctcgcgccacagctttgcccgggaaatgggcatacgcatctacgaacgcttcagcccgtcatataaagattttgccaacttgggcgaagtcttcctttatcttttccattccgaaaacgacgacaaatggctgcaaacgctcaatatccgccaatggctggttttatacgaactcatccggagccacgccgagccgtccaaattgcagacggcgggcatccgccttgccgatgcgcgtttgcgcgccatcgaaatgctgtctgtctggacggcatccgaagccatcgaacccgacctcatccgcatcgccccgcgcctgctggaagccgattcttccttcgtcgccctccaacgcgaaaccgccaaactggtcgaacactaccgcaacggcaccacgccttacgacaccgcccacctcgaagtgatgttcgaccaatgtttcagccagattgactatttgcgccgcaaagggacgggcgccggctccggttcgtcggtcaaagtcgcccacctgctcgaacggctccggcagaccgtagaccgtctgaagctgctcaccgacatccaaaccggcgccggcaacagcaaccgcctgaccatcgcgctgatgaactccctcatctacgcggcggtcgaacaatacagcacccgccacctgcgccgcagcagcatccgtatgctcgcccgcagcattaccgaaaacaaaagccaccacggcgaacactacatcacccgcaaccgcaaagaatatttcaaaatgttctactcggcggcaggcggcggcatcatcatcgccctaatggcgctgctcaaaatccgcatcggctcactcggcctcagccccttcctcacttccttgtcggctgggttcaactacggcatcggctttatgatcatccatatgctgcactgcaccgtcgccaccaagcagcccgcgatgactgccgccagctttgccgaacaggtcgatctcaacgaaggcggcaaagcggtggacaacaaactcgccaagctcctcatcgacgtatgccgctcccaaagtgtcgccgtcttcggcaacgtttccatcgccatccttttggcgtgcgccatatcgttcggctatgcccatctgtaccggctgcccatactcgatgcccacaccgccgcctaccagttcaaatccatagacatcatcgcttacccgacgctgtggtatgccgccattgcaggtctgtggctgttctgctccggcatcatcgcaggttttttcgacaaccgcgccgactacctcaacctgcgccaacgcctgcccttcaaccccttgctgcgtaaaatcatgcgccccgggccccgccgcgtcctcgccgcctacatccacaaacactacggctcgctggtcggcaacttcatcttcgggatgctcttgggtatgaccggctatttcggacacctcctcgggctgccgctggacatccgccacgtcgccttttcctccgccaacctcggctatgccgccgtcagcggcaacgtcggtttgggcacgttcgtactcggcattttcagcgtcctcgccatcggcctggtcaacctctgcgtcagcttcagcctcgccctcttcgtcgccctgcgctcgcgcggcacgaaaatcggcagcatccgcaatctgattaaaagtttttggaatcagattaaaagcaatccctgcatacttttcctcccgcccgccaaagaacagggacatcctccttcggacaagccttga

SEQ ID NO: 53755 - DNA, 891 bp, Neisseria meningitidis
atgaatcctaaatcccctttatttttacgactgtccgaccgtttggatgtgtacctgcgcctgatgcgggcggacaagcccattggggcgctgcttttgctgtggccgacctactgggcattgtggctggcttcagacggcattcccgatttggcggtattggcggcgtttacaatcggtacgtttttaatgcgcagtgccggttgcgtcatcaacgattttgccgaccgcgattttgacggtgctgtcgagcgtaccaaaaaccgtccgttcgcacagggcagggtcaagaaaaaagaagcgctgctgctgacggcatttttgtgcctgcttgccgcattgtgcctgattccgctgaatcatctgacttggctgatgagcctgcccgcgctgtttcttgcgctgacttacccgtttaccaaacgtttttttccgattccccaactctatctcgggcttgccttttccttcggtatcccgatggcgtttgccgccgttgccggaaacgtgctgcctcaagcgtggatactctttgccgccaatgtgttatggactctggcgtatgacacggtttatgcaatggcggacaaagaagacgatttgaaaatcggcatcaaaacctccgccgtcacgttcgggcgttacgacatcgccgccgttatgctgtgtcatggcggctttaccctgctgatggcagtattgggtgcggttatcggtgcggcatgggcatattggacggcaatccccatcgtcctgctgctgcaataccgccaatatgccgccatcaaaagccgcgtccggcaaatctgttttgaaacgtttttggcaaacaacagaattggttgggtgtggtttaccgccatttttgcccatacgtttttcgcgaaataa

SEQ ID NO: 53756 - DNA, 687 bp, Neisseria meningitidis
atgtttgatttcggtttgggcgagctggtttttgtcggcattatcgccctgattgtcctcggccccgaacgcctgcccgaggccgcccgcaccgccggacggctcatcggcaggctgcaacgctttgtcggcagcgtcaaacaggaatttgacactcaaatcgaactggaagaactgaggaaggcaaagcaggaatttgaagctgccgccgctcaggttcgagacagcctcaaagaaaccggtacggatatggaaggcaatctgcacgacatttccgacggtctgaagccttgggaaaaactgcccgaacagcggacacctgccgatttcggtgtcgatgaaaacggcaatccgcttcccgatgcggcaaacaccctatcagacggcatttccgacgttatgccgtccgaacgttcctacgcttccgccgaaacccttggggacagcgggcaaaccggcagtacagccgaacccgcggaaaccgaccaagaccgcgcatggcgggaatacctgactgcttctgccgccgcacccgtcgtacagaccgtcgaagtcagctatatcgatactgctgttgaaacgcctgttccgcacaccacttccctgcgcaaacaggcaataagccgcaaacgcgattttcgtccgaaacaccgcgccaaacctaaattgcgcgtccgtaaatcataa

SEQ ID NO: 53757 - DNA, 231 bp, Neisseria meningitidis; identical to SEQ ID NO: 42542

SEQ ID NO: 53758 - DNA, 1497 bp, Neisseria meningitidis; identical to SEQ ID NO: 42847

SEQ ID NO: 53759 - DNA, 963 bp, Neisseria meningitidis
atgcccagtatctctgtccgccggctgtttgacgacaaccaatacaaactgcaacttgcctgggccgccggcaattcgggtgcggacaaccgtatcggcgtagaggcggacaagcccgtcctcgccttggtcggacacctgaatttcatccaccccaaccaaatccaagtggtcggtttggcggagtcggaatatctgaaccgtctcgaatcgggggaaacgggttatcagttcggagacctgttcgacatttctatgtctttggtcattgtggcaaacggcttgccggtttccccgggtctgcgcgactattgccataaaaacgatattccactgctgacttccaaactcgaaagcccctatctgatggatgtgttgcggatttacctgcaacgcaccctggcggcatcgtccgtcaaacacggcgtatttctcgatgtgtttgaaatcggcgtgctgattaccggacattcgggtttgggtaagagcgaattggcattggaactgatttcgcgcggccacagcctgattgccgacgatgcggtcgagctgttccgcatcggcccggaaacattggaaggacgttgttcgcctatgctgcgcgattttttggaagtacgcggcttggggatactcaatatccgccatattttcggcgaaacttccatccgccccaaaaaaatcctgcaactcattatcaatttggtcgaggcggacgacgagtatatgaagcagcttgaccggttgagcatccgcaccgaaaccgaatccatcctcaacgtcaacgtccgttcggttacgctgcccgtcgccgtcggacgcaacctcgccgttttggttgaggcggcggtacgcaattatattcttcagttgcgcggtaaggatagtacgcgcgaatttttggaacgtcatcagacgcagcttaaagaaaacgagcaacacaatgaaaatcgtcctgattag

SEQ ID NO: 53760 - DNA, 2631 bp, Neisseria meningitidis; identical to SEQ ID NO: 42990

SEQ ID NO: 53761 - DNA, 774 bp, Neisseria meningitidis
atgagaccatatgctactaccatttatcaactttttattttgtttattgggagtgtttttactatgacctcatgtgaacctgttaatgaacaaaccagtttcaacaatcccgagccaatgacaggatttgaacatacggttacatttgattttcagggcaccaaaatggttatcccctatggctatcttgcacggtatacgcaagacaatgccacaaaatggctttccgacacgccagggcaggatgcttactccattaatttgatagagattagcgtctattacaaaaaaaccgaccaaggctgggtgctcgaaccatacaaccagcagaacaaagcacactttattcaatttctacgcgatggtttggatagcgtggacgatattgttatccgaaaagatgcgtgtagtttaagcacgactatgggagaaagattgcttacttacggggttaaaaaaatgccatctgcctatcctgaatacgaggcttatgaagataaaagacatattcctgaaaatccatattttcatgaattttactatattaaaaaaggagaaaatccggcgattattactcattggaataatcgagtaaaccaggctgaagaagataattatagcactagcgtaggttcctgtattaacggtttcacggtacagtattacccgtttattcgggaaaagcagcagctcacacagcaggagttggtaggttatcaccaacaagtagagcaattggtacagagttttgtaaacaattcaagtaaaaaataa

SEQ ID NO: 53762 - DNA, 225 bp, Neisseria meningitidis; identical to SEQ ID NO: 36979

SEQ ID NO: 53763 - DNA, 144 bp, Neisseria meningitidis; identical to SEQ ID NO: 43244

SEQ ID NO: 53764 - DNA, 918 bp, Neisseria meningitidis; identical to SEQ ID NO: 42983

SEQ ID NO: 53765 - DNA, 216 bp, Neisseria meningitidis
ttggatgcgggcgaatttagccatttccgtatcaatcacagcacacattttgccgaacgacaaaaccatattaatggaactgagaacttttggaatcaagcaaaacgtcatttacgcaagtttaacggcattcccaaagcgcattttgagctgtatttaaaggagtgcgaatggcgttttaacaacagtgaaataaaagttcttgttccattttaa

SEQ ID NO: 53766 - DNA, 324 bp, Neisseria meningitidis; identical to SEQ ID NO: 43549

SEQ ID NO: 53767 - DNA, 747 bp, Neisseria meningitidis; identical to SEQ ID NO: 43385

SEQ ID NO: 53768 - DNA, 825 bp, Neisseria meningitidis
atgaactgcaatacgccgaccgatattatgttttcctttgaaggcttccgccgcaggggcggcattaccgaccaccatgccgacggtttcggtatcggctttttcgaaggcaaaggcgtgcgcctgttccacgacgacaagccgagcgcaaattcccccgtcgccgacctcgtgcgtgcctaccaaatcaaatcggaaaacgtcatcgcacatatccgcaaagcatcgcaaggacaaacctcgctggcgaacacccatccctttatgcgtgaaatgtggggcggctactggctgtttgcccacaacggacatttgattgattttttccccgaacagggcgaatttttccaccccgtcggcacaaccgattccgaacgcgcgttctgccacatcctcaaccgcctgcgcacccgctttgccgcccgtcccgacgacgacacgctgtttgacgcgattgcggggctgacgcacgaaatccgcaagttcgggctgtttaactttatgctttcagacggcattgccctgtttgcccacgccagcacgctgctgcactacatcgtccgccaagccccgttcggcaaggcgcgcctgctcgacgacgacgtgatggtcgattttgccgaagtaaccacgccctccgaccgcgtcgccgttatcgccaccctgccactgacccgcgacgaatcatggtcccaacttgccgtggacgaactggtcatgttccgcgaaggcaacatcgtccgacacgaccgtcccgaaaaccccgtctatatgagtgccgaagaaggtctggaaatcgcccgcgccgccggcgtcgccgtctga

SEQ ID NO: 53769 - DNA, 1485 bp, Neisseria meningitidis; identical to SEQ ID NO: 43257

SEQ ID NO: 53770 - DNA, 405 bp, Neisseria meningitidis; identical to SEQ ID NO: 42247

SEQ ID NO: 53771 - DNA, 702 bp, Neisseria meningitidis; identical to SEQ ID NO: 43494

SEQ ID NO: 53772 - DNA, 966 bp, Neisseria meningitidis
atgagccacacgcaactgacccaaggcgaacgataccacatccaatacctgtcccgccactgcaccgtcaccgaaatcgccaaacagcttaaccgccacaaaagcaccatcagccgcgaaatcagacggcaccgcacccaagggcagcaatacagcgccgaaaaagcccagcggcaaagccagactatcaaacagcgtaagcgacaaccctataagctcgattcgcagctgattcagcacatcgacacccttatccgccgcaaactcagtcccgaacaagtatgcgcctacctgtgcaaacaccaccagatcacgctccaccacagcaccatttaccgctaccttcgccaagacaaaagcaacggcagcacgttgtggcaacatctcagaatatgcagcaaaccctaccgcaaacgctacggcagcacatggaccagaggcaaagtacccaaccgtgtcggcatagaaaaccgacccgctatcgtcgaccagaaatcccgtatcggcgattgggaagccgacaccattgtcggcaaaggacagaaaagcgcattattgaccttggtcgaacgcgttacccgctacaccatcatctgcaaattggatagcctcaaagccgaagacactgcccgggcagctgttagggcattaaaggcacataaagacagggtgcacaccattaccatggataacggcaaagagttctaccaacacaccaaaataaccaaagcattgaaagcggagacttatttttgtcgtccttaccattcttgggagaaagggctgaatgagaacaccaacggactcatccggcaatacttccccaaacaaaccgatttccgtaacatcagtgatcgggagatacgcagggttcaagatgagttgaaccaccgaccaagaaaaacacttggctacgaaacgccaagtgttttattcttgaatctgttccaaccactaatacactag

SEQ ID NO: 53773 - DNA, 702 bp, Neisseria meningitidis; identical to SEQ ID NO: 43639

SEQ ID NO: 53774 - DNA, 837 bp, Neisseria meningitidis; identical to SEQ ID NO: 43101

SEQ ID NO: 53775 - DNA, 1179 bp, Neisseria meningitidis
atgacaggcagaacaggccgcaacggcagtacccaagcgcaacccgaacgcgtcatgctggtgggcgtaatgttggacaaagatggcacgggcagcagtgccacccgtctgaacggttttcagacggcattggcggaagctgtcgagctggtcaaagcggcgggcggcgattccgtgcgcgtggagactgccaaacgcgaccgtccgcacaccgcgctgtttgtcggcacgggcaaggcggcggagctgtcagaagcagttgccgcagacggcatcgatttggtcgtattcaaccacgaactcacgcccacgcaggaacgcaaccttgaaaaagaactgaaatgccgcgtattggacagggtagggctgattctggcgattttcgcccgccgcgcccgcacgcaggaaggcaggctgcaagtcgagttggcgcaattgagccatttggcgggacgcttgatacgcggttacggccatctgcagagccagcgcggtggtatcggcatgaaagggccgggcgaaaccaaactggaaaccgaccgccgattgatcgcccatcgaatcaacgccttgaaaaaacagcttgccaacctcaaaaaacagcgcgccctgcgccgcaagtcccgcgaatcgggcacaatcaaaacgtttgcgctggtcggctataccaatgtcggcaaatccagcctgttcaaccggctgaccaagtcgggcatatatgcgaaagaccagcttttcgccacactcgacacgacggcgcggcggctgtacatcagtcccgaatgcagcattatcctgaccgataccgtcggattcgtcagcgatctgccgcacaaactgatttccgccttttccgccacgctggaagaaaccgcgcaagccgatgtgctgctgcacgtcgtcgatgccgccgctccgaacagcggacagcagattgaagacgtggaaaacgtactgcaagaaatccatgccggcgatattccgtgcatcaaggtgtacaacaaaaccgacctgctgccgtctgaagaacaaaacacgggcatatggcgcgacgctgcgggaaaaattgccgccgtccgcatttccgttgctgaaaataccggtatagacgcactgcgcgaagccattgccgagtcttgtgccgccgcaccaaacacagacgaaaccgaaatgccatga

SEQ ID NO: 53776 - DNA, 1425 bp, Neisseria meningitidis; identical to SEQ ID NO: 42173

SEQ ID NO: 53777 - DNA, 2751 bp, Neisseria meningitidis; identical to SEQ ID NO: 43382

SEQ ID NO: 53778 - DNA, 1821 bp, Neisseria meningitidis; identical to SEQ ID NO: 42083

SEQ ID NO: 53779 - DNA, 1410 bp, Neisseria meningitidis; identical to SEQ ID NO: 43361

SEQ ID NO: 53780 - DNA, 204 bp, Neisseria meningitidis; identical to SEQ ID NO: 43658

SEQ ID NO: 53781 - DNA, 651 bp, Neisseria meningitidis
atggcacaatacattttcggtgcgcgcaacaaaatccatatcgtcaacctggaaaaaaccctgccgatgttccaagacgcgcaagaagccgtacgtcgtctggttgccaacaaaggtacagtattgttcgtaggtaccaaacgccaagcccgcgacatcatccgcgaagaagcgacccgcgccggtatgcctttcgtcgattaccgctggttgggcggtatgctgaccaactacaaaaccgttaagcaatccatcaaacgcctggaagaaaaaaccgcagccttggaaaatgctgccgaaagcggtttcagcaaaaaagaaattctggaaatgcaacgcgatgttgaaaaactggaacgttctttgggcggtatcaaaaacatgaaaggcctgcctgacgcgattttcgttatcgataccggctaccaaaaaggtactctggttgaagctgaaaaattgggcatccctgttatcgccgtagtcgataccaacaacagccccgacggcgtgaaatacgttatccccggcaacgacgactccgccaaagccatccgcctgtactgccgcggcatcgctgacgcagttttggaaggcaaaaaccaagcgctgcaagaaaccgtagccgctgcccaagaagccgctgccgagtaa

SEQ ID NO: 53782 - DNA, 846 bp, Neisseria meningitidis; identical to SEQ ID NO: 43002

SEQ ID NO: 53783 - DNA, 459 bp, Neisseria meningitidis
atgaaaacccaaatcagccttgctgctgccgccatcacactgctcctttccgcctgcggaggcagcggaataccttcccaacccaaaggcgaaatttccgaaaaccgcaccgccgcgttcaaatccatgatgcccgaattcacacgcatgggcaaaatggtcaaagacgaagaaccttacgatgtcgaaaaattcaaacaggcggcagcgtcgtttgccgaaagcagcaagaaaccgttcacactttttgagtccgatccgcaaggcaacggccgcgcactgcccgccgtttggtcggatggtgcaaaatttgaagccgaaaaaacaaaattcgccgccgccgtcgaaaaactcaacgccgccgcccaaaccggcaaactggacgaaatcaaagccgcctacggcgaaaccggcgcaagctgcaaatcctgccacgacagtttccgcgcgcccgaataa

SEQ ID NO: 53784 - DNA, 339 bp, Neisseria meningitidis; identical to SEQ ID NO: 39659

SEQ ID NO: 53785 - DNA, 1581 bp, Neisseria meningitidis
atgtcttccatcaaacgcgccctgatcagcctatccgacaagacaggcgcagtcgaatttgcccaaaccctgcacaaactcggtgtcgaaattctttctaccggcggtacagcaaaactcttggctgatgcaggcgttcccgttatcgaagttgccgactataccggttttcccgaaatgctcgacggccgcgtgaaaaccctgcatccgaaaatccacggcggtattctcggtcgtcgcgatttggacgaacacgtcgccaagatggaagaacacggcatcggcaatatcgacctcgtgtgcgtcaacctctaccccttcgctgccaccatcgccaaaccaaactgcacgctggaagacgcgattgaaaacatcgacatcggcggcccgaccatggtgcgctctgccgcgaaaaactggaaacacgtcgccatcgttaccgacaccgccgatttcccggccatagctgccgaactcgaagccaacaacggcgcattgagcgacaaaacccgtttcaacctctcgcgcaaagcattcagccataccgcccaatacgacggtatgatttccaattacctgacctcgctttcagacgacgtcttgagcggcacgcccgaaatcgccggattccccggccggttcaatcaaagctggattaaagtgcaagacatgcgctacggcgaaaacccgcatcagcgcgccgcgttctaccgcgatattgaccccgccgcaggcagcctcgctgcatacaaacaactgcaaggcaaagaattgtcttacaacaacatcgccgatgccgatgccgcatgggaagccgtcaaatccttcgacgtgcccgcctgcgtgattgtgaaacacgccaatccgtgcggcgtagccatcgcctccaataccttggatgcctacaaactcgcctacgccaccgacaccaccagcgcgttcggcggcatcatcgctttcaaccgcgaagttgacggcgcaaccgtcaaacaaattaccgacaaccagtttatggaagtcctcatggcgcctaagttcaccgccgaagccctcgaaatcgccgccgccaagaaaaacgtgcgcgtattggaagtgccgcttgaggcaggcgcaaaccgcttcgaactcaaacgcgtcggcggcggactgttggtgcaaacgcccgacatccaccgcatcagccgcgccgatttgaaagtcgtctccaaacgccaaccgaccgagcaggaatggaacgatttgctgttcgtctggaacgtcgccaaatacgtcaaatccaacgccatcgtattcggcaaaggcggtcaaacctacggcatcggcgcaggccaaatgagccgcgtggacagcacccgcatcgccgcccgcaaagcgcaagatgccggtctcgacctcaacggcgcgtgtgccgcatccgatgccttcttccccttccgcgacggcgtggacgtgattgccgaacagggcatcaaagccatcatccatccggcaggctcgatgcgcgatcaggaagttttcgacgcagccgacgaacacggcatcgccatggtcgtaaccggcatccgccatttccgccattga

SEQ ID NO: 53786 - DNA, 168 bp, Neisseria meningitidis; identical to SEQ ID NO: 43416

SEQ ID NO: 53787 - DNA, 1011 bp, Neisseria meningitidis; identical to SEQ ID NO: 42825

SEQ ID NO: 53788 - DNA, 633 bp, Neisseria meningitidis; identical to SEQ ID NO: 42533

SEQ ID NO: 53789 - DNA, 1011 bp, Neisseria meningitidis; identical to SEQ ID NO: 42906

SEQ ID NO: 53790 - DNA, 1101 bp, Neisseria meningitidis; identical to SEQ ID NO: 42527

SEQ ID NO: 53791 - DNA, 165 bp, Neisseria meningitidis; identical to SEQ ID NO: 42784

SEQ ID NO: 53792 - DNA, 504 bp, Neisseria meningitidis; identical to SEQ ID NO: 42700

SEQ ID NO: 53793 - DNA, 735 bp, Neisseria meningitidis; identical to SEQ ID NO: 43353

SEQ ID NO: 53794 - DNA, 1194 bp, Neisseria meningitidis; identical to SEQ ID NO: 42130

SEQ ID NO: 53795 - DNA, 726 bp, Neisseria meningitidis
atgcgtattccgctgcttgcccctgacaattatgcctttcccgatcctgcctatgctttggcccggtgcgacgggctggtcggcgtgagcggcgatttggatacggggcggctgcttgaggcgtatcggaacggcgtgtttccgtggttttctcgggacggttggtttttttggtatgcggtcggtccgcgtgcggtgattgttcccgaacgtctgcacgttccgcgctcgctggcgaaaacgctgcgcaacggcagctatcgggttgcggtcaacggctgttttgcggaagtggtcgcgcattgtgcggcagcggcgcgcccgaatcaggacggaacttggattgcgcccgagtttcagacggcatatttgaagctgcacgaaatggggtacgcgcattctttcgagtgccattatcccgatgaaagcggtgaaacgaggttggcgggcggcttttacggcgtgcagatcggcagcgtgttttatggcgaatcgatgtttgcgttgcaaccggatgcgtcgaaaatcgcgtttgcctgcgccgtgccgtttttggcggatttgggcgtggaactgatagactgccagcaggacacggaacatatgcgccgtttcggttcggagctgctgccgtttgctgattttgccgaacgtctgcggatgttgaacgccgtgccgttgaaagaggaaatcgggcggcgcgaagtggcgtgcaaggggctttga

SEQ ID NO: 53796 - DNA, 330 bp, Neisseria meningitidis; identical to SEQ ID NO: 43091

SEQ ID NO: 53797 - DNA, 861 bp, Neisseria meningitidis; identical to SEQ ID NO: 42443

SEQ ID NO: 53798 - DNA, 378 bp, Neisseria meningitidis
atgtgtgagttaaaaaacttcagaagaaatattacttgttttgaggggtatgacgaaaattcatttattggcaaatggtatgatgacggggtgtgggatgatgaagaatattggaagttggagaatgatttaatcgaggttagaaaaaaatatccttatccgatggacataccaagatatgttgtcattggaatcggtaccattattgatttcttaatggttccaaattggaaactttttgaaattaaagcttccccttggttgcctgatagtgtgggaattcatgaacgttatgaaagattcacaacgatgctccgttatatttttaccgagaaagacatagtcaacgtgcgatttgattattacaacaaaaaatag

SEQ ID NO: 53799 - DNA, 933 bp, Neisseria meningitidis; identical to SEQ ID NO: 36892

SEQ ID NO: 53800 - DNA, 678 bp, Neisseria meningitidis; identical to SEQ ID NO: 43360

SEQ ID NO: 53801 - DNA, 1158 bp, Neisseria meningitidis
atgaaattcgccacgaaagccattcattccagctacgattgcgacgaacacaaccgcgcgctgatgccgccgatttatcaaaacagtatgtttgcgttgcacgagattggcgaaaatgtgccttaccgttattcgcgcctgagcaacccgacccgtcagattttagaagacaccgttgccgatttggaacacggtgcggcaggttttgcgttttccagcggtatggcgggaattgatgccgtatggcgcactttcctgcgcccgggcgataccattgtcgccgtcgccgatatttacggcggcgcttatgatttattggtcgatgtttatcaaaaatggggggtgaacgttgtttttgccgatttaggcaatccggataatttggacgaactgcttaaagcgcacaaggtcaaactggtttggctggaaacgccgtccaatccacttttacgcttggtagacatcaaagtccttgccgcaaaagccaaagcagccggtgcgctggtcggtatcgacaacacttttgccacgccgtatctgcaacagccgttggatatgggttgcgattttgtattccattccgctaccaaatatttgtgcggccattccgacgtgttgatgggcatcgtcgttgccaaaaccaaagaactggcgcagcctttgcacgatatgatggtgcataccggcgcggttgccggcccgctggactgctggctggtgttgcgcggcatcaaaacactggctctgcgcatgaacgcccattgccaaaacgcactcgaaatcgcgcgccgtttggaagcccatcctgccattgaaaaagtgttccatcccggcctgccgtctcacgaacattacgaactggcgaaaacacaaatgcccaaaggcatcggcggcgtggttacggtttatctcaaaaacgacacgcgtgaagcggcaaacagcgtgattaaaaacatgaaactggtcaaaatggcttccagcctcggcggtgtggaaagtttggtcaaccattgctattcccagtcccacagcggcgtaccgcatgatgtgaaaatggaaatgggcatcaaagtcggtctgctgcgtttctccatcggcatcgaagacgcggacgatatttggaacgatatttccgccgcactcgatacgactttgtaa

SEQ ID NO: 53802 - DNA, 285 bp, Neisseria meningitidis; identical to SEQ ID NO: 37122

SEQ ID NO: 53803 - DNA, 279 bp, Neisseria meningitidis; identical to SEQ ID NO: 36597

SEQ ID NO: 53804 - DNA, 627 bp, Neisseria meningitidis; identical to SEQ ID NO: 42121

SEQ ID NO: 53805 - DNA, 1071 bp, Neisseria meningitidis; identical to SEQ ID NO: 42097

SEQ ID NO: 53806 - DNA, 462 bp, Neisseria meningitidis; identical to SEQ ID NO: 43141

SEQ ID NO: 53807 - DNA, 891 bp, Neisseria meningitidis
atggagacgcaggacgacgacacggtcaaggtttggggttacgcttcaagcgaggaaatcgattcggacggcgaagtcatcgcggcggcagctatgaaggcggcgattcccgattatatgaagtttggcgcggggcgcgagatgcacggctcaaacgctgcgggaacggcaattgaaatcaacgtggaagatgacggcagaacctttttcgtggcgcatatcgtcgatcccgttgccgtgacgaaggtcaaaacaggcgtttacaagggcttttccatcggcggcagcgttaccgcccacgatgagttgaacaagtcgcaaatcacgggtttgaagctgacggaaatcagcttggttgaccgacccgccaatcccgatgcggtgtctacctgctttaaggcggacaaaggtgcggaagcggtaaacaacgatacagaacataatgctacatattttagccatttcccttccaaacaaaaaagcaccgacggcggccgatgccctttcctttacaggttcccctattttttatccgcgggcagcaccggtttggctggggcttttggtgcgggcgcgccgaccgaagcctggtccttcagcttcgccagcaccgcagggccgatgccctttaccttggtcaaatcgtctacagacttgaacgcaccgttttgcgcacggtattccgcaatggccttcgccttcgccgggcctatgcccggcagcgcctccaactcctgctgcgaagccgcattgatgtttaccgccgcaagggagaaggcgcaggagaacagcatacagaacagcacgaacattttcttcatggtttttcctttaagggttgcaaacaataaaccgcatcttgcgacgataaaacgagtcattctaaaatga

SEQ ID NO: 53808 - DNA, 357 bp, Neisseria meningitidis; identical to SEQ ID NO: 43712

SEQ ID NO: 53809 - DNA, 1065 bp, Neisseria meningitidis; identical to SEQ ID NO: 43710

SEQ ID NO: 53810 - DNA, 651 bp, Neisseria meningitidis; identical to SEQ ID NO: 43637

SEQ ID NO: 53811 - DNA, 2823 bp, Neisseria meningitidis
atgaataagaaacacagttttccgcttaccctgactgccttggccattgcaaccgcttttccgtcatatgcggcaaactccgaaacggcggcgcagacccaatccctgaaagaggttaccgtccgtgccgccaaagtgggacggcgatcgaaagaagtaaccggtttgggcaaaatcgtcaaaacgtcggaaacgttgaacaaagaacaggtactcggtatccgcgacctgacgcgctacgatccgggcgtggcggttgtcgaacagggcaacggcgcgagcggcggctactcgatacgcggcgtggataaaaaccgtgtggcggtttcggttgacggcgttgcccaaatacaggcgtttaccgtgcagggatcgttgagcggatacggcggacgcggcggcagcggtgcaatcaacgaaatcgaatatgaaaacatcagcacggtggaaatcgacaaaggtgccggttcgtccgatcacggcagcggcgcactcggcggcgcggtcgccttccgcaccaaagaggcggcagacctgatttcagacggcaaaagctgggggatacaggcaaaaaccgcctacggcagtaaaaaccgccaatttatgaagtcgctcggcgcggggttcagcaaagacggttgggaagggctgctaatccgtaccgaacgccaagggcgggaaacgcgcccgcacggcgatattgcggacggggtggaatacggcatagaccgtttggacgcgttccgccagacatacgatattcagaagcagaataaaaaggcggaatatttcctggcagagggcgagagtgagctcaagcctgcggcaaaattggcaggcaacgggaactatttgaaaaaccagctcaaccgctgggtggaagaacgtaagaaaaacaatcagtctttaagtgctgaagaagaagcgatggtgcgggaggcgcaggcgcgccacgaaaacctgtccgcccaagcttacacaggcggcggcaggatattgcccgatccgatggattaccgcagcggttcgtggcttgccaagctgggctaccgcttcggcggcaggcattatgtcggcggcgtgtttgaggataccaaacagcgttacgacatccgcgatatgacggaaaaacagtattacggtacggatgaggcgaaaaagtttagcgacaagagcggggtgtacgacggcgacgatttccgcgacggcttgtattttgtgccgaatatagaagagtggaagggcgataaaaatttggtcaagggcataggtttgaaatattcccgcaccaaatttattgacgaacatcaccgccgccgccgtatgggtttgctgtaccgttatgaaaacgaagcgtattctgacaattgggcggataaggcggtgttgtcgtttgacaaacagggcgtggcaaccgacaacaacacgctgaagcttaattgcgccgtgtatccttccgtggataaagcctgccgcgcgtcggcggacaaaccgtattcctacgacagcagcgaccgcttccactaccgcgaacagcacaatgttttgaatgccttgtttgagaaatcgctgaaaaacaaatggacgaaacaccatctgaccttgggcttcggttacgatgcttccaaagcagtctcccgccccgaacagctttcccacaatgcggcaaggatttcggaattctcggattacgccgacgacggtaaatataagtatcttttgggcaagcccgaagtcgtcgaagggtcggtctgcggttacatcgaaaccctgcgttcccgcaaatgcgtgccaagaaaaatcaacggcagcaatatccacatttctttgaacgatcgtttttcaatcggcaaatatttcgatttcagcttgggcggacggtacgaccggcaaaactttaccacgtcggaagaactcgtccgcagcgggcggtataccgatcgttcgtggaacagcggcatcgtgttcaaaccgagccgccacctttccttgtcttaccgcgcctccagcggcttcagaacgccctcattccaagagcttttcgggatagacatttatcacgattatccgaaaggctggcagcgtcccgccctgaaatcggaaaaggcagccaaccgcgaaatcggtttgcagtggaagggcgatttcggctttttggaaatcagcagcttccgcaaccgttataccgatatgattgccgttgccgatcacaaaaccaaattgccgaatcaggcaggacgattgacagagattgatatccgcgattattacaatgcccaaaatatgtcgctccaaggcgttaatatattgggaaaaatcgactggaacggtgtgtacggcaaactgcccgaaggtttgtacaccacattggcgtacaaccgcatcaaaccgaaatcggtatccaaccggccggacttgtccctccgcagctatgctttggatgcggtacagccgtcgcgttatgttttggggttcggatacgaccagccagaggggaaatggggcgcaaacattatgctgacctattccaaagggaaaaaccctgacgagcttgcttatctggcaggcgatcaaaaacgatattcgacaaaaagagcgtcgtcttcttggtcgacggcagacgtttccgcctatctgaatctgaaaaaacggctgaccttgagggcggctatctacaatatcggcaactaccgctacgttacttgggaatccttgcgccagactgcggaaagcacggcaaaccggcacggcggcgacagcaactatggaaggtatgccgcaccgggcaggaacttcagtctcgcgctcgaaatgaagttttaa

SEQ ID NO: 53812 - DNA, 249 bp, Neisseria meningitidis; identical to SEQ ID NO: 41580

SEQ ID NO: 53813 - DNA, 2580 bp, Neisseria meningitidis; identical to SEQ ID NO: 42420

SEQ ID NO: 53814 - DNA, 390 bp, Neisseria meningitidis
atgaaaaacgttcaaaaaggctttacgctgctcgagctgatgattgccgtcgccatcctcggcatcctgacgctcatcacctacccttcctataaaacctacatccggcgcgtccgcctgtcggaagtcaggacgaccctgctgcacaacgcgcagaccatggaacgttactaccgccaaaaagggacgtttaaaacctacgacaaaaacaaactgaaacaaaacgaatatttcgatatcactttaagcgaagtcagccccgaccattttacccttaaggcaacgcccaatcccaccaccaacgacggcgaaacctgcgtcgttacgctcaacgacggcggtaccattgccgcttccgatacaaaccaatcctgccccggcttcgactaa

SEQ ID NO: 53815 - DNA, 372 bp, Neisseria meningitidis; identical to SEQ ID NO: 41929

SEQ ID NO: 53816 - DNA, 846 bp, Neisseria meningitidis; identical to SEQ ID NO: 42110

SEQ ID NO: 53817 - DNA, 441 bp, Neisseria meningitidis
atgcctacccaatcaaaacatgcgtctatcaatatcggtctgatacaggcaagggaagccctgatgacccaattcaggcctattctgaatcaggcgaatattaccgatcagcaatggcggattatccgtcttttggcggaaaacggcacgctggactttcaagatttggcgaatcaggcgtgcattttgcgccccagcctgaccggtatcctgacccgccttgaaaaagcgggtttggttgtccgcctgaaaccttccaacgaccaacgacgtgtttttctgaagctgactgccgagggcgagaagctgtatgaggaaatcggcgaagaagtggacgaacgctacgacgctatcgaggaagtgctgggccgcgagaaaatgctgctgcttaaagacctgttggcagaacttgccaaaatcgaggatgcgttgaactcgtaa

SEQ ID NO: 53818 - DNA, 501 bp, Neisseria meningitidis; identical to SEQ ID NO: 37418

SEQ ID NO: 53819 - DNA, 1356 bp, Neisseria meningitidis; identical to SEQ ID NO: 43984

SEQ ID NO: 53820 - DNA, 1815 bp, Neisseria meningitidis
atgcccgctgaaacgaccgtatccggcgcgcaccccgccgccaaactgccgatttacatcctgccctgcttcctttggataggcatcgtcccctttaccttcgcgctcaaactgaaaccgtcgcccgacttttaccacgatgccgccgccgcagccggcctgattgtcctgttgttcctcacggcaggaaaaaaactgtttgatgtcaaaatccccgccatcagcttccttctgtttgcaatggcggcgttttggtatcttcaggcacgcctgatgaacctgatttaccccggtatgaacgacatcgtctcttggattttcatcttgctcgccgtcagcgcgtgggcctgccggagcttggtcgcacacttcggacaagaacgcatcgtgaccctgtttgcctggtcgctgcttatcggctccctgcttcaatcctgcatcgtcgtcatccagtttgccggctgggaagacacccctctgtttcaaaacatcatcgtttacagcgggcaaggcgtaatcggacacatcgggcagcgcaacaacctcggacactacctcatgtggggcatactcgccgccgcctacctcaacggacaacgaaaaatccccgccgccctcggcgtaatctgcctgattatgcagaccgccgttttaggtttggtcaactcgcgcaccatcttgacctacatagccgccatcgccctcatccttcccttctggtatttccgttcggacaaatccaacaggcggacgatgctcggcatagccgcagccgtattccttaccgcgctgttccaattttccatgaacaccattctggaaacctttactggcatccgctacgaaactgccgtcgaacgcgtcgccaacggcggtttcacagacttgccgcgccaaatcgaatggaataaagcccttgccgccttccagtccgccccgatattcgggcacggctggaacagttttgcccaacaaaccttcctcatcaatgccgaacagcacaacatatacgacaacctcctcagcaacttgttcacccattcccacaacatcgtcctccaactccttgcagagatgggaatcagcggcacgcttctggttgccgcaaccctgctgacgggcattgccgggctgcttaaacgccccctgacccccgcatcgcttttcctaatctgcacgcttgccgtcagtatgtgccacagtatgctcgaatatcctttgtggtatgtctatttcctcatccctttcggactgatgctcttcctgtcccccgcagaggcttcagacggcatcgccttcaaaaaagccgccaatctcggcatactgaccgcctccgccgccatattcgcaggattgctgcacttggactggacatacacccggctggttaacgccttttcccccgccactgacgacagtgccaaaaccctcaaccggaaaatcaacgagttgcgctatatttccgcaaacagtccgatgctgtccttttatgccgacttctccctcgtaaacttcgccctgccggaataccccgaaacccagacttgggcggaagaagcaaccctcaaatcactaaaataccgcccccactccgccacctaccgcatcgccctctacctgatgcggcaaggcaaagttgcagaagcaaaacaatggatgcgggcgacacagtcctattacccctacctgatgccccgatacgccgacgaaatccgcaaactgcccgtatgggcgccgctgctacccgaactgctcaaagactgcaaagccttcgccgccgcgcccggtcatccggaagcaaaaccctgcaaatga

SEQ ID NO: 53821 - DNA, 441 bp, Neisseria meningitidis
atgccgaaagccaccttttacacgcacgttgcccaagttccgattttcacctgccgcctgattgcccgtgcgattcgggacggcggcaggatactggtgtggtccgattcgttcgggcagcttcaggaattggacaaaatgctttggcaatacgaggccgagagtttcattccgcacgaaatttgggaaacggaagaagccatgccgtctgaaccatccgtcctgcttgcctgcggcggcaatctgccccgaattcccgaaggcatgaccgttttgaacctgtccgacggtttttggaacaccgctccggtcttgcccgcgcgcgttttggaaatcgtcggcaacagcttggaagagctcgccgacgcgcgcgaacgctttaccgcctaccgccgaagcggttttgccatcgaacatcacggcatggagggcaaggcataa

SEQ ID NO: 53822 - DNA, 990 bp, Neisseria meningitidis; identical to SEQ ID NO: 42262

SEQ ID NO: 53823 - DNA, 819 bp, Neisseria meningitidis; identical to SEQ ID NO: 37573

SEQ ID NO: 53824 - DNA, 1371 bp, Neisseria meningitidis; identical to SEQ ID NO: 42735

SEQ ID NO: 53825 - DNA, 1047 bp, Neisseria meningitidis
atgattccggccacctacaccctgtcccaaatcaccgcgcggctcggcggcgaatggcgcggcgaggacatttccgttaccgccgtgcgcccgctcgcagacgcgcaggcggaacacatcagcttccttgccaatccgaaatacaaagccgaagtccacgacagcagcgcgggcgcggtcatcgtttccgccaaagcggcagacggatttgaagggcgcaacctgattgtcgccgacgacccctatctctatttcgccaaagtcgcccgcctgttttcacccgtcgtcaaagcgcgcggcggcatccatccgaccgccgtcgtcgaaccgggcgcgaccgttcccaccagctgcgaaatcggcgcgaacgtctacatcggcgcaaacaccgtgctcggcgaaggctgccgcatcttggcaaacgccgtcgtccaacacgattgcaaactgggcgacgaagtcgtcctgcatcccaacgccgtcgtttattacggctgcacactgggcagacgcgtcgaaatccacagcggcgcggtcatcggcgcggacggtttcggactcgccttcgccgacgattcgtggttcaaaatcccgcaaaccggcgcggtaacgctgggcgacgacgtagaaatcggctcgaacaccaacatcgaccgcggcgcgatgagcgacaccaccgtcggcaacggcaccaaaatcgacaaccaagtccaaatcggacacaactgcaaaatcggttcgcacaccgtcatcgccgccaaaaccggcatctcaggtagcgtaaccataggcagctactgcatcatcggcggcggcgtcggtacggtcggacacatcgaaatcgccgacaaaaccaccatcggcggcggcacgtccgtcacccacagcattaccgaaagcggcaaacacctcgccggcatcttcccgatgtccacccataaagaatgggcgcgcaacgctgtttacatccaccgcttaagcgaaatgaacaaacggctcaaaacactggagcagcagctttcagatgccggtcaagacagcaaataa

SEQ ID NO: 53826 - DNA, 840 bp, Neisseria meningitidis; identical to SEQ ID NO: 43911

SEQ ID NO: 53827 - DNA, 966 bp, Neisseria meningitidis
atgagctacacgcaactgacccaaggcgaacgataccacatccaatacctgtcccgccactgcaccgttaccgaaatcgccaaacagctgaaccgccacaaaagcaccatcagccgcgaaatcagacggcaccgcacccaagggcagcaatacagcgccgaaaaagcccagcggcaaagccagactatcaaacagcgtaagcgacaaccctataagctcgattcgcagctgattcagcacatcgacccccttatccgccgcaaactcagtcccgaacaagtatgcgcctacctgtgcaaacaccaccagatcacgctccaccacagcaccatttaccgctaccttcgccaagacaaaagcaacggcagcacgttgtggcaacatctcagaatatgcagcaaaccctaccgcaaacgctacggcagcacatggaccagaggcaaagtacccaaccgtgtcggcatagaaaaccgacccgctatcgtcgaccagaaatcccgtatcggcgattgggaagccgacaccattgtcggcaaaggacagaaaagcgcattattgaccttggtcgaacgcgttacccgctacaccatcatctgcaaattggatagcctcaaagccgaagacactgcccgggcagctgttagggcattaaaggcacataaagacagggtgcacaccatcaccatggataacggcaaagagttctaccaacacaccaaaataaccaaagcattgaaagcggagacttatttttgtcgcccttaccattcttgggagaaagggctgaatgagaacaccaacggactcatccggcaatacttccccaaacaaaccgatttccgtaacatcagtgatcgggagatacgcagggttcaagatgagttgaaccaccgaccaagaaaaacacttggctacgaaacgccaagtgttttattcttgaatctgttccaaccactaatacactag

SEQ ID NO: 53828 - DNA, 1719 bp, Neisseria meningitidis; identical to SEQ ID NO: 43363

SEQ ID NO: 53829 - DNA, 489 bp, Neisseria meningitidis; identical to SEQ ID NO: 42640

SEQ ID NO: 53830 - DNA, 1398 bp, Neisseria meningitidis
atgactgtccgtatcgaacacgatttattgggcgaccgcgagattcccgccgaagtatattggggcatccacaccctgcgcgccattgaaaactttaaaatctccacacaaaaaatttctgacgtgccgcagtttgtccgcagtatggtgatggtgaaaaaggcgacggcacaggcaaacggtaagttgggcgcggtcaagcccgaaatcgcagccgccattgaaaaagcctgcgacgaagttctgctgaacaaccgctgcctcgaccaattcccctccgacgtgtatcagggcggtgcgggtacttcggtcaatatgaacaccaacgaagtcatcgccaacctcgcattggaagccttgggctatgagaaaggccgctacgacatcgtcaatccgatggaccatgtcaacgccagccaatcgaccaacgatgcctatcccacgggcttccgccttgccgtgtattacagtatcggcgaattgctcgacaaactggtcgttctgaaaaacgcctttgccgccaaagccgaagaatttaaagacgttttgaaaatgggccgcacccagcttcaagatgccgtgccaatgactacaggacaagaattccaatctttccaagtgttgttggaagaagaaatcctcaacctcgaccgcacgcgccaactgcttttagaagtcaatttgggcgcaacggcaatcggcacgggcgtgaacacgcccaaaggctacgccgaactggtggtcaaaaaactctccgaagtcagcggcttgccttgcaaactgaccgaaaacctgattgaggcgacctccgactgcggcgcatatgtgatggtacacggcgcattgaagcgcacggcggtcaaactctccaaaatctgcaacgacttgcgcctgctctcttccggcccgcgtgccggcttgaaagaaatcaacctgcccgaattacaggccggttcttccattatgcctgccaaagtcaatcccgtgattcccgaagtggtcaaccaagtctgcttcaaagtcatcggcaacgatacgacgattaccttcgccgccgaagccgggcaactgcaattaaacgtgatggagccggtcatcgcccaatgtatgtttgaaaccatttccctcttgggcaatgcagcaatcaacctgtccgacaaatgcgtcaaaggcattacggtcaaccgcgaaatatgcgagcgttacgttttcaactccatcgggctggttacttatctgaatccgtatatcggacaccacaacggcgatttggtcggcaaaatctgcgcccaaaccggcaaaggcgtgcgcgaggttgtcttggaacgcgggctgttgagcgaagaagaactcaaccgcatcctctctcctgaaaacctgatgaacccccatctgtaa

SEQ ID NO: 53831 - DNA, 936 bp, Neisseria meningitidis; identical to SEQ ID NO: 42109

SEQ ID NO: 53832 - DNA, 1143 bp, Neisseria meningitidis; identical to SEQ ID NO: 43813

SEQ ID NO: 53833 - DNA, 402 bp, Neisseria meningitidis
atgaacacaacccgactgccgaccgccctcgtcttgggctgcttctgcgccgccgcttctgccgccgacaacagcatcatgacaaaagggcaaaaagtgtacgaatccaactgcgtcgcctgccacggcaaaaagggcgaaggccgcggaaccatgtttccgccgctctaccgctccgacttcatcatgaaaaaaccgcaggtgctgctgcacagcatggtcaaaggcatcaacggtacaatcaaagtcaacggcaaaacctacaacggattcatgcccgcaaccgccatcagcgatgcggacattgccgccgtcgccacttatatcatgaacgcctttgacaacggcggcggaagcgttaccgaaaaagacgtaaaacaggcaaaaagcaaaaaaaactaa

SEQ ID NO: 53834 - DNA, 996 bp, Neisseria meningitidis; identical to SEQ ID NO: 42092

SEQ ID NO: 53835 - DNA, 477 bp, Neisseria meningitidis; identical to SEQ ID NO: 42862

SEQ ID NO: 53836 - DNA, 267 bp, Neisseria meningitidis; identical to SEQ ID NO: 39635

SEQ ID NO: 53837 - DNA, 156 bp, Neisseria meningitidis; identical to SEQ ID NO: 43525

SEQ ID NO: 53838 - DNA, 930 bp, Neisseria meningitidis; identical to SEQ ID NO: 42738

SEQ ID NO: 53839 - DNA, 726 bp, Neisseria meningitidis
ttgttagatcacgataatggtttttttgataacagcaatcaaaggccgaaatctgaaacgatcggtacggcttggcggaatgaggacgggagcggcaagacattttatgtaggtcgcaagaaaaattctcgttttgttcgtgtttatgagaaaggcaggcagcttggagataaagaaagcaaatgggtaaggttcgagatccagtttaattatggagatatagaaatacccttggatattttaataaatcagggttcgtatttctgtggagcttttccaatttgtagaaaatttaaaaatatgccggttcccgaaaggtttgatcagagaaagaaaaagcttaatttaactttcgagcataaattgcattacgcgaaaaacgcggttggaaaactggtcaatttcatgattgaaatgggttttgataatagcgaaattgtggaatctttaaaggcagattcgggatttcccaaaggattagaacctgaaaaatatgctctggaaatgttaagggacggtttgaaacacggttttattcatgaacagccggatattgatttggaaattgaacttgatgaattgggggttattgcttttaaaaattctgacaaattcgatagggaaaaaaggctttttagtcctgattatgatgtcgagaaagaaaggaaatatcaggaatatttaagtaaagtttatcatcaaaatgtagattatgattatttttaa

SEQ ID NO: 53840 - DNA, 966 bp, Neisseria meningitidis
atgagctacacgcaactgacccaaggcgaacgataccacatccaatacctgtcccgccactgcaccgtcaccgaaatcgccaaacagctgaaccgccacaaaagcaccatcagccgcgaaatcagacggcaccgcacccaagggcagcaatacagcgccgaaaaagcccagcggcaaagccagactatcaaacagcgtaagcgacaaccctataagctcgattcgcagctgattcagcacatcgacacccttatccgccgcaaactcagtcccgaacaagtatgcgcctacctgtgcaaacaccaccagatcacgctccaccacagcaccatttaccgctaccttcgccaagacaaaagcaacggcagcacgttgtggcaacatctcagaatatgcagcaaaccctaccgcaaacgctacggcagcacatggaccagaggcaaagtacccaaccgtgtcggcatagaaaaccgacccgctatcgtcgaccagaaatcccgtatcggcgattgggaagccgacaccattgtcggcaaaggacagaaaagcgcattattgaccttggtcgaacgcgttacccgctacaccatcatctgcaaattggatagcctcaaagccgaagacactgcccgggcagctgttagggcattaaaggcacataaagacagggtgtacaccattaccatggataacggcaaagagttctaccaacacaccaaaataaccaaagcattgaaagcggagacttatttttgtcgcccttaccattcttgggagaaagggctgaatgagaacaccaacggactcatccggcaatacttccccaaacaaaccgatttccgtaacatcagtgatcgggagatacgcagggttcaagatgagttgaaccaccgaccaagaaaaacacttggctacgaaacgccaagtgttttattcttgaatctgttccaaccactaatacactag

SEQ ID NO: 53841 - DNA, 198 bp, Neisseria meningitidis; identical to SEQ ID NO: 43079

SEQ ID NO: 53842 - DNA, 474 bp, Neisseria meningitidis
atgaaaggcgaccgtctggttatccgcgagctaaacaaaaacttaggcttgctgctggtaaccatcaaccaatatttccttcacgcccgtattttgaaaaactggggctttgaagaactgggcgaacatttcttcaaacagtccatcgttgaaatgaaagctgccgacgatttgatcgagcgcattctgttccttgaaggcctgccgaacctgcaagaactgggcaagcttctgattggcgagtccaccgaagaaatcatcgcctgcgatttgaccaaagaacaggaaaaacacgaagccctgcttgccgccatcgccacagcagaagcgcaacaggattacgtcagccgtgatttgttggaaaaacaaaaagacaccaacgaagaacacatcgactggctcgaaacccagcaggaactaatcggcaaaattggtttgccgaactacctgcaaacagcggcgcaagaggactaa

SEQ ID NO: 53843 - DNA, 477 bp, Neisseria meningitidis
atgaaaacaaatttcaaacagaaaattatcgaacaggcacgcagcgaaggcttgcaggtaaccgctttgcgcgagcaggtattagatattgtcttgcagcaaagcggcgtgattaaagcctacaacgtcttgtcgcagatgcagcagcaaagcgagggcgtgcttgcaccgcctaccgcctaccgcgcccttgatttttgggcggagcagggcgttttgcacaaagtggcggcggtcaacggctatattttgtgcagccacgcgcagcacgagtgcgacgaccattgccacgaccacgaagaagccgaagcgcaccacagcgcgtttattttggtctgcaccgaatgtggcacggcggacgagcaaaccctgagccacgagtgggcggcactgcgcgcaggcgttgccgaaagcggctttgcgctgaaagaagaacacgttgttttaaccgggatttgtaaaaaatgtcagcagtaa

SEQ ID NO: 53844 - DNA, 1116 bp, Neisseria meningitidis; identical to SEQ ID NO: 42994

SEQ ID NO: 53845 - DNA, 693 bp, Neisseria meningitidis; identical to SEQ ID NO: 43590

SEQ ID NO: 53846 - DNA, 783 bp, Neisseria meningitidis; identical to SEQ ID NO: 43275

SEQ ID NO: 53847 - DNA, 480 bp, Neisseria meningitidis; identical to SEQ ID NO: 41071

SEQ ID NO: 53848 - DNA, 693 bp, Neisseria meningitidis; identical to SEQ ID NO: 43555

SEQ ID NO: 53849 - DNA, 231 bp, Neisseria meningitidis
atgaacatcgttaaaaaatatgctgtaaaagcattgttggcagccggtatcttcacaccggctattgttatggcagatggctttgatgcatccgcgattggtacgcaagtggcgaatgtaatcatgggttttgtggcaatggtttccgccgtgggtatggcggcaatcaccgtaattcttgcaatccaaggcttcaaaatggcttggagcatgatcaaatctgtcaaataa

SEQ ID NO: 53850 - DNA, 996 bp, Neisseria meningitidis; identical to SEQ ID NO: 43157

SEQ ID NO: 53851 - DNA, 1410 bp, Neisseria meningitidis; identical to SEQ ID NO: 42951

SEQ ID NO: 53852 - DNA, 864 bp, Neisseria meningitidis; identical to SEQ ID NO: 43617

SEQ ID NO: 53853 - DNA, 2703 bp, Neisseria meningitidis
atgcaactgcatattctgaacaatccaaaggacgcggctttggcggcggacgcggaatttctgaaacaatccctgttcaacctcctgcacgaagaagcctcgccgttggttgtcgaaacagtcaaactcttgtccacttccgacgacagcgcggcattgattgaaaaagtattgccgcaattggacgaacaacaaacccacgatttaaccttggcctgcggcctgttcgcccagattttgaacatcgccgaagacgtgcaccacgaacgccgccgccaaatccacgaagaagccggacgcggcggcgcggaaggcagcctgacggaaaccgtccgcaggctcaaagcggggaaagccgacggcaaatcggtgcagcggcagttggacaatacgtccgttaccgccgttttgaccgcgcacccgaccgaagtgcaacgccaaaccgtcttaagcttcaaccgccgcatccgcgcactgttgccgcaacgcgaacgctgcaccaatgccgacgcgctggcacggctgcgccgcgaaatcgacactatcctgctgggcttgtggcagaccagcgaaacgcgccgccacaaactcagcgtcaacgacgaaatcaacaacggcgtgtccatcttcccgatgagctttttcgaagccctgcccaagctctaccgcaagatggaacacgactttcagacggcctatcccggcgtccgcgttccggacatcctcaaaatcggcggctggatcggcggcgaccgcgacggcaatccgtttgtttctgccgaaaccctgcgctttgccttccgccgccacgccgatgccgtgttccgcttctatcgcggcgaactcgacaaactctaccgcgaactgccgctctccatccgccgcgtcaaagtcaacggcgatgtaacggcgttgtccgacaaatcgcccgacgaagaaatcgcccgcgccgaagaaccctaccgccgcgccatcgcctacattatggcgcgcgctatgggcaaagcgcgcgcgctcggtttgggtatgggctgcaaattcggctttctcgagccttatgcttcggcacaagagtttctggatgatttgaaaaaattgcaacgttcccttatcgacaacggcagccgtctgcttgccgaaggccgtttggcagacctcatccgttccgtatccgtgttcggctttcacatgatgccgctcgacttgcgccaacacgcaggcaaacacgccgatgtggttgccgagcttttccaacacgcaggcttggaagactacaaccgcctgaacgaagagcaaaaacaaaccgccctgttgcgcgaattgagccatcaacgtcctctgtacagcccgtttatcacatacagcgaccatacccgccacgaactggcaattttcaacgaagcgcgcaaaatcaaagacgaatttggcgaagatgccgtaacacaaagcattatttccaactgcgaacaacccagcgacctgctcgccttggcattgctgctgaaagaaaccggcctgttggcggtggaaaacggcaaaccgcacagccgcatcaatatcgtgccgctgtttgaaaccattgaagcgttggaaaacgcctgtccggtcatggaaaccatgttccgcctcgactggtacgatgcactgctcgaaagccgtggaaacatccaagaaatcatgctcggctattccgactccaacaaggacggcggctacgttaccagctcatggtgcctctatcaggcggaattgggcttggtcgaactcttcaaaaaatacgatgtccgtatgcgcctgttccacggacgcggcggcagcgtaggtcgcggcggcggcccttcttaccaagccattctcgcccaaccggcgggcagcgtggcgggacaaatccgcatcaccgaacaaggcgaagtcattaccgccaaatacgccgaccccggcaatgcccaacgcaacttggaaaccttggttgccgcgactttggaagccagcatcctgccggataaaaaagaccctgatgccaaactgatgcaggcattgtcggacgtatcgttcaaatactaccgcgaactgattacccatcccgacttcatcgactactttctgcaaaccagcccgattcaggaaatcgccaccctcaacctaggcagccgtcccgccagccgcaaaaccttggcgcggattcaggacttgcgcgcgattccgtgggtattttcctggatgcagaaccgcctcatgctgccggcttggtacggtttcggcagcgcggtggaaaccttgtgcgaagacaaacccgaaacgctcgccgccctgcgcgaacacgcccaaagcaacccgttcttccaagccatgctctccaatatggaacaagtgatggcgaaaaccgacatcaccctcgcggaaaactatgccggcttgagcgaatcgcccgataaggcaaaaatcatcttcgggatgattaaggaagaataccgccgcagccgcaaagcactgctcgacctactgcaaaccgaagagcttttgcgcgacaaccgcagcctcgcccgttcgctcgctttgaggattccctacctgaacgcgctcaacggtttgcaagtcgccatgctcaaacgcctgcgtaaagaacccgacaatccgcacgcccttctgatggtgcacctgaccatcaacggcgtggcgcaaggtttgcgcaatacaggctga

SEQ ID NO: 53854 - DNA, 1662 bp, Neisseria meningitidis; identical to SEQ ID NO: 43994

SEQ ID NO: 53855 - DNA, 789 bp, Neisseria meningitidis; identical to SEQ ID NO: 42135

SEQ ID NO: 53856 - DNA, 642 bp, Neisseria meningitidis; identical to SEQ ID NO: 42771

SEQ ID NO: 53857 - DNA, 3486 bp, Neisseria meningitidis
atgcgcctgacccatatcaaactctccggcttcaaatcttttaccgacccgaccacgattcatgtgccggggcagcttgtcgcggttatcgggccgaacggctgcggcaagtcgaatgtgattgacgcggtgcgctgggtgttgggtgaggcttcggcgaagcagcttcgcggcgagagtatgcaggacgtgatttttaacggtgcggcaacgcgccgtcctgcgccaagagcttcggtggagctggtgtttgacaacagcggccacagtttgcagggcgcgtgggggcagtatgccgaggtgagcatcaagcggcagctgacgcggcagggcgaatcgacttatttcatcaacaatcagaccgtgcgccgccgcgatattactgatttgtttctgggtacgggcgtgggcgcgcgcggttatgccgttatcgagcaggggatgatttcgcgcatcatcgaagcgcggccggaggagttgcgcgcttatatcgaggaggcggcgggtgtgtccaaatataaggaacgccgcaaggagacggaaggctgtctgaaagacacgcgcgagcatttgcagcgtttgggcgatttgcagaacgaattggcgcgtcaggtggaaaagctggagaaacaggcggaaaccgccgaacgctataaatccctgaccgcgcagttgaatcaacaacaggatttgctcgattacgcccaatggcagcaatcgcttgccgccgccgacaaagcgaccgcgcagcatcagtctttgcaggcgcagcaggacgaaaccgccgcgcaggttcaggcgttaaacgacgaagtacacgccttgcagaccgccgaacagtcgcagcagcaggcggtacacgaactgggcaacaaacgcggcgtgttgcgcgagcagattgcccgtttggaagaacaaatccgccatcagcaaaacctgcatcaacgcatcgaacgcgacaagcaggcggcgcaggcgcagttacaacgcattcatcaagagcagcagcaaatccgcgtgcagcttgaagaaaacgagttgcaggtcgaagaaaaacaaaccgagctggcggaatgggcgatgcaggttgccgaacacgaagagcgtctgcccgaattggaagaagcccaagccacgctcaatgccgccttccaaacccagcaggacgaggcaaaccgcatccgccgcgaactggcgttgaagcagcagcagcttgcccatgccgaacaaaccgttgccaagcacgaagagcgcaaaggtcgtctgaaacaggaaaaccaagccctgaacctgcccgacgaagccgaaaccgccgccgcgcaggaagccgccgccttgttgcaaagccagcaagagcattacgaagaacaaatcatcgccgccgaagaagctctacacgccgcccgcgaggcgtttcagacggcatcaaaccgcttccaaagcctgaagcagcaacacatcaccttgcaggcgcagcagcaggcgttgtcgcaaatcctgtcgcaacagcaggaagccgccgacttctggcaggcaaccgaccacgccgccgcgccgcagctgtggcaacacatcaccgcgcctgccgagtggcagcacgccttgtccgtcatccttgcagaacgcctgcacgcccgcgccgtgccgcaaggtttcgtaccgcccgaacctttgccgcaggggcaggcggcgtggctttcagacggtctctccggcggcatcaaaaaatccctgcccgtacaggcattgctgaaccaaatccaagcgcagccgccgtttcagacggcattgcactactggctcgacggcgtattgtgcgcgcccgatttgagctatgccctcgcgcatcaaaacgatttgggcgcacaccaaatctggctcacgcccgaaggtcatcaggtcgataaagtcagcgtcctgctctatgccaaacccgcgcaggaaagcctgattgcccaaaaagcgcgcctcgacggcatcgcgtccgaactggaaaacctcgcccccgaactttccgccgccgaagccgcgttcaaacaggcggaagctgccgtgcgctcgtctgaagtgcaacataaaaacctgatgcagcagcaacagcagcacacgcgccaatacagtcaggcgcagcaacgcgccgccgaactcttagcgcgtaccaaccaagggcaaatccgccgcgaacacatcgagcgcgaactggcgcagttggcggaagaacagaccgtgttgcaacacacgtccgacgggctttcagacgacatcgttaccttgcaggaagccgccgccgaactcgaacaccagcagcaaaccaccgcgcacagccgccaagagcagcaaggccgtctgaaacaggcgcagcttgccctgttggaagccaaccgccaatatgggcttgccgaagtcgccgtccacaaactcaaccagcaaaaacaaaactaccggcagcaaatcgcccagcttgaacagcaaaccctcgactggcaggaacgccagcaagagcttgccctcgcctatgaaaccgagttccaaaacgacgagcagcacatcaagcttgaagaattaagcgaagccgtacagaccttggacgaagaatatattgttgtgcaagagaaactcgcgcagattcaggaacagggcagggagcaatacgctaaagtgcaaaccctgcaaaccaagctgccgcagcttcaggccgccacccaaaccgccttgttgcagcagcaggaagccctgatcaacgccaaacgctaccatcaaaacctgaccgaacgcgccgccgatttggacgcgctcgaagcgttggcgaaagaatcgccgaaagtattgaacagcagcatcggcagcctttcgcaacaaatcgaagcactcggcgcggtcaacctcgccgccctgcaagaactcgaagaagcgcgcgaacgcgacggctactaccgcagccaaagcgaagacgtgcaggcagccatcacccttttggaagaagccatcgcccaaatcgacgacaaaaccaaagcgcgtttcaaagaaaccttcgatgccgtcaacagcaaagtccaaaccttcttcccgaccctgttcggcggcggcgaagccactctcaaaatgataggcgacgacctactgaccgccggtgtgtccattatggcgcgtccgcccggcaagaaaaacagcaccatccacctcctctccggcggcgaaaaagccctcaccgccatgagcctcgtgttcgctctgttcagcctcaaccccgctccgttctgccttttggacgaagtcgatgccccgctggacgacgccaacacctcgcgtttctgcaggctggtcaaagaaatgtcggcgcaaacccagttcctctacatctcccacaaccgcctgacgatggaaatggcggagcagctggtcggcgtaaccatgcaggaaaaaggtgtctcgcgcgtcgtcgccgtggacatcaaacaggcgttggaaatggcggaagccgtttga

SEQ ID NO: 53858 - DNA, 279 bp, Neisseria meningitidis
atgttgctggcaacagacggggaggatgtgcacgaggcgcgtatggcggcacgtcccgaacacctcaaacggctggagacgctgaagtcggaaggccggctgttgacggcaggcccgaatcctttgccggaggactccaaccgcgtttcgggcagtttgattgtggcgcagttcgagtctttggatgcggcgcaggcttgggcggaagacgatccctatgttcatgcaggcgtgtacagcgaagtgctgatcaagccgtttaaagcggtgttcaaataa

SEQ ID NO: 53859 - DNA, 1380 bp, Neisseria meningitidis
atggcaaaaacgcttaaaaccctttaccaatgcaccgaatgcggcggcacttcgccgaaatggcagggcaaatgcccgcattgcggcgagtggaacacgcttcaggaaagccttgccgcgcccgagccgaaaaacgcccgtttccaatcttgggcggcggatacctcgaccgtccaatccctctccgccgttaccgccaccgaagtgccgcgcaatccgaccggtatgggcgaactcgaccgcgtattgggcggcggtttggtcgatggtgcggtcatcctgctcggcggcgaccccggcatcggcaaatccacgctgctgttgcaaaccatcgccaaaatggcgcaaagccgtaaagtgctatacgtttccggcgaagaatccgcccaacaagtcgccctgcgcgcgcagcgtttggaactgccgaccgacggcgtaaaccttcttgccgaaatccgcatggaagcgattcaggcggccttgaaacagcatcagcccgaagttgtcgtcatcgactctatccaaaccatgtattccgaccaaatcacgtccgcccccggctccgtgtcgcaggtgcgcgagtgtgccgcccaactgacgcgcatggcgaaacagatgggcatcgccatgatactggtcggacacgtgaccaaagacggcgcgattgccggcccgcgcgtgctggaacacatggttgataccgtgctgtatttcgagggcgaccaacattccaactaccgcatgatacgcgccatcaaaaaccgcttcggcgcggcaaacgaactgggcgtgttcgcgatgacggaaaacggtttgaaaggtgtgtccaacccgtccgccatcttcctcgccagctaccgcgacgatacgcccggctcgtgcgttttggttacacaggaaggcagccgcccgcttttggtcgaaattcaggcattggtcgatgacgcgcacggcttcacgcccaaacgcctcaccgtcggactggaacaaaaccgtcttgcgatgctgcttgccgtgttaaaccgccacggcggcatcgcctgtttcgatcaggatgtgttcctcaacgccgtcggcggcgtgaaaatcggcgaaccggcggcggatttggcggtcatcctcgcgatgctttccagcttccgcaaccgccctatgcctgaaaaaaccgtggttttcggcgaaatcggcttaagcggcgaagtccgccccgtcgcacgcgggcaagagcggctcaaagaagcggaaaaactcggcttcaaacgcgccatcgtccccaaagccaatatgccgcgcaacgccaaagagtttccgaacctgaaaatctacggcgtttcgagtttgcaggaagccatcgatatttgccgcgacagcagggaataa

SEQ ID NO: 53860 - DNA, 450 bp, Neisseria meningitidis; identical to SEQ ID NO: 42319

SEQ ID NO: 53861 - DNA, 369 bp, Neisseria meningitidis; identical to SEQ ID NO: 39308

SEQ ID NO: 53862 - DNA, 342 bp, Neisseria meningitidis; identical to SEQ ID NO: 43005

SEQ ID NO: 53863 - DNA, 741 bp, Neisseria meningitidis
atgctgattgtccgtccgtcgggcagggccgcagaagatgtcgaaacttgcctgaatgccggttggcgcgcggaagtattgagtccggtcgaaatcgaagcagatgctgccggactggaacttttgtccgaacaatatgcccgtgcggatgccgtgttttgggtcagtccgaccgccgttgaaaccgccgtcccgtaccttaacctttcagacggcataaaggcgcagattgccgtagggcagggcagccgccgcgcattggaacgctgtttggtcagaacggtcatcgcgcctgatgacggcaacgacagcgaggcggttttgcgcctgccggtttggaacagtctgcccgaaggtgcgcgcgtattgtttgtgcgcggacacggcgggcgggattttttgatgaatgccttgcaggagaaaggttttcggacggaggtggcagaagtctatttcagacggcataaacctttgaactttcaaaatttccaaaccgaaaatattgccgccgcctatattacgtcgaccgagctggtgcgcttgctgttcgggcagcttccgccgcaattttcccgattcttcaaatccttgctatactttacccatcatccgcgcattgcggaggcattgaagcgcgaaggcgtgtgttcggtcgaaaccgtccctacgctggaagccgcgctttcccattcttccatttccgtttcagacggcatggtctttcccggaacctcaaattaa

SEQ ID NO: 53864 - DNA, 771 bp, Neisseria meningitidis; identical to SEQ ID NO: 42178

SEQ ID NO: 53865 - DNA, 915 bp, Neisseria meningitidis; identical to SEQ ID NO: 42762

SEQ ID NO: 53866 - DNA, 2115 bp, Neisseria meningitidis; identical to SEQ ID NO: 43556

SEQ ID NO: 53867 - DNA, 1011 bp, Neisseria meningitidis; identical to SEQ ID NO: 43354

SEQ ID NO: 53868 - DNA, 321 bp, Neisseria meningitidis; identical to SEQ ID NO: 42585

SEQ ID NO: 53869 - DNA, 1023 bp, Neisseria meningitidis
ttgagttaccgcgatgcaggtgtcgatatcgacgcaggcgaccaactggtcgaaaacatcaaaccgtttgccaaacgcacgatgcgcccggaagtattgggggatttgggcggttttggcgcattggtcgaaatcggcaagaaatatcaaaatcccgtattggtcagcggtacggacggcgtgggtaccaagctcaagcttgcctttgattgggataaacatgatacggtcggcatcgaccttgttgcaatgagtgtcaacgatattttggttcaaggggctgagcccttgtttttcttggactattttgcctgcggtaaattggatgttccgcgcgcgaccgatgttattaaaggcattgcccaaggttgcgaagaatccggttgcgccctgattggcggggaaactgccgaaatgccgggtatgtatcccgtcggagaatacgatttggcgggttttgccgtcggcgtggtggaaaaagagaatgtcattaccggccgcagcatcggcgtaggcgatgtggtattgggtttggcttccaacggcgcacattcaaacggctattcccttatccgtaaaatcatcgaacgcgacaatcccgatctggatgccgagtttgataatggcaaaaccttgcgggaggctgttattgcgccgacccgtctgtatgtgaaaccgattcttgccgctttggaaaaatttaccattaaaggtatggcacacattaccggcggcggcattaccgaaaacgtgccgcgcgtgttgcctgaaaacacggttgcacaaatcgatgctaaatcgtgggaattgcccaagctcttccaatggcttcaaaaggcgggcaatgtggaaacccaagaaatgtaccgaacctttaactgcggcatcggcatggtcgttattgttgctgccgaagatgccgatgcggttcagggtctcttgggtgaacaaggtgaaacagtttaccgtttaggtttgatccgtgagcgtcagggagacgagcatcaaacccaggttgcctga

SEQ ID NO: 53870 - DNA, 2889 bp, Neisseria meningitidis; identical to SEQ ID NO: 43840

SEQ ID NO: 53871 - DNA, 402 bp, Neisseria meningitidis
gtgaagcgcgaatggttcgtcatcgatgcccaagacaaagtcttgggtcgcgttgcggccgaagtcgccagccgtctgcgtggcaaacacaaacctgaatacaccccccacgtcgataccggcgattacatcattgttatcaatgcggacaaactgcgtgtaaccggtgccaaattcgaagataaaaaatacttccgccattccggtttcccaggcggtatctacgaacgcaccttccgcgaaatgcaagagcaattcccgggccgcgctttggaacaagctgtaaaaggtatgctgcccaaaggtcctctgggttacgccatgattaaaaaactgaaagtgtatgcgggtgcggaacacgcccatgctgcgcaacaacccaaagttttggaactgaaataa

SEQ ID NO: 53872 - DNA, 1770 bp, Neisseria meningitidis; identical to SEQ ID NO: 43578

SEQ ID NO: 53873 - DNA, 1299 bp, Neisseria meningitidis
atggctaaaaatgttgtagtaatcggcgcacagtggggcgacgagggtaaaggtaaaatcgttgactggctggcggaagaagccggcggcgtggtgcgcttccaaggcggccacaatgcgggccataccttggttgtcggcggcaaaaaaaccattttgcgcctgattccgagcggcatcctgcatgaaagtttggactgcttcatcggttcgggcgttgtcgtctcccccgaagccctgttgggcgaaatcgacgagttgaacgcggcaggcgtgaaaaacgtcgaaggccgtctgaaaatcgcgccgacctgcccgctgatcctgccttaccacatcgcgctcgaccaagcccgcgaagcatcgcgcggcaaaggcaaaatcggcacgaccggccgcggcatcggccctgcctacgaagacaaagtggcacgccgcgccattcgcgccgccgatttgctgcatcctgaaaaactgcgtgaaaaactggatgccgtccttgcctattacaatgtccaactgcaacatctgcacaatgccgagccggttaaagcggaagacgtgatggcggttatcgaaaaagtcgcgccgcgcattgcgccgatgattaccgacgtgtcccgcgtgttgaacgagaaaaacaaaaacggcgaaaaactgctgtttgaaggcgcgcaaggtgcgttgttggacatcgactacggcacttatcccttcgttacctcgtccaactgtctggcgggcgcagcttcggcaggcgcgggcgtaggtcctcaaatgctggattatgttttgggcatcgtcaaagcctataccacgcgcgtcggttcgggcccgttcccgaccgaattgttcgacgaagtaggcgtaggtttggcagaacgcggacacgaattcggttcggtaaccggacgcgcacgccgctgcggctggtttgatgccgccgccctgaaacgctccatccaaatcaacggcatttccggtatgtgtattactaaactcgatgtaatggacggcgttgaaaccatcaatatctgcgtcggctatgaattgcccgacggcggcaaaaccgacatcctgccttgcggttccgatgcggtggaaacctgcaagccgatttacgaaaccatgcccggctggcgcgaatccactttcggcgtgaaggactacggcgcattgcccgaaaacgccaaagcatatttgaaacggattgaagaagtctgcggcgcgccggtcgccatcgtctccaccggccccgaccgagaagaaacgattgtgctgcatcatccgttcgcataa

SEQ ID NO: 53874 - DNA, 426 bp, Neisseria meningitidis; identical to SEQ ID NO: 43220

SEQ ID NO: 53875 - DNA, 312 bp, Neisseria meningitidis; identical to SEQ ID NO: 38411

SEQ ID NO: 53876 - DNA, 189 bp, Neisseria meningitidis; identical to SEQ ID NO: 42129

SEQ ID NO: 53877 - DNA, 234 bp, Neisseria meningitidis; identical to SEQ ID NO: 43916

SEQ ID NO: 53878 - DNA, 1497 bp, Neisseria meningitidis; identical to SEQ ID NO: 42594

SEQ ID NO: 53879 - DNA, 4170 bp, Neisseria meningitidis; identical to SEQ ID NO: 43884

SEQ ID NO: 53880 - DNA, 1242 bp, Neisseria meningitidis; identical to SEQ ID NO: 42302

SEQ ID NO: 53881 - DNA, 681 bp, Neisseria meningitidis; identical to SEQ ID NO: 43121

SEQ ID NO: 53882 - DNA, 1884 bp, Neisseria meningitidis
ttggccatttccgaaaacggtcaaaccaaagtgatcgaaaacgcagaaggcgcacgcaccacgccgtccgttatcgcttatttggacggcggcgaaatcctcgtcggtgcgcctgccaaacgccaagcggtaaccaacgccaaaaacactatttacgccgccaaacgtttgatcggccacaaatttgaagacaaagaagtccaacgcgacatcgaatctatgcctttcgaaatcatcaaagccaacaacggcgacgcatgggtaaaagcacaaggcaaagagctgtctcctcctcaaatttccgcagaagtcctgcgtaaaatgaaagaagccgccgaagcttacttgggcgaaaaagtaaccgaagccgtgattaccgtccctgcctacttcaacgacagccaacgtcaagccaccaaagacgcaggccgtatcgccggtttggacgtgaaacgcatcatcaacgagccgaccgcagccgctttggcattcggtatggacaaaggcgacaacaaagaccgcaaagtagccgtatatgacttgggcggcggtactttcgatatttccatcatcgaaatcgccaacctcgacggcgacaaacaattcgaagtattggcaaccaacggcgataccttcttgggcggtgaagacttcgaccaacgcctcatcgaccacatcatcgccgagttcaaaaaagaacaaggcattgatttgaaacaagacgtgatggctctacaacgcctgaaagaagctgccgaaaaagccaaaatcgaattgtccagcggccagcaaaccgaaattaacctgccgtacatcaccatggacgcaaccggcccgaaacacttggcgatgaaaattacccgcgccaaattcgaaagcctggttgaagacctgattacccgctctatcgaaccttgcaaaattgcattgaaagatgccggcttgagcaccggcgacatcgacgacgtaatcttggtcggcgggcagtcccgtatgccgaaagtacaagaagccgttaaagccttcttcggcaaagaaccgcgcaaagacgtgaaccctgacgaagccgttgccgtaggcgcagcgatccaaggcgaagtattgagcggcggccgcagcgacgtattgctactggacgtaactcctctgtctttgggtatcgaaaccatgggcggcgtgatgaccaaactgattcagaagaacaccaccatcccgaccaaagcgtcgcaagtgttctctaccgccgaagacaaccaaagcgcagtaaccatccacgtactgcaaggcgaacgcgaacgcgcttctgccaacaaatctttgggtcagttcaacttgggcgacatcgcacctgcaccgcgcggtatgccgcaaatcgaagtaaccttcgacatcgacgccaacggcatcctgcacgtttccgccaaagacaaaggcaccggtaaagcagccaacatcaccatccaaggttcttcaggtttgagcgaagaagaaatcgaacgcatggtgaaagatgccgaagccaatgccgaggaagataaaaaactgactgaattggtcgcttcccgcaaccaagccgaagccctgattcactctgtgaaaaaatctttggccgactacggcgacaaactcgacgcagccgagaaagaaaaaatcgaagccgcgctgaaagaagccgaagaagcagttaaaggcgacgacaaagccgctatcgatgccaaaaccgaggcgctgggcgcagccagccaaaaactgggggaaatggtttacgctcaagcacaagctgaagcccaagcaggcgaaagcgaacaagccaatgcttctgcaaagaaagacgatgatgtcgtagatgccgactttgaagaagtaaaagacgacaaaaaataa

SEQ ID NO: 53883 - DNA, 1116 bp, Neisseria meningitidis
atgggcttgaaaaaggcttgtttgaccgtgttgtgtttgattgttttttgtttcgggatattttatacatttgaccgggtaaatcagggggaaaggaatgcggtttccctgctgaaggagaaacttttcaatgaagagggggaaccggtcaatctgattttctgttataccatattgcagatgaaggtggcggaaaggattatggcgcagcatccgggcgagcggttttatgtggtgctgatgtctgaaaacaggaatgaaaaatacgattattatttcaatcagataaaggataaggcggagcgggcgtactttttccacctgccctacggtttgaacaaatcgtttaatttcattccgacgatggcggagctgaaggtaaagtcgatgctgctgccgaaagtcaagcggatttatttggcaagtttggaaaaagtcagcattgccgcctttttgagcacttacccggatgcggaaatcaaaacctttgacgacgggacaggcaatttaattcaaagcagcagctatttgggcgatgagttttctgtaaacgggacgatcaagcggaattttgcccggatgatgatcggagattggagcatcgccaaaacccgcaatgcttccgacgagcattacacgatattcaagggtttgaaaaacattatggacgacggccgccgcaagatgacttacctgccgctgttcgatgcgtccgaactgaagacgggggacgaaacgggcggcacggtgcggatacttttgggttcgcccgacaaagagatgaaggaaatttcggaaaaggcggcaaaaaacttcaaaatacaatatgtcgcgccgcatccccgccaaacctacgggctttccggcgtaaccacattaaattcgccctatgtcatcgaagactatattttgcgcgagattaagaaaaacccgcatacgaggtatgaaatttatacctttttcagcggcgcggcgttgacgatgaaggattttcccaatgtgcacgtttacgcattgaaaccggcttcccttccggaagattattggctcaagccggtgtatgccctgtttacccaatccggcatcccgattttgacatttgacgataaaaattaa

SEQ ID NO: 53884 - DNA, 1635 bp, Neisseria meningitidis; identical to SEQ ID NO: 43779

SEQ ID NO: 53885 - DNA, 2190 bp, Neisseria meningitidis
atgatttaccaccgcatcgccgtaaacgtgccgctttcagacggccttttgacttattcccattccgatccgcttcctccgggaacgcgggtgcttgtgcctttccgcaataaaaccgtggtcgggatggtgtgggaaacggatattgcgcccgatatggatatggcgcggattttgagtgttcagacggcctttgtggaagaaaagccgttgcctgaaagctggcgtgatttgttggcatttacgtcgcgttattaccactatccgactgggcaggcggtgtttgccgcgctgccgcagggtttgaaggaaacgcgcgcggtggaaatgccgcagccgccgttgttttatgctttgaacgaagcgggcagggcgcaaacgccgccaccagctcggttcaacaaaaaagcggctttgtgggacgcactgctttcgggcggaatgacgatggcagcgttgaagcaggtaaacgcgcaggcggcgaaattgattgaagattgggcggagcagggttggattgaaacaacggaagcggcgaaacctgtattgaggtcgtaccacgggcaggcttcgcactctgaatttgtgttgaatgccgaccagcaacaggcttccgatgaaattcagacggccttcggcagcttccagccgtttttgctgtacggcatcaccggcagcggcaagaccgaggtgtatttcgatgcgatggcgaaagtgttggcgcaggggcggcaggtgttgtttctgttgcccgaaatcaacctcacgccgcagcttttgaagcgggtggaaaaccgttttgccgacgtgccgaccgccgtgttgcacagtcagatggcggcaggcaagcgcacgcaggattatttgcgcgcgatgttggggcaggcgaaattggtcatcggcacgcggctggcggtgttcacgccgatggatgatgtcgggctgattgtggtcgatgaggaacacgacggctcgttcaaacaggacaacgaattgcgctaccacgcccgcgatttggcggtgtggcgggcgaagcagggcggctgcccgatcatattgggcagtgccacccccagcttggagagctggcacaaggcgcaaagcggcgcgtaccgcctgctgcaactgaccgaacgcgcccataccgccgcgcaactgccgcaagtggacatcctcaacgtaggccgtctgaaacttgacaacggcttctcgccgcaagccttgcagcttttgaaacagaactttgaagcaggtggcatgtcgttggtgtacctcaaccgtcgcggcttcgcgcccgcgctgttttgcggcgactgcggttataccttcggctgcccgaactgctccgccaaaatggtgctgcaccaacgcgcccgccaactgcgctgccaccactgcgaccaccgcgaacccatcccgtacaaatgccccgactgcggcaaccaagacctgaccgccgtcggccacggcacgcagcgcgtcgaagaaaccctgcgcaccttcctgcccaaggcagccgtcgtccgtgttgacagggacagcaccgcgcacaaaaacgactgggcggatttgtaccgccgcatcgccgacaacaaaatcgacattttggtcggcacgcagatgctcgccaaagggcatgatttcgcgcggctcaacctcgttatcgtgttgaacgctgacggcagcctgtacagcgcggactttcgcgccccggaaaggctgttcgccgagctgatgcaggtgtccggcagggcggggcgcgccgacaaacccggcaaggtgttgatacagacccaactgcccgaacatcccgtcttcgccgccgtcaaagcgcaggactacgccgtgtttgccgaaaacgaattgaacgagcggcaaatgttcgccatgccgcccttcggtttccagaccgccgtccgcgccgacgcgccgcgcgttgccgatgcgatggagtttctcaatgccgccaaagaaaccctcgccccgcttttgcccgaaagcgtttcacagttcggcgccgccccgatgctgatggtgcgcctcgccgaacgcgaacgcgcgcaaatcttcctcgaatctccgtcccgacaggatttgcaccgtgccgtgagtttgtgggcgcaggtgttgcagcaaaaccgcgacggcaaaatcagatggtcggtggatgtcgatccgcaggaggcttga

SEQ ID NO: 53886 - DNA, 729 bp, Neisseria meningitidis; identical to SEQ ID NO: 37361

SEQ ID NO: 53887 - DNA, 1458 bp, Neisseria meningitidis; identical to SEQ ID NO: 42683

SEQ ID NO: 53888 - DNA, 672 bp, Neisseria meningitidis; identical to SEQ ID NO: 42198

SEQ ID NO: 53889 - DNA, 291 bp, Neisseria meningitidis; identical to SEQ ID NO: 43483

SEQ ID NO: 53890 - DNA, 483 bp, Neisseria meningitidis
atgggctacatcaaaggcgtattcggcataaaaggctggttgaaaattgccgccaacaccgaatattccgacagccttttggactaccccgagtggcatttggtcaaggacggcaaaaccatcagcgttacccttgaagccggaaaagtcgtcaacggcgaactccaagtcaaattcgaaggcataaacgaccgcgacttggcattctcattgcgcggttacaccatcgaaataccccgtgaagcattcgccccgacagaagaagacgaatactactggacagacttggtcggcatgaccgttgtcaacaaagaccataccgttttaggcaaggtaagcaacctgatggaaaccggcgcaaacgacgtattgatgattgacggagaacacgggcagattctgattccgttcgtttcccaatatatcgaaaccgtcgataccggcagcaagaccattactgccgactggggtttggactactga

SEQ ID NO: 53891 - DNA, 1563 bp, Neisseria meningitidis
ttgtttgaagtgatgaaaaaacctttgatttcggttgcggcagcattgctcggcgttgctttgggcacgccttattatttgggtgtcaaagccgaagaaagcttgacgcagcagcaaaaaatattgcaggaaacgggcttcttgaccgtcgaatcgcaccaatatgagcgcggctggtttacctctatggaaacgacggtcatccgtctgaaacccgagttgctgaataatgcccgaaaatacctgccggataacctgaaaacagtgttggaacagccggttacgctggttaaccatatcacgcacggccctttcgccggcggattcggcacgcaggcgtacattgaaaccgagttcaaatacgcgcctgaaacggaaaaagttctggaacgcttttttggaaaacaagtcccggcttcccttgccaataccgtttattttaacggcagcggtaaaatggaagtcagtgttcccgccttcgattatgaagagctgtcgggcatcaggctgcactgggaaggcctgacgggagaaacggtttatcaaaaaggtttcaaaagctaccggaacggctatgatgcccccttgtttaaaatcaagctggcagacaaaggcgatgccgcgtttgaaaaagtgcatttcgattcggaaacttcagacggcatcaatccgcttgctttgggcagcagcaatctgaccttggaaaaattctccctagaatggaaagagggtgtcgattacaacgtcaagttaaacgaactggtcaatcttgttaccgatttgcagattggcgcgtttatcaatcccaacggcagcatcgcaccttccaaaatcgaagtcggcaaactggctttttcaaccaagaccggggaatcaggcgcgtttatcaacagtgaagggcagttccgtttcgatacactggtgtacggcgatgaaaaatacggcccgctggacatccatatcgctgccgaacacctcgatgcttctgccttaaccgtattgaaacgcaagtttgcacaaatttccgccaaaaaaatgaccgaggaacaaatccgcaatgatttgattgccgccgtcaaaggagaggcttccggactgttcaccaacaatcccgtattggacattaaaactttccgattcacgctgccatcgggaaaaatcgatgtgggcggaaaaatcatgtttaaagacatgaagaaggaagatttgaatcaattgggtttgatgctgaagaaaaccgaagccgacatcagaatgagtattccccaaaaaatgctggaagacttggcggtcagtcaagcaggcaatattttcagcgtcaatgccgaagatgaggcggaaggcagggcaagtcttgacgacatcaacgagaccttgcgcctgatggtggacagtacggttcagagtatggcaagggaaaaatatctgactttgaacggcgaccagattgatactgccatttctctgaaaaacaatcagttgaaattgaacggtaaaacgttgcaaaacgaaccggagccggattttgatgaaggcggtatggtttcagagccgcagcagtaa

SEQ ID NO: 53892 - DNA, 606 bp, Neisseria meningitidis; identical to SEQ ID NO: 42337

SEQ ID NO: 53893 - DNA, 477 bp, Neisseria meningitidis; identical to SEQ ID NO: 43560

SEQ ID NO: 53894 - DNA, 645 bp, Neisseria meningitidis; identical to SEQ ID NO: 43064

SEQ ID NO: 53895 - DNA, 360 bp, Neisseria meningitidis; identical to SEQ ID NO: 43172

SEQ ID NO: 53896 - DNA, 1164 bp, Neisseria meningitidis; identical to SEQ ID NO: 38788

SEQ ID NO: 53897 - DNA, 114 bp, Neisseria meningitidis; identical to SEQ ID NO: 43789

SEQ ID NO: 53898 - DNA, 270 bp, Neisseria meningitidis; identical to SEQ ID NO: 36672

SEQ ID NO: 53899 - DNA, 726 bp, Neisseria meningitidis; identical to SEQ ID NO: 42665

SEQ ID NO: 53900 - DNA, 192 bp, Neisseria meningitidis; identical to SEQ ID NO: 42043

SEQ ID NO: 53901 - DNA, 300 bp, Neisseria meningitidis; identical to SEQ ID NO: 37288

SEQ ID NO: 53902 - DNA, 423 bp, Neisseria meningitidis; identical to SEQ ID NO: 43566

SEQ ID NO: 53903 - DNA, 1296 bp, Neisseria meningitidis; identical to SEQ ID NO: 42403

SEQ ID NO: 53904 - DNA, 459 bp, Neisseria meningitidis; identical to SEQ ID NO: 52474

SEQ ID NO: 53905 - DNA, 486 bp, Neisseria meningitidis; identical to SEQ ID NO: 43447

SEQ ID NO: 53906 - DNA, 738 bp, Neisseria meningitidis; identical to SEQ ID NO: 42917

SEQ ID NO: 53907 - DNA, 1692 bp, Neisseria meningitidis
atgagcgcatcacaattactgtcaagactgacccaaaccgtaggcgaaaaatacatcatcaccgaccccgcgaaaaccgaacaataccgccaaggttaccgcttcggcgagggtaaggcgttggcggtggttcgccccggaagcattctggaaatgtggaaaattctgcaggcgtgcgtcgaagcagacgtgattgtgattacgcaggcggcgaataccggtttgacgggcggctcgacccccgacggcaacgattacgaccgcgacatcgtgattgtgaacaccatgcggatgaacatcatccaaaccatcaacaacaacgaacaagtcgtctgcctgcccggctcgaccctgaaccagctcgaattgctgctgaaacctttggggcgcgaaccgcattcggttatcggctcatcctgtatcggcgcgtccgtcttgggcggcgtgtgcaacaactctggcggcgcgttggtacagcgcggcccggcctacaccgaaatggcgttgttcgcccaaatcaacgaagaaggcaggttggaactggtcaaccacttgggcatagacttgggcaacacgcccgaagaaatcctgaccaatcttcaaggtcatcattatcaaaacaaagacatcacgcaagacgcgggcaaaggacacgaccacgcctattgcgaacatgtccgccaagtggacgaaccgaccgccgcgcgtttcaatgccgacccagcgcgccattacgaagcctcgggctgcgcgggcaagctgatggtattcgccgtccgcttggatacctttccgcaagaaaaacaaacggccgtgttctacatcggcacgaacgacatcaacgagctgaccgacatccgccgcgccgccttgggcgaatttgaaagcctgcccgtttccggcgaatacatccaccgccacgctttcgacattgccgacgtgtacggcaaagatacgttttacgtcatcaaaaaattcggtacgcaccaactgccgaaattatttgatttgaaggcacgcgtggacaggttcggcaaaaaagtcagcttcctgcccaaacatttttccgacaaggcaatgcagttcgtcagcaaattcctgcctgaccatctgcccaaatccatgcgcgattaccgcgacaaatacgaacaccacctgattctgaaaatgggcggaaaaggcgtggatgaggcgcgcgcgttcctgaaagagtattttgcacatcacggcggcgcgtttttcgagtgcaacgccgaagaaacccaagccgcgatgctgcaccgtttcgccgtcgcctcagccgccatccgctaccgtgccgtacacgacgacgaagtggaggacttggtcgcgcttgacatcgccctgcgccgcgacgaccgcgactggtttgaaaaactgccgccggaaatcgacaataaaatcatccacaagctctactacggacatttcatgtgccacgttttccatcaggattacatcatcaaaaaaggcaacgactgcatggcattggaacacgaaatgctgcatctcttggatcaacgcggcgcgcaatatccagccgaacacaacgtcggccatttgtacgaagccaagcccgcgctcaaacagttttaccgcaaacttgacccgaccaacagcttcaacccgggcgtaggcaaaaccagcaaaaagaaaaactgggcggaataa

SEQ ID NO: 53908 - DNA, 1260 bp, Neisseria meningitidis; identical to SEQ ID NO: 43173

SEQ ID NO: 53909 - DNA, 768 bp, Neisseria meningitidis; identical to SEQ ID NO: 43568

SEQ ID NO: 53910 - DNA, 984 bp, Neisseria meningitidis; identical to SEQ ID NO: 42465

SEQ ID NO: 53911 - DNA, 1791 bp, Neisseria meningitidis; identical to SEQ ID NO: 42942

SEQ ID NO: 53912 - DNA, 1923 bp, Neisseria meningitidis; identical to SEQ ID NO: 42968

SEQ ID NO: 53913 - DNA, 756 bp, Neisseria meningitidis; identical to SEQ ID NO: 42607

SEQ ID NO: 53914 - DNA, 1512 bp, Neisseria meningitidis; identical to SEQ ID NO: 43490

SEQ ID NO: 53915 - DNA, 453 bp, Neisseria meningitidis; identical to SEQ ID NO: 42167

SEQ ID NO: 53916 - DNA, 564 bp, Neisseria meningitidis; identical to SEQ ID NO: 43706

SEQ ID NO: 53917 - DNA, 732 bp, Neisseria meningitidis; identical to SEQ ID NO: 42778

SEQ ID NO: 53918 - DNA, 1065 bp, Neisseria meningitidis; identical to SEQ ID NO: 43024

SEQ ID NO: 53919 - DNA, 489 bp, Neisseria meningitidis; identical to SEQ ID NO: 44020

SEQ ID NO: 53920 - DNA, 465 bp, Neisseria meningitidis; identical to SEQ ID NO: 43399

SEQ ID NO: 53921 - DNA, 456 bp, Neisseria meningitidis; identical to SEQ ID NO: 39491

SEQ ID NO: 53922 - DNA, 1008 bp, Neisseria meningitidis
atgtatccacttgcccgtcgcatcctgtttgcactcgatgccgaaaaagcccaccacttcacgctcgacgcgctctacacggtttataaattgggtttgattcctgtaaccgacaaccgtaccaaacctgtaaaattgatgggtatggatttgcccaaccctgtcggacttgccgccggactcgacaaaaacggcgaatacatcgacgcattgggcgcgctcggctttggtttcatcgaaatcggcacggtaacgcccaacccgcagcccggcaacccgcagccgcgcctctttcgcgttcccgaacaccaaggcatcatcaaccgcatgggtttcaacaaccacggtatcgacaccatgatacgcaacatcgaaaaaagtaaattcagtggcgtattgggcatcaacatcggtaaaaacgcggttacacccatcgaaaacgctgccgatgattatttaatctgccttgaaaaagcctacgcacacgcaagttacattaccgtcaatatttcctcgcccaacactaaaaacctccgcgcgctgcaaggtggcgacgagttgagcgcattgcttgaggctttgaaaaacaaacaggcacagcttgcctctgtacacgggaaatacgtcccgctcgccgtcaaaatcgcccccgatttggatgaagcacaaatcgaagacatcgcccacgttgtcaaatccgtcgaaatggacggcatcatcgctaccaataccaccatcgacaaatcaagtctcggcagccatccgctcgcaggcgagcagggcggtttgagcgggctgcccgttcatgaaaaaagtaatcgggtgttgaagctgttggcagaccacatagacggcaagctgccgattatcggcgtaggcggcattatggaaggcgaggactcggcagataaaatccgcttgggcgcgaccgccgtccaagtgtacagcggattgatatacaaaggtccggcattggtcaaagaatgtttgaaggctttggcgcgatga

SEQ ID NO: 53923 - DNA, 2274 bp, Neisseria meningitidis; identical to SEQ ID NO: 37870

SEQ ID NO: 53924 - DNA, 279 bp, Neisseria meningitidis; identical to SEQ ID NO: 43450

SEQ ID NO: 53925 - DNA, 213 bp, Neisseria meningitidis; identical to SEQ ID NO: 36410

SEQ ID NO: 53926 - DNA, 1470 bp, Neisseria meningitidis
ttggcactggcacttgccgtcattacccgccgcgtactgctgtctttaggcatcggtattctggtcggcgttgcctttttggtcggcggcaaccccgtcgacggtctgacacacctgaaagacatggtcgtcggcttggcttggtcagacggcgattggtcgctgggcaaaccaaaaatcttggttttcctgatacttttgggtatttttacttccctgctgacctactccggcagcaatcaggcgtttgccgactgggcaaaacggcacattaaaaaccggcgcggcgcgaaaatgctgaccgcctgcctcgtgttcgtaacctttatcgacgactatttccacagtctcgccgtcggtgcgattgcccgccccgttaccgacaagtttaaagtttcccgcaccaaactcgcctacatcctcgactccactgccgctcctatgtgcgtgctgatgcccgtttcaagctggggcgcgtcgattatcgccacgcttgccggactgctcgttacctacaaaatcaccgaatacacgccgatggggacgtttgtcgccatgagcctgatgaactattacgcactgtttgccctgattatggtgttcgtcgtcgcatggttttccttcgacatcggctcgatggcacgtttcgaacaagccgcgttgaacgaagcccacgatgaaactgccgtttcagacgctaccaaaggtcgtgtttacgcactgattattcccgttttggccttaatcgcctcaacggtttccgccatgatctacaccggcgcgcaggcaagcgaaaccttcagcattttgggggcatttgaaaacacggacgtaaacacttcgctggtattcggcggcacttgcggcgtccttgccgtcgttctctgcacgctcggcacgattaaaaccgccgactatcccaaagccgtttggcagggtgcgaaatctatgttcggcgcaatcgccattttaatcctcgcttggctcatcagtacggttgtcggcgaaatgcacaccggcgattacctctccacactggttgcgggcaacatccatcccggcttcctgcccgtcatcctcttcctgctcgccagcgtgatggcgtttgccacaggcacaagctgggggacgttcggcattatgctgccgattgccgccgccatggcggtcaaagtcgaacccgcgctgattatcccgtgtatgtccgcagtaatggcgggggcggtatgcggcgaccactgctcgcccatttccgacacgaccatcctgtcgtccaccggcgcgcgctgcaaccacatcgaccacgttacctcgcaactgccttacgccttaaccgttgccgccgccgccgcatcgggctacctcgcattgggtctgacaaaatccgcgctgttgggctttggcacgacaggcattgtattggcggtgctgatttttctgttgaaagataaaaaacgcgccaacgcctga

SEQ ID NO: 53927 - DNA, 348 bp, Neisseria meningitidis; identical to SEQ ID NO: 43724

SEQ ID NO: 53928 - DNA, 642 bp, Neisseria meningitidis
atgaaagcctttaccaaaattaccgccatcgtcgccccgctcgaccgcagcaacgtcgataccgacgccatcatccccaaacaatttttaaaatccatcaaacgcagcggcttcggccccaatgcctttgacgaatggcgttacctcgaccacggcgaaccaggcatggacaacagcaaacgcccgttgaaccctgatttctcgctgaaccagccgcgttaccaaggcgcgcaaatcctgttgacgcgtaaaaacttcggttgcggctcttcacgcgaacacgccccttgggcattggacgactacggcttccgcgccgtcatcgcccccagcttcgccgacatcttctttaacaactgctacaaaaacggccttttacctatcgtgttgaccgaagaacgggttgaccgacttttcaaagaagttgaagccaacgaaggctatcagctctccatcgaccttgccgaacaaaccctgaccacaccaagcggcgaaacgttcacatttgacattaccgaacaccgcaaacactgcctcttaaacggcttggacgaaatcggtctgaccctgcaacacgccgacgaaattcacgcctttgaagaaaaacgccgccaaagccagccttggctgtttaacggttaa

SEQ ID NO: 53929 - DNA, 729 bp, Neisseria meningitidis; identical to SEQ ID NO: 43075

SEQ ID NO: 53930 - DNA, 1389 bp, Neisseria meningitidis; identical to SEQ ID NO: 42946

SEQ ID NO: 53931 - DNA, 2295 bp, Neisseria meningitidis; identical to SEQ ID NO: 42669

SEQ ID NO: 53932 - DNA, 483 bp, Neisseria meningitidis; identical to SEQ ID NO: 42752

SEQ ID NO: 53933 - DNA, 303 bp, Neisseria meningitidis; identical to SEQ ID NO: 43286

SEQ ID NO: 53934 - DNA, 312 bp, Neisseria meningitidis; identical to SEQ ID NO: 42205

SEQ ID NO: 53935 - DNA, 357 bp, Neisseria meningitidis; identical to SEQ ID NO: 42136

SEQ ID NO: 53936 - DNA, 600 bp, Neisseria meningitidis; identical to SEQ ID NO: 37454

SEQ ID NO: 53937 - DNA, 546 bp, Neisseria meningitidis; identical to SEQ ID NO: 37730

SEQ ID NO: 53938 - DNA, 378 bp, Neisseria meningitidis; identical to SEQ ID NO: 43612

SEQ ID NO: 53939 - DNA, 159 bp, Neisseria meningitidis; identical to SEQ ID NO: 42666

SEQ ID NO: 53940 - DNA, 129 bp, Neisseria meningitidis; identical to SEQ ID NO: 42393

SEQ ID NO: 53941 - DNA, 294 bp, Neisseria meningitidis; identical to SEQ ID NO: 36355

SEQ ID NO: 53942 - DNA, 828 bp, Neisseria meningitidis; identical to SEQ ID NO: 43711

SEQ ID NO: 53943 - DNA, 720 bp, Neisseria meningitidis
ttgactttaacccgaaaaacccttttccttctcaccgccgcattcggcacacactcccttcagacggcatccgccgacgcagtggtcaaggcagaaaaactgcacgcctccgccaaccgcagctacaaagtcgccggaaaacgctacacgccgaaaaaccaagtcgccgaattcacgcaaaccggcaacgcctcgtggtacggcggcaggtttcacgggcgcaaaacttccggcggagaacgatacgatatgaacgcctttaccgccgcccacaaaaccctgcccatccccagctatgtgcgcgtaaccaataccaaaaacggcaaaagcgtcatcgtccgcgtcaacgaccgcggccccttccacggcaaccgcatcatcgacgtatccaaagccgccgcgcaaaaattgggctttgtcaaccaagggacggcacacgtcaaaatcgaacaaatcgtcccgggccaatccgcaccggttgccgaaaacaaagacatctttatcgacttgaaatctttcggtacggaacacgaagcacaagcctatctgaaccaagccgcccaaaacttcgccgtttcgtcatcgggtacgaacctctcggttgaaaaacgccgttacgaatacgtcgtcaaaatgggaccgtttacctcgcaggaacgcgccgccgaagccgaagctcaggcgcgcggtatggttcgggcggtattgaccgccggctga

SEQ ID NO: 53944 - DNA, 1434 bp, Neisseria meningitidis; identical to SEQ ID NO: 40569

SEQ ID NO: 53945 - DNA, 390 bp, Neisseria meningitidis; identical to SEQ ID NO: 42105

SEQ ID NO: 53946 - DNA, 1401 bp, Neisseria meningitidis; identical to SEQ ID NO: 43904

SEQ ID NO: 53947 - DNA, 1296 bp, Neisseria meningitidis; identical to SEQ ID NO: 43716

SEQ ID NO: 53948 - DNA, 1332 bp, Neisseria meningitidis; identical to SEQ ID NO: 42871

SEQ ID NO: 53949 - DNA, 2766 bp, Neisseria meningitidis
atgcgaatccgccgtcgtctgaaaaacatttatctgctggacaagaaaaaccttgcccgcaaccatgtgcaggttatcaaccagtttgagcagacgggcacgcatgcaaaccgctatgacgttaccgtgttggtaaacggcctgccgctggtgcagattgaattgaaaaagcgcggtgtggcggtgcgcgaggcattcaatcaggtgcaccgttacagcaaagagagcttcaacagcgaaaattcgctgttcaaattcctgcaaatcttcgtgatttccaacggcacggacacgcgctatttcgccaacaccaccaagcgcgacaaaaacagcttcgatttcacgatgaattgggcgcggtcggacaatcatccgattaaggatttgaaagactttaccgccacgttcctgcagaaaagcgtattgctgggcgttttgctgcattacagcgtgttcgatgcgaatgatacgctgctgattatgcggccgtatcagattgccgccgccgaacgcattttgtggaaaatcaacagctcggcgcaggcgaagaattggagcaaaccggaaagcggcggctatgtctggcacaccacgggcagcggcaaaacgctgaccagctttaaggcggcgcgtctggcgacggaatcggcatttatcgacaaggttttcttcgtggtggacaggaaggatttggactatcagacgatgaaggaataccaacgtttttcgcccgacagcgtgaacggttcggaaagcacggcaggcttgaaacgcaatttggaaaaagacgacaacaaaatcatcgttaccaccatccaaaagctgaacaacctgatgaagggcgaagataatctgccggtttaccatcagcgagttgtctttattttcgacgaatgccaccgctcgcaattcggcgaagcgcaaaaaaacctgaaaaagaaatttaaaaaattctgccagttcggctttaccggcacgccgatttttcccgaaaacgctttgggcgcggaaaccacggcgggcgtgttcgggcgggagctgcattcttatgtgattaccgatgccatccgcgatgaaaaagtattgaaattcaaagtggattacaacgacgtgcgcccgcagttcaaagccgtggaagcggaacaggacgagaagaaactgagtgccgccgaaaaccacaaagccctgctgcaccctgaacgcatccgcgaaatcacgcaatatatcctgaatcagttcaggcagaaaacgcaccggctgaatgcgggtggcaaaggctttaacgcgatgtttgccgtcagcagcgtggatgcggcgaagtgctattacgaagcgttcaaaacacaacaggcaggcagcttgcacccgctgaaagtggccaccattttttcctttgcggccaacgaagagcaaaacgccgtcggtgaaattgtcgatgagacttttgaaccggaagcgatggacagcagcgcaaaagaatttttgcaggctgccatcaacgattacaacgcctgtttcaaaaccaatttcggcacggacagcaaagcctttcaaaactactaccgagatttggcaaaacgggtgaaaaatcaggaaatagatttgctgattgtggtcggcatgtttttgacgggttttgacgcgccgacgctgaacacgttgttcgtcgataaaaacctgcgctatcacggcctgatgcaggcgttttcgcgcaccaaccgcatttacgatgccaccaaaaccttcggcaatattgtctgcttccgcgatttggagcaggcaaccattgatgcgattaccttgtttggcgacaaaaacaccaaaaacgtggtgctggaaaaaagttacgaagaatacatgaacggctataccgacagccagaccggcgaagcacggcgcggttatctggatgtggcaaaagaattgcgcgagcgtttccccgatcccgacaaaatcgaaacggaaaaagacaaaaaagattttgccaaactcttcggcgaatacctgcgggcggaaaacgtattgcagaactacgatgaatttgccgcgctgcgcgagttgcagagtgtggacgcggcggacgaagatgcgatgaaggcgtttcaagaaaaatactacctgagcgatgaagacgtgcaggaaatgcggcaagtgccgatgccgtctgaaagggcggtgcaggactaccgttccgcctacaatgacatccgcgactggctgcgccgccaaaaagcaggcgaacagaaagagcaatcaaaaatcgactgggacgatgtggtttttgaggtggatttgctcaaatcacaggaaatcaatctggattacatcctgcaactggttttcgaacaccacaaaaaaatcaaaggcaaagcggagctggtggaagaaatccgccgcatcatccgcgccagcatcggccaccgcgccaaagagggtctgattgtggatttcatcaacgatacggatttggacaaagtacccgacgttcccgccatactggaaaccttctacacctacgcgcaagaggtgatgcggcacgaagcggcaggattgattgccgccgaaggcctgaacgaaaccgccgccaaacgctatttaatcagctcgctcaaacgcggctatgccagcgaaaacggcacggaactgaccgaaaccctgccgaaaatgagtccgctcaacccgcaatatctgacgaagaaacaaagtgtttttcaaaagattgcggcgtttgtggagaagtttgccggaatagggaccgatatttga

SEQ ID NO: 53950 - DNA, 579 bp, Neisseria meningitidis; identical to SEQ ID NO: 43267

SEQ ID NO: 53951 - DNA, 1338 bp, Neisseria meningitidis; identical to SEQ ID NO: 42828

SEQ ID NO: 53952 - DNA, 513 bp, Neisseria meningitidis; identical to SEQ ID NO: 37445

SEQ ID NO: 53953 - DNA, 1266 bp, Neisseria meningitidis; identical to SEQ ID NO: 51654

SEQ ID NO: 53954 - DNA, 531 bp, Neisseria meningitidis; identical to SEQ ID NO: 43484

SEQ ID NO: 53955 - DNA, 2214 bp, Neisseria meningitidis; identical to SEQ ID NO: 42436

SEQ ID NO: 53956 - DNA, 1290 bp, Neisseria meningitidis; identical to SEQ ID NO: 50425

SEQ ID NO: 53957 - DNA, 336 bp, Neisseria meningitidis; identical to SEQ ID NO: 43431

SEQ ID NO: 53958 - DNA, 657 bp, Neisseria meningitidis; identical to SEQ ID NO: 42491

SEQ ID NO: 53959 - DNA, 1116 bp, Neisseria meningitidis; identical to SEQ ID NO: 42493

SEQ ID NO: 53960 - DNA, 453 bp, Neisseria meningitidis; identical to SEQ ID NO: 43180

SEQ ID NO: 53961 - DNA, 3966 bp, Neisseria meningitidis
atgtctgtcgttttgcccttgcgcggcgttaccgccctttccgatttccgtgtcgaaaaactcttgcaaaaagccgccgcactcggtctgcccgaagtcaaattaagcagcgaattttggtatttcgtcggcagcgagaaagcacttgatgccgcgactgtcgaaaaactgcaagccttgttggcggcgcaaagcgttgaacaaacgccaaaagcgcgcgagggcttgcatttgtttttggtcacgccccgtttgggtacgatttcgccgtgggcttccaaggcgaccaatatcgcggaaaactgcggtttggcaggcattgagcgtatcgaacgcggcatggcggtgtggctggaaggtgcgcttaccgacaggcaaaaacaacaatgggcagccctgttgcacgaccgcatgaccgaaagcgtgttgaccgacatcgatgcggcggcgcaactgttccaccacatccaatcggaaactttctccaccgttgatgttttgggcggcggtaaagaagctttggtcaaagccaataccgaaatgggcttggcactctccgccgacgaaatcgattatctggttgaaaactatcaggctttgcagcgcaatccgtccgatgttgaattgatgatgttcgcgcaggcaaacagcgaacactgccgccacaaaatcttcaacgccgatttcatcctcaacggcgaaaaacaaccgaaatccctcttcggcatgatacgcgacacgcacaacgcgcatcccgaaggtacggtcgtcgcttataaagacaattcgtccgtaatcgaaggcgcgaaaatcgagcgtttctatccggatgcggcggaaaaccaaggctaccgtttccacgaggaagacacgcatatcatcatgaaagtggaaacgcacaaccacccgaccgccatcgcgccgtttgcgggcgcggcgacgggcgcgggcggcgaaatccgcgacgaaggtgcgacgggcaaaggttcgcgtccgaaagcgggcttgaccggctttaccgtgtccaacctcaacatccccggcctcaaacagccgtgggaacaagattacggcaagccggaacatatttcctcgccgctggacattatgattgaaggccccatcggcggcgcggcgttcaacaacgaattcggccgccccaacctcttgggctacttccgcacctttgaagaaaaatttgacggtcaggttcgcggctaccacaaaccgattatgattgccggcggtctgggcagcattcaggcgcagcagacgcataaagacgaaatccccgaaggcgcgttgctgatccaactgggcggcccgggtatgcttatcggcttgggcggcggcgcggcttcttcgatggataccggtacaaacgacgcttctttagacttcaactccgtacaacgcggcaaccccgaaatcgaacgccgtgcgcaggaagtgatcgaccgatgctggcagcttggcgataaaaacccgattatctccatccacgatgtcggtgcaggcggcttgtccaacgccttccccgaactggtcaacgatgccggacgcggcgcggtattcgagctgcgcgaagtgccgttggaagaacacggtttaacgcctttgcaaatctggtgcaacgaatcgcaagagcgttatgtattgtcgattttggaaaaagatttggagaccttccgcgccatctgcgaacgcgaacgctgcccgtttgccgtagtcggcacggcgaccgacgacggccatttgaaagttcgcgacgatttgttcgccaacaaccccgtcgatttgccgctgaacgtcttgctcggcaaaccgcccaaaaccacgcgcaccgacaaaacggttacgccgtccaaaaaaccgtttcacgccggcgatatcgacatcaccgaagccgcctaccgcgttttgcgcctgcctaccgtagcagctaaaaacttcctgattaccatcggcgaccgcagcgtcggcggcatgacccaccgcgaccaaatggtcggcaaataccaaacccccgtagccgactgcgccgttaccatgatgggcttcaatacctatcgcggcgaagcaatgtctatgggcgaaaaaccgaccgttgccctgtttgacgcgcccgcctcgggcagaatgtgcgtcggcgaagccatcaccaacatcgcggcagccaatatcggcgacatcggcaacatcaaactctccgccaactggatggcggcgtgcggcaacgaaggcgaagacgaaaaactctaccgcaccgtcgaagcggtttccaaagcctgtcaggcattggatttgagcattcccgtgggcaaagacagcctgtcgatgaaaaccgtgtggcaggacggcgaagagaaaaaatccgtcgtttcgccgttgagcctgattatctccgcgttcgcaccggttcaagacgtacgcaaaaccgttacgcccgaattgaaaaacgtcgaggacagcgtattgctgtttgtcgatttgggcttcggcaaagcgcgtatgggcggctctgcattcggtcaggtatacaacaacatgagcggcgacgcgcccgatttggacgacacaggccgtctgaaagcgttttacaacgtgattcaacagcttgtcgccgaagacaaactcttggcataccacgaccgcagcgacggcggcttgtttgccgttttggtagaaatggcgtttgcagggcggtgcggcttggatatagatttaaatttattgcttgcacaaacatttattaccaaccataccgctctgtctcaatcattgcggactgaagaggtaaaagcgttggctgaatggcaagaaaccattgcccgcacattatttaatgaagagttgggtgctgttatccaagttagaaaacaagatgttgccgatattatcaatttattctatcaacaacagctgcatcataatgtctttgaaatcggtacgttaactgatgagaacacgttaatcatccgcgacgggcaaacgcaccttatttctgacaacctaatcaaactgcaacaaacctggcaagaaaccagccatcaaatccaacgcctgcgcgacaaccctgcctgcgccgacagcgagttcgcactgattggcgacaacgaacgcagcgcattgtttgccaacctgaaattcgacgtgaacgaagacatcgccgcgccgtttatcaacagcggcgcgaaacccaaaatcgccatcctgcgcgaacagggcgtgaacgggcaaatcgaaatggccgccgcgttcacccgtgccggattcgatgcctacgacgtgcatatgtccgacctgatggcaggccgcttccgccttgccgacttcaaaatgctggcggcgtgcggcggcttcagctacggcgacgtactcggcgcgggcgaaggctgggcgaaatccatcctgttccaccctgctctgcgcgaccagtttgccgcattcttcgccgacccggacacgctgacattgggcgtgtgcaacggctgccaaatggtcagcaacctcgccgagattatcccgggtgcagcagaggcatggcctaaattcaaacgcaacctgagcgaacagtttgaagcacgcctgagtatggttcatgtccccaaatccgcgtcgctgattctgaacgaaatgcaaggctccagcctgcccgtcgtcgtcagccacggcgaaggccgcgccgacttcgcgcttcacggcggcaatatttccgccgatttgggcattgcgctgcaatatgtggacggtcaaaaccaagttacccaaacctatccgctcaaccccaacggctcgccgcaaggcatcgccggcattaccaacgccgacggccgcgtgaccatcatgatgccccaccccgaacgcgtgtaccgtgccgcacaaatgagctggaaaccagaagactggacggaattgtccggctggtaccgcctctttgccggcgcacgtaaagccttgggctaa

SEQ ID NO: 53962 - DNA, 1011 bp, Neisseria meningitidis
atgcacatcggcggctattttatcgacaaccccatcgcacttgcgccgatggcgggcattaccgacaaaccgttccgccgactttgccgagattttggcgcaggttgggcggtgtgcgaaatgctgaccagcgacccgacgctcagaaatactagaaaaaccttgcaccgcagcgattttgccgatgaaggcggcattgttgccgtgcagattgccggaagcgatccgcagcagatggcggatgccgcgcgttacaacgtcagccttggggcgcagcttatcgacatcaacatgggctgtcccgctaaaaaagtctgcaatgtccaagccggtagcgcgctgatgcagaacgagccgctggttgccgccattttggaagccgtcgtccgtgcggcaggcgtacccgttaccctcaaaacccgtttgggttggcacgacgaccatcaaaacctgcccgtcatcgccaaaatcgccgaagattgcggcatcgccgcccttgccgtccacggacgcacgcgtacgcaaatgtacaaaggcgaagcgcgttacgaactcatcgctgaaaccaaatgccgtctgaacatcccggtctgggtcaacggcgacattacttcgccgcaaaaagcccaagccgtcctcaaacaaaccgccgccgacggcattatgatagggcgcggcgcgcaaggcaggccgtggttcttccgcgatttgaaacattatgccgaacacggtgttttgccgcctgccttgagtttggcagaatgcgccgccgctattttgaaccacatccgcgccatacacgcgttttacggcgacaccgccggtgtgcgcatcgcacgcaaacacataggctggtacatcgacgaaatgcccgacggcgaacagacacgtcgtgaaatcaaccgcttggacagtgcggcggcgcaatacgacatgcttgcaggttatcttgaaagacttgccgaaaaaaccgacagttgggcgtgcgcctaccgcccaaatgccttctga

SEQ ID NO: 53963 - DNA, 132 bp, Neisseria meningitidis; identical to SEQ ID NO: 42334

SEQ ID NO: 53964 - DNA, 216 bp, Neisseria meningitidis; identical to SEQ ID NO: 42829

SEQ ID NO: 53965 - DNA, 669 bp, Neisseria meningitidis; identical to SEQ ID NO: 42911

SEQ ID NO: 53966 - DNA, 1254 bp, Neisseria meningitidis; identical to SEQ ID NO: 43636

SEQ ID NO: 53967 - DNA, 246 bp, Neisseria meningitidis; identical to SEQ ID NO: 42918

SEQ ID NO: 53968 - DNA, 1929 bp, Neisseria meningitidis
ttgatcgaatgtaaaaacatcaaccgctatttcggcagcggcgagaaccgcgtccatattttgaaagacatcagcctgtcgatagagaagggcgattttgtcgccatcatcgggcagtccggttcgggcaagtccacgctgatgaacatactcggctgtttggataccgccggttccggttcgtaccgaatcgacggcatcgaaactgccaaaatgcagcctgacgagctggcggcattgcgccgcgaacgcttcggtttcatcttccaacgctacaacctcttaagctcgctgaccgcaagggacaacgtcgcgctgccagccgtctatatgggcgcgggcggcaaagagcgttccgcgcgggcggacaaactcttgcaggatttgggtttggcaagcaaagagggcaacaagcccggcgaactctcgggcggacagcagcagcgcgtctccatcgcccgcgccctgatgaacggcggagaaatcatcttcgccgacgagccgaccggcgcgctcgataccgccagcggcaaaaacgtgatggaaatcatccgcaggctgcacgaagccgggcataccgtcattatggtcacgcacgaccccgacatcgccgccaatgccaaccgcgtcatcgaaatccgggacggcgaaatcatttccgacacctcgaaaaatcccgaaatccccgcaagcaatgtcgggaggattcgggaaaaagcttcgtggtcgttttattacgaccagtttgtcgaagccttcagaatgtcggtgcaagcagtattggcgcacaaaatgcgttcgcttctgacgatgctcggcatcatcatcggtatcgcgtcggtggtttccgtcgtcgcattgggcaatggttcgcagaaaaaaatccttgaagacatcagttcgatagggacgaacaccatcagcatcttcccggggcgcggcttcggcgacaggcgcagcggcaggattaaaaccctgaccatagacgacgcaaaaatcatcgccaaacaaagctacgttgcttccgccacgcccatgacttcgagcggcggcacgctgacttaccgcaacaccgacctgaccgcctcgctttacggcgtgggcgaacaatatttcgacgtgcgcggactgaagctggaaacggggcggctgtttgacgaaaacgatgtgaaagaagacgcgcaggtcgtcgtcatcgaccaaaatgtcaaagacaaactctttgcggactcggatccgttgggtaaaaccattttgttcaggaaacgccccttgaccgtcatcggcgtgatgaaaaaagacgaaaacgctttcggcaattccgacgtgctgatgctttggtcgccctatacgacggtgatgcaccaaatcacaggcgagagccacaccaactccatcaccgtcaaaatcaaagacaatgccaatacccaggttgccgaaaaagggctgaccgatctgctcaaagcgcggcacggcacggaagatttcttcatgaacaacagcgacagcatcaggcagatagtcgaaagcaccaccggtacgatgaagctgctgatttcctccatcgccctgatttcattggtagtcggcggcatcggcgtgatgaacatcatgctggtgtccgttaccgagcgcaccaaagaaatcggcatacggatggcaatcggcgcgcggcgcggcaatattttgcagcagtttttgattgaggcggtgttaatctgcgtcatcggcggtttggtcggcgtgggtttgtccgccgccgtcagcctcgtgttcaatcattttgtaaccgacttcccgatggacatttccgccatgtccgtcatcggcgcggtcgcctgttcgaccggaatcggcatcgcgttcggctttatgcctgccaataaagcagccaaactcaatccgatagacgcattggcacaggattga

SEQ ID NO: 53969 - DNA, 486 bp, Neisseria meningitidis
atgagtaataaaatggaacaaaaagggtttacattgattgagatgatgatagtcgtcgcgatactcggcattatcagcgtcattgccataccttcttatcaaagttatattgaaaaaggctatcagtcccagctttatacggagatggtcggtatcaacaatatttccaaacagtttattttgaaaaatcccctggacgataatcagaccatcgagaacaaactggaaatatttgtctcaggctataagatgaatccgaaaattgccaaaaaatatagtgtttcggtaaagtttgtcgataaggaaaaatcaagggcatacaggttggtcggcgttccgaaggcggggacgggttatactttgtcggtatggatgaacagcgtgggcgacggatacaaatgccgtgatgccgcttctgcccaagcccatttggagaccttgtcctcagatgtcggctgtgaagccttctctaatcgtaaaaaataa

SEQ ID NO: 53970 - DNA, 1197 bp, Neisseria meningitidis; identical to SEQ ID NO: 42954

SEQ ID NO: 53971 - DNA, 729 bp, Neisseria meningitidis
atgatcaaattcaaaaacgtacacaaacatttcaaagacctgcacgtcatcaacggcgtgaacttggaaatcaaaaaaggcgaagtggtcgtcgtctgcgggccttcgggcagcggcaaatccacactcatccgcaccgtcaaccagcttgaaagcatcgaaagcggcgagatttgggtggacggtgtcaacgttgccgacccaaaaaccgatttgaacaaaatccgcgaagaagtcggctttgtgtttcaaagtttcaacctctacccgcacctgaccgtgttggaaaacattaccctcgcaccgatgaaggttaaggggcaaaatgcggaacaggcggagaaaaaggcaatggagcttttggaacgcgtcggactggcacacaaaaaagacgccttcccttcccaactttccggcggccagcagcaacgcgtggcgattgcacgcggtttggcgatggaaccgcgcgtaatgttgtttgacgaaccgacctccgcactcgaccccgaaatggtcggcgaagtgttgaaagtgatgaaagacttggcggaaagcggcatgaccatgatgtgcgtaacccacgaaatgggttttgcccgcgaagttgccgaccgcgtgattttcgtcgataaagggcaaatcctcgaagacgaaacgccggaagcgttttttaccaacccgaaacacgaacgcgccaagcagttcctgcaacaggtcatgacccattga

SEQ ID NO: 53972 - DNA, 441 bp, Neisseria meningitidis; identical to SEQ ID NO: 42705

SEQ ID NO: 53973 - DNA, 471 bp, Neisseria meningitidis; identical to SEQ ID NO: 43761

SEQ ID NO: 53974 - DNA, 903 bp, Neisseria meningitidis
atggacagcctgatgacgttgctttcggtattgataccgatgtttgccggattttttatccgtgtgcccaagccttacctgcccgctttggataaggtgctatcggtcttggtgtatgctgtgctgctgctgatcggcgtctcgttgtcgcgcgtggaggatttgggttcgcggttggacgatatggcgttgacggttctgtggctgtttgtttgtacggtcggggcgaacctgcttgctttggcagtgttgggaaagttattcccgtggcggataaaggggaaagggaagggcgtttcggtcggcgtgtcgggcagtgtggggcagctcggatgcgtgctgctcggatttgcattcggcaaactgatgcgcgatatttggatgccgtctgaaagcgcgggcatgtattgtctgatgctgctggtgttcctcatcggcgtacagctcaaaagcagcggcgtatcgttgcggcaggttttggtcaaccgcaggggtattcggttgtcggtctggtttatgctttcatctctttcgggcgggctgctgtttgccgcatcggcagacggtgtgtcgtgggtgaaaggtttggcgatggcttccggcttcggttggtattccctctcgggtttggtgatgaccgaggcttacggcgcggtatggggcagtatcgcgcttttgaacgatttggcacgagagctgttcgcgctggcatttattccgctgctgatgaagcgttttcccgatgcggcagtgggggtcggcggcgcgaccagtatggatttcacattgcccgtgattcggggtgcgggcggcttggaagccgtaccggtagcggtcagcttcggcgtggtggtcaatatcgccgctccgtttctgatggtggtgttttccgctttgggctga

SEQ ID NO: 53975 - DNA, 828 bp, Neisseria meningitidis; identical to SEQ ID NO: 43509

SEQ ID NO: 53976 - DNA, 774 bp, Neisseria meningitidis; identical to SEQ ID NO: 53761

SEQ ID NO: 53977 - DNA, 246 bp, Neisseria meningitidis
atgggtgcttcccgcgatgtcagcaaaagcgccaaaggttggagtgtcggtatcggtctgaatgtaggcaaacagttgaccgacagcgtcggtctcgagtttgatccatactaccgtcacaaaacaatctacaaaccccgtgagattgtcttggacggtgacaaaaccaaaatgggccgctccaaatccaacgagtacggcttccgcgtagccgcaacgttctatagtcaattaaaatcaaaatag

SEQ ID NO: 53978 - DNA, 489 bp, Neisseria meningitidis; identical to SEQ ID NO: 43714

SEQ ID NO: 53979 - DNA, 888 bp, Neisseria meningitidis; identical to SEQ ID NO: 42424

SEQ ID NO: 53980 - DNA, 897 bp, Neisseria meningitidis
atgtttcgtttacaattcaggctgtttccccctttgcgaaccgccatgcacatcctgttgaccgccctgctcaaatgcctctccctgctgccgctttcctgtctgcacacgctgggaaaccggctcggacatctggcgttttaccttttaaaggaagaccgcgcgcgcatcgtcgccaatatgcggcaggcgggtttgaaccccgaccccaaaacggtcaaagccgtttttgcggaaacggcaaaaggcggtttggaacttgcccccgcgtttttcagaaaaccggaagacatagaaacaatgttcaaagcggtacacggctgggaacatgtgcagcaggctttggacaaacacgaagggctgctattcatcacgccgcacatcggcagctacgatttgggcggacgctacatcagccagcagcttccgttcccgctgaccgccatgtacaaaccgccgaaaatcaaagcgatagacaaaatcatgcaggcgggcagggttcgcggcaaaggaaaaaccgcgcctaccagcatacaaggggtcaaacaaatcatcaaagccctgcgttcgggcgaagcaaccatcgtcctgcccgaccacgtcccctcccctcaagaaggcggggaaggcgtatgggtggatttcttcggcaaacctgcctataccatgacgctggcggcaaaattggcacacgtcaaaggcgtgaaaaccctgtttttctgctgcgaacgcctgcctggcggacaaggtttcgatttgcacatccgccccgtccaaggggaattgaacggcgacaaagcccatgatgccgccgtgttcaaccgcaatgccgaatattggatacgccgttttccgacgcagtatctgtttatgtacaaccgctacaaaatgccgtaa

SEQ ID NO: 53981 - DNA, 1185 bp, Neisseria meningitidis
ttgatcttggttttgaactgcggcagctcgtccctcaaaggcgcggtcctggataacggcagcggcgaagtcctgctcagctgccttgccgaaaaactcaacctgcccgatgcctacatcacattcaaagtaaacggcgaaaaacacaaagtcgatctgtccgcacatcccgaccacaccggcgcggtcgaagccctgatggaagaactcaaagcccacggcctcgacagccgcatcggcgccatcggccaccgcgtcgtcagcggcggcgaactgtacagcgaatccatcctcgttgacgacgaagtcattgccggcatcgaaaaatgcatcccgctcgcccccctgcacaaccccgcccacctcttgggcctgcgtgccgcgcaaagcattttcaaaggcctgcccaacgtcgtcgtattcgatacctccttccaccaaaccatgcccgaagtcgcctacaaatacgccgttccgcaggagttgtatgaaaaatacggcctgcgccgttacggcgcgcacggtaccagctaccgcttcgtcgccgacgaaaccgcgcgcttcctcggcaaagacaaaaaagacctgcgtatggtcattgcccacttgggcaacggcgcgtccattaccgccgtcgccaacggcgaatcgcgcgacaccagtatgggcctgaccccgctggaagggctggtaatgggtacgcgcagcggcgacatcgatccttccgtattcggcttcctcgccgaaaacgccaatatgaccatcgcccaaatcactgaaatgctgaacaaaaaatccggtctgctcggcatttccggcctgtccaacgactgccgcaccattgaagaagaagccgccaaggggcataaaggcgcgaaattggccttggatatgtttatctaccgccttgccaaatacatcggcagtatggcggttgccgcaggcggtttggacgcactggtctttaccggcggcatcggcgaaaactccgacatcatccgcgaacgcgtgatcggctacttgggcttcctcggtctgaacatcgaccaagaagccaacctgaaagcccgcttcggcaacgccggcgtgattaccactgccgacagcaaagccgttgccgtggtcattccgaccaacgaagagctgatgattgcccacgacactgcccgtttgagcggtctgtaa

SEQ ID NO: 53982 - DNA, 600 bp, Neisseria meningitidis; identical to SEQ ID NO: 36546

SEQ ID NO: 53983 - DNA, 210 bp, Neisseria meningitidis; identical to SEQ ID NO: 43646

SEQ ID NO: 53984 - DNA, 633 bp, Neisseria meningitidis; identical to SEQ ID NO: 39614

SEQ ID NO: 53985 - DNA, 813 bp, Neisseria meningitidis; identical to SEQ ID NO: 42620

SEQ ID NO: 53986 - DNA, 348 bp, Neisseria meningitidis; identical to SEQ ID NO: 43000

SEQ ID NO: 53987 - DNA, 483 bp, Neisseria meningitidis; identical to SEQ ID NO: 36693

SEQ ID NO: 53988 - DNA, 1578 bp, Neisseria meningitidis; identical to SEQ ID NO: 43487

SEQ ID NO: 53989 - DNA, 423 bp, Neisseria meningitidis; identical to SEQ ID NO: 42868

SEQ ID NO: 53990 - DNA, 567 bp, Neisseria meningitidis; identical to SEQ ID NO: 42257

SEQ ID NO: 53991 - DNA, 1059 bp, Neisseria meningitidis; identical to SEQ ID NO: 42377

SEQ ID NO: 53992 - DNA, 279 bp, Neisseria meningitidis; identical to SEQ ID NO: 36778

SEQ ID NO: 53993 - DNA, 1836 bp, Neisseria meningitidis; identical to SEQ ID NO: 42818

SEQ ID NO: 53994 - DNA, 597 bp, Neisseria meningitidis; identical to SEQ ID NO: 43433

SEQ ID NO: 53995 - DNA, 519 bp, Neisseria meningitidis; identical to SEQ ID NO: 51206

SEQ ID NO: 53996 - DNA, 126 bp, Neisseria meningitidis; identical to SEQ ID NO: 39360

SEQ ID NO: 53997 - DNA, 537 bp, Neisseria meningitidis; identical to SEQ ID NO: 42803

SEQ ID NO: 53998 - DNA, 174 bp, Neisseria meningitidis; identical to SEQ ID NO: 36913

SEQ ID NO: 53999 - DNA, 363 bp, Neisseria meningitidis; identical to SEQ ID NO: 43023

SEQ ID NO: 54000 - DNA, 297 bp, Neisseria meningitidis; identical to SEQ ID NO: 42747

SEQ ID NO: 54001 - DNA, 462 bp, Neisseria meningitidis; identical to SEQ ID NO: 43699

SEQ ID NO: 54002 - DNA, 501 bp, Neisseria meningitidis
atgagaaaaagtcgtctaagccagtataaacaaaataaactcattgagctatttgtcacaggtgtaactgcaagaacggcagcagagttagtaggcgttaataaaaataccgcagcctattattttcatcgtttacgattacttatttatcaaaacagtccgcatttggaaatgtttgatggcgaagtagaagcagatgaaagttattttggcggacaacgcaaaggcaaacgcggtcgcggtgctgccggtaaagtcgccgtattcggtcttttgaagcgaaatggtaaggtttatacggttacagtaccgaatactcaaaccgctactttatttcctattatccgtgaacaagtgaaacctgacagcattatttatacggattgttatcgtagctatgatgtattagatgtgcgcgaatttagccattttagcttcgctgaaacttcgttttcgtatcaatcacagcacacattttgctgaacgacaaaaccatattaa

SEQ ID NO: 54003 - DNA, 279 bp, Neisseria meningitidis; identical to SEQ ID NO: 37183

SEQ ID NO: 54004 - DNA, 438 bp, Neisseria meningitidis; identical to SEQ ID NO: 43440

SEQ ID NO: 54005 - DNA, 519 bp, Neisseria meningitidis; identical to SEQ ID NO: 42795

SEQ ID NO: 54006 - DNA, 114 bp, Neisseria meningitidis
atggtacagcaaggagcggcaacacagaacagttttttgttcccgccttgtctttccaagcccatgccgtctgaagccggaatgtttcagacggcatcgcatcaaactccataa

SEQ ID NO: 54007 - DNA, 219 bp, Neisseria meningitidis; identical to SEQ ID NO: 36291

SEQ ID NO: 54008 - DNA, 369 bp, Neisseria meningitidis; identical to SEQ ID NO: 37026

SEQ ID NO: 54009 - DNA, 363 bp, Neisseria meningitidis; identical to SEQ ID NO: 37674

SEQ ID NO: 54010 - DNA, 642 bp, Neisseria meningitidis
atgaagataacacactgcaaattaaagaaaaaagtacagaaagaactgctccgttttttgtgctggaagttaccgcccgttctgccgccgatattttgggtatccatcccaattcggcagcactgttctaccgtaaaatccgcacggttatcaaccatcatttggccttggctgccgatgaggtttttgagggccctgtcgagccggacgaaagcgatttcggcggacggcgtaaaggcagacgtggtcgcggtgcggcaggaaaagtggttgtcttcggcattctgaaacgcaacggacgggtctataccgttgtggtggataatgccaagtctgaaacgttactccctgtcatcaaaaagaaaatcatgccggacagcattgtttataccgatagtctgagcagctgcgacaagttggacgtgagcggttttatccattaccgcatcaaccattccaaggaatttgcagaccgtcagaaccacattaacggcattgagaacttttggaatcaggcaaaacgcgtcttgcgaaaatacaacggaatcgatcgtaaatctttcccgctgttcttgaaagaatgcgaatttcgatttaacttcggcacaccgtctcaacagcttaaaatcctgtgggatttag

SEQ ID NO: 54011 - DNA, 291 bp, Neisseria meningitidis
atggatgatctaatactatattttttatcaggtatattcggaaatcaagttgctgaatgtattataaaaaataaccgtgagataaaagttccctttattgtgctttacgcaatattttttacgttgatttatactgtggctttgttgtttctcagtctgatctattgggtcaatggtgcggagattgcatggaaggggataggtattttcagtatgtcggtcagtttttgtatagtcttctgtctttatttgattgacaaggcaggaagatgtaaggataagaaacaatag

SEQ ID NO: 54012 - DNA, 114 bp, Neisseria meningitidis; identical to SEQ ID NO: 42949

SEQ ID NO: 54013 - DNA, 129 bp, Neisseria meningitidis; identical to SEQ ID NO: 43085

SEQ ID NO: 54014 - DNA, 375 bp, Neisseria meningitidis; identical to SEQ ID NO: 42749

SEQ ID NO: 54015 - DNA, 411 bp, Neisseria meningitidis
atgacaacttataccattccaaaaaaagattatcaatttctgtatatatatgagggcactctattaaactatactttgaaaaacgatgaattccatatcatcgtccagaatgtggattatccggactttcctcaagagattcctacaccaaattatatagactgggtaaaaattaaattcaagcagttcagctatctgaaatttatctatggatacgctacaaagagccaagataaagatatcgataatatattggagcttggcgaattaaagcaggatgatgaaatcttggattatggaggtacgctggaattgataggcggtagatgtgatcttctaactggttttagtatagatatagtttgccgggaaatagagttagaatttttagatcaggagagtttcaattaa

SEQ ID NO: 54016 - DNA, 396 bp, Neisseria meningitidis; identical to SEQ ID NO: 37459

SEQ ID NO: 54017 - DNA, 306 bp, Neisseria meningitidis; identical to SEQ ID NO: 36883

SEQ ID NO: 54018 - DNA, 171 bp, Neisseria meningitidis; identical to SEQ ID NO: 42347

SEQ ID NO: 54019 - DNA, 393 bp, Neisseria meningitidis; identical to SEQ ID NO: 39912

SEQ ID NO: 54020 - DNA, 453 bp, Neisseria meningitidis; identical to SEQ ID NO: 43802

SEQ ID NO: 54021 - DNA, 405 bp, Neisseria meningitidis; identical to SEQ ID NO: 42674

SEQ ID NO: 54022 - DNA, 502 bp, Neisseria meningitidis
atgagaaaaagtcgtctaagccagtataaacaaaataaactcattgagctatttgtcgcaggtgcaactgcaagaacggcagcagagttagtaggcgttaataaaaataccgcagcctattattttcatcgtttacgattacttatttatcaaaacagtccgcatttagaaatgtttgatggcgaagtagaagcagatgaaagttattttggcggacaacgcaaaggcaaacgcggtcgcggtgctgccggtaaagtcgccgtattcggtcttttgaagcgaaatggtaaggtttatacggttacagtaccgaatactcaaaccgctactttatttcctattatccgtgaacaagtgaaacctgacagtattgtttatacggattgttatcgtagctatgatgtaattagatgtgagcgaatttagccattttagcttcgctgaaacttcgttttcgtatcaatcacagcacacattttgctgaacgacaaaaccatattaa

SEQ ID NO: 54023 - DNA, 402 bp, Neisseria meningitidis; identical to SEQ ID NO: 42860

SEQ ID NO: 54024 - DNA, 453 bp, Neisseria meningitidis; identical to SEQ ID NO: 42308

SEQ ID NO: 54025 - DNA, 285 bp, Neisseria meningitidis
atgcagcctgcggtttatattttagcaagccaacgtaatggcacgttatacattggcgttacatctgatttggtgcaacgtatttaccaacatagggagcatttgattgagggatttacatcacggtacaacgttactatgctggtttggtatgaactgcatcctacgatggagagtgcaattactcgggaaaaacagttgaagaaatggaacagggcttggaaattgcaactgattgaagaaaataatgtttcttggcaggatttatggtttgatattatttag

SEQ ID NO: 54026 - DNA, 372 bp, Neisseria meningitidis; identical to SEQ ID NO: 43933

SEQ ID NO: 54027 - DNA, 324 bp, Neisseria meningitidis; identical to SEQ ID NO: 37053

SEQ ID NO: 54028 - DNA, 354 bp, Neisseria meningitidis; identical to SEQ ID NO: 42253

SEQ ID NO: 54029 - DNA, 435 bp, Neisseria meningitidis; identical to SEQ ID NO: 36184

SEQ ID NO: 54030 - DNA, 369 bp, Neisseria meningitidis; identical to SEQ ID NO: 36261

SEQ ID NO: 54031 - DNA, 429 bp, Neisseria meningitidis; identical to SEQ ID NO: 41701

SEQ ID NO: 54032 - DNA, 312 bp, Neisseria meningitidis; identical to SEQ ID NO: 39965

SEQ ID NO: 54033 - DNA, 912 bp, Neisseria meningitidis; identical to SEQ ID NO: 43889

SEQ ID NO: 54034 - DNA, 216 bp, Neisseria meningitidis; identical to SEQ ID NO: 43890

SEQ ID NO: 54035 - DNA, 396 bp, Neisseria meningitidis; identical to SEQ ID NO: 43897

SEQ ID NO: 54036 - DNA, 396 bp, Neisseria meningitidis; identical to SEQ ID NO: 43898

SEQ ID NO: 54037 - DNA, 393 bp, Neisseria meningitidis
atgtattcgtttgaagcgaatgcaaatgcagtaaaaatatctgaaactgtttcagttgataccggacaaggtgcgaaaattcataagtttgtacctaaaaatagtaaaacttattcatctgatttaataaaaacggtagatttaacacacatccctacgggcgcaaaagcccgaatcaacgccaaaataaccgccagcgtatcccgcgccggcgtattggcgggggtcggcaaacttgcccgcttaggcgcgaaattcagcacaagggcggttccctatgtcggaacagcccttttagcccacgacgtatacgaaactttcaaagaagacatacaggcacgaggctaccaatacgaccccgaaaccgacaaatttgcaaaggtctcaggctaa

SEQ ID NO: 54038 - DNA, 417 bp, Neisseria meningitidis; identical to SEQ ID NO: 36667

SEQ ID NO: 54039 - DNA, 954 bp, Neisseria meningitidis; identical to SEQ ID NO: 43053

SEQ ID NO: 54040 - DNA, 528 bp, Neisseria meningitidis; identical to SEQ ID NO: 43903

SEQ ID NO: 54041 - DNA, 318 bp, Neisseria meningitidis; identical to SEQ ID NO: 43905

SEQ ID NO: 54042 - DNA, 336 bp, Neisseria meningitidis; identical to SEQ ID NO: 43327

SEQ ID NO: 54043 - DNA, 495 bp, Neisseria meningitidis; identical to SEQ ID NO: 43908

SEQ ID NO: 54044 - DNA, 363 bp, Neisseria meningitidis
atgaagctgccgcgcaaccgcttcagcctgctttccgcattgtggtttgccggcggcatctattcgctgctcttcaaagctgccgacaccgcgccgccgccgtttccgcatttcgacaaagcagcacaccttgccctgtttttcgcacaaatctagcttttgaccaaagcattcaaaaccggaaaacttcccatcccctaccgcagcctgatggtctttgccctctgtttcgccctcttcagcgaatgcgcgcaggcatggtttaccgcaacgagaaccggcagtttgggcgatgttcttgccgatatggcaggtacggttctcgcactctttgccgcccgcgccgccgaccgcccggactga

SEQ ID NO: 54045 - DNA, 759 bp, Neisseria meningitidis; identical to SEQ ID NO: 42687

SEQ ID NO: 54046 - DNA, 732 bp, Neisseria meningitidis; identical to SEQ ID NO: 41210

SEQ ID NO: 54047 - DNA, 339 bp, Neisseria meningitidis; identical to SEQ ID NO: 43914

SEQ ID NO: 54048 - DNA, 2256 bp, Neisseria meningitidis; identical to SEQ ID NO: 43241

SEQ ID NO: 54049 - DNA, 1332 bp, Neisseria meningitidis; identical to SEQ ID NO: 43915

SEQ ID NO: 54050 - DNA, 318 bp, Neisseria meningitidis
atggtagtacgcggcggaatctatctggtctccttagacccgaccgtaggaagcgaaatcaaaaagacacgtccttgtgtcgtagtctctcctcctgaaatacacaactatctcaagactgtgctgatcgttcccatgacgagcggaagccgtcctgccccgttccgcgtcaatgtccgctttcaggataaagacggtttgcttttgcccgaacagattagggctgtggataaagccggattggtcaaacatcttggcaatttagacaacagtacggctgaaaaactgtttgcagtattgcaggagatgtttgcctga

SEQ ID NO: 54051 - DNA, 822 bp, Neisseria meningitidis; identical to SEQ ID NO: 43918

SEQ ID NO: 54052 - DNA, 375 bp, Neisseria meningitidis; identical to SEQ ID NO: 37856

SEQ ID NO: 54053 - DNA, 210 bp, Neisseria meningitidis
atgaagaaaatgttcgtgctgttctgtatgctgttctcctgcgccttctcccttgcggcggtaaacatcaatgcggcttcgcagcaggagttggaggcgctgccgggcataggcccggcggtgctggcgaagctgaaggatcaggcttccgtcggcgcgcccgcaccaaaaggcccagccaaaccagtgctgcccgcggataaaaaataa

SEQ ID NO: 54054 - DNA, 1176 bp, Neisseria meningitidis; identical to SEQ ID NO: 46694

SEQ ID NO: 54055 - DNA, 558 bp, Neisseria meningitidis; identical to SEQ ID NO: 43928

SEQ ID NO: 54056 - DNA, 1218 bp, Neisseria meningitidis; identical to SEQ ID NO: 43930

SEQ ID NO: 54057 - DNA, 696 bp, Neisseria meningitidis; identical to SEQ ID NO: 42258

SEQ ID NO: 54058 - DNA, 501 bp, Neisseria meningitidis; identical to SEQ ID NO: 37882

SEQ ID NO: 54059 - DNA, 471 bp, Neisseria meningitidis; identical to SEQ ID NO: 42963

SEQ ID NO: 54060 - DNA, 4176 bp, Neisseria meningitidis; identical to SEQ ID NO: 43934

SEQ ID NO: 54061 - DNA, 321 bp, Neisseria meningitidis; identical to SEQ ID NO: 43935

SEQ ID NO: 54062 - DNA, 279 bp, Neisseria meningitidis; identical to SEQ ID NO: 36930

SEQ ID NO: 54063 - DNA, 540 bp, Neisseria meningitidis; identical to SEQ ID NO: 36581

SEQ ID NO: 54064 - DNA, 534 bp, Neisseria meningitidis; identical to SEQ ID NO: 42952

SEQ ID NO: 54065 - DNA, 1311 bp, Neisseria meningitidis; identical to SEQ ID NO: 39855

SEQ ID NO: 54066 - DNA, 621 bp, Neisseria meningitidis; identical to SEQ ID NO: 39955

SEQ ID NO: 54067 - DNA, 714 bp, Neisseria meningitidis; identical to SEQ ID NO: 43936

SEQ ID NO: 54068 - DNA, 2760 bp, Neisseria meningitidis
atgaaaagaatgttattcaacgcaacgcaggccgaagagctgcgcgttgccatcgtcgacggacaaaacctgctggatttggatatcgaaacgctgggcaaagaacagcgcaaaggcaatatctacaaaggcatcattacccgcatcgagccgtcgctggaagcgtgtttcgtcgattacggaaccgaccgccacggcttcttgccgtttaaagaagtctcccgctcatacttccaagactacgaaggcggacgcgcgcgcatccaagacgtgctcaaagaaggcatggaagtcatcgtccaagtcgaaaaagacgagcgcggcaacaaaggcgcggcgctgaccaccttcatcagcctcgccggacgctatctggtattgatgccgaacaacccgcgcggcggcggcgtatcccgccgtatcgaaggcgaagaacgtcaagaactcaaagccgctatggcgcaactcgacattccgaacggcatgagcatcatcgcccgtaccgccggcatcggccgcagcgcggaagagttggaatgggatttgaactatctcaaacaactctggcaggcgattgaagaagcaggaaaagcgcatcacgacccttacctgctctttatggaaagctcgctgctcatccgcgccatccgcgactatttccgccccgacatcggcgaaattctggtggacaatcaagaagtttacgaccaagttgccgagttcatgagctacgtcatgccgggcaatataggccgtctgaaactctacgaagaccacacgccgctgttttcccgcttccaaatcgaacaccaaatcgaaagcgcgttttcgcgcagcgtcagcctgccctccggcggcgcgatcgtcatcgaccataccgaagccctcgtctccatcgacgtgaactccgcacgcgccactcgcggcgcagacattgaagacaccgcgttcaaaaccaatatggaagccgccgaagaagtcgcccgacaaatgcgcctgcgcgacttgggcggcttggtcgtcatcgacttcatcgacatggaaaaccccaaacaccagcgcgatgtggaaaacgtcctgcgcgacgcgctcaaaaaagaccgcgcccgcgtacagatgggcaaactctcccgtttcggacttttagaattgagccgccaacgtttgaaaccggctttgggcgaaagcagccacgtcgcctgtccgcgctgcgccggcaccggcgtgattcggggcatcgaatccaccgccctgcacgttttacgcatcattcaagaagaagcgatgaaggacaacaccggagaagtgcgcgcacaagtgcccgtcgatgtcgccaccttcctgctgaacgaaaaacgcgccgagctgtttgcgatggaagagcgtttggatgtcaacgtcgtcctgattccgaacatccacctcgaaaatccgcactacgaaatcaaccgcatccgcaccgacgacgtagaagaagacggcgaaccgagctacaaacgcgtcgccgagcctgaagaagacgaatccgccaaaccgttcggcggcgaaaaagccaaagccgcccgtcccgaacccgccgtcaaaggcgtgcgccacaccagccccgccccgactgccgcccccgagaaaaaaacctcctggtgggacagcttcaaagcttggctcaaacgcattttcggcggcagcgaaacccaagccgcgcccgctgccgaaacctccgaaaaacgcagcacggcaaaccgcagcggcagccgcgccaacaaccgccgccaaaacccgcgccgcagcaaacgcgaaggcagcaaagtagaagtccgcgaagtggcaggcaaaactgccggacaggaagcgcgtgccgacaaagccgaaacgcgcaacaacggcaaccgccgccgcaacgaacgcggcgaccgtgccgccggacgcgccgacgaagcggaaatccaagaccgcaacatacagcctgccgcaaccgttgcagatgccgcaccgtccgaaaccgaagtgcaaaccggaaaacgccgccgcaacggcagccgcagcgaacgcggccaaaccgcgccggaaaccgccaccgttgccgaaacaaccgttcagacagcggaaaacacgccgtccgaaccgcataccgcagaagacaaaggcagcaagcccaaatccgaacgcaaccgccgcgaacgcgacagccgagatgccaaagaacgccgcgagcgcaacaatcagcgcgaccgccgtcaaaacggcaaaaaacgcaatattccgtctgccgccaaaatcgagcagtacctgaatattcacgacaccgccgacaaagtccgttccgccgccgcgcacgttttcggcgaaaccgacgcaaacgcgccgattactgtcagcattgccgatccggttgcagaaagggatcttccgacagcatctcccgccgtttcaaacggcgacgcaccggtttatgatgcggcggaaaaaatccgccgtgccaccgccgccatcctgcccgaaggcgcgacaccgaaagccgaagcacaggaaatgccgtctgaaaccgcaacctttacggctgcggcggaacaggcacgggaaaccgcacaaaccggcggactcgtcctgatcgaaaccgaccctgccgcattgaaggcatgggcggcacaacccgaagtccaagccggacgcggtttgcgccgttccgaacagcccaagccgtctgaagtcgcaaccgtccctgccgaagaaatgatccaagtcgaaacccggcaaggctga

SEQ ID NO: 54069 - DNA, 291 bp, Neisseria meningitidis; identical to SEQ ID NO: 42924

SEQ ID NO: 54070 - DNA, 873 bp, Neisseria meningitidis; identical to SEQ ID NO: 43944

SEQ ID NO: 54071 - DNA, 1452 bp, Neisseria meningitidis; identical to SEQ ID NO: 43946

SEQ ID NO: 54072 - DNA, 1077 bp, Neisseria meningitidis; identical to SEQ ID NO: 43947

SEQ ID NO: 54073 - DNA, 342 bp, Neisseria meningitidis; identical to SEQ ID NO: 37907

SEQ ID NO: 54074 - DNA, 1083 bp, Neisseria meningitidis
atgatgaaaatcaaagccctgatgattgccgccgcattgctggcagcagccgatgtccacgccgcaccgcaaaaggcaaaaaccgcatccgccaaagctgccaaagctgccaaagctgccaaagctgccaaagctgccaaagctgccaaagttgccaaagttgccaaagttgccaaagttgccaaagttgccgccacggcgcaaaaagaagccgcacccgcacaacagcagggcggtatccgcttttcagacggcattgccgccgttgccgacaacgaagtcatcacgcgccgccggcttgccgaagccgttgccgaagccaaagccaacctgcccaaagacgcgcagataagcgaatccgagctgtcccgacaggtgctgatgcagcttgtcaaccaatccctgattgtacaggcgggcaaacgccgcaacattcaagcaagcgaagcggaaatcgatgccgtcgtcgcaaaaaatcccgccctcaaaaacctcagccccgcccaacgccgcgattttgccgacaacatcattgccgaaaaagtccgccagcaggcagtgatgcagaacagccgcgtgagcgaagctgaaatcgatgccttcctcgagcaggcgcaaaaacaaggcatcaccctgcccgaaggcgcaccgttgcgccaataccgcgcccaacacatcctgattaaagccgacagcgaaaacgccgccgtcggcgcggaaagcaccatccgcaaaatctacggagaggcccgcagcggcacagacttttccagcctggcgcgccaatattcgcaagacgcgagcgcgggcaacggcggagatttgggctggtttgccgacggcgtgatggttcccgcctttgaagaagccgtccacgcgctcaaacccggacaggtcggcgcgcccgtccgcacccaattcggctggcatatcatcaaattgaacgaagtgcgcgatgccggcacacctcaggaacgtatccgcaattccgtgcggcaatacatcttccaacaaaaagccgaacaggcaaccgtcaacctgttgcgtgacctgcattccggcgcgtatgtcgacatccgctaa

SEQ ID NO: 54075 - DNA, 645 bp, Neisseria meningitidis; identical to SEQ ID NO: 37921

SEQ ID NO: 54076 - DNA, 249 bp, Neisseria meningitidis; identical to SEQ ID NO: 43952

SEQ ID NO: 54077 - DNA, 195 bp, Neisseria meningitidis; identical to SEQ ID NO: 40091

SEQ ID NO: 54078 - DNA, 450 bp, Neisseria meningitidis; identical to SEQ ID NO: 36806

SEQ ID NO: 54079 - DNA, 651 bp, Neisseria meningitidis; identical to SEQ ID NO: 43953

SEQ ID NO: 54080 - DNA, 687 bp, Neisseria meningitidis; identical to SEQ ID NO: 36558

SEQ ID NO: 54081 - DNA, 207 bp, Neisseria meningitidis; identical to SEQ ID NO: 39999

SEQ ID NO: 54082 - DNA, 378 bp, Neisseria meningitidis; identical to SEQ ID NO: 43968

SEQ ID NO: 54083 - DNA, 408 bp, Neisseria meningitidis; identical to SEQ ID NO: 43969

SEQ ID NO: 54084 - DNA, 1107 bp, Neisseria meningitidis; identical to SEQ ID NO: 43970

SEQ ID NO: 54085 - DNA, 627 bp, Neisseria meningitidis; identical to SEQ ID NO: 43995

SEQ ID NO: 54086 - DNA, 543 bp, Neisseria meningitidis; identical to SEQ ID NO: 43971

SEQ ID NO: 54087 - DNA, 924 bp, Neisseria meningitidis; identical to SEQ ID NO: 43972

SEQ ID NO: 54088 - DNA, 432 bp, Neisseria meningitidis; identical to SEQ ID NO: 43974

SEQ ID NO: 54089 - DNA, 315 bp, Neisseria meningitidis; identical to SEQ ID NO: 37950

SEQ ID NO: 54090 - DNA, 561 bp, Neisseria meningitidis; identical to SEQ ID NO: 36282

SEQ ID NO: 54091 - DNA, 405 bp, Neisseria meningitidis; identical to SEQ ID NO: 43748

SEQ ID NO: 54092 - DNA, 411 bp, Neisseria meningitidis; identical to SEQ ID NO: 42958

SEQ ID NO: 54093 - DNA, 438 bp, Neisseria meningitidis; identical to SEQ ID NO: 42580

SEQ ID NO: 54094 - DNA, 393 bp, Neisseria meningitidis; identical to SEQ ID NO: 43975

SEQ ID NO: 54095 - DNA, 561 bp, Neisseria meningitidis; identical to SEQ ID NO: 43976

SEQ ID NO: 54096 - DNA, 321 bp, Neisseria meningitidis; identical to SEQ ID NO: 43977

SEQ ID NO: 54097 - DNA, 1197 bp, Neisseria meningitidis; identical to SEQ ID NO: 43978

SEQ ID NO: 54098 - DNA, 330 bp, Neisseria meningitidis; identical to SEQ ID NO: 42940

SEQ ID NO: 54099 - DNA, 318 bp, Neisseria meningitidis; identical to SEQ ID NO: 43381

SEQ ID NO: 54100 - DNA, 390 bp, Neisseria meningitidis; identical to SEQ ID NO: 43980

SEQ ID NO: 54101 - DNA, 261 bp, Neisseria meningitidis; identical to SEQ ID NO: 40012

SEQ ID NO: 54102 - DNA, 345 bp, Neisseria meningitidis; identical to SEQ ID NO: 42331

SEQ ID NO: 54103 - DNA, 435 bp, Neisseria meningitidis; identical to SEQ ID NO: 40438

SEQ ID NO: 54104 - DNA, 315 bp, Neisseria meningitidis; identical to SEQ ID NO: 42635

SEQ ID NO: 54105 - DNA, 540 bp, Neisseria meningitidis
atgcggactgccgagaaaaaccgtctgcatcaggttcacgaaacgcaagtcggaagcgtcaaacaactgattgcccattttgaccggctgattgacgaatcggacaaacaaatcgacgaccacacccacacgcattttgacggcaaagcccaagtggcggagcaaatcaaaggcatcggttcgataacgacggctacgctgatggcgatgttgcctgaattggggcggctgtcgcacaaacggatagcgagtttggtcggcattgccccgcacccgaggaagagcggggaagccaaattcaaaagccgctgctttggcggaaggtctgcggtgcttaaggcactgtatatggctaccgtggcagcgacacgttttgaaccgcttattcgggatttccaccaacgcccgctgtccgagggtaagccgtataaggttgccgttacggcatgtatgcgcaaactgctggagacctttgcaaaattcctttccctcacgacaaccgaaatcccaacacaggttttcggctgttttcgccccaaa

SEQ ID NO: 54106 - DNA, 465 bp, Neisseria meningitidis; identical to SEQ ID NO: 36919

SEQ ID NO: 54107 - DNA, 552 bp, Neisseria meningitidis; identical to SEQ ID NO: 42499

SEQ ID NO: 54108 - DNA, 225 bp, Neisseria meningitidis
gtgggatgcagggtgtgcttcagcccgctgcatcaaaaatttttggagaaccggcgggagtcggcggttttggtttcggcggggacggtggaaatgggtaacattgacggaatcgacggaagcggtggactgaagcccacccttgtatattggaatcaccgtatcatagcaacaaaccgcccagccgccacccgcgcccacccaaggcacacaaccgttgcgtag

SEQ ID NO: 54109 - DNA, 282 bp, Neisseria meningitidis
atgcaaaacggcgggggaaagatttaccagacggcggacaatgtggaagggattatgctgttgaaggtagtacctgagcgtaccgtttcggcagatgcaaaaaccagagacccgatgtgggacaatgcggctttacagaccagcgaaggcgtaaattttattgctcgtttcctaggattttttagcgatggggaataccgctatgtggatgtcctgcaacccaaccattccgatattattcggtattcaggtaaagatttttccgctaaatcaaatatttaa

SEQ ID NO: 54110 - DNA, 225 bp, Neisseria meningitidis; identical to SEQ ID NO: 43982

SEQ ID NO: 54111 - DNA, 366 bp, Neisseria meningitidis; identical to SEQ ID NO: 43983

SEQ ID NO: 54112 - DNA, 423 bp, Neisseria meningitidis; identical to SEQ ID NO: 42328

SEQ ID NO: 54113 - DNA, 111 bp, Neisseria meningitidis; identical to SEQ ID NO: 40033

SEQ ID NO: 54114 - DNA, 411 bp, Neisseria meningitidis; identical to SEQ ID NO: 43989

SEQ ID NO: 54115 - DNA, 2486 bp, Neisseria meningitidis; identical to SEQ ID NO: 43990

SEQ ID NO: 54116 - DNA, 1224 bp, Neisseria meningitidis; identical to SEQ ID NO: 42691

SEQ ID NO: 54117 - DNA, 369 bp, Neisseria meningitidis
ttgaataatattcctgttgaaatccgtttgttgaaaaaccgtaccgtgttggttttgacttatggggacgaacctaaaaatctgcctgccgaatttttacgcgtctattcgccgagtgcggaagtgcgcggacacggcgtgggacaggatgttttgcagaccggcaaggcggatgtccaaatcgcggatttgcagcctgtcggacagtacgcgctgaaaatcagtttttcagacgggcacgacagcggtctttacgattgggcgtatctgcacagactggcatacggatacgatgcgatgtggcaggaatatttggacaaattggcggcggcgggtgcttcccgttttgaaaagcaatcagattgttaa

SEQ ID NO: 54118 - DNA, 1483 bp, Neisseria meningitidis
atgtcccacttattccgaaaagaagtctttgtagcccaacaaaataagtggacaggtcaggttatcttgacccgtccattctcttttttatttctgactttttgcgcttttctcattgctctgtgtatcattatctttttgatttttggtagctataccaataaaacaaccgttgaaggtcaattacttccaactatgggggtggttcgtgtttactcttccgatatcggcacgattacgcataaatttgttgaagatggtaactttgtcaaagctggcgaaccattgttcaaactttccacatcgcgttttggcgaaaaaggaaacgtacaagccaaattggcagcagaagccaaccttaaaaaaactttggcattacaagaattggaacgtttaaagcgcattcatcaaaatgagcaaaaaaatgttcataacaacattcatcgtttaaacaatcaattagagaatattaaacagcaaattacagggcaaaatcgtcaaattcgtttagcggaaaaaacccttaacaagaacaagtttttagccagtcaaggcgcagtatcccaacaagataagatgaccgccgaaagccatttattggaacaacgctcacgtttggagagcctaaaacgtgaacaaaataatgcaatcagggaacttgatgaacagaaaatcacattaagcagcctgcctgaacgccataaaaccgaattgagccaactcaaccgtgcgattacggaaatgaaccaagaaattttggattttgatttgaaatccgaacaaaccatacgagctagtaaatcaggttgagacctttgcaaaaataatctgttaacgaaatttgacgcataaaaatgcgccaaaaaattttcaattgcctaaaaccttcctaatattgagcaaaaagtaggaaaaatcagaaaagttttgcattttgaaaatgagattgagcataaaattttagtaacctatgttattgcaaaggtctcaggttatatatcaacaattaatgttgatatagggcaacaagttgaaccgtctaaattgctgttaagcattgtccctgaacaaactgaattggtcgccaatctttacatacccagtaaagctgttggttttattaaaccgaaagataaagttgttttacgttaccaagcgtacccttaccaaaaatttggacatgccacaggagaaattatttcagttgccagaactgctctcggtaaacaaaagctatcaggtttaggtatcattttcactaacccaaccttattaaatgaacctgcctatcttgtgaaagttaaattggaaaaacaaacgattaaagcatacggagaaaacaagccgcttcaaattggcatgattttagaagcagatattctccatgaacgaaaattgtacgaatgggtacttgacccactttacagcatttcaggaaaaatcaattaaaaatggattatttatcaagactgtcctttggatt

SEQ ID NO: 54119 - DNA, 2085 bp, Neisseria meningitidis; identical to SEQ ID NO: 44002

SEQ ID NO: 54120 - DNA, 1143 bp, Neisseria meningitidis; identical to SEQ ID NO: 44000

SEQ ID NO: 54121 - DNA, 658 bp, Neisseria meningitidis; identical to SEQ ID NO: 44004

SEQ ID NO: 54122 - DNA, 816 bp, Neisseria meningitidis; identical to SEQ ID NO: 44005

SEQ ID NO: 54123 - DNA, 1269 bp, Neisseria meningitidis; identical to SEQ ID NO: 44008

SEQ ID NO: 54124 - DNA, 1647 bp, Neisseria meningitidis; identical to SEQ ID NO: 42688

SEQ ID NO: 54125 - DNA, 1002 bp, Neisseria meningitidis; identical to SEQ ID NO: 48001

SEQ ID NO: 54126 - DNA, 903 bp, Neisseria meningitidis; identical to SEQ ID NO: 44013

SEQ ID NO: 54127 - DNA, 2094 bp, Neisseria meningitidis
atgaagacagacattcaaaccgaattaacccaagccctactaccacacgaaaaagtatgggcgaacgaagaaaaaaccattttagccaaaaacatcctgttggatttggtggaaaaaaccgacccgaccattatcggtttgttattgagtaatgatgagttaaaacgccatttctttgtggaagtgaatggtgtgctggtgtttaaattgcaggatttccgttttttcttggacaaacacagcgtcaataattcctacacaaaatacgccaaccgcattggtttgacggacagcaaccgctttttgaaagacagcagtgatattgtgttggattttccgtttaaagattgtgtgttaaatggcggacaaagcaccgaggaaggcgaagaaatttattttaaacgcaataacagccagccagccagccagccagccagccagccagccagccagccagccagccagccagccagccagctatacactaaattaacccgaaaaagacaagaaatcttttttaatcaaacccttgcttttgatgaaattgatcggctttttgacgcaaaagcattctcaaaattctctcgctataccgcagacggcaaacaagccgttggcgaaatcaaacgacattcagacggcacacccgccgaaaatctcattatcaaaggcaataatctgattgccctgcattcgcttgccaagcagtttaaaggcaaagtgaagctgatttatattgacccgccatataacacgggtaatgacggttttaaatacaacgacaaatttaatcattccacttggctgacttttatgaaaaaccgtctagaaatcgccaaagagctgcttatgaaagacggttcgatttttgtgtcaattgacgacaacgaacaggcatatttgaaaattttaatggatgaagttttcggaaatgaaaatttcatctgcaattttatttgggaaaaaaagacaggtgcgtccgatgccaaacagatagcgactattacagagtttgtcttatgttactcaaagaactttaaaacagttaaattaaataaaaacacgttttcttatgatacagagagatacaaattaagtgataagtttgaacaggaaagaggcaaatattatatcgacaatttagatagagggggattgcagtatagtgacagtttgaattttgcaatccaatgtccagatggcacttttacgtatccgaatggcaggactgaatttgtcaatgatggctggatatggaaatggagtaaaaataaaattgattgggcaataacaaacggttttttggagtttagaaaatcaaagtctaaaaaatctggatggagtgtatgttataaaaactatatgttggttgataacgaaaacaagccgatagaacgttctgctccctataagaacttaatacaggatatcttaaatacacatgcgacagatgaattgaaaaaactgttcggcagcaaagtttttactactccaaaacctgagagcttattgcagtatcttattcaaattgccacatccgaatccgacatcgtcttagactaccatcttggtagtggcacaaccgccgccgttgcccacaaaatgaaccgccaatatatcggtattgaacaaatggattatattgaaacgcttgctgttgaacgcttgaaaaaagtgattgatggcgagcaaggcggtatttccaaagccgtgaattggcaaggtggtggcgagtttgtttatgccgaacttgccccatttaacgaaaccgcaaaacaacaaattttggcttgcgaagattcagacggcatcaaaacgctgtttgaaggtttatgcgaacgctatttcttgaaatacaacgtcagcgtaaatgaatttagtcaaatcattcaagagcctgaatttcaatctttgccattagacgaacaaaaacaaatggtgcttgaaatgttggatttaaatcaaatgtatgtttcattatccgaaatggatgacgaacaatttgcagattgcctgaacgatgatgataaagccttaagccgtgcattctatcaatcagtaaaaaatcaagcggagaaaaaagatggcgaataa

SEQ ID NO: 54128 - DNA, 2778 bp, Neisseria meningitidis; identical to SEQ ID NO: 44017

SEQ ID NO: 54129 - DNA, 984 bp, Neisseria meningitidis; identical to SEQ ID NO: 40053

SEQ ID NO: 54130 - DNA, 1161 bp, Neisseria meningitidis; identical to SEQ ID NO: 44019

SEQ ID NO: 54131 - DNA, 234 bp, Neisseria meningitidis; identical to SEQ ID NO: 40733

SEQ ID NO: 54132 - DNA, 2109 bp, Neisseria meningitidis; identical to SEQ ID NO: 44024

SEQ ID NO: 54133 - DNA, 3090 bp, Neisseria meningitidis; identical to SEQ ID NO: 44025

SEQ ID NO: 54134 - DNA, 1359 bp, Neisseria meningitidis; identical to SEQ ID NO: 44089

SEQ ID NO: 54135 - DNA, 513 bp, Neisseria meningitidis; identical to SEQ ID NO: 44027

SEQ ID NO: 54136 - DNA, 1869 bp, Neisseria meningitidis; identical to SEQ ID NO: 44030

SEQ ID NO: 54137 - DNA, 978 bp, Neisseria meningitidis
atgcaagaaaacccgaccgtgtggctgttcgacctcgacaacacgctgcacgatgccgacgcaggcatcttcacactcatcaaccgcgctatgacacgctatatggcacgccgcctcaaactctccgaatctgccgcgtccgacctgcgtcaagactattggcaccgctacggcgcaacgctcgccggactgcaaatccaccatcccgaaatcgacatcgccgaatttttgcgcgaaagccatccgatcgatgcaatcctgaccaggctgcacggcatgcctgaaacacaaaacaccctgagccgcctaaaagggcgcaaggcggttttttccaacggcccgtcgttttacgtccgtgccgttgtcaacgcactcggtttggaaaaccgtttcgacgcgcttttcggcacggatgatttcgggctgctgtacaaacccaatccgcaagcgtatctcaatgtctgccgcctgttggacgtaccgcccgaatgctgcattatggtggacgacagcgcggacaacctgcatcaggcaaaggcgctgggtatgaaaaccgtccggttcggtgcaaaatcccacgcgctgccctttatcgatgcctccgtaagcgatatggcgcaactggctcggtatgcagaaactttgtcagaacaccgccaaaatcattacaataccccctaccccccgaaaatacgaaagaaaaccatgcgtaaaaccttcctcttcctgaccgctgccgccgcccttttgtcgggctgcgcgtgggaaacttatcaagacggcaacggcaagaccgccgtccgtcaaaaatatcccgccggcacgcccgtttattaccaagacggcagctactcgaaaaatatgaactacaaccaataccgtcccgaacgccatgccgtgttacccaaccaaaccggcaacaacgccgacgaagagcatcgccaacactggcaaaaaccaaagtttcaaaaccgataa

SEQ ID NO: 54138 - DNA, 459 bp, Neisseria meningitidis; identical to SEQ ID NO: 37616

SEQ ID NO: 54139 - DNA, 1224 bp, Neisseria meningitidis; identical to SEQ ID NO: 44034

SEQ ID NO: 54140 - DNA, 1155 bp, Neisseria meningitidis; identical to SEQ ID NO: 44038

SEQ ID NO: 54141 - DNA, 444 bp, Neisseria meningitidis; identical to SEQ ID NO: 38644

SEQ ID NO: 54142 - DNA, 627 bp, Neisseria meningitidis; identical to SEQ ID NO: 37626

SEQ ID NO: 54143 - DNA, 234 bp, Neisseria meningitidis; identical to SEQ ID NO: 36270

SEQ ID NO: 54144 - DNA, 249 bp, Neisseria meningitidis; identical to SEQ ID NO: 44040

SEQ ID NO: 54145 - DNA, 423 bp, Neisseria meningitidis; identical to SEQ ID NO: 44041

SEQ ID NO: 54146 - DNA, 957 bp, Neisseria meningitidis; identical to SEQ ID NO: 44042

SEQ ID NO: 54147 - DNA, 360 bp, Neisseria meningitidis; identical to SEQ ID NO: 44043

SEQ ID NO: 54148 - DNA, 650 bp, Neisseria meningitidis; identical to SEQ ID NO: 44044

SEQ ID NO: 54149 - DNA, 321 bp, Neisseria meningitidis; identical to SEQ ID NO: 44046

SEQ ID NO: 54150 - DNA, 210 bp, Neisseria meningitidis; identical to SEQ ID NO: 44047

SEQ ID NO: 54151 - DNA, 189 bp, Neisseria meningitidis; identical to SEQ ID NO: 44049

SEQ ID NO: 54152 - DNA, 234 bp, Neisseria meningitidis; identical to SEQ ID NO: 40078

SEQ ID NO: 54153 - DNA, 528 bp, Neisseria meningitidis
atggaattcgttaataatttagttattttttcatttttattactaatgcttattccgatattttttgtagtatatggtatataccataagatacgttatcgcaaaatatgtatcctaagaacaagttttatattattagtggtaatactttgcagtatgtattacatatattgccgttatcttgaccaacaaaaagtagcttattattgcatagatgaacaatgtatttctattgttcatctatacaaagattatggtataaactctcccacatatgcgagaatttacgcaggaaaaatattgtttagatttcaagtaagagctaaaaattacgctgaattacttatggaagatgatatatcaattagtaaaaaaattttggggaataaatttatcatttatgggtcgctacctgtaatatacggtaatgtagataatattgaagtaaaagaagctactggttatatagatagatccagtactgattatattgtctcaagaaacttaaaattcagacatttatattaa

SEQ ID NO: 54154 - DNA, 381 bp, Neisseria meningitidis; identical to SEQ ID NO: 44051

SEQ ID NO: 54155 - DNA, 237 bp, Neisseria meningitidis; identical to SEQ ID NO: 50090

SEQ ID NO: 54156 - DNA, 291 bp, Neisseria meningitidis; identical to SEQ ID NO: 44053

SEQ ID NO: 54157 - DNA, 507 bp, Neisseria meningitidis; identical to SEQ ID NO: 44054

SEQ ID NO: 54158 - DNA, 420 bp, Neisseria meningitidis; identical to SEQ ID NO: 44055

SEQ ID NO: 54159 - DNA, 441 bp, Neisseria meningitidis; identical to SEQ ID NO: 44057

SEQ ID NO: 54160 - DNA, 417 bp, Neisseria meningitidis; identical to SEQ ID NO: 44058

SEQ ID NO: 54161 - DNA, 243 bp, Neisseria meningitidis; identical to SEQ ID NO: 44059

SEQ ID NO: 54162 - DNA, 237 bp, Neisseria meningitidis; identical to SEQ ID NO: 44060

SEQ ID NO: 54163 - DNA, 303 bp, Neisseria meningitidis
atgttaaatgaaatttttgaaatttattcgagacaaggggaatctttgataggaattggaattagagaagccgcattacccgtccctattgcaatagatatattaaatttatttatcaatgagagaatacttgtattggggggagatatttatatcaagaaagataattatttttatcaaacatatgataattggtattacgagggaagtaatttatttaacagtatcgacaaagcaatgcattatttatctcaaataaaattagagaatgcatacgtatcttttgtgttgaaatttatctaa

SEQ ID NO: 54164 - DNA, 207 bp, Neisseria meningitidis; identical to SEQ ID NO: 44064

SEQ ID NO: 54165 - DNA, 195 bp, Neisseria meningitidis; identical to SEQ ID NO: 44065

SEQ ID NO: 54166 - DNA, 441 bp, Neisseria meningitidis; identical to SEQ ID NO: 44066

SEQ ID NO: 54167 - DNA, 807 bp, Neisseria meningitidis
atggcagacatcctaccatccgacaagcggcggcaaccgccaaaaacgaaaggaagtacgatgaacataatcgaacaagaaatgaaacactccagtctgagaaaaatagatgccgaaatcgccaaaatcattgccgacgcgcacaaaatcaacgccgaatccgtaaaaatagcccaagagtcccgctggtatcccatgatagcggccaccgggctggttaccgccatcgccgccgtgttggcactgatattcaaatttgcctgaccacaagccccgcgaggggctttatcccacgaacaaaatgaacagagccgcactattcaaccgctaccccgaatggattatcgggcaagacggcgcaagccgtttcattacccattgccgctatccccgcctgattgccaaaatccacaggcagacagacggcgaatgcccgggcaggcattaccgccattccgaaaacggcatcaccctttacgattttatttttttcgacggcaaaccggcagacgaagcccgatttgccgccatccttaccgaaacctgccgccgggcagtcaaaaaaatatgcgaaacaaaataaaccgcaacgacatggaactcggctacacgccttacaacctccgcacccttcgcaaccgctgcaaactgacacaggccgagttggcgcaaatcgtcggggtgaagcactacatacaggtaggccgctgggaagccgaacccgataccgaaacccgtcgggccgatatgccgctggaaaaatggcggcagttcctcgattggatagaaaaaacaaacgccgtctga

SEQ ID NO: 54168 - DNA, 978 bp, Neisseria meningitidis; identical to SEQ ID NO: 44069

SEQ ID NO: 54169 - DNA, 432 bp, Neisseria meningitidis; identical to SEQ ID NO: 44071

SEQ ID NO: 54170 - DNA, 303 bp, Neisseria meningitidis; identical to SEQ ID NO: 40930

SEQ ID NO: 54171 - DNA, 279 bp, Neisseria meningitidis; identical to SEQ ID NO: 44073

SEQ ID NO: 54172 - DNA, 219 bp, Neisseria meningitidis; identical to SEQ ID NO: 44074

SEQ ID NO: 54173 - DNA, 216 bp, Neisseria meningitidis; identical to SEQ ID NO: 44075

SEQ ID NO: 54174 - DNA, 291 bp, Neisseria meningitidis; identical to SEQ ID NO: 44076

SEQ ID NO: 54175 - DNA, 201 bp, Neisseria meningitidis; identical to SEQ ID NO: 44077

SEQ ID NO: 54176 - DNA, 195 bp, Neisseria meningitidis; identical to SEQ ID NO: 44078

SEQ ID NO: 54177 - DNA, 159 bp, Neisseria meningitidis; identical to SEQ ID NO: 44079

SEQ ID NO: 54178 - DNA, 222 bp, Neisseria meningitidis; identical to SEQ ID NO: 40096

SEQ ID NO: 54179 - DNA, 329 bp, Neisseria meningitidis
ttgataaacatgaaaacatcgacggtcgtttttggcggattttttatggcagacaacggagagcgaatccaaatccccgttttggaaaatcctgacattagggaaatcaatcactttttttccgtatcaaattttgagaaaaaaaccggcgtccttgttttcagaatcatccccgagccggaatttggcaataccgaattaactgtctattttaaaaaaggatattatagtggattaacaaaaaccagtacggcgttgcctcgccttgccgtactggttttttgttaatccactatatcagacgaaaacaaacacccgcgccaatagcc

SEQ ID NO: 54180 - DNA, 297 bp, Neisseria meningitidis; identical to SEQ ID NO: 44086

SEQ ID NO: 54181 - DNA, 204 bp, Neisseria meningitidis; identical to SEQ ID NO: 40102

SEQ ID NO: 54182 - DNA, 258 bp, Neisseria meningitidis; identical to SEQ ID NO: 44088

SEQ ID NO: 54183 - DNA, 396 bp, Neisseria meningitidis
ttgtttgtatgctttgaaaaatgtttgtttccggattttgccattcccatccggttttgcgctgtacgatgtgttttagcgcggacttgctcaaaatcgcatgtgattccggtatttgaggctttgattagggatgcggactttcaatatattttcagctacaacaacgaaggcttgatgtctgtcgggcaggtaagggagatttttgagcgtttcggcaaatataatttggttcaaacggaataccggcgttttaaggcagataagacagaaaaccgtaatcataaggcaaattcgatattcgaatttctgcatattttagaaaagaccttttatagtggattaacaaaaaccagtacagcgttgcctcgccttagctcaaagagaacgattctc

SEQ ID NO: 54184 - DNA, 1011 bp, Neisseria meningitidis
atgattttctccatcatcgtccctatttacaatgtggaaaacctccgctgctgcgtggattccgtgcttgccgaaaattttgccgattatgaaatgattttggtcgatgacggttcgccggacggctgcgggaagatttgcgacgaatatgcaggcaaatatccgcatataaaagtgattcatcaagaaaacggcgggctgtcggatgcccgcaacgccggtatccgggcggcaaaaggcgattacctaatctttttggacagcgacgattattgggccgataccaaccgttcaaaaaacgcggggggggggattctctttgatttacaacaacttgcagacaaaaaggttgatttgatcctgcatccctcgtccttcaattaccgcgacatccccaaaggggcggacttttcggataatgattttgtccgccattttgaaacgctggtggaggggcggtactatatcgccaacgcgtggacaaagattgtcaggcgggaaatcatcattaaaaacaatctgtttttcccaaaaggatacattcacgaggatttcccgtacagtttgcaattggcgcgttttatcaagacttttgccttttacgataaccctttttaccagtaccgcgttctcggcggctctatcagccacaacatcaaatacaaaaatttcagcgatgtgctgacgcatctcgactggggtgtggattttttagtcgaaaacaaaaattcccccatctacggcggtttgcaaaaatttgtcttcgacaatatcggctatctgaggtctatattggtaaggctttatttttccaaaaacattatcctcatctaccggaaatatttttcatttaaagaaaaatgcagaaagatattcggcgcgaaggcaatccgtccggtttttatcgggaagaccgcattcatcataggattgccgatattgcgcctgctcgtaccgcctatgctgtacccggcaatcaaggccgtttatcagaaatttttttcggaataa

SEQ ID NO: 54185 - DNA, 657 bp, Neisseria meningitidis; identical to SEQ ID NO: 44093

SEQ ID NO: 54186 - DNA, 1143 bp, Neisseria meningitidis
atggatttaagtatcgtagttcctatttataatgtcgaaagttatttggaagcgtgtttaagttccatagaatctatattaagtaatgaaaatgtcgaacttatccttgtgaatgacgggtcaaaagacggaagtgaagatatatgttacaaatatatagataaaatataacagcaaacaacaaacaacaaacaacaaacaacaaacaacaaacaacaaacaacaaacaacaaacaacaaacaacaaacaacaaacaacaaacaacaaacaacaaacaacaaacaacaaacaacaaacaacaaacaacaaacaacaaacaacaaacaacaaacaacaaacaccggacaccaaatatcaaatatatatatcaggataaccaagggttgtcggaggcgagaaataccggaataaaaaattcaaacggaaaatatatagtctttattgattcggatgattttattaactgtcagattttgctggattttcttagtaaagatgatactgatatgccggatgtggtgtttttaaatgcggttaaatatgataagggaagtgtttcatattttggcgaagattatcagcctgaaaaaatactcaatcaatccaaagtcgaagttttgaaaggattatgccgatttagaaaatttccgggttcggcgtggaataagattataaaaagagaattgattattagagaaaaactgttttttgaaaggggaatttattctgaagatatcgaatggtcaatgaggttatttaatgcggcaacaactttttcttatttggacggttgttattactattatcggcagggaagaaaagattctattacgggaactgtttcggaaaaaagtataaagtcattattatatattttggagaaaaatgcggaaatggaatttaatagggatatatcgagttatctttattcttttctttcctacgaatatctcgttttgctttttataatgacgagtaaaaatatagagtgtgatgctgatataaaaagaagggcgtatcatttaaggtttatgctgttaaagtccaataaattgatatataagctgatattcccgataatcacattactcggggtcgatattacaggcaggattttaaaagcaatcagggggaatatttaa

SEQ ID NO: 54187 - DNA, 1053 bp, Neisseria meningitidis; identical to SEQ ID NO: 44095

SEQ ID NO: 54188 - DNA, 1050 bp, Neisseria meningitidis
atgaagctcaaaatagacattgcaaccaacaacttcaaacacggcggcggcacggaacgctacacattggatttggtaaagggtctgaacagacaaaacatcacaccggccgtttatgcgacgaaatttgatcacagcattcctgaatacgccctaatcgaaccccatcttgtcgatcaacaccggacgctgaaaaaactacgctcattcctcttttcaagccggctcgctcaaaccagaaaaaacagtgccgccaaactgattgcctgccaccacgccgattacgccgacctcctcatctgcggcggcacacacttgggctacctgcaccatatggcgcaaaaaccgaacctgctcgaccgcctcgccatacgccgcaaccgcagcaactacgccaccgccaaactgattatggcgcattcccatatgatgcggcgcgaactggtcggactgtacggcgttccccctgaaagaatccaagtcgccccccccccagatacggaacgcttctttccacaacccggagaaactgccgacctgcgcgccaaatacggctttgccgaccatgaaaccgttttcctgttcccatcgaccggccacacgcgcaaaggtctggaactgcttgccgactttttcgaacataccagcctgcccgtcaagctcgccgttgtcggctccccgcttccccgccctatgaaaaacgtcgtcggactgggcttctgcaccgatatgcccgaactctaccgcgccgccgactttaccattatggcttccctgtacgaacccttcgggctggtcggcgtcgaatccgtcctatgcggcacacgcgtcgtcctctccgaaaacatggcatgtacagaggtcatgaacgaagaagccggcttctttttctcacgccaaaacccggaaaccctggcgcaagccgttgcccaagccgtcagccttaaaaaacagggcggacaccgcctgtccgacccgatgcgggcactgaactacaacccggctttagacaaacacatcgggctgattcttgaaatgcttgccgcctga

SEQ ID NO: 54189 - DNA, 708 bp, Neisseria meningitidis; identical to SEQ ID NO: 44098

SEQ ID NO: 54190 - DNA, 421 bp, Neisseria meningitidis; identical to SEQ ID NO: 52124

SEQ ID NO: 54191 - DNA, 1302 bp, Neisseria meningitidis; identical to SEQ ID NO: 44100

SEQ ID NO: 54192 - DNA, 963 bp, Neisseria meningitidis; identical to SEQ ID NO: 44101

SEQ ID NO: 54193 - DNA, 414 bp, Neisseria meningitidis; identical to SEQ ID NO: 44102

SEQ ID NO: 54194 - DNA, 2124 bp, Neisseria meningitidis
ctcaaaggtgcgcagctcatcggcaaaggcatacaggcagatacgcgcaacctgcatatagaaagtgttcaagatactgaaacctatcaaagcaaacaacaaaacgccagtgcacaagtgaccgtaggttatggcttcagtgccagtggcgattacagccaaagcaaaatccgagccgaccatgcttcggtaaccgagcaaagcggtatttatgccggagaagacggctatcaaatcaaagtcagagacaacacagacctcaagggcggtatcatcacgtctagccaaagcgcagaagataagggcaaaaacctttttcagacggccaccctcacccatagcgacattcaaaaccacagccgctacgaaggcaaaagcttcggcataggcggcagtttcgacctgaacggcggctgggacggcacggttaccgacaaacaaggcagacctaccgacaggataagcctggcagccggctacggcagcgacagcgacagtcaaagcagcatcacgaaaagcggcatcaacacccgcaacatacacatcaccgacgaagcgggacaacttgcccgaacaggcaggactgcaaaagaaaccgaagcgcgtatctacaccggcatcgacaccgaaactgcggatcaacactcaggccgtctgaaaaacagcttcgacaaagacgcggtcgccaaagagatcaacctgcaaagggaagtaacgaaggagttcggcagaaacgccacccaagccgtagcggccgttgccgacaaactcggcaatacccaaagttacgaacggtatcaggaagcccgaaccctgctggaggccgaactgcaaaacacggacagcgaagccgaaaaagccgccttccgcgcatccctcggccaagtaaacgcctatcttgccgaaaaccaaagccgctacgacacctggaaagaaggcggcataggcaggagcatactgcacggcggggcggcaatcggctatgcggcgggcgggaatgtcggtacggcggcagtaggggcgaatgtcgattggaacaataggcagctgcatccgaaagaaacacaaatccttaacaaactgtcaaaaggcaaatcggctgaagaacagtaccgcctaaaagccgctgcatgtgcattaacccggtgcgcggaaggcgtacctgacttcgaccctctttataaaggactaaaaaacctccaagatgccggtaaacagtttgtagcggaacaaaacgtattgatgcggacggatgcatttaaatatggaacatggaacagcctgaatgatatacgcagcagttacgaccgtgctgccaccaaaattaagggtgcgggcaatatgggattgggtgcaacgacttttgtcggttcgggtgctataggcggaggtctgtgcagtaccgggattggctgtgcggccggtggacttattgcaacggcaggtatgaccggtggttatacacaggcctcagaaggaagccggcaattgtttggcacttaccagtccgattttggtaaaaaagttgtcctatctttgggtacaccaatagaatacgaatcgccgttagtatctgatgcgaaaaatctagccgtatggggattggaaacgctgattacgcgcaaattgggaaacttggcaacgggtgtgaaaacttccttgactccgaaaactgctgacgtacagcgaaatatcctgtcccaatccgaagtcggtatcaagtggggcaaggggattgaaggacagggaatgccttgggaggattatgtcggtaagggcttgtctgccaatgcaaggttacctaaaaattttaaaacatttgattattttgatcgtggtacaggcacggcaatcagtgccaaaactctggatacgcaaactacggcacgcctgtccaaacccgaacagctttacagtaccatgaaagggtacatcgataagacggcaaatttcaaaagttatgaattatcagaagtaccgttaagggcagacatgatcaaacagcgcgaaatccatctggccatacccgcacaaactaataaggagcaaagattgcagttgcaacgtgtggtagagtatggcaaaagtcaaaacattacagtcaaaattacggagatcgaataa

SEQ ID NO: 54195 - DNA, 1509 bp, Neisseria meningitidis
atgaccaccacccccgcaaacgtcctcgcctccgtcgatttgggttccaacagtttccgcctccagatttgcgaaaacaacaacggacaattaaaagtcatcgattcgttcaaacagatggtgcgcttcgccgccggactggacgaacagaaaaatctgagtgccgcttcccaagaacaggctttggactgtctggcaaaattcggcgaacgcctgcgcggcttccgccctgaacaggtacgcgccgtggcaaccaacacattccgcgttgccaaaaacatcgcagatttccttcccaaagccgaagcggcattgggtttccccatcgaaatcatcgccgggcgcgaagaggcgcggctgatttataccggcgtgatccacaccctcccccccgggcgcggcaaaatgctggttatcgacatcggcggcggttcgacagaatttgtcatcggctcgacgctgaatcccgacattaccgaaagcctgcccttgggctgcgtaacctacagcctgcgcttcttccaaaacaaaatcaccgccaaagacttccaatctgccatttccgccgcccgcaacgaaatccagcgtatcagcaaaaatatgaggcgcgaaggttgggatttcgccgtcggcacatcgggttcggcaaaatccatccgcgacgtgcttgccgccgaaatgccccaagaggcggacattacctacaaaggcatgcgcgccctcgccgaacgcatcatcgaagccggttcggtcaaaaaagccaaatttgaaaacctgaaaccggaacgcatcgaagtttttgccggcggacttgccgtgatgatggcggcgtttgaggaaatgaaactcgacaggatgaccgtaaccgaagccgccctgcgcgacggcgtgttttacgatttgatcgggcgcggtttaaacgaagatatgcgcggacaaacggttgccgagttccaacaccgctaccacgtcagcctcaatcaggcgaaacgcaccgccgagaccgcgcaaacctttatggacagcctctgccacgctaaaaacgttacagttcaagagcttgccttgtggcaacagtatctcggacgcgccgccgcgctgcacgaaatcggtttggacatcgcccacaccggctatcacaagcattccgcctacatcctcgaaaacgccgatatgccgggtttctcacgcaaagaacagaccatacttgcccaactggtcatcggtcatcgcggcgatatgaaaaaaatgagcggcatcatcggcaccaacgaaatgttgtggtatgccgttttgtccctgcgccttgccgcactgttctgccgttcgcgccaagacctgtctttcccgaaaaatatgcagttgcgcacggatacggaaagctgcggcttcatcctgcgtattgacagggaatggctggaacgccatcccctgattgccgacgcattggaatatgaaagcgtccaatggcaaaaaatcaatatgccgttcaaagtcgaggccgtctga

SEQ ID NO: 54196 - DNA, 354 bp, Neisseria meningitidis; identical to SEQ ID NO: 44106

SEQ ID NO: 54197 - DNA, 2112 bp, Neisseria meningitidis; identical to SEQ ID NO: 44108

SEQ ID NO: 54198 - DNA, 2031 bp, Neisseria meningitidis
atgaaactcgaagcaagcaagcacaagcagaagtttaaaaaatcatttattgtaagtctatttttttctattctttatacctctccgcttttggctgttgattacgtttacgacaaaaccaagctcactaatgatgaaattacccgcttaaaaaaactccgcgataaaacgagtgaatattggaaaaaagaaacttatcttataaccgaggataatccaaaagttccaccctttcccgcactataccctagaacataccaattcgaaaacatcaataactcaaaaaagatttctttttatgatcaagaatataccgaaggttacctagttggcttcgcccgaggtttaggggttgcaaaaagaaatggggacacagaagaacaaatacggaaatattttaaggaatgttttaattctaacactaagatacgtgattatagtacttgccaagctgaaaaatttggatcccatcctcttatagtaaaaagtcatatattctccttaggtccaaaaataaaaaatagtcatatcaacagcgaaattttatctgtcgggaattatacagaatgggctaatcaagtaattcatcatattgaaaattatgtttcttttgcagcacatctatattctggtttagatccattccactatattgaggttacagacaactcgcacgttatcgggcaaacgattagtttggatgaattccgcttagaaaattctctctgggagccccgttgggattctaatgttgggaaattaaaaacaacgaatgcagacatccgttttaatactaaaagtgaaagtttactcgtaaaagaagattatgctggcggagctcgttttcgttttgcttacgatcctaaagaagcgaaaaatactgcattaatttttgagaaaaatgttactggcacttccgacatcatcttcgaaaatccaatagacgatttaaaaagcctcgatgggcatcaaattatcaaagtaaatggcacagcagataaacacgcattccgtctttctggcaaacaccaaaagggaatttatacgctttctttacaacaacgcccagagggcttttttaccaaagtgcaagaacgcgatgatatggcgatttatgcacaacaggctcaagccgccaataccttattcgccttgcgtttgaacaacaaaaacagcgatattttcgaccgcactttaccacgcaaaggcttgtggttgcgtgtgattgacggacattccaaccaatgggtgcaaggcaaaacagcacctgtagaaggctatcgtaaaggtgtgcaactcggcggcgaagtattcacatggcaaaacgaaagtaatcaactttctattggcttaatgggcggacaagcagaacaacgtagcactttccacaacccagatacagacaatcttacaacgggaaatgtgaaaggctttggtgcaggcgtttacgccacttggcaccaacttcaggacaaacagacaggtgcgtatgcggatagctggatgcaatatcaacgcttccgccaccgtatcaacactgaagatggtacagaacgttttacttcaaaaggtattactgcctcaattgaagcaggttacaatgcgttattggcggaacacttcactaaaaagggcaacagccttcgtgtttacctacaaccacaggcacaattgacttatttgggggtaaacggaaaattcagcgatagcgaaaatgcccacgtgaatttacttggctcccgccaattacaaactcgggttggcgttcaagctaaagctcaattttcactctataaaaatatcgctattgaacctttcgccgctgtgaacgcgctttaccacaacaaacctttcggtgtggaaatggacggagagcgtcgagtgataaacaataagacggcaattgagagccaattaggtgtagcagtgaaaatcaaatctcacttaaccttacaagccacattcaaccgccaaacaggcaaacatcatcaagctaaacaaggtgcgttgaatttacagtggacgttttaa

SEQ ID NO: 54199 - DNA, 2052 bp, Neisseria meningitidis
atgctgccaacccaacccaacccaacccaacccaacccaacccaacccaaccccccaagccctgatctaagcgacacagccggggcgaacactgaggcaatctacacttcagacggcattaccgccaactctacccaactcgaacagctcaaaaaactgtttcccgcctgttttgacgcagacggaaatttccttatcgacagattacaagccgaaatcgcgccgcagaccgacatcggacgcgaattttacgaaatgaactggctgggcaaatcatatgctcgcctgcttcgcaacctgccgcccgaaaccctgataagtgaagacaagacgcacaacgccaagcccgaaaatgcaggcagccaaaacctgctgattcgtggcgacaatctagaagtgttgaaacacttaaaaaacgcctacacaaacagcgtgaagatgatttacatcgacccgccctaaaacaccggatcagacggctttgtctatcaggacgaccgcaaattcacacccgctgaacttgcccgcctagccaatattgatgaagacgaagccgcgcggattttagatttcaccgacaaaggctcaaactcgcacagcgcatggctcacctttatgtatccgcgcctgtatgtcgcccgcgaactgttaaaggacgacggtgtgatttttatctcgattgacgataacgaagcggcgcagttgaaattgttgtgtgatgaagtgtttggggaagggaattttgttgcacaattgccttggcgaaaaagaacagctaaatcagatgtgccttttggtatttcgcaggattatgaatggatatttgtattcgcaaaatcttgccaatttattgcagcaactaaaggcaaggaacgacgctattatgagactgatgatttccccgatcgtccttggcgtacccacgacttaacgaaacaaacaactgcggcggaaaggccaaatagttttttcacaatggttgatcccaagacaggaaaaaaatatccagcaaatccaaatgcaacttggcgtgtaaccaaagatacatttcaagattattataataaaggaaaaatcgttttccctgatgattatgatttcttaaatatcagcaatccagttatgcgttactttaaagatgacgacatgaaaaaagctggcgaggattttggcaaagtagctgtaagcagtagattacctgaaaatgttggtacattagccgatgcagtagccgaatatttggctatttttagtaggacgctacctgaaaatatcggaatgactaaagaaggcacaaaagaaatcacagatttatttggtagcaaaatatttaccttccccaagcctagtcaattgattaaatttttagtttcaataagttcaaagagtaatgacctaatcctagacttcttcgcaggcagcggcacaaccgcccacgccgtgatgcagcttaacgccgaaggacaaaacggtaaccgccgctatatctgtgtacagcttcccgaaaaaaccgctgaaaaatccgaagcccgtaaagcaggctacccgaccatcttcgacatcaccaaagcccgcatagaaaaagccgccgccaaaatccgcgtcgaacatcccgattacacgggcgattcgggcttcaaaatctttcaaacggcagacaatttcaggcagcatccggacaaggatttttcgcccgaacaaccggatttgccgcttaacgatgaattaagcgaagaacagctgcaaacgcttctgaccacctggacgctgtatgacggggcggcactgaccacgccggttgagcctgtgcggttaggggcttacacggcgtatctgtgcgaaaaacggctgtatctgatgaatgccggttttacttccgccgatttgttggcgtttatccgcaagctggacgacgatgcggatttcaatcccaaccgcgtgattgtattcggcagcaatatggcaagcgccatgcagcacgaacttgaccaggcggttcgcggttatgccaataaaaaagagattgagttgaatgtggttatcagggtttga

SEQ ID NO: 54200 - DNA, 1539 bp, Neisseria meningitidis
atgaatatgctgggagctttggcaaaagtcggcagcctgacgatggtgtcgcgcgttttgggatttgtgcgcgatacggtcattgcgcgcgcattcggcgcgggcatggcgacggatgcgttttttgtcgcgttcaaactgcccaacctgcttcgccgcgtgtttgcggagggggcgtttgcccaagcgtttgtgccgattttggcggaatataaggaaacgcgttcgaaagaggcgacggaggcttttatccgccatgtggcggggatgctgtcgtttgtgctggtcatcgttaccgcgctgggcatacttgccgcgccttgggtgatttatgtttccgcacccggttttgccaaagatgccgacaaatttcagctctccatcgatttgctgcggattacgttcccctatatcttattgatttcactttcctcttttgtcggctcggtactcaattcctatcataaattcagcattccggcgtttacgcccacgttcctgaacgtgtcgtttatcgtattcgcgctgtttttcgtgccgtatttcgatcctcccgttaccgcgctggcttgggcggtttttgtcggcggcattttacaactcggcttccaactgccctggctggcgaaactgggttttttgaaactgcccaaactgaatttcaaagatgcggcggtcaaccgcgtcatgaaacagatggcgcctgcgattttgggcgtgagcgtggcgcagatttctttggtgatcaacacgattttcgcgtcttatctgcaatcgggcagcgtttcatggatgtattacgccgaccgcatgatggagctgcccggcggcgtgctgggggcggcactcggtacgattttgctgccgactttgtccaaacactcggcaaaccaagatacggaacagttttccgccctgctcgactggggtttgcgcctgtgcatgctgctgacgctgccggcggcggtcggactggcggtgttgtcgttcccgctggtggcgacgctgtttatgtaccgcgaatttacgctgtttgacgcgcagatgacgcaacacgcgctgattgcctattctttcggtttaatcggcttaatcatgattaaagtgttggcacccggcttctatgcgcggcaaaacatcaaaacgcccgtcaaaatcgccatcttcacgctcatctgcacgcagttgatgaaccttgcctttatcggcccactgaaacacgtcggactttcgcttgccatcggtctgggcgcgtgtatcaatgccggattgttgttttacctgttgcgcagacacggtatttaccaacctggcaagggttgggcggcgttcttggcgaaaatgctgctctcgctcgccgtgatgggcggcggactgtgggcggcgcaggcttgcctgccgtttgaatgggtacgcgccggcggaatgcggaaagcggggcagctctgcatcctgattgccgtcggcggcggactgtatttcgcatcactggcggctttgggcttccgtccgcgccatttcaaacgcgtggaaaactga

SEQ ID NO: 54201 - DNA, 531 bp, Neisseria meningitidis
atgcagggtttcgaactcgaagatttgacgctttggctgatacgcgatgccggagaagatcagatgtggatagaccgttgggcggtcagttatcccgtcgtgcagatgtccgaagcatcggccggtcaaagcataggggaatggcaggcagggcttcagacggcattcgaacggatacagggcaggcatatcgccgttgtcgcacacggcgcgggtgcggccgcattcttggcgtggctgtaccgcgcagacatcctgacacggaagaaaattgccaacatcatccttgtaccgcagcatcccgatattttctccgacgatgcggaacacactttccaacgcgtccgctgtccctgccgtgccgcattggtggtgtccgaacacggggatgtgccgcgagattgggcgcaaaaacaggcggatacgtggaacgcgcgcctgttggtttccccgcattcgggcagtttgaacggtatgctcggcggctggcagtggggtatgaagctgatgcaggaaatgttgctggcgtga

SEQ ID NO: 54202 - DNA, 1014 bp, Neisseria meningitidis; identical to SEQ ID NO: 36441

SEQ ID NO: 54203 - DNA, 846 bp, Neisseria meningitidis
atgccgcaaggtcggcaggaaaaaggagaagaaatggacaaaatcagagttgccgccgtgcagatggtgtcgggcgtgtcgccggaaaccaacgtcgctgccatgaaacgcctggtcgcacgggcggcggagcagggtgtggattgggtgctgctgcccgaatattgggtgctgatgggcgcaaacgataccgacaaactcgcgcttgccgagcctttgggcggcggacgctttcagacggcattgagcgaaacggcgaaagaatgcggcgtggtgctgtttggcggaaccgtgccgctgcaaagccccgaggcgggcaaggtcatgaatactttattggtgtacgggcgcgacggcaaacggacggggctgtaccacaaaatgcacctcttcggcttttccggtttgggcgaacgctatgccgaagccgataccatccgcgcgggcggggatgtgccgcacttgtcggcagaaggcgtgccggtggcggcaggtatttgttacgatgtccgctttcccgaatttttccgccgccagctgccgtttgacgtattgatgctgcccgctgcgtttacgcacacgacgggcaaggcgcattgggagctgctgctgcgcgcgcgtgccgtcgaaaaccaatgttacgtcgtggcggcggcacagggcggtttgcacgaaaacggacggcgcacgttcggacacagcatgattgtcgatccgtggggcgacgtgttggacgtattgcccgaaggcgaaggcgttgttacggcagacatcgatgccaaccgcctgaacagtgtccgcaaccgcctgcccgccttgaaataccgggttttggatgccgtctga

SEQ ID NO: 54204 - DNA, 201 bp, Neisseria meningitidis; identical to SEQ ID NO: 37363

SEQ ID NO: 54205 - DNA, 8442 bp, Neisseria meningitidis
atgaaccgcaccctgtacaaagttgtatttaacaaacatcgaaactgcatgatagtcgttgctgaaaatgccaaacgcgagggcaaaaacacagccgacacccaagctgtaggtattttgccaaatgatattgcgggctttgcgggttttatccattctatctctgttatctcattctccctttcattactgctcggttctgcccttatcctgacttcttcttctgctaatgcccaaggtatcgttgccgacaaatccgcacctgcacagcaacagcctaccatcctgcaaacaggtaacggcataccgcaagtcaatattcaaacccctacttcggcaggggtttctgttaatcaatacgcccagtttgatgtgggtaatcgcggggcgattttaaacaacagtcgcagcaacacccaaacacagctaggcggttggattcaaggcaatccttggttggcaaggggcgaagcacgtgtggttgtaaaccaaatcaacagcagccattcttcacaactgaatggctatattgaagtgggcggacgacgtgcagaagtcgttattgccaatccggcagggattgcagtcaatggtggtggttttatcaatgcttcccgtgccactttgacgacaggccaaccgcaatatcaagcaggagaccttagcggctttaagataaggcaaggcaatgttgtaatcgccggacacggtttggatgcccgtgataccgatttcacgcagatattgagccatgcggttaagattgatgggcctgtgtggggtaaagatgtgcgtgtgtcggcagggaaaaatgatgtctcagctgatggctctatccggtcttcacactcccctgctacgaatataaattccgacaactcactgtatgccatcgatacaggggcattgggcggtatgtatgccggtaagatcaccctgatcagcactgatcgtgatgcatccgtgcgcaatcaggggcaatggtttgcctcagccggcaatgtggcagtgaatgctgagggtaaactggtcaacacaggcatgattgcagcgacgggagaaaatcatgcggtttcacttcatgcccgcaatgttcataatagcggtacggttgcctcacaggatgatgccaatattcacagccagacgctggacaattcaggtacggtcttatcctcaggtcaattgactgtccgtaatttaggccgtctgaaaaaccataacaacggtacgatccaggctgcacgcttagatatgtcaacaggtggtttggataacacaggtaatattactcaaacaggttcacaagcattggatttggtatctgcaggcaaattcgataacagtggcaagattggtgtaagtgacgttccacagaccggtttgaatcccaatccatcagtcataccacagattccgagtactgcaacaggttcaggcagcagcactgtcttggcatctaagcctggttcaaacaatcccgtttcacctacagcacctgcaaaaaactacgccggaggacgcattcaaacaacaggagcatttgacaatgcaggatcaatcaatgcaggtgggcaaattgacattgccgcccaaaacggtttggaaaattcgggtagtctgaatgcggctaaactacgagtatcaggcgattcatttaacaatacggtaaaaggcaaactccaggcacacgatctggctgttaacactcaaactgctaaaaacagcggtcacttattaactctaaccggcaagattgacaaccgtgaactgcataatgccggagaaattgccgccaacaatctgacactcattcattcgggccgcttgagcaatgataaaaaaggcaatattcgagctgcacatttacagcttgataccgccggtttacataatgcaggtaacattcttgccgatagtggaaccgttaccaccaagaataatcttcgcaatacaggaaaagtttctgttgcacgactaaataccgaaggtcagactctagataatacgcacggacatatagaggctgaaacggttaacatccaaagtcagcaactgactaaccaaagtggccatattactgctaccgaacaactgactatcaatagtcgaaatgtagacaaccaaaacggcaaactcctatctgcaaaccaagcacaattagctgtttcagacggcctatacaaccaacatggtgaaattgccaccaaccggcagttgtctattcacgataaaaatcaaaacactttggcgttaaacaatgcggatggcacgattcaatctgccggtaatgtatcgctacaagccaaatcactcgccaacaatggcacattaacagccggtaacaaactggatattgctttgacggacgatttcgtcgtagagcgcgacctcactgcaggcaaacaattaaatctaagcatcaaaggccgtctgaaaaatacccataccctacaagcaagccatacgctcaaactcaatgccggcaatatagataaccaagttacaggcaaaattattggtggagaacaaacggacatcacatccgaacagcatgttgacaacaggggcttgatcaacagcgacggtttgacccacatcggtgcaggtcaaaccctgaccaacaccgggacaggcaaaatctatggcaaccatattgccctggacgcgcaaatactgcttaaccgggaagaaacgacggaaggcagtaccaaagcgggggcaatagctgcaaggaaacgtttggatattggagcgaaagagattcataaccaagaaggtgccctactatccagcgaaggtatttttgccgtaggtaatcgactggatgaacaacatcatgcggcaggcatggccgatacctttgttaatggcagtgccggtttggaagtacaaggtgatgcattgatgtccgttcggaatatgcagaatatcaataatcactttaaaacagagacatacttagccaaagcagaaaagcaagttcgtgactacaccgtactggggcaaaatacctactatcaggcaggaaaagacggtttattcgacaactcgcaaggacaaaaagaccaaactactgctacgttccatttaaaaaatggttctcgtattgaggccaaccaatggcatgtccgagactaccacatcgagacttataaagaacgcatcatcgaaaaccggccggcacacattactgtgggcggtgatttgactgcctcaggtcaaaattggctgaacaaagacagccggattgtagtaggcgggcgtattatcactgatgatttaaaccagaaagaaattaccaatcaaagtacaacaggcaaaggtcgcacagatgctgtcggcacacagtgggattcagttacaaaaaaaggatggtacagcggtagaaaaagacaacgccgtactgaaagaaaccatactccttaccatgatacccaactatttacccacgacttcgacacgcctgtatccgtcatccaacagaatgccgcctccccttcctttcaacccgctgcatctgcaatcaaactgattgacggagtatccacggcagccgtcaatggtcagcgcatccataccggtaatgtggtctcgttaaataacgctactgttactctgcctaacagcagcctctataccacccatcctgacaataaaggctggttggttgaaaccgatcctcaatttgcagactaccgccgctggttgggcagcgactacatgttgcaacaactgcaattggacaccaatcatctacacaaacggctaggcgacggctactacgaacaaaaacttgttaatgaacaaatccatcagttaacaggctaccgccgactcgacggctacaggagtgatgaagaacaattcaaagctctgatggacaacggccttactgctgccaaaacattcggtctcaccccaggtatcgccttgagtgcagagcaagttgcccgcttaacttcagatatcgtttggatggaaaatcaaaccgtcaccctgtctgacggttcgactcaaaccgtactggttcctaaagtctatgccctggcgcgcaaaggtgatctcaatacctccggtggcctgattagtgccgaacaagtcttacttaaactgcaaaacggcaacctgactaacagcggtaccattgcggggcgacaggccgtactcatccaggcacggaatattaacagcaacggtaacattcaagccgaccaaatcggcttaaaagctgaaaaaagtatcaatatcgacggcgggcaggtacaagcaggcagactgctgactgcccaagcgcaaaatatcaaccttaacggtacaacccaaacttccggtaatgaacgtaacggcaataccgccatcgatcgtatggccggcattaacgtggtcggaagccatactgagcaagtagataacagaacttcagacggcatcctatccctgcatgccggcaacgatatcaacctcaatgcggccaccgtctctaaccaagttaaaggcggcactacccaaattaccgccggcaataatctcaacctcggcaccattcataccgaacatcgcgaagcctatggtacattagatgacgagaaccatcgccatgtccgccaaagtaccgaagtcggcagcagtatccgcacgcaaaacggcgcactgcttagagccggtaacgacttaaaaatccgccaaggcgaactggaggccgaagaaggcaaaaccgtccttgccgcgggacgtgatgtcactatcagcgaaggacgccaaataaccgaactggatacctcggtaagcggaaaaagcaaaggcatcctttccagtaccaaaacacaggatcgctaccgcttcagtcatgatgaagcagtcggcagcaacatcggcggcggcaaaatgattgttgcagccgggcaggatatcaatgtacgcggcagcaaccttatttctgataagggcattgttttaaaagcaggacacgacatcgatatttctactgcccataatcgctataccggcaatgaataccacgagagcaaaaaatcaggcgtcatgggtactggcggattgggctttactatcggtaaccggaaaactaccgatgacactgatcgtaccaatattgtccatacaggcagcattataggcagcctgaatggagacaccgttacagttgcaggaaaccgctaccgacaaaccggcagtaccgtctccagccccgaggggcgcaataccgtcacagccaaaagcatagatgtagagttcgcaaacaaccggtatgccactgactacgcccatacccaggaacaaaaaggccttaccgtcgccctcaatgtgcccgttgtccaagctgcacaaaacttcatacaagcagcccaaaatgtgggcaaaagtaaaaataaacgcgttaatgccatggctgcagccaatgctgcatggcagagttatcaagcagcccaacaaatgcaacaatttgctccaagcagcagtgcgggacaaggtcaaaacaacaatcaaagccccagtatcagtgtgtccatcacctacggcgaacagaaaagtcgtaacgagcaaaaaagacattacaccgaagcggcagcaagtcaaattatcggcaaagggcaaaccacacttgcggcaacaggaagtggggagcagtccaatatcaatattacaggttccgatgtcatcggccatgcaggtactgccctcattgccgacaaccatatcagactccaatctgccaaacaggacggcagcgagcaaagcaaaaacaaaagcagtggttggaatgcaggcgtagccgtcaaaataggcaacggcatcaggtttggaattaccgccggaggaaatatcggtaaaggtaaagagcaagggggaaatactacccaccgccacacccatgtcggcagcacagccggacaaaccaccatccgcagcggcggggataccaccctcaaaggtgcgcagctcatcggcaaaggcatacaggcagatacgcgcaacctgcatatagaaagtgttcaagatactgaaacctatcagagcaaacagcaaaacggcaatgtccaagttactgtcggttacggattcagtgcaagcggcagttaccgccaaagcaaagtcaaagcagaccatgcctccgtaaccgagcaaagcggtatttataccggagaagacggctatcaaatcaaagtcagagacaacacagacctcaagggcggtatcatcacctccacccgaagtgccgaaagcaaagggaaaaaccgctttcagacggccaccctcacccatcgcgacattcaaaaccacagccgctacgaaggcagaagcttcggcataggcggcagtttcgacctgaacggcggctgggacggcacggttaccgacaaacaaggcaggcctaccgacaggataagcccggcagccggctacggcagcgacggagacagcaaaaacagcaccacccgcagcggcatcaacacccgcaacatacacatcaccgacgaagcgggacaacttgcccgaacaggcaggactgcaaaagaaaccgaagcgcgtatctacaccggcatcgacaccgaaactgcggatcaacactcaggccgtctgaaaaacagcttcgacaaagacgcggtcgccaaagagatcaacctgcaaagggaagtaacgaaggagttcggcagaaacgccgcccaagccgtagcggccgttgccgacaaactcggcaatacccaaagttacgaacggtatcaggaagcccgaaccctgctggaggccgaactgcaaaacacggacagcgaagccgaaaaagccgccatccgcgcatccctcggccaagtaaacgcctatcttgccgaaaaccaaagccgctacgacacctggaaagaaggcggcataggcaggagcatactgcacggggcggcaggcggactgacgaccggaagcctcggcggcatactggccggcggcggcacttcccttgccgcaccgtatttggacaaagcggcggaaaacctcggtacggcgggcaaagcggcggtcaacgcactgggcggggcggcaatcggctatgcggcgggcgggaatgtcggcacggcggcagtaggggcgaatgtcgattggaacaataggcagctgcacaacagcgagatcagaaaaattaaaaataatgccgctaaatttgccaaactccatcccggcatttcccaacggcaggcagaagagcggctggtggcacaagctatgcgtcaggtcgatgcggcttattatgccaaacatgccgacaccgacacggcggcggaacaattcctgcgcagcatagcgggaagtttcaaagccgacggggaaacgttcctggattttgccccgatgaagtattacagggacagcggtaaatttgccgaacatacaggctatcgagatctaagagcaaagttgggacagaatccggtccataccgaagcgcaaaggaacagaactattgaagaaaagacctacggcacaataggcagaggtgtaggtaaaggcatcggcaataccctagccaacaacctgcaggcgggtccgccacactatgtactcggcattacgaactattcgaactggggcaaagaacttattccatacgagaaccctgttgagcgcgccatcggcaaacaggcagaggatatgacggaaaaagcggtagcagctgtgtctttgggccggagtttgccgtcaaaggttgttaatgtaccctctaaattagctaaaagcattaagacagcggaaacacataaaccactggtacaaaagcgtacggaaacttattttagagttgaaggaggaggaagtggaaataatcaggcagccaaagccgctaaaaatacggaaaaaatgaaagccgcaatagatcaaacccacagtggagttgacctgccttatgattcgagacaaattcgagctaaactggaaaaaagatatggagctgagaatattgtatccactacgattccaaagaaaccggtccaaagtatcaataatcaaactaaaccggactactcatctattgtatatactaataaaagtggaaaggtagttaatgttaaatataaagatcctatatcaggggaaagtaaggctgttaatatcgcctatgataataggggattacctatatttgataacgtatcaaattttaccaccaaaatagataattcattgtcgtatacgggacagatgagggcagctactaaagatttatggaaagctattgaaagtggacaagtgcccaaaaatcaatttactaatgaacaactaacgaagattaaagcaggaaatgaaaaaattcctggttatacatggcatcataatgcgcaaagctctcctaataatatgcagttaattcctaatagtattcatacagctgttaggcatactggtcaaaaatcgttaaagaaaggtcagtaa

SEQ ID NO: 54206 - DNA, 495 bp, Neisseria meningitidis
atgaaaaaaaccctgttggcaattgttgccgtttccgccttaagtgcctgccggcaggcggaagagggatcgccgcctttaccccggcagattagcgaccgttcggtcggacactattgcagtatgaacctgaccgaacacaacggccccaaagcccagattttcttgaacggcaaacccgatcagcccgtttggttctccaccatcaagcagatgttcggctataccaagctgcccgaagagcctaaaggcatccgcgtgatttacgttaccgatatgggcaatgttaccgattggacgaatcccaatgccgacacggagtggatggatgcgaaaaaagccttttacgtcatcgacagcggctttatcggcggtatgggtgcggaagacgcgctgccgttcggcaacaaagagcaggctgagaaatttgcaaaggataaaggcggtaaggttgtcggtttcgacgatatgcctgatacctatattttcaaataa

SEQ ID NO: 54207 - DNA, 231 bp, Neisseria meningitidis; identical to SEQ ID NO: 38834

SEQ ID NO: 54208 - DNA, 621 bp, Neisseria meningitidis
atgcttacctcgaaaagttgcgatttgttcaatatcccgtttttccaattttcccagcttaaaaaataccagcctgaaagcattccgcaaatcaaggcagactataaagaaaactggcaggtatggcagcagctgatccagcaggttgccgccgaattgggtgcgccgttcgcgccgccgcatatcgaacgctggtgtaacggctggcaggtgcgcgcccatttctttgcctacttcaaatacgaacaatataaaaattccgccgcgattttatcgattttattgaaccgccgccgcctgagcgtcagcttggattggcactgctacaaagccgacgtgtcgccgattgcgctgcccgaatacaaccgctggttggatgatttcgataccgacaaatacgccgcattcgatatgtggcacggcgcggaaagcgaatatgacgactaccgcaccgtcgcacaacaaagcgaatccgaccgaaagttgcaaaacgacgaagactttttctgcatcggcaaacacatcgagcgcgacgatttgggcaagcaggatgtcgcgaaatggatagcggaaacggtggaagatttgctgccgctttacgaagcctgccacggcaaatga

SEQ ID NO: 54209 - DNA, 297 bp, Neisseria meningitidis; identical to SEQ ID NO: 37913

SEQ ID NO: 54210 - DNA, 2631 bp, Neisseria meningitidis
atgcaagaacaatatcaacccgccgccatcgagcctgcggcgcagaaaaaatgggacgacgcccgtattttcaacgtctccgaagacgcttccaaacccaaatattattgcctctccatgttcccctatcccagcggcaagctgcatatggggcatgtgcgcaactacaccatcggcgatgtattgagccgcttcaaacttttaaacggcttcaacgtcatgcagcctatgggttgggacgcgttcggcatgccggcggaaaacgcggcgatgaaaaacaacgtcgcccctgccgcttggacgtacgataacatcgaatacatgaaaacccagctcaaaagcctgggttttgcgattgactgggcgcgcgaaaccgcaacctgcaaacccgaatactaccgctgggaacaatggctgtttaccaagctgtttgaaaaaggcatcgtttatcgcaaaaacggcacggtaaactgggacccggtcgaccaaaccgtccttgccaacgagcaagttatcgacggacgcggttggcgttcgggcgcgttgatcgaaaaacgcgaaatcccgatgtattacttcaaaatcaccgattacgccgaagagctgctcaacgacttggacaagctggaacactggcctgaacaagtcaaaaccatgcagcgcaactggatcggcaaatctcgcggcatgaccgtgcgctttgctgtttcagacgacagcaaacaaggcttggaaggcgattacgcgaacttcctgcaagtttataccacccgtcccgacacgctgatgggcgcgacttatgtcgccgttgccgccgagcatccgctggcaaccgccgcagccgccggcaaacccgaattgcaggcatttatcgccgaatgcaaagcaggttcggttgccgaagccgatatggcgacgatggagaaaaaaggcgtgccgaccggccgctacgtcgtcaacccgctcaacggcgacaagctggaagtgtggattgccaactatgtattgtggggctacggcgacggcgcggtgatggcggttccggcgcacgacgaacgcgattttgagttcgccaccaaatacaatctgccgaaaaaacaagtcattgccgtcggcgacaacgcatttgacgaaaaccaatggcaagaatggtacggcgacaaagaaaacggcgtattggtcaacagcggcgacttggacggcttggattttcagacggcattcgacgccgtcgccgccaagctgcaaagccaaggcgcgggcgaaccgaaaacccaataccgcctgcgcgactggggcatttcgcgccaacgctactggggctgcccgattcccatcgtccattgcgaacaatgcggcgacgtacccgtccctgccgaccaattgccggtcgttttgcctgaaaacgtcgtacccgacggcatgggttcgccgctggcaaaaatgcccgagttttacgaaactgcctgcccatgctgcggcggcgcggcgaaacgcgaaaccgacaccatggacaccttcatggaatcgagctggtatttcttccgctacatgtcgccaaaattttcagacggcatggtcgatcctgccgccgcgaaatactggggcgcggtcgaccaatacatcggcggcatcgaacacgcgattttgcacctcttgtacgcgcgtttcttcaccaaactgatgcgcgacgaaggtctagtcaatgttgacgaaccgtttgaacgcctgctgacgcaaggcatggtcgtttgcgaaacctactaccgcgaaaacgacaaaggcggcaaagattggatcaaccccgccgatgtcgagctgacgttcgacgacaaaggccgccccatttccgccgtcctcaaagccgacgggctgcccgtcgtcatcagcggcacggaaaaaatgtccaagtccaaaaacaacggcgtcgatccgcaagaactgattaacgcctacggcgcggacaccgcccgcctgtttatgatgttcgccgcaccgcccgaacagtccctcgaatggagcgacagcggcgtcgaaggcgcacaccgcttcctgcgccgcctgtggcgtaccgtttacgaatacttgaagcaaggcgaagcggtcaaagcgttcgcaggcagccaagacggtttgtctaaagaactcaaagacctgcgccacaaactgcacgcgaccactgccaaagtcagcgacgactacggccgccgccagcagttcaacaccgccatcgccgccgtgatggaattgctcaaccaatacgacaaaaccgacaccggcggcgaacaaggacgcgccgtcgcccaagaagtattggaaaccgccgtacgcctgttgtggcccatcgtgccgcacatctgcgaaaccctgtggagcgaattgaacggcgcgaaactgtgggaagcaggctggccgacagtcgacgaagccgccttggtcaaatccgaaatcgaagtgatggttcaagtcaacggcaaactgcgcggcaaaatcaccgtcgccgccgacgcctccaaagccgacctcgaagccgccgcccttgccactgaaggcgcggtgaaattcatggaaggcaagcccgcgaagaaaatcatcgtcgtaccgggcagactggtgaacatcgtcgtctaa

SEQ ID NO: 54211 - DNA, 396 bp, Neisseria meningitidis
atgatgcggcaacggggtaaaaaaatgttgtttgaagaaaatccgatagacggacagtttgcggaatatgaatgcggtgcgggcggaatccggctggcggggcaaagtttccataaacccgtgcttgtacataaggattcggtctgcctgtcgcaatgccgaaccttgtccgatctgactccggaaaacctgttgtccgacatcaaacctgttgactatctggaaatattgattatcgggacgggcgcggctcaggagtttatccatcccaaaatcatggcggatttttctcgaatcggaatcggcgtggaatgtatgaataccgattcggcattcaggacattggttttcctgcactcggaagggcgcagggcttgggcttggcttcagccgtaa

SEQ ID NO: 54212 - DNA, 873 bp, Neisseria meningitidis
atgagctggttagataaaatcctgccacccaaaatcaaaaaccgcagcaaagacggttcttccaatgttcccgagggtttgtggcacaaatgtccgtcttgttcggcaaccgtttattcgaccgagttgcagcagaacaatcaggtttgtccgaaatgcaaccaccacaatccgttgtcggcacgacaacgcctgaatctgcttttggatgaggatggcagagaggaggttgccggaaatgtcaaaccgaccgatcctttgaagtttaaagacggcaaaaaatatccggatcgtttgagtgcggcacgcaagctgaccggggaagatgatgctttggtggtaatgaaaggcaagatgaacggtctgcccgtcgtcgttgccgcgtttgaattccgctttatcggcggttcgatgggttcggttgtgggcgaacgattcgtacaaggtatccgtcgggcggttgccgacaattgtccgttcgtctgtgtggcggcttccggcggtgcgcgtatgcaggagggtgtgaactcattgatgcagatgacgaaaaccagtgccgcgctgcatttgctgacggaaaaacgcctgccatttatatcggtgttgaccgatccgactatgggcggcgtatccgccagcttcgcatttttgggcgatgtcgtgcttgccgaaccgaacgcgctgatcggttttgccggtccgcgcgtgattgagcagacggtgcgcgaaacgctgccggaaagcttccaacgcgccgagttcctgctggaaaaaggcgcaatcgaccagattgtcgaccgccgcgatatgaagcggcgcatcagtgatttgattacgctgttgtgccgtcaggacaaagtttccgccgcttga

SEQ ID NO: 54213 - DNA, 1248 bp, Neisseria meningitidis; identical to SEQ ID NO: 36316

SEQ ID NO: 54214 - DNA, 600 bp, Neisseria meningitidis
atgaatagatcaaaaatatcgccgtatgcttctttgaatgaggagttatggatttccaaaacagaagagctgattaagcagcatccattgtcagaaaaagagattgtccaactttgtttagatagttgggaaaatattttctcgtctagaattggtaatttgcaaattggcaaaaatttttttccttctcctcagattgtaggggcgttattacatgctttaattcctgctaatattgaggctagatttgaaaattggcaaggagaaaagaataaatatgacaaagatattgtatatattaaagacgactattactcaatagaattaaaaacttcatcggatccaaaatatatatttggtaataggagttatgcacaaccacaagatggaattactggtaagagtaaaaatggttattatctaactataaattttgaaaaatttatgcctgatttaaaattgcgtccagaaattaaaattatcagatttggttggttagatcatacggattggattgctcaaactgcagcgacaggccagcaggcgaggctctctccagaggcttatagaagtaaactaaaaatactttatcaaaaataa

SEQ ID NO: 54215 - DNA, 864 bp, Neisseria meningitidis
atgttaccatatccgactacaattcaaattttagaggttttaactatgaaaaaaacagtttttacatatgccatgatcgccctgaccggtactgccgccgctgcacaagagcttcaaaccgctaatgagtttaccgtccacaccgacctctcttccatttcttcaactcgtgctttcctgaaagaaaaacacaaagctgccaaacacatcggcgtgcgtgctgatattccttttgatgccaaccaaggcatccgcttggaagccggtttcgggcgcagcaaaaaaaatattattaatttggaaacagatgagaacaagctgggtaagactaaaaatgtaaaactgcccaccggcgttcctgaaaaccgtatcgatctttacacaggctacacctacacccaaacgttaagtgattctttaaatttccgtgtgggtgccggcttgggttttgaatcttcaaaagacagcattaaaaccaccaagcatacgcttcacagcagccgtcagtcgtggttagccaaagttcacgcggatttgctttcccaactgggtaacggctggtatatcaacccttggtctgaagtgaaatttgacctcaattcccgctataaattaaacaccggcgttaccaatctcaaaaaagacatcaatcaaaaaaccaacggctggggctttggattgggtgcaaatattggtaaaaaactgggcgaatccgccagcatcgaggcggggccgttctacaaacaacgcacttacaaagaatccggcgagtttagtgtaacaaccacgagtggcgacgtatcgctcaccatcccgaaaaccagtattcgtgaatacggcttgcgcgtcggcataaaattctga

SEQ ID NO: 54216 - DNA, 1407 bp, Neisseria meningitidis
atgaacgattacacagctatgccgtctgaagaccgtgaggtcggcgcattgtcgctgcctccacattcgatggaggcggaacaatccgttttgggcgggttgatgctggaaaatccggcttgggacaggattgccgatgtggtttcgggagaggatttctaccgccacgaacaccgcctgattttccgatccattgccaaattgattaatgagagccgtcccgccgatgtgattacggttcaggaagatttgcagcggaacgaagaattggaagcggcaggcggattcgaatatctgattacgctggcgcaaaacaccccgtctgccgccaacatccgccgctacgccgaaatcgtgcgcgagcgttccatcatgcgccaactcgccgaagtggggacggaaatcgcccgcagcgcatacaatccgcaaggcagggacgcggggcagcttttggacgaggcggaaaacaaagtattccaaatcgccgaaagcaccgccaaatccaagcagggctttttggagatgcccgatttgctgaaagaagtcgtacagcgcatcgatatgctctactcgcgcgacaatcccgatgaagttaccggcgtgccgacagggttcatcgacctcgacaaaaaaacctcgggtctgcaacccggcgacctgattatcgttgccggtcgtccgtctatgggtaagaccgccttttctatcaatatcgccgaacacgttgccgtagaaggcaagctgccggttgccgtcttctcaatggaaatgggcggggcgcaactggtcatgcgtatgctcggctcggtcggacgcttggatcaaagcgttttgaaaaccggcaggctcgaagacgaacactggggtcgcctgaacgaagcagtcgtcaaactctccgacgcgcccgtgtacatcgacgagaccccgggtctgaccgcgctcgaactgcgcgcccgtgcccgccgtctcgcccgtcaatttaacaataagcttggattgattgtcatcgactacctgcaactgatggcaggatccggccgttccgacaaccgagcttcggagctgggagagatttcacgttcgctcaaagcgttggcgaaagaattgcaagtccccatcatcgccctgtcgcaattgagccgcacggtcgaatcgcgtaccgacaaacgcccgatgatgtccgaccttcgcgaatccggtgctatcgagcaggatgccgacctgattatgtttatgtaccgcgacgaatactacaaccaagactcgcccatgaaaggccttgccgaatgtatcatcggcaaacaccgcaacggtcccgtcggtaaaatcttcctcacatggacgggacaattcaccaaattcgacaatgctgcctatattcccgaggaggcaaagatagaggattaa

SEQ ID NO: 54217 - DNA, 879 bp, Neisseria meningitidis
ttgtcagctgctcctactgttcaagatacacaaattgaacaatacaatcagcttacccaaatcatgcatagaactttggatcctaaagatgtaaaaggcaattcaattggtggattactgatacacattggcagcggtacaaaagatgaacatatccgcactatgagcaatagacctgtacagcaagatgatcatggtggaacacaagctcctccaagtggatattcctttttgcgtaaagaggcttttttgtatattgttggacaccatgtaattttttgcggacatggttttttgtcagcatcaacggttgcttcttatttaagtttacttagcaataaattgagagagaacaatccggatattgttcaatttaatattgaattcaaagcagtaggtaattgcgacaagttgtcattgatacaacaacatggggtaaaaagtattcttttagatgtttcggcatatcaattatccagaaacagactgtatcaagatagccgttcaaccattgctaaagcattagggaaagttggtagtgtatttacaagcgaattgagtgatgaggaattggaagcacaatccgaaattcatatcaatttagaagtcttgctaaacggtaattcgagagccagtattgaagcgcaatcgctgatgcaggagcaggcagaggaaattattgatgatgaaacggttaatcaaggattttccattaccacgcaacaaggtgaagtgattcagccctctgatgtaaaactgtctaaatctgttagaataggacgatacgatgaagccaactcgttactccctgactcggcatttacagcaatcagtgaatatttcctagaactccaaagcagaaacttaactgaacaatga

SEQ ID NO: 54218 - DNA, 678 bp, Neisseria meningitidis; identical to SEQ ID NO: 51590

SEQ ID NO: 54219 - DNA, 558 bp, Neisseria meningitidis
ttgggtatccatcccaattcggcagcactgttctaccgtaaaatccgcatggttatcaaccatcatttggccttggctgccgatgaggtttttgagggctctgtcgagccggacgaaagcgatttcggcggacggcgtaaaggcagacgtggtcgcggtgcggcaggaaaagtggttgtcttcggcattctgaaacgcaacggacgggtctataccgttgtggtggataatgccaagtctgaaacgttactccctgtcatcaaaaagaaaatcatgccggacagtattgtttataccgatagtctgagcagctgcgacaagttggacgtgagcggttttatccattaccgcatcaaccattccaaggaatttgcagaccgtcagaaccacattaacggcattgagaatttttggaatcaggcaaaacgtgtcttgcgaaaatacaatggaatcgatcgcaaatctttcccgctgttcttgaaagaatgcgaatttcgatttaacttcggcacaccgtctcaacagcttaaaatcctgcgggattggtgtgggatttag

SEQ ID NO: 54220 - DNA, 630 bp, Neisseria meningitidis
atgaaaaccgtcatcaagggcgtgtataaaatcggcatttcggatgtaagcaattttgaaggcagaatgcgccatttggaaaacaacggttatgcgaacgttgccgggttggaacgcatcctcgccgtcaaaaccgacaattacaaagaaaaagaaaacctgctccatgaaatttttagtaaaagcaggataggcgataccgaattgttcgccgtggacgagaatcttgtaaaacgtttgtttttatcgcttcgcggcgaaatcgtgttcccgaaaaacgaaacggcggaatcggaatttgaaaaaagcgtccacgaacgcaggcaggaagggaatgccggatccggtcgcaaacaactgcttgatttggtacggcgcggacaccgggaatacccttacgcgctgccccggcttttggcgggcgcggcatcctacaagccgaaaaaatcgaaaatccgcctttttaaagaagcatatttacgcaaaagcggtacgaggctgaccgacgaaattgcagacggcatccatatttacacctgtttttcgcgggcggatttggaaaaagcctattccgaatatttggaacttttcaaatccgaatcggatgccgaaggcagaaaaccacggtaa

SEQ ID NO: 54221 - DNA, 1419 bp, Neisseria meningitidis
gtgaaaccgctgcgcagactgacaaacctccttgccgcctgcgccgtagcggtcgccgccttcggacagcccgccctcgcggcggacttggcgcaagacccgttcattaccgataacgcccaacggcagcactacgaacccggcggcaaataccacctcttcggcgacccgcgcggcagcgtttccgaccgcaccggcaaaatcaacgtcatccaagactatacccaccagatgggcaacctgctcatccaacaggcaaacatcaacggcacaatcggctaccacacccgcttttccggacacggacacgaagaacacgcccccttcgacaaccacgccgccgacagcgcaagcaaagaacaaggcaacgttgacgaaggctttaccgtgtaccggctcaactgggaaggacacgagcaccatcccgccgatgcctacgacggcccgaagggcggcaattaccccaaacctacgggcgcacgcgacgaatacacctatcacgtcaacggcacagcacgcagcatcaaactcaatccgaccgacacccgcagcatccggcaacgcatatccgacaactacaacaacctcggcagcaatttctccgaccgcgccgatgaagccaacagaaaaatgttcgagcacaatgccaagctcgaccgctggggcaacagcatggagtttatcaacggcgtcgccgccggcgcgctcaacccctttatcagcgcgggcgaagccttgggcataggcgacatactgtacggaacgcgctatgccatagacaaagccgcaatgcgcaacatcgcccccttgcccgccgagggcaaattcgccgtcatcggcggcttgggcagcgtggcgggctttgaaaaaaatacgcgcgaagccgttgaccggtggatacaggaaaaccccaatgccgccgaaaccgtcgaagccgtcttcaacgttgccgcagcagccaaagtcgcgaagctggcaaaggcggcaaaaccggggaaggctgcggttagtggggatttctcagactcctacaagcataacactgcttcaagattatctcagtctgtagatggagaaatgtttcaaacccgcaatgttgattttaaagcaaaatctattgggactaaaattcatgatggagctcaagggaaacatatttcaggacatagaaactacattgaaggtaagagtactttaaatcaaaacattaatcctcaagaattgttgaacggaatacattcaggtgcttatccagttatttctaaaggagcaagaggaaatcctgttgttgattttgggtatcctataggcagcgatgggaaatcaggattaagtaccaattttggtacgattcattcaggtaaaaatggagttcacattgttccggctaaccctaaaaccattaaaaaggtgcaatag

SEQ ID NO: 54222 - DNA, 774 bp, Neisseria meningitidis
atgaaaccgaaaatccaaaggcacggagagattttaagccttgtccgccggcatcagtttatgtcggtggacgagcttgccgccgcattggacgttaccccgcagacgatacgccgcgacatccgcgagttggaggagggcggcagcctgaaacgccatcacggcggcgcatcttcgggcggaaacttgccggaggggctgcctgccagccgccaaacccggtgtcaaaacgaaaaaaacgccattgcccggctgattgcggaacacatccccgacggttcgtcgctgtttgtcagtatcggcacgacgatggaagccgtggcatcggagctggtcaggcggcgcggcagcctgcggattattaccaacaatatccacgtcgcctccatcgtttcggcgcggacggattacacggtcattatcacttccggagtcgtccgccctttggacggcggtattaccggcgtggcaaccgtcgattttatcaaccagttcaaagtcgattatgccgtgatgagtacgcacggcgtggaaagcgacggttcgcttttggacgacgactacaaagaagtcagcgtgatgcaggcgatgattgccaatgcgcgcgtccgcttcctcggcgtggaccacagtaaattccgcagcaacgcgctggtcaggctcggcgacattacggcgtttgacaaagtatttaccgaccggctgcccgataccgcgatgcagaagatgctgaaagaggcgggggtggaatgcctgattgccgatgccgtctga

SEQ ID NO: 54223 - DNA, 486 bp, Neisseria meningitidis; identical to SEQ ID NO: 37367

SEQ ID NO: 54224 - DNA, 126 bp, Neisseria meningitidis
atggaaaacattaagacgctactttttttgaccgccgaaaccaacatccctagcaaagttattttggtctccggacgtaccgacgacacccgccacctcgttggtctccggcccgaaaatacctaa

SEQ ID NO: 54225 - DNA, 420 bp, Neisseria meningitidis; identical to SEQ ID NO: 42190

SEQ ID NO: 54226 - DNA, 294 bp, Neisseria meningitidis; identical to SEQ ID NO: 52089

SEQ ID NO: 54227 - DNA, 615 bp, Neisseria meningitidis
  misc_feature 6, 7, 8, 9, 10: 'n' is a, c, g or t
gtgtgnnnnntcaaactcaaatgggccgaccgcctgccgcgcatcatcctatattacaaacaagaaggcgaaatcgtttcccgcgacgacccgcaaggccgcgtcagcatattcgaccgcctgccgcaggccgccagcagccgctgggtcgccatcggacgcttggacatcaacaccagcggacttctgattctcaccacctccggcgaactcgtccaacgtttcgcccaccccagcttcgaagtcgaacgcgaatacgccgtgcgcgtcttgggcgggctgaccggcgaacaaatgcgcgtcctcaccgaagaaggcgtgatgctcgaagacggcttggcaaaagtcgaacgcatccgcgaacaaggcggcgaaggcgcgaacaaatggtacaacgtcgtgattaaagaaggccgcaaccgcgaagtgcgccgcatttttgaaagccaagggctcaccgtcagccgcctcgtgcgcgtcggcttcggtcccatcggactgcccaaccgcctcaaacgcgggcagttctacgaactcaaccccgccgaagtcgccaacatcatcaaatgggcggacatgctgctgccgggcgaacgccgccgcaaaaaagcctaa

SEQ ID NO: 54228 - DNA, 285 bp, Neisseria meningitidis; identical to SEQ ID NO: 39839

SEQ ID NO: 54229 - DNA, 1977 bp, Neisseria meningitidis
atgccacgcattgccgccctgcccgaccatctcgtcaaccaaatcgccgccggcgaagtagtcgaacgccctgccaacgccttgaaagaaatcgttgaaaacagtatcgatgcaggcgcaacggcgattgatgtcgagctggacggcggcggcatccgcctgattcacgtcagcgacaacggcggcggtatccatccggacgacatcgaacttgcgctccaccgccacgccaccagcaaaatcaaaaccttaaacgatttggaacacgttgccagcatgggctttcgcggcgaaggcttggcaagcatcgcctccgtcagcctcctgaccctgaccagccgccaagaagacagttcgcacgcaacccaagtcaaagccgaagacggcaaactcagcagccccaccgccgccacccaccccgtcggcaccaccatcgaagccgccgaactcttcttcaacactcccgcgcggcgcaagttcctcaaatccgaaaacaccgaatacgcccactgcgccaccatgctcgaacgcctcgcgctggcgcatccgcacattgccttctcgctcaaacgcgacggcaaacaagtgttcaaactccctgcacaaagcctgcatgaacgtatcgccgccattgtcggcgatgattttcagacggcatcattggaaatcgacagcggcagcggcgcgctgcggctctatggtgcgattgccaaaccgactttcgccaaaggtaaaaccgacaaacaatactgcttcgtcaaccatcgcttcgtgcgcgacaaagtgatgctccacgccgtcaaacaggcataccgcgacgtattgcacaacgccctcacccctgctttcgtcctcttcctcgacctgccgcccgaagccgtggatgtcaacgtccacccgaccaaaaccgaaatccgcttccgcgacagtcagcaggtgcaccaacttgtgttccacacgctcaacaaagcccttgccgacacacgcgccaacctgaccgaaagcgtcggcaacgcaggcgaagtgttgcatgacattaccggcgttgtctccaccccaatgccgtctgaaaacgacagcgaaaatctgtttgatagcgtatccaactacccgacaggcaacaaatcagatacacacaatgcctttggttcatcaggcaaaaccgcgcccatgccctatcagtccgcatatgcgccgcaacaacgcagcctgtccctgcgcgaaagccgcgcggcaatgaatacttacgccgaactttacaaaaaaaccgacgacatcgaccttgagttaagccgattcgagcaggcacgtttcggcaatatgccgtctgaaacgcctgctccccaaacagatacgccgctttcagacggcatcccgtcccaatccgaactgccgccgctcggttttgccattgcccaattacttggcatctacattcttgcccaagccgaagacagcctgttgctcatcgatatgcacgccgccgccgaacgcgtcaactacgaaaaaatgaaacgccaacgtcaggaaaacggcaacctgcaaagccaacgcctgcttattcccgtaacctttgccgcgtcccacgaagaatgcgccgcccttgccgaccacgccgaagcactggcaggcttcgggctggaactgtccgatatgggcggcaacaccctcgccgtccgcgccgcacccgcaatgttgggcaaatccgatgtcgtctccctcgcccgcgacgtattaaacgaattcgcccaagtcggcagcagccaaaccatcgaggaacacgaaaaccacatcctcgccaccatgtcctgccacggctcgatccgcgccggccgccggctcaccctgcccgaaatgaacgcccttctgcgcgatatggaaaatacgccgcgcagcaaccagtgcaaccacggcaggccgacttgggtcaaactgactttgaaagaattggacgcactgttcttgcgcggacagtaa

SEQ ID NO: 54230 - DNA, 306 bp, Neisseria meningitidis
atgattaccttgacgcattatctggtattgggtgcgctcctgttcggtatcagcgcaatgggtatctttatgaaccgcaaaaacgtgctggtattgctgatgtccatcgagctgatgctcttggcggtgaacttcaactttatcgccttctcgcaacatttgggcgatactgccggacaaattttcgtattcttcgtattgaccgttgccgctgccgaatctgccatcggtttggcgattatggtattggtgtaccgcaaccgacaaacgattaatgttgccgatttggacgagttgaaagggtaa

SEQ ID NO: 54231 - DNA, 1371 bp, Neisseria meningitidis
atgatcaaccccatcgcctcgctttcccccctagacggccgttatgcccaatccgttgaagcattgcgcccgattttttcagagtacggcctgatgaaggcgcgcgtcaaagtcgaattaaactggctcaaagccctcgccgccgagccggagattgccgaagtgccgcccttcagtgccgaaacgcttgccgaaatcgacacggtgattgaaaacttctcacttgaagacgcggccgccgtcaaagccatcgaagccaccaccaatcacgatgtcaaagccatcgaatattggctgaaaaaacgttttgccgaagtgccggaagtcgccgccgtgagcgagttcatccacttcgcctgcaccagcgaagacatcaacaacctgtcccacgctttaatgctgcaagaagcgcgtgaggctgttttgctgccgaagctggccgaaatcatcgaaaaactgaccgctatggcgcacgatcttgccgccgtcccgatgatgagccgcacccacggccagcccgccacgccgaccactttgggcaaagaaaccgccaatgtcgtgtaccgcctgcaacgccagtttaaaaacctgcaagcgcaagagttcctcggcaaaatcaacggcgcggtcggcaactacaacgcccatatggtcgcctatcctgatgtagattgggaaacccactgccgcaacttcgtcgaaatcagcctcggcctgaccttcaacccctacaccatccaaatcgaaccgcacgactatatggcggaattcttccaaaccctcagccgcatcaacacgattctcatcgactttaaccgcgacgtttggggttatatttcattgggttacttcaaacaaaaagtcaaagcaggcgaagtcggttcttccaccatgccgcacaaagtcaaccccatcgactttgaaaactccgaaggcaacctcggtatggcaaacgccgtattgggctttttgtccgaaaaactgccgatttcccgttggcagcgcgacctgaccgacagcaccgtcttacgcaatatgggcgtgggcgtgggctatgccgtgttgggtttcgccgcacacctgcgcggtctgaacaagctcgaacccaaccctgccgcgcttgccgccgatttggatgccacttgggaactgctcgccgagccgattcaaaccgtgatgcgccgttacggtgtcgccaatccttacgaaaaactgaaagacctgacgcgcggcaaaggcggcattacgcccgaagtgctgaaaggctttatcggatcgctggaaatccccgtcgaagccaaagcaaaattgcttgagctgacccccgcactgtatgtgggcaaggctgaagcgttggcgaaacggatttga

SEQ ID NO: 54232 - DNA, 753 bp, Neisseria meningitidis
atgaccgacatccttattgacaacaccgccaccgaaaccgtccgcaccctgatacgggcattcccccttgtgcccgtttcccaaccgcccgaacaaggcagctacctccttaccgaacacgataccgtcagcctcaggcttgtcggggaaaaaagcagcgtcatcgtcgactttgcctcgggagccgcacaataccggcgcacaaaaggcggaggagaactcatcgccaaagccgtcaaccataccgccaaacccaccgtatgggatgcaaccgcaggattggggcgcgacagcttcgtcctcgcctcgctcggactgaccgttaccgccttcgagcagcatcccgccgtcgcctgcctgctttcagacggcatccgccgcgccctcctcaatcccgaaacgcaagacaccgccgcgcgcatcaacctccatttcggcaacgccgccgaacagatgcccgcccttgttcaaacacaaggcaaacccgacatcgtctatctcgaccccatgtatcccgaacgccgcaaaagtgccgccgtcaaaaaagaaatggcctacttccaccggctcgtcggcgaggcgcaagatgaggccgtcctcctccataccgcacgccaaacggcaaaaaaacgcgtcgtcgtcaaacgcccccgcctcggcgaacaccttgccggacaagcccctgcctaccaatacacaggcaaaagcacccgcttcgacgtttacctgccctacgaagcggacaagggataa

SEQ ID NO: 54233 - DNA, 723 bp, Neisseria meningitidis
atggataaggacaaggggtcttatgctggtattcccgtacaaaataccaaagagttagtttggcagaaaatacaagaaatacctatttctgaatgtggggaaccgttggtcagtgttggtaataccggacgcattcgtgtcaatcctgtttatttttcccagggtattgaaggtgcaataaatactgttttattgcgtagaagtgttgctgataggctgactcaggttgtctctttgctgccagaaatgtacggattggaaatttttgatggttggcgtcctgtcatagtgcaaagagcattacgagaaaatatgaagcaagaaattgaaaaacgccatccggaatatgatgaagttcaagttagagaagcactggactgttttgctgctgatccagatcgggcaggaatgcctctgccccatttgacaggcggatctgttgatgtcggattgtttgatataaaaagtggcaaaagtttggatatgggaagtgagtttgatgcaaccggacatttatcttatagcgatgctttagagaaagaaggtgagtatttctcctctgctcgtaatttacgccggattttgattcatgcgatgaaagaggcaggatttagtaatttgccaaccgaatggtggcatttcgattatggcaaccaaaattgggcttattttacccaacaaagcaacgcagtttttggggcggtagaagagcaggatacttaa

SEQ ID NO: 54234 - DNA, 1419 bp, Neisseria meningitidis
atggaaaatatattgtctgttctggtgggtacagtcaatcggttcctttgggactacctgctgatttacgcgcttttgggtatcggcctgttttttacgctgtatcttggtgcgccgcagattaccaagctgggcgcgggattcaaatccgtattcggcggcttgtttgccaaaggcgataaagacgacaagtctttatcgcagtttcaggcgttggcggttgccatatccgcgcaaatcggtacgggcaacgtcgccggcgtggcgaccgccatcaccgcaggcgggccgggcgcgattttttggatgtgggtttctgccgttttggggatgtccacgatttttgcggaggcactgctggcgcagaaataccgcgtcgtcagccacggcaaatacatcggcgggccggcgttctacatcacccacggtctgactccgaaaatcggcaggggagcggcgcgttttttgtccggtttcttttccattgcgttgattatcgcattgggctttatcggtaatgcgacacaggcaaactccattgcttctgccgttaccattgcatttgatgtgccttctttggcagtcggtattgtgcttgccgtccttgcgggcatggttgtgattggcggcgtgaaccgtattgccaatattgcccaatttgtcgtgccgtttatggcggttgtttatattttgtgcgccgtcgttatcctgtttgaattttccgaccatattgtgccgatgttcaaccacatctttaccgccgccttcaatcccgaagccgttttgggcggtgcggcgggtatcggtatgcgcgaagcgatacgtttcggcgtggcgcgcggtctgttttccaatgaggcggggatgggttcgactccgcacgcccacgcgactgcggatgtgaagcatcctgtgcagcaaggtatggcggcatttgtcggtgtgtttatcgatacgattttggtatgtacggcaactgcgctgattatcctgctgaccgatgccaacctttcgggcgaacagggcgcggcggttactcaatttgcctttaacaaggcatttccgggcttcggttcgcaattgcttgccgtgtgtctgaccttcttcgccttgacgaccattatcggctggtattatttcggtgagtccaacatccgttttcttttcaggggaagacacttgggcatctatcgcgcattggttctgcttgccatcgttttaggtacgctcggcaaagtcgatttggtttggagcctgtccgatatgttcaacggctttatggttatcccgaacttgatagccctgtttttgttgcgtaaggaaatccgtgccatttatgatgattatttggcacagaaaaaagcgggtcgggatttgtcttatccgtatgaattccacgagttccacgacaagggctga

SEQ ID NO: 54235 - DNA, 666 bp, Neisseria meningitidis; identical to SEQ ID NO: 37717

SEQ ID NO: 54236 - DNA, 573 bp, Neisseria meningitidis
atgacttatgaaattcaagcctctgttcgtgaagcacaaggcactggtgcgagccgccgcctgcgtcgcgaaggccaaatccccggcattctgtacggtgaaggtcaagagcccgttgcgattgccgtagatcacaaaaccgtattctacgcattggaaaaagaatctttccataccgcgttgattaagttgtctctgaacggcgaaactaaagacgttatcgtccgcgatttccaaatgcacccgttccgccgcgaagtccaacacatcgacttccaagccgttaaagccgatcagcttgtacgcatccgtgttcccctgcacatcgttaacgctgaaaattcccaagcggtcaaactgcaaggcggccgcgtatctctgttaaacacttctgttgaagtagttgctttgcctgccaacatccctgctttcttggatttggattgtgccgaagtggttgccggcgacattctgcacttgtcagacatcaaactgcctgaaggtgtagaaagcgtttccctgaaacgtaacgaaaatctggctgttgctaccgttaccggtaagaaacgctaa

SEQ ID NO: 54237 - DNA, 156 bp, Neisseria meningitidis; identical to SEQ ID NO: 37714

SEQ ID NO: 54238 - DNA, 423 bp, Neisseria meningitidis
atgcgcccaatcttcctatctttcgttttactccctattttgataaccgcctgcagcacaccggacaagtctgcccgatgggaaaatatcggcacaatctcaaacggcaatattcatacatatatcaacaaagacagcgtgagaaaaaacggaaatctgatgattttccaagataaaaaagttgtgaccaatctaaaacaagaacgttttgccaacacccccgcatacaagactgccattgccgagtgggaaatccactgcaacaacaaaacataccgcttaagttcgctacagttgtttgatacaaaaaacacggaaatttccacacaaagctacacagcctcttccctccgcccgatgagcatcctgtccggaacattaactgaaaaacaatatgaaaccgtatgcgggaaaaaactctga

SEQ ID NO: 54239 - DNA, 1200 bp, Neisseria meningitidis
atgcaggcggcccggccgtccctgcaatgttttttatttttgaacgaaaggtcgaaaaccatgaaaaaaacactgatggcggcggcaatcctgagcctcgccttgactgcgtgcggcggcggaagcgataccgccgcccaagccccctccgccaagcccgaagccgaacaatcgggcaaactcaatatctacaactggtcggattatgtcgatcccgaaaccgtcgccgcctttgaaaaagaaaccggcatcaagacgcgttccgattattacgacagcaacgaaacactggaggcaaaagtcctgaccggcaaatccggctatgacctgactgcgccgtccatcgccaacgtcggccggcaaatcaaagcgggcgcgtatcagaaaatcgacaaggcgcaaatcccccattacggcaacatcgataaagatttgctgaaaatgatggaagccgtcgatccgggcaacgaatacgccgtcccctatttctggggcatcaacaccttggcaatcaacacgcggcaggtgcaaaaggcattgggtacggacaagctgcccgaaaacgaatgggatttggtgttcaaacccgaatacaccgccaaactcaaatcctgcggcatcagctatttcgacagtgcaatcgaacagattcctttggcgttgcactatttgggcaaagaccccaacagtgagaatcccgaagacatcaaagccgccgtcgatatgatgaaagccgtccggggcgacgtgaaacgcttcagttcttccggctatatcgatgatatggcggcgggcaacctgtgtgccgccatcggttacggcggcgatttgaacattgccaaaacccgtgccgaagaagccgcaaacggcgtggaaatcaaagtattgactccgaaaaccggcgtgggcgtgtgggtggattcctttatgattccgcgcgacgcgcaaaacgtcgccaacgcccaccgctatatcgactacacgctccggcccgaggtggcggcgaaaaacggcagcttcgttacctacgcgcccgccagccgtcccgcgcgcgagctgatggatgaaaaatacacctccgacgcatcgattttcccgaacaaagaactgatggaaaaaagtttcatcgtatcgcccaaatccgcagaatccgtcaaactgggcgtgaagctgtggcaagggctcaaagcgggcaaataa

SEQ ID NO: 54240 - DNA, 1065 bp, Neisseria meningitidis
atggaaaaagaattcaggatattaaatatcgtatcggccaagatttggggcgggggcgaacaatatgtctatgatgtttcaaaagcattgggactgcggggctgcacgatgtttaccgccgtcaataaaaataatgagttgatgcacagacgcttttccgaagtttcttccgttttcacgacacgccttcacacgctcaacgggctgttttcgctctgcgcgcttacccgctttattcggaaaaaccgcatttcccacctgatgatacacaccggcaaaattgccgccttatccatacttttgaaaaaactgaccggggtgcgcctgatatttgtcaaacacaatgtcgtcgccaacaaaaccgatttttatcaccgcctgatacagaaaaacacagaccgctttatttgcgtttcccgtctggtttacgatgtgcaaaccgccgacaatccctttaaagaaaaataccggattgttcataacggtatcgataccggccgtttccctccctctcaagaaaaacccgacagccgtttttttaccgtcgcctacgccggcaggatcagtccggaaaaaggattggaaaacctgattgaagcctgtgtgatactgcatcggaaatatcctcaaatcagactcaaattggcagggcacggacatccggattatatgtgccgcctgaagcgggacgtatctgtttcaggagcagaaccatttgtttcttttgaagggtttaccgaagacattgcttcgttttaccgccaaagcgatgtcgtggttttgcccagcctcgtcccggaggcattcggtttgtcattatgcgaggcgatgtactgccgaacggcagtgatttccaatactttgggcgcgcaaaaggaaattatcgaacatcatcaatcggggattctgctggacaggctgacacctgaatctttggcggatgaaatcgaacgcctcgtcttaaaccccgaagcaaaaaacgcactggcaacggcagggcatcaatgcgtcgccaaccgttttaccatcaaccatatcgccgacaaattattggatgcaatataa

SEQ ID NO: 54241 - DNA, 1122 bp, Neisseria meningitidis
atgagcaatcaagatttttatgccaccctaggtgtggcaagaacagctaccgatgaagaaattaaaaaagcctaccgtaaattggcgatgaaataccatcccgaccgcaatcctgacaataaagaggcggaagagaagtttaaagaagtacaaaaggcgtatgaaactttgtccgataaagaaaagcgcgctatgtacgaccagtatggccatgcggcgtttgaaggcggcggacaggggggcttcggagggtttggaggattcggcggtgctcaaggttttgactttggggatattttcagccaaatgtttggaggcggttcggggcgcgcccagcctgattatcagggcgaggacgttcaagtcggtatcgaaatcacgcttgaagaagcagcaaaaggcgtgaagaaacgcatcaacattccgacttatgaatcgtgcgatgtctgcaacggcagcggtgcgaaaccggggacatccccggaaacctgcccgacttgcaaaggttcgggaacggtgcatatccagcaggcgattttccgtatgcagcagacttgtccgacctgccacggtgccggcaaacacattaaagaaccttgcgtcaaatgccgtggcgcggggcggaataaggccgtcaaggcggtggaagtcaatattcccgccggtatcgatgacgggcagcgtatccgtttgagcggcgaaggcgggccgggtatgcacggcgcgcccgcaggcgatttgtatgtaaccgtccgcatccgggcgcataagattttccaacgcgacggcttgaatttgcattgcgaactgccgatcagttttgccacggcggctctgggcggagagttggaagtgccgaccttggacggcaaagtcaagctcaccgtccccaaagaaacccaaaccggcaggaggatgcgcgtgaagggtaagggagtcaaatctttacgcagcagcgcgaccggcgatttgtactgccatattatcgtcgaaacacctgttaatttgaccgaccgtcaaaaagagcttttagaagaatttgaacggatttctaccgggttggaaaatcaaacaccgcgtaagaaatcgtttttagacaagctgcgcgatttgtttgattga

SEQ ID NO: 54242 - DNA, 561 bp, Neisseria meningitidis
atgaaaaacctcatcgccttcaacaaaccctatggcgttatctgccaattttcaccgcacgaaaaacacaaaagcctcaaagactttatcaatcttcccggcttctaccccgccggacggctcgacaccgacagcgaggggctgctgctgctgaccgacgacggcaggcttcaggcacaaattaccgaccccaaattcaaacaccccaaaacctactgggcgcaactggagggcgtacccgacgaaagccgattggaaagcctaagaaaagggatagacttaggcggtttcgttacccgtccggcaagcatccgcatcttgaaacacggagaagcagattcgttatgggagcgcatcccgccgatacgcgtccgcaaaaccgttcccgatttttggattgaaattaccatttctgagggcaaaaaccgccaagtcaggcgaatgaccgccaaggcgggctatccctgcctgcgtctgatcagagtggcaagcggcaggctgaaactgtttgatttggatttaaaacccggggaatgggcatacgccccgtttaaaccataa

SEQ ID NO: 54243 - DNA, 621 bp, Neisseria meningitidis
atggaattgaaagtaattgacgctaaaggacaagtttcaggcagtctgtctgtttctgatgctttgttcgcccgcgaatacaatgaagcgttggttcatcagctggtaaatgcctacttggcaaacgcccgctctggtaaccgtgctcaaaagacccgtgccgaagtaaaacactcaaccaaaaaaccatggcgtcaaaaaggtaccggtcgcgcccgttccggtatgacttcttctccgctgtggcgtaaaggcggtcgcgcgttcccgaacaaacccgacgaaaacttcactcaaaaagtaaaccgcaaaatgtaccgtgccggtatggcgactattctgtcccaattggctcgtgacgagcgtttgtttgcgattgaggcgttgactgccgaaactcctaaaaccaaggtttttgctgaacaagtgaaaaatctaggtctggagcaagtgttgtttgtaaccaaacagctcgacgagaatgtttacttggcttcacgcaacttgccaaacgtgttggttttggaagctcaacaagttgatccttatagcttgctgcgttacaaaaaagtaatcatcactaaagatgcagttgcacaattagaggagcaatgggtatga

SEQ ID NO: 54244 - DNA, 918 bp, Neisseria meningitidis; identical to SEQ ID NO: 37376

SEQ ID NO: 54245 - DNA, 534 bp, Neisseria meningitidis
atggcagagttcgcaacgattgccagaccttatgcaaaggcattgttcggtctggctcaggaaaaaaaccaaattgagtcttggttgggcggactggaaaaacttgcggcggttgttcaggaagggaaggtggcttcattgattgaccgtcctgaaacgaatgcttcagaaaaagcagatatcctcatcgatttggtcggtttgaaagacaaggagttgaaaaactttgttatcgtcttggccgggcagaaacgtttgtcgatattgccggaagtatatgctcaatatcaagacttgaccttatcattcaaccatatcaaatctgccatcatttacagtgcctatccgttgaccgacaaacaggtcggcgagttggcgcaaatgctgaataagcgtttcgacagcgagctgaaaatctctgtcgaaatcgaaccggagctgattggcggcataaaagttgaagtgggtgatcaggttttggatttgtctgtacaaggcaaattgagtgccttgtacacgactatgacgaattag

SEQ ID NO: 54246 - DNA, 1149 bp, Neisseria meningitidis
atgaatactcctccttttgtctgttggattttttgcaaggtcatcgacaatttcggcgacatcggcgtttcgtggcggctcgcccgtgttttgcaccgcgaactcggttggcaggtgcatttgtggacggacgatgtgtccgccttgcgtgcgctttgccctgatttgcccgatgttccctgcgttcatcaggatattcatgtccgcacttggcattccgatgcggcggatatcgatactgcccttgttcccgatatcgttatcgaaacttttgcctgcgacctgcccgaaaatgtgctgcacatcatccgccgacacaagccgctttggctgaattgggaatatttgagcgcggaagaaagcaatgaaaggctgcatctgatgccttcgctgcaggagagtgttcaaaaatatttttggtttatgggtttcagcgaaaaaagcggcgggttgatacgcgaacgcgattaccgaaatgccgtccgtttcgataccgaagccttgcgagagcggctgatgcttcccgaaaaaaacgcccccgaatggctgcttttcggctatcggagcgatgtttgggcaaagtggctggaaatgtggcgacaggcaggcagcccgatgacactgttgctggcggggacgcaaatcatcgacagcctcaaacaaagcggcgttattccgcaagatgccctgcaaaacgacggcgatgtttttcagacggcatccgtccgcctcgtcaaaatccctttcgtgccgcaacaggacttcgacaaactgctgcacctcgccgactgcgccgtgatacgcggcgaagacagtttcgtgcgcgcccagcttgccggcaaacccttcttttggcacatctacccgcaagacgagaatgtccatctcgataaactccacgccttttgggataaggcgcatggattttactcgcccgaaaccgcatcggtacaccgccgcctttcagacgacctcaacggcggagaggctttatccgccacgcaacgcctcgaatgttggcaaaccctgcaacaacatcaaaacggctggcggcaaggcgcggaggattggagccgttatcttttcgggcagccttccgcatccgaaaaactcgccgcctttgtttcaaagcatcaaaaaatacgctag

SEQ ID NO: 54247 - DNA, 1131 bp, Neisseria meningitidis
atgaccaaacatctgcccctggccgtcctgactgctttgctgcttgcagcgtgcggcggttcggacaaaccgcctgccgaaaaaccggcaccggcggaaaaccaaaacgtattgaaaatttacaactggtcggaatatgtcgatccggaaactgttgccgattttgaaaagaaaaacggcatcaaggttacttatgatgtgtacgacagcgatgaaacgctggaaagcaaggtgctgacaggcaagtccggttacgacattgtcgcgccgtccaatgcgtttgtgggcaggcagattaaggcaggtgcgtatcagaaaatcgataagtcgctgattcccaattataaacacctcaaccccgaaatgatgaggctgatggacggggtcgatcccggccacgaatacgccgtgccgttttattgggggacaaataccttcgccatcaataccgaacgcgtgaaaaaggctttgggtacggacaagctgccggacaaccagtgggatttggtgttcgaccccgaatacacgtccaaactcaagcaatgcggcatcagctatttggacagcgcggcggaaatctatcctatggtgttgaactatttgggtaaaaacccgaacagcagcaatacggaagacatcagggaggcaaccgccctactcaagaaaaaccgccccaatatcaaacgctttacttcgtccggctttatcgatgatttggcgcgcggcgatacctgcgtaacaatcggtttcggcggcgatttgaacatcgccaaacgccgtgccgaagaagcgggcggcaaggaaaaaatccgcgtgatgatgcccaaagagggcgtggggatttgggtggattctttcgtgattccgaaagatgcgaaaaacgtcgccaacgcgcacaaatacatcaacgacttcctcgacccggaagtgtcggcgaaaaacggcaatttcgttacttatgcgccttcgagcaagccggcgcgtgagctgatggaagacgaatttaaaaacgacaatacgattttcccaaccgaggaggatttgaaaaacagctttatcatggtgcctatccagccggcggcattgaagtttatggtgcgccagtggcaggatgtgaaggcggggaaataa

SEQ ID NO: 54248 - DNA, 1020 bp, Neisseria meningitidis
atgaaaaaaattctcgttaccggcggcaccggttttatcggctcgcataccgttgtttctttgctgaaaagcggccatcaagtcgtgattttggataacctatgcaattccagcatcaatatcctgccacgcttgaaaacgattaccggccaagagattccgttttatcaaggcgatatccgcgatcgtgagattttgcgccgtatttttgcggaaaaccgcattgattcggtgattcattttgccggcttgaaagcggtgggtgaaagtgtggccgagccgatgaaatattatgataataatgtttccggcagcttggtgttggcggaagaaatggcgcgtgccggcgtatttaagattgtgttcagctcatcggctacggtttatggcgatccgggcaaagtgccttataccgaggatatgccactgggcgataccaccagcccttacggcacatcgaaatcaatggttgagcgcattctcactgatattcaaaaagccgatccgcgctggagcgtgattttgttgcgttatttcaatccgattggcgcgcacgaaagtggtttgattggcgagcagccaaacggcatcccgaataatttgttgccttatatctgccaagtggcggcaggcaaactgccgcagttgtcggttttcggcgatgactaccctaccccagacggtacgggtatgcgcgactatatccatgtaatggatttggcggaaggccatgtcgcggcaatgaaggcaaaaggcggcgttgccggcgtacatttgttcaacttgggttcggggcgcgcctattccgttttggaaatcatccgcgcatttgaagcggcttcgggtttaaccattccatttgaaatcaaaccacgccgtgcgggcgatttggcgtgtttctatgctgacccttcttatacgaaggcacaaatcggttggcaaactcagcgtgatttaagccaaatgatggaagattcatggcgctgggtaagtaatcatccgaatggctacgacgattaa

SEQ ID NO: 54249 - DNA, 261 bp, Neisseria meningitidis; identical to SEQ ID NO: 43315

SEQ ID NO: 54250 - DNA, 1527 bp, Neisseria meningitidis
atgaacacgccccttccttattccaattacctcatccgcatcctgacggcatctgtctatgatgtcgcggtcgaaacgcctttggaaccggcacgcagcctttctgtacgtttgaaaaacaacatccttttgaaacgcgaagatttgcagccggttttttcgttcaaaatacgcggcgcgtacaacaaaatgtccaagttgccgaaagatgcgctcgcttgcggcgtgattgcggcaagcgcgggcaatcatgctcaaggcgtggcgttgtccgcacagcgtttgggctgccgtgccgttatcgttatgccggaaactacgccgaaaatcaaagtggatgcggtcaaaagccgtggcggcgaggtggttttgcgcggtgtttcatacaacgatgcctacgattatgcgatggagctggcggaacaggaagggctgacctatatcgcgccgtttgacgatcccgatgtgattgcgggacagggtacggtggggatggaaattgtcagccagcatcccgatccaatccgcgccgtattcgtaccgataggggggggcggtttggcggcgggcgtggcggcatttatcaagcaggttcgtcccgaaatcaaagttatcggcgttcagaccaacgattcctgctgtatgaagcagtcggtcgaagcgggcgaaatcgtccatttgaaagatgtcgggctgttttcagacggcacggcggtcaaagttgtcggagacgaaaccttccgcctctgcaaagaacttttggatgaaatcattacagtcgataccgatgcggtttgcggcgcggtcaaggatattttcgatgacacgcgcagcattaccgagccggcgggtgcattggcattggcaggtctgaaagcctatatcgcccgagaaggcgcggaaaaccaaaccctgattgccgttaccagcggcgcgaatatgaattttcaccgtttgcgccacgtttcggaacggagcgaattaggcgagggcaacgaaggtatttttgccgttaccattccagaggaacgcggcagcttccttaagtttgtcaatatattgggaaataggaatattaccgagttcaactaccgctacggcgacgatgaaaaagcgcatatctttgtcggtcttcaagcggcaggcccgcaggatttggcggttatcggcagccggttggatgaggcgggattgcccaatgtcgacctgaccgatgatgagattgccaaaatccatatccgttatatggttggagggcggacggacaaagtagaaaacgagcgtttggtcagttttgagtttccggagcgtccgggggcattggcacgctttttgaaccatatgcagggagggtggaatattacgcttttccattaccgcaaccacggtgcggattacgggcggattttggtcggtatcgatgtgccgccgcacgatgccgccgcatttgacggtttcttggaaagtctgggatacagctatcatgaggaaacgcaaaatgccgcgtacaagctgtttcttgcctga

SEQ ID NO: 54251 - DNA, 2301 bp, Neisseria meningitidis
atgcaccgaccgaccgccaaacagattttgcacgaagtattcggttatcccgaatttcgcggcaggcaggaggctgtcatcaatactttggcaggcggcgggagtttgacggtgctgatgccgacgggcggcggcaagtctttgtgttaccagattcccgcgctgatgcgcgaaggcgtggcggttgtcgtatcgccgctgattgcgttgatgaacgaccaagtggcaaacctgcacgccgccggcatcgaagcggcggcagtcaacagcggcacatcggcagatgaggcgcgcgagattgccgacaagcttgcccaaggccgtctgaaactgctttatgtcgcaccggaacgcttggttaccgaccgctttttgcgttttctcgaccaacaaaccgtcagtctgtttgccattgacgaggcgcattgtgtcagccagtgggggcacgatttccgccccgaataccaacagctcggcatccttgccgaacgctatccgaacgtcccgcgcatcgccctgaccgctaccgccgatgccgccacgcgcgccgacatcaagcattatctgcacttggacaatgcgcccgaatttgtctccagctttgaccgcccgaatatttattatcaggttatcgaaaaaaacaacggcaaaaaacaattgctggatttcatccgcaaagaaatgacggggcaaagcggcattgtgtattgcctaagccgcaaaaaggttgaagatgtggcgcagtttttgcgtgaaaacggattaaacgcgattccgtatcatgctggtttgagcatggacgtgcgcgaggaaaaccaacgccgctttacgcatgaagacaatattatcgtggtggcgaccgtggcgttcggcatgggcatagacaaacccgacgtgcgctttgtcgcccatctcgatatgccccagagtgtcgaacatttctatcaggaatcggggcgtgccggccgggacgggctgcctgccgcgagctggctgtgttacggtttgaacgattgggtgttgctgcacgaacggattgccgaaggcaacagcgacgaggtgcaaaagcaaatcgaaatgcaaaaactcgatgccatgcttgccgtctgcgaaaccgccgcctgccgccgcgtactgctgctcaaacatttcggcgaagcatccgaaccctgcggccattgcgacaactgcctgcatccgcccgtacggtttgacggcacggtgttggtgcaaaaattactcagctgcgtgtaccgcgccggacaacgttttgccgccggttacatcaccaaccttttgcgaggtaaaagcgacgattggatacgcggcaaccggcacgaacaactgtccacattcggcatcggtacggagttgtccaacaaagaatggcgcagcgtcatccgccagtgtatcagcctcggctacctcaccgtcaacattacccgatatcaggcattgcaactgaccgaagccgccaaaaaagtcctcaaaggcgaaaccgaagtgatgctgcgtccgctcaagcgcgacaagcccgccgcccgcaccctcaaagacaactggctgcgtaccgaacgcgaagaacgcctgtggcaggcattgcgcgtttggcgtatgaaacaggcagaagccgaaggcatccccgcctatatgattttcggcgacaaaaccctgcgcgaccttgtcgaaaaaatgccgcaagacctcaacggtctgcacgacatctacggcttgggcgaagccaaaatcgaccgtttcggacacggtatcctcgaagtctgccgcaacgccgccgactttagccacgatgccgtcatccgtccgcaaaccgaacgcgaacaacaactgcgtcaaaaactcgaagcctggcggtatgaacaggcaagggcggaaaactgcgccctgcatgccgtcctctccgacgaaagccttgccgatatgcttgccgccacgcccgaaaccgaaaccgacctcgaaggcgtgcacggcttgggcagcgtacgcgccgccaaatacggacgggacatcctcgccgtctgccgtccgttttcagacggcatcgatgaagccgccaaacacaaacgccgcctgatgcgcgccctgattcaatggtgcggcgaaacggcaaaacacgaacagtccgaaccctaccgcattctcagcaaagccgccctgcgcgccattgccgccaaacagccggaaggtttggcggagcttgccgccgtatatggcgtaggcgaagaaaaagccgcacgttacggtgcggcggtgttggcggtattggaacgaaatgccgtctga

SEQ ID NO: 54252 - DNA, 972 bp, Neisseria meningitidis; identical to SEQ ID NO: 39558

SEQ ID NO: 54253 - DNA, 846 bp, Neisseria meningitidis; identical to SEQ ID NO: 36227

SEQ ID NO: 54254 - DNA, 780 bp, Neisseria meningitidis
atgaacggcatcatcatcaaaacccccgaagaaatcgaaaaaatgcgcgagctgggcaaactcgtcgccgaagccctcgactacatcggacaattcgtcaaacccggcgtaaccaccgacgaaatcgacaaactcgtttacgactaccacgtcaacgtccaaggcggctatcccgcccccctgcactacggcaacccgccctaccccaaatcctgctgcacctccgtcaaccacgtcatctgccacggcattcccgacgacaagccgctcaaagaaggcgacattatcaacatcgacctcaccatcaaaaaagacggcttccacggcgactccagccgtatgtttaccgtcggcaaagtctcccccatcgcccaacggctgatcgacgtaacccacgcctccatgatggcgggcatagaagccgtcaaacccggcgcgacactgggcgacgtaggctacgcctgccaacaggttgccgaaaacgccggctattccgtcgtacaggaattctgcggacacggcatcgggcgcggtttccacgaagccccgcaagtgttgcactacggaaaaaaagggcagggccccgttctaaaaccgggtatgatttttaccgtcgaaccgatgatcaaccaaggcaaacgccacctgcgtatcctcaacgacggctggacggtggttaccaaagaccgctccctctccgcccaatgggaacacgaagtcttggtgaccgaaaccggctacgaaatcctcaccgtcagccccgcctccggcaaaccctga

SEQ ID NO: 54255 - DNA, 822 bp, Neisseria meningitidis
atgtctttgcaaaacatcatcgaaaccgcctttgaaaaccgcgcggacattaccccgaccaccgttactcccgaagtcaaagaagccgtgttggaaaccatccgccaactcgattccggcaaactgcgcgttgccgaacgtttgggcgtgggtgagtggaaagtcaacgaatgggcgaaaaaagccgtgttgctgtccttccgcatccaagacaacgaagtcctcaacgacggcgtgaacaaatacttcgacaaagtgccgaccaagtttgccgactggtctgaagacgagttcaaaaacgcaggcttccgcgccgttccgggtgcggttgcccgacgcggcagctttgtggcgaaaaatgtcgtgctgatgccgtcttacgtcaacatcggcgcatacgtcgacgaaggcgcgatggtcgatacttgggcgactgtcggctcttgcgcgcaaatcggtaaaaacgtgcacttgagtggcggcgtcggtatcggcggcgtactcgaacccctgcaagccagcccgaccatcattgaagacaactgcttcatcggtgcgcgttctgaaatcgttgagggcgtgattgtcgaagaaggcagcgtgatttcgatgggcgtgttcatcggtcaatccaccaaaatcttcgaccgcaccacaggcgaaatctaccaaggccgcgtaccggcaggttcggttgttgtgtccggcagtatgccttccaaagacggcagccacagcctttactgcgccgtcatcgtcaaacgtgtggacgcgcaaacccgtgcgaaaaccagcgtgaacgaattgttgcgcggcatctga

SEQ ID NO: 54256 - DNA, 726 bp, Neisseria meningitidis
atgccccgattccacctgcccgaaaacctttccgtcggacaaaccgtcgccctgcccgacaacatcgtccgccacctcaacgtcctgcgcgtccgccccaacgaaaacatcaccctcttcaacggcaaaggcaaggcacacgccgcacggctgaccgttttggaaaaacgccgcgctggggcggaaatcctgcacgaagaaaccgccgatgccgaatccccgctgaacatcacgctcatccaatccatctcctccggcgatcgcatggatttcaccctgcaaaaaagcgtcgaactcggcgtaaccgccatacagcccgtcatcagcgaacgctgcatcgtccgcctcgacggagaacgcgccgccaaacgcctcgcacgctggcaggaaatcgtcatctccgcgtgcgaacaaagcggcaggaacaccgtgccccccgtactgcccatcatcggctaccgtgaagcactcgacaaaatgccgtctgaaagcaccaagctgattatgagcatcaaccgcgcccgcaaactcggcgacatacgccaaccgtccggcgcaatcgtctttatggtcgggccagaaggcggctggacagaacaggaagaacaacaggcatttgaagctggctttcaggcggttacactcggcaaacggattttacgcacagaaaccgccccactcgccgccctcgccgccatgcagacgctttggggcgatttcgcataa

SEQ ID NO: 54257 - DNA, 1344 bp, Neisseria meningitidis
atgattaaaatcaaaaaaggtctaaacctgcccatcgcgggcagaccggagcaagtcatttatgacgggcccgtcattaccgaagtcgcgttgcttggcgaagaatatgccggtatgcgcccctcgatgaaagtcaaggaaggcgatgccgtcaaaaaaggccaagtgctgtttgaagacaaaaagaatccgggcgtggtgtttactgcgccggcttcaggcaaaatcgccgcgattcaccgtggcgaaaagcgcgtacttcagtcagtcgtgattgccgttgaaggcaacgacgaaatcgagtttgaacgctacgcacctgaagcgctggcaaacttaagcggcgaagaagtgcgccgcaacctgatccaatccggtttgtggactgcgctgcgcacccgtccgttcagcaaaattcctgccgtcgatgccgagccgttcgccatcttcgtcaatgcgatggacaccaatccgctggctgccgaccctacggtcattatcaaagaagccgccgaggatttcaaacgcggcctgttggtattgagccgtttgaccgaacgcaaaatccatgtttgtaaggcagctggcgcagacgtgccgtctgaaaatgctgccaacatcgaaacacatgaattcggcggcccgcatccggccggtttgagtggcacgcacattcatttcattgagccggtcggtgcgaacaaaaccgtttggaccatcaattatcaagacgtgattgccatcggacgtttgtttgcaacaggccgtctgaacaccgggcgcgtgattgctttgggtggttctcaagtcaacaaaccacgcctcttgcgtaccgttttgggtgcgaaagtatcgcaaattactgcgggcgaattggttgacgcagacaaccgcgtgatttccggttcggtattgaacggcgcgattgcacaaggcgcgcacgattatttgggacgctaccacaatcagatttccgttatcgaagaaggccgcagcaaagagctgttcggctgggttgcgccgcagccggacaaatactccatcacgcgtacaaccctcggccatttcctgaaaaacaaactcttcaagttcaacacagccgtcaacggcggcgaccgcgccatggtgccgattggtacttacgagcgcgtgatgcccttggatatcctgcccaccctgcttttgcgcgatttaatcgtcggcgataccgacagcgcgcaggcattgggttgcttggaattggacgaagaagacctcgctttgtgcagcttcgtctgcccgggcaaatacgaatacggcccgctgttgcgcaaagtgctggaaaccattgagaaggaaggctga

SEQ ID NO: 54258 - DNA, 324 bp, Neisseria meningitidis; identical to SEQ ID NO: 39252

SEQ ID NO: 54259 - DNA, 345 bp, Neisseria meningitidis
atgctgccgaataaagttttgggtaaatatgattggaatgtggacggaaaaacaggaataggcgcggcatgggtcgtggcggcatttgtgctgcctatgtcggtgtgggcgatatttatgctggcgcggatgcagggctggcttgcgccgaccaaggcaaacccgatatgggcgttggtgtggctgctgatttgcctgccctgcctgctgattgcgtccaaatgtttgggttggaaaggctggcggcgggtggtgaatatttttgtctgcctgaccgtctgcgccatattgagcgtccccgcttcgctgctcatcgcctttaccctccgggacctgctgaaatag

SEQ ID NO: 54260 - DNA, 7545 bp, Neisseria meningitidis
atgaataaaactctctatcgtgtaattttcaaccgcaaacgtggggctgtggtagccgttgctgaaactaccaagcgcgaaggtaaaagctgtgccgatagtgattcaggcagcgctcatgtgaaatctgttccttttggtactactcatgcacctgtttgtcgttcaaatatcttttctttttctttattgggcttttctttatgtttggctgtaggtacggccaatattgcttttgctgatggcattattgctgataaagctgctcctaaaactcaacaagccacgattctgcaaacaggtaacggcataccgcaagtcaatattcaaacccctacttcggcaggggtttctgttaatcaatacgcccagtttgatgtgggtaatcgcggggcgattttaaacaacagccgcagcaacacccaaacacagctaggcggttggattcaaggtaatccttggttggcaaggggcgaagcacgtgtggttgtaaaccaaatcaacagcagccattcttcacaaatgaatggctatattgaagtgggcggacgacgtgcagaagtcgttattgccaatccggcagggattgcagtcaatggtggtggttttatcaatgcttcccgtgctactttgacgacaagccaaccgcaatatcaagcaggcgcattaacaggctttcaggttcgttcgggtcatgttgcgatcacgggacaaggtttggatgcccgtgataccgatttcacacgtattctcagttatcattccaaaattgatgcacccgtatggggacaagatgttcgtgtcgtcgcgggacaaaacgatgtggtcgcaacaggtaatgcacattcgcctattctcaataatgctgctgccaatacgtcaaacaatacagccaacaacggcacacatatccctttatttgcgattgatacaggcaaattaggaggtatgtatgccaacaaaatcaccttgatcagtacggccgagcaagcaggcattcgtaatcaagggcagttgtttgcttcttccggtaatgtggcgattgatgcaaatggccgtttagtcaatagtggcacgatggctgccgccaatgcgaaagatacggataatacagcggaacacaaagtcaatatccgcagtcagggcgttgaaaacagcggtacggcggtatcgcaacaaggcactcaaattcacagtcagtcgattcaaaacactggcacattattgtcctcaggcgaaatattgattcacaattcgggcagcctgaaaaatgaaacatcaggcaccattgaagccgctcgtttggctattgataccgacacacttaataatcaaggcaaactctctcaaacaggttcacaaaaactccatattgatgcacaaggcaaaatggataaccgtggccgcatgggtttacaagataccgcaccaaccgcgtcaaatggttcaagcaatcaaaccggcaatagttacaatgcatcttcccattcatccactaccacaccaacaacggcaacaggtacgggtactgcaaccgtttctatatcaaacataactgcgcctacctttgctgatgggacaattcgcactcatggtgcactggataattcaggcagtattattgccaatggtcaaacagatgttagtgcgcaacaaggtttaaataatgcaggacaaatagacattcatcagttaaatgcaaaaggttcggcgtttgacaatcacaatggaacaattatcagtgatgcggtccacattcaagccggcagcctgaataatcaaaatggcaacatcacaacacgccaacagttagagattgaaaccggtcaactggataacgctcatggcaagttattatcagcagaaatagcggatttagccgtttcaggcagcctgaacaaccaaaatggcgaaatagcgaccaatcaacaactgattattcacgatggtcaacaatctaccgctgccattgataatacgaatggcacgatacaatcaggccgtgatgttgctattcaggcaaaatcgttatccaacaacggcacacttgccgctgataataaactggatattgcgttacaagatgatttttatgtaggacgcaagatcgtggcgggcaatgaattgtcgctcagtacacgaggcagcctgaaaaattcacataccttgcaagcaggaaaacgcattcggattaaagcaaataaccttgataatgcagcacaaggcaacattcaatccggcggtacgacagacattggcacgcagcacaatttaaccaatagaggcttgattgacggacaacaaaccaaaatccaagccgggcaagtgaataatatcggtacaggtcggatttatggtgacaatatcgctattgcggctacccgcttagacaatcaagatgaaaacggtacaggtgccgccattgcggcacgcgaaaacctgaatttaggcattggacaattaaataaccgtgaaaacagtctgatttacagcggtaacgatatggcggttggcggcgcattagataccaatggccaagccacaggcaaagcccaaagcatacgcaatgccagtgccaccattgaagccgccggcaaaatgcgtttaggtgtagaaaagctgcacaataccaatgagcatttgaaaacgcagttggtagaaacagggcgcgagcatattgttgattacgaagcatttggacgacacgaattattgcgggaaggcacgcaacatgaattaggctggtctgtctataacgatgaatcagaccacttacgcacccctgatagagcggcgcatgaaaattggcataaatacgattatgaacaagtcacccaaaaaacccaagttacccaaactgcgccagccaaaatcatttcaggtaatgatttaaccattgatggtaaagaagtatttaataccgatagccaaatcatcgccggcggcaatttgcttgtgcaaacagaaaaagacggtttgcataacgagcaaacctttggcgaaaagaaagtattcagtgaaaatggcaaattacacagctattggcgtgagaaacataaaggacgagactcaacgggacatagcgaacaaaattacactttgccggaggaaatcacacgcaacatttcactgggttcatttgcctatgaatcgcatcgcaaagcattaagccatcatgcgcccagccaaggcactgagttgctgcaaagcaacggtatttcgctaccctatacgtccaattcttttaccccattacccagcagcagcttatacattatcaatcctgtcaataaaggctatcttgttgaaaccgatccacgctttgccaactaccgtcaatggttgggtagtgactatatgctggacagcctcaaactagacccaaacaatttacataaacgtttgggtgatggttattacgagcaacgtttaatcaatgaacagatcgcagagctgacagggcatcgtcgtttagacggttatcaaaacgacgaagaacaatttaaagccttaatggataatggcgcgactgcggcacgctccatgaatctcagcgttggcattgcattaagtgccgagcaagtagcgcaactgaccagcgatattgtttggttggtacaaaaagaagttaaacttcctgatggcggcacacaaaccgtattggtgccacaggtttatgtacgcgttaagaatggcgacatagacggtaaaggtgcattgttgtcaggcagcaatacacaaatcaatgtttcaggcagcctgaaaaactcaggcacgattgcagggcgcaatgcgcttattatcaataccgatacgctagacaatatcggtgggcgtattcatgcgcaaaaatcagcggttacggccacacaagacatcaataatattggcggcattctttctgccgaacagacattattactcaacgcaggcaacaacatcaacagccaaagcaccgccgctagcagtcaaaatacacaaggcagcagcacctacctagaccgaatagcaggtatttacatcacaggcacagaaaaaggtgttttagcagcacaagctggtaaggacatcaacatcattgccagtcaaatcagcaatcaatcagagcaaggacaaacccagctgcaagcagggcgcaacatcaatctggataccgtacaaaccggcaaacatcaagcaacccattttgatgccgataaccatgttattcgcggttcaacgaacgaagtcggcagcagcattcaaacaaaaggcgatgttgccctattgtcagggaataacctcaatgccaaagctgccgaagtcggcagcgcaaacggtacactcgctgtgtctgccaaaaatgacatcaacatcagcgcaggcatcaatacgacccatgttgatgatgcgtccaaacacaaaggcagaagtggcggtggcaataaattggttattaccgacaaagcccagagccacaatgaaaccgctcaaagcagcacctttgacggcaaacaagttgtattgcaggcaggaaacgacgccaacataaagggcagcaatgtcatttctgacaatggcacccatatccaagcaggcaatcatgttcacattggcacaaccctaacccataatcaaagcgaaacctatcatcaaaccaaaaaatcaggattgatgagcgcaggtatcggcttcacgattggcagcaagacaaacacacaagaaaaccaatcccaaagcaacgaacatacaggcagtaccgtaggcagcctgaaaggcgataccaccattgttgcaggcaaacactacgaacaaatcggcagtaccgtttccagcccggaaggcaacaataccatccatgcccaaagcatagacattcaagcggcacacaaccaattaaacagtaataccagccaaacctatgaacaaaaaggcttaacggtggcattcagttcgcccgttaccgatttggcacaacaagcgattgccgtcgcacaaagcggcaaacaagtcggacaaagcaaaaatggtcgtgtcaatgccatggcagctgccaatgcaggctggcaagcctatcaaacaggtaagagtgcacaaaacttagccaatggtacaaccaatgccaaacaagtcagcatctccataacctacggcgaacagcaaaaccgacaaaccacccaagttcaagccaatcaagcccaagcgagtcaaattcaagcaggtggtaaaaccacattaatcgccacaggcgcagcagaacaatccaatatcaacatcgcaggctcagatattgccggcaaagcaggcacaatcctgattgccgataatgacatcacactccaatcagccgagcaaagcaataccgaacgcagccaaaacaaatcatcaggttggaacgcaggtgctgccgtatcattcggacaaggaggctggtcattaggcgttaccgcaggcggcaatgtcggcaaaggccacggcaatggcgacagcgtaacacaccgccacagccatattggcgataaaggcagccaaaccgttctccaaagcggcggcgataccgcactcaaaggcgcgcaagtcattggcaaaggcgtacaagttaatgcccaaaacttgcatattcaaagcgtacaagatagcgaaacctatcaaagcaaacaacaaaacgccagtgcacaagttaccgtaggttatggcttcagtgccggtggcgattacagccaaagcaaaatccgagccgaccatgtttcagtaaccgagcaaagcggtatttatgccggagaagacggctatcaaatcaaggtcggaaaccatacagacctcaaaggcggcatcatcaccagtacccaaagcgcagaagacaagggtaaaaaccgctttcagacggccaccctcacccatagcgacatcaaaaaccacagccaatacaaaggcgaaagttttggattgggcgcaagtgcgtccataagcggcaaaacactgggacagggcgcacaaaataaacctcaaaacaaacacctgacaagcgtagccgataaaaacagcgcaagttcatcagtgggttatggcagcgacagcgacagtcaaagcagcatcacgaaaagcggcatcaatacccaaaacattcaaatcacagacgaagccgcacaaatcaggctgacaggcaaaacagtggcacaaaccaaagccgatattgatacaaacgtaaccacagacaccgccgaacgacattcgggcagcttgaagaacaccttcaacaaagaagcggtgcaaagtgaactggatttacaaagaaccgtcagccaagattttagtaaaaatgttcaacaagccaataccgagattaaccaacatttagacaaactcaaagcagacaaagaagcagccgaaacagcagcagccgaggcattagccaatggcgatatggaaactgccaaacgcaaagtccatgaagctcaagatgcggcagcaaaagcagataattggcaacaaggcaaagtcattctcaacatgttagcctcaggtttagctgcgccgacccaaagcggagcgggcatcgctgcggctaccgcatcgccagccgtatcgtatgcgattggacagcactttaaagatttagccggtcaaaacgcgaatggcaaactaaccgccagtcaagaaaccgctcacgttcttgcccacgcggtattaggagcagcggttgccgcagcaggaggcaacaatgctctagcaggagcattgagtgcgggcgggtcggaagcggctgcgccttacatcagcaaatggttatacggcaaagaaaaaggaagcgacttaacggcggaagagaaagagactgtaacagcgattacaaatgtattgggtacggctacgggtgcggcagtcggcaacagcgcaacagatgcagcgcaaggcagcctgaatgcgaagagtgcggtggggaataatgatactgtagagcaagtgaaatttgctcttaggcaccctagaattgctattgcaattggatctgtacataaagatcctggctctacattagagcctaatatttcaacaattgcttcaacttttcaattaaatttatttcctaatagtgaatttggtggtgagggtggagttggcaatgcattcaggcacgttttatggcaagcaaccatcacacgagaatttggcaaagatattgctgttaaagtaggaaatagtcatgaaagtggggaaaaaattaattattctataagacgtaatctttcattagataaagcagatgaaatgattgatcaactaaataacgaaataggaagagaaatagcattaaataccaataggttaaacacaaaagagttagttggattaattctggaaacttataaaaataatggtttttatcaagcagaaagaaacagtaatggaaattatgatgttgtaagaaaaagattatctgaaaaagattaccagaatacaagcaatatattgattcacttagataatactggtgccggatttaaaattcagcagaggagaaaacaaatcagagcacaaatttcagccagacaatggagaagataa

SEQ ID NO: 54261 - DNA, 1410 bp, Neisseria meningitidis
atggatacacaaatcaaaactgaagccgacaatcagagcaaccggcgttatctgaccgtttggcggtggcatttttatgccggtctgctggttatgccttttcttaccctgcttgccgttacgggtttgggtatgctgctgtttgccaatattaccggtaaggagggcgagcggattcatgttgtgccgcaggcaacggtacaacctctgtctgttcaggcggaagcggcacgcagtgccgttaatccggaaacttcgtccgtcgttcagtatattgcgccgcgtgccgatgatatggttgccgtgttccgtgtcaacaatgagggcaaggcaacgatggtcgcggtcgatccttatacggcaaaagtggtcagtaccatgccgcgcaatcagggttggtattacgcgatggatgaaatccacagcgatatgatgctcggttcgacaggtgattatcttttggaaacggctgcatcgctgacgattatcatgataatcagcggtttgtacctttggtgggtgaaacggcgcggcatcaaggcgatgctgctgccgccaaaaggcagggcgcgttcttggtggcggaatctgcacggcgcgtttggaacttgggtgtcgttgattttactgttgttctgcctgtcgggtattgcttgggcaggtatttggggcggcaagttcgtgcaggcttggagtcagttcccggccggcaaatggggtgtcgaaccgaaccctgtttcagtcgtgccgacccacggcgaggtattgaatgacggcaaggttaaggaagtgccgtgggttttggagcttacgcctatgcctgtttcagggacgactgtgggcaaagacggtattaaccctgacgagccgatgacattggaaaccgtcgaccgttttgcgcgggaaatcggtttcaaagggcgttatcagttgaatttgcccaaaggcgaggacggagtgtggactttgtcgcaggattctatgagttacgacatgatcagcccgtttgccgaccgcacggtgcatatcgaccagtacagcggcaaaatccttgccgacatccgctttgacgattacaacccgttcggcaaatttatggcggcaagcattgcgctgcatatgggtactttgggctggtggagcgtgttggcgaacgttttgttctgccttgccgtcatttttatcggtatcagcggctgcgtgatgtggtggaaacgccgtccgaccggagcggtgggcatcgttccgccggcgcagaaagtcaagctgccggtttggtggatgatggcattgccgctattggcaatcgcactgctcttcccgaccgcactgcttgccattgccgtgatttggctgttggataccttgctgctgtcgcggattcctgttttgaggagatggtttaaatga

SEQ ID NO: 54262 - DNA, 1044 bp, Neisseria meningitidis
atgagtaaaaaaatcaaagtcggcattgtcggcgcgacgggctacacgggcgtggaactgctgcgcctgcttgccgcccatcccgatgtcgaagtcgccgccgtaaccagccgcagcgaagcgggaactgcagttgccgattactttccgagtttgcgcggcgtgtacggcctcgccttccaaacgcccgacgaggcaggtttggaacaatgcgacatcgtcttcttcgccacgcccaacggcatcgccatgaaagacgcgccgcgcctgattgaacagggcgtgcgcgtcatcgacctttccgccgacttccgcatacgggacattccgacctgggaacactggtacggcatgacccacgccgcccccgacctcgtttcccaagccgtgtacggattgagcgaactcaaccgcgaagccgtcgcacaggcacgcctcgtcgccaaccccggctgctacccgacctgcgtatccctgccgctcgtgccgctgttgcggcaatgccgtctgaagcccggtatgccgctgattgccgactgcaaatccggcgtgtccggcgcgggcaggaaaggcaatgtcggttcgctgttgtgcgaagtcggcgacaacttcaaagcctacggcatagctggacaccgccacctgcccgaaatcaggcagaccatcgccgggcttcaggacggcatcgccgaaggattcgtgttcacgccgcacctcgcgccgatgatacgcggtatgcacgccaccgtttacctccacctttcagacggcatctgccccgaaaccatcctgcgcgactattaccgcgacagcctgttcgtggacatcctgcccgccggttcgacacccgaaacccgcagcgtgcgcggcgcaaacctctgccgcatcagcatccaacaggcggcgcaatccgatgtgtgggtcgtcctttccgtcatcgacaacctcgtcaaaggcgcggcgggtcaggcggtgcaaaatatgaacatcatgttcggactgaaggaaacacacggcttggacgcaatccccctgctcccctga

SEQ ID NO: 54263 - DNA, 519 bp, Neisseria meningitidis; identical to SEQ ID NO: 36779

SEQ ID NO: 54264 - DNA, 807 bp, Neisseria meningitidis; identical to SEQ ID NO: 50298

SEQ ID NO: 54265 - DNA, 510 bp, Neisseria meningitidis
atgacagacactcaaaaccgggtagccatgggctacatcaaaggcgtattcggcataaaaggctggttgaaaattgccgccaacaccgaatattccgacagccttttggactaccccgagtggcatttggtcaaggacggcaaaaccatcagcgttacccttgaagccggaaaagtcgtcaacagcgaactccaagtcaaattcgaaggcataaacgaccgcgacttggcattctcattgcacggttacaccatcgaaataccccgtgaagcattcgccccgacagaagaagacgaatactactggacagacttggtcggcatgaccgtcgtcaacaaagaccataccgttttaggcaaggtaagcaacctgatggaaaccggcgcaaacgacgtattgatgattgacggagaacacgggcagattctgattccgttcgtttcccaatatatcgaaaccgtcgataccggcagcaagattattactgccgactggggtttggactactga

SEQ ID NO: 54266 - DNA, 1524 bp, Neisseria meningitidis
gtgcgcaaattttcttttcttctttctgtgctcatgaaagaaacagcttttaaaactgggatgtgtttaggttccaataatttgagcaggctacaaaaagccgcgcaacagatactgatcgtgcgtggctacctcacttcccaagctattatccaaccacagaatatggattcgggaattctgaaattacgggtatcagcaggcgaaataggggatatccgctatgaagaaaaacgggatgggaagtctgccgaaggcagtattagtgcattcaataacaaatttcccttatataggaacaaaattctcaatcttcgcgatgtagagcagggcttggaaaacctgcgtcgtttgtcgagtgttaaaacagatattcagattataccgtccgaagaagaaggcaaaagcgatttacagatcaaatggcagcagaataaacccatacggttcagtatcggtatagatgatgcgggcggcaaaacgaccggcaaatatcaaggaaatgtcgctttatcgttcgataaccctttgggcttaagcgatttgttttatgtttcatatggacgcggtttggcgcacaaaacggacttgactgatgccaccggtacggaaactgcaagcggatccagaagttacagcgtgcattattcggtgcccgtaaaaaaatggctgttttcttttaatcacaatggacatcgttaccacgaagcaaccgaaggctattccgtcaattacgattacaacggcaaacaatatcagagcagcttggccgccgagcgcatgctttggcgtaacagacttcataaaacttcagtcggaatgaaattatggacacgccaaacctataaatacatcgacgatgccgaaatcgaagtgcaacgccgccgctctgcaggctgggaagccgaattgcgccaccgtgcttacctcaaccgttggcagcttgacggcaagttgtcttacaaacgcgggaccggtatgcgccaaagtatgcccgcacctgaagaaaacggcggcggtactattccaggcacatcccgtatgaaaatcataaccgccggattggatgcagcggccccgtttatgttgggcaaacagcagtttttctacgcaaccgccattcaagctcaatggaacaaaacgccgttggttgcccaagataaattgtcaatcggcagccgctacaccgttcgcggatttgatggggagcagagtcttttcggagagcgaggtttctactggcagaatactttaacttggtattttcatccgaaccatcagttctatctcggtgcggactatggccgcgtatctggcgaaagtgcacaatatgtatcgggcaagcagctgatgggtgcagtggtcggcttcagaggagggcataaagtaggcggtatgtttgcttatgatctgtttgccggcaagccgcttcataaacccaaaaggctttcagacgaccaacaccgtttacggcttcaacttgaattacagtttctaacctctgaattttttactgatatttag

SEQ ID NO: 54267 - DNA, 1302 bp, Neisseria meningitidis; identical to SEQ ID NO: 39130

SEQ ID NO: 54268 - DNA, 774 bp, Neisseria meningitidis; identical to SEQ ID NO: 47967

SEQ ID NO: 54269 - DNA, 624 bp, Neisseria meningitidis
atgaaaaaaccgaccgataccctacccgttaatctgcaacgccgccgcctgttgtgtgccgccggcgcgctgttgctcagcccgctggcacaagccggcgcgcaacgtgaagaaacgcttgccgacgatgtggcttccgtgatgaggagctctgtcggcagcataaatccgccgaggctggtgtttgacaatccgaaagagggcgagcgttggttgtctgccatgtcggcacgtttggcaaggtttgtccctgatgaggaagagcggcgcaggctgctggtcaatattcagtatgaaagcagccgggccggtttggatacgcagattgtgttggggctgattgaggtggaaagcgcgttccgccagtatgcaatcagcggtgtcggcgcgcgcggcctgatgcaggttatgccgttttggaaaaactacatcggcaaaccggcgcacaacctgttcgacatccgcaccaacctgcgttacggctgtaccatcctgcgccattaccggaatcttgaaaaaggcaacatcgtccgcgcgcttgcccgctttaatggcagcctcggcagcaataaatatccgaacgccgttttgggcgcgtggcgcaaccgctggcagtggcgttga

SEQ ID NO: 54270 - DNA, 1521 bp, Neisseria meningitidis
atgcagctgatcgactattcacattcatttttctcggttgtgccaccctttttggcactggcacttgccgtcattacccgccgcgtactgctgtctttaggcatcggtattctggtcggcgttgcctttttggtcggcggcaaccccgtcgacggtctgacacacctgaaagacatggtcgtcggcttggcttggtcagacggcgattggtcgctgggcaaaccaaaaatcttggttttcctgatacttttgggtatttttacttccctgctgacctactccggcagcaatcaggcgtttgccgactgggcaaaacggcacattaaaaaccggcgcggcgcgaaaatgctgaccgcctgcctcgtgttcgtaacctttatcgacgactatttccacagtctcgccgtcggtgcgattgcccgccccgttaccgacaagtttaaagtttcccgcgccaaactcgcctacatcctcgactccactgccgcgcctatgtgcgtgctgatgcccgtttcaagctggggcgcgtcgattatcgccacgcttgccggactgctcgttacctacaaaatcaccgaatacacgccgatggggacgtttgtcgccatgagcctgatgaactattacgcactgtttgccctgattatggtgttcgtcgtcgcatggttctccttcgacatcggctcgatggcgcgtttcgaacaagccgcgttgaacgaagcccacgatgaaactgccgcttcagacgctaccaaaggtcgtgtttacgcactgattattcccgttttggccttaatcgcctcaacggtttccgccatgatctacaccggtgcacaggcaagcgaaaccttcagcattttgggtgcatttgaaaatacggacgtgaacacttcgctggtattcggcggcacttgcggcgtgcttgccgtcgtcctctgcacgctcggcacgattaaaaccgccgattatcccaaagccgtttggcagggtgcgaaatccatgttcggcgcaatcgccattttaatccttgcctggctcatcagtacggttgtcggcgaaatgcacacgggcgactacctctccacgctggttgcgggcaacatccatcccggcttcctgcccgtcatccttttcctgctcgccagcgtgatggcgtttgccacaggcacaagctgggggacgttcggcatcatgctgccgattgccgccgccatggcggtcaaagtcgaacccgcgctgattatcccgtgtatgtccgcagtaatggcgggggcggtatgcggcgaccactgctcgcccatttccgacacgaccatcctgtcgtccaccggcgcgcgctgcaaccacatcgaccacgttacctcgcaactgccttacgccttaaccgttgccaccgccgccgcatcgggctacctcgcattgggtctgacaaaatccgcgctgttgggctttggcacgacaggcattgtattggcggtgctgatttttctgttgaaagataaaaaacgcgccaacgcctga

SEQ ID NO: 54271 - DNA, 582 bp, Neisseria meningitidis
atggaagaaaaaaacgactacaccgacgcggcatccgacaaccgcaacgggcaggaaattgaagtcggaattgccggcgcaggcgaccggatacttgccgcgctgctgaaccaattgtttacctttttggttttgttggtgccgtttgccggactgattgctttcgccatcaagaatgaaggcaggattggcggcagtgaggaaatattcgggctgcttttgggcatgacttccttttgggtaggactggcgggcattttggtttataccgtcgttcaaatctactatatgagtcgggacgggcagtcattgggtaagaagatcatgagaatcagggtgttgaaaaccgacggccgcaatccgggttttgtcggcacggttttggtacgcgaaatcgcatggtcggttttggttgccattattgccgccgttatcggtcttgcagtaggtgacaacggagaaaacgccatcaacctgctggcattccttgccaactttgtcctgctctttatggtcaaacgcgaccgccgcacgctttacgacatactggcggatacggttgtcgtcaagctgcccaaataa

SEQ ID NO: 54272 - DNA, 363 bp, Neisseria meningitidis; identical to SEQ ID NO: 43221

SEQ ID NO: 54273 - DNA, 312 bp, Neisseria meningitidis; identical to SEQ ID NO: 38411

SEQ ID NO: 54274 - DNA, 591 bp, Neisseria meningitidis
atggaaaacgacatgtcaaacaaaatcaaaatggttgtcggcttgggcaacccgggcaaagaatacgaacagacccgccataatgcaggcttttggttcctcgacgaactggcttggaagtggaaggcttcgtttaaagaagaaaaaaaattcttcggcgaagtcgcccgtgctaccctgcccgacggcgatgtctggctgctcaagccgaccacgttcatgaaccgttccggacaggcagttgccgcccttgcgcagttttataaaatcaaacccgaagaaatcctcgtcgtccacgacgaactcgacattccctgcggacggatcaaattcaaactcggcggcggcaacggtggacacaacggcttgaaagacattcaggcacggctcggcacggccgactattaccgtctgcgcctcggtatcggccatccgggcgaccgcaacctcgtcgtcggctatgtcctgaacaaacccagtacggaacaccgccgacagattgacgatgccgtcgccaaatccctgcaagccatacccgacatccttgccggcaaatgggaagaagcaacccgcttcctgcacagcaaatga

SEQ ID NO: 54275 - DNA, 366 bp, Neisseria meningitidis; identical to SEQ ID NO: 44550

SEQ ID NO: 54276 - DNA, 1302 bp, Neisseria meningitidis
atgccgtctgaaaccgcccgccccctttatgcggacacgtgcgccgcacacacgctcgtctggttccgccaaaacctccgcatccgcgacaacgccgccttatgcaccgccgttgccgaaggtttgcccgttatcggtatttggattgacgatgccgaaacagacaaccctcgccgcgccgcgttctaccgccaatccgccgccgaactcgcccaagggcttgcagggcgcggcatcccgctctacacggcggcatcgcctgccgagctcgtccggctcgccgtccgcctcaatatccgcgccgtcatcgccgacgaatcccatacttttgccgacaaactcgccgacaacgccctttggcatgaattggacaaacacggcatcgcgttaaccttcgtcaacgaccgcgccgttttcggcaaaaccgacctgatacccgacggcggcacggcatatgccgatttcgaccgctaccgcgaagtatggctcgaccgcttttccaagcagccccccgccggtccggacctattcgcggcataccgccaacccttccccgaaaacctttccgccccgcagcctgccgcgctttcagacggcatcttcctgccgcaaaacggcggcgaaacagcggcttggcggcagtggcggcggtttctcgaacaggcggattcctactccgttttaaaggatttcccttcgcgcaaaaacacttcgctgatgggtgcgtatttgagtgccggctgcatctcgtcgcgcctgctcgcgcgggaaagcctcgaacgccgtctgaacgcgtgggcggacaacatcatccgccgcgattttttccttcaacttgccttgcagcacgcggatgacgacccttcagacggcaatccagaacacaccctgcgcctgacgctttggcagcagggccagaccggcattccgattatcgatgccgcgatgcgctgtttgcacaaaaccggtggcctccaccccgccctgagacgcttgagcgcggactttttctgccacgttttaaacctcccccgccgcgaaggcgagatatggtttgcccgacagctgaccgatttcgatgtagcaatcaaccaaggcaactggcggcttgccgcctcacggcacacctaccccgacattgccgccgcctcataccgtaccgacccggacggtacttttatcaaacggcacattcccgaactcgcccacctgtccgccgacaccgtccacacgccttggcggtttgcctgttcggtcgatacccacggctatcccgcctatcctgtcgccggtattccctaa

SEQ ID NO: 54277 - DNA, 891 bp, Neisseria meningitidis
atgtttcccgttttccatctttcaggcgaaagccgccgccggatgcttcaggcggcatcgcgttttccctatgttttcaaagcccgtgcggaagattcgcacaaagggactttcggcacgctcgccgtagtcggcggatcggcagggatgagcggcgcgcccgtattggcggcatcggcggcgatgtatctcggctgcggcaaggtgtgggcgggtttcaatcaggatgcgcttccgtttgccgtcattgccggttttcccgaaattatgttggacacggcagacggtttgaccaagcgtcaaggcataaacgcttggatggtaggttgcggcctgggtacggataaagcggcggtcggaacgcttgccggaattttggcggaacacacggacaagcccgtccttttggatgcggacgcgctgaacatattatcaaccgatgccgaaacccgaaatctggcgcgcgggtgtaaaaacctgattttaacgccacaccccgccgaagccgcgcgcctgcttggaacgacggttgcacaggttcaggcggatcggacggcggcagtgaggaagataggggcaattttcggcgcaaccgtggttttaaaggggcacaaaacattggttgctgtgtccgatacggaaatctatgtcaacgaaagcggcaacgcgggattggcaacggcgggcagtggcgacgtattgggcggcatcatcggcagtctgctcgcacagggcgtgccggtttttgaagccgcctgcgcgggcgcgtggctgcacggcgcggcggcggatgtcataaaagaatcggcaggcattgcggcagggctgttggcaggggaaatcgctccggcggcaaggtggctgcgcaaccggataactaaaagtatgtaa

SEQ ID NO: 54278 - DNA, 1311 bp, Neisseria meningitidis
atgaacacgccgcatccgcgcccgaaaatcgccgtcatcggcgcaggctgggcaggactgtccgccgccgtcaccttggcgcggcacgccgacgttaccctgtttgaagccggccggcaggcgggcggcagggcgcgcacactggccggaaataccgacggtttcggttttttggacaacgggcagcacattttgctcggcgcataccggggcgtgttgcgcctgatgaaaaccatcggttcggatccccgtgccgcctttttgcgcgtaccgctgcactggcatatgcacggcggtttgcagttccgcgccctccccctgcccgcgccgctgcatattttgggcggcgtgctgcttgcccggcgtgcaccgactgcattcaaagccaaactgcttgccgatatgtccgatttgcagaagtccgcacgcctcggacagcccgacacgacagtggcgcaatggctgaaacagcggaacgtgccgcgtgccgccgtgatgcagttttggcagcccttggtttggggcgcgctcaacacgcctttggaaaccgcaagcctgcgcgtgttgtgcaacgttttgtccgacggcgtgctgacgaaaaaatccggcagcgactatctcctacccaaacaggatttgggcgcaatcgtcgccgaacccgccttggcggatcttcaacggctcggcgcggacatccgcctcgaaacgcgcgtatgccgtctgaacaccctcccggacgggaaagtgctcgtcaacggcgaagctttcgatgccgccgtccccgccaccgcgccctaccacgccgccgcgctcctgcccgaaggcacgcccgaacacgttcagacggcatatcaaaaccttcgctaccacgccatcaccaccgtctatctgcgctacgccgaacccgtccgcctgcccgccccgctgaccggccttgccgacggcacggtgcaatggctgctttgccggggcaggctcggactgcctgaaaacgaagtgtccgccgtcatcagcgtttccgaccgcgtcggcgcgtttgcaaaccgggcgtgggcggacaaagcccacgccgacctcaaacgcatccttccgcatttgggcgaacccgaagccgtgcgcgtcatcaccgaaaaacgcgccacaaccgcagccgatgccccgccgccggatttgtcgtggctgcaccggcaccgcatcttccccgccggcgactacctccacccggactaccccgccacgctcgaagccgccgtacaatcaggtttcgcggcggcggaaacctgcctgcaaagcctgagcgatgccgtctga

SEQ ID NO: 54279 - DNA, 303 bp, Neisseria meningitidis; identical to SEQ ID NO: 37654

SEQ ID NO: 54280 - DNA, 987 bp, Neisseria meningitidis
atgtcttctacgccgaataaacaagccggatatccccgactggtcgccgatatcggcgggacgaatgcacgctttgcgctggaaaccgcgccgcgcgtcatcgaaaaagccgccgtgcttccgtgtaaagactacgatacggttaccgatgcggtgcgtgcctatctgaatcaaagcggtgcaacagccgtacggcacgcggcatttgccatcgccaacccgattttgggcgactgggtgcagatgaccaaccaccattgggcgttttccatcgaaaccacccgtcagactttggggctggacaccctcatccttttgaacgactttaccgcgcaggcattggcggtaacgcagacttcaagcaaagacctgatgcaggtaggcgggcaaaagcctgtcgaatttgcccccaaagccgttatcggccccggtaccggcctgggcgtgagcggattggtgcacagccacgcaggctgggtggctttggcaggcgagggcgggcataccagtttcccgccgtttgacgatatggaagtgctgatttggcagtacgccaaaaacaaatacggccatgtttccgccgaacgctttttgagtggcgcgggcttgagcttggtttacgaggctttggctgcaaaacagaaagccaaacccgccaaactgatgccgtctgaaatcacggaaaaggctttgagcggcacgtcgcctttgtgccgtcagactttggacatcttctgcgccatgctcggcacggttgcttccaacctcgccctgacgctgggcgcgcgcggcggcgtgtacctgtgcggcggcattattccccgcgtgttggaatacttcaaaacttccccgttctgcagccgtttcgagaacaagggcaggtttgaagcatatcttgccgcgattcccgtgtatgtcgtcttgagcgagtttcccggaatttccggtgcggctgcggctctcgacaaccatttgagaaacgtttaa

SEQ ID NO: 54281 - DNA, 135 bp, Neisseria meningitidis; identical to SEQ ID NO: 44583

SEQ ID NO: 54282 - DNA, 687 bp, Neisseria meningitidis; identical to SEQ ID NO: 42016

SEQ ID NO: 54283 - DNA, 546 bp, Neisseria meningitidis
ttgatattggcggttgccttgggcggtctgtcggcatggttgggtcgtatcagcgaagtcgagattgaagaagtcaggctcaatcccgacgaaccgcaatacacaatggacggcttggacggcaggcggtttgacgaacagggatacttgaaagaacatttgagcgcgaagggcgcgaaacagtttccggaaagcagcgacatccattttgattcgccgcatctcgtgttcttccaagaaggcaggttgttgtacgaagtcggcagcgacgaagccgtttaccataccgaaaacaaacaggttctttttaaaaacaacgttgtgctgaccaaaaccgccgacggcaaacggcaggcgggtaaagttgaagccgaaaagctgcacgtcgataccgaatctcaatatgcccaaaccgatacgcctgtcagtttccaatatggtgcatcgcacggtcaggcgggcggcatgacttacgaccacaaaacaggcatgttgaacttctcatctaaagtgaaagccacgatttatgatacaaaagatatgtaa

SEQ ID NO: 54284 - DNA, 1008 bp, Neisseria meningitidis
atgagcaccttctttcaacaaaccgcgcaagccatgattgctaaacacatcgaccgcttcccgctattgaagttggaccgggtgattgattggcagccgatcgaacactacctgaaccgtcaaaaaacccgttaccttagagaccaccgcggccgtcccgcctatcccctgctatccatgttcaaagccgtcctgctcggacaatggcacagcctctccgatcccgaactcgaacacagcctcatcacccgcatcgatttcaacctgttttgccgttttgacgaactaagcatccccgattacagcaccttatgccgctaccgcaattggctggctcaagacaataccctgtccgaattgctcaaactgattaaccgccaactgaccgaaaaaggcctaaaaatagagaaagcatccgccgccgttgttgacgccaccattattcagaccgccggcagcaaacagcgtcaggctatagaagtcgatgaagaaggacaagtcagcggccaaaccacaccgagtaaagacagcgatgcccgttggatcaagaaaagcggcctctacaaactcggttacaaacaacatacccgtaccgatggggaaggctatatcgagaaactgcacatcacccccgccaatgcccatgagtgcaaacacctgtcgcctttgctggaaggactgcccaaaggtacgaccgtctatgccgacaaaggctacgacagtgcggaaaaccggcaacatctggaagaacatcagttgttagacggcattatgcgcaaagcctgccgcaaccggccgctgtcggaagtgcaaaccaaacgcaaccggtatttgtcgaagacccgttatgtggtcgaacaaagcttcggtacgctgcaccgtaaattccgctatgcgcgggcagcctatttcgggctgctcaaagtgagtgcgcaaagccacctgaaggcgatgtgtttgaacctgttgaaagccgccaacaggctaagtgcgcccgctgccgcctaa

SEQ ID NO: 54285 - DNA, 912 bp, Neisseria meningitidis
atggttcatattatgtttaatcaggcagcacaagaattgacgactatccgcgatattttacgttttgcagtcagccgttttaatgaggcagggctcttttttggtcatggaacagataatgcgcatgatgaagcagcttatttgattctgcatactttgaatttgcctttggatatgcttgccccatatcttgatgcaaaactcttggaagctgaaaaagaggaagtgctggcggttattgagcgtcgtgctgtcgaacacattccagccgcttatttgacacaccaggcatggcagggagagtttgatttctatgtggatgagcgcgtaatcatacctcgttcttttatttatgaattgttgggtgacggacttcgtccttggatagaatacgatgagttggtgcataatgctttggatctttgcaccggaagcggttgccttgccattcagatggcgcatcattatcctgatgcccaaattgatgcggttgatgtgagcttggatgctttggaagtggcagggattaatgtcgaagattatggtttggaagaacgcatccggcttattcatacggatttgtttgaaggattggaaggcacttatgatttgattgtttccaatccgccttatgtggatgcggaatcggttgagttattgcctgaagagtatttgcacgaaccggaattggcattgggcagcggggcggacgggttggatgccaccaggcagattcttctgaatgcggcaaagtttctgaatcccaaaggtgtattgctggtggaaatcgggcataacagggatgtattggaagcagcgtatccggagttgccttttacttggttggaaaccagcgggggcgacggttttgttttcctcttgacgcgcgagcagttattgggtgaagagtga

SEQ ID NO: 54286 - DNA, 645 bp, Neisseria meningitidis
gtgaacaaacggctgttttgcagccgcaacggcttgcgctattacctgttgggcggtttctgtttgagtgtttttccgtttttgctggtgtttgcctcatccgtttgggcggtttatcggacgggcgggcaggttttgccgccgtatgtccgggcggatgccgcgctggtgttgggtgccgccgcgtgggacaaacgcccttctccggtttttcgggaacgcatcaaccacgccatcgcgctttatcagagccgcagggtaggcaaaatcgtgtttacgggagggcgaaccaaaaaaggctatatgaccgaagccgaggtcgggcggcggtacgcgctcaaacagggggttccggcgcgcaacatcctgtttgaaaacacttcgcgcaacacttatgaaaacctgaacaacatccgtccggttttgcgtgccaacggtattgccagcgtggtgattgtcagcgatccctaccatttggcacgggcggcggaaatggcggaggatttgggtgtccgcgtttatatgtctgccacgccgaccacgcggtttgatgcgggaaataagaaaaaaatctttatgctgcaagagggatatgcgttatccctctaccgtttggaaaaatgggggcgggattttttcaattag

SEQ ID NO: 54287 - DNA, 702 bp, Neisseria meningitidis; identical to SEQ ID NO: 40491

SEQ ID NO: 54288 - DNA, 1569 bp, Neisseria meningitidis
atgagtcaaaccgatacgcaacgggacggacgatttttacgcacagtcgaatggctgggcaatatgttgccgcacccggttacgctttttattattttcattgtgttattgctgattgcctctgccgccggtgcgtatttcggactatccgtccccgatccgcgccctgttggtgcgaaaggacgtgccgatgacggtttgattcacgttgtcagcctgctcgatgctgacggtttgatcaaaatcctgacgcataccgttaaaaatttcaccggtttcgcgccgttgggaacggtgttggtttctttattgggcgtggggattgcggaaaaatcgggcttgatttccgcattaatgcgcttattgctcacaaaatctccacgcaaactcactacttttatggttgtttttacagggattttatctaataccgcttctgaattgggctatgtcgtcctaatccctttgtccgccatcatctttcattccctcggccgccatccgcttgccggtctggctgcggctttcgccggcgtttcgggcggttattcggccaatctgttcttaggcacaatcgatccgctcttggcaggcatcacccaacaggcggcgcaaatcatccatcccgactacgtcgtaggccctgaagccaactggttttttatggtagccagtacgtttgtgattgctttgattggttattttgttactgaaaaaatcgtcgaaccgcaattgggcccttatcaatcagatttgtcacaagaagaaaaagacattcggcattccaatgaaatcacgcctttggaatataaaggattaatttgggctggcgtggtgtttgttgccttatccgccctattggcttggagcatcgtccctgccgacggtattttgcgtcatcctgaaacaggattggtttccggttcgccgtttttaaaatcgattgttgtttttattttcttgttgtttgcgctgccgggcattgtttatggcagggtaacccgaagtttgcgcggcgaacaggaagtcgttaatgcgatggccgaatcgatgagtactctggggctttatttggtcatcatcttttttgccgcacagtttgtcgcattttttaattggacgaatattgggcaatatattgccgttaaaggggcgacgttcttaaaagaagtcggcttgggcggcagcgtgttgtttatcggttttattttaatttgtgcttttatcaatctgatgataggctccgcctccgcgcaatgggcggtaactgcgccgattttcgtccctatgctgatgttggccggctacgcgcccgaagtcattcaagccgcttaccgcatcggtgattccgttaccaatattattacgccgatgatgagttatttcgggctgattatggcgacggtgatcaaatacaaaaaagatgcgggcgtgggtacgctgatttctatgatgttgccgtattccgctttcttcttgattgcgtggattgccttattctgcatttgggtatttgttttgggcctgcccgtcggtcccggcgcgcccacattctatcccgcaccttaa

SEQ ID NO: 54289 - DNA, 480 bp, Neisseria meningitidis
atgagtaaacacacttatccgataacacctgccgtgcgcgttttgcgtgaaaacggcatcgaatttgaaccttttacctatgcctatgaggaacacggcggcacggcgcagtttgcccgactattcggcaaagacgaacacttggtcattaaaaccattgttttgcaagatgaaaacggtaaggggctgattgtcttgatgcacggcgacaagcagatttcaacccgcaatctggcgcggcatttgggtgcgaaacacatcgaacccgccacgcccgtacaggcaaacaagtggacgggctatctggtcggcggcacaacgccgttcggcatccggacaaagttggatatttacgtcgaacagtcggtgatggatttggaaaccatctatatcaacggcggaaaacgcgggttcattatcggcatccgtcccggagatttaaatattttgaacccgaaaacaatacaggcggcggtttga

SEQ ID NO: 54290 - DNA, 276 bp, Neisseria meningitidis
atgaagataacgcactgcaaattaaagaaaaaagtacagaaagaactgctccgtttttttgtgctggaagttaccgcccgttctgccgccgatattttgggtatccatcccaattcggcagcactgttctaccgtaaaatccgcacggttatcaaccatcatttggccctggctgccgatgaggtttttgagggccctgtcgagccggacgaaagcgatttcggcggacggcgtaaaggcagacgtggtgaaaagtggttgtcttcggcattctga

SEQ ID NO: 54291 - DNA, 2178 bp, Neisseria meningitidis
atgacacgcttcaaatattccctgctgtttgccgccctgttgcccgtgtacgcgcaggccgatgtttctgtttcagacgaccccaaaccgcaggaaagcactgaattgccgaccatcaccgttaccgccgaccgcaccgcgagttccaacgacggctacactgtttccggcacgcacaccccgctcgggctgcccatgaccctgcgcgaaatcccgcagagcgtcagcgtcatcacatcgcaacaaatgcgcgaccaaaacatcaaagcgctcgaccgcgccctgttgcaggcgaccggcaccagccgccagatttacggctccgaccgcgcgggctacaactacctgttcgcgcgcggcagccgcatcgccaactaccaaatcaacggcatccccgttgccgacgcgctggccgatacgggcaatgccaacaccgccgcctatgagcgcgtagaagtcgtgcgcggcgtggcggggctgctggacggcacgggcgagccttccgccaccgtcaatctggtgcgcaaacgcccgacccgcaagccattgtttgaagtccgcgccgaagcgggcaaccgcaaacatttcgggctgggcgcggacgtatcgggcagcctgaatgccgaaggcacgctgcgcggccgcctggtttccaccttcggacgcggcgactcgtggcggcagcgcgaacgcagccgcgatgccgaactctacggcattttggaatacgacatcgcaccgcaaacccgcgtccacgcaggcatggactaccagcaggcgaaagaaaccgccgacgcgccgctcagctacgccgtgtacgacagccaaggttatgccaccgccttcggcccgaaagacaaccccgccacaaattgggcgaacagccgccaccgtgcgctcaacctgttcgccggcatcgaacaccgcttcaaccaagactggaaactcaaagccgaatacgactacacccgcagccgcttccgccagccctacggcgtagcaggcgtgctttccatcgaccacaacaccgccgccaccgacctgattcccggttattggcacgccgacccgcgcacccacagcgccagcgtgtcattgatcggcaaataccgcctgttcggccgcgaacacgatttaatcgcgggtatcaacggttacaaatacgccagcaacaaatacggcgaacgcagcatcatccccaacgccattcccaacgcctacgaattttcccgcacgggcgcctatccgcagccatcatcgtttgcccaaaccatcccgcaatacggcaccaggcggcaaatcggcggctatctcgccacccgtttccgcgccgccgacaacctttcgttgatactcggcggcagatacagccgttaccgcaccggcagctacgacagccgcacacaaggcatgacctatgtgtccgccaaccgtttcaccccctacacaggcatcgtgttcgacctgaccggcaacctgtcgctttacggctcgtacagcagcctgttcgtcccgcaatcgcaaaaagacgaacacggcagctacctgaaacccgtaaccggcaacaatctggaagccggcatcaaaggcgaatggcttgaaggccgtctgaacgcatccgccgccgtgtaccgcgcccgtaaaaacaacctcgccaccgcagcaggacgcgacccgagcggcaacacctactaccgcgccgccaaccaagccaaaacccacggctgggaaatcgaagtcggcggccgcatcacgcccgaatggcagatacaggcaggttacagccaaagcaaaacccgcgaccaagacggcagccgcctgaaccccgacagcgtacccgaacgcagcttcaaactcttcactgcctaccactttgcccccgaagcccccagcggctggaccatcggcgcaggcgtgcgctggcagagcgaaacccacaccgaccctgccacgctccgcatccccaaccccgccgccaaagcccgcgccgccgacaacagccgccaaaaagcctacgccgtcgccgacatcatggcgcgttaccgcttcaatccgcgcgccgaactgtcgctgaacgtggacaacctgttcaacaaacactaccgcacccagcctgaccgccacagttacggcgcactgcggacagtgaacgcggcgtttacctatcggtttaaataa

SEQ ID NO: 54292 - DNA, 1257 bp, Neisseria meningitidis
atgaacgccgcacaactcgaccataccgccaaagttttggctgaaatgctgactttcaaacagcctgccgatgccgtcctctccgcctatttccgcgaacacaaaaaactcggccgccaagaccgccacgaaatcgccgaaactgcctttgccgcgctgcgccactatcaaaaaatcagtaccgccctgcgtcgtcctcacgcgcagccgcgcaaagccgcactcgccgcactggttctcggcagaagcaccaacatcagccaaatcaaagacctgcttgatgaagaagaaacagagttcctcggcaatttgaaagcccgcaaaaccgagttttcagacggtctgaataccgccgcagaattgccgcaatggctggtcgaacaactgcaacagcattggaacgaagaagaaatcctcgccttcggacgcagcatcaaccaagccgcgccgctcgacatccgcgtcaataccttgaaaggcaaacgcgataaagtgctgccattgttgcaagccgaaagtgccgatgcggaggcaacgccttattcgccttggggcatccgcctgaaaaacaaaatcgcgcttaacaaacacgagctgtttttggacggcacactggaagtccaagacgaaggcagccagctgcttgctttattggtgggcgcaaaacgcggcgaaatcattgtcgatttctgtgccggcgcaggcggcaaaaccctcgccatcggcgcgcaaatggcgaacaaaggcagaatctacgccttcgacatcgccgaaaaacgccttgccaacctcaaaccgcgcatgacccgtgccggactgaccaacatccaccctgaacgcatcagcagtgaacacgatacccgtattgcccgactggcaggcaaagccgaccgcgttttagtggatgcgccctgctccggcttaggcacgctgcgccgcaatcccgacctcaaataccgccaatccgccgagaccgtggccaaccttttggaacagcaacacagcatcctcgatgccgcatccaaactggtgaaaccgcaaggccgcttggtgtacgccacctgcagcgtgttgccggaagaaaacgagctgcaagtcgaacgtttcctgtccgaacatcccgaatttgaacccgtcaactgcgccgaactgctgcaaagcctgaaggttgatttggataccggaaaatacctgcgcctcgattccgcccgacaccaaaccgacggcttcttcgccgccgtattgcaacgcaaataa

SEQ ID NO: 54293 - DNA, 1485 bp, Neisseria meningitidis
atgccgtataatcaagcccctgattttttatgcgccgacactatgcatccgacctattccgccgtacaggcgcggctgctcgaagccaaccgcctttcccccgaactgctcgccaaaagcctgtgcatcatcggcgcgcaccacgtcgattacgccgacatctactgccagcgcaccgcttatgaaagctggcatttggaagagggcatcgtcaaatcgggcagcttccaaatcaatcagggcgtgggcgtgcgcgccgtttcgggcgataaaaccgcctttgcctacgccgacagcctgtgcatcgattcgataaaccgttccgcccgcgccgtccgcgcgattggggcggcaggcggcaaggtgtccgccaaaatgccgtctgaaacgcgcggcaagccggtttgttccgcgtccgaccccattgccggcctcgattccgccgccaaagtcgcgctgttgaacaaagtggaagcaatcgccaaagccgccgatccgcgcatcgtgcaagtgatggccggtttgacctgcgaatacgacatggtttacctcgcccgtctggacggtaaacacgctgccgatatccgcccgatggtgcgcatgaacgttaccgttatcgccaaacagggcgaacgccgcgaacagggcagcgcgggcggcggcggacgctacgacttggcttatttcgatgaaaacttggtgcatcggtttgtcgattccgccgtcaaacaagccctgaccaatcttgaatcccgtcctgcgcctgccggcgaaatgaccgtcgttttgggcaacggctggccgggcgtgttgctgcacgaagcggtcggacacggtttggaaggcgatttcaaccgcaagggaaccagcgtcttttccggccgaatcggcgagcgcgtcgccgccaaaggcgttaccgttgtggatcaaggcgatattgccggccggcgcggttcgctcaacatcgacgacgaaggcaacgaaacccgccgcaccgtattgattgaagacggcatcttggtcggttatatgcaggacgaaaccaatgcccgcctgatgggcacgcaatcgaccggcaacggccgccgcgaaagctacgcctccgtccctatgccgcgcatgaccaatacctttatggaaaacggcggctacgaacccgacgaaatcatcgcgtccatcgacaaaggcatttacgccgtcaacttcggcggcggacaggtggacattaccagcggcaaattcgtgttcagcgcgtccgaagcgtggtgggtggagggcggcaggctgcaataccccgtcaaaggcgcgaccattatcggcaacggccccgaagtgctgaaacacgtttccatgataggcaacgatactgcgctcgacagcggtgtcggcgtgtgcggcaaagaagggcagagcgtccccgtcggcgtggggcaaccgactttgcggattgatgccggactgaccgtcggcggcagcgcaatctga

SEQ ID NO: 54294 - DNA, 1035 bp, Neisseria meningitidis
atgagcctgccagcaatggatgccggtatttatctcgaagaaaccgctccgcacgccctgattgaacacaataatattttggataattcggtcggcgtctatctgcatggttcttccgaagcgatggtgcgcgagaacaaaatcgtcggcgacgcgactttgcgcgtgaacgagcgcggcaacggcgttaccgtttggaacgcgcccggtgcgcaagtcgtcggcaacgacatttccaaagggcgggacggcattttttccaacaccagcacatataacacctacaaaaacaaccgcttcagcgatttgcgtttcgccgtccactatatgtacaccaacgacagcgaaatcagcggcaatatttccgtgggcaacaatatgggctatgtgctgatgttttccgagcggctcaaagtattcgacaatatcgccgtcggcagccgcgatcagggcattatgctcaactatgtcaactattccgatattcacgacaacattatcaacaaagcgggcaagtgcgtatttgcctataatgccaactacgataaacttttcgccaatcattttgaaaactgccaaatcggcatacactttaccgccgccatcgaaggcacgtccctgcacgacaattccttcatcaacaacgaaagccaggtcaaatacgtcagcacgcgctttctcgactggagcgagggcggacacggcaactattggagcgacaacagcgcgttcgatttgaacggcgacggcttcggcgacagcgcgtaccggcccaacggcatcatcgaccaaatcatctggcgcgcgcccgtatcgcgtctcttgatgaacagtcccgcaatcagcatcgtcaaatgggcgcaggcgcagtttcccgccgttctgcctggcggcgtggtggacagcaaaccgctgatgaagccttatgcccccaaaattcaaacccgttatcaggcgatgaaggacgagttgctcaaagaagccgaaacgcggcagtcggaatggggcagggcggaaaacgggtctttgaactag

SEQ ID NO: 54295 - DNA, 1128 bp, Neisseria meningitidis
atgacccttatcaaacccgtcattgccgcgctcgcactcatcgggcttgccgcctgctccggcagcaaaaccgaacagcccaagctcgactaccaaagccggtcgcaccgcctgatcaaacttgaagtcccacccgatttgaacaaccccgaccaaggcagcctctaccgcctgcctgccggttcgggagccgtccgcgccagcgatttggaaaaacgccgcacacccgccgtccaacagcctgccgatgccgaagtattgaaaagcgtcaaaggtgtccgcctcgagcgcgacggcagccaacgttggcttgtcgttgacggcaaatcccctgccgaaatctggccgcttctgaaagccttttggcaggaaaacggcttcgacatcaaatccgaagaacccgccatcggacaaatggaaaccgagtgggcggaaaaccgtgccaaaatcccccaagacagcttgcgccgcctattcgacacagtcggtttgggcggcatctactccaccggcgagcgcgacaaattcatcgtccgtatcgaacagggcaaaaacggcgtttccgacatcttcttcgcccacaaagccatgaaagaagtgtacggcggcaaagacaaagacacgaccgtatggcagccctccccgtccgatcccaacctcgaagccgctttcctgacgcgctttatgcaatatttgggcgttgacggacagcaggcggaaaacgcatcggcaaaaaacccgaccctgcccgccgccaacgaaatggcgcgtatcgaaggcaaaagcctgattgtctttggcgactacggcagaaactggcggcgcaccgcgctcgccctcgaccgcatcgggctgaccgtcgtcggtcaaaacaccgaacgccacgctttcctggttcaaaaagccccgaacgaaagcaatgcagttaccgaacaaaaacccggcctgttcaaacgcctgctgggcaaaggcaaagcggagaaacctgccgaacagccggaactgattgtctatgccgagcctgtcgccaacggctcgcgcatcgtcctgctcaacaaagacggcagcgcatatgccggcaaagacgcatccgcattattgggcaaactccattccgaactgcgttaa

SEQ ID NO: 54296 - DNA, 417 bp, Neisseria meningitidis
atgaaaacatcgacggtcgtttttggcggattttttatggcagacaacagggagcgaatccaaatccccgttttggaaaatcctggcattagggaaatcaatcactttttttccgtatcaaattttgagaaaaaagccggcgtccttgttttcagaattattcctgaacccaaatttggcaataccgaattaactatctattttgaagaaggatgttatttgccaatgattcaaacaattttagaagatggggatattgaagtcaaaaaccttaaaacagaaaattatagtggaaatacaatggaaatttggggagacttctaccctattgagcatatctctaaaaatatttctacaattcaaaatataatttctgaatttatgatacaaaaacaaacaccggcaccaataatttga

SEQ ID NO: 54297 - DNA, 192 bp, Neisseria meningitidis; identical to SEQ ID NO: 43532

SEQ ID NO: 54298 - DNA, 1836 bp, Neisseria meningitidis; identical to SEQ ID NO: 44240

SEQ ID NO: 54299 - DNA, 810 bp, Neisseria meningitidis
atgaccgccctcccccgttactccgttttcggcaaccccgttgcacacagtaaatctccgcagattcatcggcaatttgcccttcaggaaggcgttgacatcgaatacggacgcatttgcgccgacatcggcggtttcgctcaggcggtttcgacattttttgaaacaggcggttgcggggcaaacgttaccgtaccgttcaaacaggaagcgtttcatctggcggacgaacattccgaccgcgctttggcagcaggtgcggtcaatacgctgattctgttgaaaaacggcaagctgcgcggcgacaatactgacggtatcggtttggccaacgacatcacgcaggttaaaaacattgccatcgagggcaaaactattttacttttgggcgcgggcggtgcggtgcgcggcgtgattcctgttttgaaagaacaccgtcctgcccgtatcgtcattgccaaccgtacccatgccaaagccgaggaattggcgcagcttttcggcattgaagccgtcccgatggcggatgtgaacggcggttttgatatcatcatcaacggcacatccggcggtttgagcggtcagcttccggccgtcaatcctgaaattttccgcgactgccgccttgcctacgatatggtgtacggcgaagcggcaaaaccgtttttggattttgcccggcaatcgggcgcgaaacaaaccgccgacggactgggtatgctggtcggtcaggcggcggcttcctacgccctctggcgcggatttacgcccaatatccgccctgttatcgaatacatgaaagccatgtaa

SEQ ID NO: 54300 - DNA, 603 bp, Neisseria meningitidis
atgttcaacataccggctgttgccgtttcctatctgatcggctcactttctttcgccgtcatcgtttccaagtattacgggatggacgacccgcgcacctacggatcgggcaatcctggggcgaccaatgttttacgcagcggcaaaaaaaaggcggccgcgctgacgctcttgggcgatgccgccaaaggtttagttgccgttttgcttgcacgcgtgcttcaagaaccgctcggtttatccgacagcgcaatcgctgccgtcgcactcgccgcgctggtcgggcatatgtggccggtgtttttcggatttaagggcggcaaaggcgtggcaacggcattgggcgtgcttctggcactctctcccgcaactgccttggtctgcgcgttggtttggcttgttatggcattcggcttcaaggtgtcctcccttgccgcattaaccgccacaatcgccgccccccttgccgcactgttttttatgccgcatacttcttggattttcgcaaccctcgcaatcgccatattggtgttgctccgccacaaaagtaatatcgtcaagctgctcgaaggcagagaaagcaaaatcggcggcagccgctga

SEQ ID NO: 54301 - DNA, 1008 bp, Neisseria meningitidis
atgagcaccttcttccggcaaaccgcacaagccatgattgccaaacacatcgaccgtttcccactattgaagttggagcaggtgattgattggcagccgatcgaacactacctgaaccgtcaaaaaacccgttaccttagagaccaccgcggccgtcctgcctatcccctgctgtccatgttcaaagccgtcctgctcggacaatggcacagcctctccgatcccgaactcgaacacagcctcattacccgcatcgacttcaacctgttttgccgtttcgacgaactgagcatccccgattacagcaccttatgccgctaccgcaactggctggcgcaagacgacaccctgtccgaattgctcaaactgattaaccgacaactgaccgaaaaaggtttaaaaatagagaaagcatccgccgccgtcattgatgccaccattattcagactgccggcagcaaacagcgccaggcgatagaagtcgacgaggaaggacaagtcagcggccaaaccacaccgagtaaagacagcgatgcccgttggataaagaaaaacggcctctacaaactcggttacaaacaacatacccgtaccgatgcggaaggctatatcgagaaactgcacatcacccccgccaatgcccatgagtgcaaacacctgtcgcctttgctggaaggactgcccaaaggtacgaccgtctatgccgacaaaggctacgacagtgcggaaaaccggcaacatctggaagaacatcagttgttagacggcattatgcgcaaagcctgccgcaaccggccgctgtcggaagtgcaaaccaaacgcaaccggtatttgtcgaagacccgttatgtggtcgaacaaagcttcggtacgctgcaccgtaaattccgctacgcccgggcagcctatttcggactgattaaagtgagtgcgcaaagccatctgaaggcgatgtgtttgaacctgttgaaagccgccaacaggctaagtgcgcccgctgccgcctaa

SEQ ID NO: 54302 - DNA, 684 bp, Neisseria meningitidis; identical to SEQ ID NO: 46781

SEQ ID NO: 54303 - DNA, 1032 bp, Neisseria meningitidis; identical to SEQ ID NO: 48687

SEQ ID NO: 54304 - DNA, 468 bp, Neisseria meningitidis; identical to SEQ ID NO: 50927

SEQ ID NO: 54305 - DNA, 855 bp, Neisseria meningitidis
atgaaaatcgtcctgattagcgggttgtccggttcgggcaaatccgtcgcactgcgccaaatggaagattcgggttatttctgcgtggacaatttgcctttggaaatgttgcccgcgctggtgtcgtatcatatcgagcgtgcggacgaaactgaattggcggtcagcgtcgatgtgcgttccggcatcgacatcggacaggcgcgggaacagattgcctctctgcgcggactggggcacagggttgaagttttgtttgtcgaggcggaagaaagcgtgttggtccgccggttttccgaaaccaggcgaggacatcctctgagcaatcaggatatgaccctgttggaaagcttaaagaaagaacgggaatggctgttcccgcttaaagaaatcgcctattgtatcgacacttccaagatgaatgcccaacagctccgccatgcagtccggcagtggctgaaggtcgaacgtacagggctgctggtgattttggagtccttcgggttcaaatacggcgtgccgaacaacgcggattttatgttcgatatgcgcagtctgcccaacccgtattacgatcccgagttgaggccttacaccggtatggacaagcccgtttgggattatttggacggacagccgcttgtgcaggaaatggttgacgacatcgaaaaatttctgacgcattggctgccgcgtttggaggatgaaagcaggagctacgttaccgtcgccatcggctgtaccggcgggcagcaccgttccgtctatgttgtcgaaaaactcgcccgaaggttgaaagggcgttatgaattgctgatacggcacagacaggcgcaaaacctgtcagaccgctaa

SEQ ID NO: 54306 - DNA, 966 bp, Neisseria meningitidis
atgttacgtttgactgctttagccgtatgcaccgccctcgctttgggcgcgtgttcgccgcaaaattccgactctgccccacaagccaaagaacaggcggtttccgccgcacaatccgaaagtgcgtccgttaccgtcaaaaccgcgcgcggcgatgttcaaataccgcaaaaccccgaacgtatcgccgtttacgatttgggtatgctcgacaccttgagcaaactgggcgtgaaaaccggtttgtccgtcgataaaaaccgcctgccgtatttagaggaatatttcaaaacgacaaaacctgccggaactttgttcgagccggattacgaaacgctcaatgcctacaagccgcagctcatcatcatcggcagccgcgccgccaaagcatttgacaaattgaacgaaatcgcgccgaccatcgaaatgaccgccgataccgccaacctcaaagaaagtgccaaagagcgcatcgacgcgctggcgcaaatcttcggcaaacaggcggaagccgacaagctgaaggcggaaatcgatgcttcgtttgaagcggcgaaaactgccgcacaaggcaaaggcaaaggtttggtgattttggtcaacggcggcaagatgtccgccttcggcccgtcttcacgactgggcggctggctgcacaaagacatcggtttgcccgctgtcgatgaatcaattaaagaaggcagccacggtcagcctatcagctttgaatacctgaaagagaaaaatcccgactggctgtttgtcctcgaccgaagcgcggccatcggtgaagagggtcaggcggcgaaagacgtgttgaataatccgctggttgccgaaacaaccgcctggaaaaaaggacaggtcgtttacctcgttcccgaaacttatttggcagccggcggcgcgcaagagctgctgaatgcaagcaaacaggttgccgacgcttttaacgcggcaaaataa

SEQ ID NO: 54307 - DNA, 492 bp, Neisseria meningitidis
atgaattccctctttgtggacaatactgttttcattacacggctgaaagccgggcatatcggcaggttggttcaggcgttgtttgaggagtggcacggatttgaaccgtggtcttctgtggataagattcatgcctattacggcaggtgtttgaaggatgacgaactgccgctggcttttgcggctgtggatgattccggaaccctgttgggttcggctacggtcaagcggcatgatatggaaagttttccacagtatgaatattggttgggtgatgtctttgttttacctgaatatcgcggaaaaggcattggcaggaggctggtcgcccactgcataggcgcagcgcgttcgctggggataaagttcttgtatctttatacgcctgatgtgcaaatattttatgaatcattcggctgggcggttgtcgggcgacatttccataacggtgaatgggttacggttatgcgtttggatatggataaggtttaa

SEQ ID NO: 54308 - DNA, 1254 bp, Neisseria meningitidis
atgcgtaaacccagaatcacctatttggatgtttgggcaaacgatgaaagaatcggtactttggaaaagggggccatgtatcggttcacatacgacaatcccaattcttcgttgctgggcctgcattatcaagacagaagcaaggtatatatcagcaacaacatgccgcatatctttgcacagtattttccggaaggctttttggccgcacacatcacaagcaaatatgcttttcatgatgcgccttttgaagacaatgagatgctgcgcttggcaattctgggcagagaggctttgggtcggatacatgtgcgctgtaatgacccgctttttaatgaatggattgacgggttggagatgaaaaatccaagaatattgactgaacgggatttgctgggcataaatgcccgacaggtttttcagcaatatatggcagaaatcttccatcacggccgtttcgtcagtgtatccgggatacagcagaagatgtccttagatgccatcagcagaaataccaagcaaactgcctcatatattgccaaaggttttgatgcatccgaatatccttgcttggctgccaatgaatttttatgcatgcagaccatcaaacaagccggcattgccgttgcacagaccagcctgtcggaagattcatcagtcttattggtacgtcggtttgatgtcagtgaacaggggtatttcttaggcatggaagactttaccagtctgcgtcagtattcagcagaagataagtataaaggcagttatgcggctattgcacagattatccgacagatatccggcagacccgatgaagatttaatccatttctttaaccaacttgccgccagttgcatattgaaaaacggcgatgcacacctcaaaaatttttcagtactctatcatgacgaatacgatgtacgtcttgcacctgcctatgatgtattggatacatcaatatacagggttggaacacaaggaatttttgatgcttatgacgatacgctggcattaaacctgactaaccacggtaagaaaacatatccttccaagaatacattgttggattttgctgagaaatattgcgatttgggaagagaagatgcatcctttatgatagatacaatcgttcaagctaaagaacaggttcttgttaaatactcggatgtattgcgtgagaatgaatggttggcgcagaagtggcattttatcccggatgaaaatgaagaaggtctaccgtttacattccggtag

SEQ ID NO: 54309 - DNA, 1005 bp, Neisseria meningitidis; identical to SEQ ID NO: 36487

SEQ ID NO: 54310 - DNA, 1746 bp, Neisseria meningitidis
atggaacggcagacagatgaatttgcccaagcggcggcaagggcggcaatctggtttttggcacgctatgcgggttcaggcagcgaagtgcttgcaaactgcaccgaacgcctgtttcaggcattgcaaaacggtcattcgtttatccgtttgagcggtggcgaggctgacgcgctgtcggcactcgcacccgtggtcggaacatccgccgcgcctttgattttggaaggcagaaggctgtttttgggcaggatgtggcagttggaatacgatttggctgccgagataaaacgcttggcggcagccggcacgtccgcccccgacgcggcaggcgcgcggcaaaacctcgcaaaatggtttcaaggcacgggcagcgaagggcagcgcgatgccgccgccttggcactgttgcagtcttttatggtgattaccggcgggccaggaacgggcaaaacgacaacggttgccaaactgctggcgctgatttgcggtgaagacgaaaatcttcccaacatcgcgcttgccgcaccgacaggcaaagcggcggcacatatggcgcgcgcgctgcaccgtgcaatcaacggttttgacgcgccggaggccatccgccgccatttgctcaaactggaagggcaaaccgtccaccgactgctgaagctgcgcccgcccaaaatgcaggcggcgttcaaccctgtttacccgctgccgttggacgtattggttatcgatgaagcctccatgttggataccgcattgatgttgcaacttttaaaagcggtcaaaaccggcgcgcgcgtgattctgctgggggatgaaaaccagctcccgtccgtcggaatcggggcggtgctgtccgttttgtcgcacaaaaccgttttggacggagaaacgcaccaaaggctggccggcttccttccggaacacggtttcagcgtcagcgcaaatccgcccgtgttggcgcaaaacaccgcccatctgtcgttcagccaccgcttcggcgacaacagtggcatcggctgccttgcccgtgccgccgtatcgggcgatgagggggcgtgggcattgtttgaccggtttccggacgaactggaacattcggaatgcagtccgaacgctcgagtcgaaaggttgtaccgggcgcacaaagcctattggcaggcggtaaaagacggcaatatcgaagccgcatacgcaggcatctcggatatcgtcgtcctcgcggcgtggcggcaggatgcggaagacttcaacgaagcctattgcagccatgtacgccgcaaaatgaacataccggaacatcaggcctatttcgccggagaaccgattatgatcagacagaacgactacgcgcttgaactgttcaacggcgacatcggactgattatggaagatgtcggacggcagggcagccttgccgcctattttgccgatgcggacggatttaaaaaggtagcggtaagctgcctgcccgaatttgaacccgcattcgccatgaccgtccacaaaagccaaggttcggaatatcgggaagtctggctgctgccgccttccgccgcaccttcggacgaaggggacgatgcattgtctggattgagtaaggagctgttatataccgccattacccgcgcgagagagaagttcgtattcttcggcggggaagaagccttccggcaagctgccgccaccgtcaaaacgcgtcagacggcgttgggcagtatgcttgagcgggtattttcacaagaataa

SEQ ID NO: 54311 - DNA, 3615 bp, Neisseria meningitidis
atgtctgcacccatccaagcatttgacccgctgaccgtccccatttccggcaccaacctgattgaggcctctgccggcaccggcaaaacctacggcatcgccgccctgtttacgcgcctgatcgtattggaacaaaaaaacgtcgagcgcgtattggtcgttaccttcaccaaagccgccaccgccgagttgaaaacacgcctgcgcgcacgtttggacgatgtgttgcaggttttagaaagtaaagaaattgccaaacttggagacgacacgctttcagacggcatcgccgcctactgcgccgaacaccacaaaggcgacaccttcctgcccgcactcttaaaacaggctttgcaaaaagagggccggacgcgtctgattgtccgcctcaaggccgccatcgggcaattcgacaacgccgccatctataccatccacggcttctgccaacgtatcctgcgcgactacgccttcttgtgccaagcaccgttcgatgtcgaactgaccgaagaagacggcgaccgcctgcttatcccggcgcaagatttttggcgggaacgcgtcagcaatgatccggtgcttgccgcattggcgtttaaacgcaaagctgtgccgcaaaccgtccttgcccaaatttcgcgctatctttcccgcccgtacctgaatttccgccgtccgcaggcggatttgaaacaggcgcagcgcaacgccgaaacctcatggcaaaccatctgccgcctgctgcccgagctggaagccggcttttggcgcatccatcccgacctcaacggcaacagttaccgcaaaaacagcttcggcaacctttttaaagaactggcacaaaaatccgccgccggacaactgccctttctggacaaagacacgcacgacagactcttgaaacttgcgtccgacaaactcgaagccgcccttaaaaaaggcaaaacgcccgatgcggcagcatttgccgaattgcagaaactggcagacttcgggcgcgatttgaacgcactcgaagaagcggaagaagcaacaatgatccggctgcaactggatttaatcggatacctcaaccgcagccttgccgagatgaaaaaatcgcgccgcgaacgcggtttcgacgacctgctgctcgatgtccacaccgcgctgaccgacaatccgcacgccgaaaccctcgcccgcgccgttgccgaaaactgggaaaccgcgctgatcgacgagttccaagacaccgacccgctgcaatatgaaatcttccaaaagattttcattgcccaaaaccgcccactgtttctcgtcggcgatcccaaacaggcgatttacagctttcgcggagcggacatttacgcctacctgcaagccgccggagacgcgcggcaccgctacacgctcgccaccaactaccgcagccacgccgcgcttatcggcagcataggcgcgctgttccgcctcaaagaacgcccgttcgttttggaaaacatcggctattcggaagtcggtgcggcgcgtgccgaaagcaggttgtcccccgaacgtcctgccgtacaggttcgttggctgcacgaaaacgacaatgaaaaagccaacaaagacgttttgcgccgccgtgccgccgactattgcgccgacgaaatcgcccacgcgctcaacgaagccgccggaggccgtctgaatttcaaaggctgcccgttgcagtcgggcgatattgccgtgctggtacgcacgcacaacgaggcggtgatggtttccgccgccctgaaaaaacggcaggtgcaaagcgtcctgctttcgcgcgaatctgtgttcgcctcgcccgaagccgccgccctgtccgcactcatcggcttctggctcgaaccgcgccgcgccggaacgctgcgctttgtcctgacaagcggcatattcggttatgacgcgcagcaattgcacgacttcaaccaaaacgaaagcgagattttgcattgggcggaatctgcccgaaccgcactcgacaactggaatcaatacggcattttcgccgctatgcagcaattttcccaaacacacggcatcgaaacgcgcctcttaagccggaacaacgggcgcagcctgaccaactatttccaactgctcgaactgcttgccgccgaagacgcgcaaaaccgcaacccagccgcgctgcacaaatggttgcgcgaccaaatcagcctggccggcaacaacagcggcgacaaccgcgccatccgtctggaaagcgacgaagatttggtcaaaatcgttaccatgcacgcctcgaaaggtttgcagtatccgctggtgtactgcccgtttgcgtgggacgcgcaagataccgggccgtccgactggcaaatcctccaccaaagcgcaaaccgaaccgaactgttggcaaaggcgcaactgtcggaagacgaacagaaacaatacgccgatgaagaaatggcggaacgcctgcgcctgctttatgtcgcactgacgcgtgccgaggaacagctcaacatctacgccgcgtactccaccaatactgccgacaaccccctcgcctacctgattgaaggctcgccccaagacagccgtgaaaccgtccgccgtgcctatgcgtgtgaaaaagacggcatcgcgatgctcaaacgcaactggcggcgcgtggcggacaacgccccttccggcacaaatttcgccttcaccgaaaatgcgccgccccctgccgcctatcgcagcaacgccggtcaaaccgccgaatttgccgcaaacagcattcccgaacgcggattccgatttgtccgccacactagctttaccgccttaagccgccatacccaaacgcccgacggcggcgaagaagatgcctgcccgtccttggatgccgccgaaacctcggtgccggcgatgccgtctgaaacgccgacggcttcagacggcatatcgatacacgattttccgaaaggcacgcaggcggggctgtgcctgcacgaaattcttgaagatttcaaattcggacaagcagccgccggacaggaaaccctcattgccgacaagctgaaaaaatacggttttgaagaaatatggctgcccgccgttgccgaaatggcggaagcctgccgcaaaacgccgctgacgggggcatacgacctgtccgacatctcacccgagtgccgctgtcccgaaatgggctttaccctccacaccgaagacttcagcctcaaacgcctgcgcgactggtttgcccgcgacgacatcaggctgcccgaagtctgccgtgccgctgccgaaacgctcgacttccacaccgtcaacggctttttaaacggctttgtcgatatggtctgccaagaccccgacggcaatatctgcgtcatcgactacaaatcaaaccacctcggtacggacgcatccgcctacacgcaacaggcaatggacgaagccgtcgcacaccaccactattaccttcaggcactgatttacgccgttgccgccgcacgctacttcaagctgcgcggacaaccgcccgccgccgtttccgtccgctacctgtttttgcgcggattggatggcaaaggcggcggcgtttggcgttgggacatagatgccgccgctttggaacagataaaataa

SEQ ID NO: 54312 - DNA, 1587 bp, Neisseria meningitidis
atggcacttttcctcagcatattccccatcgtcctgctgatttggctgatggtgaaaaaaaacagtatgccctcctacgtcgcactgccgattaccgcagtgctgatttacgccatcaaacttttctacttcggcgatgcgggcatgctgctcaacgccaccgccgcttccggcctcgtcaaaacgctcacgccgattaccgtgattttcggcgcgattatgttcaaccgtatgatggaaaccacgggctgcattgatgtcatccgcaaatggctggcgaccatcagccccaaccccgtagcgcaactgatgattatcggctgggcttttgcctttatgattgaaggcgcatccggcttcggcacgcctgccgcgattgccgcgccgattctgatgagcttgggcttcaacccgttgaaagtggcgattttcactttggtgatgaactccgtccccgtctctttcggcgcggtcggtacgccgacctggttcggtttcgcaccgctgaacctgagtgccgaagacatcctcgccatcggcaggcagaccggcgtaatgcacttcttcgcaggtttcgtcatccccgtcatcggcttgggcttcatcgtaccttggtctgaaatccgcaaaaacttgggcttcgtcgccattgccgtcttctcctgcaccattccttatgtcgcattggcgatggtcaacgaagaattcccgtcgctcgtcgccggcgcgatcggcctgatggtgtccgtattcgccgccaaccaaggctggggcttgagcaaagaccacgccaaagacccgaatgccgaaaaagtgccgttcgcccaagtcgccaaagcactcgcccctttgggtatgctgatcggcatgctggtggttacgcgcatcaaacagctcggcatcaaaggcattttgaccagcaaagaagaatggttcagcttccaactgccgtttgatttgtccaaaatcaccgtcagcgactccctgacgattaccttcggcaatattttcggacaagatgtcagcgcgtcttaccaaacgctgtacgtcccggcttggattccgtttgtgctgaccgtttggatttgcatcctgctgtataaaaccaaattcaaagatgcctggacgatttattccgtaactttcaatcaaaccaaaaaaccgctgcttgccctgatgggcgcgctgattatggttcagctgatgctggtcggcggcgacaattcgatggtgaaaatcatcggtaaggaatttgccgcaatggcgggcgaacactgggtttatttctcgccgtatctgggcgcgatcggtgcgttcttctccggctccaacaccgtgtccaacctgactttcggcccgattcagcagcaaatcgccttggataccggcctgtccgttaccctgattctggcgttgcagtccgtcggcggcgcgatgggcaatatggtgtgcctcaacaacatcatcgccgtatgtaccgtattggatgtgaaaaattccgaaggtgcgattatcaagaaaaccgttatcccgatggcgatttacggcgtgattgccgtcgtcgcggcaatgattttcttcctctag

SEQ ID NO: 54313 - DNA, 372 bp, Neisseria meningitidis; identical to SEQ ID NO: 37474

SEQ ID NO: 54314 - DNA, 879 bp, Neisseria meningitidis; identical to SEQ ID NO: 46918

SEQ ID NO: 54315 - DNA, 150 bp, Neisseria meningitidis; identical to SEQ ID NO: 41322

SEQ ID NO: 54316 - DNA, 828 bp, Neisseria meningitidis
atgcaaaaccacgttatcagcttggcttccgctgcagaacgcagggcgcacattgccgataccttcggcaggcacgacattccgtttcagtttttcgacgcactgatgccgtctgaagcactggagcaggcaatggcggaactcgtacccggtttgtcggcgcacccctatttgagcggagtggaaaaagcctgctttatgagccacgccgtattgtggaaacaggcattggacgaaggtctgccgtatatcgccgtatttgaggatgatgtcctgcttggcaaagacgcggagaaattccttgccgaagacgcttggctaaaagaacgctttgaccccgattccgcctttatcgtccgcttggaaacgatgtttatgcacgtcctgacctcgccctccggtgtggcggactactgcgggcgtgcctttccgctgttggaaagcgaacactgggggacggcgggctatatcatttccaaaaaagcgatacggtttttcctgcaacatttcgtaatgttgcagccggaacagataaaacctatcgacttaatgatgttcagtgattttttcgataaggaggggatgcctgtttatcaggtcagtccggccttatgcgcccaagagctgcattatgccaagtttcacgaccaaaacagcgcattgggcagcctgaacgaacacgaccgcctcctgaaccgcaaacagcaaaggcgcgattcccccgccaacacattcaaacgccgcctgatccgcgccttgaccaaaatcagcagggaaagggaaaaacgccggcaaaggcgcgaacagttcattgtgcctttccaataa

SEQ ID NO: 54317 - DNA, 1842 bp, Neisseria meningitidis
atgcagacaaattatttgtctgaaacggattcgattatgaaaaaactgatttgcctgttcgccgtatttttgatgttgtgcggacgagctttcgcgctggatgcgaacgatctgctgccgccggaaaaggcattcgtgccggagcttgccgttgccgacgacggtgtgaacgtccgtttcaagattgccgacggatactatatgtatcaggcgaaaatcgtcggcaagaccgatccggcggatttgttgggacagccttctttcagcaagggcgaagagaaggaagacgagtttttcggcaggcagacggtttaccatcacgaagcgcaggttgcctttccttatgcaaaggctgtcggcgaaccgtataaattggttttgacctatcagggctgtgccgaagccggcgtgtgctatccgcccgtggataccgagtttgatatttccggcaacggcacttaccatccgcaaaccgacgaaccggcatccgccaaagaccgctttttgcagccttcctctcaaaacggcagcggggcgctgccgcccccgaagggggatgagggcggcgacagccgtttcaagctgtcttgggatacgctcaacgccaatcttttggcgttttttctcgccggtttgggtctgagttttaccgcctgtatgtatcccctgttgccgattgtttccagtattgtggtcggcgacaaaaaggcgggcaaggcgcgggcgtttgtgctgtccgtcgtttatgttcagggtttggctctgacttatacgctggtcggcattgttgccggactgacgggcgcactgctgaccgtatggttgcagcaggcttgggtcgtgttggcggcatcggctttgatggtcgtcttggcactgtctatgttcgggctgttcaacatccagcttcccaacgccgtgcagtcgtattttcagaatcaaagcagcaggctttcaggcggtaaaatcgtttccgtctttattatgggcatattgtccgcgctgattgtcgggccgtgcgtcgccccgccgctggcatttgctttgggctacatcggtcagacgggcgatgcggttttaggcggtttggcactttacactttggcgttgggcaccggcgttccgctgattgccatcggcacgttcggcgggcatatcctgcctaaggcaggcgattggatgaatgccgtcaaatacgctttcggctttatcctgcttgccgtcgccgtttacctcgccacgccgcacttgccctattatctcgtcgtcgcgctgtacacgctgctgatgctggttcctgcctgtatgctgctggtcaacggacgcaggcagaaacgccgtccgaaagctgtggcattcgcattgggcagcatattgctgataggcggcgcgtggttcggctggcagggcgcaaacggcaaaacgaccgcgctgcaccatttcctgaccctcaatccgccggccgaagcaggcaaatcttcggaacacggcaaaatgtttgccgatactgccgcgctgaaggcagcgatggatacggcgttgaaagaacatcccgacaaacccgtcgttttggatttttatgccgactggtgcatttcctgcaaagaaatggcggcttacacgctcaatcagccggaagtgcatcaggcagtcgatatggaacgctttttccaaatcgacgtaaccgccaacacgcccgaacatcaggcgttgttgaaagaatacggtctgttcgggccgccgggcgtgtttgtcgtccgctccgacggcagccgcagcgagccgctgctgggttttgtcaaagcagacaagtttatcgagtggtatgaacaaaaccgctga

SEQ ID NO: 54318 - DNA, 387 bp, Neisseria meningitidis
atggcatacagcgataaagtaatcgaccactacgaaaatccccgcaacgtcggtactttcgacaaaaacgacgaatctgtcggcaccggcatggtcggcgcgcccgcctgcggcgacgtcatgcgcctgcaaatcaaagtgaacgacgagggcatcatcgaagatgcgaaatttaaaacttacggctgcggctcggccatcgcttcgtccagcctgattaccgagtgggttaaaggcaaaagcctggatgacgcgctggcaatcaaaaacagcgaaatcgccgaggagttggaattgccgccggtaaaaatccactgctccatcttggctgaagatgcggtaaaagcggccgttgccgactaccgcaaacgtcaggaaaacagataa

SEQ ID NO: 54319 - DNA, 642 bp, Neisseria meningitidis
atgaccgatttccgccaagatttccttaaattctccctcgcccaaaatgttttgaaattcggcgaattcaccaccaaagccggacggcggtcgccctatttcttcaatgccggtctctttaacgacggcttgtccacgctgcaactggcaaaattttacgcacaatccatcattgaaagcggcatccgattcgatatgctgttcggtcccgcctacaaaggcattattttggcggcggcaaccgcgatgatgctggcggaaaaaggcgtgaacgtcccgtttgcctacaaccgcaaagaagccaaagaccacggcgaaggcggcgtgttggtcggcgcgccgcttaaagggcgcgtgctgattatcgacgacgtgatttccgccggcacatccgtacgcgaatcgatcaaattgattgaagcggagggtgcaacccccgccggtgtcgccatcgcgctcgaccgcatggaaaaaggcacgggtgaattgagcgcggttcaggaagtggaaaaacaatacggcctgcccgtcgcccccatcgccagcctgaacgatttgtttatcctgttgcaaaacaatcccgaattcggacagttcctcgaacccgtccgagcctaccgtcggcagtacggcgtagaataa

SEQ ID NO: 54320 - DNA, 1479 bp, Neisseria meningitidis
atgttcagcaagttaacccctttggctgaaaccggcatcccgaccctgtcgtgtgcaaacgcggcagggcgtttgttgcattcagacagccgccaaatcaaacaaggcgatattttcgttgcctgtccgggcgaatatgccgacggacgcagttatatccccgccgccgttgccaacggcgcggcttttgttttttgggacgacgatggcaaattcgcgtggaatcccgaatggaaagtccccaatcaaggcatcaaagatttgaaacaccgtgccggcatattggcggcgcaagtttacggcaacgtttcagacggtctcaaagtctggggcgtaaccggaaccaacggcaaaacctccatcacgcaatggctggcgcaagctgccgatttgttgggcgaaaaaaccgccattgtcggcacggtcggcaacggcttttggggtgcattggaagaaaccacgcataccacacccgcccccgtcgatgtccaaaccctgctctaccgtttccgtcaacaaggcgcaacagtcgccgcgatggaagtctccagccacgggcttgaccagtcgcgcgtcaacggcgtgtcattccgcagcgcaatctttaccaacctcacccgcgaccacctcgactaccacggcacgatggaagcctacggtgccatcaagtcgcgcctgttttactggcacggcttgaaacacgccgttatcaatgtagatgacgaatacggcgcggaactcgcaggtcgtctgaaaaaagactgccccgatttggccgtttacagttacggcttcagcgaacacgccgacatccgcattaccgactttaccgcctcttcagacggcatagaagccgtattccaaaccccgtggggcgaagggaaatgccacacgcgcctgctcggacggttcaacgcgcaaaatctcgccgcctgtgtcgctttgctttgcgccaacggctatccgctggataaggtattggatgtactggaaaaaatccgtcctgcttcaggccgtatggattgtattatgaacagcggcaaacctttggttgttgtcgattatgcccacacgcccgacgcattggaaaaagcactcgccaccttgcaggaaatcaaaccgcagggtgcggctttgtggtgcgtattcggttgcggcggtaaccgcgatcgcggcaaacgcccgctgatgggcgcggcagccgtacagggcgcggataaagtcgtcgtcaccagcgacaacccgcgcttggaaaatccgcacgacatcatcaacgacatcctgcctgccgttcccgcgcccgaatgcgtcgaagccgaccgtgccgccgccatccgttatgcggttgaacaagccgccgcaaacgacatcatcctgattgccggcaaagggcatgaaaactatcaggatgtacaaggcgtgaagcaccgtttttccgatcttgaaatcgtcggacaggctttgttaactcgtaaataa

SEQ ID NO: 54321 - DNA, 540 bp, Neisseria meningitidis; identical to SEQ ID NO: 36581

SEQ ID NO: 54322 - DNA, 1350 bp, Neisseria meningitidis
atggcaaaccaaaccaatagcaaagcaaaagcattgttaggctggatggacgctcgtttccccctgtctaaaatgtggaatgagcatttggctcaatactacgcaccgaaaaactttaatttttggtactacttcggctctttggccctgcttgtcctcgtgattcaaatcgtcagcggcattttcctgaccatgaactacaaacccgacggcaacctgaacgcctaccatctgcctgctgcctttactgcagtcgagtacatcatgcgcgacgtgtccggcggttggattatccgctacatgcattccaccggcgcatctttcttcttcattgttgtttatctgcacatgttccgtggtttgatttacggttcgtacaaaaaaccccgtgagttggtgtggattttcggttctctgattttcttggcattgatggcggaagcctttatgggctacctgctgccttggggtcagatgtccttttggggtgcgcaggtaattattaacctgttctccgccatccctgttatcggtccggatttgtccacttggattcgcggcgacttcaacgtttccgacgttaccctgaaccgcttctttgccctgcacgttatcgcggtacctctggtattgctcggcttggttgtggcgcacatcatcgccctgcacgaagtgggttctaacaaccctgacggcgttgaaatcaagaaaaacaaagacgaaaacggtatcccgcgcgacggtatcccattccatccttactataccgttaaagacgtcttgggtgtggttgtattcctgattgtcttctgtgccgtattgttcttcgcaccggaaggcggcggctacttcctcgaagcgccgaacttcgatgcggcaaatgcgctgaaaacacctccgcacattgcgccggtatggtatttcacaccgttctacgccattttgcgtgcgattccctcgttcttgggaacgcaggtttggggtgtaatcggtatgggcgcggcggtcgtgttgattgccctgctgccttggctggataggggcgaggtgaaatccgtccgttaccgcggcccgattttcaaaaccgcattggtcttgttcatcatttcctttatcggtttgggtattttgggcgcgatggtggcaaccgatacgcgtactttggtcgcgcgcatcctgtccttcgtctatttcgcattcttcctgggtatgccgttctataccaagctggataaaaacaaaccggttcccgaacgcgtaaccatgagcaccgccaaacaaaaaatcatgttctttgtttacgtcggcattaccgccgtgggtgcttacctgtttgcaaccaacatctga

SEQ ID NO: 54323 - DNA, 2439 bp, Neisseria meningitidis
atgacagaaaaatcccataaaaaaacagcaaaaggcagggcgggaagcccgtccccaacgtccgcacgcaacaagaaagccgacaacggcgcacggggcaataaagtttccgagcggctcaaggcggtcaaagagttgcagaaaaccgaaaccaaaaaggcgcgtcccgaacatgtcgtcaaccttatcggcgacgcactgtggctgatgggtttggcggcaaccctgtatttggcgatttccctgatcagtttcgatatgggcgatccgtcttggtcgcacagttcgccggttgtggaagatgtcgccaattggggcggactgttcggcgcgtatgttgccgatgtcggctattatcttttcggctggtcgttctggtggtggatagcggctgcctgcgtcgtgctgtataaaaatttccgcctgcacgcaaaacagacggaaaacgaggcatacaaccacaaaatcgctgccgccgcgctgtttgtcctgacggtcttcagccccgtcttggagtattttgtgctgggcggaaaatatgccgactccctgcctgtcggagcaggcggtatggtcggcatacgcgtcggcgcagtgtttgcgtggctgctggggaaatcgggcagcctgctgattatcttggttgttctgctgttgtcgttgtccctactggtgcagatttcatggctggaatttttgaacggtgcaggcagggcggttcaaaaccgcctgagtgccttatccggcaaggtcatggctttaggaaaacgccggccgaataccaaaacagacggtgtcgatacccaaaatacacggcgcatggtaaaagaagccaagaatattacggccaaacccgttgccttgcccgaaggcagcagcagcaaccgcaaatccgtcgcggtttccgtcgcgccgccgcccaaaattcaggtttctctgtttgaagatgacgaacctcggcaggcgggcgaataccacaagcctacattgaacctattgcggattcccgacagcgagcccgtcagcatcaatcccgccgaattggagcgcactgccgaactaatcgaatccaagctggcagaattcggcatcggcgtacaagtcgtatccgccacatccggccccgtcatcacgcgctacgaaatcgaacccgcgcaaggtgtcaaaggcagccaaattgttgccttgtcgaaagatttggcacgctctatgtcgctgcaatccgtgcgtatcgtcgaaaccatcgccgggaaaaacacgatgggcatcgagttgcccaacgacaaacgccaagacgtgatgttgagcgaaatcttgtcctcgcccgtgtttgccgaagccaaatccaagctgaccgtcgcgctgggcaaagacattgccggtacccccgttgtcggcgacttggcgaaaatgccgcaccttttggtcgccggtatgactggttcgggcaagtccgtcggcgtgaacggcatgattatgtctatgcttttcaaagctacgcccgacgaagtccgcttcattatgatagacccgaaaatgctcgagttgagcatttacgacggcattccgcacctgctctgtcccgtcgtgaccgatatgcgcgaagcagggcaggcgttgaactggtgcgtcgccgaaatggaaaaacgctaccgcctgctttcccacgccggtgtacgcaatctggaaggcttcaaccaaaaagtcgaagccgcaaaagcggcaggcaagcctttgcttaatccgttcagcctgaaccccgacgagcccgagccgctggaaaaactgccgttgattgtggtcgttatcgacgaacttgccgacctgatgatgaccgaacgcaaagccgtcgaacagcaaatcgcccgtctcgcccaaaaagcgcgcgccgccggtatccatatgattgtcgcgacccaacgtcccagtgtcgatgtcgttaccggcctgattaaagccaacatcccgacgcgtatggcgtttaccgtgcaaagcaaaatcgacagccgtaccatcctcgaccaaatgggcgcggacgaactgctcaaatatggcgattcgctgttccttcagcccggcagtgccgaaccgacccgcctgcaaggcgcgtttgtttcagacgacgaagtacatcaagtcgtcaactacgtcaaatcgcaagccccagccgactatattgaaggtctgctcagcggcgaggccgcgctggaaactgccaatatcgttaatccgaatgcagacagcgacgaattgttcgatcaggcagtcgcctatgttttggaaagcaaaaaaacctccatttcgtctttgcagcggcagttgcgtatcggctataaccgcgcggcaaacctgatggaggcactggaaaatgcgggtgtcgtttctcccaccgacctcaacggcagccgtaaaattttggcgcacaaggaccatttgtag

SEQ ID NO: 54324 - DNA, 1176 bp, Neisseria meningitidis; identical to SEQ ID NO: 38454

SEQ ID NO: 54325 - DNA, 2016 bp, Neisseria meningitidis
gtggggagttttcacggattctgtctttcagacagcattggttttcaaatgccgtctgaaaacgcaaaacgctcctgtttctttattctaaacgagaaaacaggagcattttttatgactacgccaaaaaaaaccgccaaaacttccggcaacgaagcgcgcgaacttgccgacttgagcgaagacatcggtatccgcttcaaatatccgaactcggaacgcgtgtatctgcaaggcagccgcgacgacatccgcgtgcctttgcgtgaaatccgtcaggacgacacctatacggcgcaaggcgcggaagccaacccgccgattcccgtctatgacaccagcggcgtgtacggcgatccagcggcacacatcgacctgaaacaaggtctgccgcacatccgcaccgcatggctgaacgaacgcggcgataccgaaatcctgcccaagctctccagcgaatacggcatcgaacgcgcacacgatccgaaaaccgcccatctgcgcttcaaccaaatcacccgcccgcgccgcgcgaaaagcggtagcaacgtaacccagcttcactacgcgcgccaaggcattatcacgcccgaaatggagtttgtcgccatacgcgaacgtttaaaattagacgaattgtcccaaaaatcggaatacgccaaactcttgaaacaacacgcagggcaaagtttcggcgcgaacatcccaacccgtcccgaccaaatcacgcccgaattcgtgcgccaagaaatcgccgccggacgcgcgattatccccgccaacatcaaccaccccgaactcgaaccgatgattatcggccgcaacttccgcgtcaaaatcaacggcaatttgggcaactccgccgtaacctccagcctgaccgaagaagtcgaaaaaatggtgtggtcgctgcgttggggcgcggacacgattatggatttgtccaccggcgcgcacatccatgaaacgcgcgaatggattatccgcaacgcgcccgtccccatcggcaccgtgccgatttaccaagcgttggaaaaaaccggcggcatcgccgaagatttgacttgggatttgttccgcgacaccctcatcgaacaggcggagcaaggcgtggactattttaccatacacgcgggcgtgttgctgcgttatgtgccgatgaccgccaaccgcctcaccggcatcgtctcgcgcggcggttcgattatggcgaaatggtgtttggcacatcatcgggaaaatttcctctacacgcatttcgacgaaatctgcgaaattatgaaagcgtatgacgtatcgttcagcctcggcgacggcctgcgccccggctgcattgccgatgccaacgacgaatcccaattcgccgaactgcacaccttgggcgaattgaccgataaagcgtggaaacatgacgtacaagtcatgatcgaaggccccggccatgtgccgctgcaacgcgtcaaagaaaacatgaccgaagagctgcaacactgctttgaagcacctttttacacgctcggcccgctcgttaccgacatcgcacccggctacgaccacatcacctcgggcataggcgcggccaatatcggctggtacggcacggcgatgctttgttacgttacccccaaagaacatttggggctgcccgacaaagaagacgtgcgcaccggcatcatcacctacaaactcgccgcccacgccgccgatctcgccaaaggctggccgggcgcacaattacgtgacaacgccctgagcaaggcgcgtttcgagttccgttggcgcgaccaatttcgcttaagcctcgaccctgaacgtgccgagagcttccacgacgaaaccctgcctgccgaaggcgcgaaaatcgcccacttctgctcaatgtgcggccccaaattctgctcgatgaaaatcacgcaggaagtgcgcgactacgccgacaagcaaaaagcccaacggcagggcatggaggaaaaagcggtcgagttcgtcaaaagaggcgcgaagatttacagttga

SEQ ID NO: 54326 - DNA, 1095 bp, Neisseria meningitidis
atgaaaaccaatctgctcaactacgacctccaagggctgacccgacattttgccgatatgggcgaaaaacctttccgtgccaaacaggttatgcgttggatgcaccaatccggcgcgcaaaattttgacgaaatgaccgatttggcaaaatcgttgcgccataaactgaacgaacaggcaggcatcgaaattcccaagctgatgatgtctcaaaaatcttcagacggcactcgaaaatggcttttggatgtcggtacgggcaacggggtggaaaccgtcttcatccccgaatcggatcgcggcacgctctgcatttcctcacaagtcggctgcgctttggaatgtacattttgttcgaccggtcggcagggcttcaaccgcaatttgactgctgccgaaatcatcgggcaattgtggtgggcaaacaaagcgatgggcgttacaccgaaaaacgagcgcgttatttccaacgtcgtcatgatgggcatgggcgagccgatggcgaacttcgacaatgtcgttaccgccttaagcatcatgctggacgaccacggctacggtttgagccgccgccgcgtaaccgtttccacttcgggtatggttccccaaatggacaggttgcgcgatgtcatgccggtggctttggcggtttccctccacgcttccaatgacgaagtccgcaaccaaatcgtaccgttgaacaaaaaatatcccttgaaagaattgatggccgcatgccaacgctatctggtcaaagcacccagggatttcatcactttcgaatacgtcatgttggacggaataaacgataaggcgcaacatgcgcgcgaactgatcgaactggtcacagatgttccctgcaagttcaatctgattccgttcaatcccttcccaaactccggatacgaacgctccagcaatgagaacatccgtgtgttccgcgatattttgcagcaggcaggatttgtcgttaccgtacgaaaaacgcgcggcgacgacatcgatgccgcctgcggacagttggcggggcaggttcaggataaaacgcgccgccaacaaaaatggcagcagattttaatcggacaacaggggtaa

SEQ ID NO: 54327 - DNA, 594 bp, Neisseria meningitidis; identical to SEQ ID NO: 42358

SEQ ID NO: 54328 - DNA, 474 bp, Neisseria meningitidis
atgttatccgcagaatccttaaaacaaattgatattgagttggcaaaatatcctgccgaccaacgccgctctgccattatgggcgcattgcgtattgcacaaaccgaaaaaggctggctcgcccccgaaaccatcgcctttgttgcagactatatcggcatctcgcctgcacaagcctacgaagtcgctaccttctacaatatgtacgaccttgagcctgtcggcaaatacaaactgaccgtttgtaccaacctgccctgcgccctgcgcggcggtatggcaaccggcgaatacctcaaacaaaaactcggtatcagctacggcgaaaccacgcctgacggcaaatttacccttgtcgaaggcgaatgcatgggggcgtgcggcgatgctcctgttatgttgttgaataatcataaaatgtgcagctttatgactgaagaggcgattgagaagaaactggcggagttggagtag

SEQ ID NO: 54329 - DNA, 1110 bp, Neisseria meningitidis
ttggaagcgcaactgggtgcgccgattgaggattacgcgccgccgaaacattggacgcgcaagcagctcagaagtatggggcgtgtgtcgtatttgtgcgtcgatgcggcggagcaggctttgacggatgccggtttgctcggagacgaaagcattaccgacggacggatgggcgttgcctgcggctcttccagcggcagcaccaaagacatcggcgatgtgggcgaattgttgctgaccggcacgtcgcgcaacttcagtgccaacacctatgtgcgtatgatgccgcacaccgccgccgccaatatcggcatctttttcggactgaaaggacgcatcatcccgacatcgagcgcgtgttcgtccggcagccaaggcataggttatgcctacgaagccatcaaatacggtctgaccgatatgatgctggcgggcggaggcgaagaatttttctcgtccgaagtgtatgttttcgactcgctttatgccgccagccgccgcaacggcgaaccggaaaaaaccccgcgcccatacgacgcgaaccgcgacgggctggtcatcggcgaaggcgcggggattttcgtgctggaagaattggaacacgccaaacggcgcggtgcgataatttacgccgaactcgtcggctacggagccaacagcgatgcctaccatatttccacgccccgccccgacgcgcaaggcgcaatccttgcctttcagacggcattgcaacacgcaggtcttgcgcccgaagacatcggctggattaatctgcacggcaccgggacgcaccacaacgacagtatggaaagccgtgccgttgcagcggttttcggcaacaatacgccctgcacgtccaccaagccgcaaaccggacacacgctgggtgcggcgggcgcaatcgaagccgcgttcgcgtggggcattgccgaccggcaaagcaatcccgaaggaaaacttccgccccagctttgggacgggcagaacgatccgaaccttcccgccatcaacctgaccggcagcggcagccgctgggaaaccgaaaaacgcattgccgccagctcatcgtttaccttcgggggaagcaactgcgtcttaatcatcggatga

SEQ ID NO: 54330 - DNA, 567 bp, Neisseria meningitidis
ttgttattgcccttcgccacgctggcattgtgcaccaacgcttttgccgccccgcccagcgacgcgtcgttggcgcgttggctggatacgcagaattttgaccgggatatagaaaaaaatatgattgagggctttaatgccggatttaaaccgtatgtggacaaagcccttgccgaaatgccggaagcgaaaaaagatcaggcggcaaaagcctttaaccgctatcgtgagaatgttttgaaagatttgattacgcccgaagtgaaacaggctgtccgcaatactttattgaagaatgcccgtgagatatacacgcaagaagaaattgacggcatgattgccttttacggttcgcctgtcggtcagtccgtcgttgccaaaaatccgcgcttaatcaagaaatcgatgagtgaaatagcagtatcttggactgcattgtcagggaaaatcgcgcgacatcatctgcccgcgtttacggaagagttgcggcgcatcatctgcggcggtaaaaatcccgatgcgggctgtaaacaagccggacaggttgggaaaaggcatcagaaataa

SEQ ID NO: 54331 - DNA, 1002 bp, Neisseria meningitidis
atgaaacggaaaatttggctgctgccgctgctggcggtttcggcatacctgcaggcgcagacggaagtcaggctggcggtgcataagtcgttcagcctgcccaaagggttgattgcgcgcttcgagcgggcaaacgatgcgaaggtgtcgattattcaggcgggcggcgcgaacgaaatgctcaacaaactgattttgagccgcgccaacccgattgccgacgcggtgtatggtttggacaacgccaatatcggcaaggcgcgggaaatgggcattttggcggcggcgcaacccgaatccgcccccgtcgcggtcgggctgccttcggctttggcggtcgattacggctatgtgtccatcaattacgacaaaaaatggtttgaaggcaaaaagctgcccctgccgcaaaccctgcaggatttgacccgccccgaatataaaaacctattggtcgtgccgtcccccgccacgtcgtccccggggctgggcttcctgatggcgaacatcagcggtctgggcgaagaaggcgcgttcaaatggtgggcacagatgcggcagaacggcgtgaaggtcgccaaaggctggagcgaggcgtattacaccgacttttcgcacaacggcggcgcgtatccgctggtggtcggttatgccgccagcccggcggcggaagtgtatttttccaaaggcaagtacagcgagccgccgacgggcaacctgtttttaaaaggcggcgtattccgtcaggtcgaaggtgcggcggtcttgaagggcgcgaaacagccggaattggcggcaaaactggtgcaatggctgcaaagtcgggaagtgcagcaggcggttccgtccgaaatgtgggtttaccccgccgtcaaaaacacgcgcctgcccgacgtgttccgcttcgcccaagccccgacgcacaccaccgcccccgcgcagcgcgatattgatgcgaaccagcgcggatgggtttcccgttggattagaacggttttgaaataa

SEQ ID NO: 54332 - DNA, 360 bp, Neisseria meningitidis
atgccacgcgtaaaacgcggtgttaccgctcgtgcccgtcaccaaaaaatcttcgcgttagccaaaggctatcgcggccgtcgtaaaaacgtttaccgcgttgccaagcaggcggtaatgaaagccggccaatacgcataccgcgaccgccgccaacgcaaacgccaattccgtcaattgtggattgtccgtatcaatgcaggtgcgcgtgaaaacgggttgtcttacagcaaatttatgaatggtctgaaacgcgcctctatcgaaatcgaccgcaaagtattggctgatttggccgtgttcgataaagccgcttttgcacaattggttgaaaaagccaaagctgctttggctgcttaa

SEQ ID NO: 54333 - DNA, 216 bp, Neisseria meningitidis; identical to SEQ ID NO: 42829

SEQ ID NO: 54334 - DNA, 1227 bp, Neisseria meningitidis
ttgaaagaagatggtatgaaccaactgaaacttgccgtttccggtgcacagattttatttgtggcattcggcgcaatggtgctggttcccctgctgaccggtctgaatccggctcttgcgcttttgggcgcaggcttcggaacgctgctgttccaaattacaaccaaacgtaaagtgccgatttttctcggttcttcgtttgcctttatcgcaccgattatctactccatcggagaatgggggctgccttccaccatgttcggactgtttgccgccggctttatgtattttgtgtttgccgtgctaattcgttggcgcggactggcggcggtacacaaactgctgccgccggtcgtcatcggccccgtcatcatggtcatcggtctgtctgttgccgtggcggcaagcagcatggcaatgggtcaggcggacggcaaacaggtcatcgactataccgattcactgattctttccggctttacctttgccgttaccgccatcgtatcggttttcggcagcaggatgatgaagctgattcctatcttgatcggtgtcgcttcgggttatgttttggcactgctgatgggactggtggacacggcaagcattgcacacgcgccctggttcgccgttccccattttgaaacgcctcaggtcaactggcaggcggcactgtttatgctgcccgttgccgtcgcccccgccatcgaacacatcggcggcatcatggcaatcggcaatgtgacggggaaagactatacgaaagacccgggcttggacaaaacccttgcaggcgacggtttgggcgtgtgcgttgcgggtctgatcggcggcccgccggttacgacctacggcgaagtaacgggtgcggtgatgattaccaaaaacagcaaccccgtcatcatgacttgggcggcggtttttgccgtctgcatggcgtttttcggcaaattcaatgcgtttttggcttccattccgatgccagtaatgggcggcattatgctgctgctgttcggcacgattgcttctttgggcgtgaaaacgctgattgatgccaaagtcgatttgatgctgccgaaaaacctggtcatcgtcagctcggtactgaccacgggcatcggcggcatgacgctcaaattgggcagcttcagctttgccggcgtgggcttgtgcgccgtacttgccattatgttgaacagcctgctgcccgatccgaaagaatcctga

SEQ ID NO: 54335 - DNA, 771 bp, Neisseria meningitidis
atgaggctgaccgacacacattgccatcttgccgattctgttttgcgcggcaatctggcgcaggtgcttgccgaagcgcgacaggcgggtgtgtggcggtttatcgttcccgcgacgcgcccgcaggattggcaaagcgtggcggaactgtcggaaatgccgtccgaacacggtcaaatccgtattgcgctcggcatccatccttggttttcagacggcattgccgagcgtgattgcgtccgcctggaagcgatgttggcacgttatccgcaggcatgggtcggcgaaatcggtttggatttttacgacaaaacccaaacgccgccgcagcgcgaacggcaaatccaagttttcgtccgccagcttgccatcgcgcaaaccctgcgccgccgcgtgattatccataatctcaaagccaccgccgacatcgccgccgccgtcaaacagacaggctttgcccaaggcggcatcgttcacgccttctcaggcagcgcggaagaagcgcgcgtgttgacgaaactgggtttcaaaatcggcatcggttcgttgttgctcaatccgaacgcgcgtaaagtgcgcgatacgcttaaagccttgaacgacggggatttcgtattggaaaccgacagcccgtttatgctgaaaaaagagattaatacgcctgccaatattctttggattgccgaaattgccgcgcagatacgcggtgtcggcgtggcggacatcgccgcgataacggaacgcaatgccgacagcctgctccgtccctag

SEQ ID NO: 54336 - DNA, 462 bp, Neisseria meningitidis
atgaaaccgcaaaaatccctacgcgcccgcgcgatggacatcctctcgcgccaagaagtcagccgcatcggtctgaaacgcaaacttgcaccgcacgccgaaagcgaagaagagttggaaaacgtgttaaacgaatttgccgaacgcaactggcagtcggatttgcgctatgccgaagcctatatccgcagcaaaagccgcaaacacggttcattgaggctgaaacaggctttggcgcaacagggcatagatgaagaaaccagccgcaacctgcttcccgaccgctcaagcgaaaaacaggccgccatagccgtgttgcgtaaaaaattcaaacaccccgccgccgacctcaaagaaaaacaaaaacaggcgcgtttcctcgcctatcgcggattcgatgccgataccgttcagacggcattgaaacacgcttgggacgaaaattgggaagacggctgctga

SEQ ID NO: 54337 - DNA, 531 bp, Neisseria meningitidis; identical to SEQ ID NO: 39309

SEQ ID NO: 54338 - DNA, 1002 bp, Neisseria meningitidis; identical to SEQ ID NO: 36643

SEQ ID NO: 54339 - DNA, 294 bp, Neisseria meningitidis; identical to SEQ ID NO: 37088

SEQ ID NO: 54340 - DNA, 132 bp, Neisseria meningitidis; identical to SEQ ID NO: 39343

SEQ ID NO: 54341 - DNA, 534 bp, Neisseria meningitidis
atggcagacttcaaccaaatcctgacccccggcgatgtggacggcggcatcatcaacgtcgtcaacgaaatccccgccggcagcaaccacaaaatcgagtggaaccgcaaactggccgcattccaactcgaccgcgtcgaacccgccatcttcgccaaaccgaccaactacggcttcattccccaaactttggacgaagacggcgacgaattggacgtgctgctcgttaccgaacaacctttggcaaccggcgtattcttggaagcgcgcgttatcggcgtgatgaaattcgttgacgacggcgaagtagacgacaaaatcgtctgcgttcctgccgacgaccgcaacaacggcaacgcctacaaaactttgtccgatttgccgcaacagctcatcaaacaaatcgagttccacttcaaccattacaaagacctgaaaaaagcaggtacgaccaaagtcgaatcgtggggcgatgcggaagaagcgaaaaaagtcatcaaagaatccatcgaacgttggaacaaacaggcataa

SEQ ID NO: 54342 - DNA, 588 bp, Neisseria meningitidis
atgcgggctgtcgggcattgttggaaaagatttccaaataaagcaattgaatacaaatataaaaccgcctcctgccgtatcggttgttcagacggcataaacagagaatttatgaaaacaaatttcaaacagaaaattatcgaacaggcacgcagcgaaggcttgcaggtaaccgctttgcgcgagcaggtattagatattgtcttgcagcaaagcggcgtgattaaagcctacaacgtcttgtcgcagatgcagcagcaaagcgagggcgtgcttgcaccgcctactgcctaccgcgcccttgatttttgggcggagcagggcgttttgcacaaagtggcggcggtcaacggctatattttgtgcagccacgcgcagcacgagtgcgacgaccattgccacgaccacgaagaagccgaagcgcaccacagcgcgtttattttggtctgcaccgaatgcggcacggcggacgagcaaaccctcagccacgagtgggcggcactgcgcgcaggcgttgccgaaagcggctttgcgctgaaagaagaacacgttgttttaaccgggatttgtaaaaaatgtcagaaatga

SEQ ID NO: 54343 - DNA, 723 bp, Neisseria meningitidis; identical to SEQ ID NO: 42576

SEQ ID NO: 54344 - DNA, 1422 bp, Neisseria meningitidis
atgaaaatcattcagatacagaacaatcacaatgtaaacgatgaccgccccgagtttgaccgcgcgctgattgccagcctgcccgccagcggcccgcgctacacttcctaccctaccgccgaccgtttccatgacggtttccgcgaaggcgaatatatcaaagctttacatttgcgcggtatgggcgcgttaaacaaaccgctttccctttacattcacattccgttctgcaacaccatctgctactactgcggctgcaacaaaatcatcaccaaagacaaaagccgcgccgatgcctacatcgaatatcttgaaaaagaaatggaactgctcgctccacatctgaacggacggcaccagcttgcccaactgcacttcggcggcggcacgccgacctttttgagcgacgaacagatcgaacgtgtcttccgcatgatacgcaaacatttcgagttaatccccaccggcgaatactccatcgaaatcgacccgcgcaaagtcagccgcgacaccgtcctcatgctcggcaggctcggcttcaaccgcatgagcatcggcattcaggatttcgaccccaaagtgcaggcggcggtcaaccgcatccaaagttacgaagaaaccaaagaagtcatcgatgcggcgcgcgaagcggggttcaaatccgtcagcgtcgatttgatttacggcctgccgcaccagacttcggaaagcatcaaaaccaccatcgataccgttttgtcgctcgatcccgaccgcctcgccctttatcactacgcccacctgccgcacgtgttcaaaccgcaacgccgcatcgataccgtcgccgttcccgacagcgaagagaagctcgatatgctgcaatactgcgtccaaaccctaaccgaacgcggctacgtcttcatcggcatggaccatttcgccaaacctgacgacgaactctccatcgccctcaaagaaggcttcctccagcgcaacttccaaggctattcgacctacgcggattgcgatttggtcgccatcggcgtgtcgtccatcggcaaaatcggcagcacctattcccaaaacgaacgcgacatcgatgcctactatgccgccatcgacgaaggcagactgcccatcatgcgcggttatcagctcaatcaggacgacatcctgcgccgcaacatcattcaggatttgatgtgccgtttcgcgctcgactatcggatttacgaaagtatgttcggcatcccgttcgaccgctacttcaaagacgaactggcggatttggaaaaactcgccggtttgggattggtgcgcctgaacagccacgggctgaccgttaccccgaaaggacgcttcctcatccgcaacatcgccatggtcttcgattaccacctgcgccataaagaaaccaaggcgaaatattcgcaaacggtgtga

SEQ ID NO: 54345 - DNA, 2745 bp, Neisseria meningitidis
ttgaggtacatttacagtatttacggcaatgagagaaaaatcatgcaactgcatattctgaacaatccgaaggacgcggctttggcggcggacgcggaatttctgaaacaatccctgttcaacctcctgcacgaagaagcctcgccgttggttgtcgaaacggtcaaactcttgtccacttccgacgacagcgcggcattgattgaaaaagtattgccgcaattggacgaacaacaaacccacgatttaaccttggcctgcggcctgttcgcccagattttgaacatcgccgaagacgtgcaccacgaacgccgccgccaaatccacgaagaagccggacgcggcggcgcggaaggcagcctgacggaaaccgtccgcaggctcaaagcggggaaagccgacggcaaatcggtgcagcggcagttggacaatacgtccgttaccgccgttttgaccgcgcacccgaccgaagtgcaacgccaaaccgtcttaagcttcaaccgccgcatccgcgcactgttgccgcaacgcgaacgctgcaccaatgccgacgcgctggcacggctgcgccgcgaaatcgacactatcctgctgggcttgtggcagaccagcgaaacgcgccgccacaaactcagcgtcaacgacgaaatcaacaacggcgtgtccatcttcccgatgagctttttcgaagccctgcccaagctctaccgcaagatggaacacgactttcagacggcctatcccgatgtccgcgttccgaacatcctcaaaatcggcggctggatcggcggcgaccgcgacggcaatccgttcgtttctgccgaaaccttgcgttttgccttccgccgccacgccgatgccgtgttccgtttttaccgtggcgaactcgacaaactttaccgcgaactgccgctctccatccgccgcgtcaaagtcaacgacgacgtaatggcactggcagccctctcgcctgacgaagaacttgcccgcacggaagaaccctaccgccgcgccattgcttacatcatggcgcgcgctatgggcaaagcgcgcgcgctcggtttgggcatgggctgcaaattcggctttctcgagccgtatgcttcggcacaagaatttctcgatgatttgaaaaaattgcaacgttcccttatcgacaacggcagccgcctgcttgccgaaggccgtttggcagacctcatccgctccgtatccgtgttcggcttccacatgatgccgctcgacctgcgccaacacgcaggcaaacacgccgatgtggttgccgagcttttccaacacgcaggcttggaagactacaacagcctgaacgaagagcaaaaacaagctgccctgttgcgcgaattgagccatcaacgtccgctgtacagcccgtttatcacatacagcgaccatacccgccacgaactggcaattttcaacgaagcgcgtaaaatcaaagacgaatttggcgaagatgccgttacacaaagcattatttccaactgcgaacaacccagcgacctgctcgccttggcattgctgctgaaagaaagcggcctgttggtggtggaaaacggcaaaccgcgcagccgcatcaatatcgtgccgctgtttgaaaccatcgaagcactcgaaaacgcctgtccggtcatggaaaccatgttccgcctcgactggtacgacgcactgctcgaaagtcgcggcaacatccaagaaatcatgctcggctactccgactccaacaaagacggcggctatgttaccagctcatggtgtctgtatcaggcggaattgggcttggtcgaactcttcaaaaaatacgatgtccgcatgcgcctgttccacggtcgcggcggcagcgtcggacgcggcggcggtccgtcttaccaagccattctcgcccaaccggcgggcagcgtggcgggacaaatccgcattaccgaacaaggcgaagtcattaccgccaaatacgccgaccccggcaatgcccaacgcaacttggaaaccttggttgccgcgactttggaagccagcatcctgccggataaaaaagaccctgatgccaaactgatgcaggcattgtcggacgtatcgttcaaatactaccgcgaactgattacccaccccgacttcatcgactacttcctgcaaaccagcccgattcaggaaatcgccaccctcaacctcggcagccgtcctgccagccgcaagaccttagcgcggattcaagacttgcgcgcgattccgtgggtattttcctggatgcaaaaccgcctcatgctgcctgcttggtacggtttcggcagcgcggtggaaaccttgtgcgaagacaaacccgaaacgctcgccgccctgcgcgaacacgcccaaagcaacccgttcttccaagccatgctttccaatatggagcaagtgatggcgaaaaccgacatcaccctcgcggaaaactatgccggcttgagcgaatcgccggaaaaagccgccgtcatcttcggcatgattaaggaagaataccaacgcagccgcaaagccctgctcgacctgctgcaaaccgaagaacttttacgcgacaaccgcagcctcgcccgttcgcttgccttgaggattccctacctgaacgcgctcaacggcctgcaggtcgccatgctcaaacgcctgcgtaaagaacccgacaatccgcacgcgctgctgatggttcacctgaccatcaacggcgtggcgcaaggtttgcgcaatacaggctga

SEQ ID NO: 54346 - DNA, 945 bp, Neisseria meningitidis
atgtctgcatctaagaaatttccgattcctttgagctatttcagcatcgcgctgggcttgtttgccttggggctgtcgtggcgttacggcgcgtctgtcgggctgctccccgccttggccgccgaatcgctgcttgcggtggcttcggttgtctggctcttgctggtggcggcatacctgatcaaaatgtttgcgtaccgaaacgattttttgtctgatttgcgcgacttggtgcaatgctgcttcatcagcgcgattccgattaccgctatgctggagggactcgcgctgaagccctatcaggcaggcgcggcggcagtcctgatttatgtcggcgttgccggacagttggcgttttcgatgtatcgggcggccggtctgtggcgcggcctgcattccttggaggcgacgacgccgattatttatctgcctacggttgcgacaaactttgtcagcgcgtcatctctggccgcgttggggcatcatgattatgcagctttgtttttcggcgcgggtatgttttcctggctgagcttggaagcctccatcttgggcaggctgcgcacggcggcaccggtcggcacggcggcgcgcggcgtggtcggcatccagcttgcgcccgcctttgtcggctgcggcgcgtattttgccgtcggcggtaaagtcgacggttttgcgttggcattaatcggctacggctgcctgcagcttttgttcttgctgcgcctgacccgctggttttgggaaggcggttttacgatgagcttttggggattttcattcggtttcgcggcaatggcaggatgcggtctgcatctggcggcttctggcatattgtcgggcttggggctgacgcttgccaccgccggatcggcaggcgtggcgctgctgcttgtcggtacgctgcaccggatagcgacggggcgtttcttggtacgcggctga

SEQ ID NO: 54347 - DNA, 849 bp, Neisseria meningitidis
atggacttcaaacaatttgattttttacacctgatcagtgtttccggttgggagcatctggctgaaaaggcgtgggcgttcgggctgaaccttgccgccgcgctgcttatttttttggtcggaaaatgggcggcgaaacgcattgtcgccgtgatgagggcggcgatgacgcgcgcgcaggtcgatgccacgctgattagttttttgtgtaatgttgccaatatcggcttattgattttggtgattattgccgcgttgggcagattgggcgtttccacaacatccgtaaccgccttaatcggcggcgcgggtttggcggtggcgttgtccttgaaagaccagctgtccaattttgccgccggcgcgctgattatcctgttccgcccgttcaaagtcggcgattttatccgcgtcggcggttttgaaggatatgtccgagagattaaaatggtgcagacttctttgcggacgaccgacaacgaagaagtcgtgctgcccaacagcgtggtgatgggcaacagcatcgtcaaccgttccacactgccgctgtgccgcgcccaagtgatagtcggcgtcgattacaactgcgatttgaaagtggcgaaagaggcggtgttgaaagccgccgtcgaacaccccttgagcgttcaaaacgaagagcggcaggccgccgcctacatcaccgccttgggcgacaatgccatcgaaatcacattatgggcttgggcaaacgaagcagaccgctggacgctgcaatgcgacttgaacgaacaagtggtcgaaaacctccgcaaagtcaatatcaacatcccgttcccgcaacgcgacatacacatcatcaattcttaa

SEQ ID NO: 54348 - DNA, 441 bp, Neisseria meningitidis
atgatgcagactttccgaaaaatcagcctgtatgccgcaaccttatggctcggtatgcagattatggcgggttatatcgtcgcgccggtgctgttcaaaatgctgcccaaaatgcaggcgggcgaaattgccggcgtattgttcgacatcctctcttggagcgggcttgccgtttggggcgcggtactggctgccgcctttgccgccctaacccggcggcaaaccgccctgctgctttttttattgtccgcccttgccgccaaccgattcttgattacacccgttatcgaggcgctgaaatacgggcatgagaattggctgttgtcggctttgggcggatctttcggaatgtggcacggcatttccagtattgtttttatggcggccgccctactttcgatttacttaagttggcggctctacggcaaaaatgccgtctga

SEQ ID NO: 54349 - DNA, 363 bp, Neisseria meningitidis; identical to SEQ ID NO: 37674

SEQ ID NO: 54350 - DNA, 306 bp, Neisseria meningitidis
atgcgcgtatctaaaataattggaagtatgttgcttgttacagcggttcagaccgtattttcggcaaatgtttacgcgtgccgccataatggtaaaaccagttacagccaaactccgggaaaacattgtaccaacgcgggtttggggcgggaccgggtgtacagttcggttagaccggcagtaaaagacagggcggaagacgcaggggtcggcgattattcggacacggtgagggacgaacacgtccaaaatccgaaagggaatgcacagaaagacggttcggatgccggcatcaggccgcattga

SEQ ID NO: 54351 - DNA, 453 bp, Neisseria meningitidis
atgcaaattattctgttagaaaaaatcggcggtttgggcaacttgggcgacatcgtaaccgttaaaaacggctatgcccgcaacttcttgattcctgctggtaaggcaaaacgtgctactgaagcaaacatgaaagagtttgaagcacgccgtgccgaattggaagccaaacaggccgaaattttggcagatgcccaagcccgtcaggaaaaattggatggccaaaccattaccgttgcacaaaaagccggtgtggacggtcgtctgtttggttccgttaccaatgctgatattgcggctgcaatcgttgcgactggcatcgaagccgtgaaagcaaatgtacgtctgccgaacggtcctctgaaagccgttggcgagtacgaagtggaagtggctttgcacactgatgccgttgctaaaattaccgttgccgtcgttgccgcaaccgagtaa

SEQ ID NO: 54352 - DNA, 273 bp, Neisseria meningitidis
atgcccattgaggacatccctttttatatttttgacttggcggatttcgatgtaggaattggcgatattggcaatattgtaggttttgctccgagttccagcctgccgaaatcgaaaaaaaatgccttgaccggcattgccttcttaagggggatagatgtctatgaccctcccgtttcaaaagaaaaagcattaaaagccttagagaaatatcctgaaatttatcagaaatttcagcatttctttccgtttgtagagctgccgccgctttaa

SEQ ID NO: 54353 - DNA, 405 bp, Neisseria meningitidis
atgagaaaaagtcgtctaagccggtataaacaaaataaactcattgaactgtttgtcgcaggtgtaactgcaagaacgacagcagagttagtaggcgttaataaaagtaccgcagcctattattttcatcgtttacgattacttatttatcaaaacagtccgcatttggaaatgtttgatggcgaagtagaagcagatgaaagttattttgctgaacgacaaaaccatatcaatggaattgagaacttttggaaccgggcaaaacgtcatttacgcaagtttgacggcattcccaaagcgcattttgagctgtatttaaaggggtacgaacggcgttttaacaacagtgagataaaagttcaaatttccattttaaaacaattagtaaaatcgagtttatcctag

SEQ ID NO: 54354 - DNA, 600 bp, Neisseria meningitidis
atggcgttaaaaacatcaaacttggaacacgcaatgctggttcatcccgaagctatgagtgtcggcgcgcttgccgacaaaatccgcaaaatcgaaaactggccgcaaaaaggcatcttattccacgacatcacgcccgtcctgcaaagcgcggaatacttccgacttttggttgatttattggtttaccgctatatggatcagaaaatcgacatcgttgccggtttggacgcgcgcggcttcattatcggcgcggcactcgcctaccagctcaacgtcggtttcgtccccatccgcaaaaaaggcaagctgccttttgaaaccgtatcgcaaagctacgcgctcgaatacggggaagctgcggtggaaatccacaccgatgccgtcaaacccggttcgcgcgtgctgctggtcgatgatttggttgccacgggcggcacaatgcttgccgggctggaactgatccgcaaactcggcggggaaattgtcgaagctgccgccattttggaatttaccgaccttcaaggcggcaagaatatccgtgcaagcggcgcgcccttatttaccctgcttcaaaacgaaggctgtatgaagggctga

SEQ ID NO: 54355 - DNA, 702 bp, Neisseria meningitidis; identical to SEQ ID NO: 49218

SEQ ID NO: 54356 - DNA, 660 bp, Neisseria meningitidis
atggatacttggcacgatgcactgggcaacgaaaaacggcaaccgtattttcaggaaattttaaatgcagtcaggcaggaacgtttgtcggggcaaatcatctatccgccggcggaggatgtgttcaacgcattccgcctgacagcgtttgaccgagtcaaagtcgtcattctcggacaagacccgtatcacggggcagggcaggcgcacggtttggcattttccgtcaggcagggtgtccgcataccgccgtctttactcaatatctacaaagagttggaaaccgacatcaacggtttttccattcccgatcacggctgcctgacggcttgggcggagcagggcgtattgcttctgaacacggttttgacggtgcgtgcaggacaggcgcattcgcacgcccttttaggctgggaacgctttaccgataccgtcatcaggcagcttgcgacacaccgcaagcaccttgtcttcatgttgtggggtgggtatgcacaacaaaaagggaggctgatagacagtcaaaatcatttgatattgaccgcaccgcatccgtctcctctgtcggcatatcgcggttttttcggctgccgccatttttcacaggcaaacagctatttgagtcaacacggtatcgaaccgataaactggaagctatga

SEQ ID NO: 54357 - DNA, 372 bp, Neisseria meningitidis
atgaaaccatacaaaatctacacccatcccgccctgccgccccaagccgtcaaacaaggctggtcatggccggggctcttgttcggcacgctgtgggcgtgtttcaaaagaatgtggggtttggggctggggctgacgggcgcgatattcgtgctggctgtgtttgcccaactggtttacggcgacacgcccgccacagactcggcgtttaacgtattgggcttggcggtttccgtctggttcggcgcaaagggcaacagcctttatgcacgccaccttttatcgcgcggctataccgaattgcccgaaacggttgaggcagccaacccccaagccgcattggcgcaatatttcgggcgcgggggccgataa

SEQ ID NO: 54358 - DNA, 165 bp, Neisseria meningitidis; identical to SEQ ID NO: 38385

SEQ ID NO: 54359 - DNA, 2157 bp, Neisseria meningitidis
atgcccgccccccaaccttccgccccttacgaccccctgaccgccgaagcgcgtgccctgcttttccataccgcctcctacctcaagcccgaggaacaggcggagcttgaaaaagctgtcgcctatgcgtttcgtgcccacgacgggcaaacccgcaaaagcggggagccctacatcacgcatccgattgccgttgcgacgcagctcgccctttggcatatggacatacagggtctttgtgcaggcgtgatgcacgacgtattggaagatacgggcgtgacaaaaggggaaatggcggcggtgttcggcaatacgattgccgagatggtggacgggctgtccaaactcgagaaactcaaatttgaagatcatgcggaacatcaggcggagagtttccgcaaactgattttggcgatgaccaaagatgtgcgcgtcatcgtcgtcaaacttgccgaccgcctgcacaatatgcggacgctcggttcgatgcgcccggacaaacgccgccggattgcaagggaaacccttgaaatctatgcacagattgccaaccgtataggtttgaataacgcatatcaagagcttcaggatttatcgttccaaaacctgcatcccaaccgctacgagactttaaaaaaagcgatggacaagagccggaagaaccggcaggacgttgtcggcaaagtcttgcgcgcattcggccagcggctggtaggcgcgaatatagaggccaaaatcaaaggcagggaaaaaaacctgtacggcatccatcagaaaatgatggcgaaaaagctgcgctttgccgaggttatggatatttacggtttccgcgtcattgtcaacagcattccagcctgttatgccgcactcggcgcattgcacaccctctatcagcccaagcccgggcggttcaaagactatatcgccattccgaaaagcaacgggtatcaaagtctgcatacgactttggtcggtccttacggcttgccgattgaagttcagatacgtaccaaggaaatggatgctgttgccgaaggtggaatcgccggacattggagctataaatcatattctaagacggtcgatcaggcggtgcttcacacaaaccggtggctgaaaaatatcttagatttgcaggcaagcagtgccaatgccattgagtttctcgaacacgtcaaagtcgatttgtttccgaacgaaatctacatccttacgccaaaaggaaaaatcctaactttgcccaaaggggcaacgcctgtcgattttgcttatgcggtgcataccgatatcgggcacaaaaccgttgccgcacgtatcaacaatatcatgatgccgttgcgtacgaagctcaaaaccggtgattctgttgaaattatcacatccgaacacgccaaacccaatcccgcgtggttgaatttcgccgtgtccggcagggcgcgcagcgccatacgccaatatattaaaaaccttaaccggcacgatgcggtcgttttgggagagagcctcttacaaaaagccctgtccagtttgctgcccaaagatgtcctgctttcagacggcatcaaggaaaaatatcttgccgatctcaacgacaaacagacttcatttgaggaagtgctgtacaacgtcggtatggggcataccctgcctgtttatgtcgccatgcacattgccgagttggcaggggagcatttcggtagcgaggtcaggctcagttccattaaagtcgatggtcaggaaagcgggcatattcattttgcagagtgctgccaccctgttcccggcgattccatccgtttgctgttggttaagggaaaaggcatgattatccatagggatacctgcccgacgttgttgaagtccgatcccgaacagcagctggatgcagactgggaaaatatgaacgggcagaactaccgtgtcgggcttcaagtccaatcggaagacagccacggcttgctggcattaatggcgcaagcgatttccgattccggtgcggacattgagtcggtcgaaacaccgtctaaatcccagtcgggaacggaaggttttgtcgaattcaaattcttattgaaagtcaagaatctgaatcaattgaatcagattattcaaaatctgcatagtattccatatatccgcaaagtcatcagaagttga

SEQ ID NO: 54360 - DNA, 828 bp, Neisseria meningitidis
atgaaactgattgagcaacatcaaatttttggcggtttgcagcaagtttgggcgcattatgcccaaacgctgcagtgcgaaatgaaatttgccgtctatttgccaaataatccggagaatcgaccgcttggtgtgatttattggctttccggcttgacttgtacggaacaaaatttcattaccaaatcaggttttcagcgttatgcggcagaacatcaagtgattgtggttgcccccgataccagccctcgcggagagcaagtgccgaacgatgcggcttacgatttagggcagggtgcgggcttttatctgaatgcgaccgagcagccttgggtgacgaattatcaaatgtatgattatattttgaatgagttgcctagtctgattgaggaaaaatttcctaccaacggcaaacgttccattatgggacattcaatgggcggacatggcgcattggtattggcactgcgaaaccgggaacgttatcaaagtgtttctgccttttcgcctattttatcgccaagcctcgtgccttggggagaaaaagccttttctgcctatttgggaaagaatcgcgaaaaatggcagcaatatgatgccgactcgctcatccgacaaggctgtaaggtgcaaggtatgcgcattgatcagggcttggaagatgagtttttgccgacacaattgcgtacccaagattttatcgaaacctgtcgtgcggcaaaccaaccggccgatgtgcgcttccacaaaggctatgatcacagctattacttcatcgccggttttattggcgagcatattgcctatcacgcggcatttttgaagtaa

SEQ ID NO: 54361 - DNA, 1206 bp, Neisseria meningitidis
ttgaagccttgcgatacgggcggtaaaatcacagtttatccggttcaagaaaccggcgacagcaaggactttcccatgattaaaatcagcacccgcttcgatgccggctcggtcgtcgtcaaagacctgaccgatccttccaacatccgcctcgccctgcgtcccgacaacgcctccgattttgcacaatggttctacttccggctgcaaggcgcggcatatcaaaactgcatcatgcattttgaaaacgcggcagaagccgcctacccgaaaggctgggaaggctatcaggcgtgtgcctcatacgaccgccgcaactggttccgcgtaccgacttcctacgaaaacggcgtactgaccgtcaatcatacgccgctgtccaacagcgtgtattacgcctatttcgaaccttactccgaagaacagcatttaaacctcctcggcgacgcgcaaggcagcggcctgtgccgcatcgacgacttgggcagcaccgtgcaagggcgcgacatcaatctgctgaccatcggcaatcaggtcgaaagcgatctgaaaatctggattaccgcccgccagcatccgggcgaaaccatggcggaatggtttgtcgaggggctgctcggcaggctgctcgatccgcaagacccgacagcgcgcaccctgctcgaccgcgccacgttctatatcgtccccaatatgaaccccgacggttcggcactgggcaaccttcgtaccaacgccgccggtgcgaacctcaaccgcgaatgggaaaatccgactttggaaaaaagccccgaagtgttcttcgtgcgcgaaaaaatgctggaaaccggcgtggatttgttcttggacatccacggcgacgaagggctgccctttatctttgttgcaggaactgaaggcgtgccaaactacaatccgcgcatttccgcgttggaaacacagttcaaaaccgcccttttgaacgccagccccgatttccaagacgaatacggttacgaaaaagatgcgcccggtcaggcaaacatgaccttggcaacaaactgggtcggcaaccgtttcaactgccttgcctatacgttggaaatgccgttcaaagacaatgccaacctgcccgacgacgatttcggatggaacggtcaacggtcgttgcgcttgggcgaagccgcgttgtccgccatcctcaacatcatcggcgatttgcgctga

SEQ ID NO: 54362 - DNA, 2223 bp, Neisseria meningitidis
atgactaaatccaccattatctatacctacaccgacgaagctcctgcattggccactcaatccctgttgccaatcgtgcaggcgtttacccgccatgccgatattgatgtcaagaccagcgacatctctctctccggccgtattttggcggcgtttccagaatacctgaccgaagcgcaacgcgtacctgatgcgcttgccgaattgggcgaactggtgaaacaacccgatgcaaacgtaatcaaactgccgaacatcagcgcatccgtacctcaactgactgccgcgattaaagaattgcagtctaaaggctttgccgttcccgactatcctgccgaccctcaaaccgatgaagaaaaagccgtacgcgaacgctacgaccgcatcaaaggcagcgcggtaaaccctgtcctgcgtgaaggcaactccgaccgccgcgcccccaaagcagtgaaaaactttgccaaaaaaaatccgcacagtatgggcgcgtgggcgaaagactccaaaacccacgttgccaccatgcaaagcggcgactttttccataacgaacaatccgttaccgtacccgaagcgacttccgtatccatcgtgttcaccgacaaacaaggcaacaaaaaagagctgcgcgcgcctgttgccctgaaagccggcgaaatcatcgacgcaaccgtgatgagcaaaaaagccctgctcgccttccttgccgaacaagtgaaagacgcgaaggcaaaaggcgtattgttctcactgcatatgaaagccacgatgatgaaagtgtccgacccgattatcttcggacacgccgtcaaagtgttcttcgcgcctgtatttgaaaaattcggcggcaaactggctgccgcaggtgtcaacgtcaacaacggtttcggcaacctgcttgccaatctggacaaactggatgcggacacccgcgccgccgtcgaagctgaaatcgccgccgtttacgccgccaaccctgatttggcgatggttgattccgacaaaggcatcaccaacctgcacgttcccagcgatgtcatcgtcgacgcttctatgcctgcgatgattcgtaattccggccgtatgtgggacaaaaacggcaaagcacaagacaccaaagccgtgattcccgacagcagctatgccggcgtttaccaagcaaccatcgacttctgccgcgaacacggcgcatttgacccgacaaccatgggtactgtgcccaacgtcggactgatggcgcaagcggcggaagaatacggctcgcacaacaaaacctttgaaatcgaagccgacggtcaggttcaagtagttgatgcggcaggaaaagtcctgatgcagcacgacgttgaagcaggcgacatctggcgtatgtgccaaaccaaagacgctccggttaaagactgggtacaactcgccgtcaaccgcgcccgcctgagcaatacgcccgccgtgttctggctcgacgaaaaccgtccgcatgacaagagcctgctcgccaaggttaaagcctaccttgccgaactggataccaacggcctcgacatccgcgtcctcgctcccgaagaagccgccaagttcagcctgggccgtctgaaaaacggcgaagacaccatctccgtaaccggtaatgtcttgcgcgactacctgaccgacttgttcccgattttggaactcggcacaagcgcgaaaatgctgtctatcgttccattgatgaacggcggcggtatgtttgaaaccggcgcgggcggttctgcaccgaaacacgtccaacaattccttgaagaaaaccacttgcgttgggactctttgggcgaattcctcgcgctcgccgtatcgtttgaacatttggcacaaaaaaccggcaacaccaaagcccaagtcctcgccgacactttggatgccgccaccgaaaaactgctgctaaacgacaaatcgcccaaacgcaaaaccggcgaactcgacaaccgcggcagccatttctacctcaccctctactgggcgcaagaattggcggcgcaagacaaagatgccgaattgaaagccgcatttgcgccgttagccaaatcgttggcggaaaacgaagccaaaatcgttgaagaactctctgccgtacaaggcaaagcggtcgacatcggcggctactacgccgccaatcctgaaaaagcggcacaagcgatgcgcccaagcgcaacctttaatcaggcactaagcaccttataa

SEQ ID NO: 54363 - DNA, 444 bp, Neisseria meningitidis; identical to SEQ ID NO: 38644

SEQ ID NO: 54364 - DNA, 1851 bp, Neisseria meningitidis
atgtacctaccctctatgaagcattccctgccgctgctggcgaccctagtgcttgccgcgtgttcttcgacaaacacactgccagccggcaagaccccggcagacaatatagaaactgccgacctttcggcaagcgttcccacccgccctgccgaaccggaaggaaaaacgctggcagattacggcggctacccgtccgcactggatgcagtgaaacagaaaaacgatgccgccgtcgccgcctatttggaaaacgccggcgacagtgcgatggcggaaaatgtccgcaacgagtggctgaagtctttgggcgcacgcaaacagtggacgctgtttgcacaggaatatgccaaactcgaaccggcagggcgcgcccaagaagtcgaatgctacgccgattcgagccgcaacgactatacgcgtgccgccgaactggtcaaaaatacgggcaaactgccttcgggctgcaccaaactgttggaacaggcagccgcatccggcttgttggacggcaacgacgcctggaggcgcgtgcgcggactgctggccggccgccaaaccacagacgcacgcaaccttgccgccgcattgggcagcccgtttgacggcggtacacaaggttcgcgcgaatatgccctgttgaacgtcatcggcaaagaagcacgcaaatcgccgaatgccgccgccctgctgtccgaaatggaaagcggtttaagcctcgaacaacgcagtttcgcgtggggcgtattggggcattatcagtcgcaaaacctcaatgtgcctgccgccttggactattacggcaaggttgccgaccgccgccaactgaccgacgaccaaatcgagtggtacgcccgcgccgccttgcgcgcccgacgttgggacgagctggcctccgttatctcgcatatgcccgaaaaactgcaaaaaagcccgacctggctctactggctggcacgcagccgcgccgcaacgggcaacacgcaagaggcggaaaaactttacaaacaggcggcagcgacgggcaggaatttttatgcggtgctggcaggggaagagttggggcgcaaaatcgatacgcgcaacaatgttcccgatgccgacgcaaacagcgtcctccgtatggcggaagacggcgcgattaagcgtgcgctggtactgttccaaaacagccggaccgccggcgatgcgaaaatgcgccgtcaggctcaggcggaatggcgttttgccacacgcgggttcgacgaagacaagctgctgaccgccgcacaaaccgcgttcgaccacggtttttacgatatggcggtcaacagcgcggaacgcaccgaccgcaaactcaactacaccttgcgctatatttcgccgtttaaagacacggtaatccgccacgcgcaaaatgttaatgtcgatccggcttgggtttacggcctgattcgtcaggaaagccgcttcgttataggcgcgcaatcccgcgtaggcgcgcaggggctgatgcaggttatgcctgccaccgcgcgcgaaatcgccggcaaaatcggtatggatgccgcacaactttacaccgccgacggcaatatccgtatggggacgtggtatatggcggacaccaaacgccgcctgcaaaacaacgaagtcctcgccaccgcaggctataacgccggtcccggcagggcgcgccgatggcaggcggacacgcccctcgaaggcgcggtatatgccgaaaccatcccgttttccgaaacgcgcgactatgtcaaaaaagtgatggccaatgccgcctactacgcctccctcttcggcgcgccgcacatcccgctcaaacagcgtatgggcattgtccccgcccgctga

SEQ ID NO: 54365 - DNA, 879 bp, Neisseria meningitidis
atgaattacgcaaaagaaatcaatgcgttaaataacagcctttccgatttgaaaggcgacatcaacgtttcattcgaatttttcccgccgaaaaacgaacaaatggaaaccatgctgtgggattccatccatcgcctgcaaaccttgcacccgaaatttgtttccgtaacttacggtgcaaactcaggcgagcgcgaccgcacacacggcatcgtcaaacgcatcaaacaggaaaccggcttggaagccgcgcctcacctgaccggtatcgacgcttctcccgacgaattgcgccaaattgccaaagattattgggacagcggcatccgccgcattgtcgccctgcgcggagacgagccggccggttatgagaaaaaaccgttttacgccgaagacttggttaagctattacgctccgtcgccgacttcgacatctctgtagcagcatatcccgaagtgcatcccgaagcgaaatccgcacaagccgacctgattaatttgaaacgcaaaatcgatgcgggcgcgaaccacgtcatcacccaattcttcttcgatgtggaacgctacctgcgcttccgcgaccgctgcgtgatgttgggtatcgatgtggaaatcgtccccggtattttgcctgttaccaacttcaagcagctcggtaaaatggctcaagtaaccaacgtcaaaatcccaagctggctgtcgcaaatgtatgaaggtttggacgacgaccaaggtacgcgcaatctggtggcggcaagtatcgccatcgatatggtcaaagtcctgtcccgcgaaggcgtgaaagatttccacttctatacgcttaaccgcagcgagctgacttacgccatttgccatattttaggcgtgcgcccttaa

SEQ ID NO: 54366 - DNA, 369 bp, Neisseria meningitidis; identical to SEQ ID NO: 38525

SEQ ID NO: 54367 - DNA, 126 bp, Neisseria meningitidis
ttgaaagaggattttattaataatgagcgatatgaaaaaacagaattatattcccaaaaagataaggtaattctatttccaaagtttggtgaatatgatttggtgttaaatccggacattatttaa

SEQ ID NO: 54368 - DNA, 309 bp, Neisseria meningitidis; identical to SEQ ID NO: 38004

SEQ ID NO: 54369 - DNA, 1305 bp, Neisseria meningitidis
atggctatggctaaaaatgttgtagtaatcggcgcacagtggggcgacgagggtaaaggtaaaatcgttgactggctggcggaagaagccggcggcgtggtgcgcttccaaggcggccacaatgcgggtcatactttggtcgtcggcggcaaaaaaaccattttgcgcctgattccgagcggcatcctgcatgaaagtctggactgcttcatcggttcgggcgttgtcgtctcccccgaagccctgttgggcgaaatcgacgagttaaacgctgcaggcgtgaaaaacgtcgaaggccgtctgaaaatcgcgccgacctgcccgctgatcctgccttaccacatcgcgctcgaccaagcccgcgaagcatcgcgcggcaaaggcaaaatcggcacgaccggccgcggcatcggccctgcctacgaagacaaagtggcacgccgcgccattcgcgccgccgatttgctgcatcctgaaaaactgcgtgaaaaactggatgccatccttgcctattacaatgtccaactgcaacatctgcacaatgccgagccggttaaagcggaagacgtgatggcggttatcgaaaaagtcgcgctgcgcattgcgccgatgattaccgacgtgtcccgcgtgttgaacgagaaaaacaaaaacggcgaaaaactgctgtttgaaggcgcgcaaggtgcgttgttggacatcgactacggcacttatcccttcgttacctcgtccaactgtctggcgggagccgcttccgcaggcgcgggcgtaggccctcaaatgctggattatgttttgggcatcgtcaaagcctataccacgcgcgtcggttcaggcccgttcccgaccgaattgttcgacgaagtaggcgcaggtttggcggaacgcggacacgaattcggctcggtaaccggccgcgcacgccgctgcggctggtttgatgccgccgccctgaaacgctccatccaaatcaacggcatttccggtatgtgcattaccaaactcgatgtaatggacggcgttgaaaccatcaatatctgcgtcggctacgaattgcccgacggcggcaaaaccgatatcctgccttgcggttcggatgcggtggaaacctgcaaaccgatttacgaaacaatggagggttggaaagaatcgactttcggcatcaaaaattatgaggaactgcccgataatgccaaagcatatttgaaacggattgaagaagtctgcggcgcgccggtcgccatcgtctccaccggccccgaccgagaagaaacgattgtgctgcatcatccgttcgcataa

SEQ ID NO: 54370 - DNA, 939 bp, Neisseria meningitidis
atggacgcctacaccgaagccgaagccccgccgcaaagcatcgtcgagctggttcccgtattgattgccgttaccgacggcggcctgcgggtattaaccgtcgcccaaggcacactcctgcccaacggcccgctctcccctctgcgcaattccctgcaggcgggcgtgaagctgtgggttgccaagcagacttcgcagcctatgggctatgtggaacagctttacacctttgtcgatacccaccgccgcaacgaacacggcatgcccgtcttgtacgtcagctatttggggctggtgcgcgaggcagccgacagcatcctgcacccggatgcgaaatggcaggactgctacggctatttcccgtgggaagacttgcgcaccgacggcgggcagcgcgacgccgtcgtcagccgcctgcgcatttgggcaaattcggcggacacggaggaagtgcgtcaaatgcggctcaagcgcattcatttgtgctggggggtcgaaccggaaaactggtcggaagaatacgttttacaacgctatgaaatgctgtatgaaagcggtctgatagtggaagccgccgagccgcaggcaaacttcgacttcgcgctcacggggcagcccatgcgccacgatcaccgtcgcgtactggcgaccgccctgtcccgcctgcgcgccaaaatcaaataccgccccgtgatttttgaactgatgccgcccgaattcacgctgctgcaactgcaaaacagtgtcgaagccatcagcggaagattgctgcacaagcaaaacttccgccgccagattcagcagcaaaaccttatcgagccgtcggataccggcgtatcgggcagcaaaggccgtcccgcgcagctttgccgcttccgcgacgacgtcctgcccgacaggctgatttcggacatcggattgccgctgggcagccgttag

SEQ ID NO: 54371 - DNA, 2838 bp, Neisseria meningitidis
atgaataagaaacacggttttcagcttaccctgaccgccttggccattgcaaccgcttttccggcttatgccgcccaagcgggggcggcggcacctgatgccgcgcagacccaatccctgaaagaggttaccgtccgtgccgccaaagtgggacggcgatcgaaagaggcgaccggtttgggcaaaatcgtcaaaacgtcggaaacgttgaacaaagaacaggtactcggtatccgcgacctgacgcgctacgatccgggcgtggcggttgtcgaacagggcaacggtgcgagcggcggctactcgatacgcggcgtggataaaaaccgtgtggcggtttcggttgacggcgttgcccaaatacaggcgtttaccgtgcagggatcgttgagcggatacggcggacgcggcggcagcggcgcaatcaacgaaatcgaatatgaaaacatcagcacggtggaaatcgacaaaggtgccggttcgtccgatcacggcagcggcgcactcggcggcgcggtcgccttccgcaccaaagaagcggcagacctgatttcagacggcaaaagctgggggatacaggcaaaaaccgcctacggcagtaaaaaccgccaatttatgaagtcgctcggcgcggggttcagcaaagacggttgggaagggctgttaatccgaaccgaacgccaagggcgggaaacgcgcccgcacggcgatattgcggacggggtggaatacggcatagaccgtttggacgctttccgtctgacacacggcattaaaaaaccaagtgaagaaggggaatatttcctagcggagggcgagagtgaacccaagcctgtggcaaaattagcgggcaacggaaactatttgaaaaaccagctcaaccgctgggtggaagaacgccgttcaaaaggtcaggctttaaacagtgaagaagaagcgatggtgcaggaggcgcaggcgcgccacgaaaacctgtccgcccaatcgtacacgggcggcggcaggatattgcccgatccgatggattaccgcagcggctcttggcttgccaagctgggctaccgcttcggcggcaggcattatgtcggcggcgtgtttgaggataccaaacagcgttacgacatccgcgatatgacggaaaaacagtattacggtacggacgagtcgaaaaagtttagcgacaagagcggggtgtacgacggcaacgatttccgcgacggtttgtattttgtgccgaatatagaagagtgggacaaaaacaaaaaagatttggtcaagggcataggtttgaaatattcccgcaccaaatttattgacgaacatcaccgccgccgccgtatgggtttgctgtaccgttatgaaaatgcgaaatactcggacaactgggcggataaggcggtgttgtcgtttgacaaacaaagcgtggcaaccgacaacaacacgctgaagctgaattgcgccgtgtatcctgctgtggacaaatcctgccgcgcgtcggcggacaagccgtattcctacgacagcagcgaccgtttccactaccgcgaacagcacaatgttttgaatgcctcgtttgagaagtcgctgaaaaacaaatggacgaaacatcatctgactttgggcttcggttacgatgcttccaacgcgatctcccgccccgaacagctttcccacaatgcggcaaggatttcggaatccacgggattcgatgaaaagaatcaagataagtaccgtttgggtaagcccgaagtcgttgaagggtcggtctgcggctacatcgaaaccctgcgttcccgcaaatgcgtgccaagaaaaatcaacggcagcaatatccacatttctttgaacgatcgtttttcaatcggcaaatatttcgatttcagcttgggcggcaggtacgaccggaaaaacttcaccacgtcggaagaactcgtccgcagcgggcggtatgttgaccgttcgtggaacagcggcatcgtgttcaaaccgaaccggcatttttctttgtcttaccgcgcctccagcggcttcagaacgccctcattccaagaacttttcgggatagacatttatcacgattatccgaaaggctggcagcgtcccgccctgaaatcggaaaaggcagccaaccgcgaaatcggtttgcagtggaagggcgatttcggctttttggaaatcagcagcttccgcaaccgttataccgatatgattgccgttgccgatcacaaaaccaaattgccgaatcaggcaggacaattgacagagattgatatacgcgattattacaatgcccaaaatatgtcgctccaaggcgttaatatattgggaaaaatcgactggaacggtgtgtacggcaaactgcccgaaggtttgtacacgactttggcgtacaaccgtatcaaaccgaaatcggtatccaaccggccgggactgtctctccgcagctatgctttggatgcggtacagccgtcgcgttatgttttggggttcggatacgaccagcccgaggggaaatggggcgcaaacattatgctgacctattccaaagggaaaaaccctgacgagcttgcttatctggcaggcgatcaaaaacgatattcgacaaaaagagcgtcgtcttcttggtcgacggcagacgtttccgcctatctgaatctgaaaaaacggctgaccttgagggcggctatctacaatatcggcaactaccgctacgttacttgggaatccttgcgccagaccgcggaaagcacggcaaaccggcacggcggcgacagcaactatggaaggtatgccgcaccgggcaggaacttcagcctcgcgctcgaaatgaagttttaa

SEQ ID NO: 54372 - DNA, 627 bp, Neisseria meningitidis
atgaacgttaacgttatcaaccatccgctcgtccgccacaaattaaccctgatgagggaggcagattgcagcacctacaaattccgaacgcttaccacagagctggcgcgcctgatggcgtacgaagcaagtcgtgattttgaaatcgaaaaataccttatcgacggatggtgcggtcagattgaaggcgaccgcatcaagggcaaaacattgaccgtcgttcccatcctgcgtgccggtttgggtatgcttgacggcgtactcgacctgattccgactgccaaaatcagcgtagtcggactgcagcgcgacgaggaaacgctgaaacccgtttcctacttcgagaaattcgtggacagcatggacgaacgtcctgccctgattatcgacccgatgctggcgacgggcggttcgatggttgccaccatcgaccttttgaaagccaagggctgcaaaaacatcaaggcactggtgctggttgccgcgcccgagggtgtgaaggcggtcaacgacgcgcatcccgacgttacgatttacaccgccgcgctcgacagccacttgaacgagaacggctacatcatccccggcttgggcgatgcgggcgacaagattttcggcacgcgctaa

SEQ ID NO: 54373 - DNA, 489 bp, Neisseria meningitidis
atgaaaaaaatactcaccgccgccgtcgtcgcactgatcggcatcctccttgccatcgtcctcatccccgacagcaaaaccgcgcccgccttctccctgcccgacctgcacggaaaaaccgtttccaacgccgacctgcaaggcaaagtaaccctgattaatttttggtttccctcctgtccgggttgtgtgagcgaaatgcccaaaatcattaaaacggcaaatgactataaaaacaaaaacttccaagtccttgccgtcgcccagcccatcgatccgatagaaagcgtccgccaatatgtcaaagactacggtttgccgtttaccgtcatgtatgatgcggacaaagctgtcggacaggcgttcggcacacaggtttatccgacttccgtccttatcggcaaaaaaggcgaaatcctcaaaacttatgtcggcgaacccgatttcggcaaactctaccaagaaatcgataccgcgctggcgcaatag

SEQ ID NO: 54374 - DNA, 837 bp, Neisseria meningitidis
atgatagacctgcactgccattccaccgtttccgacggtatgctctcccccgccgaaatcgtgcgcctcgcgcatcaaaatggctgcacgctgctggcgttgaccgaccacgaccacacgggcggcatcgccgaagcgcgtgccgaagccgacaggctcggtttgcgcctgattaacggcgtggaaatctccgtaacgtggcgcgggcgtaccatacacgttgtcggtttggatttcgacgagcaggacgagaacctgcaaaacttgttggcgcaagtgcggcaaggccgtctgaaacgtcttgaagccatcgccgacaagctcgaaaagaaaggcatcggcggcgcatacgacggcgcgctggagttggcggcaaacaaagaaatggtcagccgcacccacgtcgccgagttcctcatcaaaaacggatacgtcaaaaacaagcagcaggcgttcaccaaatacttgggcgacggcaaatcctgcgccgtccgacacgaatgggcgacgctggaagactgcgtctccgccgtcaacggcgcgggtgggttggcggtgattgcccatccgatgcgctacgatttgtccgccaccgccaagcgcaatctgtttgaagaatttaaaaacctcggcggcgcaggcatcgaagtccacagcggaaactgttgcaaaaacgaccgcctcaactacgcgcttttggcagaacgcttcggtatgctcgccagcgcgggcagcgacttccaccgtttaaacgacttcagcggcggcatcctcggcgcgtgtcccgagctgccggaaaactgcaggccggtgtgggcgcatttttcccgacattga

SEQ ID NO: 54375 - DNA, 1251 bp, Neisseria meningitidis
atgttttcaaaaagcgttaccctcgcacaatatgaccccgatttggcagcagccattgcccaagaagaccaacgccagcaagaccacgtcgagctgattgcctctgaaaactacgtcagctgcgccgtaatggaaacgcaaggttcccagctgaccaacaaatacgccgaaggctaccccggcaaacgctactacggcggctgcgaatacgtcgatattgtcgaacaattggcgattgaccgcgtcaaaaaactgttcggcgcgcaatacgccaacgtccaaccgcactccggctcgcaagccaaccaagccgtgtacgcttccgttttaaaaccaggcgacaccattttgggtatgtctctggcgcacggcggccacctgacccacggcgcgagcgttaatatctcaggcaaactctacaatgccgttacttatggtttggatgaaaacgaagtgctcgattatgccgaagtcgaacgcctcgcgctcgaacacaaacccaaaatgattgtggcgggtgcgtctgcctacgcgttgcaaatcgactgggcaaaattccgcgaaatcgccgataaagtcggcgcatacctctttgtcgacatggcgcactacgccggactgattgccggtggcgaatatcccaacccggtgccattctgcgacttcgttaccaccaccacccacaaaaccctgcgcggtcctcgcggcggcgtaattttgtgccgcgacaatacccacgaaaaagcgttgaactcttccatcttcccaagcctgcaaggcggcccgctgatgcacgttatcgccgccaaagccgtggcgtttaaagaagcattgcaacccgagttcaaacaatacgcaaaacaagtgaaaatcaatgcagccgccatggcggaagagttggttaaacgcggtttgcgcatcgtttccggccgcaccgaaagccacgttttcctcgttgacctgcaaccgatgaaaattaccggcaaagccgccgaagctgctttgggcaaagcgcacatcactgtcaacaaaaacgccatcccgaatgatccggaaaaacccttcgttacctccggcatccgcatcggttccgccgccatgaccacacgcggttttaacgaagccgacgcgcgcgtattggcgaacttggttgccgacgtattgtctaaccccgaagacgaagccaacctcgccaaagtccgcgaacaagtaactgctttgtgcaataaataccccgtttacggcgcgtaa

SEQ ID NO: 54376 - DNA, 747 bp, Neisseria meningitidis; identical to SEQ ID NO: 51012

SEQ ID NO: 54377 - DNA, 1065 bp, Neisseria meningitidis
atgactcttttaaaaaacgataccttcctccgcgccctgcttaaacagcccgtcgaatacacgccgatttggatgatgcgtcaggcggggcgttatctgcccgaatacaaagccacacgcgcgaaagcgggcagcttcctcgatttgtgcaaaaacaccgaattggcgaccgaagttaccatccaacctttggaacgtttcgatttggacgcggcgattttgttttccgacatcctgaccgtccctgacgcaatgggcttgggactgtattttgccgaaggcgaaggcccgaaattcaaacgcgccctgcaacacgaggacgacattgccaaattgcacgtccccgatatggaaaaactgcaatacgtctttgatgccgtcagctccatccgtaaagcactggacggccgcgtaccgcttatcggcttctccggcagcccgttcacacttgcctgctacatggttgaaggtggcagcagcaaagaattccgcaccatcaaaaccatgatgtactcgcgccccgatttgctgcacaaaatcctcgataccaatgctcaagccgttaccgcctatctcaacgcccaaatcgacgcgggcgcgcaggctgtgcagattttcgacacttggggcggcgtcttgagcgatgaggcgtttaaagaattcagcctcaaatacatccgccagatcgtcgccggactcaaacgcgaaagcgaaggcagacgcgtgcctgttatcgtatttgccaaaggcggcgggctgtggctggaaagcatggcagaaattggcgcagacgcattgggcttggactggacgtgcaacataggcgaagcacgccgccgcgtcggcaagcaagtcgccctgcaaggcaacttcgacccgttcgccctcttcggtacgccggaatccatccgcaccgaggtcgcacgcatcctagccgactacggacaaggcagcggccatgtcttcaacctcggacacggcatcaaccaacacgccgaccccgaacacgccaaaatcttagtcgacaccgtacacgagctgtcgcggcagtatcacggcgggtaa

SEQ ID NO: 54378 - DNA, 1749 bp, Neisseria meningitidis
atgattcattataaaataaccccgtcccctctcgaccacgagtggcacatcctgctgacattcacacaagatgatgatcttcctatagaaataagcctgccaaactgggttccgggcagctatctgattcgggatttttcccgccacatcacttctatccatgcatcctgtaacggcacgtccatgccgctcgaacaaattgcaaaaaaccgctggcacgctgccgccgtacgcggcgagtggcaaatccgctacaccgtatatgcattcgatttgtcggttcgaggttctttcctgacgacagaacgcggtttttttgacggatcgtgcctgtttttgaaagtcgaaggaacggaaacgctgccgcaccgcttggaattgacgggtattccgtccgaatggcgtattgccacaacgctgccggaaacagggaggtttgtctttcaggcggcatcttatgccgaattgattgaccgacctgtcgagatgggcttgattgaatttttagattttgaggcggcaggcattccgcacacaattgccttaagcggcatctatcccgatttcgaccgcaacaggctggtttcggatatcaaaaaaatctgcgaaacagaactggcggtgttttcctcccctgccccgtttcaaaaatatttgttcctgctccacgtcggcgaccatatttacggcggtttggaacacgccgacagcaccgccctgctcgccgaccgccacagccttccgccgttcggtatgaccgatgccgacgatgcctacaccacattgctcggacttttctcccacgaatattttcacgcgtggaacgtcaaatccatcaaacctgccgcgttcgccccttatgacctcgacaaagaaaactataccgaacaactatgggcattcgaaggcattacatcctattacgacgatttgtttttggcacgcagccgcaccatctcgcccgaatcttatttaaacctgctggcacaaggcattacgcgcgtacaacaaacccgcggccgtttgaggcagaccttggcggaatcgagttttaccgcgtggaacaaattttacaaacctgatgaaaacagccccaacgccatcgtcagctactaccagaaaggcgcgcttgccgcattgtgccttgatctgataatacgcaaccgaagcaacggcagacattctctcgatacgataatggacaaactctatcgggagtggagggacacacactcgggtattccggaaaaacactggcaaatccgctgtcaggaaattaccggcttggatttggaagattttttccaaaaagcgttatacagtaccgaaaatttgccgcttgccgaatgcctggcaaccgcaggcgtgggactgaccttcctgccgcttccccgacaacacggcggcggatacgcagaacacatctgccccgtcccgtcggcaggcgattttggcgcacgtttcaaacaaaacgccgaccacatcgtcctgacccatgtcttcaacggcggcagcgcggaatctgcggcactgtgtccgcaagacaaaatcattgctttagacggttatgcctgcaccgactttaccgcacaatgggcccgataccacgtcaatgcaaaaatcaatatccacttcttccgtgccggcatattgcgtcaaaccgtcttgacggttcaggcagcggcagcggatactgccatcctacatatcacagaccggaacctgttggacaactggttgttcggttaa

SEQ ID NO: 54379 - DNA, 432 bp, Neisseria meningitidis; identical to SEQ ID NO: 38797

SEQ ID NO: 54380 - DNA, 1455 bp, Neisseria meningitidis
atgagcatcgaaccaacccctccgaaccttgaaaacgacggtatcgaaaacgatgtagaacgcgtttccgccgatttcgaccgtgtccactccctctgcgaaattctcgaacctgcttttgaacaaatcgaaaacggcacaccgcttgaagacgcgccgctgcgcgacaagctgaccgagctgaccgttctcttgagcgagctgcaccctgccgacgtggcggcggtattggaatcgctaccgccgcgcgaacgcaatatcgtctggattctggtcaaaccggaagacgacggcgaagtattgctggaagtatccgacgcggtgcgcgaaacgctgatcgagtcgatggacaaagacgaattgttggcagcggtcgatgatttggacgcggacgaattggcggaactggcagacgatttgccgcaccaagtggtttacgaagcgctacaaacccgcgatgaggaagaacgcgcccaagtcaaagcggcaatgtcctacgaagacaaccaagtcggtgcgattatggacttcgagttggtcagcatccgcgccgatgtcgcctgtgaagtggtgctgcgctatctgcgccgcttcgacagcctgcccgaccataccgacaagatttttgtggtcgatgaaaacgacgtactgcaaggcgtgctgcccatccgcaaacttttggtcgccgatcccgaagatttggtggaaaacgtgatggcgaaagatgtcgtgcgtttccgcgccgaagacgacgtggaagaagcggcgcaggcgtttgaacgctacgacttggtaactgcgccggttgtcgatgaaaacaaaaagctcatcggtaggattaccgttgacgagatggtggacgtaatccgtgaagaatccgaagcggatatgttgaacatggcaggtttgcaggaagaggaagacctgttcgcccccgtcttggattccgtcaaaaaccgctggatgtggctcgccgtcaacctctgcaccgccttcctcgccagccgcgtcatcggcgcgtttgaaggcagtatcgaaaaaatcgttgcactcgccgcgctgatgcccatcgtcgccggtatcggcggcaactcgggcaaccagacgattaccatgattgtccgcgccatggcgatggggcagttgacgggaatgcaggcggggcgcttgttgaaaaaagaagtcggcgttgccctagtcaacggcattatctggggaaccgtcatgggcgcggtttcatggctgctctacggcagcctcggcatcgggctggttatgattgccgcgatgacgctcaacctcctgctggcggcaaccgtcggcgtattaattcccgtggtaatggaaaagttcggacgcgatcccgcactgggcagctcggtgctgattaccgccgttaccgactccggcggcttcctgattttcttggggctcgccaccctattcctgctttaa

SEQ ID NO: 54381 - DNA, 1128 bp, Neisseria meningitidis
atgtacactttccgcccgtttcccaaactgcacacagaaacacacattatgaacatacaaaacatccgcaccctcctcgacaccgtcgccgttccgaatacggcacgcacgctcggcggcgaaaaggccgtccgttcggtcgaacagcgttcagacggcatccatatcgccctgcatttcggcttccccgtcgcgcacattgcctcagaaacagccgaccgcatacaggaaatcctgatgccgctgacaggcgacacacacatccatctgtccatagacaccgaaatcggcacacacaaagtccagcccggcgttaccaccatcaaaggtgtgaaaaacatcattgccgtcgcctccggcaaaggcggcgtgggcaaatcaacaaccaccgccaaccttgccgccgcaatggcgcggatgggcgcgcgcgtcggcgtgctcgatgccgacctttacggcccgagccaaccgaccatgttgggtgtggacgaccgcaaacccgatcagaaaaaccaaaaactcattcccgtcgaatcttcagacggcatacaggtcatgtctatcggctttctcgtcgataccgaccaagccgtcgtctggcgcgggccgatggtcagccaagccttgcagcagctgatgttccaaagcgagtgggacgaagtggactatcttttcatcgacctgcccccgggtacgggcgacatccagctcacgctgtcccagcgcatccccgtaaccggttccgtcatcgtaaccacgccgcaggacatcgccctgatagacgcgcgcaaggctgtggatatgttccgaaaagtcaacattcccattttaggtgtattggaaaatatgtccgtccacatctgctccaactgcggacacagcgaagcactgttcggcacagacggcggcaaagatttcgcggcccgcctcaacgtccccctgctcggacagcttcccctaagcctgcccgtgcgcgaagccatggacggcggcacaccggcgcaactgttcgacgaacaccccgccatcgcccgaatctacaccgatgccgcattccaaatcgccctgggcattgccgacaaaggcaaagacttcagcagccggttccctaaaattgtcgtcgaataa

SEQ ID NO: 54382 - DNA, 927 bp, Neisseria meningitidis
atgtcttttgcattcttctttcccggacaaggctcacaaagcctaggcatgatgaacggctttgccgagcaagccatcgttaaagccacatttgacgaagcttccgccatattggggcaggacttgtgggcgatgattaacggcagcgatgccgaaatcatcggtcaaaccgtcaacacccagcccattatgctcgccgccggcgttgccgtttaccgcgcctatttggaagcgggcggcaaaacgcctgccgccgttgccggacacagcctcggcgaatacaccgcactcgttgccgccggcgcattgaattttgccgacgcggtcaaactcgtgcgcctacgcgccgaactgatgcagtccgccgtaccgcaaggcgtgggcgcaatggcggcaattttgggtttggaagatgaacaggtaaggcagatttgcaccgaatccgcacaggatgaagtggttgaagccgtcaacttcaactcgcccggacaagtcgtaattgcaggcaatgccgccgccgtcggacgcgccatgaccgccgccaaagaagccggtgccaaacgcgccctgccgctgcccgtgtccgtaccttcccattgcagcctcatgaaacccgccgccgacaaactcgccgaagccctcaaaaccgtcgaaatcaagcagccgcaaatccgcgtcatccacaacgccgacgttgccgcctacgatgatgccgacaaaatcaaagacgcgctcgtccgccagctttacagccccgtacgctggacggaaaccgtcaacgcccttgtttcagacggcattgccgaatccgccgaatgcggaccgggcaaagtgttggcgggcttggcaaaacgcatcaacaaaaccgccgcgtgcagcgcgctgaccgatgccggacaggttgccgcctttatcgaagcgcactga

SEQ ID NO: 54383 - DNA, 1008 bp, Neisseria meningitidis
atgagcaccttcttccagcaaaccgcccaagccatgattgccaaacacatcgaccgtttcccgctattgaagttggatcaggtaattgattggcagccgatcgaacagtacctgaatcgtcaaaaaacccgttacctcagagaccaccgcggccgtcctgcctatcccctgttgtccatgttcaaagccgtcctgctcggacaatggcacagcctctccgatcccgaactcgaacacagcctcatcacccgcatcgatttcaacctgttttgccgttttgacgaactaagcatccccgattacagcaccttatgccgttaccgcaaccggctggcgcaagacgacaccctgtccgaattgctcaaactgattaaccgacaactgaccgaaaaaggcttaaaagtagagaaagcatccgccgccgtcattgacgccaccattattcagaccgccgacagcaaacagcgccaggctatagaagtcgatgaagaaggacaaatcaacggccaaaccacaccgagtaaggacagcgatgcccgttggataaagaaaaacggcctctacaaactcggttacaaacaacatacccgtaccgatgcggaaggctatatcgagaaactgcacatcacccccgccaatgcccatgagtgcaaacacctgccgccgttgttggaaggactgcccaaaggtacgaccgtctatgccgacaaaggctatgacagtgcggaaaaccggcaacatcttgaagagcgtcagttgttagacggcattatgcgcaaagcctgccgcaaccgtccgctgacggaaacgcaaaccaaacataaccgatatttgtcgaagatccgttatgtggtcgaacaaagcttcggtacgctgcaccgcaaattccgctatgcgcgggcagcctatttcgggctgattaaagtgagtgcgcaaagccatctgaaggcgatgtgtttgaacctgttgaaagcggccaacaggctaagtgcgcccgttgccgcctaa

SEQ ID NO: 54384 - DNA, 735 bp, Neisseria meningitidis
atggcttcgcataatactacacatcagatgaaaacgctgtgttcttcctgttctttgcgggaactctgcctgcctgtcgggctgctgcccaacgagctcagccaactcgatgccgtcatccgtcaaagccgccgcctgaaaaagggcgaatacctgttctgtgtcggcgaagcctttacctcgctctttgccatccgttcgggcttcttcaaaacaaccgtcgccagtcaggacggccgcgatcaggtaacgggtttctttatgtcgggcgaactcatcggcatggacggcatctgttcccatgtgcacagttgcgacgcggtcgccttggaagacagcgaagtgtgcgaactgccgtttacccacatcgaagaactggggcaaaacatccccagcctgcgtacgcacttcttccgcatgatgagccgtgaaatcgtgcgcgaccaaggtgttatgctgctgttgggcaatatgcgcaccgaagagcggattgccgccttcctgctgaacctttcccaacgcctttattcccgaggttttgctgccaacgacttcatcttaagaatgtcccgcgaagaaatcggcagttatctcgggctgaaacttgaaaccgtcagccgcacattatctaaatttcatcaggaaggattgatttccgtcgagcataagcacatcaaaatcctcaatctgcaggtgttgaaaaaaatggtgtccggctgctcgcacgccatttga

SEQ ID NO: 54385 - DNA, 966 bp, Neisseria meningitidis
atgagctacacgcaactgacccaaggcgaacgataccacatccaatacctgtcccgccactgcaccgtcaccgaaatcgccaaacagctgaaccgccacaaaagcaccatcagccgcgaaatcagacggcaccgcacccaagggcagcaatacagcgccgaaaaagcccagcggcaaagccggactatcaaacagcgtaagcgacaaccctataagctcgattcgcagctgattcagcacatcgacacccttatccgccgcaaactcagtcccgaacaagtatgcgcctacctgtgcaaacaccaccagatcacgctccaccacagcaccatttaccgctaccttcgccaagacaaaagcaacggcagcacgttgtggcaacatctcagaatatgcagcaaaccctaccgcaaacgctacggcagcacatggaccagaggcaaagtacccaaccgtgtcggcatagaaaaccgacccgctatcgtcgaccagaaatcccgtatcggcgattgggaagccgacaccattgtcggcaaaggacagaaaagcgcattattgaccttggtcgaacgcgttacccgctacaccatcatctgcaaattggatagcctcaaagccgaagacactgcccgggcagctgttaggacattaaaggcacataaagacagggtgcacaccatcaccatggataacggcaaagagttctaccaacacaccaaaataaccaaagcattgaaagcggagacttatttttgtcgcccttaccattcttgggagaaagggctgaatgagaacaccaacggactcatccggcaatacttccccaaacaaaccgatttccgtaacatcagtgatcgggagatacgcagggttcaagatgagttgaaccaccgaccaagaaaaacacttggctacgaaacgccaagtgttttattcttgaatctgttccaaccactaatacactag

SEQ ID NO: 54386 - DNA, 810 bp, Neisseria meningitidis
atgacaccgctcaaaatcgctatcgccggcgtcaacggccgcatggggcgcgtattggttgaagccgtcaacaaccatcccgacaccgtcctttccggcgcgctcgaacactcgggctcagaagccctcgggctggacgcaggctacgccgtcggactcaaaaccggcatcgccatttcagacgacgttgacgccgttctcgcacaaagcgacgtactcatcgacttcacccgccccgagcccaccctcaaacacctgcaaaaatgcgttgaaaaacaagtcaacatcatcatcggcacaacaggcttcgacgatgcgggcaaagccgctatccacactgccgccgaacaaacaggcatcgttttcgccgccaacttcagcgtcggcgtcaacctcaccttccacatcctcgacaccgtcgcacgcgtattaaacgaaggctacgacatcgaaatcattgaaggccaccaccgccacaaagtcgatgcccccagcggcaccgcgttacgcatgggcgaagtcatcgccggcgcgctcggcagagacctcaaacaatgcgccgtttacggccgcgaaggccacaccggtccgcgcgatccgtcgaccatcggctttgccaccgtccgcgcaggcgacatcgtcggcgaccacaccgccctcttcgccaccgacggcgagcgcgtggaaatcacccacaaggccagcagccgcatgacctttgccgccggtgccgtccgcgccgcagtttgggtaaacggcaaaacgggtttgtacgatatgcaggacgtactcgggctgaacaaccgttaa

SEQ ID NO: 54387 - DNA, 1788 bp, Neisseria meningitidis
atggctttagttgaattgaaagtgcccgacattggcggacacgaaaatgtagatattatcgcagttgaagtgaacgtaggagacaccatcgccgttgacgataccctgattaccctggaaaccgacaaagcgacgatggacgtgcctgccgaagttgcgggcgtggtcaaagaagtgaaagtcaaagtcggcgacaaaatctccgaaggcggcttgattgtcgtcgttgaagctgaaggcacggcagccgctcccaaagctgaagcacctgctgccgccccggcgcaagaagcccctaaagctgctgctcctgctccgcaagccgcgcaattcggcggttctgccgatgccgagtacgacgtggtcgtattgggtggcggtcccggcggttactccgctgcatttgccgctgccgatgaaggcttgaaagtcgccatcgtcgaacgttacaaaactttgggcggcgtttgcctgaacgtcggctgtatcccttccaaagccttgttgcacaatgccgccgttatcgacgaagtgcgccacttggctgccaacggtatcaaataccccgagccggaactcgacatcgatatgcttcgcgcctacaaagacggcgtagtttcccgcctcacgggcggtttggcaggtatggcgaaaagccgtaaagtggacgttatccaaggcgacgggcaattcttagacccgcaccacttggaagtgtcgctgactgccggcgacgcgtacgaacaggcagccactaccggcgagaaaaaaatcgttgccttcaaaaactgtatcattgcagcaggcagccgcgtaaccaaactgcctttcattcctgaagatccgcgcatcatcgattccagcggcgcattggctctgaaagaagtaccgggcaaactgctgattatcggcggcggcattatcggcctcgagatgggtacggtttacagcacgctgggttcgcgtttggatgtggttgaaatgatggacggcctgatgcaaggcgcagaccgcgacttggtgaaagtatggcaaaaacaaaacgaataccgttttgacaacattatggtcaacaccaaaaccgttgcagtcgagccgaaagaagacggcgtttacgttacctttgaaggtgcaaatgcaccgaaagagccgcaacgctacgatgccgtattggttgccgccggccgcgcgcccaacggcaaactcatcagcgcggaaaaagcaggcgttgccgtaaccgatcgcggcttcatcgaagtggacaaacaaatgcgtaccaacgtgccgcacatctacgccatcggcgacatcgtcggtcaaccgatgttggcgcacaaagccgttcacgaaggccacgttgccgctgaaaactgcgccggccacaaagcctacttcgacgcgcgcgtgattccgggcgttgcctacacttcccccgaagtggcgtgggtgggcgaaaccgagttgtccgccaaagcctccggccgcaaaatcaccaaagccaacttcccgtgggcggcttccggtcgtgcgattgccaacggttgcgacaacggctttaccaagctgattttcgatgccgaaaccggccgcatcatcggcggcggcattgtcggtccgaacggtggcgacatgatcggcgaagtctgccttgccatcgaaatgggctgcgacgcggcagacatcggcaaaaccatccacccgcacccgaccttgggcgaatccatcggtatggcggcggaagtggcattgggtacttgtaccgacctgcctccgcaaaagaaaaaataa

SEQ ID NO: 54388 - DNA, 492 bp, Neisseria meningitidis
atgcgtgcggtcatacagaaaacggtaggtgcaaaggtggatgtcgtgtccgaaaacggcacggaaacctgtggcaaaatcgacggcggattcgtcgtgctgctcggcgtaacgcacgacgacacagaaaaagatgcgcgctatatcgccgacaaaatcgtccatttgcgcgtgtttgaagacgaagcgggcaagttgaacctgtctttgaaagatgtcggcggcgcggtgctgctggtgtcgcagtttacactttatgccgatgcggcaagcgggcggcggccttcgttttcccaagccgcacctgcagaacaggcgcagcagctttacctgcgaacggcggaactgttgcgcggacacgggattcatgtcgaaacagggcgtttccgcacgcatatgcaggtgtcgctctgcaacgatgggccggtaaccatactgctggactctttcatgacgcggatttccccaaaaatgaaggttgttccggattga

SEQ ID NO: 54389 - DNA, 1374 bp, Neisseria meningitidis
atgagtaatccattttcctctttaggtttgggtacggaactcgtttccgcactgaccgcgcaaggttacgaaaacccgacgcccatccaagccgccgccattcccaaagcactcgccggtcatgatttactagccgccgcgcaaaccggcacgggcaaaaccgccgcctttatgctgccctcgctcgaacgcctcaagcgttacgccaccgccagcacctcgcccgcgatgcaccccgtgcgtatgctcgtcctcacccccacgcgcgaacttgccgaccaaatcgaccaaaacgtgcagggctacatcaaaaacctgccgctgcgccacaccgtcttgttcggcggtatgaatatggacaaacagaccgccgacctgcgtgccggctgcgaaatcgtcgtcgccaccgtcggacggctgctcgaccacgtgaaacagaaaaacatccatttgaacaaagtcgaaatcgtcgttttggacgaagccgaccgtatgctggatatgggttttatcgacgacatccgcaaaatcatgcagatgctgccccgccaacgccaaaccctgctcttttccgccaccttctccgccccgatacgcaaactggcgcaagacttcatgaacgcgcccgaaaccgtcgaagtcgccgcgcaaaacaccaccaacgccaacgtcgagcagcacatcatcgccgtcgataccattcagaagcgcaacctgctcgaacggctgattgtcgatttgcatatgaaccaggtcatcgtgttctgcaaaaccaaacaaagcgtcgaccgcgtaacgcgcgaactggtgcgccgcaacctgtccgcacaggcgatacacggcgaccgttcccaacaaagccggctcgaaacactcaacgccttcaaagacggcaacctgcgcgtcctcgtcgccaccgatatcgccgcgcgggggctggatattgccgaactacccttcgtcatcaattacgaaatgcccgcccagcccgaagactacgtccaccgcatcgggcgcacggggcgcgcgggcgcggacggcgtggcgatttccctgatggacgaatccgaacagaaaatgtttgaatccattaaagagctgaccggcaacaagctgctcatcgagcgcatcgagggcttcgagccgcaatggtgggaacagggcggcgcaaaaccggaaaaacccgaaatgcgcgaaccaagacaacgcaaccgctacgaatccgccaaagcgcaacgcgaaaaaaacacccggccggaaaatgcggcaaacgatgcgggcgcggcttgcggaaaaattgccggacgcagccgccgaagccgccgggaacaccggacgtgcgccctgctccaaccgcgttacggcgtaaaatag

SEQ ID NO: 54390 - DNA, 1227 bp, Neisseria meningitidis; identical to SEQ ID NO: 40906

SEQ ID NO: 54391 - DNA, 567 bp, Neisseria meningitidis; identical to SEQ ID NO: 46235

SEQ ID NO: 54392 - DNA, 540 bp, Neisseria meningitidis; identical to SEQ ID NO: 47703

SEQ ID NO: 54393 - DNA, 1065 bp, Neisseria meningitidis
atgttggtattaggaatcgagtcttcttgcgacgaaacaggtgttgcgctttacgatacggaacgtggattgcgggcgcactgcctgcacactcaaatggcaatgcacgccgaatacggcggggttgtgccggaattggcaagccgcgaccatatccgccgccttgttccgttgactgaaggctgtttggcgcaggcgggcgcatcgtatggcgacattgacgcggttgcctttacgcaggggcccggtttgggcggtgcgctgctggcgggttcgagctacgccaacgcgctggctttagcgttggacaagcctgttattcccgtccatcatttggaaggacatctgctgtcgccgctgttggcggaggaaaaacccgactttccttttgtcgcgctgctggtttcgggcgggcatacgcagattatggcggtcaggggcataggcgactacgcgcttttgggcgagagcgtcgatgatgcggcgggcgaggcattcgacaaaacggcgaaactgctgggcttgccgtatccgggcggtgcgaaactgtcggaacttgcggaatcgggcaggcccgaagcgtttgtttttccgcgcccgatgattcattccgacgatttgcagatgagtttttcaggtttgaaaaccgctgttttgactgccgttgaaaaagtgcgtgaggcaaacggttcggaaaccattcccgagcaaacccgcaacgatatttgccgtgcgtttcaagatgcggtagtcgatgtgttggcggcgaaagtgaaaaaagccctgttgcagacagggttcagaaccgtagtggtcgccggcggggtcggtgcaaaccgcaaactccgtgaaactttcggcaatatgacggtgcaaatcccgaccccaaaaggcaagccgaaacatccgtccgaaaaagtcagcgtgtttttcccgccgacggcatactgcacggacaacggtgccatgattgcctttgccggtgcgatgcacctgggcaagggcagggaggtcggtgcgttcaatgtccgtccgcgctggccgctgtcggaaatcgtcagatga

SEQ ID NO: 54394 - DNA, 519 bp, Neisseria meningitidis; identical to SEQ ID NO: 39562

SEQ ID NO: 54395 - DNA, 561 bp, Neisseria meningitidis
atgaaaacagcacaagaactgcgcgccggcaatgtatttatggtcggcaacgatcctatggtcgttcaaaaaaccgaatacatcaaaggcggccgctcttccgccaaagtcagcatgaaactgaaaaacctgctgaccggcgcggcttccgaaaccatttacaaagccgacgacaaattcgacgtggtcatcctgtcccgcaaaaactgtacgtacagctattttgccgacccgatgtacgtctttatggacgaagaattcaaccaatacgaaatcgaagccgacaacatcggcgacgcgttgaaattcatcgttgacggtatggaagaccaatgcgaagttaccttctacgaaggcaaccccatttctgtcgaactgcctaccatcatcgtacgcgaagtcgagtacaccgagcctgctgtcaaaggcgacacttccggcaaagtgatgaaaaccgcgcgtctggtcggcggcaccgaaatccaagtgatgtcttacatcgaaaacggcgacaaagtcgaaatcgatacccgcaccggcgaattccgcaaacgcgcctga

SEQ ID NO: 54396 - DNA, 1407 bp, Neisseria meningitidis
gtggaatttagcacaaaaaccgaaatcttgcaggaacagcaggcaggcgcgcagttatttgtctgcaccgaagaggcgcaattaaaccatccgaccgcccttgcccttttgtcttcgcttgaagaaggtcaaaattttgccgacacaaaaatcccgacggacaacggtttgcaagccattgccgtcgcccgcctcgctaaaaccgaccgcgccgcgctgaacaaagtcgcagccgaagccgccaaatgggcgcaaaatcaggaaacggtcaatgtggacatccatgccttcgatgaagcgcaagccgccgccgtagccgaagcgtttgcgattgcgttcggcaacgccgcctaccgtttcgaccgctacaaaaaagaagccaagcccgccaaatttgaaactgccgtgttccacagcgcacacgaagccgccgttaaagaagccttgcgcgtcgccgaagcgcaagtttacggacaaagcctctgccgcgacttgggcaatgccgcgccgaacgaatgcacgcccgaatttttagcgcgcaccgccaaggccgaagccgaaaaactgggcgcgcacgccaaaatcatcgaaaaagactacatcaaagaaaacatgggttcgttctggtcggtcgccaaaggcagcgtcgaagatccctatttggtcgaactgagctatttcggtgcagccgacaaagaagccgcgcctgtggtattggtcggcaaaggcattaccttcgacaccggcggcatttccctcaaacccggtctgaacatggacgaaatgaagtttgatatgtgcggcgcggcaaccgtcatcagcaccttctgcgccgccgtcaaactgcaactgccgatcaacctgattgccatcgtcgccacttgtgaaaatatgccttccggcgcggccaacaaaccgggcgacgtcgtaaaaagcatgaaaggcctgaccatcgaagtgttgaacaccgatgctgaaggccgtctgattttgtgcgacgcgctcacttacgccgaacagttcaaacccaaagccgtcatcgacgtcgccaccctgaccggtgcgtgtattgttgccttggggcacgatgtcagcggcgtgatgggcaacaatcaagatttggtcgacagcctgcttgccgcttcctacaacgtggacgacaaagcgtggcaactgccgctctttgagacctacaaagaccaactcaaatccaactttgccgacattccaaacatcggcacgcccggcgcgggcacgattaccgccgcaacattcctatcctactttaccgaagactatccatgggcacaccttgacatcgcgggtacggcgtggaaatccggtgcggaaaaaggtgcgaccggccgtcccgttcccttgctgctgaactatctgcggaatctttaa

SEQ ID NO: 54397 - DNA, 1017 bp, Neisseria meningitidis
atgtatcggaaactcattgcgctgccgtttgccctgctgcttgccgcttgcggcagggaagaaccgcccaaggcattggaatgcgccaaccccgccgtgttgcaaggcatacgcggcaatattcaggaaacgctcacgcaggaagcgcgttctttcgcgcgcgaagacggcaggcagtttgtcgatgccgacaaaattatcgccgccgcctacggtttggcgttttctttggaacacgcttcggaaacgcaggaaggcgggcgcacgttctgtatcgccgatttgaacattaccgtgccgtctgaaacgcttgccgatgccaaggcaaacagccccctgctgtacggggaaaccgctttgtcggatattgtgcggcagaagacgggcggcaatgtcgagtttaaagacggcgtattgacggcagccgtccgcttcctgcccgtcaaagacggtcagacggcatttgtcgacaacacggtcggtatggcggcgcaaacgctgtctgtcgcgttgctgccttacggcgtgaagagcatcgtgatgatagacggcaaggcggtgaaaaaagaagacgcggtcaggattttgagcggaaaagcccgtgaagaagaaccgtccaaacccacgcccgaagacattttggaacacaatgccgccggcggcgatgcgggcgtaccccaagccgcagaaggcgcgcccgaaccggaaatcctgcatcctgacgacggcgagcgtgccgataccgttaccgtatcacggggcgaagtggaagaggcgcgcgtacaaaaccagcgtgcggaatccgaaattaccaaactttggggaggactcgataccgacgtgcaaaaagagttggtcggcgaacaacgcaagtgggcgcaggaaaaaatcagcaactgccgacaagccgccgcgcaggcagaccggcaggaatacgccgaatacctcaagctgcaatgcgacacgcggatgacgcgcgaacggatacagtatcttcgcggctattccatcgattag

SEQ ID NO: 54398 - DNA, 759 bp, Neisseria meningitidis; identical to SEQ ID NO: 46332

SEQ ID NO: 54399 - DNA, 156 bp, Neisseria meningitidis; identical to SEQ ID NO: 39708

SEQ ID NO: 54400 - DNA, 411 bp, Neisseria meningitidis
atgaaaatttataatttagataatattataacttcatcagcattgagtctgtataaatccacttgggttaagttagatttaatatcttgtgctaaatttatcatagaaggaacggattttacttttgattgggatgaaggaattgaaaattggatagttttttttcataaaaacaaagttattggttatttgtgtgcaaaattaccttttgctatattagacaacgaacaattaaaaaatcagctatatcacaaatatcctcatgtattaaccttacaaattaaaaatattgaaactgaaaaaatatctttaaatgtaaacatttgtagattaacgttatgcccatcatttcatgatgaacatgatacgcttgtttgttcagtacaagatttttatgtaaatactgtttaa

SEQ ID NO: 54401 - DNA, 450 bp, Neisseria meningitidis
ttggtcatccaagacggaaaaatcctatacaaacaggaaacctccgtcagcgaagaacagctcaaccaactcatccagcgcacctatcaggtaacagaagaaaaagcggaagaaatcatcaactccccgcaaaaaccttccgattaccaagaaagcgtggcaaactatttcaaccagcagattacccaagaaatacaaagggtcttgcagttttattacaccacgcagaccgcagacgatatgaccgacatcaagcatatcctgctgaccggggaagcggcgcgccaggaaggtatcgcccaaaccgtcgcctcacaaaccaatgcagatgtacaatgcgtccatcccgcgcgttattttgcggacaacctcaaaacagacaaacaacaattcgaacttgatgcgccgacactgaccagggcgttcggtttggcggtacggggattataa

SEQ ID NO: 54402 - DNA, 393 bp, Neisseria meningitidis
atgagtatgcatgatcctatttccgatatgttgactcgtatccgcaatgcgcaacgtgctaataaagcagcggttgcaatgtcttcttcaaaattaaagtgtgctattgcaaaggtattgaaagaagaaggatatattgaggacttcgcagtttcatctgacgtaaagtctatattggaaattcaattaaaatactatgcaggtcgtcctgtaattgaacaaatcaagcgtgtatctcgccctggtttgcgtatttataaagcgtctagtgagattccaagtgttatgaatggcttgggtattgctattgttagtacttctaaaggtgtaatgactgatcgtaaagcacgttctcaaggtgttggtggtgagttgttatgcattgtagcctag

SEQ ID NO: 54403 - DNA, 1314 bp, Neisseria meningitidis
ttgccatgccgtctgaaagccgtttcagacggcatttgcattctcatccgacttgaaagcatcatagaacaggcgcaaaatattaacaaattaaacaacgggcgcacgctccgttgccgaacggacaaaaccgaggaatcaccgatgagcaaaaaactccatccgcaaacgctcgccatacgcggcggcaaagaacaaaccgaataccgcgaacacaatcaggcattgtttctgaccagcagcttcatgtgggacaacgcccaacacgctgccgatttgttttcaaaaaaaatcaaagggttcacttatacccgtaccgccaacccgaccacagccgcctttgaaaaacgcatcgccgctttggaaggtgcggaacgcgcggtcgccacttcgacgggtatgtctgcgattcaggcggcgtttttcacctttttgcaggcgggcgaccacgtggtttccagccgcagcctgttcggcacgaccgtcggctttatcaataacatcgttaccaaattcggcatcgaagtgagccacgtgtcgccgactgatataaacgaatggaaagccgccgtcaaagccaacaccaaactgctgtttttggaaacgccgtccaatcccttgggcgaagtggccgacttggaagccttggcggaattggcgcacggcatcggcgcgattttggtggtggacaacagcctgctgtcgcccgtcggctcgcagcctttgaaacacggcgcggatatttccgtttcctccgcgaccaaagccatagacggacacggacgcgtgatgggcggcgtgttggcgggttcggaagaattgatggcgcaggccgccgtttactgcaactcttgcgggctggcgatgtcgccgtttaatgcgtggcagttgttgagcggcgtggaaaccctgtcgctgcgtatggaaaaacagttcgacaacgccctgaaaatcgcacaatggctgcaagcgcagccgcaggttcaagccgtgtactacaccggattgcccgaccatccgcaggcggcgcttatccgcaaacagcaaaacggcggcggcatcgtcatcggctttgaagtcgccgaccaagcagccgcgtggaaagtcgtggacggcgtggaactcttttcccgtaccgccaacctcggcgacgtgcgctcgaccatcacccatccgtggacaaccacgcacggcaggatgcagcccgaagaaaaactcgccgccaacatccgccccggattggtgcgcctgtcggtcggtttggaatatgttggcgatttgattgacgatttgaaacaggcactcgcacgctga

SEQ ID NO: 54404 - DNA, 693 bp, Neisseria meningitidis; identical to SEQ ID NO: 42313

SEQ ID NO: 54405 - DNA, 453 bp, Neisseria meningitidis; identical to SEQ ID NO: 43802

SEQ ID NO: 54406 - DNA, 936 bp, Neisseria meningitidis
atggggcacaatatgatgaccacccaaaaatggtatgagcatattactaatgtaatcataggcaatactgctaatttcaatagcggttgccttgactctatagattatgtagatgaaagaaaaggcgttccgcttgcagctatgcaacatattttcatggacgttagagctgcagcttcccatgcctatctatttgaacatgatcttaagaaattcaagcaatatgcttatgttgcaggaaagctgggggttttgctgagtgtaaattctacagaccctgaacccttcttctttccctgtgacatgctcaacattcaaaatccgatgtttctgatgctgatgagcgacagcccacagctgcgcgagtttctggtgcgcaatatcgacaacatcgccaacgatacagaagcctttataaaccgctacgacctcaaccgtcatatgatttacaatactctgctgatggtagagggtaagcagcttgatcggttgaaacaacgtagcgagaaagtcttggcgcatcccacccctagcaaatggctgcaaaagcggttgtacgattaccgcttcttcctcgctttcgccgaacaggatgccgaggcaatgaaagccgccttagagccgcttttcgataaaaaaaccgcgcgtatggctgccaaagaaacattgtcctatttcgatttctacctgcagccgcaaatcgttacctacgccaaaatcgcatccatgcacggtttcgatttgggcatagatcaagaaatcgcaccgagggatttgattgtttacgatccgctgccggcagacgaatatcaagacatcttcgattttatgaaacagtatgacttgtcttacccgtatgaatatctgcaggattggatagattactatacgttcaaaaccgataagctggtatttggtaacgcgaagcgagagtga

SEQ ID NO: 54407 - DNA, 288 bp, Neisseria meningitidis; identical to SEQ ID NO: 36767

SEQ ID NO: 54408 - DNA, 861 bp, Neisseria meningitidis
ttgcccgtcttcccgataagccttaaaatacacgccgtcaaacctaccgtccgtccgtacatgagcccatccccctttatcgaaatgaaagacgtcgccttcgcgtatggcgaccgcccgattctgaagaacatcaatttcagcattccgcaaggcaattttgctgccgtaatgggcggttcgggcagcggcaaaaccacgctgatgcgactgattacaggacagattcgtccgcagtccgggcaggttttgattgaaggacgggatttggcgggcttttcggctgacgagttgtatgaacaccgccgccgtatgggcgtattgttccaacacggcgcgctgtttaccgatttgtctgtatttgacaatattgcttttccgatgcgcgaactgacgcgcctgccggaagcggtgattcgagatttggttttgttgaaactgaacgcggtcgggctgcgcggcgtggaaaacctgatgccgtccgagttgtccggcgggatgtcgcgccgcgtcgcgcttgcccgcacaatcgcgctcgatcccgaaattatgttgtacgacgagccgtttaccggtctcgatccgatttccttgggcgtgattgcccacttgatcagccgcgtcaacaaggctttgcgttcgaccagtattatggtcacgcacgacattgaaaaatctttggaaatcgtcgatcaggtgattttcttggcgcacggcgaaattatgttctccggctcgccgcaggaaatgcgcgaactggattcgccttgggtgcgccagtttgtcggcgggctggcagacggccccgtggcataccgttatccggcgcaaacgtcgttgcagcaggatttgctcgggtaa

SEQ ID NO: 54409 - DNA, 198 bp, Neisseria meningitidis; identical to SEQ ID NO: 36305

SEQ ID NO: 54410 - DNA, 507 bp, Neisseria meningitidis
atgcccctactagacagtttcaaagtcgatcacacccgtatgcacgcccccgccgtacgcgtggcgaaaaccatgaccacgcccaaaggcgacaccattaccgtattcgacctgcgtttctgcgtgcccaacaaagaaatcctgcccgaaaaaggcatccacacgctggagcatttgttcgccggttttatgcgcgaccacttgaacggcaacggcgtggaaattatcgacatttccccgatgggctgccgcaccggtttctacatgagccttatcggcacgccttccgaacagcaggtcgccgatgcatggctcgcctcgatgcaggatgtgggcaatgtcaaagaccaaagcaaaatccccgagttgaacgaataccaatgcggcacttatcaaatgcactcgctcgccgaagcgcagcaaatcgcgcaaaacgtgttggcgcacaaagtggcggtgaacaaaaacgaagagctgacgctggatgaagggctgctgaacgcctaa

SEQ ID NO: 54411 - DNA, 951 bp, Neisseria meningitidis
atgtcccaacaccgcaaactgattattttgggttccggccccgccggatacaccgccgctgtctatgccgcgcgcgccaatttaaaccccgtcattattacaggtatcgcgcaaggcgggcaactgatgaccaccaccgaagtggacaactggcctgccgatgccgacggcgtgcaagggccggaattgatggcgcggtttctcgcccacgccgaacgtttcggaacggaaatcatttttgaccaaatcaacgccgtcgatctgcaaaaacgcccgtttacactcaaaggcgatatgggcgagtacacttgcgatgccctgattgtcgcaacaggcgcgtccgccaaataccttggtttgccgagtgaggaagcgtttgcagggaaaggcgtttccgcttgtgccacctgcgacggtttcttctacaaaaaccaagatgttgccgtagttggcggcggcaatacggcagttgaagaggcactctaccttgccaatatcgccaaaaccgttaccctgatccaccgccgcagcgagttccgtgccgaaaaaatcatgatcgacaaactgatgaaacgcgtggaagagggcaaaatcatcctcaagctggaaagcaacctgcaagaagtactgggcgacgatcggggcgtaaacggcgcattattaaaaaacaacgacggttctgagcaacaaattgccgtcagcggcatttttatcgccatcgggcacaagccgaataccgatattttcaaaggtcagttggaaatggacgaagctggttacctgaaaaccaaaggcggcacggcggacaatgtcggcgcaaccaatatcgaaggcgtatgggcggcgggcgacgtaaaagaccatacctaccgtcaggcgattaccagcgcggcttccggctgtcaggcggctttggacgcggaacgctggctgggcagccaaaacatttga

SEQ ID NO: 54412 - DNA, 1311 bp, Neisseria meningitidis
atggacacttcaaaacaaacactgttggacgggatttttaagctgaaggcaaacggtacgacggtgcgtaccgagttgatggcgggtttgacaacttttttgacgatgtgctacatcgttatcgtcaaccctctgattttgggcgagaccggcatggatatgggggcggtattcgtcgctacctgtatcgcgtctgccatcggctgttttgttatgggttttgtcggcaactatccgattgcactcgcaccggggatggggctgaatgcctatttcacctttgccgtcgttaagggtatgggcgtgccttggcaggttgcgttgggtgcggtgttcatctccggtctgatttttatcctgttcagcttttttaaagtcagggaaatgctggtcaacgcactgcctatgggtttgaaaatgtcgattgctgccggtatcggtttgtttttggcactgatttccctgaaaggcgcaggcattatcgttgccaatccggcaaccttggtcggcttgggcgatattcatcagcccagcgcactgttggcattgttcggttttgtcatggtggtcgtattggggcatttccgcgttcaaggcgcaatcatcatcaccattctgacgattaccgtcattgccagcctgatgggtttgaatgaatttcacggcatcatcggcgaagtaccgagcattgcgccgacttttatgcagatggattttgaaggcctgtttaccgtcagcatggtcagtgtgattttcgtcttcttcttggtcgatctatttgacagtaccggaacgctggtcggcatatcccaccgtgccgggctgctggtggacggtaagctgccccgcctgaaacgcgcactgcttgcagactctaccgccattgtggcaggtgcggctttgggtacttcttccaccacgccttatgtggaaagcgcggcgggcgtatcggcaggcggacggaccggcctgacggcggttaccgtcggcgtattgatgctcgcctgcctgatgttttcacctttggcgaaaagtgttcccgcttttgccaccgcgcccgccctgctttatgtcggcacgcagatgctccgcagtgcgagggatattgattgggacgatatgacggaagccgcacccgcattcctgaccattgtcttcatgccgtttacctattcgattgcagacggcatcgccttcggcttcatcagctatgccgtggttaaacttttatgccgccgcaccaaagacgttccgcctatggtatggattgttgccgtattgtgggcactgaaattctggtatttgggctga

SEQ ID NO: 54413 - DNA, 1248 bp, Neisseria meningitidis
atgcaacttaccgctgtcggactcaatcatcaaaccgcacctttaagcatacgggaaaagctggcgtttgccgcggcctgcctgcccgaagccgtccgcaatcttgcccgaagcaaggcggcaacggaggcggtaatcctttctacctgcaaccgcaccgagctttactgtgtaggcgattcggaagaaatcatccgttggctcgcagactatcacagccttcccatagaagaaatcagcccctacctttatactttggggatgcaggagactgtgcgccatgccttccgcgttgcctgcggcttggattcgatggtgttgggcgagccgcagattttaggacagattaaggatgcggtcagggttgctcaagagcaggaaagtatgggtaagaaactcaatgccctgttccaaaaaaccttttctgttgctaaagaggtccgtaccgatactgccgtcggcgaaaactcggtttccatggcttccgcttccgtcaaattggcggaacagatttttcccgacatcggcgatttgaatgtcttgtttatcggcgcaggcgaaatgattgagctggttgccacttattttgccgccaaaagtccccggctgatgacggttgccaaccggacgctggcgcgtgcacaggagttgtgcgacaagctcggtgtcaacgccgaaccgtgcctgctgtccgatctgcctgctattctgcacgattacgacgtggtggtttcttcaacggcgagccagcttccgatagtcggcaaaggcatggtcgaacgtgcattgaaacagcgtcagagtatgccgttgtttatgcttgatttggccgtgccgcgcgatattgaagcggaagtcggcgatttgaacgatgcctatctttatacggtggacgatatggtcaacatcgtccaaagcggcaaggaggcaaggcagaaggccgccgccgccgccgaaacgctggtatccgagaaggttgccgaatttgtcaggcagcagcagggcaggcagagcgtccccttgattaaagccttgcgggacgagggcgagaaagcgcgcaagcaggtgttggaaaatgcgatgaaacagcttgccaaaggcgcaacggcagaagaggttttggaacggctgtccgtccaactgaccaacaagctgctgcattcgccgacccaaactttgaataaggcgggggaagaagataaagatttggttcatgccgtcgcgcagatttatcatttggacaaataa

SEQ ID NO: 54414 - DNA, 627 bp, Neisseria meningitidis
atgtatacaggcgaacgcttcaatacttacagccatttgagcggtttgattctggcggcggcaggtttggcgctgatgctgctgaaaaccataggacacggggacggctaccgtatcttcagcgtatcggtttacggcatcagccttcttctgctctatttgagttcctcgctgtaccacggaattgcagccggaaaactgaaaagcattttgaaaaaaaccgaccactgcatgatttatgtgctgattgccggaagctacacaccgtttgcactggtttctttgagaaacgggccgggctggacggtattttcactgtcctggctgctggcggctgcaggaatcgcacaagaactcaccatcggacggaaaagcgaaaaacgactgctgtctattgtgatttatgtcgtcatgggttggatggtcttggcggtaatgaaatccctgacagcctcactcccgccggcaggactggcttggctggcggcaggcggtatgctgtacagcgtcggcatttactggtttgtaaacgatgaaaaaatccgacacgggcacggaatttggcatctgttcgtattgggcggcagcatcacccaatttgtcagcgtgtacggttatgtaatctga

SEQ ID NO: 54415 - DNA, 1284 bp, Neisseria meningitidis
atgactgcatcgaaatcaggttttatcgggcaaatcttttcccgcaatatgcttgtctgtatttttacggggtttacctcggggctgccgctgtactttctgattaacctgattccggcgtggttgcgcagcgagcaggtggatttgaagagcatcgggctgatggcgttaatcggtctgccgtttacttggaaatttttgtggtcgccgctgatggacgcggtcaggctgcccgttttgggacggcggcgcgggtggatgctgctgacgcaggcagggttgctggcggctttggcggcctatgcctttttaaacccccgtaatcatctgccgctgattgccggcttgtcggtgcttgtcgcttttttttccgccagtcaggatattgtattggatgcgttcaggcgcgagattttgtcagacgaagaattgggtttgggcaactcggttcatgtgaacgcctaccggattgccgccctgattcccggttcattgagtttggtgttggcagacaggatgccgtggtcagaagtatttgttatcacttcattatttatgctgcccggccttctgatgacgctgtttctcgcgcgcgaacccgtgttgccgcctgccgttcctaaaacgttgaagcagaccgtggtagagccgtttaaagaattttttacgcgcaagggcatcgcttcggcggtgtgcgtgctgctgtttatcttcctttacaaactcggcgacagtatggcaaccgcgttggcaacgccgttttatctggatatgggtttcagcaagacagacatcggtttgattgcaaaaaatgcaggactgtggccggcagtggcggcaggtatcttgggcggcgtgtggatgctgaaaatcggcgtaaacaaagccttgtggatatttggcgcggtgcaggctgtaaccgttttggggtttgtatggctggcagggttcggacatttcgacacggtcggcacaggcgagaggctgatgctggcggcagttatcggcgcagaggcagtcggcgtgggtttggggacggcggcgtttgtatcgtatatggcgcgcgagaccaatcccgcatttaccgcaacgcagcttgcactgtttaccagcctgtccgctgttccccgtacggtcatcaattcctttgccggttatctgattgaatggctcgggtatgtaccgtttttccagctgtgtttcatacttgccctgccgggtatgctgctgctgctgaaagttgcgccttggaacggggagaaaactcaggatgcaggcagatga

SEQ ID NO: 54416 - DNA, 936 bp, Neisseria meningitidis
atgagcgtattgattattgtcgaacacgacaacaaacagttgaatcctaccactttgcatgctgttaccgctgccgccaagctgggtaaagtcgatttattggttgccggaagcggtgcatctgccgtagtagagtccgcaaaacaagtggcgggtgtggaaaaagttttggttgcagatgctgcccattatgccgaaggtttggctgaagagttggctccgctggttgttaaattggcagcggattaccgctatgttgcagcaacggcaaccacattcggtaaaaaccttttgccccgcgtagccgccttattagacgtaccgcaaatttctgatttgaccgagattgtagataacacgacttttgtacgtccgatttatgcaggtaatgcatttgaaaccgtgcaagccaatgcggaaaaattggtgctgaccttccgtgcgacggcttttgacgcagcggcggtgcaaggtggtaatgctgaggtaattaatattgaaacaacccctgcccaaaacctgagtcgttttgttaaccgtcagctttcccattccgatcgtcccgaactgactcaggcaaaagtgattgtttctggtggtcgtgcgttgggtagtgcggaaaaatttaatgaagtgctgacaccgttggcggatgttttaggtgcggcaatcggtgcatcccgtgcggcagttgatgccgaatatgcgccaaacgatgctcaagtcggacaaaccggtaaagtagttgcgccgcaactctattttgcaatcggtatttcaggtgcgattcaacacgttgccggtatgcaagacagtaaggtgattgttgcaatcaataaagatgctgatgcgccgattttcaatgtagccgattacggattggttggcgatttatttgaaatcgttccacaattaacagaagcattgaaaaattaa

SEQ ID NO: 54417 - DNA, 741 bp, Neisseria meningitidis
atgaatcctttaatctccgacttccaaactccgcaacaacgcacccccgttatcgtcgcccttgatttttccaacgaaaaagacacgctcggattcgtccgcaaccttgacccgacattgtgtcaaatcaaaatcggcaaagagctgtttaccgcgacgggacgcaatttggcagaaagcttaatcaatcaaggtttcaaacttttcctcgatttgaaataccacgatattccccacaccgtcgcgcaagcctgcaaagtcgctgccgatatgggcgtttggatggtcgatatgcacgcatcgggcggccgccgtatgatggaagccgcagcagaagccgttgccggatacggcacgaagccgctcttaatcggcgtaaccgtgttgaccagcatggaacaaagcgatttggcggaaatcggtttgaacaccgcccctgaagaacaagtcatccgcttggcgaaactggcgcaaagttcgggcttggacggcgtggtctgttccgcccaagaagccgcaccgctgcgccgcgagttgggacaagattttgtcttggtcacgcccggcatccgcttggacgttgccggcaataatgatgaccagcgccgcatcatgacaccggccgaagccttggctgccgcttcgacttatttggtaatgggtcgtcctgtaacccaagctgccgatccggtagccgtattgcgcgaagtgaaccgcgtggcaaaccttgaagcaaactga

SEQ ID NO: 54418 - DNA, 549 bp, Neisseria meningitidis
ttgaatttaacggagggcgacaccgtgttggacagggaaggctatcgccccaatgtcggtatcatcttaatcaacaaccgcgacgaagtcttttggggcaagcgcgtgcgcgaacattcttggcagtttccgcaaggcggcatcaagccgggcgaaagccccgaaaccgccatgtaccgcgagttgtacgaagaagtcgggcttttgccgcaacacgtcaaaattatcggccgcacgcgcgactggctgcgttatgacgtgccgaacaactgggtacgccgcgaatggcgcggatcctatcgcgggcagaagcagatttggtatctcctgcgcctgaccggccgagattgcgatgtcaacctgcgcgccacccgccaccccgaatttgacggctggcgttggcatcaatattgggcgcccgttgacgaagtgattgatttcaaacgcgacgtttatttgggggcgttgaaagaactctcttcccgcttcctgcgcggtatggaaagttatgaagactttgccgcccgccaatcttccgacaaccgctaa

SEQ ID NO: 54419 - DNA, 1272 bp, Neisseria meningitidis
atgaaactgctggttatcggtaatggcggtcgcgaacacgcgctggcttggaaattggcgcagtcgcctaaagtggaaacagtatttgttgcgcctggtaatgccggtacagcgattgaacccaagttgcaaaacatcgacttgactgcgcatcaggatttgattgaattctgtcgtaaagaaaatattgtttttactgtcgtcggccctgaagcgcctttggcggcaggtgttgtggatgatttccgtgccgcaggactaaaaatattcggtccgacacaatatgcggcgcagttggaaagttccaaagatttcgccaaagcatttatggcgaaatacaatattccaaccgcgcaatatcaaacctttgaaaacgccgatgccgcacatgattacgtcaatcagaaaggtgcgcctatcgttatcaaagccgatggtttggcggcaggtaaaggcgtgattgtggcgatgactttggatgaagcgcatgctgcgattgatgatatgctgctggacaacaaaatgggcaatgccggcgcgcgtgttgtgattgaagatttcctgcaaggcgaagaagcgagttttatcgtcatggttgatggcaataatgtactgcctatggcaaccagccaagaccacaagcgtcttttagacggcgacaaaggtctgaatacgggcggtatgggtgcgtacagccctgcgcctgtggtaacgcctgttgtgtacgaacgcgcgatgaatgaaattattttgccgaccgtagcagggatgaaagcggaggggcatgagttcaccggtttcctgtacgcaggtttgatgattgatcaaagcggtgcaccctatacgattgagtttaactgccgtttcggcgatcctgaaacccagccgattatgagtcgtctgaacagcgacttggcggatttggttgaagcggcaatagacggtaaacttgatagtgttgctgccgaatggaatccacaaactgccgtaggtgtagtgttggcggcgcaaaactatcctgaaacgcctaaaaaaggcgatgttatttccggtctggatgctgccaaccaggtaggcaaagttttccatgcaggtacaacggcaaacgagaaaggtgacgtattgaccaacggcggacgcgtattgtgtgttgtgggattgggcgacaatgtggcgcaagcgaaagctaaggcatatggcgcgttggaaaaaatcagcttcgacgggatgcaataccgtaaagacattgccgataaagcgattaaccgttaa

SEQ ID NO: 54420 - DNA, 360 bp, Neisseria meningitidis
atgatacgttatcttttaattgcctgcggctgcatttccctgctgttgggtatcatcggcatttttttgccgctgttgccgaccacgccgttcgtactgctctccgccgcctgctgggcaaaggcatccccgcgctttcaccgctggctgcaccggcaccgctatttcggtccgatggttcataactgggaacaaaacggcgcagtgccgcgcaaagccaaaatattcgccatcagtatgatgaccgcatcctgcctgataatgttttggcagtttccccaacgctggtgggtcggggcggtttcatcggttttttgttcccttgtcgccatatggatgtggcgcaggcccgaatcttga

SEQ ID NO: 54421 - DNA, 459 bp, Neisseria meningitidis
atgcccatcactccacccttaaacatcatctcccctaaactctaccccaatgaacaatggaacgaaagcgaagcactcggtgccatcacttggctatggtatcagtcgcctacgcatcgccaagtacctattgtggagatgatgacgtatatattgcctgtgttaaaaaacgggcagttcgctttgttttgcaagggtacccaaccaatcggttatatctcatgggcttattttgatgaagtggcgcaggcgcattatttagaatctgaccgccatttgcgtgacaacagcgattggaactgtggcgacaatatttggctgattcaatggtttgcgccattgggacacagtcatcaaatgcgctcagctgtgcgccagttatttcctagtacgacagtacgcgccttgtatcataaagggagcgataagggtttgagaattttaacttttaaaacttga

SEQ ID NO: 54422 - DNA, 474 bp, Neisseria meningitidis; identical to SEQ ID NO: 44983

SEQ ID NO: 54423 - DNA, 660 bp, Neisseria meningitidis; identical to SEQ ID NO: 36652

SEQ ID NO: 54424 - DNA, 582 bp, Neisseria meningitidis; identical to SEQ ID NO: 37500

SEQ ID NO: 54425 - DNA, 918 bp, Neisseria meningitidis
atggttttggacgggtttgcggcgcattttgacgcttatttggaaaacatcgtgcgcgagggcaagtcggagcacacggtggcggcataccggcgcgatttggaagaactgtttgcgctgttggcacaaatgccgtctgaagatgcaggcggcgtgccgcaggacttgtcgcggcgcgattttacggcggcgttgcggcggctgtcgcagcgcggtttgaatgcgcggacgctggcgcgcaagctgtcgtcttggcggcagtattgtgtttggctggtggaacgcggtctgctgcataccgacccgaccgccgacatcaaaccgccgaagcagcccgagcgcgtacccaaagccctgccgcaggaatggctgaaccggatgctggatttgcccgtggacggcggcgacccgctggcggtgcgcgaccacgccctgttcgagctgatgtacggcagcggtttgcgcgtgagcgagatacacggcttgaatgcagatgatgtctatttggacgaggcgtgggtacacgttaccggcaaagggcgcaagcagcggcaggtgtcgctgaccggcaaaagcgtggaagccctgaaaaactatctgccgctgcgtcagacggcatcggacggcaaagccctgtttaccggcaggaacggcacgcgcctgagccaacgccaaatccaaaaacgtttggcgcaatgggcggcgcaaaacggcgacggcaggcacgtttcgccgcatatgatgcgccacagctacgccggacacctgttgcaggcttcgcgcgacatcagggcggtgcaggagctgctcgggcacagcagcctttcgaccacgcagatttacaccaaactcgatttcgaccacatcgcccgcctgtatgacgaagcccacccgcgcgccaagcggcaggacgaatga

SEQ ID NO: 54426 - DNA, 456 bp, Neisseria meningitidis
atggcatactctgcggacttaagaaacaaagctttaaactatagtggattaaatttaaatcaggacaaggcgacgaagccgcagacagtacaaatagtacggcaaggcgaggcaacaccgtactggtttaaatttaatccactatattacgaacaatgcaaaaacatcagccaaaccgcagcaacgtttaacttgtcaagaaacacgctttacctgtggattcgccttaaaaaacaaacaggcagcctaaaacatcaagttaccggtctaaatgccgtcaaatcggataggcaaaaaccggctcaatatgttgggcaacaccaggatgcctatctgcatgaaatcgccaaacattttgattgtacggcagccaccgtttgctatgcactcaaacagatggggataacgcgcaaaaaaagaccaccacttacaaagaacaagacccggccaaagtaa

SEQ ID NO: 54427 - DNA, 516 bp, Neisseria meningitidis
atgaaacgcgccaaacaatatccttttttatccttacagcgacaacgttttcatctgaactttgaaaacgcttcttccaccgccaaccttccgagcgaacgcgatttctaccgctgggcgtggtctgccttgaaaaatgaataccgccgcgccgacatcagcctgattcttctggacgaagaagaagcccgcgcttacaaccgcgactaccgcggcaaagattacgccaccaatgtattgagtttcgcgctcaacgaaggcgaaatcctgccctgccaagtttcggaaaaactgtacggcgatttgattatctgcccgcaagtggttttgaaagaagccgccgaacagggcaaaacgcccgaacggcattttacccacctgaccatacacggcgttttgcacctgatgggctacgaccacatcgaagacgatgaagccgaaataatggaagccgaagaaatccgcctgatgctggcggcaggcttccccaacccctaccaagaggacgaatattaa

SEQ ID NO: 54428 - DNA, 216 bp, Neisseria meningitidis; identical to SEQ ID NO: 42474

SEQ ID NO: 54429 - DNA, 504 bp, Neisseria meningitidis
atgtcagaccctaatttgattgacccggaaattttcgccgccgaagggcagaatctgcaaggcagttttctgctggaagaattggatgaacgcgtcagttcgcacgattatcccgccgacaggcagaccaaaatatcgtttacactgaccggcggtcgcgaccggctgcaacgcctgttcctcgacctgaacgtcaaagccgatatgcccctgatttgccagagatgtatcaaacccatgccgttcatgcttgatgaaagcagccgtatcgtcctgttttccaacgaagagtccttggacgaatccatgcttgccgacgaagaactcgaaggcatactgattgaaaaagaactcgacgtgcgcacattggtagaagaccaaatcctgatgtccctgcccttttcgccgcgacacgaagactgcggcgacaatgggacactggaagaagtcaatcgggacaaacccaacccctttgctgttttggcaggtttgaaaagcaattga

SEQ ID NO: 54430 - DNA, 495 bp, Neisseria meningitidis
atgaacaacagacattttgccgtcatcgccctgggcagtaatcttgaaaaccctgcccaacaggtacgcgccgcattggacacgctgtcgtcccatcccgatattcggcttcatcaaacctcgtccctgtatgccaccgcccctgtcggctatgacgaccagcccgactttgtcaatgccgtctgcaccgtttccaccgatatggacagcatctcgctgctctccttgctcaaccgtatcgaggcggatttcgggcgcaaacgcagtttccgaaacgcgccgcgcacattggatttggacattatcgactttgacggcatctccagcgacgacccccgcctcaccctgccgcatccgcgcgcacacgaacgcagtttcgtcatacgccctttggcagaaatcctccctgattttgttttaggcaaacacggaaaagttgccgaattgtcaaaacaactgggcaatcaaggtatccgtcttttaccggacaggtaa

SEQ ID NO: 54431 - DNA, 279 bp, Neisseria meningitidis; identical to SEQ ID NO: 36210

SEQ ID NO: 54432 - DNA, 1128 bp, Neisseria meningitidis
atgagcaactggaaacccgatattccctataacgatttaccacccctgccgccaaaacaggatattgaaagcaaaaccatcctgaaacgttgtatagccgcccgtgcatcccttgcccgtttaaagcaggcggcagaattgataccgaatcaagccatgctgattaacacccttcctgttatggaagcccgtgcaagttcggaaattgaaaacatcgtaaccacaacggacaagctgtttcaatccctgcaaatggatacggaacggcaagaccctgccacgaaagaagccctgcaataccgcaccgccctgtttgcaggctatgaatcactgacgagccgccctttatgcacacaaaccgccatcatggtttgcaacgccatcaagcacccctacgaaatggccatccgcaaaacaggcggcacagccctaaaaggaggcaacagcggaaatgttgtctataccccgcccgaaggagaagaaaccatacgcggcaagctggcaaattgggagcggtttattcacgaaagcggcgatttagacccgcttatcatcatggcggcggcacattaccaatttgaagccatccacccgtttacggacggcaacgggcggacggggcgcatattgaacagcctgctattgattgaaaaagggcttttggatttgcctattttgtatttgagccgctatattatcgaaaacagggcggactattaccgcctgcttttaggcgtaaccgaacggcaggactgggaaagctggataatctacatcttagacggcgtagccgataccgccgattggacggtagcgaaaatagatgcgatacgccgcctgtttgagcagacacgtcaacacatacggacacacgcacaaggaatctacacgcacgaactggtaaatcttctgtttgagcagccatatacacgcattgccaacctagaagcggcagggatagccaaacggcagacggcctctaagtacctgaaagagctttcagacataggtgtgctgcaagaaatcgccattggcagggacaaactattcattcatccgcgcctaatggaactattgcggggagagggcaacagctttacctcattccaatccctcgttaaagcatag

SEQ ID NO: 54433 - DNA, 474 bp, Neisseria meningitidis
atgactgatttttccgtttgggaaacagccccctttggcgcaaccgtcgattatatcctgcaacgctaccacaatgtccaccgcgcacaatttgaagaattggtgccgctggcgcagaaagtggtccaagtccatgccgatacctttccggcggaaattgccaggctgcttgccgatatgcagaacgaactgctgatgcatatgatgaaagaggaaaggatgctgtttccgatgattaatcagggtgtcggacgcggtgcggcaatgcccatcagcgtgatgatgcacgaacacgaagaacacgaccgcgccatcgcacggctcaaagagctgaccgacaatttccaaccgccagaaggggcttgcggaagctggacgcgcctttacgctttggccaaagaaatggtggaggatttgaacgaccacattcatttggaaaacgatattctgtttgcccgcgtactcgattcttaa

SEQ ID NO: 54434 - DNA, 579 bp, Neisseria meningitidis
atgagtgcgaccgaaatcgaaaaagctaaagcgaagattactgcctattcaaaactggttgccggcactgcgtctgccgttgtaggcggggatgtgaatacagcggcgaatgcggctactgtggcggtagagaataattccctctttcagccacaaaccacattagaagcgggagtaagaaatgcaattttacgaggagatattcaggaattacggcttttgttgggcgaagcaaatttttcaacagctgatgctgcctatgctcaaaggattttagcttcgatggaaaaaataggtgaaagtaattctcgactattggctgaaagatacggtgtagattggctaaataaagttcatcacatctttaaggggcatcaaggaagcatcggtaatacattgattcaaaaatcaggctccatggaaaatgctgttgtagcgacgcaaaaggcagtggatgctttaaaactgacaaaaacaggaaattatccagttactgtaacggtcaatggtataacggtaattgttcgcgtatatgtcaacaatggagtatctcgtattgcaactattttgaaaatgtaa

SEQ ID NO: 54435 - DNA, 276 bp, Neisseria meningitidis; identical to SEQ ID NO: 54290

SEQ ID NO: 54436 - DNA, 750 bp, Neisseria meningitidis
ttggctgaaggtcaaaaatcagccgtcacagagtattacctgaatcacggcatatggcccgccaacaacagtgatgccggcgtggcatcctccgcctccgacatcaaaggcaaatatgttcaaagcgttatagtcgcaaacggcgtcgttaccgccgaaatgaaatcaaccggcgtaaacaaagaaatcaaaggcaaagaactctccctgtgggccaagcgtcaaaacggttcggtaaaatggttctgcggacagccggttacgcgcgccaacgccaacggcgccaacaacgacgaagtcaccgccgccaccggcaacgacaccgacaaaatcgacaccaagcacctgccgtcaacctgccgcgacgcatcatctgccgtttgcacaaaaacacccgagtattacctgaatcacggcgaatggcccggcaacaacacttctgccggcgtggcatcctcaaccgacatcaaaggcaaatatgttcaaagcgttgaagtcaaaaacggcgtcgttaccgccacaatggcttcaagcaacgtaaacaacgaaatcaaaggcaaaaaactctccctgtgggccaagcgtcaagacggttcggtaaaatggttctgcggacagccggttacgcgcgccaacaccgccaccggcgccaacgccgacgacgtcaccaagaccggtaccgacaacgaaaaaatcaacaccaagcacctgccgtcaacagcaccgacaagaaaatcgacaccaaactag

SEQ ID NO: 54437 - DNA, 957 bp, Neisseria meningitidis
atgaatataatcgggctggacatctcaaaggataccatagacgcaacattgcataaaacaaacggaagtatccattacattaaatttaagaataatgatgatggattaaaacagtttagattgtggataaagggaaacagaatcagaaaagcctatatcggcatggaggcaacaggcatctattacgaaaaggcagcagatatgctttcttcctactataccgtttacgttatcaatcccttaaaaatcaaggactacgggaaaagcaggtttaaccgtaccaaaaccgacaaagcagattcaaacctgatagcagattacataaaaaggcatcaagatacattgataccgtatcagatacccaaaaacaaagcactgcaaaaactgattaaccttaaaaatcaattacagcaacatcagaagcaaattaaaaaccgtcttcatagcactgaagaagacttcataaggaacatacatcaagacttgatagataccatacaggacaagatggaacaggtaaaaatagccatatccgaacaaatcaaaaaacaaacggactataaccattaccgcaatcttcaaaccatcccgagcataggcaaagacaccgcatcagttctttatgcgcaactgacagaaaaacattttaaaaccgcaaaccagtttgtatcctatgccggattaagtcccgccatcatacaatcagggacaagcgtaagaggtcggggcagattgagccgatacggaaacagacgattaaaaagtacgctgtatatgcccgccctttgtgcttaccgttttaacgcatttccgaaattaataaataatctgaaaaaagcgggtaagccaaagatggtaattatcgttgccatcatgcgcaaactggcgaagctcgcctattatattgttaaaaccggccagccttacgatgcggaaagacaccgattgaatcaataa

SEQ ID NO: 54438 - DNA, 558 bp, Neisseria meningitidis
atggaaaataacaaagccaaatctgatgataattcagtttctattgaatttatacaagattttataactgcaagtacggatgtaattaatctgagttacgaaaattttcgtaaaaatttttatacacaaatgtcaactgattctaccaattatgcagccaaacatgaaagtttaggaaaatcggtacaacgtgaattacaaaaaacacaaagtcagttgagacaagttgtaagaaaaatgcagagtaaatataatataaataataaagcacgagcagcagaaatatctttgttaaggcaaatgcaaagccaattttctcgaaaagatgtaaacaaaaatcttggtaacggcaacactttggctcaacaaggcagctacaccaaaaaagacggcacaaccgcgcaagcaggcgatttgctgttggctgctgacaacctgcacagccgcctcacggacaaaatgctatccattagccatgttcgggaaaacacgatttccccgtttgttttaggctgtctaaaacaaataaccataaatgcatatcattatttaaaataa

SEQ ID NO: 54439 - DNA, 1458 bp, Neisseria meningitidis; identical to SEQ ID NO: 44683

SEQ ID NO: 54440 - DNA, 822 bp, Neisseria meningitidis
atggattttctgattgtcctgaaagccctgatgatgggcttggtagaaggttttaccgaatttttacctatttccagcaccggacatttgattgtgttcggtaacttggtcggttttcacagcaaccacaaggtttttgaaattgccatccagcttggtgcggttttggcagtagtgtttgaataccggcagcgtttcagcaatgtgttgcacggcttaggaaaagaccggaaagccaaccgtttcgtcctcaatcttgccattgcttttatacctgccgccgtgatggggctgttgttcggcaaacaaatcaaagagtatctgtttaaccccttgagtgttgcagtcatgctggttttgggcggtttttttattttgtgggtggagaaacgccaaagccgagcagagcctaaaattgccgatgttgatgcattgcgtccgattgatgccttgatgatcggtatcgcgcaggtgtttgccttgattccgggaacatcccgctcgggcagtacgattatgggcgggatgctttggggaatcgagcggaaaacggcaacggagttttcatttttcttggccgttccgatgatggttgccgcaacggcttatgatgtcctgaaacattaccggtttttcaccctgcatgatgtcggtttgattctgataggctttattgccgcttttgtttccggtttagtagcggtcaaagcactgctgaagtttgtttccaagaaaaactatatcccgtttgcctattaccgcattgttttcggcatcgtcatcataatattgtggttgtcgggctggataagttgggaatga

SEQ ID NO: 54441 - DNA, 861 bp, Neisseria meningitidis
atgaaaccctattccgccaatcccaacctgaccgaaccgcgccggctgcgcgtgttgctgattgccgccgcgctgggctttctgctgctgatgctggtcgtgccgctcgtcgccgtgttttacgaagccttaaaaggcggttgggatttgtacctaaaatccttaaacgatcccgaagcgtggtctgccatcaaattgacgctgattaccgcgctgattgtcgttcccgtcaatgctgtattgggtgtggcgatggcgtggctgctgacccgttttgattttcgcggcaagcagttgctgactaccctgctcgatttgccgttttccgtatcgcccgtggtggccggtttaatgttcgtcttattgttcggcgcgcacacggcattgggtggctggctcgaagcgcaaggcatacagattatcttcgccatccccggcattattctggcgacgctgttcgttactttcccctttgtcgcacgcgaaatcatcccgctgatgcaggctcagggcgacagcgaagaacaggcggcattgatactcggcgcaagcggctggcagatgttttggcgcgttaccctgcccaacatcaaatgggcgttactctacggcatcatcctcaccaacgcccgcgcgatgggcgagttcggcgcggtcagcgtggtatcgggacacatacgcggcgaaaccaacaccgtcccgcttttggtcgaaatcttctacaacgaatacaacttcaccggcgcattcgccctctccggcgtattggcacttttagcactggcgacgctggcggtgcagaacatcatcaccaaattacaagacaaaaaactcgccgccgccgaaaggaacgcagcatga

SEQ ID NO: 54442 - DNA, 1050 bp, Neisseria meningitidis; identical to SEQ ID NO: 38313

SEQ ID NO: 54443 - DNA, 1209 bp, Neisseria meningitidis
atgaccggcatcatacattcgctgcttgacaccgacctctacaaattcactatgctgcaagtggttctgcaccagtttccgcagacgcacagcctttacgaattccgctgccgcaacgcctcgaccgtctatccgcttgccgacatcagggaagacttggaagccgaactcgacgcgctctgccaactacgcttcacccacgacgaactcgactacctccgtagcctgcgtttcattaaaagcgactttgtcgattatctcgaactcttccagctccaacgccgctttgtcgaaatcggcacagacgataaagaccgtctgaacatccgcatcgaaggtccgatgatacaggcgatgttttttgaaatcttcatcctcgccattgtcaacgaactttacttccgccgcctggaaacccctgcagtcatagaagaaggcgaacgccggcttcaagccaaagccgcgcgcctcaaagaaatcgccgccgcacaaaaccccgacgaaccgcccttcctgatttccgacttcggcacgcgccgccgctacaagctcgcgtggcaggaacacgtcatccgcaccctgctcgaagccgccccaagcatcgtgcgcggcaccagcaatgtctttctcgccaaaaaactcggcatcacccccatcggcaccatggcgcacgagttcctccaagccttccaggccctcgacgtacgcctgcggaatttccaaaaggccgcgctcgaaagctgggtgcacgaataccggggcgatttgggcgttgccctgaccgacgtggtcggtatggatgccttcctgcgcgatttcgacctctatttcgccaaacttttcgacgggctgcgccacgacagcggcgacccttacgtttggggcgacaaagcctacgcccactatcaaaagctcaaaatcgacagccgcaccaaaatgctgaccttctccgacgggctggacatcgaacgctcttgggcattacaccaatatttcaaagaccgcttcaaaaccggcttcggcatcggcaccaacctgaccaacgatatggggcatacgcctttgaatatcgtcttgaaactggtcgaatgcaacgggcagtccgtcgccaagctgtccgactctccgggcaaaaccatgaccaacaacagcaccttcctcgcctacctgcgccaagtgttcgacgtacccgaacccgaaacgccgtaa

SEQ ID NO: 54444 - DNA, 1077 bp, Neisseria meningitidis
atgcaaaccgcaaacaaaaaaaccatcctcgttaccggcggcgcgggctttatcggttctgccgttgtccgccatattatccgaaacacccgggacgctgtcgtcaatgtcgataagctgacttatgccggcaatttgaaatctttgaccgaggtagccgataatccccgctatgcttttgaacaagtggatatttgcgaccgcgccgaactcgaccgcgtattcgcacaacaccggcctgatgccgtgatgcacttggcggcggaaagtcatgtcgaccgctccatcgattctgcaggagaatttatccaaaccaatatcatcggcacgttcaatctacttgaagctgcgcgcgcctaccggcggcaaatgccgtctgaacagcgcgaagccttccgtttccaccatatttccaccgatgaagtctatggcgatttgcacggcacggatgatttgtttaccgaaaccacgccttacgccccttccagtccttattcggcttccaaagcctccagcgaccatttggtgcgcgcatggctgcgtacttacggcctgccgaccattgtgaccaattgttctaataactacggcccttatcattttcctgaaaaactgattccactgatgattctgaatgcgcttgatggcaaaccactgccggtgtatggcgacggtatgcaaatccgcgactggctgtttgttgaagatcatgcgcgtgcgctgtatcaagtggtcacagaaggcgaaatcggcgaaacttacaacattggtggccacaatgaaaaagccaatattgaagtggtgcgcaccatttgcgccctgctggaagaattggtgccgaacaaaccgcaaggcgtggcgcgttatgaagatttgattacctatgtcaaagaccgccccggccatgatgtgcgctatgcgattgatgccgcaaaaatcggccgtgagttgggttggcagccgcaagaaacttttgaaagcggcatccgcaaaacagtggaatggtatttaaacaatcaaacttggtggtcgcgcgtgttagacggcagctacaatcgtgaacgcttaggcagttaa

SEQ ID NO: 54445 - DNA, 276 bp, Neisseria meningitidis
atgaatgagggtgaagttgttttaacaccagaacaaatccaaaccttgtatggttatgcttctcgtggcgatacctatggcggttggcgttatttggctaatttgggtgaccgttatgcggataatgctgccgcaattgtcggtaaggatgcaaacttaaatggtttgaatttatggatgaaaaaaggggtggaaaacctatgggatgatacggtcggtaaaaagatccgtttaatgtgtatttctgttttttggattgtggttttcaatttgtag

SEQ ID NO: 54446 - DNA, 252 bp, Neisseria meningitidis; identical to SEQ ID NO: 39189

SEQ ID NO: 54447 - DNA, 2991 bp, Neisseria meningitidis
ttgacggacaaaagcaatgaacgcgaagttacccatacgagtaaatttattgtaacaaaaaagtacattagtttctcattcaataataccgatgaagttgttgctgaaaaaaaagatgctgtcgttttcggcgcggcgacttatctgccgccctacggcaaggtttccggttttgataccactaagctgaccgagcgcaaaaatgccgttgatcagattggtacgacccacccggggctgataggctacagctaccaagatagcacatgctccagcagtggttgtcctgaagttgcctatagaacccaatttaccttcggcaattccgggttggcaaaaaagaaaacagacaacaagctggatatatacgaagacaaaagccgcgacaattcgcccatttataaagtgaaggattatccttggttgggcgtgtctttcaatttgggcggagagagctctttcaaaccaaagagaaacggttctttggtatcttcttttagcgaggacgtgacgcagcaaaatggtgcgggcagccaacacaaagacaaaaacctcgtttatacgacagacgattacaagagtcagaataataaaaaccatcaggacaaacaccacgccgtcgccttttatctgaacgccaagctgcacctgctggataaaaaacacattaaaaatatcgtgcaaggtaaaacagttaatttgggtatcttgaaaacacgcatcgagccgacggaagcatggaaaagacggaatagtaacttttttaacggtaattggacgtatgaagagaaaggaacagtcagcgtcaaactcaaattgccggaagtcaaagcagaccgctgcatcaataaaccgaaccccaataaaaacagcaaagtcccttcgccggcactgactgcccccgcgctgtggttcggacctgtgcaaaatggtaaggcggagatgtattccgcttcggtttctacctaccccgacagttcgagcagccgcatctaccttcaaaatctgaaaagaaaaaccgaccccggcaaacccggccgccattccctcgaaaccttgactgagaatgatattaaaagtcgagagccgaatttcacagggcggcaaaccatcatccgattgaatggcggcgtacgtgagatcaaactggatagaaacaatactgaggtcgtcaattttaatggaaatgacggcaacaacgacactttcggcattgttaaggacttgggcgtcgaacctgataccagcgagtggaaaaaagtattgctgccttggacggttcggggttttgctgatgacagtaaatttaaagcattcaacaaagaagaaaacaacgacaacaagccaaaatacagccaaaaataccgcagccgcgacaacaacaagggcgaacgcaatttgggcgacatcgtcaacagccccatcgtggcggtcggcgagtatttggctacttccgccaacgacgggatggtgcatatcttcaaacaaagcggcggggacaagcgcagctacaatctgaagctcagctacatccccggcacgatgccgcgccaatattttgataacgacacttccgctctcaaagactccaccctcgccaaagagctgcgcacctttgccgaaaaaggctatgtgggcgaccgctacggcgtggacggcggctttgtcttgcgccaagttaacaacttaaatgggcaagaccgcgtgtttatgttcggcgcgatgggctttggcggcagaggcgcatacgccttggatttaagcaaaatcgacagcaataacccgaccgccgtttccctgtttgatgtcaaaaatgacgataaaaacaataatggcgtgaaattaggctacaccgtcggcacgccgcaaatcggcaaaacccacaacggcaaatacgccgccttcctcgcctccggttatgcgactaaaaaaattgacgaccaaacaaataaaaccgcgctgtatgtgtatgatttggaaagcaacaacggtacgccgattgcaacaatcaacgtacccgacggcaagggcgggctttcgtcccccacgctggtggataaagatttggacggcacggtcgatatcgcctatgccggcgatcgcggcgggaatatgtaccgctttgatttgagcagtcaagatcctaaacaatggtctgcacgcgccatttttaaaggcgacaaaccgattacttccgcgcccgccatttcccaactgaaagacaaacgcgtggtcatcttcggcacgggcagcgatttgagtgaggaggatgtggacaaaaaggacgaacaatatatttacggtatcttcgacgacgatacggcgacgacgggttctgtaaacttcagcggttcgggaggcgggctgctcgagcaacaccttactcaggaagataaaaccttattcctgaccgattacaagcgatccgacggatcgggcaataagggctggatagtgaaattgaaggacggacaacgcgttaccgtcaaaccgaccgtggtattgcgtaccgcctttgtaaccatccgcaaatatactgacaacggctgcggcgcggaaaccgccattttgggcatcaataccgccgacggcggcaagctgaccaagaaaagcgcgcgcccgattgtgccggaagccaatcaggctgtcgcgcaatattccggccataagcaaaccgccaaaggcaaatccatccctataggttgtatggaaaaagacaatggaatcgtctgcccgaacggatatgtttacgacaaaccggttaatgtgcgttatctggatgaaaagaaaacagacggattttcaacaacggcagacggcgatgcgggcggcagcggtatagaccccgacggcaagcgttccggcaaaaacaaccgctgcttctcccaaaaaggggtgcgcaccctgctgatgaacgatttggacagcttggacattaccggcccgacgtgcggtatgaaacgaatcagctggcgtgaagtcttctactga

SEQ ID NO: 54448 - DNA, 2277 bp, Neisseria meningitidis
atggcacaaaccacactcaaacctattgttttatcaattcttttaatcaacacacccctcctcgcccaagcgcatgaaaccgatcggtcggtggatttggaaacggtcagcgtcgtcggcaaaagccgtccgcgcgcgacttcggggctgctgcacacttctaccgcctccgacaaaatcatctccggcgataccttgcgccaaaaagctgtcaacttgggcgatgctttagacggcgtaccgggcatccacgcttcgcaatacggcggaggcgcgtccgctcccgttattcgcggtcaaacaggcagacggattaaagtattgaaccatcacggcgaaacaggcgatatggcggatttttcgcccgatcacgccattatggtagataccgccttgtcgcaacaggtcgaaatcctgcgcgggccggttacgctcttgtacagctcgggcaatgtggcggggctggtcgatgttgccgatggcaaaatccccgaaaaaatgcctgaaaacggcgtatcgggcgaactagggctgcgtttgagcagcggcaatctggaaaaactcacgtccggcggcatcaatatcggcttgggcaaaaactttgtattgcataccgaaggcttgtaccgcaaatcgggcgattacgccgtaccgcgttaccgcaatctgaaacgcctgcccgacagccacgccgattcgcaaacgggcagcatcgggctgtcttgggttggcgaaaaaggctttatcggcgcagcatacagcgaccgtcgcgaccaatatggtctgcctgcccacagccacgaatacgatgattgccacgccgacatcatctggcaaaagagtttgattaacaaacgctatttgcagctttatccgcatctgttgaccgaagaagacatcgattacgacaatccgggcttgagctgcggcttccacgacgacgataatgcacacgcccatgcccacaacggcaaaccgtggatagatttacacaacaaacgctacgaactccgcgccgaatggaagcatccgctccccggttttgaagccctgcgcgtacatctgaaccgcaacgactaccgccacgacgaaaaagcaggcgatgcggtcgaaaacttttttaacaaccaaacgcaaaacgcccgcatcgagttgcgccaccaacccataggccgtctgaaaggcagctggggcgtgcaatatttgggacaaaaatccagcgcgctttccgccattcccgaaaccgtccaacaaccgatgttgattgacaacaatgtccgccattacagctttttcggtgtagaacaggcaaactgggacaacttcacgcttgaaggcggcgtacgcgtggaaaaacaaaaagcctccatccagtacgacaaagcattgattgatcgggaaaactactacaaccagcccctgcccgacctcggcgcgcaccgccaaaccgcccgctcgttcgcactttcgggcaactggtatttcacgccacaacacaaactcagcctgaccgcctcccatcaggaacgcctgccgtcaacgcaagaactgtacgcacacggcaaacacgttgccaccaacacctttgaagtcggcaacaaatacctcaacaaagagcgttccaacaatatcgaactcgcgctgggctacgaaggcgaccactggcaatacaatctggcactctaccgcaaccgcttcggcaactacatctacgcccaaaccttaaacgacggacgcggccctaaatccatcgaagacgacagcgaaatgaagctcgtgcgctacaaccaatccggcgcagacttctacggcgcggaaggtgaaatctacttcaaaccgacaccgcgctaccgcatcggtgtttccggcgactatgtacgaggccgtctgaaaaacctgccttccctacccggcagggaagatgcttacggcaagcgtcccttcatcgcacaagccgaccaaaacgcgccgcgcgttccggctgcgcgcctcggcgttcacctgaaagcctcgctgaccgacctcatcgatgccaacttggactactaccgcgtgttcgcccaaaacaaactcgcccgctacgaaacgcgtacgcccggacaccatatgctcaacctcggcgcaaactaccgccgcaatacgcgctatggcgagtggaattggtacgtcaaagccgacaacctgctcaaccaatccgtttacgcccacagcagcttcctctctgatacgccgcaaatgggccgcagctttaccggcggcgtgaacgtgaagttttaa

SEQ ID NO: 54449 - DNA, 2157 bp, Neisseria meningitidis
atgtcagttttccgcatcaatatgaccgccgccacggttttggcagcactttcgtcttcggtttttgccgcacaaacggcggatttggaaaccgtccatattaagggtcagcgttcgtacaacgcgattgccaccgagaaaaacggcgattacagctcgtttgccgccaccgtcggcacaaaaatccccgcttctttgcgcgaaattccgcaatctgtcagcatcatcaccaatcaacaggtcaaagaccgcaatgttgatacgtttgaccagttggcacgcaaaacgcccggcctgcgcgtgttgagcaacgacgacggacgctcttcggtttacgcgcgcggttacgaatacagcgaatacaacatcgacggcctgcccgcgcagatgcagagtatcaacggcacgctgcccaatctgtttgccttcgaccgtgtggaagtgatgcgcgggccgagcggcttgttcgacagcagcggcgagatgggcggcatcgtaaatctggtgtgcaaacgcccggccaaagcgttccaaggtcatgctgcggcagggttcggtacgcacaaacaatataaagccgaggcggacgtatcgggcagcctcaattcagacggcagcgtgcgcggccgcgtgatggcgcagaccgtcggcgcgtctccgcgtcccgccgagaaaaacaaccggcacgaaaccttctacgcggcggcggattgggacatcaaccccgatacggttttgggcgcgggctatctttaccagcaacgccacctcgcgccgtacaacggcttgccagccgatgccaataacaaattaccgtccctgccgcaacacgtatttgtcggcgcggattggaacaaatttaaaatgcacagccacgacgtgttcgccgatttgaaacattacttcggcaacggcggctacggcaaagtcggtatgcgctattccgaccgcgatgccgactccaactatgcctttgccggcagcaagctgggcatgaaaaccccggcaggccgcccgggctgcaatacggctgacgacaaagcctgcgcggtgggtttgggtacagaaatcaaacaaaaagccctcgcgtttgacgccagctacagcaggcctttccgcttgggcaatacggccaacgaatttgtcatcggcgccgattacaaccgcttccgcagcaccaacgaacaaggccgtactactttatatgcacgcggcggcctggctttaaacgagttccgcagcataccgcaggttgatttgattgccaacgcgcgcaaaggcgtgcgcggttacagccataccgtcgctaccgaaaacctcgacgaattcggcatttacggcaaatccaccttccatcctgccgacgggctgtcgcttatcggcggcggacgtttgggacactataaaatcgagtcgggcgaaggcaaaaccctgcacaaagccagcaaaaccaagttcaccggctacgcaggcgcggtttacgacttgaacgacaacaacagcctctacctgagcctgtcccagctctacacaccgcaaaccaacctcgatgccgacggcaagctgctcaaaccgcgccaaggcaaccagtttgaagtcggttacaaaggcagctacatggacgaccgcctcaatgcccgagtttcgttctaccgcatgaaagacaaaaacgccgccgcaccgttgaacccgaacaacaaaaaaacccgttacgccgcattgggcaaacgcgtgatggaaggcgttgagaccgaaatcagcggcgcggttacaccgaaatggcaaatccatgcaggttacagctatctgcacagccaaatcaaaaccgcctccaattcacgcgacgacggcatcttcctattgatgcccaaacacagcgcaaacctgtggacgacttaccaagttacgcccgagctgaccatcggcggcggagtgaacgcgatgagcggcattacttcatctgcagggatgcatgcaggcggttatgccacgttcgatgcgatggcggcataccgcttcacgcccaagctgaagctgcaaatcaacgccgacaacatcttcaaccgccattactacgcccgcgtcggcggcgcgaacacctttaacattcccggttcggagcgcagcctgacggcaaacctgcgttacagtttttaa

SEQ ID NO: 54450 - DNA, 846 bp, Neisseria meningitidis
atgctcagttacagacacgcattccacgccggcaaccacgccgatatgctcaaacacttcaccttgtttttagtgctgcaatatttcaaccgcaaagacaagccctactggtacatcgacacgcacggcggcgcgggtgtgtacaatctcgaaggcagcgaggcacaaaaagtcggcgaataccggcaaggcatcgccctacttcgacaagcaaaaaacctgccaaccgagttaaacggctttatcgcgcacatacaaaaaatcctgccctcgcccgaactttactgcggttctccgtggctggcgcaatcgctgacccgcgtcggcgacaaattacgcctgtttgagctgcaccccaccgactttgtccatctgcaaaacaatatgggcgaagcaggattgggcaaacgcggacaagtgttgcgcgaagacggttacaaagggctgatttccctgctgccgcccccgccgcgccgcgccaccgtcctcatcgacccgccctatgaggaaaaacaggactaccggcgtgtaacggaaacgctgaaagccgctttaaaacggtttgagtccggctgttatctcatttggtatccctgcctcagccgcgaagaaagccgcaagctgcccgaagaattgaaaaaactcctgcccgacaactaccttcacgccgaacttcacgtccacgcgccgaaagccgacggtttcggtatgcacggcagcggaatgttcgtcatcaatccgccctatctgttggcggaacaattggcggcaaacctccccgccctgacgcggctgctggcgcaagacgaaggcgcgcgctaccttttggacagcaaaatccgctga

SEQ ID NO: 54451 - DNA, 669 bp, Neisseria meningitidis
atgaaaaacctcgccatcttcgacctcgacaacaccctcatcaacaccgattccgaccacgcctggccgcaatacctcatcaaaaaaggcttggttgacgctgccgaaaccgaagcgcaaaacgaaaaattctaccgcgactaccaaaacggttgcctcgacatcgacgcattcctcaaattccaccttgccccgctcgctcgttacagcaaagaagagctggcagagtttcaccgcgaatttatggcggaatacatcatcccccacatctcgcctatgcagcgtatgctggtgcagagccaccaaatggcaggcgacgaaaccctcgtcatctcatcgaccaacgagttcatcatcacccccgtctgccgccttttcggcattaccaacatcatcggcacacaactcgaatccggttccgacggccgctacaccggcaattacatcggcacgcccagcctcaaagaaggtaaaatcacccgcctgaaccaatggctcgccgaacgcggcgaaacgctcgaaagctacggcaaaacctatttttacagcgactccaaaaacgacctgccgctgctgcgcctcgtcgacgaacccgtcgccgtcaaccccgatgccgagctggaaaaagaagccaaagaaaaaggctggccggttttgaatttcaaatga

SEQ ID NO: 54452 - DNA, 321 bp, Neisseria meningitidis; identical to SEQ ID NO: 38688

SEQ ID NO: 54453 - DNA, 861 bp, Neisseria meningitidis
atgtctgatttgtctgtattgtcgccgtttgccgtgcctttggcagcggtgttcgggctgctggtcggaagtttcttaaatgtcgtcatttaccgcgtgccggtcatgatggaacgcggctggacggtatttgccaaagaatatttaaacctgccgctgaccgaagaggaaagccgtaccttcaacctgatgaagccggattcctgctgtcccaaatgtcgcgtgccgatacgcgcgtggcagaacatcccgattgtcagctacctgctcctgcgcggcaaatgcgcttcctgccaaaccaaaatcagcatacgttatcccttaatcgagctgctgaccggcgtattgttcgggctgatcgcctggcaatacggctggtcttggattacgctgggcggattggtactgaccgcgtttctgatttccctgacctttatcgatgcggacacccaatacctgcccgactcgatgacactgctcttgatttggctgggactgatatttaatttggacggcggcttcgtgcctttgcagtctgccgttttaggtgcggttgccggctatggttcgatatggcttttatgcgcggtatataaactgattaaaggcgaaaccggtatgggcaacggagatttcaaactgattgccgcattgggcgcgtggctcggcatatccgcattgcccgtgctgatttttgtttcctcgctgatcggtttggtcgcggcaatcgttatgcgcgtcgccaaggggcagcattttgccttcggccccgcactgacagtttcgggctggataatttttacggcaaacgattccgtatggcgggcggtcaactggtggctgacccatccggtgctgtaa

SEQ ID NO: 54454 - DNA, 303 bp, Neisseria meningitidis
ttgggattcaataatcttgtttcgcttgccgcgttgattgaaaaggttttccctattcgatatacgcctgccggaatctctgtcttagatattattttaaagcatgaatcatggcaggaggaaaacgggcagcaatgccttgtccaattggaaattccggcacggattttaggcaggcaggcggaagagtggcagtatcggcaaggtgtatatgttcacgtcgaaggttttttagctcaaaaaagcagacgttcccttatgccgatgctcaggatacaaaatattcaagaatataaaggttaa

SEQ ID NO: 54455 - DNA, 1338 bp, Neisseria meningitidis
atgaccgacacagccggtctgcgccgccgcaacctgcggcaatggatagcagaacactacggcggtttgcaaacccgttttgccgaagccgttgccctcaacacaggcgaactctccgcccttttgaaaaacaaatccttcggcgagaaaaaagcccgtaaaatcgaacaggcggcaaaaatgcccgccttctggctcgataccgaacacaccgcccgcccgcccgaacacacaggaaaacacaccatgtcccatatttcccccatccccgaaatcctagccgacatcaaagccggcaaaatggtcatcatcaccgatgccgaagaccgagaaaacgaaggcgacctgctgatggcggcgcaattcgtcacgcccgaagccatcaacttcatgatcaaacacgcgcgcggcttggtctgcctgccgatggacggcgaaatggtcgaaaaactcgggctgccgatgatgacccaaaaaaacggcgcgcaatacggcaccaactttactgtctccatcgaagccgcacacggcattaccaccggcatttccgccgccgaccgcgccctgactattcaaaccgccgtttccccgaccgctaaacccgaagacatcgtccaacccggtcatatctttccgcttcgcgcccaaaaaggcggcgtactcgtccgcgccggacacaccgaagccggcgtcgacctggcgcaaatgaacgggctgattcctgcctccgttatttgcgaaatcatcaacgacgacggcacgatggcgcgtatgcccgaactgatgaaattcgccgaagaacacaagctcaaaatcggcacgattgccgacctcatcgaataccgcagccgtaccgaaagcctgcttgaagacatgggcaatgcgcctgtacaaaccccgtggggcgagttccaacaacacgtttacgtcgacaaactctccggcgaaacccacctcgccctcgtcaaaggcacgccctccgccgacaccgaaaccctcgtccgcgtccacgaacccttcagcgtcatggacttcatccaagctaacccgcgtcattcatggtcgctgcccaaagcactcgagcgcatccaacaggccgaaagcggcgtagtcatccttctgcaccgcaccgaagacggcgccgccctgctcgaccgcaccctgcccaaaggtgcaaaccaagcctacaaatgggacagcaaaagctacggcatcggtgcgcaaatcctcgccggcctcaacgtcaaaaaactgcgcgtcctcgggcagccctcatctttcaccggcctgaccggcttcggtttggaagtcgtcggctttgaagaagcggaaaaataa

SEQ ID NO: 54456 - DNA, 1512 bp, Neisseria meningitidis
atgagcgaacaaaaccatccgcaaaccgagccgcagttggacgaaaaccaaatcatcgccctgcgccgcgaaaaactgcacaacatccgccaacagcgcaacgcctatcccaacgacttcaaacgcgacagcttcgccgccgatttgcacgcccaatacggcgaaatcggcaaagaagaactcgatccgcaaggcattcccgtcaaagtggccggccgcatgatgctgaagcgtcaaatgggcaaggcgagttttgccaccattcaagacgtgtccgggcaaatccagctttatctgaacaacaaaggcgtgagccaagaaattttggacgacttcaaccattgggacttgggcgacatcgtcggtgcggaaggcactttgttcaaaaccaaccacggcgaactgaccgtacgcgtgtccgacatccgcctgctgtctaaatccctgcgcccgctgcccgacaaacacaaaggcttgagcgatcaggaaaccaaataccgccaacgctacgtcgatttgattgccaacgaagaatcgcgcaataccttcatcaaacgcagccaaatcatccaatctgtgcgcaattttatggtgaacgagcgttatctcgaagtcgaaaccccgatgatgcacccgattcccggcggcgcgacggcgaaaccgttcgtgacccaccacaatgctttggacatcccgctctacctgcgcatcgcgcccgagctgtatctgaaacgcttggtggtcggcggtttggagcgcgtgtttgaaatcaaccgcagcttccgcaacgaaggcatgtccgtgcgccacaaccccgaatttacgatgattgaattttacgaagccttctccgactacgaacgtatgatgcagatggcggaagacatcatccgcaacgcatcgcgcacagtaaacggtacggcaaacatcacttacaatggcaaagaagtcgatttggaaagcccgttcgagcgtctgaccatcctcgaagccatcaaaaaatacaatccgcactacaccgacgagcagttgaacgatgcggaatggctgaaaaaagaaatcgtcaaacacggtgaaagcctgccgccgtccccgggcatcggcagcctgcaactcgcgctgtttgaaggttgcgccgagggcaagctgtggaacccgactttcatcatcgattacccggtcgaagtttccccgttggcgcgcgcttcggataccaaacaaggtctgaccgaacgtttcgaattgttcgttgtcggccgcgaactggcaaacggctattcagaattgaatgaccctgaagaccaagccgaacgcttcaaatcgcaagtcgcacaaaaagacgcgggcgacgacgaagccatgcattacgatgccgactacatccgcgcgatggaatttggtttgccgccgaccggcggttgcggcatcggtatcgaccgcttggtgatgttgctgaccgattcgcaaaccatccgcgatgtgattctgtttccgcagatgcgccccgagtag

SEQ ID NO: 54457 - DNA, 1569 bp, Neisseria meningitidis
atggcaaaaaagaacaataaaactaaaatccaaaagcccgaagctgcattgcagacggacgtggctcaaattacggcgaccggtcgggttatcgccgagcatccgtccaattttattacaccgcaaaagatgcgggccctcttcgaggatgcggaaagcggcgacatccgcgcccaacacgagcttttcgcggacattgaggagcgcgacagcgacatcgcggcaaatatggggacgcgcaaacgcgcgctgctgacgctcaactggcgcgtcgccccgccgcgaaatgcgacgcccgaagaagaaaagctgtccgaccaagcctacgaaatgatggacagcctgcctaccctcgaagacctgattatggatttgatggacgcggtagggcacggattttctgcgttggaggtcgagtgggtattttcagacggcctttacctaccccgaaactttatccaccgcccgcaaagctggttcaaatgggacaaagacaacgggctgctgctgcgtacccgcgaaaatccggaaggcgaagcgttgtggccgctgggctgggtcgttcatacccaaaaatcgcgcagcgtccagcaggcgcgcaacgggcttttccgcacgctttcctggctgtatatgttcaaacactacgccgtccacgattttgccgagtttttggagctgtacggcatgcccatccgtatcggcaaatacggcgcgggcgcaaccaaagaggaaaaaaacaccctgcttcgagcggtggcggaaatcggtcacaacgcggcaggcatcatgccagaaggtatggaaatcgagctgcacaacgctgcaagcggtacgatggcaaccagcaatccgtttttgcagatggccgactggtgcgaaaaatcggcggcgcggctgattttggggcaaacgctaaccagcggtgcggacggaaaatccagcaccaacgcgctgggcaatatccacaacgaggtacgccgcgatttgctggtgtcggacgcaaaacaggtggcgcaaaccatcacaagccaaatcatcggaccgttcctgcaaatcaactatcccaatgccgacccaaaccgcgtgccgaaatttgaatttgacacgcgcgagccgaaagacatcgcggtctttgccgacgctatcccgaaactggtggatgtcggcgtacaaatccccgaaagctgggtgcgcgacaaactggtcattccagatgtgcaggagggtgaggctgtgttggtgcggcaggtaccggacaatccgataaacagaactgcattggcggctttatccgcccacaccgtaccatctaaggctacgggcaggcatcaggaaatattggacggcgcgttggatgacgcgctggttgagcccgatttcaattctcagctcaacccgatggtgcgtcaggcggttgccgcacttaatgcttgcaacagctacgaggaggcagatgccgcactgaatgcgctttatccgaatttggacaacgcgaaactgcgtacctatatgcagcaggccttgtttatcagcgatattttgggacaagaccatgcccgcgcctga

SEQ ID NO: 54458 - DNA, 1404 bp, Neisseria meningitidis
atgaacaatcccgacttactctatcatcaagccttagaacgcctgtctcaagaacaatatgactttaccgaagtccgccgcctgctgacagaagcggcctcggcaggtcatcccgccgccgcattcgagttagcaaaacacctgatggacgcggacagcccgcaccaagaccgcgaacaaggtatggaaatgctccgcatcgccgccgaacaggggcatccctacgcgcgttacaatctggcatatatccaagaattggaaggcgcgcgcccggaaaccctgataccgctttacagaccgttggcagaggaaggactgcccgaagcacaagtccgcctgatgtaccttctgtatgcgtcccgacattttgaagaagccctgaaatgggcaaaaacgaccgcaaaaaacaacaacccccacggacaatatctgcttgcccaatactgccagtacggtacgccaccggattttgaaacggcacaccttctctaccgcgaggctgcagcacaaggcttggcggcggcacaatggcagctcggccttcaataccgtttcggacaaggtacaccaaccgacacgacccaagctatcaatcatttgcgcgccgccgcacaacaaggatacattcccgcctacaccccgcttgccgaactcatcctacctacggctcccgatgaagccgtttaccggttccaacaggcggcacaggaaaatgaccccgatgcccatgccgcacttgccgacatctacctacaaggcaagcatctggaaagaaaccacaaacttgccctgcatcatgccgaagcagccgccgccgaacgccatcccgaaggtttgcggatactgggcgacatctgccgctacagtttgggcatagcccccgatacggaaaaagcccggcattattatcggcaggcagccgaagccggcagcctttccgcctatcagaaactcatatccgacagcgcgttaaaccatcctaaccaatacggcggcattaaagattccgccatcaggcggcaaagggcagaacggctttatcaaaaagcccaagccctgcattacggattacaatgcgcgcccgaatatgcagccgcactcaaactctacacagaagccgcagaactcggccacagcaaagcccaaaccaatctgggcagcatgtattacttcggacagggtatgaccgccgactacaatgaagcacgcaaatggtttgaaaaagccgccgcaaaaaaagacagtatggcgttctacaacctcgcctgcatccattacagcggacacggtgtcgggccggacaacgaaaaagcctgccgctacctgcaagaagccataaacagcggacacgaacaaaaaagctttctgcaagaactgttgcaacagtggcaaaatgccgtctga

SEQ ID NO: 54459 - DNA, 171 bp, Neisseria meningitidis
atgaaatacggcgtattttttgcggcggcaaccgccctcctgctttccgcctgcggttacaaaggcgacctctacctgcccaaagaaggcgatacggcgcgtttcggcgcaatccaaaccggtttgcagcttcaaaacaaaccgcaatccgccccacaaacccgaaaatga

SEQ ID NO: 54460 - DNA, 1092 bp, Neisseria meningitidis
atgaacgcccaaaccctgattgccaacgttgccgaactcgtcaaaaccaagctcaaacccatagtggacgacatcgaccgcaaaggatactaccccgaagcatttatgcgcgaactcggcgcaatcggcggattcggcgcagtcggcacagaagccgaaggcggcaacggcttgggtttggcaacgcaaatcgccgtattgcgcgaaatcggcaaagaatgcggcgcaacctccttcagcgcgtggtgtcaggcggcttgcgcgtggtatctgcatcaaacgcccaaccaagccgtcaaagacaaatacctcgccgacatcctgcaaggcaaagtattggcaggcaccggaatgtccaataccgtcaaacaccttgccggcattgaaaaacacaaccttcaagccgagcgcgtggagggcggttatacagtcaacggcgcgctgccgtgggtatccaacatcggcgaagagcatatttgggcaaataccgcccaaatcggcggcggctacgtcatgtttatcaccggcggacaatgggaaggcgtaagcctgcaaaactgccccgaattttgcgccctcgaaggcacgcgcaccttcagcctgaacttcaaagacgtatttatccccgacgaagacatcatcgccgcgcccgaacagtttgccgactacatccaaagcatcaaagcaggctttatcctcctgcaaatcggcatcggcgcgggcgtgatagacggcagcctcggcatcatccgcctcgccaacgtcgtcaacgccgaagtcaaccgctatctcgacgacggctacgacagcctcaaaacaaggctggacggcgcgtgggcagaaaccgaacggctcgccggattggcttggagcggcacgcccgacaaccttaccaccctcaagctgcgcgaagccgccgccgtactgacacttgccgccgcccaatccgccgccctgcattccggcgcaaaaggctacctgatgcggagtcccgcccaaaggcgcgtccgcgaagcaatgtttgtcgccatcgtaactcccgcgatcaaacacctccgcaaagaaatagcggcaatcgaagccgcaaaataa

SEQ ID NO: 54461 - DNA, 720 bp, Neisseria meningitidis
atgttgttccgtaaaacgaccgccgccgttttggcggcagccttgatgttgaatggctgtacggcaatgatgtggggcatgaacgacccgttcagccaaacgaccgcctataaacacgttgacaaggatcaaatccgcgccttcggtgtggttgccaaagacaatgcccaattggaaaagggcagtctggtgatgatgggcgggaaatactggttcgtcgtcaatcccgaagattcggcgaagctgacgggcattttgaaggcagggctggacaaacccttccaaatagttgaggataccccgagctatgctcgccaccaagccctgccggtcaaactcgaatcgcctggcagccagaatttcagtaccgaaggcctttgcctgcgctacgataccgacaagcctgccgacatcgccaagctgaaacagctcgggtttgaagcggtcaaactcgacaatcgaaccatttacacgcgctgcgtatccgccaaaggcaaatactacgccacaccgcaaaaactgaacgccgattaccattttgaacagagtgtgcctgccgatatttattacacggttactgaaaaacataccgacaaatccaagctgtttgcaaatatcttatatacgccccctccctttttgatactggatgcggcgggcgcggtactggccttgcctgtcgcggcgttgattgcagccacgaattcctcagacaaatga

SEQ ID NO: 54462 - DNA, 4179 bp, Neisseria meningitidis
atgaactattcgtttaccgagaaaaaacgtatccgtaagagttttgcaaagcgggaaaatgttttggaagttcctttcttgctagcaacccaaattgattcttatgcgaagtttttgcagctggaaaatgcttttgacaaacgtaccgatgacggtctgcaggcggcatttaattctattttcccgattgtgagccataacggttatgcgcgattggagtttgtgcattacacattgggcgagcctttgttcgatattcccgaatgtcagttgcgcggaatcacttatgcagcccccttgcgcgcgcgtatccgtttggtgattttggataaggaagcatctaaaccgacggtaaaagaagttcgtgaaaacgaagtgtatatgggcgaaattccgttgatgaccccgagcggttcttttgtgattaacggcacagagcgtgtgattgtctcccagttgcaccgttcgcccggcgtattcttcgagcatgacaaaggtaagacgcactcttccggcaagttgttattctccgcccgtatcattccctaccgcggttcatggttggattttgaatttgacccgaaagatttgctgtatttccgtatcgaccgccgccgtaaaatgccggtaacgattttgttgaaggctttgggctacggcaatgagcaaatcttggatattttctacgacaaagaaacgttctatttgtcttcaaacggtgttcaaaccgatttggtcgcaggccgtctgaaaggcgaaactgccaaggtcgatatcttggataaagaaggcaatgtattggttgccaaaggtaagcgcattactgcgaaaaatatccgtgatattaccaatgcaggcctgacccgtttggatgtagaaccggaaagcctgctgggtaaagcattggctgccgatctgattgattcggaaaccggcgaggtattggcttctgccaatgatgaaattacagaagagttgttggccaaatttgatatcaacggcgtaaaagaaattacgaccctttacatcaatgagttggatcagggtgcttatatctccaacaccttgcgtacggatgagactgccggccggcaggcggcgcgtgttgcgatttaccgtatgatgcgtccgggcgaaccgcccaccgaagaggcggtcgagcaattgtttaaccgcttgttcttcagtgaagacagctacgatttgtcccgcgtaggccgtatgaaatttaatacgcgcacatacgaacaaaaactgtccgaagcccaacaaaactcttggtacggccgcctgctgaacgaaacgtttgccggtgctgccgaaaaaggcggttatgtcctgagcgtcgaagatattgtcgcctcgattgcgactttggtcgagttgcgtaacggccatggtgaagttgacgatatcgatcacttgggcaaccgccgagtacgttcggtaggcgagctgactgaaaaccaattccgcagcggtttggcccgtgtggaacgtgctgtaaaagaacgtttgaatcaggcggaatcagaaaacttgatgccgcacgatttgattaatgcaaaacctgtttctgccgctattaaagaattcttcggctccagccaattgagtcagtttatggatcagaccaaccccttgtctgaagtaacccataaacgccgcgtatccgcattgggtccgggcggtttgacccgcgaacgtgccggcttcgaggtacgggacgtgcatccgacccactacggccgcgtatgtccgattgaaacgcctgaaggtccgaacatcggtttgatcaactcattgtccgtttatgcgcgcaccaatgattacggtttcttggaaacgccttaccgccgcgttatcgacggcaaagtaaccaaggaaatcgattacttgtctgccatcgaagaaggccgctatgtgattgcacaggcgaatgccgatttggattcagatggcaatctgattggcgatttggttacctgtcgtgaaaaaggcgaaaccattatggcaacgcccgaccgcgtccaatatatggacgtggcaactggtcaagtggtatccgttgcagcatccctgattccgttcttggaacacgatgacgcgaaccgcgcattgatgggtgcgaatatgcaacgtcaggcagtgccttgcttgcgtcctgaaaaaccgatggtcggtaccggtatcgagcgttccgttgccgttgactctgctactgcaatcgttgcccgccgaggcggcgtggtcgagtatgtcgatgccaaccgtgttgtgattcgtgtccatgacgacgaagcgactgccggcgaagtgggtgtcgatatttacaacttggttaaatttacccgttccaaccaatctaccaacatcaaccaacgtccggccgtaaaagcaggcgacgtgttgcaacgcggcgacttggtggccgacggtgcgtctaccgacttgggcgaattggctttgggtcaaaacatgaccatcgccttcatgccatggaacggttacaactatgaagactcgattctgatttcagaaaaagtggctgcggatgatcgttacacttcgattcacattgaggaattgaatgtcgttgcccgcgataccaagctgggtgcggaagacattacccgcgatattccgaacttgtccgagcgtatgcaaaaccgcttggacgaatccggtatcgtttacatcggtgcagaagtagaagccggcgatgtgttggtaggcaaagtaacgcctaaaggcgaaacccagctgacgccggaagaaaaactgttgcgcgccatcttcggcgaaaaagcgtctgacgtaaaagatacttcattgcgtatgcctaccggtatgagcggtacggttatcgacgttcaagtcttcactcgtgaaggtattcaacgcgacaaacgcgcccaatccattatcgattccgagttgaaacgctaccgtttggatttgaacgaccaattgcgtattttcgacaacgacgcattcgaccgtatcgaacgtatgattgtgggtcaaaaagccaatggtggtccgatgaagctggctaaaggcagcgaaattactaccgaatatttggcgggtctgccgagcaggcacgattggttcgatatccgtctgaccgatgaagatttggccaagcagttggaactgattaaagtgagcctgcaacaaaaacgcgaagaagcggacgagttatacgaaatcaagaagaaaaaactgacccaaggcgacgaattgcaacccggcgtacaaaaaatggtgaaagtttttatcgccatcaaacgccgtctgcaagccggcgacaaaatggcgggccgccacggtaacaaaggcgtggtatcgcgcattctgccagtggaagacatgccttacatggcggacggccgtccggtagacatcgtactgaacccattgggcgtaccttcccgtatgaacatcggtcagattttggaagttcacttgggttgggcagcaaaaggtatcggcgagcgtatcgaccgtatgctgaaagagcaacgcaaagcaggcgagttgcgcgagttcttgaacaaactctacaacggcagcggcaagaaagaagatttggatgccctgactgatgaagaaatcatcgaactggcctccaacctgcgcaaaggtgcatctttcgcctctcctgtattcgacggtgcgaaagagtctgaaatccgcgaaatgctgaacttggcttatccgagcgacgatcctgaggttgaaaaactgggcttcaacgacagtaaaacccaaatcacgctgtatgacggccgttcaggcgaagcatttgaccgcaaggttacagtcggtgtgatgcactatctgaaactgcaccacttggttgacgaaaaaatgcacgcgcgttctaccggtccgtacagtctggttacccagcagcctttgggcggtaaagcccagttcggcggccaacgtttcggcgagatggaggtttgggcattggaagcatacggcgcggcatacacgctgcaagagatgctgactgtgaagtctgacgacgtgaacggccgtaccaaaatgtacgaaaacatcgtcaaaggcgaacacaaaatcgatgccggtatgcccgagtccttcaacgtattggtcaaagagattcgctcactgggcttggatatcgatttggaacgttactaa

SEQ ID NO: 54463 - DNA, 165 bp, Neisseria meningitidis
atgggacaggttgagttttacgaaaagatgattgagctgtggtcgagcaaaagccgtgaggcaagcgaacgggctgatttggcggcgtttgaatttgcggagggcgaactggccaattatcgggaaatgctgaaacggcacctgcaaaccaaaagtgtggaatag

SEQ ID NO: 54464 - DNA, 402 bp, Neisseria meningitidis; identical to SEQ ID NO: 42182

SEQ ID NO: 54465 - DNA, 1104 bp, Neisseria meningitidis; identical to SEQ ID NO: 44519

SEQ ID NO: 54466 - DNA, 423 bp, Neisseria meningitidis
atgaaaatcaccaaaatcttcaccttcgactcctctcatatgctcgacgggcatgacggcaaatgccaaaacctgcacgggcatacctacaaactcgaaatcaccgtttcagacgacctcgtcagaggcgggccgaaagacggtatggtgatggactttaccgacttgaaagccattgtcaaacaacacattaccgaccccttcgaccacgccttcatctaccacggcggcaacgggcgcgaatctcaaatcgccgcactcttggaaggctggaacatgaaaaccctgcgcctgccctgccgcaccactgccgaaaatatggcggtcgaaatgtacgaccgtctgaaaaacgcggggctgaacgtgtgccgcgtcaaattgtgggaaacgccgacatcgtgtgcggagtatgaaggggagtag

SEQ ID NO: 54467 - DNA, 360 bp, Neisseria meningitidis; identical to SEQ ID NO: 42498

SEQ ID NO: 54468 - DNA, 1446 bp, Neisseria meningitidis
atgacccaatacacattgaaacaggcaagcgtcctgttgcagtccaaacagatttccgccgtcgaactggcaagcgcataccttgccgccatcgccgaaaaaaatcccgccctcaacggctatatcaccatcgaccaagataaaacccttgcagaagcccgtgccgccgacgaacgtatcgcgcagggcaacgcctccgcgcttaccggcgtacccgtcgcctacaaggatattttctgccaaaccggctggcgcagcgcgtgcgcttccaaaatgctcgacaacttcatctccccctacaccgccaccgtcgtccaaaacctgctcgacgaaggtatggtaacgctcggccgcaccaatatggatgagttcgctatgggttcgaccaatgaaaactcattctacggtgcagccaaaaacccatggaatcttgagcacgtccccggcggttcgtcaggcggttccgccgccgtcgttgccgcgcgcctcgcccctgccgcgctcggttcggacaccggcggctctatccgccagcctgcatcgcactgcggcattaccggcatcaaacccacatacggcacggtttcccgcttcggtatggtcgcctacgcctccagcttcgaccaggccggtccgatggcgcaaaccgccgaagactgcgcgattctgttgaacgcgatggcaggtttcgaccccaaagactccaccagcctcgaacgcgaaaaagaagactacacccgcgatttgaaccaaccgctcaaaggcgtgaaaatcggcctgcccaaagaatatttcggcgaaggcaacagcgccgatgttcagacggcattgcaaaatactatcaacctcctcaaaacccaaggcgcggaattggtcgaagtttccctgccgcaaaccaagctgtccatccccgcctactacgtcctcgcctccgcagaagccagtaccaacctttcacgttacgacggcgtacgttacggacaccgtgccgcccaattcggcgatttggaagaaatgtacggcaaaacccgcgccgaaggtttcggcagcgaagttaaacgccgcatcatgatcggcacttatgtactgtcacacggctactacgatgcctactatctcaaagcccaaaaactgcgccgcctcgttgccgatgattttcagacggcatttgcacggtgcgacctcatcctcgcgccgaccgcacccactgcagccccaaaaatcggagcggatgcttcgccggttgaaacctacttgagcgatatctacaccatcgccgtcaacctcgccggactgcccgcattgaccctgcccgcaggcttcagcggcggcggactgcccgtcggcgttcagcttgtcggcaactacttcgccgaagccaaaatcctcggtgcggcgcatcaaatccaactcaacagcgattggcacggcaaacgacccgaatga

SEQ ID NO: 54469 - DNA, 1797 bp, Neisseria meningitidis
atgaacaaaatataccgcatcatttggaatagtgccctcaatgcctgggtcgtcgtatccgagctcacacgcaaccacaccaaacgcgcctccgcaaccgtggcgaccgccgtattggcgacactgttgtttgcaacggttcaggcgaatgctaccgatgacgacgatttatatttagaacccgtacaacgcactgctgtcgtgttgagcttccgttccgataaagaaggcacgggagaaaaagaaggtacagaagattcaaattgggcagtatatttcgacgagaaaagagtactaaaagccggagcaatcaccctcaaagccggcgacaacctgaaaatcaaacaaaacaccaatgaaaacaccaatgaaaacaccaatgacagtagcttcacctactccctgaaaaaagacctcacagatctgaccagtgttgaaactgaaaaattatcgtttggcgcaaacggtaataaagtcaacatcacaagcgacaccaaaggcttgaattttgcgaaagaaacggctgggacgaacggcgaccccacggttcatctgaacggtatcggttcgactttgaccgatacgctgctgaataccggagcgaccacaaacgtaaccaacgacaacgttaccgatgacgagaaaaaacgtgcggcaagcgttaaagacgtattaaacgcaggctggaacattaaaggcgttaaacccggtacaacagcttccgataacgttgatttcgtccgcacttacgacacagtcgaattcttgagcgcagatacgaaaacaacgactgttaatgtggaaagcaaagacaacggcaagaaaaccgaagttaaaatcggtgcgaagacttctgttattaaagaaaaagacggtaagttggttactggtaaaggcaaagacgagaatggttcttctacagacgaaggcgaaggcttagtgactgcaaaagaagtgattgatgcagtaaacaaggctggttggagaatgaaaacaacaaccgctaatggtcaaacaggtcaagctgacaagtttgaaaccgttacatcaggcacaaaagtaacctttgctagtggtaatggtacaactgcgactgtaagtaaagatgatcaaggcaacatcactgttaagtatgatgtaaatgtcggcgatgccctaaacgtcaatcagctgcaaaacagcggttggaatttggattccaaagcggttgcaggttcttcgggcaaagtcatcagcggcaatgtttcgccgagcaagggaaagatggatgaaaccgtcaacattaatgccggcaacaacatcgagattacccgcaacggcaaaaatatcgacatcgccacttcgatgaccccgcaattttccagcgtttcgctcggcgcgggggcggatgcgcccactttaagcgtggatgacgagggcgcgttgaatgtcggcagcaaggatgccaacaaacccgtccgcattaccaatgtcgccccgggcgttaaagagggggatgttacaaacgtcgcacaacttaaaggtgtggcgcaaaacttgaacaaccgcatcgacaatgtggacggcaacgcgcgcgcgggtatcgcccaagcgattgcaaccgcaggtttggctcaggcgtatttgcccggcaagagtatgatggcgatcggcggcggtacttatcgcggcgaagccggttacgccatcggctactcgagcatttctgacactgggaattgggttatcaagggcacggcttccggcaattcgcgcggccatttcggtgcttccgcatctgtcggttatcagtggtaa

SEQ ID NO: 54470 - DNA, 1497 bp, Neisseria meningitidis
atgaccacggaaaaccaagccggcagtccggcatccggaatcggcacgtccgaacaaacaaaagccgcgccgaaagcaaaaaaaacattcgatccgcgagccagcgtgattcaaatccatcccgaaggcgaacgcatccatcccaaaaaggcggaaggacggttcgccaaactgcgtatcgccgccgtattggcgacgcagtttgtgttttacgtcattccgtggttcaactggagcggcaggcaggccgtcgttttcaatatccccgaacggcatttcttcattttcggattgtcgttgggggtgggcgatttgatttaccttgccttgctgctgatgatttgcgccttcgggctgttttggtggacgacgattgcagggcgactgtggtgcggctattcctgcccgcaaacggtttacaccgaaattatgctgtggattgacaacctggtcgaaggcgatagaaacaaacggctgaaactggaaaaatcgccgtggaatttcactaaaatccgcatcaaagccaccaaatacctgctgattttccttgtctgcgcgtggacgggcatcacgtttgcaggctggtttgtccctatccgccagttcgttcccgatttattcactggagcagcaggtggcggcgcgatgtttgccgcagcgttttatggctttatgaccttcttcttcgcccacattatgcgtgaaaaagtatgcctgcatatgtgtccgtatgcacgtttccaaagcgcgatgttcgacaaggacacgctgattgtttcttatgacgcggaacgcggcgaaccgcgcggcgcgcgcaagaaaacggtcaataaggaagaggcgggtttgggcgactgcatcaactgtgcgatgtgcgtccaagtctgccccgtcggcatcgacatccgcaacggtctgcaataccaatgtatcggctgcgccgcctgtatcgacgcgtgcgatgagattatggacaaaatgggctatccgcgcggattaatccgttatacgaccgaaagcgcgctggaacacgaatattctgaaaaagacattaaaaaacggctgctcagaccgcgtgtggcaggttacggcgcggtgttggcgttagttatcattgccttcctggccggtttgtccacgcgcaaaatggtcgaggtcgatattttgaaagaccgtggcgtactggtgcgcgaaaacgccaaaggctggctggaaaacgcatacagcctgcgtatcatcaacaaaagtgaaaaagaacagctcattaccgcaagtgtcaaaggctttgacgaaatcgccctgaccgggctgcccgaaggcggtatcaaggttgccccgcgcgaaacggtaacccttcccgtccaagtgtccaccattccggaatacgcggacaaaggcagccaccctatcgaatttaccttccaataccgcgaaagcggcgcgcccgacggcaagccggtcgtcttggaagaagatgcaacctttatcggagaataa

SEQ ID NO: 54471 - DNA, 1281 bp, Neisseria meningitidis
atgaaatccctttttattcggctgctcctgttgggttcggcggcaggcgttttctaccatacccaaaaccaatccctgcccgcgggcgaacttgtctatccgtccgcaccgcaaatcagggacggcggcgatgcgctgcactacctcaaccgcatccgagcccaaatcggtttgcacaagctggcacacgcgccggttttggaaaactccgcccgcaggcacgcaagctacctcacgctcaatcccgaagacggacacggcgaacaccatcccgacaatccgcactacaccgcacaaaagctgaccgaacgcacacgccttgccgggtatctctacaacggcgtgcatgaaaacatcagcacggaagaagaagccgccgaatcgtccgacagcgacatccgcacgcagcaacgccaagtggacggattaatgagcgcaatctaccaccgcctttccctacttgaccgccatacggatgaggcaggagcggcatttgtgcgcgaaaacggtaaaaccgttctcgtattcaatcagggcaacggcaggtttgagcgacattgcgcccaaggcagaaatcagccggaagcaggacggaaatattaccgcaacgcctgccataacggtgcggtcgtgtacaccgacgaagccatgcccgcacaggagctgctctatacagcctatcccgtcggcagcggcgcactgccttatttccacggcgagcgtccagaccccgtgccggaatatgaaatcacgggcaatcctgccagcattgatttttccgaggcggcaggcaaaattacgatgaaaagtttcaagctgtatcagggtaaaaacgaaatccgccccgtcagggttttaaccgccggcaacgaccccaacggcaggctgaccgcgtaccaattcgcgctttttccgctcaagcctttggaatacggcacgctttatacggcggtattcgactatgtccgcaacggacggcgagcgcaggcgaaatggcagtttagaacccgaaaacccgattacccttattttgaggtaaacggcggcgagacacttgcggttagaaaaggcgaaaaatatttcatccactggcgcggacgctggtgtttggaagcgtgtacccgttatacctaccggcagcgacccggcagccgcctgtccataggaaggcacgaggcgggcggcatcgtcttcagcgttgacggaatggcgggcagccgcatcacgcttgcaccggaaggagaaacggaacgaggcgtaaccctttatttacaggattga

SEQ ID NO: 54472 - DNA, 1311 bp, Neisseria meningitidis
atgagcgcgcccgacctctttgtcgcccacttccgcgaagccgccccctacatccgccaaatgcgcggcaaaacgctggtcgccggcatagacgaccgcctgctcgaaggtgataccttaaacaagctcgccgccgacatcgggcttttgtcgcaactgggcatcaggctcgtcctcatccacggcgcgcgccacttcctcgaccaccacgccgccgcgcaaggccgcacgccgcattattgcaggggcttgcgcgttaccgacgaaacctcgctcgaacaggcgcagcagtttgccggcaccgtccgcagccgttttgaagccgcattgtgcggcagcgtgtccgggttcgcgcgcgcgccttccgtcccgctcgtatcgggcaacttcctgaccgcccgtccgataggtgtgattgacggaaccgatatggaatacgcgggcgttatccgcaaaaccgacaccgccgccctccgtttccaactcgacgcgggcaatatcgtctggctgccgccgctcggacattcctacagcggcaagaccttctatctcgatatgcttcaaaccgccgcctccgccgccgtctcgcttcaggccgaaaaactcgtttacctgaccctttcagacggcattgcccgccccgacggcacactcgccgaaaccctctcggcgcaggaggcgcaatcgctggcggaacacgccggcagcgaaacgcaacggctgatttcgtccgccgttgccgcgctcgaaggcggcgtgcatcgcgtccaaatcctcaacggggccgccgacggcagcctgctgcaagaactcttcacccgcaacggcatcggcacgtccattgccaaagaagccttcgtctccatccggcaggcgcacagcggcgacatcccgcacattgccgccctcatccgcccgctggaagaacagggcatcctgctgcaccgcagccgcgaatacctcgaaaaccacatttccgaattttccatcctcgaacacgacggcaacctgtacggttgcgccgccctgaaaacctttgccgaagccgattgcggcgaaatcgcctgccttgccgtctcgccgcaggcacaggacggcggctacggcgaacgcctgcttgcccacattatcgataaggcgcgcggcataggcataagcaggctgttcgccctctccacaaataccggcgaatggtttgccgaacgcggctttcagacggcatcggaagccgagttgcccgaagcgcggcgcaaagcctaccgcaacaacggacggaactcgcatattctggtgcgtcgcctgcaccgctga

SEQ ID NO: 54473 - DNA, 1326 bp, Neisseria meningitidis
atgcccgcgcctgatttgggatttgccttaagtctgccgccaaaaaaggcaatcgagtggctggaaagtaaaaaggttacggcggagagctaccgcaatctgacagcctccgaaattgccaaagtctatacgattgcccgcatgaccgacttggatatgctcaacgacatcaaaacttcgatggttgaatcggcaaaaagtggacagtcgtttgacgattggcgaaaaggtatcttgaatctgctcggcaacaagggctggctgcatccgaacgggcataacggtaaggatatcatcgacccagccaccggcgaggtattcggttcgccgcggaggttggagacgatttaccgtaccaacatgcaaactgcctacaacgccggtcaatatcaaggatatatggcaaatattgatgcacggccttattggatgtatgacgcggtaggcgacagccgcacccgtccggcgcattcggcaatagacgggctggtgtaccgctacgacgacccgttttgggcaacgttttacccgcccaacggctacaactgccgttgctcggtcatcgcgctgtcggagcgggatgtggaacgccaggggcggattgtcgggcaaagcacggcggacaatctggtcgagacccataaaatctacaacaaaaaaggcgatacttatctgacccttgcctataaagcaccggatggcagtctgtacacgaccgatcgaggatttgattacaacgccggacgaatgaactaccgccccgatttagacaagtacgaccgtgcgttggcgcatcaatttgccaaagcggaaatgggtggtgcggattttaaaaccagctttaaacagcttgaaaaagagttttatgaagtcaagcaacgtttggatattgatggcaagcccgataaagagcagaaaatcaaaatccgaaatgcgctatcaagacagcttaaatttgctgcgggtgtattgagcaaggaaacgcaagaattggcaggtatgacacgagcgacggtgtggctgtctgatgatacattggtcaaacaggtggacagtcgggaggggcaatcgtttggaacagatttatatgccatgctccccgatctgattcatgagcccgaatatattttttatgacaaaagcagaggaaaagaaagttttgttttgctcggaaaaccgttggaggggaacgaaaaatacagattgatggcagttttgaaatatctgccacagtacgattcgatttttttggattcgtttcgcagggcggatgaaaaagaaattgtgaaaagtaagaaacgctatgaaatgaaaaaaggctactaa

SEQ ID NO: 54474 - DNA, 1284 bp, Neisseria meningitidis
atgaaccgtaacgaaattttattcgaccgcgccaaggcggtcatccccggcggtgtgaattcgccagtccgcgcattcggcagcgtcggcggcgtaccgcgcttcatcaaaaaagccgaaggcgcgtatgtttgggatgaaaacggcacgcgctacaccgactatgtcggctcgtgggggcctgcgattgtcggccacgcgcaccccgaagtcatcgaagccgtgcgcgaagccgcgttgggcggtttgtcgttcggcgcgcctaccgagggcgaaatcgtcatcgccgaagaaatcgccaaaatcatgccgtccgtcgaacggctgcgcctcgtcagctccggtaccgaagcgacgatgaccgccatccgtttggcacgcggttttaccggtcgcgacaaaatcatcaagtttgaaggctgctaccacgggcattccgacagcctgctggtgaaagccggcagcggcctgctgacgttcggcaatccttcttccgccggtgtgcctgccgactttaccaaacacactttagtccttgagtacaacaacatcgcccaattggaagaagcctttgctcaaagcggcaatgacattgcctgtgtgattttggagccttttgtcggcaatatgaaccttgtccgcccgaccgaagccttcgtcaaagccctgcgcgaattgaccgaaaaacacggcgcggtgttgatttacgacgaagtgatgaccggtttccgcgtcgcgctcggcggcgcacaatcgctgcacggcatcatgcccgacctgaccacgatgggcaaagtcatcggcggcggtatgccgcttgccgcgttcggcgggcgcaaagacattatggaatgtatttccccactgggcggcgtgtatcaggcaggtacattatcaggcaacccgattgccgtcgccgccggtttgaaaacgctggaaatcatccgccgcgaagggttttatgaaaacctgacggcgcgtaccgaacagttggttcaaggttttcagacggcagcggatgcggcgggcatcgagtttgccgccgacagcgtgggcggtatgttcggtctgtatttcgccgcacacgcgccgcgaaactatgccgatatggcgcgttccaatattgacgctttcaaacgcttcttccacggtatgctcgaccgcggcattgccttcggcccgtccgcttatgaagcaggtttcgtttctgccgcgcatacgcccgagctgattgacgaaacggttgcggttgcggttgaagtgttcaaggcgatggctgcatga

SEQ ID NO: 54475 - DNA, 1539 bp, Neisseria meningitidis
atgttccattccatcgaaaaatacagaacgcccgcccaagtccttttgggcctgattgcattaaccttcgtcggcttcggggtcagcacggtatcccatccgggtgccgactacatcgtccaagtgggcgacgaaaaaatcagcgaccactccatcaacaacgccatacagaacgaacaggcggacggcggcggcccttcgcgcgacgcggtgttccaatccctgctgcaacgcgcctacctgaaacagggcgcgaagctgttaggcatttcggtttcttccgaacaaatcaagcaaattatcgtggacgatcccaatttccacgacgcaaacggcaaattcgaccacgcgcttttaaaccgctacctttcccaacgccatatgtctgaagaccagtttgtcgaagaaatccgcgatcagtttgccttgcagaatttggtaaacctcgtccaaaacggcgtattggtcggcgacgcgcaggcggaacagctgatcaggctgacgcaggtcaaccgcaccatccgttcgcacactttcaaccccgacgagttcatcgcccaagtcaaagtgtctgaagccgatttgcagaaattttataatgcgaacaaaaaagactatctgctgccgcaggcggtcaaattggaatatgtcgccttgaatctgaaggattttgcagacaagcaaaccgtcagtgaaacggaagtgaaaaatgcgtttgaagagcgcgtggcgcgtttgccggcaaatgaagccaaactttctttcgagcaggaaaaagccgccgtcgaaaacgaattgaaaatgaaaaaggcggttgccgacttcaataaggcaaaagaaaagctgagcgatgacgcgttcaaccatcccgcttcgcttgccgaagccgccaaaaacagcagtttgaaagtcgaaacccaagaaacttggctgagcaggcaggacgcgcaaatgtccggactgcctgaaaacctgatcaatgccatattcagcgacgacgtattgaagaaaaaacacaattccgaagtgttgtctatcaataatgaaatcgcgtgggtcgtccgcgccaaagaagtccgcgaagagaaaaccctgccgtttgccgaagccaaagatgcggtgcgtcaggcttatatccgtgccgaagccgccaaacttgccgaaaacaaggcaaaagacgtgcttacccaactgaacggcggcaaggcagttgatgtgaaatggtcggaagtgtccgttttgggcgcgcagcaggcaaggcagtccatgccgcccgaggcttatgcggaactgctgaaagcaaaaccgacaaacggcaaacccgcctacgtcaggctgaccggtctgccggcacccgtgattgtcgaagtacaggctataaccccgccggatgatatcgccgcacagcttccgcttgcaaaacaggctttggcgcagcagcagtctgccaataccttcgacttgttgatacgttatttcaacggcaaaatcaaacagaccaaaggagcgcaatcggtcgacaacggcggcggtcagtaa

SEQ ID NO: 54476 - DNA, 966 bp, Neisseria meningitidis
atgagctacacgcaactgacccaaggcgaacgataccacatccaatacctgtcccgccactgcaccgtcaccgaaatcgccaaacagctgaaccgccacaaaagcaccatcagccgcgaaatcagacggcaccgcacccaagggcagcaatacagcgccgaaaaagcccagcggcaaagccagactatcaaacagcgtaagcgacaaccctataagctcgattcgcagctgattcagcacatcgacccccttatccgccgcaaactcagtcccgaacaagtatgcgcctacctgtgcaaacaccaccagatcacgctccaccacagcaccatttaccgctaccttcgccaagacaaaagcaacggcagcacgttgtggcaacatctcagaatatgcagcaaaccctaccgcaaacgctacggcagcacatggaccagaggcaaagtacccaaccgtgtcggcatagaaaaccgacccgctatcgtcgaccagaaatcccgtatcggcgattgggaagccgacaccattgtcggcaaaggacagaaaagcgcattattgaccttggtcgaacgcgttacccgctacaccatcatctgcaaattggatagcctcaaagccgaagacactgcccgggcagctgttagggcattaaaggcacataaagacagggtgcacaccattaccatggataacggcaaagagttctaccaacacaccaaaataaccaaagcattgaaagcggagacttatttttgtcgcccttaccattcttgggagaaagggctgaatgagaacaccaacggactcatccggcaatacttccccaaacaaaccgatttccgtaacatcagtgatcgggagatacgcagggttcaagatgagttgaaccaccgaccaagaaaaacacttggctacgaaacgccaagtgttttattcttgaatctgttccaaccactaatacactag

SEQ ID NO: 54477 - DNA, 648 bp, Neisseria meningitidis
atgaaacctttgattttagggcttgccgccgtgttggcgctgtctgcctgccaagttcaaaaagctcccgacttcgactacacgtcattcaaggaaagcaaaccggcttcaattttggtggttcccccgctgaacgaatcgcccgatgtcaacggaacatggggtgtactggcttcgaccgccgctccgctttccgaagccggctattacgtcttccccgccgcagtcgtggaggaaaccttcaaacaaaacggcttgaccaatgccgccgatattcacgccgtccggccggaaaaactgcatcagattttcggcaatgatgcggttttgtacattacggttaccgaatacggcacttcatatcaaattttagacagcgtgacgaccgtatccgccaaagcacggctggtcgattcccgcaacggaaaagagttgtggtcgggttcggccagcatccgcgaaggcagcaacaacagcaacagcggcctgttgggggctttggtcagcgcagtggtcaatcagattgccaacagcctgaccgaccgcggttatcaggtttccaaaaccgccgcatacaacctgctgtcgccctattctcacaacggcatcttgaaaggtccgagattcgtcgaagagcagcccaaataa

SEQ ID NO: 54478 - DNA, 3132 bp, Neisseria meningitidis
atgaacctcgaaactaaacccatcgccgaaacgccgaatttcatcgtgctcgaccaatatgaaaaaatcgaacagtcgggcagctaccaatcggaaaaccagttggaagcggagttaatcgccgatttgcagaatcagggttacgaataccgcaaggatttgaacagccaaagcaggctgctggaaaacctgcgcgcgcagttgcagcggctgaacgatgtggcgttttcagacggcgaatgggcgcggtttttgacggaatatctggacaggccgtctgaaaacattaccgataaaacccgaaaaatccacgacgaccatatttacgatttcgcttttgatgacggccgtctgaaaaatatttatctgctggacaaaaaaaaccttgcccgcaaccatgtgcagcttatcaaccagtttgagcagacgggcacgcatgcaaaccgctatgacgttaccgtgttggtaaacggcttgccgctggtgcagattgaattgaaaaagcgcggcgtggcggtgcgcgaggcattcaatcaggtgcaccgttacagcaaagagagcttcaacagcgaaaattcgctgttcaaattcctgcaaatcttcgtgatttccaacggcacggatacgcgctatttcgccaacaccaccaagcgcgacaaaaacagcttcgatttcacgatgaattgggcgcggtcggacaatcatccgattaaggatttgaaagactttactgccacgttcctgcagaaaagcgtattgctgggcgttttgctgcattacagcgtgttcgatgcgaatgatacgctgctgattatgcggccgtaccagattgccgccgccgaacgcattttgtggaaaatcaacagttcggcgcaggcgaagaattggagcgggccggaaagcggcggctatgtctggcacaccacgggcagcggcaaaacgctgaccagcttcaaggcggcgcgtctggcgacggaatcggcgtttatcgacaaggttttcttcgtggtggacaggaaggatttggactatcagacgatgaaggaataccaacgtttttcgaccgacagcgtgaacggttcggaaagcacggcgggcttgaaacgcaatttggaaaaagacgacaacaaaatcatcgttaccaccatccagaagctgaacaacctgatgaagagtgaagataatctgccggtttatcaccagcaagttgtctttattttcgacgaatgccaccgttcgcaattcggcgaagcgcaaaaaaacctgaaaaagaaatttaaaaaattctgccagttcggttttaccggtacgccgatttttcatgaccatatcgttgatggcaaactgattatgaaaggcaatgcgcttggttcggagagtacggaaagcgtatttgggagacagctgcattcttatgtgattaccgatgccatccgcgatgaaaaagtattgaaattcaaagtggattacaacgatgtgcgcccgcagttcaaagccgtggaagcggaacaggacgagaagaaactgagtgccgccgaaaaccgccaagccctgctgcatcctgaacgcatccgcgaaatcacgcaatatatcctgaaccagttcaggcagaaaacacaccgcttgaatgcgggcggcaaaggctttaacgccatgtttgccgtcagcagcgtggatgcggcgaagtgctattacgaagcgttcaaaacacaacaggcaggcagcctgcacccgctgaaagtggccaccattttttcctttgccgccaacgaagagcaaaacgccgtcggtgaaattgccgatgaaacctttgaaccggaagcgatggacagcagcgcaaaagaatttttgcaggctgccatcaacgattacaacacctgtttcaaaaccaatttcggcacggacagcaaagcctttcagaactactaccgcgatttggcaaaacgggtaaaaaatcaggaagtggatttgctgattgtggtcggcatgtttttgacgggttttgacgcgccgacgctgaacacgctgtttgtcgataaaaacctgcgctatcacggcctgatgcaggcgttttcgcgcaccaaccgcatttacgatgccaccaaaaccttcggcaacattgtctgcttccgcgatttggagcaggcaaccattgatgcgattaccttgtttggcgacaaaaacaccaaaaatgtagtgctggaaaaaagttacgaagaatacatgaacggctataccgacagccagaccggcgaagcgcgacgcggctatttggatgtggcaaaagaattgcacgagcgtttccccgatcccgacaaaatcgaaacggaaaaagacaaaaaagattttgccaaactcttcggcgaatacctgcgggcggaaaacgtattgcagaactacgatgaatttgccgcgctgcgcgagttgcagagtgtggacgcggcggacgaagatgcgatgaaggcgtttcaagaaaaatactacctgagcgatgaagacgtgcaggaaatgcggcaagtgccgatgccgtctgaaagggcggtgcaggactaccgttccgcctacaacgacatccgcgattggttgcgccgccaaaaagcaggcgaacagaaagaacagtcaaaaatcgactgggacgatgtggtttttgaggtggatttgctcaaatcgcaggaaatcaatctggattacatcttgcaactgattttcgagcatcacaaaaaaatcaaaggcaaagcggagctggtggaagaaatccgccgtatcatccgcgccagtatcggacaccgcgccaaagagagcctgattgtggatttcatcaacgatacggatttggataaagtccccgatgttcccgccatactggaaaccttctacacctacgctcaagaggtgatgaggaatgaagccgcagagctgattgccgccgaaggtttgaacgaaaccgccgccaaacgctatttaatcagctcgctcaaacgcggctatgccagcgaaaacggtacggaactgaccgaaaccatgccgaaaatgagtccgctcaacccgcaatatctgacgaagaaacaaagtgtttttcaaaagattgcggcgtttgtggagaagtttgccggaatagggacagatatttga

SEQ ID NO: 54479 - DNA, 702 bp, Neisseria meningitidis
atgttccgcatcgtcaaatggctgattgccctgcccgtcggcatctttatctttttcaatgcctatgtgtacggcaacatcatcacctaccgcgccgtcgcgccgcatcggactgcctttatgtcgatgcggatgaagcagtttgaacaggaaggtcgcgatgtcgcactggattaccgctgggtaccctacaaccgcatctcggtcaacctgaaaaaagccctgattgcttccgaagatgcccgtttcgccggacacggcggcttcgattggggcggcattcaaaacgccatcaggcgcaaccggaacagcggcaaagtgaaggcgggcggttcgaccatcagccagcagcttgccaaaaacctgtttttaaacgaaagccgcagctatatccgcaaaggcgaagaagcggcgattaccgcgatgatggaagctgttaccgacaaagacaggatttttgaactgtatttaaactcaatcgagtggcactacggtattttcggcgcggaagccgcgtcccggtatttttatcaaatacccgccgccaaactgagcaaacagcaggcggcgaaactgacggcgcgcgtccccgccccgctctactacgccgaccatccgaaaagcaaacggctgcgcaacaaaaccaatatcgtgctcagacgcatgggttcggcagaattgcctgaaagcgatacggactga

SEQ ID NO: 54480 - DNA, 501 bp, Neisseria meningitidis
atggcggatttgcagaaaacttttcaaacttcgttccgtgatgcgatggcatcctgtgcggcaggcgttcatgtcatcacgacagacggtgcggcagggcgttacggcattacaatgacggcggttgcgccggttaccgacgagccgccgaccgtgatgctgtgcatcaaccggagtgcgcgaatcattccgatcctgtcggaaaacggcagcctctgcatcaatacgctggcggacgaacatcaggatgttgccgaacattttgccggattgaccggcctgtcgcccgaagagcggtttgcctaccacatctggcatcgcggcaaaacgggacaacttgaaatagagggcgcgttggcgcacctgcacgggcatattgtcggcaaacatgaaatcggcacgcattttgtgttttacgtcaggctcgacgaaatcaaaaactgcgggtgcaaacgccccgcgctgctgtatttcagacggcagtttagatttttagactga

SEQ ID NO: 54481 - DNA, 1446 bp, Neisseria meningitidis; identical to SEQ ID NO: 54468

SEQ ID NO: 54482 - DNA, 867 bp, Neisseria meningitidis
atgtggaaaatgttgaaacacatagcccaaacccaccgcaagcgattgattggcacattttccctggtcggactggaaaaccttttgatgctggtgtatccggtgtttggcggccgggcgatcaatgccgtgattgcggggggggtgtggcaggcgttgctgtacgctttggttgtgcttttgatgtggctggtcggtgcggcgcggcggattgccgatacgcgcacgtttacgcggatttataccgaaatcgccgtgccggtcgtgttggaacagcggcagcgacaagtcccgcattcggcggtaactgcgcgggttgccctgtcgcgtgagtttgtcagcttttttgaagaacacctgccgattgccgcgacatccgtcgtatccatattcggcgcgtgcatcatgctgctggtgctggaattttgggtcggcgtgtcggcggtgggcatacttgcgttgtttttatggcttttgccacgttttgccgccatcagcgaaaacctgtatttccgcctgaagaacagcttggaatgcgacaaccactttatccgaaaaggagaccggcggcagctggaccgccattacggactggttgcgcgcctgcgtgtgctgatttccaaccgcgaagccttcggctatctctgcgtcggcgcggcgatgggtattttgttcggctttgcttttgtgatgatgacgctcaaaggctacagcagcgcggggcatgtctattcggtcggcacttatctgtggatgtttgccatgagtttggacgacgtgccgcgattggtcgaacaatattccaatttgaaagacatcggacaacggatagagtggtcggaacggaacatcaaagccggaacttga

SEQ ID NO: 54483 - DNA, 642 bp, Neisseria meningitidis
atgccatctgaaaaaccaatgaacagaagaaccttcctcctcggcgcaggcgcgttgctccttaccgcctgcggcagaaaatccgcccgaacccacgccaaaattcccgaaggaagcaccgtacttgccttgggcgattcgcttaccttcggctacggcgcaaaccctggcgaatcctaccccgcgcaactgcaaaaactgacgggttggaatattgtcaacggcggcgtatcgggcgatacatccgcccaagccctgtcgcgcctgcccgcgctgttggcacgcaaacccaagcttgtgattgtcggcataggcggcaacgactttctgcgcaaagttcccaaggagcagacccgcgccaatatcgcgaaaatcatcgaaaccgtgcagaaggaaaacatccccgccgtcctcgtcggcgtgccgcacattaccttgggcgcgttgttcgggcatttgaacgatcatccgctgtatgaggatttgtccgaggaatacggcattccgctgttcggcggcgcgtgggcggaaattttgggcgataataatctgaaatccgaccaaatccacgccaacggcaaaggctatcggaaatttgccgaagatttgaatcaatttttgagaaaacaggggtttagataa

SEQ ID NO: 54484 - DNA, 306 bp, Neisseria meningitidis; identical to SEQ ID NO: 37296

SEQ ID NO: 54485 - DNA, 876 bp, Neisseria meningitidis
atggcttacctgttaatcagcatcgtgttcagcgtgtcggtttccattttgctgaaaatggcaaggaagaaaaaaatcgacatcgcgcaggcggtcgccgtcaattatgtggtcgcggtcatactgaccctgctggtattgaagccggatatcggcaatatcggcgcatttttgccgacgtggccgctgtttgccgctttgggcgtgctgctgccgtccgtattcgtgataatgggcaaatctgtggaagccgccggtatcgtcaaatccgacgcggcgcagcgtttgtcgctgtttttgccgattgttgccgccttgacgctgtttggcgaaaaactcagcgaaggcaaactaatcgggctgtgcctcgcatttgccgcactgttctgcctgctttggaaacacagcggtggcaaaaaatcaggaagcgcgtggcggcaggcggcattgctgctgggcgtgtgggcaggttacggcattatcgatatcctgttcaaacagcttgccaaaagcggaacggcatttgcgggcaacctgctggttgcatttgtgctggcgggtgtgctgatgtttgcctgcctgtttgccaaatcggtcagatggcgtgttgagagtgtggtcggcggcatattcttgggcggtttgaattttatgaatatcgtaacctacatcaccgcgcaccaaatgatgaaggataatccgaccttggtttttgccggtatgaatatcggcgtgattgttttgggtacgctttcgggcgcattgttctttaaggaaaaaatcaacacaatcaatacggcgggaatcgtgttggcactgtgttctatcgcctgcctgttttattggggggaagtcaaggtactgttcggcatataa

SEQ ID NO: 54486 - DNA, 126 bp, Neisseria meningitidis; identical to SEQ ID NO: 42488

SEQ ID NO: 54487 - DNA, 1911 bp, Neisseria meningitidis
ttgggcatttcccgcaaaatatcccttattctgtccatactggcagtgtgcctgccgatgcatgcacacgcctcagatttggcaaacgattcttttatccggcaggttctcgaccgtcagcatttcgaacccgacgggaaataccacctattcggcagcaggggggaacttgccgagcgcagcggtcatatcggattgggaaacatacaaagccatcagttgggcaacctgatgattcaacaggcggccattaaaggaaatatcggctacattgtccgcttttccgatcacgggcacgaagtccattcccccttcgacaaccatgcctcacattccgattctgatgaagccggtagtcccgttgacggattcagcctttaccgcatccattgggacggatacgaacaccatcccgccgacggctatgacgggccacagggcggcggctatcccgctcccaaaggcgcgagggatatatacagctacgacataaaaggcgttgcccaaaatatccgcctcaacctgaccgacaaccgcagcaccggacaacggcttgccgaccgtttccacaatgccggtagtatgctgacgcaaggagtaggcgacggattcaaacgcgccacccgatacagccccgagctggacagatcgggcaatgccgccgaagccttcaacggcactgcagatatcgttaaaaacatcatcggcgcggcaggagaaattgtcggcgcaggcgatgccgtgcagggcataagcgaaggctcaaacattgctgtcatgcacggcttgggtctgctttccaccgaaaacaagatggcgcgcatcaacgatttggcagatatggcgcaactcaaagactatgccgcagcagccatccgcgattgggcagtccaaaaccccaatgccgcacaaggcatagaagccgtcagcaatatctttatggcagccatccccatcaaagggattggagctgttcggggaaaatacggcttgggcggcatcacggcacatcctgtcaagcggtcgcagatgggcgcgatcgcattgccgaaagggaaatccgccgtcagcgacaattttgccgatgcggcatacgccaaatacccgtccccttaccattcccgaaatatccgttcaaacttggagcagcgttacggcaaagaaaacatcacctcctcaaccgtgccgccgtcaaacggcaaaaatgtcaaactggcagaccaacgccacccgaagacaggcgtaccgtttgacggtaaagggtttccgaattttgagaagcacgtgaaatatgatacgaagctcgatattcaagaattatcggggggcggtatacctaaggctaagcctgtgtttgatgcgaaaccgagatgggaggttgataggaagcttaataaattgacaactcgtgagcaggtggagaaaaatgttcaggaaataaggaacggtaatataaacagtaactttagccaacatgctcaactagagagggaaattaaaaaattaagaacttcagaaggaaaggcaaattctgcatcagcagctttattgacacttgatttgaagacagctcaagctgccaatcaagttgttgaaagtttgagaagtacaggtaatcttccttctaattatattactaaatctcaggcgataagtatgggatggcgtccaggaaaagccttgggtaatacaataaaaaatggacaattagggggagatatttttgcaaattctacaaatattttacctgctaaacagggtaggatatggtatgaagcggacattggcttaataaataccatgtcaagatcgaaccaggctggtactagattattatattctaacgatggattgctatatataacaactgatcattatatctctgcaatacaaattggaacttggaaatag

SEQ ID NO: 54488 - DNA, 2049 bp, Neisseria meningitidis
gtgattcctgcctacattcctcttcgctctttcggtatacgtaaaattccgaatattacgcaatttctaccggaatattcacttaacaaaaccgtattcaacgcccaaaccatcattggctggggcttacgcccgaccacccaccaagcacgtgcttttgcacaatcacatggcttgccgtttgtagccttggaagacggttttttacgctcactgggcttaggcgtggccggttatccgcccttcgcactggtttacgacgatatcggcatctattacgacacaacccgcccatcgcgtttggagcagttgattttagccgcaaacatgccgtctgaaatgcttaaccaagcgcagcaggccattgatttgattttgacgcaccgtttgtctaaatataaccatgctctggatttttcagacggcctcgtacaagacagcaaaaacattgttttggtaattgatcaaactttcggcgatatggcgattcaatatggcggcgcagatgaagccacattccgccaaatgtttcagacggccttagccgaaaatcctgatgcggaaatctgggtcaaaacccatcccgatgtattgagcggcaagaaacagggttaccttactgatttggcacagcagccgcgtgtgcgtttattggctgaagacattaatccgatttcgctgctgcaagcggtggacaaagtgtattgcgtgacctcgcaaatgggttttgaagccttgttgtgcggcaagcctttggtaacgtttggtttgccgtggtatgccggatggggcgtgagtgacgaccgccatcctaaaatcgacagccttgttcaaacccaacgccgcgccccccgcaacttgctgcagctcttcgctgcagcctatctgcaatacagccgctacctcaaccccaataccggcgaagcaggcagcctctttgatgtcatcgactatctggcgacggtcaaacgcaaaaacgacaaattgcgtggcgagttgtattgcgttggtatgtctttgtggaaacgcgcggttgccaaaccgttctttaacgtaccctcttgccgtctgaaatttatctcttccacccaaaaactggcaggggtcaaactgtccgacgatgcacgcatccttgcctggggcaacggcaaagaggccatcgtccgctttgccgaacaacaccacatccccctgctgcgcatggaagacggctttatccgctcggtcggactcggctccaacttagtgccgccgctgtcgctcgttaccgacgatatgagcatttatttcaatgccgaaaccccgtcccgtcttgaatacatcctacaaaaccaaaacttcgacgatcaagactttcagacggccttgaagctgcaaaaaatgctgaccgaaaaccacatcagtaaatacaacgtcggcagctcagacttcaccgccccgtcaaccgacaaaaccgtgatcctcgttcccggccaggttgaagatgatgcgtctatccgctacggttcgccccaaatctaccgcaatctggatttgctccgtaccgtacgcgaacgaaaccccaatgcctatatcatctacaaaccgcatcccgatgtagtcagcggtaaccgcatcggccatatttcccctgaagatgctgcacgatatgccgaccaaaccgccgagcaaaccgacatcctgacctgtctccaatacgcagacgaagtacataccatgacttcgctgaccggttttgaagccttgttgcgcggcaaaaaagtcagctgctacggcctgcctttttacgcaggctggggacttacccaagatctgctccccattccgcgccgtagccgcagacttgagctttggcagctgattgccggcacgctcatccactatcccgactacatccaccccgaaacccatcaggccataaatgcagaaaccgcagcccaaatcctgatacgacaaaaaaatatgcaaaaaaacaacaacggattacatcgcgggtactttgccaaaaaattaggtaaaatcaaacaactatatcgatctttcaaataa

SEQ ID NO: 54489 - DNA, 1155 bp, Neisseria meningitidis
atgaaatttaccaagcaccccgtctgggcaatggcgttccgcccattttattcgctggcggctctgtacggcgcattgtccgtattgctgtggggtttcggctacacgggaacgcatgagctgtccggtttctattggcacgcgcatgagatgatttggggttatgccggactggtcgtcgtcgccttcctgctgaccgccgtcgccacttggacggggcagccgcccacgcggggcggcgttctggtcggcttgactatcttttggctggctgcgcggattgtcgcctttatcccgggttggggtgcgtcggcaagcggcatactcggtacgctgtttttctggtacggcgcggtgtgcatggctttgcccgttatccgttcgcagaatcaacgcaactatgttgccgtgttcgcgctgttcgtcttgggcggtacgcacgcggcgttccacgtccagctgcacaacggcaacttaggcggactcttgagcggattgcagtcgggcttggtgatggtgtcgggttttatcggtctgattggtacgcggattatttcgttttttacgtccaaacggttgaatgtgccgcagattcccagtccgaaatgggtggcgcaggcttcgctgtggctgcccatgctgaccgccatgctgatggcgcacggcgtgatgccttggctgtcggcggctttcgcgtttgcggcaggtgtgatttttacagtgcaggtgtaccgctggtggtataagcctgtgttgaaagagccgatgctgtggattctgtttgccggctatctgtttaccggattggggctgattgcggtcggcgcgtcttatttcaaaccctctttcctcaatctgggtgtgcatctgatcggggtcggcggtatcggcgtgctgactttgggcatgatggcgcgtaccgcgcttggtcatacgggcaatccgatttatccgccgcccaaagccgttcccgttgcgttttggctgatgatggcggcaaccgccgtccgtatggttgccgtattttcttccggcactgcctacacgcacagcatacgcacctcttcggttttgtttgcactcgcgcttttggtgtatgcgtggaagtatattccttggctgattcgtccgcgttcggacggcaggcccggttga

SEQ ID NO: 54490 - DNA, 345 bp, Neisseria meningitidis
ttgcgtactcactttgtcatttccaatgttccaagtacacctgctccgctaagaggaagaaaacttacaggaaaacttattttagaagttcctgctcaggtcaatccaattccacaatctgtattaagggcggcacgagaagaaaatgttatcattagagatacaacaggaaggatttacaataggtggtggtttagtattaggtggttgtgcaggtgcacatcttgcaagaaaagaaccattgatactaacagggaaaacaggggcaggtgcgtcagcaattgcaaatgcaagcattggatatcaatggactgtcaatttgtcaaagccaaaagaaggagctaa

SEQ ID NO: 54491 - DNA, 537 bp, Neisseria meningitidis; identical to SEQ ID NO: 38262

SEQ ID NO: 54492 - DNA, 279 bp, Neisseria meningitidis; identical to SEQ ID NO: 37183

SEQ ID NO: 54493 - DNA, 1914 bp, Neisseria meningitidis
atgaacccaagccccctactcgacctgattgacagcccgcaagatttgcgccgtctggacaaaaaacagctgccgcgccttgccggcgagttgcgcgcctttctgctggaatccgtcggtcaaaccggcggtcatttcgccagcaacttaggtgcggtcgagctgaccatcgccctgcactatgtgtacaacacgcccgaagacaagctggtgtgggatgtcggacaccaaagctatccgcacaaaatccttaccggacgcaaaaaccagatgcacaccatgcgccaatacggcggtttggcgggttttccgaaacgttgcgagtccgagtacgacgcgttcggcgtggggcattcctccacctccatcggcgcggcgttgggcatggcggcggcagacaaactcttgggcagcgaccgccgcagcgtcgccatcatcggcgacggcgcgatgacggcggggcaggcgtttgaggccttgaactgcgcgggcgatatggatgtggatttgctggtcgtcctcaacgacaacgaaatgtcgatttcccccaacgttggcgcgctgccgaaatacctcgccagcaacgtcgtgcgcgatatgcacggcctgttgagtaccgtcaaagcgcaaacgggcaaggtattagacaaaatacccggcgcgatggagctcgcccaaaaagtcgaacacaaaatcaaaacccttgccgaagaagccgaacacgccaaacagtcgctgtctttgtttgaaaacttcggcttccgctacaccggccccgtggacggacacaacgtcgaaaatctggtggacgtattgaaagacttgcgcagccgcaaaggccctcaactgctgcacgtcatcaccaaaaagggcaacggctacaaactcgccgaaaacgatcccgtcaaataccacgccgtcgccaacctgcctaaagaaagcgcggcgcaaatgccgtctgaaaaagaacccaagcccgccgccaaaccgacctatacccaagtgttcggcaaatggctgtgcgaccgggcggcggcagattcccgactggttgcgattacccccgccatgcgcgagggcagcggcttggttgagtttgaacaacgattccccgaccgctatttcgatgtcggcatcgccgagcagcacgccgttacctttgccggcggtttggcttgcgaagggatgaagcccgtcgtggcgatttattccacctttttacaacgcgcctacgaccaactggtgcacgacatcgccctgcaaaacctgcccgttttgtttgccgtcgaccgcgcgggcatcgtcggcgcggacggcccgacccatgccggtttgtacgatttaagctttttgcgctgcattccgaatatgattgtcgccgcgccgagcgatgaaaatgaatgccgcctgctgctttcgacctgctatcaggcagacgcgcccgccgccgtccgctatccgcgcggcacgggtacgggcgtgccggtttcagacggcatggaaaccgtggaaatcggcaagggcattatccgccgcgaaggtgggaaaaccgcattcattgccttcggcagtatggtcgcccccgcattggcggtcgccggaaaactgaacgccaccgtcgccgatatgcgcttcgtcaaaccgatagacgaagagttgattgtccgccttgcccgaagccacgaccgcatcgttacccttgaagaaaacgccgaacagggcggcgcaggcggcgcggtgctggaagtattggcgaaacacggcatctgcaaacccgttttgcttttgggcgttgccgataccgtaaccggacacggcgatccgaaaaaacttttagacgatttgggcttgagtgccgaagcggtggaacggcgtgtgcgcgcgtggctgtcggatcgggatgcggcaaattaa

SEQ ID NO: 54494 - DNA, 1188 bp, Neisseria meningitidis
atgacagaggacgaacgtttcgcgtggctgcaattggcgtttacgccctatatcggcgcggaaagcttcctgctgctgctgcgccgtttcggcagcgcgtcaaacgccctgtccgcaccggcggaacaggtcgccccggcggtgcggcacaagcaggcggccgaggcttggcgcaatgcggaaaaacgcgcctcggcgcggcaggcggcagaagcggcgttggaatgggaaatgcgggacggatgccgtctgatgctgcttcaggatgaagatttccccgaaatgctgacgcaggggctgaccgcgccgccggttttgtttttgcgcggcaacgtgcggctgctgcacaagccttccgccgccatcgtcggcagccgccatgccacgccgcaggcgatgcggattgccaaagatttcggcaagtcgttgggcgggcaaaatatccccgttgtgtcgggtatggcttccggtatcgatactgccgcccatcagggcgcactggaggcagaaggcggcaccatcgccgtgtgggggacgggtatagaccgcatttacccgccgtccaataaaaaccttgcctatgaaatcgccgaaaaaggattgattgtcagcgagtttcccatcggtacgcgcccgtatgccggcaactttccgcgccgcaaccgcctgattgccgcgctgtcgcaggttacgctggtggttgaagctgcgttggaatccggttcgctgattaccgccggcttggcggcagaaatggggcgcgaagtgatggcggtacccggttcgatagacaatccgcacagcaaaggctgccacaaactgattaaagacggcgcgaaattggtggaatgcctggacgacatcctgaacgaatgcccggggctattgcaaaatacgggtgcttcatcatattctataaataaggatacgcccgacacgggcagtcgcgccgttcagacggcatacgccccgccgcctgccgcaaaaatgccgtctgaaggggcggcaggcggcacagccgtcggcggcatactggataaaatgggtttcgaccccatccatcccgacgtgcttgccggacagttggctatgcctgccgcagatttgtatgccgcactgttggaattggaattggacggcagcgttgccgcaatgcccggcggcagataccagcgtatccgaacttga

SEQ ID NO: 54495 - DNA, 621 bp, Neisseria meningitidis; identical to SEQ ID NO: 37371

SEQ ID NO: 54496 - DNA, 528 bp, Neisseria meningitidis
atgaaacagaaaatctggtacacctacgatgacatccaccgcgtcatcaaagcattggcagaaaaaatccggaacgccgacatcaaatacgatgccatgattgccatcggcggcggcggctttattccggcacgtatgctgcgctgttttctggaaattccgatttatgccgtaaccaccgcctattacgacagcgacaacgaaggacaggttacagaagaagtcaaaaaagtccaatggctcgaccccgttcccgaagccctgcggggcaaaaacgtccttgttgtcgatgaagtggacgacagccgcgtaaccatggaattttgcctgacagagctgctcaaagaagacttcggtacgatcggcgtcgccgtactgcacgaaaaaatcaaagccaaagcaggcaaaatccccgaaggcattccctatttcagcggcatcaccgtagaagactggtggatcaactatccgtgggacgcactcgacatcgacgaacacaaccgccttgccgaggccggccgaggctga

SEQ ID NO: 54497 - DNA, 381 bp, Neisseria meningitidis; identical to SEQ ID NO: 39549

SEQ ID NO: 54498 - DNA, 714 bp, Neisseria meningitidis
ttgggcgcgtgcagcacttcctaccgcccctcgcgggcagaaaaagccaatcaggtttccaatatcaaaacccagttggcaatggaatatatgcgcggtcaggactaccgtcaggcgacggcaagtattgaagacgccttgaaatcagaccctaaaaacgagcttgcctggctggtccgtgccgaaatctatcaatacctgaaagttaacgacaaggcgcaggaaagtttccggcaagccctctccatcaaacccgacagtgccgaaatcaacaacaactacggctggttcctgtgcggcaggctcaaccgccctgccgaatctatggcatatttcgacaaagccctggccgaccccacctacccgaccccttatattgccaacctgaataaaggcatatgcagcgcaaaacaggggcaattcggattggcggaagcctatttgaaacgttccctcgccgcccagccgcagttcccacccgcatttaaagaactggcgcgcaccaaaatgctggccgggcagttgggcgatgccgattactactttaaaaaataccaaagcagggtagaagtccttcaggccgatgatttgctgctaggctggaaaattgccaaagccctcggcaacgcacaggcggcatacgaatatgaagcacaattgcaggcgaatttcccctactcggaagaattgcaaaccgtcctcaccggtcaataa

SEQ ID NO: 54499 - DNA, 873 bp, Neisseria meningitidis
gtgaaaggactcgactattgccgtcaaaaagcagaagaaagccgctccagttttttatcgggcttccgtttcctgactcagaaaaaacgggatgcggtaacggttttatatgctttttgccgcgaattggacgatgtggttgacgaatgttccaaccccgatgttgcacaggcaacattgaactggtggcgcggcgatttggacaaggtgttcggtggcgagatgccggaacaccccgtcaatcaggccttgcagcaggttaaggaaaccttcaagctgccgaaatatgaactggaagccttaatcgacgggatgcagatggatttggttcaagcccgttacggcagttttgaagaattgaaactgtattgccaccgcgtcgcaggcgtagtcggctgcctgattgcgcggattttggggttttcagacagcaaaacactggaatacgccgacaaaatgggacttgcgctgcaactgaccaacatcatccgcgatgtcggcgaagacgcccgtaatgggcggatttacctgccgatggaggaaatgcggcggtttgatgtccccgcaagtgtgattttgcagtgccggccgacagaaaatttcaccgaattgatggcattccaaataaagcgtgcgcgtgaaacctaccgcgaagccgtatcgctgctgcctgatgccgacaaaaaagcccaaaaagtcggactggttatggcggcggtttattacgcgcttttaaacgaaatcgaccgagacggcgcgcaaaacgtcctcaaatacaaaatcgccctcccttcgccgcgcaaaaaacgcattgccctgaaaacctggttattcggattcaaaccgcgccccggcacgccggaacgggcataa

SEQ ID NO: 54500 - DNA, 552 bp, Neisseria meningitidis
atgaaagcgtatctggctctgatttctgctgccgttatcggtttggctgcctgctctcaagaacctgccgcgcctgctgccgaggcaactcctgctgctgaagcacccgcttccgaagcacctgccgccgaagctgctcctgcagatgctgccgaagcccctgctgtcggcaactgtgcggcaactgtcgaatccaacgacaatatgcagttcaacaccaaagacatccaagtcagcaaagcatgtaaagagtttaccatcactctgaaacataccggtacgcaacccaaagccagcatgggtcacaatctcgtgattgccaaagctgaagacatggacggcgtatttaaagacggcgtaggtgctgccgataccgactatgtcaaacctgatgatgcacgcgttgttgcccataccaaactgatcggcggcggcgaagaagcttccctgactctggatcctgctaaattggccgacggcgaatataaattcgcttgtaccttcccaggtcacggtgctttgatgaacggcaaagtgactttggtcgattaa

SEQ ID NO: 54501 - DNA, 117 bp, Neisseria meningitidis
ttggaattgaaatactgcaatcgggaggctaaggcttccgttgtaacgtttaccatatatttcattattttaatttcatcaaaaaacaaaattcaagattatacataccgccaatag

SEQ ID NO: 54502 - DNA, 453 bp, Neisseria meningitidis
atggcaaaaccgctcaaataccccgtttccgcactggtcgtcctttatagcggggacggcggcatcctgctcatcgaacgcacgcatccgaaaggattttggcagtcggtaaccggcagcctcgaaccgggcgaaaccgtcgcacaaacggcaaggcgcgaagtttgggaagaaaccggcatcctgctggcggacgggcagcttcaagactggcacgacagcacggtttacgaaatctaccaccactggcggcaccgctatccaaaaggcgtgtttgaaaaccgcgaacacctcttctctgccgaaatcccgcgtgatacgcccatcgccctgcaacccgaagaacacgtctcctacggctggttcggcttggaagaagcggcggaaaaagtgttttccccgtccaacaggcgcgcgattctggaactgggcaggtttttgggcaaacggtaa

SEQ ID NO: 54503 - DNA, 1224 bp, Neisseria meningitidis
atgtctgcgcaatcacaaaacaatcatacgtccccattggtcgtcttgaccacgctgttcttcatgatgggttttattacctgcatgaacgacatccttatccctcatttgaaagaaattttcgacctgtcttacgttcaggcgatgctgatccaattctgtttctttaccgcctatgcggtgatgtccatcccgatgggggcttttgtcggcaaagtcggctacaaaaacggcgttatcggcggctttctgctgacggcggtcggatgcctgctgttttatcctgctgcgggcagccattcttacgcggtatttttgggcgcgttgtttattttggcttccggcgtaacgctgcttcaggtcgccggtaatccttatgttaccctgctggcgaaacccggcaaggaatcggcaacactgacgctggttcaggcgtttaacgctttgggtacgaccattgcgccgcaaatcggcgcgttcctgattttggcggacgcaacccaaaccgtcagcaaggcggaacagatttcttccgtacagattccctatttgggactggcggggctgctgattatccttgccgttttcgtgaaaatgatccggctgcccgacgcgcgcaaaattgccgccgaggaaagcgcgcacaaccacgacggcaaaaccagcgtatggcaatacaaacatctcgtgttcggtacggcaggcattttctgctatgtcggcgcggaggtgtctatcggttcgttgatggtcaacgtattgggttatctgaaagggctggatcatgcttctgccgcgcattacctgtcgttctattggggcggcgcgatggtcggacgtttcctcggttcggcggtgatggcgaaattcgcgcccaaccgttatttggcgtttaacgcatcggctgcggtcgtactgcttgccgtcgcgatggcgacgggtagcggcaatgcggatgtggcgatgtggtcgctgcttgccatcggttttttcaactcgattatgttcccgacgattttctctttggcaaccaaaggattgggaaaatttaccaacgcggcttccggtgtactgtgtaccgcgattgtcggcggtgcggtcgttcctgtcgtgcagggctgggtggcagatacttacaccctgatgtcttcgtttgtcgtttccgtcatctgttatctgtatatcgtgttttttgcggtgtacggatatagggcggacaaataa

SEQ ID NO: 54504 - DNA, 219 bp, Neisseria meningitidis; identical to SEQ ID NO: 36291

SEQ ID NO: 54505 - DNA, 942 bp, Neisseria meningitidis
atgaagggttttaccattattgaatttttggttgcgggcatgctcagtatgattgtcctgatggcggtcggatcgagttacttcacgtcccggaaattaaatgatgcggcaaacgagcgtcttgctattcaacaggatttgcggaatgcggcaacattaattgtccgcgatgcaagaatggcggggagcttcggttgtttcaatatgtctgagcataccgaaaaggatgttgttcccgatgtggcgcaaaaaaaccgtcttttttccttaaaagggagcagtgcaaataaacttatccccataacggaatctttaaatatcggatatccgggttttacccagcgccttaacgcattgattttccaatacggaatcgatgatgttaatgcaagcgccgatactaccgtcgtcagcagctgtgccaaaatagcaaaaccgggtaagaaaatatctaccttgcaagaagcaaagagtgcattacagattactaatgatgataaacaaaatggaaatatcacccgtcaaaggcatgtggtcaatgcctatgcggtcggcaggattgacggtgaggaaggtttgttccgcttccaattgaatgatgatgggcagtggggcaatcctcagttgttggttaaaaagattaataaaatggatatacggtatatctatcttctcgtggaaagtcctggtatacagcctaccaattctccccggtatatttacggttgccctgaagatgacgatgccggcaaagaggaaacattcagatatacggataaattcaacagcgcccaagatgctgttacgcccgccggggtggaggttttattgagtagcggtactgataccaagattgccgcttcttcagacaatcatatttatgcttaccgtatcgatgcgacaatacgcgggggaaatatatgcgcaaacagaacgctttga

SEQ ID NO: 54506 - DNA, 588 bp, Neisseria meningitidis
atgaacaatatgtttgccgcaaaattgtccaaactggtttataccgcttccgaccatcctgattccctgtcggagatggaggagtttgaccgcctgattctgctgatacgcaaactgtatcaaatattggacgggcaacatatcctctccagagtaacggtttgccttcaccaccaaaaccggcgcggcctgattgccttggataaagcggctgccggttgcgatgcggcaatgttgcgcgcccaacgttggcgtatctacacgcagattgcggaacgcctttccgggtcgggcggcggcttcacggttacggcagaaagcgtgtccgccgcctgcccggagcttgaaggacgctatctcgagcttgtccgccgcgccgccgtctctttcggtttcacgcaaggatgggaaaatccggcaggcgggcaggaaaaaacacaagccgtcccggatgccgcatcgggtcattccgtcagaaaaccaatcaaaatcaatatagaagcgaaagtggaacgctatccggcataccgcccgaccgccgccctgaaagtaacccgccggcggtttttccggctgcaaaaccgataa

SEQ ID NO: 54507 - DNA, 1497 bp, Neisseria meningitidis
atgtcgcttgccttggtttacagccgcgccttgagtggtatgaatgcgccgttggtcgaagtggaagcccaccttgccaacggcctgccgcatttcaacatcgtcgggctgcccgatacggaagtaaaggaaagtcgcgaccgcgtccgtgccgccattattcaaagcggttttgaattccccgccaaaaaaatcaccgtcaacctcgcccccgccgacctgcccaaagagtcggggcgtttcgatttgccgattgcaatcggcatccttgccgcatcggggcaggttgcgcccgaaaaactggcggaatacgagtttgcgggggaattggcactgtcggggctgttgcgccccgtgcgcggcgcgttggcgatggcgtggcagggtatgcaggcaaaacgtgcatttgttttgcctgaagaaaacgcaggacaagccgccgtgatgcgcggcattaccgtttacggcgcgcgctctttgggtgaagtcgccgcccatttgaacggcatcgaacctttggcgcaaaccgaatgttccgtaccgcaaatgccgtctgaacatggcggacaacctgatttgtgcgatgtgaaaggtcagcacaccgcgcgccttgctttggaaatcgctgccgcaggcggacacagcctcttgatgatgggtccgccgggaacgggcaagtctatgctctcccaacggctgcccggcatcctgccgccgctgaccgaagacgaattggtagaagtttgggcattgcgttcgctcctgcccaaccaccaacaacaactcgacagcaaccgtcctttccgcagtccgcatcacagcgccagcgcggcggctatggtcggcggcggttcggatccgcgcccgggcgaaatttcattggcgcaccacggcgtattgtttttggacgagctgcccgagttcgaccgcaaagttttagaagttttgcgcgaaccgttggaaaacggcgaaatccacatttcccgcgcggcgcgccaagccgtctatcctgccaaattccaacttgttgccgccatgaacccttgtccttgcggttatctcgggcatcccatcaaaccctgccgttgcacgcccgaaagcgtcgcgcgttaccgcagcaagatttccggcccgctgctcgaccgcatcgatttgaccatcgaagtcccgagcctgtccgccgccgaactgatgcagcaggaagcaggggaaagcagcgcgtccgttttggaacgcgttatcgccgccagagacaaacaatacgcacggcaaggcaaagtgaatgccgctttgagcgtcagcgaactcgattcccaagcccgcattcaaaaagaagcgcaggaagcattgggcggcctgctggaaaaactctccctttccgcccgcagcttccaccgcattatgcgcgtggcgcgtacattggcggatttggcgggcgacgaagaagtcggcagaagccacgtcatgaaagccataggtttccgtcgcgctttatag

SEQ ID NO: 54508 - DNA, 396 bp, Neisseria meningitidis
gtgaaactgctggcgaataactggcagccgattgccatcatcgcgcttgtcggcacgggtttggcggtgtcacaccatcaaggctacaaggcagcctttgcgaagcagcaggcggtcatcgacaagatggagcacgataaggcgcaagccctgctgttgtcggctcaaaactatgcgcgcgaactggaactggcacgcgcggaagcgaaaaaatatgaagtcaaggcgcacgctgtcggcatggctttggcgaaaaaacaggcggaagtcagccgtctgaaaacggaaagagacctttgcaaaattcctttccctcccgacagccgaaacccaaacacaggttttcagctgttttcgccccaaatacctcctaattttacccaaatacccccttaa

SEQ ID NO: 54509 - DNA, 525 bp, Neisseria meningitidis; identical to SEQ ID NO: 39459

SEQ ID NO: 54510 - DNA, 1287 bp, Neisseria meningitidis
atgagcgcaatcgttgatatttttgcccgcgaaattttggactcacgcggcaacccaaccgtagaatgcgacgtactgttggaatccggcgtcatgggacgcgcagccgtaccaagcggcgcatcaaccggtcagaaagaagctttagaacttcgcgacggcgacaaatcccgttacttgggcaaaggcgtattgaaagccgttgaccacgtcaacaaccaaatcgcgcaagccctcatcggtatcgatgccagcgaacaatcttatatcgaccaaatcatgatcgaattggacggtactgaaaacaaaggtaacttgggtgccaacgcgactttggccgtttctatggccgtagcacgcgcagccgctgaagatgcagggctgccgctttaccgctacttgggcggcgcaggtccgatgtccctgcccgtaccgatgatgaacgtcatcaacggcggcgaacacgccaacaacagcctgaacatccaagagtttatgattatgcccgtcggcgcaaaatctttccgcgaagcgttgcgctgcggtgcggaaattttccacgccttgaaaaaactgtgcgacagcaaaggcttcccgaccacagtcggcgacgaaggcggtttcgcccccaacctgaacagccacaaagaagccctgcaactgatggttgaagccaccgaagccgccggctacaaagcgggcgaagacgtattattcgcattggactgcgcgtccagcgagttctacaaagacggcaaataccacttggaagccgaaggccgctcctacaccaacgcggaatttgccgaatatctggaaggcctggtcaacgagttccccatcatctccatcgaagacgggatggatgaaaacgactgggaaggctggaaactgctgaccgaaaaactgggcggcaaagtccaactcgttggcgacgacctcttcgttaccaacccgaaaatccttgccgaaggcattgaaaaaggcgtggcaaacgcactattggtcaaagtcaaccaaatcggtactttgagtgaaaccctgaaagccgtcgacttagccaaacgcaaccgctacgccagcgtaatgagccaccgctccggcgaaaccgaagacagcaccattgccgacttggcagtcgccaccaactgtatgcagatcaaaaccggttctttgagccgttccgaccgcatggcgaaatacaaccaactgctgcgtatcgaggaagaattggcggaagccgccgactaccccagcaaagccgcattctaccaactgggcaaataa

SEQ ID NO: 54511 - DNA, 192 bp, Neisseria meningitidis
ttgccgaaattcggagaatgccctctccccagccctcccccacgggggagggggtaggttgcagcagattcaggcgttgcaggtcgtctgaaaaagaatgcccgaaacatcgacagcgggaatgtttcaggcagcctttatcgcaaggcaggtggaacaaacgttgcgaacgttttttcagacgacctttga

SEQ ID NO: 54512 - DNA, 1836 bp, Neisseria meningitidis; identical to SEQ ID NO: 44240

SEQ ID NO: 54513 - DNA, 1473 bp, Neisseria meningitidis
atgaaccagacaagccgcgatctgacccgcatcagccacaacaccaaaatcgtcgccaccttggggccgggcagcaacaacgtcgaactgttggaagacatgatccgcgtcggcggtctgaacgtcgtccgcttcaacttcagccacggcacgcccgaattccatcaggaaaacgcccgcattgtgcgcgaggcggcaaaacgcgccggacaggaaatcgccatcattgccgacctgcaagggccgaaaatccgcgtgggcaaaatcgccggcggcggcatcgaattgaacaaaggcgaaacgctggtactggatgccgcgctcgaaggcgaaggcacgcgcgaggcggtcggtttggactaccgcgacctgcccgacgacgttaccgcaggcgacgtattgtggctggacgacggcctgctgaccctgaccgtggaatccgtcgaaggcagcaggattatcacaagggtggaaaacagccatgtcctgaaaagcaacaaaggcatcaacaaacgcggcggcgggctgtccgcaggcgcgttgaccgaaaaagacttccgcgacctgaaaaccgcgattgccatcggttgcgactacctcgccatcagctttgtgaaatctgccgaagatttgcacatcgcgcgcgccaaagtcgaagaagaaatgaagggcagcactgccgtgcgccccggtttggtttccaaaatcgaacgcgtagaagcgattgaaaaccttgatgaaatcatcctcgccggcgacggcattatggttgcgcgcggcgacttggcggtcgaagtcggacacgccgccgtccccgccctgcaaaaacggatgatccgccgcgcccgcgagttgcgccgcttcagcattacggcgacgcaaatgatggaatcgatgattaccaaccccgtgccgacccgcgcggaagtcagcgatgtggcaaacgcggtattggacggtaccgatgcggtgatgtgttccgccgaaaccgccgtcggcgcgtatccgtttgaaaccgtcagccaaatggcaattatctgcgcggctgcggaaaaagagcaggattcgctcaacggcgttgccgaacaggcggagtatcccgaagcggtcagcaccaacctggcggttgccggcggcgcggtcagcgtggcgcgcgcggttcacgccaaagcgattgtcgccctgaccgaaagcggttcgaccgcctttgaaatcagccgccacaacatcaccctgccgattttcgcgctgaccccgagcgtttccgcccaacgccgtatggcgatgtaccgcggcgtgcgcccgctgattttggcaaccagtaccgaccacgacacggcgttgaacgaagtcgaaaccatgctggtggaacacaacatcctgcattccggcgaccaatacatcatcaccagcggctcgcaaatgcgcgaatccggttcgaccaatacgctggaagtgctgcgcgtcaaataa

SEQ ID NO: 54514 - DNA, 198 bp, Neisseria meningitidis; identical to SEQ ID NO: 37567

SEQ ID NO: 54515 - DNA, 1194 bp, Neisseria meningitidis
atgtaccgacacatcgaatactatccgggcgacccgattttgagtttggtcgaaaccttcaaaaacgacccgcgccctgaaaaagtcaatttgagcataggcatttatttcgacgacgaaggcaaaatgcccgtgttggaatccgtgcgccgtgccgaaaccgcccgcgccgccacgcctgcgccgtcgccctacctgccgatggaaggcttggacacttaccgcagcgcggtgcagcatttattgttcggcaaagacaaccctgcgctcgcgcaaggacgcatcgctaccgtacaaaccttgggcggctcgggcgcactcaaagtcggggcggacttcctgcaccgctggtttcccgaagcgcgcgcctacgtcagcgacccgacttgggacaaccatcgcggcatttttgaaggcgcaggtttcgaggtcggcacttacccatattacgaccctgccactgttggcgtgaaattcgacgaaatgaccgcgtttttcaacaccctgcccgaaaacagcgtcctgatcctccatccctgctgccacaacccgaccggcgtggatatgtcggaacaacaatgggacgaagtgttgcacatcatcaaaacgcgcaaactgattccgtttatggacatcgcctaccaaggcttcggcggcgatttggacagcgatgcctacgccgtccgcaaagcggtggaaatggaattgcccttgttcgtcagcaattccttctcaaaaaacctgtcgctctacggcgagcgcgtcggcggcctgagcgtggtttgcccgaataaggaagaagcggatttggtgttcggacagctcaaattcactgtccgccgcatctactccagcccgcccgcgcacggcgcgtatatcgccgccgacgtgatgaacagccccgaactttacgccttgtggcaaaacgaggtttatatgatgcgcgaccgcatccgtgcgatgcggcagaaactttatgatgtcttaactgcgcaaatccccgatcgcgatttcacttatttcatcaaacagcgcggcatgttcggctacacaggattgagcgtggaacaagtccgcaggctgcgcgacgaatttgccgtttacctgctggattccggcaggatgtgcgtcgccggactgaatacgtcgaataccgactatgttgcccgcgcatttgcggaagtcttgaaataa

SEQ ID NO: 54516 - DNA, 798 bp, Neisseria meningitidis
atgctgaaacaacgggtaataaccgccatgtggctgctgccgctgatgctgggcatgctgttttacgcgccgcaatggttgtgggctgcattttgcggactgattgccctgattgccttgtgggaatatgcccgtatgggcggtttgtgcaaaattaaaaccaaccattacctcgccgcaaccttggttttcggcgtggttgcctatgcgggcggctggatgctgcctaatttggtttggtatgttgttttggcattttggctcgccgttatgcctttatggttgagattcaaatggaggctcaacggcggttggcaggtttatgccgtcggctggcttctggtcatgccgttttggttcgcgctcgtatccctgcgcccgcatcccgatgatgccctgccgctgctcgccgtgatgggtttggtgtgggttgccgatatttgcgcgtatttcagcggcaaggcgttcggcaaacacaaaatcgcaccggcaatcagccccggcaaaagctgggaaggtgcaatcggcggcgcggtttgcgtggccgtgtacatgaccgccgtacgaagtgccggctggctggcattcgatacaggctggttcgataccgtgttaatcggtttggtgttgaccgttgtcagcgtatgcggcgaccttttggaaagctggctcaagcgcgcggcaggcatcaaagacagcagcaacctgctgcccggacacggcggcgtgttcgaccgtaccgacagcctgattgccgttatcagcgtctatgcggcgatgatgtcggttttaaattga

SEQ ID NO: 54517 - DNA, 1167 bp, Neisseria meningitidis
atgagaaaattcaatttgaccgcattgtccgtgatgcttgccttaggtttgaccgcgtgccagccgccggaggcggagaaagctgcgccggccgcgtccagtgaggcgcaaaccgccaacgagggcggttcggtcagtatcgccgtcaacgacaatgcctgcgaaccgatggaactgaccgtgccgagcggacaggttgtgttcaatattaaaaacaacagcggccgcaagctcgaatgggaaatcctgaagggcgtgatggtggtggacgagcgcgaaaacatcgcccccggactttccgataaaatgaccgtcaccctgttgccgggcgaatacgaaatgacttgcggtcttttgaccaatccgcgcggcaagctggtggtaaccgacagcggctttaaagacaccgccaacgaagcggatttggaaaaactgtcccaaccgctcgccgactataaagcctatgttcaaggcgaggttaaagagctggtggcgaaaaccaaaacctttaccgaagccgtcaaagcaggcgacattgaaaaggcgaaatccctgtttgccgacacccgcgtccattacgaacgcatcgaaccgattgccgagcttttcagcgaactcgaccccgtcatcgatgcgcgtgaagacgacttcaaagacggcgcgaaagatgccggatttaccggctttcaccgtatcgaatacgccctttgggtggaaaaagacgtgtccggcgtgaaggaaattgcagcgaaactgatgaccgatgtcgaagccctgcaaaaagaaatcgacgcattggcgtttcctccgggcaaggtggtcggcggcgcatccgaactgattgaagaagtggcgggcagtaaaatcagcggcgaagaagaccggtacagccacaccgatttgagcgatttccaagccaatgtggacggatcgaaaaaaatcgtcgatttgttccgtccgctgatcgaggccaaaaacaaagccttgttggaaaaaaccgataccaacttcaaacaggtcaacgaaattctggcgaaataccggactaaagacggttttgaaacctacgacaagctgggcgaagccgaccgcaaagcgttacaggcctctattaacgcgcttgccgaagaccttgcccaacttcgcggtatactcggcttgaaataa

SEQ ID NO: 54518 - DNA, 633 bp, Neisseria meningitidis
atgagaaaaaccaaaaccgaagccttgaaaaccaaagaacacctgatgcttgccgccttggaaaccttttaccgcaaagggattgcgcgcacctcgctcaacgaaatcgcccaagccgccggcgtaacgcgcggcgcgctctattggcatttcaaaaataaggaagacttgttcgacgcgctgttccaacgtatctgcgacgacatcgaaaactgcatcgcgcaagatgccgaagatgccgaaggagggtcttgggcggtattccgccacacgctgctgcactttttcgagcggctgcaaagcaacgacatctactacaaattccacaacatcctgtttttaaaatgcgaacacacggagcaaaacgccgccgttatcgccattgcccgcaagcatcaggcaatctggcgcgagaaaattaccgccgttttgaccgaagcggtggaaaatcaggatttggctgacgatttggacaaggaaacggcggtcatcttcatcaaatcaaccttggacgggctgatttggcggtggttctcttcctgcgaacgtttcgatttgggcaaaaccgccccgcgcatcatcgggataatgatggacaacttggaaaaccatcccgacctgcgccggaaataa

SEQ ID NO: 54519 - DNA, 342 bp, Neisseria meningitidis; identical to SEQ ID NO: 43005

SEQ ID NO: 54520 - DNA, 1662 bp, Neisseria meningitidis
atgactgacaacagccctcctccaaacggacacgcccaagcacgcgtccgcaaaaacaacaccttcctctctgccgtctggctggttccgctgatcgcgctgattgccggcggctggctttgggttaaggaaatccgcaacagggggcctgtggttacgctcttgatggacagcgcggaaggcattgaggtcaacaatacggtcatcaaagtattgagcatcgatgtcggacgcgttacccgaatcaaactgcgcgacgaccaaaaaggcgtggaagtaaccgcccaactcaatgcggacgtatccggcctcatccgcagcgatacccagttttgggtggtcaagccgcgtatcgaccaaagcggcgtaaccggtttgggtacgctgctttcgggttcgtacatcgcctttacacccggcaaaagcgacgaggcaaaagacgtgttccaagtgcaggacattccgcccgttaccgccatcgggcaaagcgggctgcgcttgaatttgattggtaaaaacgaccgcatcctcaacgtcaacagccctgttttgtatgaaaactttatggtcgggcaagtcgaaagcgcgcatttcgacccgtccgaccaaagcgtgcattacaccatcttcatccaaagccccaacgacaaactgattcattccgccagccgtttctggctggaaagcggcatcaatatcgaaaccacaggcagcggcatcaaactcaattccgcccctctgcctgccctgctgtcgggcgcgatttcatttgattcgccgaaaaccaaaaacagtaaaaacgtcaaaagcgaagacagcttcacgctttacgacagccgcagcgaagtcgccaacctgcctgacgaccgctcgctgtactacaccgcgtttttcaaacaatccgtgcgcggcctgaccgtcggttcgcccgtcgagtacaaagggctgaatgtcggcgtggtttccgacgttccttatttcgaccgcaacgacagcctgcacctgtttgaaaacggctggatacccgtacgcatccgcattgaaccttcccgtttggaaatcaatgccgacgaacaaagcaaagaacattggaaacaacaatttcagacggccttaaacaaaggcctgaccgccaccatctccagcaacaacctgctgaccggaagcaaaatgattgagttgaacgatcagccttccgcatcacctaagctgcgaccgcataccgtttatgcaggcgataccgttatcgcgacccagggcggcggtttggacgatttgcaggtcaaattggcggatttgctggacaaattcggcaaactgcctttagataagacggttgccgaattgaacggttcgcttgccgagctcaaatccacactcaaatctgccaatgccgccctaagctccatcgacaaactggtcggcaaaccgcagacacaaaacattccgaacgaactgaaccaaaccctgaaagagttgcgcacaaccctgcaaggcgtatcgccgcaatcgcctatctacggcgacgtacaaaatacgttgcaaagtttggacaaaaccttaaaagacgttcaacccgtcattaacactttgaaagaaaaacccaacgcgctgattttcaacagcagcagcaaagaccccatcccgaaaggaagccgataa

SEQ ID NO: 54521 - DNA, 930 bp, Neisseria meningitidis
atgattcatgtttcggcagtgcaggcaccggcgcatattcaggataccggacgctacggacaccggcgttacggcatcggtcatgccggtgcgatggacacggttgctttggcggcgggcaatattttattgggcaacgacgaaggcacggccgcaatcgaaatcgctttgggcgggataatgctggtgtttgaacgggatacgccgttttgtctcaccggtgccgtgtatcaggcggaattggacggcgaaccggtctattcgtattggcgttataccgcccgcaaagggcagaccttgaaaatggtgcgtgccgtgcagggcatgtacggctatgtgtgcgtggcgggcggatttgatgtgccggaagtgatgggttcgagaagtaccgacctgaaagccggtttcggcggccatcagggcagaatgctgcaaaaaggcgattatctccccatcggcaaaggtgcgcaggaattgtccaaagtcggcattgccccgataccgtttaccgataccgtccaccttgttccttcgtcggaatatgccgctttcagtgaaaaagggcgtctgaatctggaacgggaaacgtggacgctgcaaagcgatagcaaccgcatgggctaccgcttcgacggacagccgctgaccctgtcgcaacctttggaaatgctgtcccacgctgttcaggcaggaaccgtgcaggtgccgcccggcggcaaaccgattatcctgctggccgatgcgcaaaccaccggcggttatccgaaaatcgctaccgttgccgccgccgatttgggcaggctggcacaggtgcgcttcggcagcaaagtcaaattcaaaataatcggcttgaaagaagccaccgccctgcggcgcaaaaaccaagcctatctgaaccaaatacggagaatcacccatgaagcaggttga

SEQ ID NO: 54522 - DNA, 351 bp, Neisseria meningitidis
atggaagccttcaaaaccctaatttggattgttaatataatttccgctttggccgtcatcgtgttagtattgctccaacacggcaaaggcgcggatgccggcgcgactttcggatcgggaagcggcagcgcgcaaggcgtattcggctctgccggcaacgctaacttcctcagccgctcgaccgccgttgcagcaacatttttctttgcaacctgcatggctatggtgtatattcacacccacacaacaaaacacggtttggacttcagcaacgtacaacaaactcagcaagcacccaaacccgtaagcaataccgaaccttctgcccctgttcctcagcagcagaaataa

SEQ ID NO: 54523 - DNA, 549 bp, Neisseria meningitidis; identical to SEQ ID NO: 39055

SEQ ID NO: 54524 - DNA, 138 bp, Neisseria meningitidis; identical to SEQ ID NO: 36823

SEQ ID NO: 54525 - DNA, 801 bp, Neisseria meningitidis; identical to SEQ ID NO: 53459

SEQ ID NO: 54526 - DNA, 132 bp, Neisseria meningitidis
gtgaaaagtcagattttatgcggaaaacgcagacgtgtcgcattttcgacaaaatttgtcggctgcgcgatatgtttttccgaacaagccgcgttgtgctttattaaaatagaaccattatcatttatgtga

SEQ ID NO: 54527 - DNA, 1350 bp, Neisseria meningitidis
atgaaattaccggtgatgtcgcccgaacattcggcgcaacttcaggcgtttgaggcaaaaatcctgtccaatcacgccaaaatcgaggcgtggttccgcacgcagtggagcgtacaccgcccgccgttttacggttcggtcgatatacgcaatgccggttacaaaatttcgtctatcgatatgaatttgttccccggcggcttcaataatctgaatcccaactttatcccgctggcggcggttgccgcgcaagatgcggtgcaacgcgcctgcgaaacggcgaaatccgtattgattattcctgaaaaccacacgcgcaatacgttttacctgcaaaacgtttacgccctcggcgagattttgcgttcggcagggtatgaagtgcgcttgggcagcctgaatccggaagtaaccgaaccgaccgaatttgaaaccgcattgggcgacaaaatcctgttggaacctttattgcgtacccgcgatcgcgtccatcttgcagacggcttttcgccttgcgtggttttgttgaacaacgatttgtccgccggcattcccgacatcctcaaaggcatcagccaaaccgttttgccgccgttgcacggcggttggacgacgcgccgcaaaacaaatcatttcggcgcgtacaaccaagttaccgccgaatttgccaagttaatcggcatcgacgaatggcaaattaacccttattttgaaaaaatcggcggtttggacttccaagggcgtgaaggcgaagacgcgttggcggaagcggtagaacgtgtgctggcgaaaattcaagccaaatacgacgaatcgggcattaccgacaaacctttcgtcatcgtcaaagccgatgccggcacttacggcatgggcgtgatgagcgtcaaatccgccgacgaagtgcgcggattgaaccgtaaaaaccgcaataaaatggcgaaagtcaaagaaggcttggaagtcagcgaagtgattgtccaagaagggatttatacttatgaaaccttaaacggcgcggtgtgcgaacccgtcgtgtatatgatggaccgcttcgtcatcggcggctttttccgcgtacacgaagggcgcggtgcggacgaaaacctcaacgccggcggtatggtgtttgttccgctgtctaacagcattcctaccggtaacggcgataattcccaagaagcgcccgaagcctgcaagcgcgtattcgaacaatgggactcgctgggtatgccgcgctctgaaaaagactgcgacgtggacaacgaacacaaccgcctctacgtttacggcgtaatggcacgcctgtcgcttctggcggcttcaatcgagttggaagaaacggcgtaa

SEQ ID NO: 54528 - DNA, 312 bp, Neisseria meningitidis; identical to SEQ ID NO: 38726

SEQ ID NO: 54529 - DNA, 999 bp, Neisseria meningitidis
atgtccgaaaacaaacaaaacgaagtcctgagcggttacgaacaactcaaacggcgcaaccgccgccgcctcgtaacggcaagttgcttggttgccgcctcctgcatcctgctggcagccgccctcagttccggccctgccgaacagactgccggcgaaacaagcggcgtagaaaacaaagcggcaggtgcggcacaaacccctgccttgaaatccgccgccgacaaaccgcaggacttggcaggcgaagacaagccttctgccgccgacagcgaaatcagcgagcctgaaaacgtaggcgcgccgctggtgctgattaacgagcgcctcgaagacagcaacatcaaaggtttggaagcatccgagaaactgcaacaggcagaaaccgccaaaaccgcaccgaagcaggcaaaacaacgcgctgccgaaaaagtgccggcaactgccgacagtacggatacggtagcggttgaaaaaccgaaacgcactgccgaaacaaaaccgcaaaaagcggaacgcactgccaaagccaagcccaaagccaaagaaaccaaaaccgccgaaaaagttgccgacaaaccgaaaactgccgccgaaaaaaccaaaccggatacggcaaaatccgacagcgcggtaaaagaagcgaaaaaagccgacaaggctgaaagcaaaaaaacagccgaaaaagaccgttcggacggcaaaaaacacgaaacggcacaaaaaaccgacaaagcggacaagaccaaaaccgccgagaaggaaaaatccggtaaaaaagccgccattcaggcaggttatgccgaaaaagaacgcgccttaagcctccagcgcaaaatgaaggcggcgggtatcgattcgaccatcaccgaaattatgaccgacaacggcaaagtttaccgcgtcaaatcaagcaactataaaaacgcaagggatgccgaacgcgatttgaacaaattgcgcgtacacggtatcgccggtcaggtaacgaatgaatag

SEQ ID NO: 54530 - DNA, 798 bp, Neisseria meningitidis
atgaaagccttgcataaaacatcattttgggaatctttagccattcaaaggcgcgtaatcggtgcgcttttgatgcgggaaattatcacccgttacggtcgcaataatattggctttttatggctgtttgttgagccgttgctgatgacattcgttatcgtcttgatgtggaaatttttaaaggcagaccgatattcaactttgaatattgtcgcatttgcgattactggctatccgatgttgatgatgtggcgtaatgcctcaaaacgggcagttgggtcgatttcttcaaatgccagcttgctttatcaccgcaatgtaagagttttggataccatcttggcgcgcatgattttggaaattgctggtgcaaccattgcgcagattgtgattatggcggtattgattgcgattggctggattgaaatgccggcagatatgttttatatgctgatggcttggcttttgatggctttttttgcgattggtttgggtttggtgatttgttcgattgcctttaatttcgagccgtttggcaagatttggggcacattgacttttgtgatgatgccgttatccggtgcgttcttttttgtgcataatttgccgcccaaggtacaagaatatgcattaatgatcccgatggtgcatggcacagaaatgttccgtgccggatattttggcgacagcgtcacgacttacgaaaatccttggtatattttgttgtgtaacttggttttgctgctgcttggtttggcggtggtggcgagattcagcaaaggggttgagccgcaatga

SEQ ID NO: 54531 - DNA, 312 bp, Neisseria meningitidis
atgaaatacaaaagcgaggcattagccgccattcatgaaatgatggaaggggcttacaacatcggcgcaatcgacaaaaagactatgcgcggctttgacaagtcctgcctgaccgaaatcaaaccgttgagcggcggggacatcaaggcaatcagggagaaggaggcactatcgcaagccgctttcgccatctatctcaacgtgggaaaaaatcacgtttcggcttgggagcggggcgttaaaaagccgagcggcgcggcgttgaagctgctgaccatcgtcaaaaacaagggcatcgaagccattgcgtag

SEQ ID NO: 54532 - DNA, 249 bp, Neisseria meningitidis; identical to SEQ ID NO: 38918

SEQ ID NO: 54533 - DNA, 768 bp, Neisseria meningitidis
atggcactggcaaaacgcatcatcccctgtctcgacgtaaaagacgggcgcgtcgtcaaaggcgtgaacttcatcggtttgcgcgacgcgggcgaccccgtcgaagccgccaaacgctacaacggcgaaggcgcggacgaattgaccttcctcgacatcaccgcctcatccgacaaccgcgacaccatcctgcacatcatcgaagaggttgccggacaagtcttcatccccctgaccgtcggcggcggcgtacgcaccgttgccgacatccgccgcctgctcaatgccggcgcggacaaagtcagcatcaacaccgccgccgttacccgtcccgacctgattgacgaagccgccggatttttcggttcgcaagccatcgtcgccgccgtcgatgccaaagccgtcaactccgaaaacacacgctgggaaatctttacccacggcgggcgcaatccgaccggtttggatgcggtggaatgggcgatcgaaatgcaaaaacgcggcgcgggcgaaatcctgctcaccgggatggacagggacggtacgaaacagggtttcaacctgccgctgacccgcgccgttgccgaagccgtcgacatccccgtcatcgcctccggaggggtcggcaatgtccggcacctgattgaaggtataaccgaaggcaaagccgatgccgtacttgccgccggcattttccatttcggggaaatcgccatccgcgaagccaaacgcgctatgcgcgaagccggcatcgaagtgcgcctctga

SEQ ID NO: 54534 - DNA, 1185 bp, Neisseria meningitidis
atggctaaggaaaaattcgaacgtagcaaaccgcacgtaaacgttggcaccatcggtcacgttgaccatggtaaaaccaccctgactgccgctttgactactattttggctaaaaaattcggtggtgctgcaaaagcttacgaccaaatcgacaacgcacccgaagaaaaagcacgcggtattaccattaacacctcgcacgtggaatacgaaaccgaaacccgccactacgcacacgtagactgcccggggcacgccgactacgttaaaaacatgattaccggcgccgcacaaatggacggtgcaatcttggtatgttccgcagccgacggccctatgccgcaaacccgcgaacacatcctgctggcccgtcaagtaggcgtaccttacatcatcgtgttcatgaacaaatgcgacatggtcgacgatgccgagctgttggaactggttgaaatggaaatccgcgacctgctgtccagctacgacttccccggcgacgactgcccgattgtacaaggttctgcactgaaagccttggaaggcgatgccgcttatgaagagaaaatcttcgaactggctgccgcattggacagctacatcccgactcccgagcgtgccgtggacaaaccgttcctgctgcctatcgaagacgtattctctatttccggtcgtggtacagtagtaaccggtcgtgtagagcgcggtatcatccacgttggtgacgagatcgaaatcgtaggtctgaaagaaactcaaaaaaccacttgtaccggtgttgaaatgttccgcaaactgctggacgaaggtcaagcaggcgacaacgtaggcgtattgctgcgcggtaccaaacgtgaagacgtagagcgtggtcaagtattggctaaaccgggtacaatcactcctcacaccaagttcaaagcagaagtatacgtactgagcaaagaagagggtggccgccataccccgttcttcgctaactaccgtccgcaattctacttccgtaccaccgacgtaactggcgcggttactttggaagaaggtgtagaaatggtaatgccgggtgaaaacgtaaccatcaccgtagaactgattgcgcctatcgctatggaagaaggtttgcgctttgcgattcgcgaaggcggccgtaccgtgggtgccggcgtggtttcttctgttatcgcttaa

SEQ ID NO: 54535 - DNA, 399 bp, Neisseria meningitidis
atgagcaccttcttccagcaaaccgcccaagccatgattgccagacacatcgaccgtttcccgctattgaagttggaccaggtgattgattggcagccgatcgagcagtacctgaaccgtcaaaaaacccgttacctccgagaccaccgcggtcgtcccgcctgtcccctgttgtccatgttcaaagccgtcctgctcggacaatggcacaacctctccgatcccgaactcgaacacagcctcatcacccgcatcgatttcaacctgttttgccgttttgacgaactgagcatccccgattacagtcatcaaccatattccggtttgtcggagaaagatgcatacgctgtgatgaccggataccgaccctttaaaagagtccgaccctatgccgtctga

SEQ ID NO: 54536 - DNA, 648 bp, Neisseria meningitidis; identical to SEQ ID NO: 38905

SEQ ID NO: 54537 - DNA, 1497 bp, Neisseria meningitidis
atgttttccaactacctactcagcttggcaatatggatacccatcgccgcaggtgtgctggttttgtcgaccggtaaggacagccgtgcgccgctggcgcgtgtgcttgcctttatgggtgcgcttgccggtttcttggtaacgctgcccctgtttaccggtttcgaccgtttgagcggcggctatcaatttaccgagttccacgagtggattccgctgctgaaaatcaactatgcattgggcgtggacggtatttcggtgctctttatcatcttgaatgcgtttattacgctgttggtggtattggccggttgggaagttattcagaaacgcccggcgcagtatatggcggcattcctgatgatgtcgggtttgattaacggtgcgtttgccgcgcaggatgcgattctgttttatgtgttcttcgagggtatgctgattccgctgtacctgattatcggtgtatggggcggcccgcgccgcgtctatgcgtcggtcaagctgttcctctatacgctgatgggttcgctcctgatgctggttgctatggtttacctgtactatcaaacaggcagcttctctattgtcgatttccaaaacatcaaacagattccgttgggcgtacaacagcttttgtttgcggcattcttcctgtcattcgctgtaaaagtgccgatgttccctgtacatacttggttgccggatgcccacgttgaagcgccgaccggcggttcgatggtgttggcggcaattacgctgaaactgggcgcgtatggtttcttgcgctttatcttgccgattatgccggacgcggcacgctattttgcccccgtaatcatcgtattgagcctgattgccgtgatttacatcggtatggtggctttggtgcagaccgatatgaagaaactggtggcgtattcgtccatcagccatatgggttttgtaacgcttgggatgtttttgtttgttgacgggcagttggacgactgggcgttgaaaggcgcaatcattcaaatgatttcccacggttttgtgtctgccgcgatgtttatgtgtatcggcgtgatgtacgaccgcctgcatacccgcaatattgctgactatggcggcgtggtcaatgtgatgcctaagtttgcggcgtttatgatgttgttcggtatggccaatgccggtctgcctgcaacttccggcttcgtgggcgagtttatggtgattatgggcgcggttaaagtgaatttctgggtgggcgcgttggcggccatgaccctgatttacggtgcgtcttataccctgtggatgtacaagcgcgtgattttcggcgcgatccacaatccgcacgttgccgaaatgaaagacatcaactgccgcgaatttgcgattctggcgattttggcggttgtggtattgggtatgggtctgtatccgaacgcatttatcgaagtggtgcatcaggcggcaaacgatttgattgcccatgtggcacaaagcaagatttga

SEQ ID NO: 54538 - DNA, 2019 bp, Neisseria meningitidis
atgaataaatctttatccggttcggtagaagaataccgcgaactgacgctccgaggcatgatactcggtgcattgatcactgtaatttttactgcgtccaacgtttacctcggtttgaaagtcgggctgacctttgcctcgtcgattccggcggcggtgatttcgatggcggttttaaagtttttcaaaggcagcaatattttggaaaacaacatggtgcagacccaagcctcggctgcgggtacgctttcaaccatcatcttcgtcctgcccggtttgctgatggcgggctactggagcggtttcccgttctggcagacgacgcttttatgtattgccggcgggattttgggggtgattttcaccattccgctgcgttacgcgatggtggtgaaaagcgatttgccttatccggaaggtgtggcggctgctgaaattttgaaagtgggcggtcatgaagaaggggataaccgtcagggcggcagcggcatcaaagagctggcggccggcggtgcgttggcgggattgatgagcttttgcgccggaggtctgcgtgtgattgccgatagcgcgagttattggtttaaaagcggtacggcaattttccaactgccgatgggcttttcactggcattgttgggcgcgggctatttggtcggactgacgggcggtatcgccattctgttgggcatttcgattgcttggggcattgccgtgccgtatttttcatcgcacatcccgcagccttccgatatagaaatggcggcgtttgcgatgaagctgtggaaggaaaaagtacgcttcatcggcgcgggaaccataggtatcgcggcggtttggacgcttttgatgctgctcaagccaatggtggaaggcatgaagatgtcgttcaagagttttggcggcggtgcgcccgctacagaacgcgctgaacaggatttgtcgcctaaagccatgattttctgggtattgtctatgatgtttattctaggcgtgtcgttttaccactttatcggcgattcgcacattacgggcggcatggcttggcttttggtggtcgtttgcacgcttttggcttccgtcatcggctttttggtcgccgccgcctgcggttatatggcgggtttggtcggctcgtcttccagcccgatttccggcgtgggcatcgtttccatcgtcgtgatttcgctggttttgctgctggtgggcgaatccggcggtttgatggcggatgaggcaaaccgcaaatttttgctggcactgactttattttgcggctcggcagtaatctgcgtggcttcgatctccaatgacaacctgcaagacctgaaaaccggctacctgctcaaagccacgccttggcggcagcaagtcgccctgattatcggctgtatcgtcggtgcgctggttatttcacccgtgttggaactgctttacgaagcctacggctttaccggcgcaatgccgcgcgaaggtatggacgcggcgcaggctttggcagcccctcaagcgactttgatgacgaccatcgcgtcgggcattttcgcccacaacctcgaatgggtctatatctttaccggcatcgcgattggcgcggtgttgattgccgccgatttggtgttgaaaaaatcatcaggcggcaaacttgccctgcccgtccttgcggtcggtatgggtatttatctgccgccgtccgtcaatatgcccatcgtggcaggcgcggtgttggcggcggtgttgaaacacatcatcggtaaaaaagcggaaaaccgtgaaggccgtctgaaaaacgccgagcgcatcggaaccttgttctccgccggcctgattgtcggtgaaagcctgatcggtgtgattatggcgtttattattgccttctccgtgaccaacggcggctcggatgcgccgctcgcgttgaatctgcaaaactgggatgccgccgcttcttggttgggtttggcgttcttcgttaccgggatgtttttctttgcacagcgcgtactgaaggcgggtaggtag

SEQ ID NO: 54539 - DNA, 957 bp, Neisseria meningitidis; identical to SEQ ID NO: 54437

SEQ ID NO: 54540 - DNA, 1167 bp, Neisseria meningitidis
atgaatttacacgagtatcaggctaaagaactgctggctagctacggtttgcccgtacaaggcggtattttggcacacaacggcgaagaagccgctgcagcttacgacaaattgggcggcaaattcgctgttgtcaaagcacaagtacacgccggcggccgcggtaaagcgggcggcgtaaaagtcgttaaaagccgcgaagaagctaaagaagtggctgaaagcctgattggcaccaacttggtaacttaccaaaccgatgccaacggccaacctgtcaacagtgttttggtttgcgaagacatgtatccggttcaaaccgagctgtacttgggcgcagtggttgaccgttctacccgccgcattacattcatggcctctaccgaaggcggcgtggaaatcgaaaaagttgctgccgaaactcctgaaaaaatcttcaaagtaaccgttgatccgctggtcggcctgcaaccttgccaagctcgcgaagttgcgttccaactgggcttgaaagacaaacaaatcaacgagttcgtcaaactgatgaccggtgcgtacaaagcgtttgtcgaaaatgacttcgccctgtttgaagtaaacccgctggcagttcgcgaaaacggcgcgctcgcctgcgtggacggcaaaatcggcatcgacagcaacgcgctctaccgcctgccgaaaatcgccgaattgcgcgacaaatctcaagaaaacgaacgcgagttgaaagcttctgaatttgacctgaactatgttgccctggaaggcaacatcggctgtatggtgaacggtgccggtttggcgatggccactatggacatcatcaaactgaaaggcggccaacctgccaacttcttggacgttggcggcggcgcaaccaaagaccgcgtggttgaagcgttcaaactgattctggaagacaaatccgttcaaggcgtattgatcaacatcttcggcggtatcgtacgttgcgacatgattgcggaagccatcgtggcagccgttaaagaaatcaacgtcgacgttcctgtcgttgttcgtttggaaggcaacaacgccgaactcggcgcgaaaatcctgaacgaatcaggtctgaaactgacttctgcagacggcctgaatgacgcagccgaaaaaattgtcgcagccgtaaacgcctaa

SEQ ID NO: 54541 - DNA, 729 bp, Neisseria meningitidis
atgcctgattacatccgcacctcacgcgccgccgacagcctgcgcgatatcaaaatcacccctcatttcctgccgcatacggacggttcgtgccttattgaatgcggtaataccaaagttatctgtaccgcttccgtggatgaaaatgtcccaccgtttttgcgcggtaaaaaccaaggctgggtaacggcggaatacgggatgctgcctgcgtccaccgcttcgcgtatgcgccgagaagcctcggcgggcaaacagtccgggcgcacgcaggaaatccaacgtttgatcgggcgttcgctgcgcgcggtcgtggatatggaaaaactcggcgaacgacaaatcttgattgactgcgatgtgattcaggcagatggcggtacgcgcacggcttcgattaccggtgcgtttgtcgcgctgcaaatcgccgtcggcaaactggtttcagacggcattttgagtgaaaaccccatccgcgaagccgttgccgctgtgtcagtaggcgtagtgaacggcgtgccgcttttggatttggattatcccgaagactccggttgcgacagtgatgtgaatatcgtcatgaccgcatcgggaaaaatcatcgaaatccaaggtacggcggaagacgcgccgttcagtttggacgaattgggcaaactggttgcactggcgcaaaaaggcataggcgaactgctgcaacaccagcaaaatgcgttgtccgccgcctga

SEQ ID NO: 54542 - DNA, 210 bp, Neisseria meningitidis; identical to SEQ ID NO: 45301

SEQ ID NO: 54543 - DNA, 612 bp, Neisseria meningitidis
atgattacgacttataaaaccattacttccccgacgcaggctgggtttaaagataaaggcagccgttttatcgcatttgcctatccgattcggacattggctgatgtgaaaaaatacctcgatccgttaaaggaagagcaccataaagcacgacactggtgttatgcctatcgtttgggcgtggatggtatgcaatttcgtgccaacgatgatggagagccatcaggaagtgctggacgaccaattttgggacagattgattcggtgggcatcaccgatgttttggtcgtggtcgtccgctatttcggtggtactttattgggcgtttcaggtctgatacatgcgtacaaagaggcgacggctcaggcgttggcgattgcggaagtgattgaaaagaatattgaaaaaaccgtttggctgaaatgtgaatatccatttttgaatgaagcgatacgcatcgccaaacaatatcaggcggatatattggagcaggatttgcagttggattgccgattgacggtaagtttgtcgttggcaaattatgaagtctgtgttgcggcttggaagaatacacggcagattgaagtaaatacggaaaagccttttgaatga

SEQ ID NO: 54544 - DNA, 690 bp, Neisseria meningitidis
atgctgtttgaaggcttgccgtgtttggcggtttggtgcaaaaaccggctgtctgccgttttgcctgttggaggattgaacgtgtctgaaaatctgcttgaaatcgaaacccatcccttcgattccgtgttgccgccgaaggctgcggtcatgatgatggggacgtttccgcccaaggaagacaaacgcgcgatgcagtttcattatccgaatttccaaaacgatatgtggcgcgtttacgggctggtgttttttaatgatgcggcgcatttccaaaggttgtctgaaaaagcgtttgatgccgagaaaatcaaggcgtttttgcgcgaacggggaattgcgtcctgtccgaccgtgttgaaggcggcaagggaacacggcaatgcgtccgacaagtttttaaaggtagttgaaaccgtcgatttggcggcggtgttggcaaaaatacccgagtgccgccatatttgtacgacaggcggcaaggcgacggaaatcctgctcgatattcagggtggcggcatcaaaatgccgaaaacgggcgaaaccgtgccgtttccgtttgccggacgggatttgacgctgacgcgcctgccttcgacttcgcgtgcctatcctttgagtttggcgaaaaaagcggcggcgtatcgggcgttttttgaaatggcgggcttgtgtgaaaagcagttataa

SEQ ID NO: 54545 - DNA, 321 bp, Neisseria meningitidis; identical to SEQ ID NO: 41574

SEQ ID NO: 54546 - DNA, 942 bp, Neisseria meningitidis
atgaaaaccctgctcctcctcatccccctcgtcctcacagcctgcggcacactgaccggcatacccgcccacggcggcggcaaacgctttgccgtcgaacaagaactcgtcgccgcatcgtcccgcgccgccgtcaaagaaatggatttgtccgccctgaaaggacgcaaagccgccctttacgtctccgttatgggcgaccaaggttcgggcaacataagcggcggacgctactctatcgacgcactgatacgcggcggctaccacaacaaccccgaaagtgccacccaatacagctaccccgcctacgacactaccgccaccaccaaagccgacgcgctctccagcgtaaccacttccacatcgcttttgaacgcccccgccgccgccctgacgaaaaacagcggacgcaaaggcgaacgctccgccggactgtccgtcaacggcacgggcgactaccgcaacgaaaccctgctcgccaacccccgcgacgtttccttcctgaccaacctcatccaaaccgtcttctacctgcgcggcatcgaagtcgtaccgcccgaatacgccgacaccgacgtattcgtaaccgtcgacgtattcggcaccgtccgcagccgtaccgaactgcacctctacaacgccgaaacccttaaagcccaaaccaagctcgaatatttcgccgtcgaccgcgacagccggaaactgctgattgcccctaaaaccgccgcctacgaatcccaataccaagaacaatacgccctttggaccggcccttacaaagtcagcaaaaccgtcaaagcctcagaccgcctgatggtcgatttctccgacatcaccccctacggtgacacaaccgcccaaaaccgtcccgacttcaaacaaaacaacggtaaaaaccccgatgtcggcaacgaagtcatccgccgccgcaaaggaggataa

SEQ ID NO: 54547 - DNA, 504 bp, Neisseria meningitidis
atgcacgcgcttcatttttcggcttcggacaaggccgcgctttatcgggaggtgttgccgcagattgagtctgtggtggctgacgaggcggattgggtggcgaatttggcgaacacggcggcggttttgaaggaggcgttcggttggttttgggtgggtttttatttggtcgatacgcgttcggacgaattggttttggcaccgtttcaggggcctttggcgtgtacgcggattccgttcggtcgcggggtgtgcggtcaggcttgggcgaagggagagacggtggtcgtcggggatgtcaacgcgtatcccgaccatattgcctgttcgtctttgtcgcgttcggagattgtcgtgccgctgttttcagacggccgctgtatcggcgtgttggacgcggacagcgaatatttggcgcagtttgatgagacagatgctttgtatttgggcgagctggcgaagattttggagaagcggtttgaggcttcgcgtcaggcggtttga

SEQ ID NO: 54548 - DNA, 666 bp, Neisseria meningitidis
atggatgcatggtttgaagatacggcgatggggcggtatgttgcaaaattggaacaggatttcttcgggcggtatctggattcataccgtttttcgggaatgtgtgcggttcaggtgggcggtccgtggctgagcctgtctgaagatgttgtctgtgtgccgcgagatatgtcgatgtcggcggagaatatggctttggcggatgtttctgcggatatgctgctttttccgcatacgcttgaaggcggtatcccttcgcaaatcctgtccgaggcgcaccggatattgaaaccgtgcggacgcttgatgctgacgggtttcaatccgtattcgctctggggattcagccgttggtttgacggcgaacgcctgccggaaaaacggttttgtctgccgctgcccgagttgaaaaggcagcttgcggatgtcggtttcgatattgaatttgggaaatttatggtgtatctgccgcccgtttcgtcgatcgggcaaatacgcttttggcggtttatggaaaaggcgggcgaccgttggtggccgcaatgtgccgcagtgtacgctttggttttggtcaaaagggcggcgggcgtaacgcccctgcccgcgtgggacgggtatttgggcggcaaagcccttgcggcgggtgcggcaagggttgcggattag

SEQ ID NO: 54549 - DNA, 210 bp, Neisseria meningitidis
atgccttatgtcaatattaaagtaaccggcggcagcgaagcaccgactgccgcgcaaaaagcggaactgatcggcggcgtaaccgaattgctggcacgcgtgctgggcaaaaatcccgaaacaacggttgtcgtgattgacgaagtggataccgataactggggaataggcggcaaaagcgtcagcgaacggcgcaaagagggcaggtaa

SEQ ID NO: 54550 - DNA, 789 bp, Neisseria meningitidis
atgaatcccaaaatcgtgtttttcgatattgacgatacgctgtaccgcaaatatacggataccttgcgtccttccgtgaaaacggcggtggcggctttgcgcggcaaaggcatattgacggcgttggcaacggggcggtctttggcgacgattcccgaaaaggtcagggacatgatggcggaaacgggtatggatgccgtggtaacgataaacggacagtttgcgctgctgcacggaaaaactgtgcacgaagtaccgatggatgccggtttgatgggcagggtttgcgcgcatttggatggcttgggcatggattatgcgtttgtcggcggagaggggatcgccgtgtccgcgctgtcggaatgcgtgtgccgcgccttgcagcatatcgccagcgatttttttgccgataaggattatttttcaagcaaaccggtgtatcagatgctggtgtttgcggaggaaaacgaaatgccgctctggtcggatattgtggaacaggaaggcttgaaaacggtgcgctggcacgaggaagcggtcgatttgctgcctgcgggtgcgtcgaaaacagacggcatcagaagcgtggttgaagcattgggtttggaaatggcggacgtgatggcgttcggcgacggtttgaacgatgtggaaatgctgtcagaagtcgggttcggcgtggcaatgggcaacggggaacaggcggcgaaagaagcggcgaaatatgtttgccccagcgttgatgaagacggcgtgttgaggggcttgcaagatttgggcgtgatttga

SEQ ID NO: 54551 - DNA, 1206 bp, Neisseria meningitidis; identical to SEQ ID NO: 38565

SEQ ID NO: 54552 - DNA, 2595 bp, Neisseria meningitidis
atgtccaaatccgccgtttccccaatgatgcagcaatacctcggcatcaaagcgcaacataccgacaaactggtgttttaccgtatgggcgatttttacgagatgtttttcgacgatgcggtagaagcggcaaaacttttggatattaccctgaccacgcgcggacaggtggatggcgagccggtcaaaatggcaggcgtgccgtttcacgccgccgaacaatatctggcgcgcctggtcaagttgggcaaaagcgtggcgatttgcgaacaggtcggcgaagtcggcgcgggcaaagggcctgtggagcgcaaagtcgtgcgcatcgtaacgcccggcacgctgaccgattccgcattgctggaagacaaggaaaccaaccgtatcgttgccgtgtcccccgacaaaaaatacatcggtttggcgtgggcatcgctgcaaagcggcgaattcaaaaccaagctgacaactgtggataaattggacgacgaactggcgcgcctgcaggcggcggaaattctgttgccggacagtaaaaacgcaccgcaacttcagacggcatcgggtgttacgcgcctgaacgcgtggcagtttgccgccgacgcgggggaaaaactgctgacggaatatttcggctgccaggatttgcgcggcttcggtttggacggcaaagaacacgccgttgcgattggcgcggcaggtgcactgttgaactatatccgtctgacgcaaaacctgatgccgcaacatttggacggcctgtcgctcgaaaccgacagccaatatatcggtatggatgctgccacgcgccgcaatctcgaaatcacgcaaaccctctccggcaaaaaatcgccgaccctgatgtccacgctcgacctttgcgctacccatatgggcagccgcctcttggctctctggctgcaccaccctttacgcaaccgcgcccacatccgagcgcgccaagaagccgttgccgcgctggaaagccaatacaaacccctccaatgccgtctgaaaaacattgcggacattgaacgcattgctgcccgcatcgccgtcggcaacgcccgcccgcgcgatttggcatctttacgcgacagtctgttcgagttggcacaaatcgacttgtccgcaaacggcagcagcctgttggaaaccctcaaagccgttttcccggaaaacctatccacagccgaacagctccgccaagccattttgcccgaaccttccgtctggctgaaagacggcaatgtcatcaaccacggttttcatcccgaactggacgaattgcgccgcattcaaaaccatggcgacgaatttttgctggatttggaagccaaggaacgcgaacgtaccggtttgtccacactcaaagtcgagttcaaccgcgttcacggcttttacattgaattgtccaaaacccaagccgaacaagcacctgccgactaccaacgccggcaaaccctcaaaaacgccgaacgcttcatcacgccggagttgaaagcctttgaagacaaagtgctgactgctcaagagcaagccctcgccttagaaaaacaactctttgacggcgtattgaaaaaccttcagacggcattgccgcagcttcaaaaagccgccaaagccgccgccgcgctggacgtattgtccacattttcagccttggcaaaagagcggaacttcgtccgccccgagtttgccgactatccggctatccacatcgaaaacggccgccatcccgttgtcgaacagcaggtacgccacttcaccgccaaccacaccaaccttgaccacaaacaccgcctcatgctgctcaccggccccaatatgggcggcaaatccacctacatgcgccaagtcgcgctgattgttttattggcacacaccggctgttttgtgcctgccgatgccgccacaatcgggcccatcgatcaaatcttcacccgcatcggcgcatcggacgacctcgcctccaaccgctccactttcatggtcgaaatgagcgaaaccgcctacatcctgcatcacgccaccgaacaaagccttgttttaatggacgaagtcggacgtggcacttccactttcgacggcctcgccctcgcgcacgccgttgccgaacacctgctgcaaaaaaacaaatccttcagcctgtttgccacccactatttcgagctgacctacccgcccgaagcccacgccgccgccgtcaatatgcacctttccgcgctcgaacagggacaggacatcgttttcctgcaccaaatccaaccgggtcccgccggtaaaagctacggcattgccgtcgccaaactcgccggcctgcctgtacgcgcattgaaatccgcccaaaagcatttgaacgaactggaaaaccaagccgccgcgaaccgtccccaactggatattttcagtaccatgccgtctgaaaaaggagatgaaccgaatgtgggcaactttgtggataaagcagaggaaaaacattttgaaggtatattggcagcagccttggaaaaactcgatcccgacagcctgaccccgcgcaaagcattgtcagaactgtaccgtctgaaagatttgtgcaaatccgtatcttaa

SEQ ID NO: 54553 - DNA, 303 bp, Neisseria meningitidis; identical to SEQ ID NO: 44727

SEQ ID NO: 54554 - DNA, 5979 bp, Neisseria meningitidis
atgaataaaggtttacatcgcattatctttagtaaaaagcacagcaccatggttgcagtagccgaaactgccaacagccagggcaaaggtaaacaggcaggcagttcggtttctgtttcactgaaaacttcaggcgacctttgcggcaaactcaaaaccacccttaaaactttggtctgctctttggtttccctgagtatggtattgcctgcccatgcccaaattaccaccgacaaatcagcacctaaaaaccagcaggtcgttatccttaaaaccaacactggtgcccccttggtgaatatccaaactccgaatggacgcggattgagccacaaccgctatacgcagtttgatgttgacaacaaaggggcagtgttaaacaacgaccgtaacaataatccgtttgtggtcaaaggcagtgcgcaattgattttgaacgaggtacgcggtacggctagcaaactcaacggtatcgttaccgtaggcggtcaaaaggccgacgtgattattgccaaccccaacggcattaccgttaatggcggcggctttaaaaatgtcggtcggggcatcttaactaccggtgcgccccaaatcggcaaagacggtgcactgacaggatttgatgtgcgtcaaggcacattgaccgtaggagcagcaggttggaatgataaaggcgaagccgactacaccggggtacttgctcgtgcagttgctttgcaggggaaattacagggtaaaaacctggcggtttctaccggtcctcagaaagtagattacgccagcggcgaaatcagtgcaggtacggcagcgggtacgaaaccgactattgcccttgatactgccgcactgggcggtatgtacgccgacagcatcacactgattgccaatgaaaaaggcgtaggcgtcaaaaatgccggcacactcgaagcggccaagcaattgattgtgacttcgtcaggccgcattgaaaacagcggccgcatcgccaccactgccgacggcaccgaagcttcaccgacttatctctccatcgaaaccaccgaaaaaggagcggcaggcacatttatctccaatgatggtcggatcgagagcaaaggcttattggttattgataccggggaggacatcggtttgcgtaacggagcggtcgttcaaaacaacggcaaccgccctgctgctacggtattaaatgccggccgtaatttggttatcgaaagcaaagcaaatgtgaacaatgctaaaggttcgaccaatctgtcgaccggcggccgtaccgtcatcaaggaggccagtattcagactggcactaccgtatacagttccagcaaaggcaacgccgaattaggcaataacacacgcattaccggggcagatgttaccgtattatccaacggcaccatcagcagttccgccgtaatagatgccaaagacaccgcacacatcgaagcaggcaaaccgctttctttggaagcttcaacagttacctccgatatccgcttaaacggaggcagtatcaagggcggcaagcagcttgctttactggcagacgataacattactgccaaaactaccaatctgaatactcccggcaatctgtatgttcatacaggtaaagatctgaatttgaatgttgataaagatttgtctgccgccagcatccatttgaaatcggataacgctgcccatattaccggcaccagtaaaaccctcactgcctcaaaagacatgggtgtggaggcaggctcgctgaatgttaccaataccaatctgcgtaccaactcgggtaatctgcacattcaggcagccaaaggcaatattcagcttcgcaataccaagctgaacgcagccaaggctctcgaaaccaccgcattgcagggcaatatcgtttcagacggccttcatgctgtttctgcagacggtcatgtatccttattggccaacggtaatgccgactttaccggtcacaataccctgacagccaaggccgatgtcaatgcaggatcggttggtaaaggccgtctgaaagcagacaataccaatatcacttcatcttcaggagatattacgttggttgccggcaacggtattcagcttggtgacggaaaacaacgcaattcaatcaacggaaaacacatcagcatcaaaaacaacggtggtaatgccgacttaaaaaaccttaacgtccatgccaaaagcggggcattgaacattcattccgaccgggcattgagcatagaaaataccaagctggagtctacccataatacgcatcttaatgcacaacacgagcgggtaacgctcaaccaagtagatgcctacgcacaccgtcatctaagcattaccggcagccagatttggcaaaacgacaaactgccttctgccaacaagctggtggctaacggtgtattggcactcaatgcgcgctattcccaaattgccgacaacaccacgctgagagcgggtgcaatcaaccttactgccggtaccgccctagtcaagcgcggcaacatcaattggagtaccgtttcgaccaaaactttggaagataatgccgaattaaaaccattggccggacggctgaatattgaagcaggtagcggcacattaaccatcgaacctgccaaccgcatcagtgcgcataccgacctgagcatcaaaacaggcggaaaattgctgttgtctgtaaaaggaggaaatgcaggtgcgcctagtgctcaagtttcctcattggaagcaaaaggcaatatccgtctggttacaggagaaacagatttaagaggttctaaaattacagccggtaaaaacttggttgtcgccaccaccaaaggcaagttgaatatcgaagccgtaaacaactcattcagcaattattttcctacacaaaaagcggctgaactcaaccaaaaatccaaagaattggaacagcagattgcgcagttgaaaaaaagctcgcctaaaagcaagctgattccaaccctgcaagaagaacgcgaccgtctcgctttctatattcaagccatcaacaaggaagttaaaggtaaaaaacccaaaggcaaagaatatctgcaagccaagctttctgcacaaaatattgacttgatttccgcacaaggcatcgaaatcagcggttccgatattaccgcttccaaaaaactgaaccttcacgccgcaggcgtattgccaaaggcagcagattcagaggcggctgctattctgattgacggcataaccgaccaatatgaaattggcaagcccacctacaagagtcactacgacaaagctgctctgaacaagccttcacgtttgaccggacgtacgggggtaagtattcatgcagctgcggcactcgatgatgcacgtattattatcggtgcatccgaaatcaaagctccctcaggcagcatagacatcaaagcccatagtgatattgtactggaggctggacaaaacgatgcctataccttcttaaaaaccaaaggtaaaagcggcaaaatcatcagaaaaaccaagtttaccagcacccgcgaccacctgattatgccagcccccgtcgagctgaccgccaacggtatcacgcttcaggcaggcggcaacatcgaagctaataccacccgcttcaatgcccctgcaggtaaagttaccctggttgcgggtgaagagctgcaactgctggcagaagaaggcatccacaagcacgagttggatgtccaaaaaagccgccgctttatcggcatcaaggtaggtaagagcaattacagtaaaaacgaactgaacgaaaccaaattgcctgtccgcgtcgtcgcccaaactgcagccacccgttcaggctgggataccgtgctcgaaggtaccgaattcaaaaccacgctggccggtgccgacattcaggcaggtgtaggcgaaaaagcccgtgtcgatgcgaaaattatcctcaaaggcattgtgaaccgtatccagtcggaagaaaaattagaaaccaactcaaccgtatggcagaaacaggccggacgcggcagcactatcgaaacgctaaaactgcccagcttcgaaagccctactccgcccaaattgtccgcacccggcggctatatcgtcgacattccgaaaggcaatctgaaaaccgaaatcgaaaagctggccaaacagcccgaatacgcctacctgaaacagcttcagacggccaagaacgtcgattggaaacaggtgcagctggcctacgacaaatgggactataaacaggaaggcttgaccggagccggtgcagcgattgtggtgattattgtaaccgctctaacttatggatacggagcggctgcagcgggtagcgtaactgccgcaggaagtagtacagccgcagctgcaacaacgacagcggcagcaactaccactgtttctactgcagctgccatgcaaaccgcagctttagcctccttgtatagccaagcagctgtagccatcatcaataataaaggcgatgtcggcaaagcgttgaaagatctcggcaccagtgatacggtcaagcagattgttacttccgcactgacggcgggtgcattaaaccagatgggagcagatattgcccaattgaacagcaaggtaagaaccgaactgttcagcagtacgggcaatcaaaccattgccaaccttggaggcagattggccaccaacctcagcaatgcaggtatctcagctggtatcaataccgccgttaacggcggcagcttgaaagacaacttaggcaatgccgcattgggagcattggttaatagcttccaaggggaagccgccagcaaaatcaaaacaaccttcagcgacgattatgttgccaaacagttcgcccacgctttggcgggttgtgttagcggactggtacagggaaaatgtaaagatggggcaattggcgcagcagttggggaaatcgtagctgaatccatacttggcggcagaaaccctgctacactcagcgatgcagaaaagcataaagttatcagttactcgaagattattgcgggcagcgtggcggcactcaacggcggcgatgtgaatactgcggcgaatgcggctgaggtagctgtggtgaataatgctttgaattttgacagcacccctaccaatgcgaaaaagcatcaaccgcagaagcccgacaaaaccgcactggaaaaaatcatccaaagtattatgcctgcacatgcggcaggtgcgatgactaatccgcaggataaggatgctgccatttggataagcaatatccgtaatggcatcacaggcccgattgtgattaccagctatggggtttatgctgcaggttggacagctccgctgatcggtacagcgggtaaattagctatcagcacctgcatggctaatccttctggttgtactgtcatggtcactcaggctgccgaagcgggcgcgggaatcgccacgggtgcggtaacggtaggcaacgcttgggaagcgcctgtgggggcgttgtcgaaagcgaaggcggccaagcaagctgctcctaaagaaacaataaacaatttggcaaatttagccaaagcagaacagcagattttattccgtattgcccaacgcgatacgcaactggatgcatggaagacgggatttaacaatagagtaaggaaaggagcaggcttgcttgatgcaagtaatattccgataaccattaacggaaaaaccatcaaacctgtacaagccataagcttaaagggagcacccgtttacagcggcgtaagcgaacaggagatttttgcgctttatcggcagatgactggccagaatccgaattttagagttttgcctgacggaagattagcaaatggcattatcagtactggagaatgggcaggaacaaaaattgcattaagaaatttttcaaaaacagagaattcaactcaagcacgatggacattagatttgcagaatcctccatcatttattaaaggtactaaattggagcttaaattccaataa

SEQ ID NO: 54555 - DNA, 810 bp, Neisseria meningitidis
atggcaaaaattggggattttgccgccaaatccatgatagagatacggagcaaacgaatgattaccctgccttccttaaacaatctgccgtcaaaatgggatgaaatccgctattggctcgaaacccgggtttgtgagtgcggcgttatgccgcatcccaatttgacggaatgcgaagccgggcagttcgatcgggatttttgggacaatatcggctgcgcgcctgaagaatatgtccgtatccgccgagccatccgtctgttggaagcgagttatcccgacagtttgaacgagctggtgtgtgccgccattgccacgcctttgggcgagatgttggcggtgtttggaaataagggattgtgtctgctggagtttgtcggacagaaatatatggagcaggaaattactgccgtccaaaaagctttgcgcgggcggtttgtgtttcgggaagatgagcgaacgcaacttctgaggcaggaattggacttatacttcaaatgccgtctgaaaacctttgccacgcccttggaaatgattggtacggcgtttcaaaaacaggcgtgggacgcacttttggcgattccttacggcgaaacgcgcagttataaggagcaggcgcagcgtttgggcaaccccaaagccgtccgcgccgttgccgccgccaacgggcagaacaaggtgtctatcttgattccctgccaccgcgtcatcggcagcgacggcaaactgaccggttacgcaggcgggttgaaccgcaaacagtttttactggctttggaacgcgacgaagttcagacggcattgttttaa

SEQ ID NO: 54556 - DNA, 1455 bp, Neisseria meningitidis
atgactacgcaaaccatcaaatttcacatgaagccggaaactttcaagcaaaacgccgcaatttcccttcaagacaagcctttgcgcaaaagcctgcgtaccgcgatggatatgctgatgaccaaacgcaaagccgttttgaccgacgaagaagagctgcaaagcttgcgcgatttgtgcgaacacatccgccagcgttccctgtccaaattgcccgcgctgttggagcagttggaagaaaacctgaccaagttgggcgtaaaagtacactgggcggaaacaccggccgaagcctgcgaaatcatccacgacatcatcacagccaaaaacggcaagctgatggtcaaaggcaaatcgatggtcagcgaggaaatcgagctgaaccattatcttgaagcaaaaggcattaaagcggtagaaagcgacttgggcgagttcatcgtccaaatggcaggcgaaaaaccgacccatatcgtgatgcctgcaatccataaaaccaaagaacaggtgagcgaactgttccaccaaaacctcggcacaccgcttacagacgatgtggaccaactgaccggcttcgcccgcaaagccctgcgcgatatttacagcactgccgatgtcggcttgagcggcgtgaacttcgccgttgccgaaacaggtacgctgtgtctggtggaaaacgaaggcaacggtcgcttgagtaccaccgtaccgcccgtgcatatcgctattaccggcattgaaaaagtggtggcgaaattgtccgacatcccacccttgtacagtctgctgccgcgctccgccatcggtcaaaacatcacaacctatttcaatatgattaccggcccgcgccgcagtgaagaattagacggtccgcaagaaatgcacttggttctgctcgacaacggccgcagccaggcttatgccgaagaccaaatgcgccgcaccctgcaatgtatccgttgcggcgcgtgtatgaaccattgcccggtttatacccgcatcggcggcgcggcatacggcacaacctatcccggcccgattggcgagattatttcccctcacctgttgggtctggatgccacccgcgatctgccaaccgcctgtaccatgtgcggtgcgtgtgtggaagtctgtccggtacgcatcccgattaccgaacaaatgcagcgtttacgcgttgaagcgcaacgttcgccgaccgaaaccgtgccgcaccccatccgagggcaaggcgcatcgcataccttcggcgaacaaatggcgtggcgcacattcaacggtattttcagcggcagcaaaacctaccgcgccttcggttgggcagccaccaagttccgcaacctgaccccgcgcaaacagttgggttggacgcaaaaccgcgtgccgatgaaaccggcgaagaaaaccctgcacgaactgatggcagaaaaaatgcgccaaaaagaacaggcataa

SEQ ID NO: 54557 - DNA, 1035 bp, Neisseria meningitidis; identical to SEQ ID NO: 38477

SEQ ID NO: 54558 - DNA, 447 bp, Neisseria meningitidis; identical to SEQ ID NO: 50949

SEQ ID NO: 54559 - DNA, 219 bp, Neisseria meningitidis
atgtgcggctccaccacacacgccgtccccaaccgcccaaaaccgcgtgcctgcctgcggcttaccccctaccacccaaccaacacagcaagcgtaggttggatacttgtatccgacaaaacctttaacattcccatcattgcaatccattgtagcaatgcccaaaatgtcggattcgagaatccgacctacaaaatcattccgagcataatactatga

SEQ ID NO: 54560 - DNA, 2892 bp, Neisseria meningitidis
gtgctacaataccagttttcctttatttttcaggcggcatccattatgtgcaagcatcatccccaacattcgcacgacaacgacaccatccgcatacgcggcgcgcgcacgcataatttgaaaaacatcgatttggacattccgcgccacaagctggtggtggtaacaggattgtcgggcagcggcaaatcgtcgctggcgttcgacacgctgtatgccgaaggacagcggcgttatgtcgagagcctgtccgcctatgcgcggcagtttttgcagatgatggacaaacccgatgtcgatttgatcgagggtctgtcgcccgcgatttccatcgagcagaaatccaccagccacaatccgcgctccaccgtcggtacggtaacggaaatccatgattacctgcgccttttgtacgcccgcgtcggtacgccgtattgccccgaacacaatttgccgttgtcgagccagaccgtgtcgcaaatggtcgatgccgtcttaaaactgccggaagacacgcgcgtgatgattcttgcgccggcagttcgtgagcgtaagggcgagtttgtcgacttctttgccgacttgcaggcgcaaggctttgcccgtgtgcgcgtggacggcgaagtttatcagcttgacgaagtgccgaagctggagaaaaacatcaagcacaatatcgacgtggtcatcgaccgcgtgaaagtgaaggcggacatcaagcagcggctggcggaaagttttgaaaccgcactgcgccacggcaacgagcgcgcgctggcgatggaaatggaaagcggcgaagaacattggttttccgcgcgtttcgcctgtcccgtatgttcatacagcctgcccgaattagagccgcgcctgttttcgttcaacaacccgatgggctcctgcccaacttgcgacggcttgggcaacaccaacttcttcgatcccgaaaaagtggtcgcgcatcccgaattgtcgctggcaacgggcgcgattgacggctgggataagcgcaaccagttctatttccaaatgattcagtcgctggcgcggcattacggtttcgatgtgcaggctgcttgggaaacgctgcctgaaaaagtcaaaaaagtcgtgctgcacggctcgggcaaggaagtcattgatttcacctacctatccgaacgcggcaccaccttcaaccgcagccacgccttcgaaggcatcattcccaatctcgaacgccgctaccgcgaaaccgacagcgaaaccgtgcgcgaaaaattgcgcgaataccagaaccaccgcgcctgcccgagctgcggtggtgcacgtttgcgcaaagaagcccgctacgtttacgtcagcggcgaaccgctgcacgaagtttccgcctggccgctcaccaaaacccaccaattctttgaaacactggatttagacggcaacaaaaaacaaatcgccgaaaaaatcctcaaagaaatcaccgaacgcctcggcttcctgattaacgtcgggctggattacctgaatttaagccgctccgccgaaaccctctccggcggcgaagcccagcgcatccgcctcgccagccaaatcggcagcggcctgaccggcgtgatgtatgtactggacgaaccctccatcggcctgcaccagcgtgacaatgaccgcctgctggccaccctcaaacgactgcgcgatttgggcaacagcgtgattgtggtcgaacacgacgaagacgccatccgcgaagccgatttcgtggtcgatatgggccccggcgcaggcgaacacggcggcaacgtactgattgccgacacgcccgaaaacgtcgcccaatgcgaaaactccgttaccggacaatacctcagcggcaaaaaatccattgccgtgccgtctgaacgcacgcccgtcaatcccgaccggatgctcgtcctcaaaggcgcgcgcggcaacaacctcaaaaacgttacccttgagctgccgctcggtttgattacctgcatcaccggcgtatccggcagcggcaaatccaccctgattaacgacaccctcgccaaaatcaccgcccgcgaactcaaccgcgcccaagaagaacccgccccatacgacgacatccgcggcctcgaacacctcgacaaagtcatcaacgtcgaccaatcccccatcggccgcaccccgcgctccaaccccgccacctacaccggcctgttcacccccatccgcgaactcttcgccggtgtacccctctcgcgcgaacgcggctacaacgtcggcagattctccttcaacgtcaaaggcggccgctgcgaagcctgccaaggcgacggcgtcatcaaagtcgaaatgcacttcctgcccgacgtgtacgtcccctgcgaagtctgccacggcaaacgctacaaccgcgaaacgctcgaaatccaatacaaaggcaaaaacatcagccaagtcctcgacatgaccgtcgaagaagcccgtgaatttttcgacgccgtccccaccgtatcgcgcaaactgcaaaccttgatggacgtaggcttaggctacatccgtctcggccaatccgccaccaccctctccggcggcgaagcccagcgcgtcaaactcgccttggaactctccaaacgcgacaccggcagaacgctctacatcctcgacgaacccaccaccggcctacacttcgccgacatcgccctgctgctggaagtcatagaccgtctgaaaggcaaaggcaactcgatagtgattatcgagcataatctggatgtgattaaaaccgccgattggattgtggacttagggccagaaggcggcgacggcggagggaggattattgcttcaggtagcccggaggaagtggcgaaggttaaggggagttatactgggaagtatttgaagaatatactttaa

SEQ ID NO: 54561 - DNA, 417 bp, Neisseria meningitidis; identical to SEQ ID NO: 39610

SEQ ID NO: 54562 - DNA, 822 bp, Neisseria meningitidis
atgagcagtccgcgccatgtgttttacatttccgaccgtaccggtctgactgccgagaatatcggcgaggctttgctgaaccagtttggcaatctgtcgttcaaacgccatacgcatccgtttgtcgatacgccggaaaaggcgcgcgcggtggtggagaaggtcaatcggagccggcaggaaaacggtcagcgtccgattgcgtttgtcagtgtggttgatgacgaaatccgtcggattatcaaaggggcggatgcttttcagattaatttctttgagacttttttgggactgttggagaaagaactcaataccgaagccacggcatccgagcaagggcatcacagtatcggtaatacgaagcgttacgatgcgcgtatggaggcggtaaatttctcattgaaccacgatgacggggtcagcgataagaaccttcaggaagcggatgtaatcttgatgggtgtatcgcgttcgggcaaaacgccgacctgcctttacctcgccctgcaatacggcatccgtgcggcaaactatccgctgattcctgacgatttggaatcggccgatctgccgcgtatggtcaagccttatagggataagctgttcgggttgaccatccagccggaacgtttgcaggccatccgccaagagcgccgcccgaattcaacttatgccaaaatcgatacatgccgcagcgaggtggcagacgcgcagagtatgttcagacggcatgggattccgtttgcgaatacgacggataaatcagtggaagagcttgccgtacacatccttcaggcgtgcaagctcaaacgcaggttttga

SEQ ID NO: 54563 - DNA, 387 bp, Neisseria meningitidis
gtggttgttttcggcattctgaaacgcaacggacgggtctataccgttgtggtggataatgccaagtctgaaacgttactccctgtcatcaaaaagaaaatcatgccggacagcattgtttataccgatagtctgagcagctgcgacaagttggacgtgagcggttttatccattaccgcatcaaccattccaaggagtgtgcagaccgtcagaaccacattaacggcattgagaacttttggaatcaggcaaaacgcgtcttgcgaaaatacaacggaatcgatcgtaaatctttcccgctgttcttgaaagaatgcgaatttcgatttaacttcggcacaccgtctcaacagcttaaaatcctgcgggattggtgtggaatttag

SEQ ID NO: 54564 - DNA, 747 bp, Neisseria meningitidis
atgaacgttttgatttccaacgacgacggctacctctccgaaggcatcgccgttttggcgtgcgttacggcggaatttgccaacgtcagggtggtcgcgcccgaacgcgacaggagcggggtcagcaattcgctgacgctggaacgccctttgcagttgaaacaggcgcaaaacgggttctactatgtcaacggcacgccgaccgactgcatccacatcgggcagtctgtattttcggattttcaggccgattttgtcttttcgggcatcaaccggggcgcgaatatgggggacgacacgctttattcggggacggttgcggcggcaaccgaagcctaccttatgggcatacccgccgtggcgttttccttaaacgacgcttccggacgctattgggcgaccgcagaacaggcactgtggacattgttggcgcattttttcaaaacccccccgcagtcccctattttatggaacatcaatatccccgccgtcgcgccggaagatgtgcggggcattaaaatcgcccgtttgggcaggagacaccacggtcagaacgtcatccccgcgcgcaatccgcgcggcgaacagatttattggatagggccggtcggcgaagtttccgatcgggaagagggaacggatttcggtgaatgcggcgcaggtttcattaccgtaacgccgctgcaaatcgacctgaccgcctatccggacatggcggaaacagcggcgttctggcatgcggactga

SEQ ID NO: 54565 - DNA, 273 bp, Neisseria meningitidis; identical to SEQ ID NO: 44827

SEQ ID NO: 54566 - DNA, 183 bp, Neisseria meningitidis; identical to SEQ ID NO: 44130

SEQ ID NO: 54567 - DNA, 1083 bp, Neisseria meningitidis
atgtttttatggctcgcacatttcagcaactggttaaccggtctgaatatttttcaatacaccacattccgcgccgtcatggcggcgttgaccgccttggcgttttccctgatgttcggcccgtggacgatacgcaggctgaccgcgctcaaatgcgggcaggcagtgcgtaccgacggcccgcaaacccacctcgtcaaaaacggcacgccgacgatgggcggttcgctgattctgaccgccattaccgtgtccaccctgttgtggggcaactgggcgaacccgtatatctggattctcttgggcgtattgctcgctaccggcgcactcggtttttacgacgactggcgcaaagtcgtctataaagaccccaacggcgtgtccgccaaattcaaaatggtgtggcagtcaagcgttgccattatcgccggtttggcattgttttaccttgccgccaattccgccaacaatattttgattgtcccgttcttcaaacaaatcgccctgccgctgggcgtggccggctttttggtgttgtcttacctgaccatcgtcggcacatccaacgccgtcaatctcaccgacggcttggacggccttgccgccttccccgtcgtcctcgttgccgccggactcgccattttcgcctacgtcagcggacactaccaattttcccaatacctgcaattaccttacgttgccggcgcaaacgaagtggtgattttctgtaccgccatgtgcggcgcgtgcctcggtttcttgtggtttaacgcctatcccgcgcaagtctttatgggcgatgtcggtgcattggcattgggtgccgcgctcggtaccgtcgccgtcatcgtccgccaagagtttgtcctcgtcattatgggcggattatttgtcgtagaagccgtatccgttatgcttcaggttggctggtataagaaaaccaaaaaacgcatcttcctgatggcgcccatccatcaccactacgaacaaaaaggctggaaagaaacccaagtcgtcgtccgcttttggattattaccatcgtcttggtgttgatcggtttgagtaccctcaaaatccgctga

SEQ ID NO: 54568 - DNA, 189 bp, Neisseria meningitidis; identical to SEQ ID NO: 43856

SEQ ID NO: 54569 - DNA, 486 bp, Neisseria meningitidis
atggacgcgctgcacaccatcgcccgaaacctgacgaaaaaacgtcaaaccgtaagctgtgccgaatcctgcacgggtgggctgcttgccgccgcattcacaagcgttgcaggcagttcgcaatggttcgatcaaagttttgtaacatacagcaacaaagccaaagaagaccgcttgggcgtgttgcccgaaaccctgctcgaacacggcgcggtcagccgccaaaccgtctatgagatggcgcgcggcgcgaaagccgtggcgcaggcggattacgccgtcggtatttccggcatcgccggaccgagcggcggcagcgaaagcaaacccgtcggtacggtttggttcgggtttgcctttccgggcggaagttgcgaagcaatgcgccgttttgacggcaaccgcgaatccgtccgcgcgcaggcggtcgccttcgcgttggaaaggttggcggggctggttgaaaacggcggcgatgccgtctaa

SEQ ID NO: 54570 - DNA, 1428 bp, Neisseria meningitidis
atgatacacaccgaaccgagtgcgcagccgtcaactatggacacggctgcttttttaaagcacatcgaatccgcattccgccgcattttttcagacggtatcgacctgatgcgatacctgcccgaagacaaatggcttgccttgaagcaggcgggtttgctgttgcccttcctcgacaaaaaacacggcgggcgcaagggcagccagtttgaaattcaggaagtcttgcggattgcggggcattacggcgtgcccgttacgctgcgtaccggcatcgaaggcgcgctggtgttgcagccactgcaagagttcggcgatgaagcgcaaatcgcacagggtttggacatggttttcaaaggcgagggcggtggtttgggcgttaccgaacccgaaacctccggcgcggcgattgcccgagaaatgcagtcttactacgaatataccgacggacaaaccatttacgtcaacgccgcgaaatactggcagggcaactcgcaaagcgacttcctcctcgttgccgccaaagagcgcaaaaacggcaaactcgccaaagtcatcgacctgctgctcgtccccaaaacatacatccgctgcgaaaccctcgcatccgaaggcttgcgcgccgtccgttacgccgtcaaccgcatcgatgccgaaatgcctgcaaccgccgtgatgaaactctcccagagcgacgctgccggtttgcgcgcgttccaaaacatctttatccgcagccgcctgcaactgatcggcatgacgcacggcattatggaatacatccttgaaaacctggaacgatacgtccgcaacgacatcagattcgtcgattacgaacgccgcgaaatccggcgccgccatcaggtttccgagattctttaccgctacgtctgccattccgtttcacctgttgcccccgtcgcccatcagctgatggaggcgaacatcgtcaaaaccctcgccacggaatacacttacgccgccgcgcaaatgttgcaaaaacttttgggcgcgaagggttttgaacgcggacacaccgccggcaatatcgctatcgacatccgccccttcacgatttttgaaggcccgaacgatatgctttatgccgaaatttacgaccagttcgtccgcgccaccgccgaagaaaaagaagcaggcatgaagttggacaaaaaccaaaccctgctcgaccgcctgcaaaccgatgcccgctttgccgccgtcgcccgcgactacactttgcccgaagacatccgcagcttcctgcaggaacacaccctgaccgacgcctgcgccctgcaaaaagtcttcatcggcaaaatcatcgcccgactctttgtcttcgtacaggcggaacacgaagacaccgcagccttcctgctgaacgacatccgcaaagatatattggactgccgatattgcggatag

SEQ ID NO: 54571 - DNA, 870 bp, Neisseria meningitidis; identical to SEQ ID NO: 40980

SEQ ID NO: 54572 - DNA, 660 bp, Neisseria meningitidis
atgtcaaaccaacaagccttggtcatcttttcgggcggtcaggattcgaccacctgcctgattcaggcaatccaaacctacgggcgcgaaaacgtccaagccatcactttccaatacgggcaacgccatgccgtcgagctggaacgcgcccgctggattgcgcaggatttgggcatcaaacaaaccgtactcgacttgagcctgatgcggcagattacgcacaatgccctgatggacgataccgccgccatcgaaaccgccggcaacggtgttcccaatacctttgtggacgggcgcaacgcgcttttcctgctttacgccgcgatttacgccaaagggcaggggatacggcacatcatcgcgggcgtgtgcgaaaccgacttctccggctatcccgactgccgcgacgtgtttgtcaaatcgatgaacgttacccttaatttggcgatggactatgattttcaaatccacacgccgctgatgtatctgaccaaggcgcaaacttgggcgttggcggacgaaatgggcgcgctggactatatccgcgagcaaacccacacctgctataacggcatcgtcggcggctgccgcgaatgcccgagctgtatcttgcgcgaacgcgggctggcggaatatctggaaagtaaaaaggccgtctga

SEQ ID NO: 54573 - DNA, 1047 bp, Neisseria meningitidis
atgaaaatgcaggcagttgttgtgaataaaaatgtagcgggcgatgtggaaatagtcgaacgcgaggttcgcccgttggaatacggcgaggcgttggtcgaagtcgaatattgcggcgtgtgccacaccgacctgcacgttgcggcaggcgactacggcgaaaaaccgggccgcgtgctgggacacgagggcatcggtttggttaaagaagttgccgacggtgtgaaaaatctgaaagtcggcgaccgcgtcagcatcgcctggctgttccaaagctgcggctcttgcgaatactgcaataccggccgcgaaaccctgtgccgctctgtattgaacgctggctatactgccgacggcggcatggcgacccactgtatcgtgagtgccgattacgcggtcaaagtcccagaaggcttggatcctgcgcaagcttcgagcattacttgtgccggtgtaaccacttataaagccattaaagtttccggcgttcgtccgggccaatggattgcgatttacggcgcaggcggtttgggcaacttggcggttcaatacgcgaaaaaagtatttggcgcacacgtcgtcgccatcgacatcaacgatgaaaaactggcttttgccaaagaaagcggcgcagatttagtcatcaacgctgccaaagaagatgccgccaaagtgattcaggaaaaaaccggcggtgcacacgtagccattgttaccgccgtatccgccgccgcattcaactccgctgtggactgcgtccgcgcaggcggtcgcgtcgtcgccattggtctgccgcccgaatctatggacctgtccattcctcgtctggtcttggacggcatcgaagtggtcggctctttggtcggtacccgcaaagatttggaagaagcattccaattcggcgcagaaggcttggttgtgcctaaagtcgagttgcgtgctttggatgaagcgcctgccatcttccaagaaatgcgcgaaggtaaaattaccggccgtatggtaatcgatatgaaaaaagaatgcggctgcggccatcaccactga

SEQ ID NO: 54574 - DNA, 669 bp, Neisseria meningitidis
atgacgacccatctgtccaatgtcgcccccgacctgcaaaactatttgaacgccatcggcgaacccgaacatcccgttttgacgcggctgcgtgagaagaccgagcatcaccgtatgggcaaaatggcgattgcgcgcgaacaggcggcggttttggtttggctggcaaagctgattcgcgcggaaaaatatctggaagtcggcgtgtttaccggatacagcagcaccgcgcttgcattggcgttgccagaacacgggcggattaccgcctgcgacatcaatgtaacctttaccgatacggcgcgtcaggtttggaacgaggcaggtgtggcacataaaatcagcctgcacctgcaacccgcattgctgacattggatgatttgattgtacagggtgaagccggaagctacgatttggcactgatagacgcagacaaaccgcccacgccgcaatatttcgagcgttgcctcaaactcgtccggcaaggcggcatcattgccattgacaatattttgttgaacggaagggtgatgcgcgaagcggcttccgacgcgccgcccagtgtcggcatcctcaaagatttcaatcaaaacctgccgaacgacccgcgcatcgtccccatcaccctgcccgtcggcgacggtttgaccctgcttctgaaaaaataa

SEQ ID NO: 54575 - DNA, 453 bp, Neisseria meningitidis
atgaatattgaagtagaaatgaaagtattggacgagaggatggcggattttatccctgcctatgcaacggagggttctgcaggtttagatttgcgcgcctgtttggatgaggaagtcgtcttgcagccgggtgaaacgtttcttgtaccgacaggtttggcaatttatttggcgaatcccgcatatgccgccgttttgctgccccgttccggcttggggcataaacacggcattgttttgggcaatttggtcggcttgattgactccgattatcaaggggaattgaaggtttcgttatggaacagaagcagcgagccgtttactgtcaaaccgtttgagcgtatcgcgcagatggttatcgtgccaatcgtgcaggcgcgtttcaaacgtgtcgaggaatttgtcggaagcagccggggtgagggcggcttcggcagtacgggtttgcattga

SEQ ID NO: 54576 - DNA, 276 bp, Neisseria meningitidis; identical to SEQ ID NO: 44823

SEQ ID NO: 54577 - DNA, 564 bp, Neisseria meningitidis
atgaaactcatcattctcgaccgcgacggcgtcatcaatcaggaccgcgatgacttcgtcaaatccgttgacgagtggatacctgtcgaaggcagcatggatgcggtggcatttctgacgcaggcaggctacaccgtcgccgttgccaccaaccaatccggcatcgggcgcaaatattttaccgttcaaaaccttaccgaaatgcacgccaaaatgcaccgcctcgtccgtcaggcaggcggcgaaatcaacggcatctggttctgcccgcacaccgatgccgacaactgcaactgccgcaagcccaaaccgggtatgattgaagacatcatcggacgcttcaacgcccaagcctcggaaacctggctggtcggcgacagcctgcgcgatttgcaggcaatcgatgccgtcggcggaaaacccgcgctggttctgaccggaaaaggcaaaaaaacgctctcccaacacggacacgaattacccgaacacacacaggttttcgataccttgctcgatttctcacaatacatcatgcaggaaaacgccgcaccgcaagccgactga

SEQ ID NO: 54578 - DNA, 1275 bp, Neisseria meningitidis
atgaaaacactgcaagactggctctcgcatttggaaaccgcccacagcggcggcttgatcgatatgggcttggaacgcgtaggcgaagtgaaaaaacggatgaagctcacgccgcaatgccccgtcgtcgttgtcgcgggaacaaacggcaaaggttcggtctgcgcctacctgacacagatttacaaacaggcgggctacaaaaccggcacactgaccagcccgcatttattgcgttacaacgaacgcatcgccatcaacgccgaacccgtttcggacgatacgattattgcctctttcgagcgcatcgaagcggcgcgcagcgaaatatcgctgacttattttgaattcaatacgttggcggccgtcgacatcttcatgcgcgaacaggttgacgtgatgatattggaagtcggcttgggcggacgcttggacgcggtcaacgcgtttgacggcgattgcgcggtggttaccagcgtggatttggaccatcaggcatttttgggcgatacggtcgagcaggtcggctttgaaaaagcaggcgtgttccgtagcggcaaacccgccatctgcggtcaaaaccccgcgcccaaatcgttgctttcacacgccgaagccataggcgcgaaactgctgatggtgcagcgcgatttcgagtttcacgcgctggaaaacatccaatggaactaccgcttccgaccgcagcattcagacagccccgctcgcaaccgtaattccctgcccttccccgcattgcgcggcgcataccaactttccaatgccgcctgtgcgctgaccgtgttggaatgtttgaacgacaaattgccggtggacatcggtgcaatcaaacgcggattgctgctggttgaaaatcccggacgcttccaagtcctgcccggccggccgctgaccgttttggacgtcggacacaatccccacgctgcccgcgccctgcgccgcagcctgattaatttggcgtttgcgcaaaaacgcaccgccgtgttcagtatgctgtccgacaaagacatagacggcgtgttggaaattgtcaaagaccagtttgacgaatggtatatcgcacctttggacatgccgcgcggcatgacgctcgagagcctgcaaaacaaactgcacgaacacagcatcgaaaacatacagacattcgccgccgtccgcgaagcataccgggcggcagcctcaaaagcgggcgagaacgacagaatcgtcgttttcggctcatttcataccgttgccgatgtcatgtcggtactttaa

SEQ ID NO: 54579 - DNA, 291 bp, Neisseria meningitidis
atgaacatccaacttcaaggccacatcgtcggcgttaaaaaattcaacggacaaatcgaaggcaggagcttcgactattgccgcctgattgtcgccacacccttagacagctcccaaggcaacgcattgggcagctctactactgaatacgatttcggcggctctgccaatttcgagcagttccgaaacgcccaatttccgatcgaagcaaacctgaacgtagaaatcgttactacgggcaaaacccaaaaactgaaagtcatcggttttcaactcgtgaagaaaggctga

SEQ ID NO: 54580 - DNA, 756 bp, Neisseria meningitidis
atggattcttttttcaaaccggcagtttgggcggttttgtggctgatgtttgccgtccgccccgcccttgccgacgagttgaccaacctgctcagcagccgcgagcagattctcagacagtttgccgaagacgaacagcccgttttacccatcaaccgagcccccgcccggcgggcgggcaatgccgacgaactcatcggcagcgcgatggggcttaacgaacagcccgttttacccgtcaaccgagtccccgcccggcgggcgggcaatgccgacgaactcatcggcaacgcgatggggcttaacgaacagcccgttttacccgtcaaccgagcccccgcccggcgggcgggcaatgccgacgaactcatcggcaacgcgatgggacttttgggtattgcctaccgctacggcggcacatcggtttctaccggttttgactgcagcggcttcatgcagcacatcttcaaacgcgccatgggcatcaacctgccgcgcacgtcggcagaacaggcacggatgggtacgccggttgcccgaagcgaattgcagcccggagatatggtgtttttccgcacgctcggcggcagccgcatttcccatgtcggactttatatcggcaacaaccgcttcatccacgcgccgcgcacggggaaaaatatcgaaatcaccagcctgagccacaaatattggagcggcaaatacgcgttcgcccgccgggtcaagaaaaacgacccgtcccgctttctgaactga

SEQ ID NO: 54581 - DNA, 1776 bp, Neisseria meningitidis
atgagtatcgtgctgcacggcgtggcggcgggcaaaggcattgccgtcggttgcgcccacctgattgcgcgcggtacggaggaagtgccgcagtatgatgttgcggaggcggacaccgatgccgaagccgaacgtttcgatgccgccgtcaaagccacgcgcaaagagttggaacagctccgcagcgcgattcccgaaaacgccccgaccgagttgggcgcgttcatctcgctgcacctgatgctcttgaccgatgttaccttgtcgcgcgaacccgtcgatattttaagggaacaaaaaatcaacgccgagtgggcattgaagcagcagagcgacaaactcgccgcccaattcgacaatatggacgatgcctatttgcgcgaacgcaagcaggatatgctgcaagtcgtccgccgcatccacaacaacctgatcgggcagggcaacgagttggaagttgccgacaacctgtttgacgaaaccgttctgattgcaaacgacctttcgcccgccgacacggttttgtttaaagagcagcgcattgccgccttcgttaccgatgccggcggccccaccgggcatacggcgattttgggcaggagcttggacatcccgtccgtcgtcgggctgcacaacgcgcgcaaactgattaccgagggcgaaacggtcattgtggacggtatcaacggcgtgttgattatcgcgccggatgagtcggtgttgaacgaataccgccgccgtgcccgcgaataccgcagccacaaacgcgatttgaacaagctcaaaaaaaccgccgccgccaccgctgacggggtctgcatcgagcttgtgggcaatatagaatccgccgaagacgtgaaaccgctgcacaacctcggcgcagacggcatcgggctgttccgcagcgagtttctttacctgaaccgcgatacgatgccgtctgaagacgagcagtacgaagtgtacagcgcgattgtcaaaaaaatgaaaggcaaaagcgtaacgatacggacagtcgatttgggtgtggacaaaaacccgcgctggttcgggaaaaacagcacgcccaacggcagcctcaaccccgcgctgggcatgaccggcatccgcctgtgccttgccgaaccggtcatgttccgcacccagatgcgcgccatcctccgcgccgccgcccacggccccgtgcggatgatgtggccgatgattacctccgtatccgaagtgcgccagtgcctcatccacctcgacaccgcgcaacgccagcttgccgaacgcggcgatgccttcggtaaagtcggcatcggctgtatgattgaaattccgtctgccgcgctgaccgtcggcagtattttgaaactggtcgatttcatctccgtcggtaccaacgacctgattcaatacatcttgtccgtcgatcgcggcgacgacagcgtcagccacctctaccagcccggccatcccgccgtgctgaaaatgctgcaacacgtcatccgtaccgccaaccgcatggacaaagacgtatccgtatgcggcgagatggcgggcgataccgcgtttacccgcgttttattgggtatggggctgcgccgtttttccatgaaccccaacaacatcctgcccgtcaaaaacatcattctgcacagcaatgtcggacagctcgaaagcgatattgtgaaagtcatccgctgcgaagacgaagagaagtcggaaaagctgatcaaacagatcaacagcgtgtctgtcgaggaagaagccgacttcaaggggcggaaataa

SEQ ID NO: 54582 - DNA, 1719 bp, Neisseria meningitidis
atgaacctacatcaaaccgtcgaacacgaagccgccgccgcctttgccgccgcaggcatcgccggcagccccgttgttttgcagccgaccaaaaatgccgaacacggcgatttccaaatcaacggcgtgatgggtgcggcgaaaaaagccaaacaaaacccgcgcgaactggcgcaaaaggtcgccgacgcattggcaggcaacgccgtcatcgaaagcgcggaagtcgccggtcccggttttatcaacctgcgcctgcgccccgaatttctcgcgcaaaacattcagacggccttgaacgacgcgcgtttcggcatagcgaaaaccgacaaaccgcaaaccgtcgtcatcgactattcctcgcccaatctggcgaaggaaatgcatgtcggtcacctgcgttccagcatcatcggcgacagcatttcgcgcgtgttggcatttatgggcaacaccgtcgtccgtcaaaaccacgtcggcgactggggtacgcagttcggcatgttggtcgcttatttggtcgagcagcaaaaagacaatgccgcgtttgagctggcggatttggagcagttttaccgcgccgccaaagtgcgctttgacgaagatcctgccttcgccgacaccgcgcgcgaatacgttgtgaagctgcaaggcggcgatgaaaccgttttggcattgtggaaacagtttgtcgatatttcgctctcgcacgcccaagccgtttacgacacgctgggcttgaagctgcgccccgaagacatggcgggcgaatcgaagtacaacgacgatttgcagccagtggtcgatgatttggttcaaaaaggtctggcggtcgaagacgacggcgcgaaagtcgtattcttggacgagttcaaaaacaaagaaggcgaacccgccgcgtttatcgtgcaaaaacaaggcggcggcttcctttatgcttccaccgacttggcgtgtttgcgctaccgtgtcggcacgcttcatgccgaccgcctgctgtacgtcgtcgaccaccgccaagccctgcactttgagcaactctttaccacttcccgcaaagcaggctatctgccggaaaacgtcggcgcggcatttgtcggcttcggcacgatgatgggcaaagacggcaaaccgttcaaaacacgcagcggcgacactgtaaaactggtcgatctgctgaccgaagccgtcgaacgcgccgccgctttggtgaaagagaaaaatcccgaattgggcgcggacgaagccgccaaaatcggcaaaaccgtcggcatcggcgcggtcaaatacgccgacttgagcaaaaaccgcaccagcaattatgtgttcgactgggacgctatgctttcgtttgaaggcaacaccgccccctacctgcaatatgcctacacccgcgtgcaaagcgtgttccgcaaagccggtgaatgggacgcaaccgcaccgactgttttgagcgaaccgctggaaaaacagcttgccgccgagctgctgaaattcgaagacgtgctgcaaagcgtggcggacacggcgtatccgcactacctcgccgcctacctctatcaaattgcgaccctgttcagccgcttctacgaagcctgtccgatactcaaagccgaaagcgcaagccgcaacagccgcctgcaactggcgaagctgaccggcgacacgctgaaacaaggcttggatttgctgggcatcgatgtgttggacgtaatgtaa

SEQ ID NO: 54583 - DNA, 690 bp, Neisseria meningitidis; identical to SEQ ID NO: 36702

SEQ ID NO: 54584 - DNA, 1158 bp, Neisseria meningitidis; identical to SEQ ID NO: 46682

SEQ ID NO: 54585 - DNA, 3096 bp, Neisseria meningitidis
atgaataaaactttaaaaaggcaggttttccgccataccgcgctttatgccgccatcttgatgttttcccataccggggggggggcgcaggcggaaacccataactacgctattgtcatgaacgaacaaaatcagctgaaggtaaagcagaagggtttatattcaaccttaagggaaaaagacagggaacgcaaatttatctataataaaagctggcagggtggaggctctgtctttttcgacaataccgatacccttgtttcccgacaaagcggtactgccgtttttggcacagccacctacctgccgccctacggcaaggtttccggttttgatgccaacgctctgaaagagcgcaacaatgccgtcgattggattcataccacccgggccgggctggcaggctacgcctacaccaacgtcatatgcagaagccaccaatgcccccaacttgtctataaaacccgattttccttcgataatcccgacttggcaaaaagaggaggcgggctggataggcacacagagccaagccgcgacaattcgctcatttacaaattgaaggatcatccatggttgggcgtatctttcaatttgggcagcgagaataccgtcaaaaatagccaatcatccagcagattgatatcttcttttagtgaagacaataataatcaaaccatcgtctctacgacagaaaaccaccctatttcccttggcgacaggcagcgcgaacataccgccgtggcctattatctgaacgccaaactgcacctgctggataaaaaagggattaaagatatcaccggcaaaacagtgcggttgggtgtcttgaagccgagcatcgatgtgaagacacaaaggacggggcttggcggcttgctaggttttcatgctaagtgggacattaaagataccgggcagattccggtcgagctcggcctgccgcaaatcaaagcaggccgctgcatcaacaaaccgaaccccaatcccaaagcccaagccctttcgccggcactgactgcccccgcgctgtggttcggacctgtgcaaaatggcaaggtgcagatgtattccgcttcggtttccacctaccccgacagttcgagcagccaaattttcctgcaaaacctttcccgcaaggatgacacaagcaaaccgggccgctattccctcaaacccttgagtacgtcggagattaaaagtaaagagccgactttcacagggcggcaaaccgtcatccgattggatggcggcgtacagcagattaaacttcaaggcaatgaggtcactagttttaatgtaaacaacggcaacaacactttcggcattgttaaggacttgggcgtcgatcctgatgccagcgagtggaaaaaagtgctgctgccttggacggttcgtgcttccaatgatgacaatcaatttaaaacaattaaccaacaacttaaccaacaaaaaatccaatacagccaaagataccgcatccgcgacaacggcaatcgcgatttgggcgacatcgtcaacagccccatcgtggcggtcggcgagtatttggctacttccgccaacgacgggatggtgcatatcttcaaacaaagcggcggggacaagcgcagctacaatctgaagctcagctacatccccggcacgatgccgcgccaatattttgataacgacacttccgctctcaaagactccaccctcgccaaagagctgcgcacctttgccgaaaaaggctatgtgggcgaccgctacggcgtggacggcggctttgtcttgcgccaagttaacaacttaaatgggcaagaccgcgtgtttatgttcggcgcgatgggctttggcggcagaggcgcatacgccttggatttaagcaaaatcgacagcaataacccgaccgccgtttccctgtttgatgtcaaaaatgacgataaaaacaataatggcgtgaaattaggctacaccgtcggcacgccgcaaatcggcaaaacccacaacggcaaatacgccgccttcctcgcctccggttatgcgactaaaaaaattgacgaccaaacaaataaaaccgcgctgtatgtgtatgatttggaaagcaacaacggtacgccgattgcaacaatcaacgtacccgacggcaagggcgggctttcgtcccccacgctggtggataaagatttggacggcacggtcgatatcgcctatgccggcgatcgcggcgggaatatgtaccgctttgatttgagcagtcaagatcctaaacaatggtctgcacgcgccatttttaaaggcgacaaaccgattacttccgcgcccgccatttcccaactgaaagacaaacgcgtggtcatcttcggcacgggcagcgatttgagtgaggaggatgtggacaaaaaggacgaacaatatatttacggtatcttcgacgacgatacggcgacgacgggttctgtaaacttcagcggttcgggaggcgggctgctcgagcaacaccttactcaggaagataaaaccttattcctgaccgattacaagcgatccgacggatcgggcaataagggctggatagtgaaattgaaggacggacaacgcgttaccgtcaaaccgaccgtggtattgcgtaccgcctttgtaaccatccgcaaatatactgacaacggctgcggcgcggaaaccgccattttgggcatcaataccgccgacggcggcaagctgaccaagaaaagcgcgcgcccgattgtgccggaagccaatcaggctgtcgcgcaatattccggccataagcaaaccgccaaaggcaaatccatccctataggttgtatggaaaaagacaatggaatcgtctgcccgaacggatatgtttacgacaaaccggttaatgtgcgttatctggatgaaaagaaaacagacggattttcaacaacggcagacggcgatgcgggcggcagcggaacattcaaagagggtaaaaaacccgcccgcaataaccggtgcttctccggaaaaggtgtgcgcaccctgctgatgaacgatttggacagcttggacattaccggcccgacgtgcggtatgaaacgaatcagctggcgtgaagtcttctactga

SEQ ID NO: 54586 - DNA, 1788 bp, Neisseria meningitidis
atgaaacttcctttatcctatttgcctaatattcgctttttgtcttggtgctgcttattggcaggtatcattgctcctgctactttgttggcctcccccaaccctgccgaaatccgtatgcagcaagatattcagcaacgccaacgcgaagagcagttgcgccaaaccatgcagcctgaaagcgatgtgcgtttgcatcaaaaaaacacgggggaaacggttaatcagttgatgggcgatgacagcagccaaccgtgttttgccattaacgaagtggtgttggaaggcgaacaccatgctcggtttcagtttgccctaaaacgtgccttgcgcgaaacgggttttcaggctggcaagtgtctgcatgcgggcaacattaatcaaatcatgtccttagcacaaaatgctttgatcggcaggggatataccacgacccgtatcttggctgcgccacaggatttgaatagtggcaagcttcaattaaccctgataccgagctatctgcgctccatacgaatcgatcggtctaacgatgatcaaacccatgcaggacgtattgcagcattccagaacaaatttcccacccgctcgaacgatctgttgaatctgcgtgatttggaacaaggactggaaaatctcaaacgtctcccgactgcggaagccgatctccaaatcgttcccgtagagggagaaccaaaccaaagtgatgtcgtggtgcaatggcggcaacgtctgctgccctaccgtgtgagtgtggggatggataattcgggtagtgaggcgacaggaaaataccaaggaaatatcactttctctgccgacaatccttttggactgagtgatatgttctatgtaaattatggacgttcaattggcggtacgcccgacgaggaaagttttgacggccatcgcaaagaaggcggatcaaacaattacgccgtacattattcagcccctttcggtaaatggacatgggcattcaatcacaatggctaccgttaccatcaggcggtttccggattatcggaagtctatgactataatggaaaaagttacaatactgatttcggcttcaaccgcctgttgtatcgtgatgccaaacgcaaaacctatcttggtgtaaaactgtggacgagggaaacaaaaagttacattgatgatgccgaactgactgtacaacggcgtaaaactgcgggttggttggcagaactttcccacaaagaatatatcggccgcagtacggcagattttaagttgaaatataaacgcggcaccggcatgaaagatgctctgcgcgcgcctgaagaagcctttggagaaggcacgtcacgtatgaaaatttggacggcatcggctgatgtaaatactccttttcaaatcggtaaacagctatttgcctatgacacatccgttcatgcacaatggaacaaaaccccgctaacatcgcaagacaaactggctatcggcggacaccacaccgtacgtggcttcgacggtgaaatgagtttgtctgccgagcggggatggtattggcgcaacgatttgagctggcaatttaaaccaggccatcagctttatcttggggctgatgtaggacatgtttcaggacaatccgccaaatggttattgggccaaactctagccggcacagcaattgggatacgcgggcagataaagcttggcggcaacctgcattacgatatatttaccggccgcgcattgaaaaagcccgaatttttccaatcaaggaaatgggcaagcggttttcaggtaggctatacgttttaa

SEQ ID NO: 54587 - DNA, 462 bp, Neisseria meningitidis; identical to SEQ ID NO: 43699

SEQ ID NO: 54588 - DNA, 882 bp, Neisseria meningitidis
atgccgtctgaaaacaccctcttttccctacccgacaccctgttgcgccccatagtcgaacaagccttgagcgaagatttgggcaggcgcggcgatattacgtccgccgccgtcatcgcccccgacaaaaccgccaaactcttccttgtcagccgcgaagacggcgttatcgccggcatggacttggcgcgcctcgcctttcagacgatggatccgtccgtccgcttccaagccgaaatccgagacgggcaagtcgtccgcgcaggtcagacgcttgccgccgtcgaaggcaacgcctgcgcgctgctcgccgccgaacgcaccgcgctcaactacctcacgcacttaagcggcatcgccaccgccaccgcgcgtgccgttgccgaagtcgccaaatacggtacagacatcgtgtgcagccgcaaaaccatccccctgctgcgcgtcctgcaaaaatacgccgtcagggcgggcggcggcgtgaaccaccgcatgggtttggacgatgccatccttgtcaaagacaaccacctcgcctattgcggcagcatcgcccaagccgtgcggcaggcaaaacaggcggtcggaccgttgacttgtgtagaaatcgaagtggacacgttggcacaactggacgaagccatcgcagcgggcgcggaacggattttgctggacaacatggacgacgaaaccctgaaagaagcggcaaaccgctgccacacgcaaaccgcccacccccacaccgtctattgcgaagcatcgggcggcatcggcttcgaccgcctgaagcgcgtggcgcaaaccggcgtggacggcatcgccctcggctatctgacccacagcagccgctcgttggacataggtttggatttcttggcatga

SEQ ID NO: 54589 - DNA, 576 bp, Neisseria meningitidis
atgttattgctgtcggcatttgtgcttgctgcgtgtaatgcccaaaaccggcaatcctgtgtacggcatcaggatttcgcacgtgtagccgtcgatttgtttcggagtgcctgcgtcctgactcaaggcagtttcgaaccagtttccaagtttgccgctgtcggacattttgtccctgtcggaaaggaagacctgtcccgtctgccgcccgctgttgcagaacccgatgtacaggcgttgtggacgcttgaacgcgatggcggcatttattatttgagcctgccgcgcgactgttgcagtgtgaaagccgagcgggcagacagtgccgtgcttttggaacattttgacggacttgtccgacagccgccgaaaaataccaatatagaattgagggctgaacagtcggtgcaggcactgtttgaaaccaggcaaatcagctatgcctggcgggaatcgggcagccccgaagaaaccgtattgaccgcacaaaccgccgattccccggatttgcccgtacaggcagttttgaacctgacgcaccgttcccacaacgggaaacccctaattctcccctaa

SEQ ID NO: 54590 - DNA, 699 bp, Neisseria meningitidis
atgaaatccagacaactcgccctcggcgttgccgccctgttcgcccttgccgcgtgcgacagcaaagtccaaaccagcgtccccgccgacagcgcgcctgccgcttcggcagccgccgccccggcagggctggtcgaagggcaaaactataccgtccttgccaacccgattccccaacagcaggcaggcaaagtcgaagtccttgagtttttcggctatttctgtccgcactgcgcccacctcgaacctgttttgagcaaacacgccaagtcttttaaagacgatatgtacctgcgtaccgagcatgtcgtttggcaaaaagaaatgctgccgctggcacgcctcgccgccgccgtcgatatggctgccgccgacagcaaagatgtggcgaacagccatattttcgatgcgatggtcaaccaaaaaatcaagctgcaagagccggaagtcctcaaaaaatggctgggcgaacaaaccgcctttgacggcaaaaaagtccttgccgcctacgagtcccccgaaagccaggcgcgcgccgacaaaatgcaggagctgaccgaaaccttccaaatcgacggtacgcccacggttatcgtcggcggtaaatataaagttgaatttgccgactgggagtccggtatgaacaccatcgaccttttggcggacaaagtacgcgaagaacaaaaagccgcgcagtaa

SEQ ID NO: 54591 - DNA, 333 bp, Neisseria meningitidis
atgttggacgcaagcccaccgcaagagcggggtagccgccgcgaaacgcgcagccaaaaaaaagcgtcacaaataaccgcctttttccgatggctgggcggcttggtctctaatccggccacagggaaaatcagccataccaaactttgggcaaacgtcgccgcagccgccatgacttggaagttcgtgcaggcggcggacgcgcccgaatggctttggtgggcatacggcgcgatggtcggcgggtatgcattaatcaaacgcggcatcgccgtcgtaccgcagttggcggaagtcaaaaaatccgcaaatcaggaaggggggcggcaatga

SEQ ID NO: 54592 - DNA, 369 bp, Neisseria meningitidis
atgatagacggcgaactggtcgcgcttatccatcaaaccgtattggcggatgaagcgggtttgaaagggcgggcggatatggcgcggctcgacggcgcattgtcgcggattgccaactggcggcagtatgaaaaccttgaggacatctacgaaatcgccgccctttatgcacaagccatagccaaagcccacgcctttcccgacggcaacaagcgcaccgcgcttttaacaatgttgacctatctggatttgcagggcatcagcattgccgccgaccaagggcttgacgacttgattgtcagtttggcggcgggggaaaccgacttcaaacagctcgccgaaaccctgcgccgactggataaggaatag

SEQ ID NO: 54593 - DNA, 633 bp, Neisseria meningitidis; identical to SEQ ID NO: 50523

SEQ ID NO: 54594 - DNA, 1020 bp, Neisseria meningitidis
atgaacactatgctaatgtcgggcgcggctgccgcgctgcttgccggcatcatcctttatttcaaaagcgacaaaaagcggcaggaaaacggtgaatggagttccggcctcgaatacgcctatatcctgacagcggtcggcgtgtttgccgctttgtccctgtttatgagctttaccgccgttttcctgattttcgttgtattgtgcggtacggcttggggggtatataaataccgcctgaagactcatcccgaaatctcggaaagcagccacttcggcgattatttcggcagtttcttccctaccgttttggtattgttcctcatccggtcgtttatcgccgaaccgttccaaatcccgtccagctcgatgcgcccgggcctgatcaaaggcgatttcattttggtcggcaaattttcctacggcctgcgcgtacccgttttaaacaatgtattcatccccacgggcaaaatcgaacggggcgatgtggtcgtttttaattatcctttgcaaccggagatgacctacatcaagcgtattgtcggcattccgggcgatgtggtcgaatatcggaataaagttttgacggtaaacggaaaacctgcttccgatattcctgacggcacataccgttatcccgacgacaccgacccatccgaaatccacaatacggatatgttccacagcggtttggacggcaaatccttcaatattctgaaaaaagaaggacagcctgccgtttccctgcccgtattgggcaaatatacctccgatattatgtctgaaaacggatattccatagagcaaagcggtttggaacactgccaatatgccgacgacggcagcggtttcgtgtgcaaagttcccgaaggacgctatttcgctatgggcgacaaccgcgacaacagtgccgattctcgctactggggatttgtggatgacaagctggttgtcggcaaggcaatgttcattttgatgaacttcggcgatttcggcagggccggtacggcaatccgttag

SEQ ID NO: 54595 - DNA, 441 bp, Neisseria meningitidis
atgcctacccaatcaaaacatgcgtctatcaatatcagtctgatacaggcaagggaagccctgatgacccaattcaggcctattctgaatcaggcgaatattaccgatcagcaatggcggattatccgtcttttggcggaaaacggcacgctggactttcaagatttggcgaatcaggcgtgtattctgcgccccagcctgaccggtatcctgacccgccttgaaaaagcgggtttggtcgtccgcctgaaaccttccaacgaccaacgacgtgtttttctgaagctgactgccgagggcgagaagctgtatgaggaaatcggcgaagaagtggacgagcgttacgacgctatcgaggaagtgctgggccgcgagaaaatgctgctgcttaaagacctgttggcagaacttgccaaaatcgaggatgcgttgaactcgtaa

SEQ ID NO: 54596 - DNA, 144 bp, Neisseria meningitidis; identical to SEQ ID NO: 53494

SEQ ID NO: 54597 - DNA, 645 bp, Neisseria meningitidis
atgattgttttagtcggtttgggaaataaaaaaatgaagaataatgattgcttccgcctgaaaaacccccagtctggtatggcgctgatagaagtcttggtcgctatgctcgttctgaccatcggtattttggcactattgtctgttcagttgcggacagtcgcttccgtcagggaggcagagacgcaaaccatcgtcagtcaaatcacgcaaaacctgatggagggaatgttgatgaatccgaccattgattcggacagcaacaagaaaaactataatctttacatgggaaaccatcatacactatcagttgtggatggcgattttgcgattgatgccatgaaaactaaggggcaattggcagaggcacaattgaagagatttagttatgagctgaaaaatgccttgccggatgcgacagccatccattacaccgtctgcaaggattcgtcgggtaatgcgccgacattgtccggcaatgctttttcttcaaattgcgacaataaggcaaacggggatactttaattaaagtattgtgggtaaatgattcggcaggggattcggatatttcccgtacgaatcttgaggtgagcggcgacaatatcgtatatacttatcaggcaagggtcggaggtcgggaatga

SEQ ID NO: 54598 - DNA, 444 bp, Neisseria meningitidis
atgccgttccgcctgtttttagggatattatgcggcctgtcaatggttgcccccgtatatgcacaggggcaaccggatgcgatcaatgcctatatccaaaagaaaaaagtcatcgtcgatacatccaaagcggaactctgtttcgctgacgaccgtcagtgccaccccgtcctcatcggtgttgccacgcccaaggggacgttcgggctgacgctgaacagtaccgacaagcctggatacggcggcgaagtcatcggtttcaagcaggagggtgattttcttttcgccctgcaccgcgtttggaatcagataccgtcggaaaggcggaacgaacgcatcgcctccccgtccgtgtccgacaggattatgaccaacggctgcatcaacgtcagcgatgcggtgtacgaaaaactgcgtcattattttgtgttggaagtgatttga

SEQ ID NO: 54599 - DNA, 438 bp, Neisseria meningitidis; identical to SEQ ID NO: 42580

SEQ ID NO: 54600 - DNA, 1245 bp, Neisseria meningitidis
atgtccaacgaaaaccgtacctgttccttttgcggaaaatccaaatcacacgtcaaacatttaattgagggcgaaaacgcctttatctgtgacgaatgcgtctcaaactgtattgaaatattgcatgaagacggaaatgacggcacgtcttcggaaagtgtcggacagacatcggaagagcccggcaagctgcccacgcccgccgaaatcgtcgccaacctcaacgaccacgttatcggtcaggaacaagccaagaaagccttggcggtgtcggtgtacaaccattacaaacgcctgcgccacccgaaagccggagctaatgtcgaattgtcgaaatccaacatcctgcttatcggcccgaccggatcgggtaaaaccctgctggcgcaatctttggcgcgcaaactggatgtgccgttcgtgatggcagatgcaaccacgctgaccgaagcaggttatgtcggcgaagatgtcgagcaaatcatcaccaaactcttgggcaaatgtgatttcgatgtcgaaaaagcccaacgcggcatcgtctatatcgacgaaatcgataagatttcacgcaaaagcgacaatccgtccatcacgcgcgacgtgtccggcgaaggcgtgcagcaagccttgctgaaactgattgaaggtacggtggccagcgttccgccccaaggcggccgcaagcatccgaatcaggaatttatcaacgtcgataccaccaacatcctgtttatctgcggcggcgcgtttgcaggcttggaaaaagtcatccgccagcgtactgaaaaaggcggtatcggtttcggtgcgtccgttcacagcaaggacgaaaatgccgatgttaccaagctgttcggcattgtcgaaccggaagatttgattaaattcggtctgattccggaattaatcggacgtttgcccgtgattgcaacgttagaagaactggatgaggacgcgctgattaatattttgaccgagccgaaaaatgctttggtcaagcagtatcaagctttgttcggtatggaaaatgtcgagttggaatttgaagaaggcgcattgcgttccatcgcgcggcaggcgatggaacgcaaaaccggcgcgcgcggcctgcgttccatcgtcgaacgctgcctgctcgatacgatgtaccgcctgcctgatttgaaaggcttgaaaaaagtggttgttggtaaggcagtcatcgaagagggcagggaaccggaattggtgttcgagccctga

SEQ ID NO: 54601 - DNA, 378 bp, Neisseria meningitidis; identical to SEQ ID NO: 36526

SEQ ID NO: 54602 - DNA, 786 bp, Neisseria meningitidis; identical to SEQ ID NO: 44566

SEQ ID NO: 54603 - DNA, 717 bp, Neisseria meningitidis
atgaactttgaaaacgacgacattatccatgcgccgactacgtcttccctgattctcgaagagcggcacgattctgagctgttccgtgtttacgccctgattttggacggcattaccgatcaggtgctgctgcccggcaaaaagctgaccgaatccgaactttgccgtcagatggtgtgttcgcgcaacaccgtccgcggcgcgctgtcgcttttggcgcacgacaagattgtcgatttgcaacccaacaggggcgcgttcgtccacgttcccgatttgaaagaaatgcaggatgtgttcaatgcgcgcatcgaaatggagacgatgattttgaatatcctcgcagatttgccggatttggaaacgcgcctcaagccgctttatgcgatgatacggcgcgaagaagaggcctccggcaggggcgaccgcgttggctggaaccgcctgtccaatgccttccacgtcgaactggcgcgcctggtgggcaacgatgtgctgttcgacattatgaacacgctgtgcgcgcggtcttccctgattgtcgccgtggcgggcgtgcatcgcgaggaaaaacacgccatcaatacgcatacgcattcagaacaccgcgaaatcctcgacctgctgctggcgggcaggcgcaaccgcgtggtcaaaatcctgcgccgccatttgggcaactgtatggagcgtttggaaaagactttggaagattga

SEQ ID NO: 54604 - DNA, 381 bp, Neisseria meningitidis; identical to SEQ ID NO: 46227

SEQ ID NO: 54605 - DNA, 546 bp, Neisseria meningitidis
atgagcaaaattatttgtctgactgccggacacagtaacaccgacccgggcgcagtcaacggcagcgaccgtgaggcggacttggcgcaggatatgcgcaacattgtggcttcaatcctgcgtaacgattacggcctgaccgtacgcaccgacggcgaaggcaaaggcaatatgcccttgcgcgatgcggtcaagctgattcgcggctcggatgtggcgattgagttccacaccaatgcggcggcgaacaaaacggcgacaggcatcgaagccttgtccacgccgaaaaataaacgctggtgtcaggtgctgggcaaagccgttgccaagaaaaccggctggaaactgcgcggcgaagacggctttaagccggataacgcagggcaacattcgcgcctggcttatgcgcaggcaggcggcattgtgtttgagccgttttttatcagtaacgacactgatttggccttgtttaagacgaccaaatggggcatctgccgcgcgattgcggacgcgatcgcgatggaattgggagcgacgaaggtatga

SEQ ID NO: 54606 - DNA, 1149 bp, Neisseria meningitidis
atgcccctccctctcccctctcccgaagcacggcaattctcgctcaaactgcaaaccctcattgccgaaaaaatcggcaaacacggcaactggattccattttcacgttttatggaattggttttatacgctccgcaatacggctactacaccggcggcagccataaaatcggcaataccggggattttattaccgcaccgaccctcacctctctgtttgcacagacactggcacgccaacttcaagaacttctatcccaaacggcgggcaatatctatgaattcggcgcgggaaccggacagcttgccgccgatttgttgggcagcatttcggacggcatcagccgttactatattattgaaatatcgccggagctggcagcacgtcagaaaaacctgattcaagcccgcgcaccggaagcatctcaaaaagttgtccacttgaccgcacttcccgaagcgtttgacggcatcatcatcggcaacgaagtactcgatgccatgcctgtcgaaatcgtccgtaaagatgaaggcggctcattcgagcatgtcggcgtttgcacggacaacggccgtttcgcctattctgcaagacccttgcacgacccgtcgctttccacctcggcttccctctattttcctcaaacagattatccctacaccagcgaactacatccgcaacaatatgcctttatccgcacccttgcctcaagactcgaacacggctgcatgatattcatcgactacggttttgatgcagcgcagtattaccacccgcaacgcaatcaaggtactctaatcggacactaccgacatcacgttatccacaatccttttgacttcatcggattggccgacctgaccgcgcatgtcaactttaccgacattgcccaagccgggacggatgccggattagatttgataggttaccttccccaatcccatttcttattgaacctgggcattaccgagctattggcacagacggggaaaacgaattcggcagcctatatccgtgaagctgctgccgttcagaaactgattgaccagcacgaaatgggcgaactgtttaaagtcatcgcattcggaaaaaatatcggcatcgactgggcaggattccgcttcggcgacatctgccacaaactctaa

SEQ ID NO: 54607 - DNA, 405 bp, Neisseria meningitidis; identical to SEQ ID NO: 38321

SEQ ID NO: 54608 - DNA, 1050 bp, Neisseria meningitidis
atgtccaaacagcccaccagcaaacgccaatggcgcgacggcgtagccccgtctgccaagaaaaccgccaaacctttcaaaagcaaagcccgtcccaaagacgaaacggacaaaaccgcatcccaaccttacggacaaaaagcttcagacggcatcaaacctcaaaacctccccaaacagcgcgccgccaaagccaaaaaactcgtcgtccgcaatcccaaccaaaaaattatggaacacgcgcgcgatttaaaagaacgccgcagcgacctatcgcgcatggaacccgaacgcctgcaaaaagtgcttgccgcgtccggcgtcggctcgcgccgcgaaatggaagaatggatcaacaacggctgggtaacggtcaacggcaaaaccgcgcaactgggcgacaaagtcacccccgacgaccacgttaccgtcaaaggcagcatcatcaaactcaaatgggccgaccgcctgccgcgcatcatcctatattacaaacaagaaggcgaaatcgtttcccgcgacgacccgcaaggccgcgtcagcatattcgaccgcctgccgcaggccgccagcagccgctgggtcgccatcggacgcttggacatcaacaccagcggacttctgattctcaccacctccggcgaactcgtccaacgtttcgcccaccccagcttcgaagtcgaacgcgaatacgccgtgcgcgtcttgggcgggctgaccggcgaacaaatgcgcgtcctcaccgaagaaggcgtgatgctcgaagacggcttggcaaaagtcgaacgcatccgcgaacaaggcggcgaaggcgcgaacaaatggtacaacgtcgtgattaaagaaggccgcaaccgcgaagtgcgccgcatttttgaaagccaagggctcaccgtcagccgcctcgtgcgcgtcggcttcggtcccatcggactgcccaaccgcctcaaacgcgggcagttctacgaactcaaccccgccgaagtcgccaacatcatcaaatgggcggacatgctgctgccgggcgaacgccgccgcaaaaaagcctaa

SEQ ID NO: 54609 - DNA, 1335 bp, Neisseria meningitidis
atgactgacctgaacaccctgtttgccaacctcaaacaacgcaatcccaatcaggagccgttccatcaggcggttgaagaagtcttcatgagtctcgatccgtttttggcaaaaaatccgaaatacacccagcaaagcctgctggaacgcatcgtcgaacccgaacgcgtcgtcatgttccgcgtaacctggcaggacgataaagggcaagtccaagtcaaccggggctaccgcgtgcaaatgagttccgccatcggtccttacaaaggcggcttgcgcttccatccgaccgtcgatttgggcgtattgaaattcctcgcttttgaacaagtgttcaaaaacgccttgaccaccctgcctatgggcggcggcaaaggcggttccgacttcgaccccaaaggcaaatccgatgccgaagtaatgcgcttctgccaagcctttatgaccgaactctaccgccacatcggcgcggacaccgatgttccggccggcgacatcggtgtaggcgggcgcgaaatcggctacctgttcggacaatacaaaaaaatccgcaacgagttttcttccgtcctgaccggcaaaggtttggaatggggcggcagcctcatccgtcccgaagcgaccggctacggctgcgtctatttcgcccaagcgatgctgcaaacccgcaacgatagttttgaaggcaaacgcgtcctgatttccggttccggcaacgtggcgcaatacgccgccgaaaaagccatccaactgggcgcgaaagtgctgaccgtttccgactccaacggcttcgtcctcttccccgacagcggtatgaccgaagcgcaactcgccgccttgatcgaattgaaagaagtccgccgcgaacgcgttgccacctacgccaaagagcaaggtctgcaatactttgaaaaccaaaaaccgtggggcgtcgccgccgaaatcgccctgccctgcgcgacccagaacgaattggacgaagaagccgccaaaaccctgttggcaaacggctgctacgtcgttgccgaaggtgcgaatatgccgtcgactttgggcgcggtcgagcaatttatcaaagccggcatcctctacgccccgggaaaagcctccaatgccggcggcgtagcaacttcaggtttggaaatgagccaaaacgccatccgcctgtcttggactcgtgaagaagtcgaccaacgcctgttcggcatcatgcaaagcatccacgaatcctgtctgaaatacggcaaagtcggcgacacagtaaactacgtcaatggtgcgaacattgccggtttcgtcaaagttgccgatgccatgctggcgcaaggcttctaa

SEQ ID NO: 54610 - DNA, 477 bp, Neisseria meningitidis
atgccgatagaaatcgaacgccgttttttgattggaaacgacaactggcggcaatacgccgacgaaccgctgctgttgaggcagggttatctgtctgttgaaaaagaacgcaccgtccgtgtccgcattgccggaaaacaggcgtggctgacgctgaaaggctatatttcggaaatcagccgcagtgagtttgaatacgaaatcccgcttgccgatgcggaaaagatgatggaaacgatgtgcccgtttaaaatggaaaaatggcgttatccggtcagatggggcggcagcctgtttgaaatcgatgtttttcttggcgataatgcgcctttggtcgtcgcggaaatcgagttgcccgacgagaatgccgattttgaccgtccggactggctgggacgggaaatcactgccgacggtatgtttaccaatgcctatttgagcaggcatccgttctcaagctggaaaaatgccgtctga

SEQ ID NO: 54611 - DNA, 966 bp, Neisseria meningitidis
atgagctacacgcaactgacccaaggcgaacgataccacatccaatacctgtcccgccactgcaccgttaccgaaatcgccaaacagctgaaccgccacaaaagcaccatcagccgcgaaatcagacggcaccgcacccaagggcagcaatacagcgccgaaaaagcccagcggcaaagccggactatcaaacagcgtaagcgacaaccctataagctcgattcgcagctgattcagcacatcgacccccttatccgccgcaaactcagtcccgaacaagtatgcgcctacctgtgcaaacaccaccagatcacgctccaccacagcaccatttaccgctaccttcgccaagacaaaagcaacggcagcacgttgtggcaacatctcagaatatgcagcaaaccctaccgcaaacgctacggcagcacatggaccagaggcaaagtacccaaccgtgtcggcatagaaaaccgacccgctatcgtcgaccagaaatcccgtatcggcgattgggaagccgacaccattgtcggcaaaggacagaaaagcgcattattgaccttggtcgaacgcgttacccgctacaccatcatctgcaaattggatagcctcaaagccgaagacactgcccgggcagctgttagggcattaaaggcacataaagacagggtgcacaccattaccatggataacggcaaagagttctaccaacacaccaaaataaccaaagcattgaaagcggagacttatttttgtcgcccttaccattcttgggagaaagggctgaatgagaacaccaacggactcatccggcaatacttccccaaacaaaccgatttccgtaacatcagtgatcgggagatacgcagggttcaagatgagttgaaccaccgaccaagaaaaacacttggctacgaaacgccaagtgttttattcttgaatctgttccaaccactaatacactag

SEQ ID NO: 54612 - DNA, 672 bp, Neisseria meningitidis
gtgtttcccgacaaatacaagttgagtttgaaagaaaatatttttttggcaaagaaagtattggttgcccaaattcacaacctcagccgttttgagaattgtcagacgaccttgttgcagaccgaacaaattatccatggcaaaaatgtagcctccgcgtcactggaagacatccaaaccatcttgaacctgaaacgtgcctatcaatatgtgatttcgcatatttcaaacggcgaaccggtcgatatttcactccttaaaaaaatcaacaacactgttgccaaggacgattctttggcacccggtgatttccgtaccggttcggtcggcgtaacgctattggacggttcccgtcatgccccgaatccagtgaaggaaattgaagtggcccgcgtgttacaaaatatcggactgcaaagcggttcgacgacggaggcagccgtccgttttatgctttattgtatgcggcagcaggttttttgggacggcaacaaacgaacggcaaccttatttgccaatggtctgatgatggagagaggccgtggcatcttggaaatctccgaaatgcagatgccgcaattcaatgaaaaactgtccgcattctatcgctccggcgacgataccgatatttccaagtttgtgtatcaaaattgtatatcgggcatagactga

SEQ ID NO: 54613 - DNA, 960 bp, Neisseria meningitidis
atgtccaaaaaaaccaaacaagaactcgaaaacaacaaactcagcaaacgcctgcgccacgccgtcggcgacgcgattaacgatttcaatatgatcgagccggacgacaaaatcatggtctgcctctccggcggcaaagacagctatgccctgttagacatcctgcgccagctccaagccagcgcgccgattgatttccaactggttgccgtcaatctcgaccaaaagcagccgggcttccccgaagaagtattgccgacctatctcgaaagcataggcgtgccgtacaaaatcgttgaagaagacacctactccaccgtcaaacgcgtattggacgaaggcaaaacgacttgttcgctgtgcagccgcctgcgccgcggcatcctctaccgcactgcaaaagaattgggctgcaccaaaatcgccttgggacaccaccgcgacgacatcctcgccaccttgtttttaaatatgttttacggcggcaaactcaaagccatgccgcccaagctggtgagcgacaacggcgaacacatcgtcatccgtccgctggcgtatgtaaaagaaaaagacttaatcaaatacgccgaattaaaacaattccccatcatcccgtgcaacctctgcggctcgcaacccaacctgcaacgccaagtcatcggcgatatgctgcgcgattgggacaaacgcttccccggccgcatcgaatcgatgttctccgccctgcaaaacgtcgtcccttcccaccttgccgataccgaactcttcgactttgtcggattggaacgcggtcaaaccctgaaacacggcggcgatttggcgtttgacagcgaaaaaatgcccgaacgtttttcagacggcagcgaagaagacgaaagcgaaatcaaaatcgagccgcaaaaagccgaacgcaaagtcatcaacattctggcgaacaagccgaaaacctgcggcgcgtaa

SEQ ID NO: 54614 - DNA, 657 bp, Neisseria meningitidis
atgaccattaaaattattctgatagacgaccacaccctcttccgcagcggcattaaagcccttttgtcgcgccaacacggttttgaagtcatcggcgaagccgcagacggcctctcgggcatcaaaatgattagtcggctgcaacccgatgtcgtcctgctcgatttggatatgcccggcatgaacggacgcgaagcactctcccaaatcatcagcatcaatccgcagcaggcagtgattatgctgaccgtttccgaagacagcgacgacttgaccgaatgtattcgcatcggcgcgcgcggttacctgctgaaaaacatcaacgctgactttctgctcgaaagcatacgcaaagccgccgaaggcgataatgtattctcgcccgagatgaccgccaaactcgttaaaagcctgatttctccccagtccacacaagggacgcaggcactctcctcacttacccctcgtgaactggaaatcttgggctatctcgccgcaggacacagcaacaaaatcatcgcccgccacctcgatcttgccgaatccaccgtcaaagtccacgttcaaaacctgctccgcaaactcaacctcagcagccgggtgcaggccgccgtttacgccatccggcacaacgtcccccaacctgtgccggaataa

SEQ ID NO: 54615 - DNA, 384 bp, Neisseria meningitidis
atgatgacggaaccccatggttacccatcaaataatttacctgttaaaatcataaatgatattatttatgcaacccagttagttgaagatttggttttaggaaaaataaaaattgttgattttttaaaatcatataacaatttttattattggcttggttttgatgagttacctcaatctgagaaaataaaatttctaaactatctcaatatattaagtattcataaggaaatacaagataaaactgtgaatagggtttataccgattgttttgatattgataaattacattcgcttggtagaattacaactaatgaatgtattaatggtataaaaaaaatctatcaaaaaaacaaattagaatttgacaatatactcaaataa

SEQ ID NO: 54616 - DNA, 351 bp, Neisseria meningitidis
atgtcagacggacaaaatattccggcaaaaatgatgtcgttgcagctgaaagacatgaatctgctgtacagctcctatatgccgtttttggaacacggcggtctgtttgtgcagaccaacgacgtattttccatcggggacgatattctgcttgccgtagaaatcctcaacttccccaaactgttcctgccgaccaaagtcgcctggatcaatcctgcgcgtacttcctccaaacccaaaggggtggggctggcattcacaaaacacgaaaactgcctgaaagtcaaagaccagatcgaagtcgaactgggcaacacaatcggcggcagcagacctacgtttaccatgtaa

SEQ ID NO: 54617 - DNA, 291 bp, Neisseria meningitidis
atgaacatccaacttcaaggtcacatcgtcggcgttaaaaaattcaacggacaaatcgaaggcaagagcttcgactattgccgcctgattgtcgccacacccttagacagctcccaaggcaacgcattgggcagctctactactgaatacgatttcggcggctctgccaatttcgagcagttccgaaacgcccaatttccgatcgaagcaaacctgaacgtagaaatcgttactacgggcaaaacccaaaaactgaaagtcatcggttttcaactcgtgaagaaaggctga

SEQ ID NO: 54618 - DNA, 615 bp, Neisseria meningitidis
atgaggataaccgttataatcacaactttacagtctgcacagagaaaaccgatgccttggaatctccccatcttcctcacatggttgagggtcttgctcattcctgtcatgacagcccttttttacctgccttttccgtggttcgcggaggaaacgattaatctcaccgccgccgtcatttttgccgttgccgccttaaccgactggtttgacggatttttggcaagactgtggaaacagacttccgatttcggcgccttcctcgatcccgtcgccgacaagctgatggttgccgtatcgctacttttactggtcaaactcgaccggacctatgttttgtttgccatgatcattatcggcagggaaattaccatttccgcattgcgcgaatggatggcgcaaatgggcaaaaggaacagcgttgccgtcgccaccgtcggtaagtttaaaaccgccgcgcaaatgctggcaattttcctgctgctgctgaatattcccgatttttacggatttaatcttgttgttatcggcaatgtattgatgtttatcgcatctttgctgacagtctggtcgatgctgtattatctgaaaatggcgtggaaagaaatcgcctga

SEQ ID NO: 54619 - DNA, 807 bp, Neisseria meningitidis
atgtggcattgggacattatcttaatcctgcttgccgtaggcagtgcggcaggttttattgccggcctgttcggcgtaggcggcggcacgctgattgtccctgtcgttttatgggtgcttgatttgcagggtttggcacaacatccttacgcgcaacacctcgccgtcggcacatccttcgccgtcatggtcttcaccgccttttccagtatgctggggcagcacaaaaaacaggcggtcgactggaaaaccgtatttacgatgatgccgggtatggtattcggcgtattcgctggcgcactctccgcaaaatatatcccagcgttcgggcttcaaattttcttcatcctgtttttaaccgccgtcgcattcaaaacactgcataccgaccctcagacggcatcccgcccgctgcccggactgcccggactgactgcggtttccacactgttcggcacaatgtcgagctgggtcggcataggcggcggttcactttccgtccccttcttaatccactgcggcttccccgcccataaagccatcggcacatcatccggccttgcctggccgattgcactctccggcgcaatatcgtatctgctcaacggcctgaatattgcaggattgcccgaagggtcactgggcttcctttacctgcccgccgtcgccgtcctcagcgcggcaaccattgcctttgccccgctcggtgtcaaaaccgcccacaaactttcttctgccaaactcaaaaaatccttcggcattatgttgcttttgattgccggaaaaatgctgtacaacctgctttaa

SEQ ID NO: 54620 - DNA, 966 bp, Neisseria meningitidis
gtgaaaccgcgtttttattgggcagcctgcgccgtcctgctgaccgcctgttcgcccgaacctgccgccgaaaaaactgtatccgccgcatccgcatctgccgccacactgaccgtgccgaccgcgcggggcgatgccgttgtgccgaagaatcccgaacgcgtcgccgtgtacgactgggcggcgttggatacgctgaccgaattgggcgtgaatgtgggcgcaaccaccgcgccggtgcgcgtggattatttgcagcctgcatttgacaaggcggcaacggtggggacgctgttcgagcccgattacgaagccctgcaccgctacaatcctcagcttgtcattaccggcgggccgggcgcggaagcgtatgaacagttggcgaaaaacgcgaccaccatagatctgacggtggacaacggcaatatccgcaccagcggcgaaaagcagatggagaccttggcgcggattttcggcaaggaagcgcgcgcggcggaattgaaggcgcagattgacgcgctgttcgcccaaacgcgcgaagccgccaaaggcaaaggacgcgggctggtgctgtcggttacgggcaacaaggtgtccgccttcggcacgcagtcgcggttggcaagttggatacacggcgacatcggcctaccgcctgtagacgaatctttacgcaacgaggggcacgggcagcctgtttccttcgaatacatcaaagagaaaaaccccgattggattttcatcatcgaccgtaccgccgccatcgggcaggaagggccggcggctgtcgaagtattggataacgcgctggtacgcggcacgaacgcttggaagcgcaagcaaatcatcgtcatgcctgccgcgaactacattgtcgcgggcggctcgcggcagttgattcaggcggcggagcagttgaaggcggcgtttgaaaaggcagaacccgttgcggcggggaaagagtag

SEQ ID NO: 54621 - DNA, 477 bp, Neisseria meningitidis
atggaacacctatttgggaaatggctgcccgacttgcccgccgccgtttcagacggcatcgacctgccgatgagccggttattgaaagcccggtcgctgaccgccgcattgcgcgccttgccgcatacattttcggtggaactgctgaaactgggcgaattggagacggaatgcggagggaggctggtgcgcgaagttttgttgaagctggacggtatccctgttgtcgcggcaaggagcgagtgccggataggttcggcgttttggcaaaacattttggactgcggcacgcgccctttgggcgagcgtctgtttcaagccgatttggaaggggcgcgttcggcgtttgagtttgccgtttccggcgaaggatgcggacggtactttgccgcgcggcgttctcggttttcccgtcacggcgaggaaatgctgctgaccgagtattttctgcccgaactgaaacgctttatcggataa

SEQ ID NO: 54622 - DNA, 468 bp, Neisseria meningitidis
atgactgaactgcaacatcccgtcctcgtcgtcgatgacgaaaccgacattctcgacctgatggaaatgaccctgatgaaaatgggcttgcgcgtccataccgcgtcaggcgttgccgaagccaaaaacaagctcgacagccaacgctattcgctcgtcctgaccgatatgcgtatgccggacggctcggggctagaagtcgtccaacacatcaacagccgcctgctcgatacgccggttgccgtcatcaccgccttcggcaatgccgatcaggcacaggaagccctgcgttgcggcgcgttcgaccccgataccatgcagatacaggactatctcgaccaaatcgaacgcgacatcatcgaacaaaccctcaaacaaaccgaaggcaaccgcacgcaggccgacaaacgcttgggcatcagcttccgttccatgcgctaccgtatggaacgcctcaacatcggctga

SEQ ID NO: 54623 - DNA, 1248 bp, Neisseria meningitidis
gtgaaagaaaatttttccgatgaggcttgggcatcgtttgtcgaacgtttcgcatatctcaaagtcgatgttacgcagccggacgattttgccgctttgggcgatttggtcaaagcgcgcaaagaaaccgacaatgtcgtcatctatctttccaccgcgccgaaattcttcgcgcaaacatgtgaaaaccttgccaaaatcggtttgaacgccgacaacgtgcgtgtggttttggaaaaaccgttgggtacggatttggcttcttcccagcaaatcaataccgatgtcgcgcgttatttcaaagaagggcaaatttaccgcatcgaccactaccttggcaaagaaagcctgcaaaacctgcttgcgctgcgttttgccaatgtaatgttcgagccgctgtggaacaataaatacatcgaaagcgtgcagttgaccatcgccgagcagttgggcgtggaagaacgcggcgagttttacgacattaccggcgcgttgcgcgatatggtgcaaaatcacttgatgcaaatgctgtgcatgactgcgatggaagcccccgccagcttggatgccgacgcggtgcgcgatgaaaaagtcaaagtcatcaagtcattgaagccgctgaccgtcgaatctgtcaatgaaaatgtcgtgcgcggacaatataccgccgccaaaggcatgaacggctatcttgaagaaatcaacgttccgcaagacagctttaccgaaacctacgtcgccattaaagccgaaatcgaaaacgaacgctggaagggcgttcccttctacctgcgtaccggcaagcgcatggcgggcaaagtggcggaaatcgttttgaacttcaaagatttgaacagccatatttttgaaggcagccgcaccgcgcccaaccggctcgttatcgagttgcaaccatatgaatccgtgcgcctctatacgcagatgaaaaccccgggggcaggaaataaggtcgaaaccgtgccgctggcaaccgatttgggcaaagcattggaaagccgccgcgcggaagcttacgagcgcctgctgctggatgtgattaacggcaaactcgctttattcaaccgccgcgacgaactcgaagccgcgtgggaatatgtgatgccgattttggaaaactggacaaataacaccacgccgccgcacggctacggcgcacactcgtgggggcctgaagccgcgcgcgaactattggcgcgcgacggacacaagtggcacgaagagcagtaa

SEQ ID NO: 54624 - DNA, 810 bp, Neisseria meningitidis
atgcccgatttttcgatgtccaatttggccgttgccttttccatcacattggctgccggtttgtttaccgtattaggcagtggcttggtgatgttttccaaaacgcccaatccgcgtgtgttgtcgtttggtttggcgtttgccggcggtgcgatggtatatgtttccctgacggagattttcagtaagtccagcgaggcgttcgctgaaatttatgataaagaccacgcgtttgcggcggcgaccatggcatttttggccgggatgggcggcattgcgctgattgaccgtctggtgccgaacccgcatgaaactttagacgcgcaagacccgtcgtttcaagaaagcaaacgccgccatatcgcgcgagtcggcatgatggcggcgtttgcgattactgcgcacaatttccccgaaggcttggcgacgttttttgccacattggaaaatccagcagtcgggatgcctttggccttggcgattgccatccataatattccggagggcatttccatcgccgcgccggtttattttgccacccgcagccgtaagaaaacggtgtgggcgtgtctgctatccggcttggccgagccgttgggggcggctttgggctatttggttttgcagccgtttttgtcgcctgccgtgtttggttcggtattcggcgtgatagccggtgtgatggtgtttttggcgttggacgagctgctgccggctgccaaacgctattcagacggccatgaaaccgtttacggcctgacaatgggcatggcggtgattgccgtcagcctggtattgttccatttttaa

SEQ ID NO: 54625 - DNA, 285 bp, Neisseria meningitidis
ttgaaattagctctcaaacgttcaggcaaatataacgtttacgacccccttgccctagatctagatggcgacagtatagaaaccgttgccaccaaaggccttgcaggtgcattgttcgaccaccgcagccaaggtatccgcaccgccacgggctggattgctgcatatgacggttttcctgtgcgcaaattaaacagtaacgggggcattattagcacgacagataccatattccaatctttgcatacatggcttgatcatcaaccaaatgatacatgccattga

SEQ ID NO: 54626 - DNA, 1509 bp, Neisseria meningitidis
atgaccaccacccccgcaaacatcctcgcctccgtcgatttgggttccaacagtttccgcctccagatttgcgaaaacaacaacggacaattaaaagtcatcgattcgttcaaacagatggtgcgcttcgccgccggtctggacgaacagaaaaacctgagtgccgcttcccaagaacaggctttggactgtctggcaaaattcggcgaacgcctgcgcggcttccgccctgaacaggtacgcgccgtggcaaccaatacattccgcgtcgccaaaaacatcgcagatttccttcccaaggccgaagcggcactgggtttccccatcgaaatcatcgccgggcgcgaagaggcgcggctgatttataccggcgtgatccacaccctccccccgggcggcggcaaaatgctggttatcgacatcggcggcggttcgacagaatttgtcatcggctcgacgctgaatcccgacattaccgaaagcctgcccttgggctgcgtaacctacagcctgcgcttcttccaaaacaaaatcaccgccaaagacttccaatctgccatttccgccgcccgcaacgaaatccagcgcatcagcaaaaatatgaggcgcgaaggttgggatttcgccgtcggcacatcgggttcggcaaaatccatccgcgacgtgcttgccgccgaaatgccccaagaggcggacattacctacaaaggtatgcgcgcccttgccgaacgcatcatcgaagccggttcggtcaaaaaagccaaatttgaaaacctgaaaccggaacgcatcgaagtttttgccggcggacttgccgtgatgatggcggcgtttgaggaaatgaaactcgacagtatgaccgtaaccgaagccgccctgcgcgacggcgtgttttacgatttgatcgggcgcggtttaaacgaagatatgcgcggacaaacggttgccgagttccaacaccgctaccacgtcagcctcaatcaggcgaaacgcaccgccgagaccgcgcaaacctttatggacagcctctgccacgctaaaaacgttacagttcaagagcttgccttatggcaacagtatctcggacgcgccgccgcgctgcacgaaatcggtttggacatcgcccacaccggctatcacaagcattccgcctacatcctcgaaaacgccgatatgccgggtttctcacgcaaagaacagaccatacttgcccaactggtcatcggtcatcgcggcgatatgaaaaaaatgagcggcatcatcggcaccaacgaaatgttgtggtatgccgttttgtccctgcgccttgccgcactgttctgccgttcgcgccaagacctgtctttcccgaaaaatatgcagttgcgcacggatacggaaagctgcggcttcatcctgcgtattgacagggaatggctggaacgccatcccctgattgccgacgcattggaatatgaaagcgtccaatggcaaaaaatcaatatgccgtttaaagtcgaggccgtctga

SEQ ID NO: 54627 - DNA, 270 bp, Neisseria meningitidis
atgatgacggaatcccatggttacctatcaaataatttacctgttaaaatcataaatgatattatttatgcaacccagttagtcgaagatttggttttaggaaaaataaaaattgttgattttttaaaatcatataacaatttttattgttggcttggttttgatgagttgcctcaatctgagaaaataaaattcctaagctatcttaatatattaagtattcataaagaaatacaagatgaaactgtgaatagggtttataccgattga

SEQ ID NO: 54628 - DNA, 843 bp, Neisseria meningitidis
atgttagtctgcaacccctacgaagtcgtcatccacggcacaacgagttccggcaagattttccgtcccagcgactgggcggaacgcctgtgcggcattctgtcctcgttcaccaaagaccacaggctttcctattcgaaatgggtgcgccccatactggtggacaacatccgctgcgtcgccgtcgataaaaaactggaaaccgacaatccgcagatgttccgcttcctgatggactttgccgccgacaacgacctgcgcgtcatcgactgcaaagccctgctcgaagaacgcgaacagggcggacaaaacgaccctgccgacgagcgcgtcctgctggcacaggcaatcgaagaaaaacacgccgccgagaaagcacaggaacagaccgcctcgggcgcatcctacgttttgcgcgaaatcggcgcggacgacaccgccaccgcctttgcagccttgagcgttttgcgttccgccctgaccgacatcaaccgctttaccgaacagatcaacaaagtccaacgcccccaaggctaccgcctgctgggtatttttgaagaaggcaaacacaatgccgtcgccgtctgcggcttccgcgaagcctgcaccctcgccagcggccgccacatccacatcgatgacatcgttaccctgccgcaaagccgccgcaaaggctacgcctcgcgccttttggaagaagtccgcaaaatcggcgcggaaacaggggtaaccaaaatccacctcaacgtccacgtcaaccacgaccgtgccgacgcgcaccgcctgtatttcaaaaacggttttgaaatctgcgcataccacttccgttgcgaccccaaatga

SEQ ID NO: 54629 - DNA, 279 bp, Neisseria meningitidis; identical to SEQ ID NO: 39585

SEQ ID NO: 54630 - DNA, 690 bp, Neisseria meningitidis
atgacctccctgatccacactctttctgacggcatggaactgactatagaaatcaagcgccgtgccaagaaaaacctgattatccgccctatcggcacacataccgtccgcatcagcgtcccaccctgcttctccgtctccgctctaaaccgctggctgtatgaaaacgaagccgtcctgcggcgaacactggcgaaaacaccgccgcaaactgccgaaaaccggctgcccgaatccatcctcttccacggcagacaacttgccctcaccgcccatcaagacacgcaaatcctgctgatgccgtctgaaatccgcgttcccgaaggcgcacccgaaaaacagcttgcgctgctgcaggactttttggaacggcaggcgcacagttacctgattccccgcctcgaacgccacgcccgcaccacacaactgttccccgcctcctcctcgctgacctctgccaaaaccttctggggcgtgtgccgcaaaaccacaggcatacgcctcaaccggcggctggtcggcgcaccggaatacgttgccgattatgtctgcatacacgaactctgccacctcgcccatcccgaccacagccccgccttttgggaactgacccgccgcttcgccccctacacgcccgaagcgaaacagtggctcaaaatccacggcagggaacttttcgccttaggctga

SEQ ID NO: 54631 - DNA, 1458 bp, Neisseria meningitidis
atgcacaaaatcctgcccatcgcccacgtcctctcccgactgggtatgctgttttcctttatcctgctgatacccgccgccctctcctacgccttttcggacggtgcgtacaccgccttcgccaccaccgcgaccgttaccctttccggctcgtacatcgtccggctcgccaccctccggttcaggcgcgaactgcgcccgcgcgacggcttcaccctcgtcctgatgttgtggctggcgtttgccgctatggcggcgatgccgatgtacctgtatttcccgaatatgggctttaccgacgcattttttgaatcgatgtcgggactgaccaccaccggcgcgaccgtcatcccccacgtcgacgggctcgccccctccgtcaacttttggcggcatatgctcaactggctgggtgggatgggcatcatcgtccttgccgtcgccatcctgcctatgctcggcgtaggcggcacgcagttattcaaagccgaaatccccggcattgacaaagaaagcaaaatgtcgccgcgcatttcccaagtggcgaaaaaactctggttcggctacaccctgatcaccatcctcgcggcagcctgcctgcattttgccgggatgagctggttcgatgccgtctgtcacgcaatggcgaccctctcgctgggcggattttccacccacgatgccagcatagcttattacaactcccccctcatcgaggcggtcatcatcgttttcaccattgtcggcggcatcaattttgccagccatttcgccgccctcaacagccgcagcctcaaaacctattggaaagacgaagaatgccggacgatgctgctgctgctctccggcagcatccttaccgccgccctgtacctgtggcacaccggctattacgccggttttaccgaatccctgcgctacaccgccttcaacttcgtctccatcggactggcaaacgggctggccaacaccgacttcgcacaatggccgctcctgatttccctgtggatgtttttcctcgccaacatcctcgccaactccggctcgaccggcggcggcatcaaaaccatacgcgccctcgtcctgttcaaattcagcctgcgcgaaatgatggtgctgctgcaccccaaagccgtccgcaccgtcaaaatcagcggcaaagccatacccgaccgcctcgcgctgaccgttatgtccttcatcttcatctactttatgaccgtcgtcctcttcagcttcctgctgatggcgagcggtatggaatttaccaccgccttcaccgccgtcatcgcctgcatcaccaacgccggccccggcctgggcgaagtcgggcccgccggcaattacgccggtttggacgtgatgcagaaatggatctgcgttaccgccatgctcttgggcaggctggaaatcttcaccgtcttcatcctcttcacccccgcctactggaagaaataa

SEQ ID NO: 54632 - DNA, 1200 bp, Neisseria meningitidis
atgtccgaccaactcattcttgttctgaactgcggcagttcatcgctcaaaggtgccgttatcgaccgcaaaagcggcagcgtcgtcctaagctgcctcggcgaacgcctgaccacgcccgaagccgtcattacgttcagcaaagacggcaacaaacgccaagttcccctgagcggccgcaactgccatgccggcgcggtgggtatgctgctgaacgaactggaaaaacacggactgcacgaccgcatcaaagccgtcggccaccgcatcgcccacggcggcgaaaaatacagcgagtctgttttgatcgaccaggccgtaatggacgaactcaatgcctgcattccgcttgcgccgctgcacaaccccgccaacatcagcggcatccttgccgcacaggaacatttccccggtctgcccaatgtcggcgtgatggatacttcgttccaccaaaccatgccggagcgtgcctacacttatgccgtgccgcgcgagttgcgtaaaaaatacgctttccgccgctacggtttccacggcaccagtatgcgttacgttgcccctgaagccgcacgcatcttgggcaaacctctggaagacatccgcatgattattgcccacttaggcaacggcgcatccattaccgccatcaaaaacggcaaatccgtcgataccagtatgggtttcacgccgatcgaaggtttggtaatgggtacacgttgcggcgacatcgatccgggcgtatacagctatctgacttcccacgccgggatggatgttgcccaagtggatgaaatgctgaacaaaaaatcaggtttgctcggtatttccgaactttccaacgactgccgcaccctcgaaatcgccgccgacgaaggccacgaaggcgcgcgcctcgccctcgaagtcatgacctaccgcctcgccaaatacatcgcttcgatggctgtgggctgcggcggcgttgacgcactcgtgttcaccggcggtatcggcgaaaactcgcgtaatatccgtgccaaaaccgtttcctatcttgatttcttgggtctgcacatcgacaccaaagccaatatggaaaaacgctacggcaattcgggcattatcagcccgaccgattcttctccggctgttttggttgtcccgaccaatgaagaactgatgattgcctgcgacactgccgaacttgccggcatcttgtag

SEQ ID NO: 54633 - DNA, 141 bp, Neisseria meningitidis
atggacaccctattaaaaatcatcatcgcgctgtcattttccggcgctgaggcattggtggtatggcttttcatcacggccgccgatgccgtattacgccgcttccagaaaccgagtcattacaggagagtaaaaaaatga

SEQ ID NO: 54634 - DNA, 1098 bp, Neisseria meningitidis
ttgcgatataattcaaaccatttgccaaaaccgtcaaacactatgccgtctgaaacacgcctgccgaactttatccgcgtcttgatatttgccctgggtttcatcttcctgaacgcctgttcggaacaaaccgcgcaaaccgttaccctgcaaggcgaaacgatgggcacgacctataccgtcaaatacctttcaaataatcgggacaaactcccctcacctgccgaaatacaaaagcgcatcgatgacgcgcttaaagaagtcaaccggcagatgtccacctatcagcccgactccgaaatcagccggttcaaccaacacacagccggcaagcccctccgcatttcaagcgacttcgcacacgttactgccgaagccgtccgcctaaaccgcctgacacacggcgcgctggacgtaaccgtcggccctttggtcaacctttggggattcggccccgacaaatccgttacccgtgaaccgtcgccggaacaaatcaaacaagcagcatcttatacgggcatagacaaaatcattttaaaacaaggcaaagattacgcttccttgagcaaaacccaccccaaagcctatttggatttatcttcgattgccaaaggcttcggcgttgataaagttgcgggcgaactggaaaaatacggcattcaaaattatctggtcgaaatcggcggcgagttgcacggcaaaggcaaaaacgtgcgcggcgaaccgtggcgcatcggtatcgagcaacccaacatcgtccaaggcggcaatacgcagattatcgtcccgctgaacaaccgttcgcttgccacttccggcgattaccgtattttccacgtcgataaaagcggcaaacgcctctcccatatcattaatccgaacaacaaacgacccatcagccacaacctcgcctccatcagcgtggtcgcagacagtgcgatgacggcggacggcttgtccacaggattattcgtattgggcgaaaccgaagccttaaagctggcagagcgcgaaaaactcgctgttttcctgattgtcagagataaaggcggctaccgcaccgccatgtcttccgaatttgaaaaactgctccgctaa

SEQ ID NO: 54635 - DNA, 1101 bp, Neisseria meningitidis
atgattactctgaaaaccaccccatttcatcaagcccatcaagatgcaggcgcgaagccggtagattttgccggctgggagctgcccatccattatggttcgcaaatcgccgaacacgaagccgtgcgcaccgacgccggtatgtttgacgtatcccatatgcttgttaccgacgtagcaggcgcaaatgccaaagcctttttccgcaaattgattgccaacgatgtcgccaagctcgcttttgtcggcaaagccctttattccgctttgctcaacgacaacggcggcgtgattgacgacttaatcgtttaccgcaccaacgaagccgaaacccaataccgcatcgtgtccaacggagcgactcgcgaaaaagacacggcgcaattccacaaagtcggacaagagttcggcgttgcctttaatccgcgctacgacctcggcatgctcgccgtacaaggccctaaagccatcgaaaaactcctgaccgtcaaacctgaatgggcggatgtgattcacggcctcaaaccgttccaaggtgcagacttgggcaacgattggtttgtcgcccgcaccggctataccggcgaagacggcgtcgaagtgattctgccgggcactgaagccgtcgcattcttcaaagccctgcaagcagcaggcgtacaaccttgcggtctcggcgcgcgcgacaccctgcgcatggaagccggcatgaacctctacggcaacgatatggacgacgataccagcccgctcgaagcaggcatgggttggaccgttgatttgaaagacgaaagccgcgattttgtcggcaaagctgccttgttggcattgaaagaaaaaggcgttgccgtcaaacaggtcggtttgctgctcggcaaaggcggcatcctgcgcgcgcatatggaagtgttgaccgacaaaggcaaaggcgaaaccaccagcggcgtattctcgcccagcctgaaacaatccatcgccatcgcccgcgtaccgaaagactttgacggcgataccgctaaagtgctgatgcgtggcaaggaagtggacgtgcgcgtattgaagttgccgttcgtgcgtaacggtcaaaaacagtttgattaa

SEQ ID NO: 54636 - DNA, 225 bp, Neisseria meningitidis; identical to SEQ ID NO: 38642

SEQ ID NO: 54637 - DNA, 954 bp, Neisseria meningitidis
atgacacataccgtccacctgcatttagaagaaaccgacaacttggcgttgcagcgtctgtgcggttcttttgacaacaaccttgatttacttgctaaagcactcgatatccacatcagccgccgttttgaacatttcactttcaacggcgcatttgcacacgccggcaaacgcgcactgctcaaactcttggaaacggcgcagacgcgcgacctaaacgacggcgacatcaggcttgccgccgtcgaagcccaaaccgaagatgccggtcatcaagaaaaaaaccatgaccacgcctattatttccgcaccaagcgcggcagcatcggcggcagaacgccacggcagaacggctatatccgcgccctactcaaccacgacatcgtattcggtctcgggccggcaggtacgggcaaaacctatctcgccgtcgccgccgccgtcgatgcgatggaaaaacaccaagtcgaacgcatcattttagtgcggcctgccgtcgaagccggcgagaaactgggttttctgcccggtgacctgacccagaaagtcgatccctaccttcgtccgctttatgatgccctctatgacctgatgggctttgaccgtgtaaccaagctgattgaaaaaggcctgattgaaatcgccccgctcgcctatatgcgcggcaggacgctcaacggcgcatacatcatcctcgacgaagcgcaaaacaccacgcccgaacaaatgaaaatgttcctgacccgcatcggcttcggcgcgaaagccgtcattaccggcgacaccagccaaatcgacctgcccaaaaacatcaaatcgggattaaaagatgcgcgtgagaaactgcacaacgtggaagggctgtatttccacacctttaccggcgaagacgttgtccggcatcctctggtgcaaaaaatcgtcgaagcctacgaatcggcagaacacgactga

SEQ ID NO: 54638 - DNA, 819 bp, Neisseria meningitidis
atggtattatggcagttaacttttgttaataatgctgtttcggggctttcccgcgttgagtccgcccgtaaaggcattgaaggaaaaaatatgaccgcctaccgtatcgcacccagtattttgtcggcagactttgcccgcctcggagaagaggtggaaagcgtcattgcggcaggtgcagatctgatccattttgacgtgatggacaaccattatgtgccgaacctgaccttcggccctatggtttgcgcggcgttgaagccttatgcaagcgtgccgatcgatgtgcatttgatggtcgaacccgttgacgacctgattcagtcgtttgccaaagcaggagcatcgattatcacttttcatcccgaagcgagccgccatatcgaccgcagcttgagcctgattcgtgatatgggctgtcaggcggggctggtgttgaatccggcaacgcccgtatatctgttggaaaacgtattggacaggctggatatggttttgctgatgtcggtcaaccccggattcggcggacaaagcttcatcccgcacacccttgaaaaaatccgccgggtgcgggcgatgctggatcggtacgaagcacaaagcgggcggcacatcgccatcgaagtggacggcggcatcaaaaccgacaatattgccgccgttgcccgagctggtgcggatacctttgttgccggttctgcgattttcggcaaaccagactataaggcggtgattgatgcgatgagggcggaactggaaaaaagcggcaggctgaaccttgcgccaatgattgaaatagaaatgccgtctgaaaattag

SEQ ID NO: 54639 - DNA, 201 bp, Neisseria meningitidis; identical to SEQ ID NO: 38240

SEQ ID NO: 54640 - DNA, 726 bp, Neisseria meningitidis
atggattttctctctcgttggcggcgcatcgcagacgcgcccactatcaggcgttgcgtattatgccacggttcgtccggcgtttcagacggcatctgcgccggctgccgcgacgatttggcggcataccgcaccgacgcggcaaacagctgccccctgtgtttcaggcacatccaaggcggcgcggtgtgcggcggctgtcagaaaaaaccgcccgcattcgaccggatgtgggcttcgctgcattacgaaccgcccgtcagcaacatgatacgtacgctgaaacacttggcagatttgggcatggttcgcccattggcaaacctgatggtacaaaacccgcccgaccggcttgcagacgaatgtttcgatttcgtcctgcccgtaccgctaagcagggagcggctgctgcaacgcgggttcaaccaaagtgaaagcatcgtcgggttgttggcacaacgctacggctggcagatactgccccgacacaccgtattccgacaccaccgcccgccgcaaagcacgctcaaaggcagcgaacggcggcgaaacatcaaaaacgcctttgaaatccgcacaccgataccggaaaactgtaatattctgttaatcgacgatgtctttaccaccggcgcgacgctggacgaactggcaaagacgctgaaaaaatcgggcgcgaaccgcatctgctgctggacgctggcacgcacgccaatgaaaaaataa

SEQ ID NO: 54641 - DNA, 315 bp, Neisseria meningitidis
atgaaacttatctataccgtcatcaaaatcattatcctgctgctcttcctgctgcttgccgtcattaatacggatgccgttaccttctcctacctgcccggacagaaagtcgatttgccgctgattgtcgtattgttcggcgcgtttgtcgtcggcatcgtgttcggaatgtttgccttgttcggacggttgttgtcgttacgtggcgagaacggcaggttgcgtgccgaagtaaagaaaaatgcgcgtttgacggggaaagagctgaccgcaccaccggcgcaaaatgcgcccgaatctgccaaacagccttga

SEQ ID NO: 54642 - DNA, 396 bp, Neisseria meningitidis
atgccgtctgatgtcggaatgcggcttcagacagcattcaaacggaagttgaacatgaaaaaaatattgtattttctgatgtttgttttttctacaagcgtatgggcgggggatgcggaagacaatctgctcagcatccaatccggctatcgtgccttactgcaaaaacaaaacaatctggacggaaaaatcatcgggatgcagtcggatttggaagatgcgcgccggcgtttgcagacggctcaggcagacatcgcccgtttggaagcggaaattcctgcagcaatggcgcaaaaagcccggcaggctgaagagctgaggcaaatcggagtgcgtttggactatgcttggaatgcggtttacggcgcagggggaacgaaagcgtcggggaattga

SEQ ID NO: 54643 - DNA, 1410 bp, Neisseria meningitidis
atgacagcacaaaccctctacgacaaactttggaacagccacgtcgtccgcgaagaagaagacggcaccgtcctgctctacatcgaccgccatttggtgcacgaagttaccagccctcaggcatttgaaggcttgaaaatggcggggcgcaagctgtggcgcatcgacagcgtcgtctccaccgccgaccacaacaccccgaccggcgattgggacaaaggcatccaagacccgatttccaagctgcaagtcgatactttggacaaaaacattaaagagtttggcgcactcgcctattttccgtttatggacaaaggtcagggcatcgtacacgttatgggccccgaacaaggcgcgaccctgcccggtatgaccgtcgtctgcggcgactcgcacacttccacccacggcgcattcggcgcactggcgcacggcatcggcacttccgaagtcgagcacaccatggcgacccaatgtattaccgcgaaaaaatccaaatccatgctgatttccgttgacggcaaattaaaagcgggcgttaccgccaaagacgtggcgctctacatcatcgggcaaatcggcacggcaggcggtacaggctacgccatcgagtttggcggcgaagccatccgcagcctttctatggaaagccgcatgactttatgcaatatggcgattgaggcaggcgcgcgctcaggcatggttgccgtcgaccaaaccaccatcgactacgtaaaagataaacccttcgcacccgaaggcgaagcgtgggacaaagccgtcgagtactggcgtacgctggtgtctgacgaaggtgcggtattcgacaaagaataccgtttcaacgccgaagacatcgaaccgcaagtcacttggggtacctcgcctgaaatggttttagacatcagcagcaaagtgccgaatcctgccgaagaaaccgatccggtcaaacgcagcggtatggaacgcgcccttgaatacatgggcttggaagccggtacgccattaaacgaaatccccgtcgacatcgtattcatcggctcttgcaccaacagccgcatcgaagacttgcgcgaagccgccgccatcgccaaagaccgcaaaaaagccgccaacgtacagcgcgtgttaatcgtccccggctccggtttggttaaagaacaagccgaaaaagaaggcttggacaaaattttcatcgaagccggttttgaatggcgcgaaccgggctgttcgatgtgtctcgccatgaacgccgaccgcctgaccccggggcaacgctgcgcctccacctccaaccgtaactttgaaggccgtcaaggcaacggcggacgtacccacctcgtcagccccgctatggcagcagcagccgccgttaccggccgctttaccgacatccgcatgatggcgtaa

SEQ ID NO: 54644 - DNA, 1041 bp, Neisseria meningitidis
atggatatttcagattttgattttaccctgcccgaaaagctgattgcccagcatccgcccgaagtgcgcggcagcagccgccttttggttgcgttgcccgatatgccgctgcaagaccgggtgttcggcgatttgccggattatgtcgaggcgggcgacgttttggtgttcaacaacaccaaagtcatgaaggcgcggctgtttgggcagaaagacagcggcggcaggatcgaagccctgattgagcgcgtgttggacaaccataccgcactggcgcacatccgttcgtccaagtcccccaagcccggtatggggctggtgtttgaaggcggcatccgtgccgtgatggtcgggcgtgagggcgaactgttctgcctgcgttttgaaggcggtcaaaccgtttacgaacttttggaacagaacggacacctgcccctgccgccttatatcgaacgcgccgccgacgcggacgacgacagccgttatcaaaccgtttatgccaaatatcagggtgcggtcgccgcgccgacggcgggtctgcattttacggaagaacttttgcgccgcctgaaagacaaaggcgcagtaaccgcagaagtaaccctgcacgtcggtgcgggaacgttccagcccgtgcgtgtggaaaaaatcgaagaacacaaaatgcacagcgaatggtttgaagtgccgtctgaaaccgccgccgccgttgaggcggcaaaagcacgggggaacaaagtctgggcggtcggcacgacttccatgcgcgccctcgaatctgccgcgcgtgcgacgggtcgtctgaaagcggggcagggcgacaccgatattttcatcacgccgggctaccgttttaatgttgtcgacaggctggttaccaattttcatttgccgaaatcgacgctgctgatgcttgtcagcgcgttttcgggtatgggtcatatccgcgccgcgtatcgttatgcggtcgaacgcgaataccgtttcttcagctacggcgatgcgatggttttggggcggaacgaaggggtggtacgttag

SEQ ID NO: 54645 - DNA, 549 bp, Neisseria meningitidis
ttgacaggccgtctgaagacgaaacgcggaacatcggatattcaaggaactttaatgaaaaagaacatattggaattttgggtcggactgttcgtcctgattggcgcggcggcggttgcctttctcgctttccgcgtggccggcggtgcggcgttcggcggttcggacaaaacctacgccgtttatgccgatttcggcgacatcggcggtttgaaggtcaatgcccccgtcaaatccgcaggcgtattggtcgggcgcgtcggcgctatcggacttgacccgaaatcctatcaggcgagggtgcgcctcgatttggacggcaagtatcagttcagcagcgacgtttccgcgcaaatcctgacttcgggacttttgggcgagcagtacatcgggctgcagcagggcggcgacacggaaaaccttgctgccggcgacaccatctccgtaaccagttctgcaatggttctggaaaaccttatcggcaaattcatgacgagttttgccgagaaaaatgccgacggcggcaatgcggaaaaagccgccgaataa

SEQ ID NO: 54646 - DNA, 777 bp, Neisseria meningitidis
atgcgcgcagtccccccgccccatatctccatcacaggcctaggttacctcggcctgccgctggcacaaaagttttaccaacacggcagccgcgtcgccgccataaaacgcagcctgacttcggacgacatcaacctgcccatacatctcgacaccttcgacctcggcagcaccgatgcctttcagacggcattgtggcggcaccacgccgacaaacccgtctggttcttcctgctaccgccctcctcgctgacgcattacgccgacaccgtcaaacaatgggcagaacttgcccgggcgtgcaacgtgcaacacctgattttcacaagcagcaccagcgtttacggcgatacagcgcgcgaatgcgacgaaatcgccctacccgatccgcaaaccgagtccgcccgccaaatcctcgccgccgaacaacacctgctcgacagcggcgttccgaacatcgacatcctgcggctgggcgggctttattgcgccgaacgccatcccgtcagccgtctcgttcaaaagcaaaacatcccaggcggcaaccgccccatcaacatcgtccaccataatatcgccgtcgaaagcctgtttcagacggcatttaaccccggcggcaggcggctgaaaaacattatcgaatcgcgccacccgacacgacgcgaattctatacggaagaagccgccaaactcggcttgccggctcctgatttcgcacccgacgacagcatgggcaaaatcatccgtaccgtttgcgataacagcttaagcctgtaa

SEQ ID NO: 54647 - DNA, 294 bp, Neisseria meningitidis; identical to SEQ ID NO: 36355

SEQ ID NO: 54648 - DNA, 606 bp, Neisseria meningitidis
atgattttgctgcatttggattttttgtctgccttactgtatgcggcggtttttctgtttctgatattccgcgcaggaatgttgcaatggttttgggcgagtattatgctgtggctgggcatatcggttttgggggcaaagctgatgcccggcatatggggaatgacccgcgccgcgcccttgttcatcccccatttttacctgactttgggcagcatattttttttcatcgggcattggaaccggaaaacggatggaaacggatggcaggcagaccccgaacatcctctgctcgggctgtttgccgtcagtaatgtatcgatgacgcttgcttttgtcggaatatgtgcgttggtgcattattgcttttcgggaacggttcaagtgtttgtgtttgcggcactgctcaaactttatgcgctgaagccggtttattggttcgtgttgcagtttgtgctgatggcggttgcctatgtccaccgctgcggtatagaccggcagccgccgtcaacgttcggcggctcgcagctgcgactcggcgggttgacggcagcgttgatgcaggtctcggtactggtgctgctgctttcagaaattggaagataa

SEQ ID NO: 54649 - DNA, 975 bp, Neisseria meningitidis; identical to SEQ ID NO: 45618

SEQ ID NO: 54650 - DNA, 735 bp, Neisseria meningitidis; identical to SEQ ID NO: 43353

SEQ ID NO: 54651 - DNA, 435 bp, Neisseria meningitidis; identical to SEQ ID NO: 43698

SEQ ID NO: 54652 - DNA, 1389 bp, Neisseria meningitidis
atgaacactcgcaccgaacacgacaccatgggcaatgtcgaagtcccgtccgaagcctattggggtgcgcagacccagcgcagccgcaacaatttcaaaatcggcggcgaaaccctgccgcagccgctgatttatgctttggcgctggtgaaaaaagccgctgccgccaccaatgtttccctcggcaggattaagcccgaacaggcggatttgattacgcaggcggcggatgatgtgttgaacggcaggcttgacggacagtttcctttagtggtttggcagaccggctccggcacgcagtccaatatgaacatgaacgaagtgctggcgaaccgcgccaacgaaattgcaggtacaggtttggcggcgtatcagcccgtccatcccaacgaccatgtgaaccacgcgcaatcgaccaacgacgcattcccgaccgccatccacgttgccgccgcgattgaaatcaaccgccacctcatccccgccgtaaaagccctgcgcgacacgttggacaaaaaagcccaagctttcgcccctatcgtcaaaatcggccgcacccacttgcaagacgcgacgccgctgactttgggacaggaattttccggctacgtttcccagcttgatcacggtttaggccgtctgaacgatgcgcttaaagacttgtatgaacttgctttgggcggtacggcggtcggcacgggtttgaacagccatcccgaatacgccgaaaaagctgctgctaaactcgccgaactgtctggcttgccgtttgtcagcgcgccgaacaaatttgaagccttaggcggacgcgatgccgccgttgccgcttcgggcgcattgaaaacgctggcggcaagcctgaataaaatcgccaacgacatccgctggctggcaagcggcccgcgttgcggtttgggcgaaatcaaaatccccgaaaacgagccgggttcgtccatcatgccgggcaaagtcaacccgacccaatgcgaagcaatgacgatggtgtgctgccaagtgttcggcaacgacgttaccatcggtatggcgggcgcgtcgggcaatttcgagctgaacgtctatatgcccgttatcgcctacaacctcttgcaatccatccgcctcttgggcgacgcgtgcaacagcttcaacgaacactgcgccgtcggcatcgaacccgtaccggaaaaaatcgactatttcctgcaccattccctgatgctcgttaccgcgttgaaccgcaaaatcggttacgaaaacgccgccaaagtcgccaaaaccgcctacaaaaacaacaaatcgttgcgcgaaaccgccgttgagctgggcttgctgacgggcgaagaatttgacgaactggtcgttcctgccgatatggttcatccgcgctaa

SEQ ID NO: 54653 - DNA, 2559 bp, Neisseria meningitidis
atgcctgcaaacctgtcttcagcactggaaaccttcaaacggcagcgcgatgccgccgaagcgcattatttgaaagccaaccgcgtgtcggtatttttcagggaatatacggcggcagtcgaaaccttactggcggcattgtgggtagaacattttcaaaacagcgcgttatgcctgatggcggtgggcggcttcgggcgcggcgaactgtatccctgttcggatgtggatttggcggttgtctcccctgccccgctttcagacggcattcaggaacagattgcccggtttgttcaaaccctgtgggactgcaaactgatgccgtctgtaaaaagcggcagcgttgatgaactatgtgaaagcgtgcgcaatgatattacgggggacacagcgtttttagaggctaggtttttgtttggcaaccgccaaacggtggataaactggcggaaaaaatgaacgcgcagcgcaatgtggcggcgtttgtcgaggcaaaactggtggagatggaacaccgccacgccaaatcgcaaggttcgggggcagtattggagccgaatatcaaaagctgtccgggcggtctgcgcgacatccacaccctgctttggatagcgaaggcgcaaggcttggcgaccgacctgcccgacctgctcaaacagcggattttgacgcgtgccgaagccggtatgctttcgcacggctaccgccgcctcgcccacatccgcatccatctgcatttaaacgccaatcgcgccgaagaccgcctgctgttcgatttgcagccgcaagtcgccgaaagcatgggttatgaaggcttgaacctccgccgccaaagcgaagaactgatgcgcgtgttttaccgcgcgattaaaaccgtcaaacaactgggcggcatcctcacgcctatgctgcaaagccgcgtttcctccaccccgttgcgcgttaccctgcggattgacgacgactacatccaagtcaacaaccaaatcgccgcgcggcacaccgatatttttttcagacggcccgaacacattttcaaaatcgtcgaaatcatgcagcagcgcaacgacattaccgcgctcgaaccgcaaaccctgcgcgcctggtggggcgcgacgcgcaaaatcaaccgcagcttctaccaaaatcccgaaaaccgccgccgcttcgccggttttttccgcaacggcaacgggctgacccagaccctgcgctttctcaacctctacggcgtgttgggccgctacctgcccgcgtgggaaaaaatcatcggcctgctccaacacgacctgttccacatctatcccgtggacgaccacatcctcaccgtcgtccgcaacgtccgccgccttgccttggatatgcacagccacgagctgccctacgcctctgcactgatgcagtcctttgaaaaacaagacatcctctaccttgccgcctttttccatgacatcgccaaaggacgcggcggcgaccatgccatacaaggcatcgcagacgcgcgccaatttgccgctgaccacttcctgaccggagaagaaagcgacctgctcgcttggctggtcgaaaaccacctgctgatgtctgccgtcgcccaaaaagaagacatccaagaccccgacgtactcgatgctttctgcaaacgcgtccaaacccacgaacgcctcagcgcgctctaccttctgaccatttccgacatacgcggtaccaatcccaagctgtggaacgcatggcgcgccagcctgctggaaagcctcttccatgccgccggacgctaccttacaggcaacggcggcaacccgcacaccctcttcggccgccgccggcaggaagccgccgacttactcacccgcgccgccgtccccgaaaaacagcagaaaaaactatggaacgcgctcggttccgcctacttcgcccgccaccagtcccgcgaaatcctgtggcacgccgccaacctcgtacacgattttgaaacccccatcgtccgcagccgcatcctgccccaaagcgacagcttccaagtgatggtctttatgcccaacggcccgcgcctgttcgcccgcctctgccgcatcttcagccgccacggcttcgacattctcgccgcccgcgccttcatcaccgaacacgactacatcctcgacaccttcatcgtgcaaatcccctcgcagcacgctcccgaagactaccccgacattcaaagcgcgctcgaagccgaactcaacagctttatccacggacacaccgttgccgaaatctccagccatagccgccgcatcagccgccgcagccgctatatgccgatcgcgccaagcatcaccatcacccccgaagaagactaccccgattggtactccgtcgaaatcaccgccgtcaaccgccccttcctgctcgccgatatggcggaagtctttttcgcccacaacgtcagcctgcgctatgccaaaatctccacactggatgaacgcgccgaagacagttttaccgtttttagcctagacctgaaaaacccaaaaatccagtcctcattgaagcagacgctgctggaacaattatcataa

SEQ ID NO: 54654 - DNA, 606 bp, Neisseria meningitidis
atgatgaccctctattccggcattacctgccccttcagccaccgctgccgcttcgttttgtacgaaaaaggtatggattttgaaatcaaagacgtcgatatttacaacaaacccgaagacctcgccgtcatgaacccgtacaaccaggtccccgtactggtcgagcgcgatttggtgctgcacgagtccaacatcatcaacgaatacatcgacgaacgcttcccccatccgcagcttatgcccggcgatcccgttatgcgcggccggggccggctggtgctgtaccgtatggaaaaagaattgttcaaccacgtccaagttttggaaaaccccgccgccaccaacaaggaacaggcaaaagcgcgcgaagccatcggcaacggtctgaccatgcttgccccttcgttcagcaaaagcaaatacatcctcggcgaagatttttctatgattgatgtcgcccttgctccgctgctgtggcggctcgaccactacgatgtcaaactgggcaaaagtgccgcgccgctgctcaaatacgccgagcgcatcttccagcgcgaagcctttatcgaagcactgacacccgccgaaaaagccatgcgcaaataa

SEQ ID NO: 54655 - DNA, 1155 bp, Neisseria meningitidis
atggatacgcacgcggacgaaacaaaacttcaaaacacgcaagccaaacgcaaacgccgcctgacggcattgacgctgctgttcgcgcttgccgccgcagccgccgggtcggcgttttttttatggtggcagcacgaagaggaaacggaagacgcttatgttgccggacgcgtggttcaggttacgccgcaaaagggcggtacggtgcggaaggttttgcacgacgatacggatgccgtgaaaaaaggcgacgtgctggcggtattggacgacgataatgatgtgctggcttacgagcgggcaaaaaacgagctgattcaggcggtgcggcaaaaccgccggcaaaatgccgccacttcgcaggcgggggcgcaggttgccttgcgccgggcggatttggcgcgcgcgcaggatgatttgcgccgccggtctgctttggcggaatcgggcgcggtgtccgccgaagagctggcacatgcccgtgcggcagtgtctcaggctcaggcggcagttaaggcggctttggcggaagaatcttcggcgcgtgcggctttgggcggtcaggtttctttgcgcgaacagccggcggttcagacggcaatcggcaggttgaaagatgcgtggttgaaccttcagcggacgcaaatccgcgcgccggcggacggtcaggtggcgaagcgttcggtgcaggtcgggcagcaggtggcggcaggcgcgccgctaatggcggtggtgccgctgtcggatgtgtgggtggatgctaattttaaagagacgcagttgcggcatatgaaaatcggacagcctgccgagctggtgtccgatttgtacggcaaacaaattgtttatcgcggcagggtggcaggtttttcggcaggtacgggcagcgcgttttcgctgattccggcgcaaaacgcaacgggcaactggattaaagtggtgcagcgcgtccccgtccgtatcgtgctgaaccgcgaagatgtggacaggcatccgttgcgtatcggtttgtcgatgacggttaaagtggatacttccgccgcaggcgcgcctgtttcaaaaacgccgggtgcggcattgccggaaatggaaagtaccgactggtcggaagtcgatcggacggtcgatgaaatcctcgggcaatccgcgccctga

SEQ ID NO: 54656 - DNA, 618 bp, Neisseria meningitidis; identical to SEQ ID NO: 44520

SEQ ID NO: 54657 - DNA, 552 bp, Neisseria meningitidis
ttgagcggcatcaacataaacctcaaaaacggcgattccctgctgatacgcggcccgagcggttgcggcaaaacctcgctgttgcgcgcgctggcggggctttggccgttcggcagcagcggcaaagtcagccgtccgccgcatcaagacatcctctccctgccgcaacgcccgtacacggcacagggcagcctgcgcgacgcggtttgttaccccgacattgacaagcagcatcccgagttagccgaagccatgaacacctgccgcttgggttatctggttgataaattagataaaaccgacgactggcaacacaaactctccccgggcgaactgcaacgcgtcgccttcgtccgcgccctgctttccaagcccaaaatcgtcctgctcgacgaagccaccgccgctttggacgaaccgaccgaggccctgctctaccgcgcactgaaacaaaaactgcccgacagcatcatcatcagcatcggccaccgcagcacgctcaacgcgttccacaatatgcacctcgatgtcggcaacgctgcctgcggctga

SEQ ID NO: 54658 - DNA, 762 bp, Neisseria meningitidis
atgaccgaattcgtcgtattgattccggcgcggctggattcgtcgcgcctgcccggaaaagccttggcggacatccacggcaaaccgatggtcgtgcgcgttgccgaacaggcggcaaaaagtaaagctgcgcgcgtcgttgttgccaccgaccatcccgatattcagacggtctgtcaggcgcacggcgtcgaagtcgtcatgacttcaaaccggcacgaaagcggcacgacgcgccttgctgaagctgccgccgcgctgaagctgccgcaacatctggtcgttgtcaacgtacagggcgacgagccgctgattgcccccgaactcatcgaccgcaccgccgaagtactcgtcgaaaacaacgtccaaatggcgaccgccgcccacgaattgcacgatttcgacgaattgatgaatcccaatgccgtcaaagtcgtcctcgacaaaaaccgcaacgccatctacttcagccgcgccccgattccctatctgcgcgatgcaatgcgtgccggaaaacgcgaaatgccgtttgaaaccgccgtcctgcgccatatcggcatctacgcctaccgcgtcggcttcctgcaacgctacaccgaaatgagcgtttcgccgctggaaaccattgaatcgctggagcaactgcgcgtcctgtggcacggctacccgattgccgtcgaaaccgccaaagaagctcctgccgccggcgtagatacgcaggaggatttggacaggattcgcgctgtatttcagactatataa

SEQ ID NO: 54659 - DNA, 792 bp, Neisseria meningitidis
ttgcaccgtttgcagaaagtcgtgcgccatatcgcgcaaaccgaaattatgccgcgttttttgaatacgccgtctcaccgcaaggaagatggttcgatgttgagcgaggcggacattgccgcgcagacggcttttgccgccgcgttgccgcttctgatcgattgcccgatgttgggcgaggaaatgtcgcgacaggaacagtcggctctgtgggaacaatattcgggggaaaaggggctgtggattgtcgatccgatagacgggacgaacaattttgtcaacgggctgccgcattttgccgtgtcggtggcgtttgtccgcaacgggcgcgccgaattgggcgtaatctacaatccggtcagcggcgaatgtttttatgccgaacgggggcagggtgcgtttcttaatgggacacgcctgcctttgcgcctcgtggataagaagttgaatgaggcaatcgcgggtgtggaaatcaaatatctgcgttcgggcaaactgtccagccgcatgagtacgctcgcgcctttcgggacgatacgcagtatgggcagcagtacgttggattggtgttatctggcgtgcgggcgttatgatgtttatgtccacggcgggcagaagctgtgggattatgccgccggtgcgctgatttttgaggaggcgggcggcaggctgacgactttggaaggcgacgggttttggagtggtgaacacgtgttcaaacgctcggtcgttgccgcgctcgaaccgaagctgtttgaacgctgggtcgggtggatacgggaaaaccaatag

SEQ ID NO: 54660 - DNA, 675 bp, Neisseria meningitidis
atgcctgctgctttgattaaggattttctgctgactcagggtttgaagctgccgcttgacgaggttcggacggcgtatctgacggcgcagacggtaatggatatggggacgacttcgattgagcgttcggttttgtggcttgagcatgaggattggaggcttgccgattatttggagcaaaacagcgggaatgaggaaggtctgaaacggcttttcatggctttggattcggtgttttcacgctgtaaaggcgtgcgcgccgcagccgtttatgccctgatgccgtctgaaaatgccgcctttcggctggtttgcctgtcccggcagggcgaggttttggaaaacctgtgggatttggatgaagcggcaggcaaggtttcgctggcttgccgttcggcgcaaagcggctggatgaatgttgcctcggatgtacgccgttggttggatttgggagagctttcgggagaacgcaatcatgcttcggcggcgcaaatttccattccggtctgcacggaaagtggcggtgtgttgggcgtggttcatgtggaatttgaatgcgcagagtgtgcgggtacggcagcacaggtggaatgggtggctcttgccttggctttgtccgaacctttgaagcagcttttgggcatcactgccgcagaaggagatgaaaatgtctga

SEQ ID NO: 54661 - DNA, 702 bp, Neisseria meningitidis
ttgaatccgacctacgacctgtcccatcttaataaaataccccattccacccggagaaccgaaatgtccaaactgaccccccgcgaaattttgaccgccggcgcagttgtgccggtaatggcgattgacgacttaagcaccgccatcgatttgtcccacgcccttgtcgaaggcggcatccctaccctcgaaatcaccctgcgcacccctgtcggcctcgatgccatccgcctgattgccaaagaagtgcccaacgccatcgtcggcgcaggtacggtaaccaatcccgaacagcttaaagccgtcgaagacgcaggcgcggttttcgccatcagcccggggctgcatgaatccctcgccaaagccggccgcaacagcggcatccccctgattcccggtgttgccaccccgggcgaaatccaactggctttggaacacggcatcgacaccctcaaactcttccctgccgaagtcgttggcggcaaagccatgctcaaagccctgtacggcccttacgccgatgttcgcttctgcccgacaggcggcatcagcctcgccaccgcgcccgattacttggcactgcccaacgtcctgtgcgtcggcggctcatggctgacgccgaaagaagccgtgaaaaacaaagactgggacaccatcacccgtctcgccaaagaagcggcggcattgaaacccaaagcctga

SEQ ID NO: 54662 - DNA, 183 bp, Neisseria meningitidis
atggaaaaaaaattcttagacatcctcgtctgccccgttaccaaaggcaggctggaatatcatcaggacaaacaggaattgtggagccgtcaggcgaagcttgcctatccgattaaagacggcattccctatatgctggaaaacgaagcgcgaacgttgagcgaagaggaactcaaagcatga

SEQ ID NO: 54663 - DNA, 1311 bp, Neisseria meningitidis
atgagcgtaactgttgaaactttagaaaatctggaacgcaaagtagtgttgtccctgccttggtccgaaatcaacgcagaaaccgataaaaaactgaaacaaactcaacgccgtgcaaaaatcgacggtttccgtccgggtaaagcacctttaaaaatgattgcccaaatgtacggtgcgagcgcacaaaacgacgtgatcaacgagctggtgcaacgccgcttctacgatgttgccgttgcccaagagttgaaagtggcaggcttcccccgttttgaaggcgttgaagaacaagacgataaagagtctttcaaagttgccgccatttttgaagtgttccccgaagtcgttatcggcgatttgtctgcacaagaagttgaaaaagtaaccgcttccgtcggtgatgccgaagtggaccaaaccgtagaaatcctgcgcaaacaacgtacccgcttcaaccatgtcgaacgcgaagctcaaaacggcgaccgcgtcatcattgactttgaaggcaaaatcgacggcgaaccttttgcaggcggcgcatccaaaaactacgccttcgtattgggcgcaagtcaaatgctgcctgaatttgaagccggcgtagtcggcatgaaggctggcgaaagtaaagacgttaccgtcaatttccctgaagactaccacggtaaagacgttgccggtaaaactgccatgttcaccattacgctgaacaacgtttccgaagcgactctgcctgaagtcgatgcagattttgcaaaagccttgggtattgcggatggcgacgttgccaaaatgcgcgaagaagtgaagaaaaacgtaagccgcgaagtggaacgccgcgtaaacgaacaaaccaaagaatccgtaatgaacgcgctgctcaaagccgtagagctgaaagcacctgttgctttggtaaatgaagaagccgcacgcttggcaaacgaaatgaaacaaaattttgttaaccaaggtatggctgatgctgccaacttggatctgcctttggatatgtttaaagaacaagccgaacgccgcgtgtctttgggtctgattttggccaaactggttgatgaaaacaaactggaaccgactgaggagcaaatcaaagccgttgtcgccaacttcgcagaaagctacgaagatcctcaagaagtaatcgactggtactacgcagagccttcccgcctgcaagccccgacttctttggcgatagaaagcaacgtcgttgatttcgttttgggtaaagccaaagtaaacgaaaaagctttgtcttttgacgaagtgatgggcgcgcaagcctga

SEQ ID NO: 54664 - DNA, 1395 bp, Neisseria meningitidis; identical to SEQ ID NO: 45077

SEQ ID NO: 54665 - DNA, 459 bp, Neisseria meningitidis; identical to SEQ ID NO: 38813

SEQ ID NO: 54666 - DNA, 282 bp, Neisseria meningitidis; identical to SEQ ID NO: 38303

SEQ ID NO: 54667 - DNA, 1113 bp, Neisseria meningitidis
atgagcaccttcttccagcaaaccgcccaagccatgattgccagacacatcgaccgtttcccgctattgaagttggaccaggtgattgattggcagccgatcgagcagtacctgaaccgtcaaaaaacccgttacctccgagaccaccgcggtcgtcccgcctgtcccctgttgtccatgttcaaagccgtcctgctcggacaatggcacaacctctccgatcccgaactcgaacacagcctcatcacccgcatcgatttcaacctgttttgccgttttgacgaactgagcatccccgattacagcaccttatgccgctaccgcaactggctggcgcaagacgacaccctgtccgaattgctcaaactgattaaccgacaactgaccgaaaaaggtttaaaaatagagaaagcatccgccgctgtcgttgacgccaccattattcagaccgccggcagcgaacagcgtcaggccatagaagtcgatgaagagggacaagtcagcggtcaaaccacactgagtaaggacaaaaatgcccgttggacaaagaaaaacagcctctacaaactcggttacaaacaacatacccgtaccgatgcggaaggctatatcgagaaactgtacatcactcccaccaatgcccatgagtgcacacacctgtcgccgttgttggaaggactgcccaaaggtacgaccgtctatgccgacaaaggctacgacagcaaggaaaaccggcaacatctgaaagaacatcggttgcagaacggcattatgcgcaaagcctgccgcaaccgtccgctgacggaaacgcaaaccaaacgtaaccgatatttatcgaagacccgttatagtggattaaatttaaatcaggacaaggcgacgaagccgcagacagtacaaatagtacggcaaggcgaggcaacgccgtactggtttaaatttaatccactatatgtggtcgaacagagcttcggtacgctgcaccgtaaattccgctatgcgcgggcagcctatttcgggctgagcaaagtgagtgcacaaagccatctgaaggcgatgtgtttgaaccttttgaaagcggccaacaggctaagtgcgcccgctgccgcctaa

SEQ ID NO: 54668 - DNA, 1437 bp, Neisseria meningitidis
ttggaaaactcattaattatcggtttggcactggcggtattgctgatgcttttggttatgcgtgcgaagcagggtaagaaaacaccgaagcgcaaatcccaaggtgtcggcaatacgcaggggcagacacccggaagcaatgattcggactgggtcgatcagattggacaatcggtttcagacggcacgcaacccgactggtcttggaacgaaagtgccgagaccgcatccgccgccgtatccgcgcaagaagtcgatccgcttacggagtatcaggtttataagcaattcggttatcagggcaaggctgccgaatctttggctgcctatctggacggcattccggatggtgaagcgaaacctgaaaaccttatccgcgagctgctcgatatcaatctcgaagtgggggatgtcgatgttttggcagacaatctgcaaaaatacggcaaactgattccttccgaacttttggcaaaatatatcgaacaggcattacagcgcgattcaaaccatttgcgtatccgcgtcttggcagaagagggtttgggatggggtactcaggagattgaaaaacgtgcggaaggcggttctgcgacggcagcttccgcatcgcccccaccggatgccggcggtaaggcttatgaagccgaagaaatcaagcgcatcccgattgtgcggggcaaaaaagacgtgtccggaatcagtcaagaggaaatcggtgcgattgccggtttggttcgtgccgatcaaggtgcgaaaatccttaaagacaaagtcagctatgaaacggcatcgaaacaatacgaccgtgccatccaaacttccgaaaaacctgcaaacctgattatcgatgcgttgaaactcgattaccaatacgcggacatagaccgttttgccggacatttgtggaaactttaccaaacgttgggcaactacggcaggcaggttaaagagcggatgctggggtgggggtacagcttgggttaccatgaagttttcgatgatttggaaaaagggccgaacgaccggcaaatcaaagacatcggtatggggcacgggtatctgccgaaaaatatacagaaattcaaatcgcaacatcgggatttggtgcttcaagattcttcgttgatcaacaccggttcgtctccggcagacgatgcggttaaggaagtagagtcgttgctgatgtatggtcagattgaagcggcaatggatgtgttggagcaggcggtattgaaatatcccgacgagtcccagctttatattacgttgatcgatatttatgaacgtactgaagattgggataggttggggcagtttttaagggtattgagggaacgtgcggacaggcttcctgaagaggtcgttatgctgatgagccggctgctgcagcgtatgaatcaaaatattaaaaaaataaaacggtacggaaaataa

SEQ ID NO: 54669 - DNA, 948 bp, Neisseria meningitidis
atggctattccagttttactttggggtgcagccgccgcccttgctgcaacaggtattgtcaaaggagcagctgcactcagcgatatagatgatgcaaaagaaataggtgagcgtgcagaacgccgttataaacgcaggaaaagagaattgaattcgactaaagacgaaaccaaccttgcttttgaggagctgggacagtttaaggttgatatttttaacaatcaaatcagacatattgttcaagtcctaaacaacaccagcaacaagcatgcgaaaagcgaactgtcgggttttaacagtacatttgatattgctgaattaaaagaaatggaaactatggtgcaaacttctttagagttaagcaccaatctcggcagtagtgccattactggcgcactggcaggctttggcgtatacggtgcagtacctatgattgcaactgcttccacaggaacagcaatctccaccctttcaggtgctgcggcaaccaatgcaacccttgcttggctcggaggtggctcattggcagcaggtggattcggtatggcaggcggcatggtggctttgggtggcatcgtggcaggacctgctttagcaatcggtggatttatgctggcaagcaaggcggaagaggcactgacggaagcacgagcatatagtgctgaaatcgatgaggctattgacgagatggatttaattacagaaggattagaagggttgaaggaaaacgcaagggaaatacgccataccttagaagaaatggttaaacgtttcgaaaaggttcgtgtcgaccatgccgaccatcctgatttccataccatgctggtcatcggcaaggcgattaaaaatctgctgaatacgcctattatggaagaggacggatctcctgtagccaatatccgtcatcaatgcgaaggttgtctgaatatcgaattaggtacagtataa

SEQ ID NO: 54670 - DNA, 717 bp, Neisseria meningitidis
atgacagacaccgccgaaaaccaaacacaaaacaactggcaagccgaacacccccgcagcatccgcagtttcgtcctccgccaaagccacatgacctccgcgcagcaacgcgccatcgataccttatggggcagcttcggcatcgactaccaagcaacaccggccgatcttgatgcccgtttcggaagcagccgacccaaaatcctcgaaataggcttcggtatggggacggcaaccgcagaaatcgcccgcaggctgcccgaaaccgactttcttgccatcgacgtacacggtcccggcgtaggcaatctgctcaaactcatagaagaaaaccatttggaaaacatccgcgtgatgcggcacgatgccgtagaagttgtcgaaaatatgctgcaagacggctcgctcgacggcatccacatattcttccccgacccgtggcacaaaaaacgccaccacaaacgccgtctgatacaagcccccttcatcgccaaactgctgcccaaactcaaaaccggcggctatatccacttggcgacagactgggaagaatatgcgcagcagatgcttgaagtcctcagcagcttcgacagcctgcaaaatacggcggcagactacgcccccaccccggactaccgccccgaaaccaaattcgaagcgcgcggcaaacgcctcggacacggcgtttgggacttggtattcaaacggatcggataa

SEQ ID NO: 54671 - DNA, 459 bp, Neisseria meningitidis
atggaaaccccgaaactcagtgtcgaagccattgaaaaaggtacggttatcgaccatattcccgctggcagggggctgaccatcctgcgccagttcaaacttttgcactacggcaacgcagtaaccgtgggcttcaacctgcccagcaaaacccaaggcagcaaagacatcatcaaaatcaaaggcgtgtgcttggacgacaaagccgccgaccgccttgccctgtttgcacccgaagcagtggtcaacaccatcgacaatttcaaggttgtgcagaaacggcatttgaacctgcccgacgaaatcgccgaagtgttccgctgtccgaacacgaattgcgccggccacggcgagccggtcaaaagccggttttatgttaaaaaacacaacgggcagacgcggctgaaatgccattactgcgaaaaaacctacagccgggattcggtggcggaagcctga

SEQ ID NO: 54672 - DNA, 933 bp, Neisseria meningitidis
atgctctcacaactggagtatggcattgcgaaggaaaacagaccgaaccggcaggcagaccgctttgccggttcggttttaccgcttgccgccagtctgacccacaagccgaacatcatgaaacccataccgaccgacacattccaacctgccatactgccccaagcctttgaaaccgaaatcaaatccacctgcacggggcgaatctatcggattcagacggcgacactcggcgaaatgccgtctgaaggctatcccgtcctcttcgttttggacggcgaagcctttttccccgcacttttcaacatcatgcagtcgctgatgcccaaccccgttacccgaagcaacgccccctgcctgattgtcggtatcggctacacgacaggcagtgtgcgcgatttggcacaacgtgccgccgactacacgccgccgcttggagacaacgccacagcagacgaacggcagcagttcggacaggcagaccgcttctccgcctttatcgacagcgagctgaccgcctttttagaaagccgctacaccctcaaccgcaatgaaaccgccgtattcggacactcgttcggcgcactgttcggactgtattccctgctttcccaccgccgtttcagacggcattggctcgtatccccatcgatttggtggcacaacaggcggatactcgattttatgccgtctgaaaaccggctaaacggcatcgatgtctgcctcaacatcggcgcgctcgaacggggtagcggttgcaaacgcagggaagaacgcgatatggcaggactgtccgaacgcatggcggcagagttggacaggcacggggccgccgtctttttccgggaatatccgaatgccgaccacggcaatgtctcgttctactcgctgaccgattgcgtcgaatatttgaggaaggcttggcagaggtag

SEQ ID NO: 54673 - DNA, 1293 bp, Neisseria meningitidis
atgcagttttcagcattcggcgaaaaattcacgcaacacagcggcatcctccaactaatggacaacctcggcgacgcgctcaaaagcgacaagcccgtcaacatgctcggcggcggcaatccggcgcgcattccggaaatcgatcgggcgtttgccgacatattttccaaactggcggcagaacacgccgtcgaaaacatcggcaactactccaatccccaaggcgatgccgtgctgattgacgcgctgaccgccttcctcaaccgcgaatacagctggaatctgaccgccgacaatatcgcgctgaccaacggttcgcaaaacgcgtttttctatcttttcaacctcttcggcggcaaattcaagctttcagacggcacatccgcagaaaaagccattttgttgccgctcgcgcccgaatacatcggctatgccgacgtgcatgtcgaagggcagcacttcgtttccgtcaagcccaaaatcgaaaacgtcgaacacgaaggcgaagcaggcttcttcaaataccgcgtggactttgacgcactggaaaacctgcccgaactcaaagcgggcaaaatcggcgcgatttgctgttcgcgcccgaccaacccgaccggcaatgtgttgaccgacggcgaaatggcgcgtttggacgctttggcgcgtgaacacgggattccgctgattatcgacaacgcctacggaatgccgttccccaacatcatttacagcgacgtaacgctgaattggcatgaaaacatcatcctctgcttcagcctttccaaagtcggcctgccgggcgttcgcaccggcatcatcgtcgccgcgccggaagtggtcaaagccgtcagcagcctgaacgcgattgtgaaccttgcccccacgcgcttcggcgcggccatcgccgccccgctactggaaagcggcgagatgaaacggcttgccgaccaagtcatccggccgttttaccgcaatcaggcgcaaaccgccgtctcgctgctcaagcgcgagctgggcgcgtacccgatgaaaatccacaaacccgaaggcgcgattttcctgtggctctggtttgaaaacctgcccgtttcttcgcaaaccctgtacgaaatgctcaaagccgaaggtacgctgattattccgggcgaacatttcttcgtcggcatcgacacgcaggattacccgcacgcgggcgagtgcatccgcatgagcatcgcgcaggacgctcaaacgctggaaaaaggcattgccgccatcggcaaaaccgtccgaaaactgtacgacaacgtttaa

SEQ ID NO: 54674 - DNA, 780 bp, Neisseria meningitidis
atgcatatcatcgattcgcactgccacctcaattttgaaggtttgaaagaacgcctgcccgaagttttgtccaacatggaagcaaacggcgtggggcaggtgctcgccatcagcgtcagtagggaaagcttctccgaagtctttgccatcgccgaagcgcacgaacacatctattgcaccataggcgtacatcccgacagcaaggaagccgaagaattttctattgcggaaatggttgctgcagccgcccatccgaaagtggtcggcattggcgagacgggcttggattattactggtgcaaaggcgatttgtcctggcaacacaaacgctttgcagaccacatcgaagcagccaatcaaaccggactgcccgttatcgtccatacgcgtgatgcggcggcggacaccttgtctatcctgaaagaatgccgggttaattcgggcgttatccactgtttttccgaagacacagcctttgcccgggctgccatggatttggggctttatatttctttctcgggaatcgttacctttaaaaatgcccccttggttcaggaggcggcgaaatatgtgccggacgaccgcattttggtggaaaccgatgcgccgttcctcgcccccgttcccaaacgcggcaggcagaacgaaccggcttttgtgcgctataccgccgaacatatcgccaaattgcggaaccaaacattggaacaggttgcggcatatacgacggaaaacttttaccggctgtttaaaaaagtacccgatatgcgggtcgtctga

SEQ ID NO: 54675 - DNA, 594 bp, Neisseria meningitidis
atggaacactatttgagcctctttatcaaatccgtcttcatcgaaaatatggcgctatccttctttttgggtatgtgtacgtttttggcggtatccaaaaaagtatccaccgcattcggtttgggtgtggcggtgattttcgtactcggactgtccgtccccgccaaccaattggtttactcgctgctcaaagacggcgcgattgtcgaaggcgtggatttgacctttttgaaattcatcaccttcatcggcgtgattgccgctttggtgcagattttggaaatgttcttggataaattcgtccccgccctctataacgcgttgggcatctacctgccgctgattaccgtgaactgcgcgattttcggcgccgtatcgtttatggcgcaacgcgaatacaacttcggcgagtccgttgtatacggcttcggcgcgggcttgggctggatgttggcgattgtcgctttggcgggcattaccgaaaaaatgaaatattcggacgctcccaaaggcctcaaaggcttgggcattacctttatcgccgccggcctgatggcgatggcgtttatgtcgttctccggcatccagttataa

SEQ ID NO: 54676 - DNA, 549 bp, Neisseria meningitidis
gtgtctcaaaacactccaatcaaaccttggtacaaacacgtctggccgtggatcttgatggcggggccgatttttgtcgtcatcgccagcgtcgctatgttttttgtcgcgcagcagcacgcgacagatttggttacggacgattattataaagacggcaaacatatcgacatccagcttcatcgggatgaagaagccatcagacggcatatcggggtgcaggttctcatttcccccgatatgaatgcggcaaaagtgtttgtcggcggcgagtttgacggcaaacagcctttgaacctgctgctgatgcacccgacccgcaaggcggacgatcaaaccgtcgccctcaagcccgtcggcagcgcgcagaacggcagggcggaatatgaggcggtgttcaaaacccttccgccgaccaaccactggtatgtgcgcgtggaggacgcggcaggcgtgtggcgcgtcgagaacaaatggattaccagccaaggcaatgcggtcgatttgaccccgatggacaaacttttcaataatactgaaagcaaataa

SEQ ID NO: 54677 - DNA, 792 bp, Neisseria meningitidis
atgattactgtgaacacactgcaaaaaatgaaggcggcgggcgagaaaatcgccatgctgaccgcttacggatccagttttgccgcgctgatggacgatgccggcgtggaaatgctgctggtcggcgactctttgggtatggcggttcaagggcggcagtcgacgctgcccgtcagcctgcgcgatatgtgctatcacaccgaatgtgtagcacgcggtgcaaaaaatgcgatgattgtcagtgatttgccgtttggtgcatatcagcagagtaaggagcaggcgtttgccgccgccgccgaactgatggctgccggcgcgcatatggttaaacttgaaggcggtgtgtggatggcggaaactaccgaattcttgcaaatgcgcggtattccggtttgtgcgcatatcggtctgacgccgcaatcagtgtttgcctttggcggatataaggttcagggtcgcggaagtaaggcgcaggcgttgcttaacgatgccaaggcgcatgacgatgcgggggcggcggtcgtgttgatggagtgtgttcctgcggaactggcaaaaaaggtaactgaatccgtttcttgtccgaccatcggtatcggtgcgggtgtagattgcgacgggcaggttttggtaatgcacgatatgctcggtatttttccgggtaagacggcgaaattcgtcaaaaacttcatgcaggggcataatagcgttcaagcggcggttcgtgcgtatgtcgaagaagttaaagcaaaaacctttcctgctgcagaacatatctttacagactga

SEQ ID NO: 54678 - DNA, 807 bp, Neisseria meningitidis; identical to SEQ ID NO: 46908

SEQ ID NO: 54679 - DNA, 1185 bp, Neisseria meningitidis; identical to SEQ ID NO: 37431

SEQ ID NO: 54680 - DNA, 2259 bp, Neisseria meningitidis; identical to SEQ ID NO: 37079

SEQ ID NO: 54681 - DNA, 438 bp, Neisseria meningitidis; identical to SEQ ID NO: 39862

SEQ ID NO: 54682 - DNA, 894 bp, Neisseria meningitidis
atgccgcatccgtgccaaaccgttcacactttaaccgcccgtgtcccgaaatgccgtctgaagttgaacgccgcccgacggcagcgttacaatcgcccgcaactgttttttccgaacatcatcatgaccacgaccgaacacgacaacgacgacgaactcctgctgcggtacagccgccacatcctcttggacgaaatcggcatcgaagggcagcagaaactttccggcgcgcatattttggtcgtcggctgcggcggtttgggtgccgccgccctgccctacctcgccgcttccggcatcggcacgctgaccatagccgattccgacacggtcgagctgcacaacctgcaacgtcaggttgcatttgacgagagcgacgtcggcaaactcaaaaccgaagccttggcagaccgtctgcgccatatcaaccataccgtcgatgtccgcaccgtcaacgaaaaactcgacggctgccgcctgaccggtttggttcaaaccgccgacatcgttttagactgctgcgacaactacgccacgcgccaagccgtcaaccgtgtctgcgtacaaacgaaaacaccgctggtttcaggagcagcggtgcgctttgaagggcaacttgccgtgtaccgtcccgacttgcccgactcgccgtgttacgcctgcctgtttgacggcggatcggcttcagacggcatctgttccctcttcggcgtgttctcgccgctggtcggcatcatcggcagtacccaagcggcggaggctctgaaaatcctgctggatgcgggcgaaccgtcgcacggcaggctggcggtttaccgtgccttggaagggggctggcaatatttcgacctgccgcgcaaccccgaatgcccgatttgcggcgcggaacggtaa

SEQ ID NO: 54683 - DNA, 297 bp, Neisseria meningitidis
atgttccgcatattactgttgcttttcccttgtgcaatccttgccgcctgcgcccgaaacataccggcaagccccgccgtttcaaattgcgcgcatcttcaaaaccgcaccatcctgtattttgacgcacacggcaaacccgccgacggcgcagtaaagggcggattttacaaaattatcgaaatacagggtgcaaactgcatccttattcaagactttaacagcacgggcaatgccctcggcggatcctatgtgccggactgccgcaaatcatcccttttcccgaaaaatatttga

SEQ ID NO: 54684 - DNA, 525 bp, Neisseria meningitidis
atgcaaacccgcattctctccgccgtactgctggctttttcaaccgctgcctttgccgggggcgcattcacgctgcaattcgacaacccgtccgaagacggcggcttcacgcaaaaccagcttttgagcgcgccttacggatttggctgttcgggcggcaatgcttcgcccgcgctgtcgtggaaaaatccgcccgccgggacaaaaagtttcgtcctgaccgtttacgataaagacgcgccgaccggactgggctggatgcaccgggtggtcgccgacattcccgccgatgtccaccgccgcaacgcgacctcgctgcaattaagccgctgcaccagcatcgccgacgaccagtccgcagccatatcggcggtaatcagtttgcggatttgccgcatcaggttgacgccttcgtacacggcaaaaccgatgccgtcatgctgcaaccacgccaacacgccgcaaagcgcggcctccgcagcattgtgcggcacttcttcatccgccagtaccgcagcctcataa

SEQ ID NO: 54685 - DNA, 954 bp, Neisseria meningitidis
atgcatcaatattatgacgcagtaattttatcggttggaaatgggttgttaaaaaggttctttaagcagaatgcgcaattaaatattgcttcaaggccattgattattaccttgtttccaggtgtagtattcggtgatcaggcaagtattctatctcgtatgggggctgatattgttttatataataataagcatgattttagaattgcagaggaatataagaaacaatataaattaagttgtcaaaatatactttatggttatccaatttttcgccacgcatcaaaaggtcgtcatggagagaaaatttactttattgaccaagttaaaatcccatttaaaaaagaagaaagaatttatacattaaaaaaattgattgccttggctgaaaaataccctgagaaagaatttactattttgctaagggttgcagataaagatattactgtgcatcaggataaacattcgtatatagagctggcaaagcagtttcagttgccgagtaatttgacaatagagcgaaaaagtaccgcgcaagccttccaagaaatggggtattgtttatcttattcatctactatgctttttgaagctgaatgtaagggtatccctgttggtgttgttgcagacttaggcttttctaaatcctatgcaaatcagcattttttaggtagtggggttttagtttattttgatcaaatagatttcacttccccaaaaatagcagatccggattggcttgattgctatgctactaaaaaggtgattacaactgatgagtttaataagctattaaagcaggttgtgccattgcaacatgattaccaagaatatttatctgcggtgaatagtatagaatcaactaaaactatttttttaagaaaatttaaaaagttaattagggatcctaaaaagtttttttatgattctaaatggttgagaaaggtgatttaa

SEQ ID NO: 54686 - DNA, 909 bp, Neisseria meningitidis
atgaatcaaaccgccatcaaccgcgccgatgtgcgtacccgctttatcttcgacgatatgcccgtgcgcgggctgcacgtccgtctggaaaacgtgtggcagcacattgtaaaacagaaaaactatcccgccgccatccgccgcgccttgggcgagctgttggctgccggtgttctgctgtcgggcaacctcaaaaacgaaggcacgctgattgtgcaggttcaggggcaggggcggctgaaaatgctggttgcggaagcgacttccgaccgtaccgtccgtgcgaccgcgcggtgggacgaggcggcagaaatagccgatgacgaaagcctcggcgaccttttgggcggcaacggcgtgttcgtattgacgctgcagcccaaagacggcgaaccctggcagggcgtagtgcctttggaaggcgacggtatcgcgcaaatgttgatgaactatatgaaacgttccgaacagcttgatacgcacatcgtcctgtctgcaagcgatgaagcggcgggcggtctgctggtgcagcgtctgcctgaagaggtgttggatgaagaggcatgggaacacgtcagtacgctggcgcgcacgctgacggcgggcgagttggcagaattggatgcgcaacatgttttgtaccgcttgttccacgaaacgccgccgcgcgtgttcgagccggaaacgtttgaattttcatgcacctgttcgcgcggcaaagtcagcgatatgctgttgatgctgggcggggaagaagtcggcggcgtggtggcggaacaaggcagcatcgaagtcgattgcgatttctgccacagcaaatatgtgtttgacgaaaccgatgtcaacgcgctgttcggggaggatgtggtcggcgttgccaaagggctgccccggcataccgtccaataa

SEQ ID NO: 54687 - DNA, 537 bp, Neisseria meningitidis; identical to SEQ ID NO: 37832

SEQ ID NO: 54688 - DNA, 564 bp, Neisseria meningitidis
gtgcaggacaaaaacaacctctgctggctcgatatggaaatgacggggcttaatcccgaaaccgaccgcattatcgaagtcgcgatgattattaccgactcggatttgaatgtattggcgcaatccgaagtttacgccgtccaccaaagtgacgagctgctcgacaatatggacgagtggaacaccgccacacacggcaggacggggctgacacagcgcgtacgcgaatcgtcgcataccgaagccgaagtcgaacagaaactgctggactttatgtcggaatgggtacccgaacgcaccacgccgatgtgcggcaattccatccaccaagaccggcgttttatggtcaaatatatgccgaaactggaaaactacttccactaccgcaacctcgacgtttccacgctcaaagagcttgccaaacgctggaatccgcccgttgccaaaagcgtcgtcaaacgcggttcgcacaaggcattggacgacattttggagagcatcgaagaaatgcgccactaccgcgaacactttctgatttccgccccgagagccgaagcgcaataa

SEQ ID NO: 54689 - DNA, 411 bp, Neisseria meningitidis; identical to SEQ ID NO: 42958

SEQ ID NO: 54690 - DNA, 777 bp, Neisseria meningitidis; identical to SEQ ID NO: 38952

SEQ ID NO: 54691 - DNA, 843 bp, Neisseria meningitidis
atgtcgggaggggttatgccggaattgccggaagtggaaacgacgttgcgcggcatcgcgccgcatattgaaggaaaaacggtggaagccgtggtattgcgccaattgaagctgcgctggcaggtcaatcccgatttgggggagattttgtccggcaggcaggttttgtcttgcggcaggcgggcgaaatatctgattgtccgttttcaaacagggattttgctgattcacttggggatgtcgggcagtttgcggatttttacgccgtcggacggacgtatcggcaagccggacagacacgatcacgtcgatattgtgttttcagacggcacggtcatgcgttaccgcgatccgagaaagttcggcgcgatactttggtatgagggaatcgaagaacatcatccgctgttggaaaaactggggcctgaacctctgtcggaagtattttgtgcggattatctgtatgtgaggctgaaggcgcagaaacgcgcggtcaaacttgccctgatggacaatgcggtcgtggtcggtgtgggcaacatttatgccaacgagagcctgttcagagcgggcatttcgccccaccgtcctgccaaccgtctgaaaaagaaagagtgcgcgcttttggttgaaaccgtcaaagcggtgttgcggcgcgccattgaaacgggcggcagtaccttgagggattttgtggacagcgacggcaaaagcggctacttccaacaggaatatacagtgtacgggcggcacaatcagccgtgcccccagtgcggcggtttggttgtgaaagaaactttggggcagcgcggcacgttttattgcccgaactgtcagaaatag

SEQ ID NO: 54692 - DNA, 942 bp, Neisseria meningitidis; identical to SEQ ID NO: 37828

SEQ ID NO: 54693 - DNA, 1197 bp, Neisseria meningitidis
atgcaaaactatctgacccccaatttcgcctttgcaccgatgattcccgaacgcgcttcaggcagccgcgtttgggatacggaagggcgtgaatatattgacttttcaggcggcatcgccgtcaatgcgctgggacactgccaccctgcccttgccgatgctttaaacacgcagatgcacaagctgtggcacatttccaatatctatacgacacggccggcgcaggagttggcgcaaaaattggtgaagaacagctttgccgacaaggtttttttctgcaactcgggctcggaagcgaatgaggcggcgttgaagctggcgaggaaatacgcccgcgaccgtttcggcggaggaaaaagcgaaatcgtcgcctgtatcaacagttttcacggacgcacgctgtttaccgtgtccgtcggcggtcagccgaaatacagcaaggattatgcacccctgccgcaaggcattacgcatgttccgttcaacgatattgccgcgctggaagctgccgtcggcgaacagacctgcgcggtcatcatcgagccgatacagggcgaaagcggcatcctgcccgccactgcggaatatttgcaaaccgcgcgccgtctgtgcgaccggcacaatgcgttgttgattttggacgaagttcaaaccgggatggggcatacgggcaggctgtttgcctatgaacattacggcattgttcccgatattttgagttcggcaaaagccttgggctgcggctttccgatcggcgcgatgctggcgacagaaaagattgccgccgccttccaaccgggcacgcacggctcgactttcggcggcaacccgatggcgtgtgcggtcggcagccgcgcattcgacatcatcaatacgcccgaaactttaaaccatgtccgcagccaggggcagaaacttcagacggcattgctggatttgggcaggaaaacaggcttgttctcacaggttcgcgggatgggactgctgctcggctgcgtgttggacgcgccttatcgcggacgcgcatccgaaatcaccgccgccgccttgaaacacggcgtgatgattttggttgcaggtgcggacgtattgcgtttcgcgccttcgctgctgttggacgatgaagatacggcggaaggtttgcggcgtctggaacacgcgctgacggaatttgccgcgacatcagacaatccgtaa

SEQ ID NO: 54694 - DNA, 855 bp, Neisseria meningitidis
atgttttaccaaatccttgccctgattatctggagcagctcgtttattgccgccaaatatgtctatggcggcatcgatcccgcattgatggtcggcgtgcgcctgctgattgctgcgctgcctgcactgcccgcctgccgccgtcatgtcggcaagattccgcgtgaggaatggaagccgttgctgattgtgtcgttcgtcaactatgtgctgaccctgctgcttcagtttgtcgggttgaaatacacttccgccgccagcgcatcggtcattgtcggactcgagccgctgctgatggtgtttgtcggacactttttcttcaacgacaaagcgcgtgcctaccactggatatgcggcgcggcggcatttgccggtgtcgcgctgctgatggcgggcggtgcggaagagggcggcgaagtcggctggttcggctgcctgctggtgttgttggcgggcgcgggcttttgtgccgctatgcgtccgacgcaaaggctgattgcacgcatcggcgcaccggcattcacatctgtttccattgccgccgcatcgttgatgtgcctgccgttttcgcttgctttggcgcaaagttataccgtggactggaacgtcgggatggtattgtcgctgctgtatttgggcttggggtgcggctggtacgcctattggctgtggaacaaggggatgagccgtgttcctgccaacgtttcgggactgttgatttcgctcgaacccgtcgtcggcgtgctgctggcggttttgattttgggcgaacacctgtcgcccgtgtccgccttgggcgtgtttgtcgtcatcgccgccaccttggttgccggccggctgtcgcatcaaaaataa

SEQ ID NO: 54695 - DNA, 348 bp, Neisseria meningitidis
atgtatattcccgacaaaggcgatattttccatttgaatttcgacccttccggcggcaaggaaatcaagggcgggcggtttgcgctggctctgtctccaaaagcattcaaccgcgcaacgggattggtttttgcctgccccatttcacaggggaatgcagcggctgcacgaagcggcggcatgatttcaaccttactcggtgcaggaacggaaacgcagggcaatgtccactgccaccagctcaaatctctggactggcaaatccgcaaggcttcttttaaagaaactgtacccgattatgtattggacgatgtgctggcgcgcatcggcgccgtcttattcgattaa

SEQ ID NO: 54696 - DNA, 1170 bp, Neisseria meningitidis
atgacagcacataaaatcctgcccgtcctgctttccatcatcttaggcatttctcacgcaacggctgcatcgcccgtgcccaacagaccgacggcacacgccgcccccacgctccaaacacccgaaaccctcacagcggcacacatcgttatcgaccttcaaagcaaacagattttatccgccaaaaacatcaatacccctgtcgaaccggcggcactaacccaactgatgaccgcatatctggttttcaaaaacatgaaatcgggaaatatccgatctgaagaaaacttaaaaatacccgaatccgcatgggcttcagaaggaagcagaatgtttgtacgtcccggcgatacggtcagcaccgacaaactcttaaaaggcatgattgcactatccgcaaacgatgccgccctaacccttgccggccggctgggcaacggctcgattgaaaattttgtgcaacaaatgaacaaagaagcccgacgcttgggcatgaagaacactgtattcaaaaatccgacaggcttgagtagagaaggacaggtttccaccgccaaagacctcgcccagctgtctgaagcattgatgcgcgactttccggaatattacccgctgttttccatcaaatctttcaaattcaaaaatatagagcaaaacaaccgcaatatccttttatatagggacaacaatgtaaacggtctgaaagccggacacacagaaagcggcggctacaaccttgccgtgtcatactccggcaacggcaggcacatccttgccatcacattgggttcggaatcggcggaaacacgcgcatcagacaacagcaagctgctgaactgggcattgcaggccttcgatacgcccaaaatatatccgaaaggaaaaaccgttgcccaaatccaaatttccggaggcagcaaaaaaaccgtccgcgcaggcttcctcaaagaagcctacatcactctgccacataaggaagcgaaaatggcagaacaaattctagaaaccatacagccgattcccgccccagtaaaaaaagggcaaattttaggaaaaatcaaaatcagacaaaacggatacaccattgccgaaaaagaaatcgtcgcactggaggacgtagaaaagaaaaactggtggaaaaaactctgggcacgcctgacgggacagtaa

SEQ ID NO: 54697 - DNA, 291 bp, Neisseria meningitidis
atggcgcgcattggtacgaataagggtttttttgagctcttggagggcgagaccctgttggaaggcttggaacggacggggcatatggtggaatatcagtgccgaagcggatattgcggatcgtgccgagtgaagattttggagggaagcgttacttatcgggagccgcctttggcttttttggggcgggacgagatactgccgtgctgctgttgcgtcgagggggatgtcaggctggattgcggtttgtcgggggaggatgaggggctgtctgacagtttgttgaaataa

SEQ ID NO: 54698 - DNA, 1413 bp, Neisseria meningitidis
atgctgctgctgcctttattggcaagtgcggcatatgccgaagaaacaccgcgcgaaccggatttgagaagccgtcccgagttcaggcttcatgaagcggaggtcaaaccaatcgacagggagaaggtaccggggcaggtgcgggaaaaaggaaaagttttgcagattgacggagaaaccctgctgaaaagtcccgaattgttgtcccgcgcgatgtattccgcagtggtctcaaacaatattgccggtatccgcgttattttgccgatttacctacaacaggcgcagcaggataagatgttggcactttatgcacaagggattttggcgcaggcagacggtagggtgaaggaggcgatttcccattaccgggaattgattgccgcccaacccgacgcgcccgccgtccgtatgcgtttggcggcagcattgtttgaagacaggcagaacgaggcggcggcagaccagttcgaccgcctgaaggcggaaaacctgccgccgcagctgatggagcaggtcgagctgtaccgcaaggcattgcgcgaacgcgatgcgtggaaggtaaacggcggcttcagcgttacccgcgaacacaatatcaaccaagccccgaaacggcagcagtacggcaaatggactttcccgaaacaggtggacggcacggcggtcaattaccggctcggcgcggagaaaaaatggtcgctgaaaaacggctggtacacgacggcgggcggcgacgtgtccggcagggtttatccggggaataagaaattcaacgatatgacggcaggcgtttccggcggcatcggttttgccgaccggcgcaaagatgccgggctggcagtgttccacgaacgccgcacctacggcaacgacgcttattcttacaccaacggcgcacgcctttatttcaaccgttggcaaaccccgaaatggcaaacgttgtcttcggcggagtgggggcgtttgaagaatacgcgccgggcgcgttccgacaatacccatttgcaaatttccaattcgctggtgttttaccggaatgcgcgccaatattggatgggcggtttggatttttaccgcgagcgcaaccccgccgaccggggcgacaatttcaaccgttacggcctgcgctttgcctgggggcaggaatggggcggcagcggcctgtcttcgctgttgcgcctcggcgcggcgaaacggcattatgaaaaacccggctttttcagcggttttaaaggggaaaggcgcagggataaagaattgaacacatccttgagcctttggcaccgggcattgcatttcaaaggcatcacgccgcgcctgacgctgtcgcaccgcgaaacgtggagtaacgatgtgttcaacgaatatgagaaaaatcgggcgtttgtcgagtttaataaaacgttctga

SEQ ID NO: 54699 - DNA, 1050 bp, Neisseria meningitidis
atgtcatctaaccaatatatccagtcgcttgagttgacaaactttaccgttcttccaaacgatacttttgaattttctgaaaatctcaatgttattgttgccgaaaacggttgtggcaaaacacatttgttaaaaattttatacagcctgctagaagtaacatctaacaccaaaaacagattactgaaaacagaattgcaaaaaagttttgccgataaattactgaatgttttccgtcccgattccttgggcaggttgagcaaacgtttgcaggggcgcgggcgtacggaaatcgttttaaaactgcaaaacggcactacgcatagtagtctgaatttttccagtaactcatcatcgcaagtcaatgttcaaagcatcggattgaaagaaaatgaatatactccgacacctatcttcttacccagccgcgaattaattacactttgcccttggttcacttctttgtatcaaaaccaaagcatccctttcgaagaaacttggtttgatacctgtatgcaattaaatcacccgcttgccaaaggccccagagaaacaaaaattcgagaattgctcgaacctattgagaacgcgatgggcggaaaagtatctgaagaacaaggaaggttttatctatcgctgacaaatacgggcggtaagattgaagcacctttggtagcagagggtttgcggaaatttgtcatgattgcccggttaatcgcaacaggggcattgctggataaaggctatctattttgggatgaaccggaagctaatctgaatcctaaattgatcaaagtggctgcccgtattatttggtctttatctcaacagggtattcaggtttttattgcaacacactctttattcttattgagagaattggaacttttgaagcttgaaaataacacggatttacctgtacgttttttctcgttgattgcttccgatgatggaacaaaagtggagcaagggaacagtattaatgatttgaacacattgatattgttagatgaaaacattatgcaggcagacaggtatctgaatatttga

SEQ ID NO: 54700 - DNA, 309 bp, Neisseria meningitidis; identical to SEQ ID NO: 36432

SEQ ID NO: 54701 - DNA, 597 bp, Neisseria meningitidis; identical to SEQ ID NO: 38176

SEQ ID NO: 54702 - DNA, 279 bp, Neisseria meningitidis; identical to SEQ ID NO: 36597

SEQ ID NO: 54703 - DNA, 936 bp, Neisseria meningitidis
atgaaagcgaatatggatattgaaaccttccttgcaggggaacgcgccgccggcggataccgttgcggcttcgtggcgattgtcggtcgtccgaacgtgggcaaatcaacgctgatgaaccatctcatcggtcagaaaatcagcatcaccagcaaaaaggcgcagacgacgcgcaaccgcgtaacggggatttataccgacgataccgcgcagttcgtgtttgtcgatacgcccggctttcaaaccgaccaccgcaacgcgctcaacgacaggctgaatcaaaacgttaccgaggcgcttggcggcgtggatgtggtggttttcgtcgtggaagcgatgcgctttaccgatgccgaccgtgtcgtgttgaaacaactgcccaagcacacgccggtcattttagtggtcaacaaaatcgacaaggacaaggcgaaagaccgttacgcgctggaggcgtttgttgcccaagtgcgcgccgaatttgaatttgcggcggcggaggcggtcagtgcgaaacacggattgcggattgccaacctgttggagctgctcaagccgtatctgcccgaaagcgtgccgatgtatcccgaagatatggttacggacaaatcggcgcgttttttagcgatggaaatcgtgcgtgaaaaattgttccgctatttgggcgaggaattgccttatgcgatgaacgtcgaagtggagcagtttgaagaggaagacggtttgaaccgcatctatatcgccgttttggtcgataaggaaagccaaaaggcgattttaatcggcaaaggcggggagcgtttgaagaaaatttccaccgaagcgcggttggatatggaaaaactgtttgataccaaagtatttttgaaggtctgggtcaaagtcaaatccggttgggcggacgacatccgcttcctgcgcgagctgggtttgtag

SEQ ID NO: 54704 - DNA, 288 bp, Neisseria meningitidis; identical to SEQ ID NO: 39206

SEQ ID NO: 54705 - DNA, 663 bp, Neisseria meningitidis
atgatacaagccgtattgttcgacctcgacggcacgcttgccgacaccgccctagacctcggcggcgcactcaacaccctgctcgcccgccacggactacctgcaaaaagcatggacgaaatccgcacccaagccagccacggcgcggcaggactgatcaaactcggcgcaggcatcacccccgaccacaccgactacacccgatggcgcgccgaatacctagacgaatacgacagccgctacgcccaagacaccaccctcttcggcggcgtaaacgaactcatcgccgaactcggaaaacgcggcatcaaatggggcatcatcaccaacaaacccatgcgcttcaccgacaaactcgtccccaaactcggcttcatcgtcccacccgccgtcgtcgtcagcggcgacacctgcggcgaacccaagcccagcgtcaaacccatgctgtatgcgtgcggacaaatccacgccgacccgcaacacacactctacgtcggtgatgccgaacgcgacatccaagcaggccgcaacgccggcatgaaaaccgtcctcgccgaatggggctacatcgctcccgaagacgataccggctcatggcaggcggatttccacatccgcacgccgctcgatctgctcgaatgtctggacaaaatacagtcctga

SEQ ID NO: 54706 - DNA, 354 bp, Neisseria meningitidis; identical to SEQ ID NO: 51512

SEQ ID NO: 54707 - DNA, 693 bp, Neisseria meningitidis
atgaacgaaatcctcaggcagcccagcgttctgcttttcctcacgcttgccgtgtacgcgcttgcgattatcgtgcgcacgcgcacgggcaatatcttctgcaaccccgtactcgtcagcactatcgtgctgattgcctacctgaaaatcctcgacatcgattatgcggtgtaccacaacgccgcgcagtttatcgatttctggctcaagcccgccgtcgtcgtgcttgccgtgccgctctaccaaaaccgccgtaaaatcttcaaccaatggctgcccgtcatcgtttcacagcttgcgggcagcgttacgggcattgttacggggatgtattttgccaaatggctgggcgcggaacgcgaagtcgtcctctcgctcgcgtccaaatctgttaccaaccccatcgccattgaaattacccgctccatcggcggcattcccgccattaccgccgccaccgtcatcattgccggtctggtcggacagattgccggttacaaaatgctgaagaacacagtcgtcatgccctcgtccgtgggtatgtcgctcggcacggcttcgcacgcgatgggcattgccgcctcgctcgaacgcagccgccgcatggcggcatacgcggggctggggctgacgttcaacggcgtactgaccgcgctgattgcgccgctgcttatccccgttttggggttctga

SEQ ID NO: 54708 - DNA, 780 bp, Neisseria meningitidis; identical to SEQ ID NO: 38358

SEQ ID NO: 54709 - DNA, 1806 bp, Neisseria meningitidis
atgcgctacaaaccccttctgcttgccctgatgctcgttttttccacgcccgccgttgccgcccacgacgcggcacacaaccgttccgccgaagtgaaaaaacagacgaagaacaaaaaagaacagcccgaagcggcggaaggcaaaaaagaaaaaggcaaaaatggcgcagtgaaagataaaaaaacaggcggcaaagaggcggcaaaagagggcaaagagtccaaaaaaaccgccaaaaaccgcaaagaagcagagaaggaggcgacatccaggcagtctgtgcgcaaaggacacgaaggggataagaaatcgaaggcggaacacaaaaaggcacatggcaagcccgtgtccggatccaaagaaaaaaacgcaaaaacacagcctgaaaacaagcaaggcaaaaaagaggcaaaaggacagggcaatccgcgcaagggcggcaaggcggaaaaagacactgtttctgcaaataaaaaagtccgttccgacaagaacggcaaagcagtgaaacaggacaaaaaatacagggaagagaaaaatgccaaaaccgattccgacgaattgaaagccgccgttgccgctgccaccaatgatgtcgaaaacaaaaaagccctgctcaaacaaagcgaaggaatgctgcttcatgtcagcaattccctcaaacagcttcaggaagagcgtatccgccaagaacgtatccgccaagagcgtatccgtcaggcgcgcggcaaccttgcttccgtcaaccgcaaacagcgcgaggcttgggacaagttccaaaaactcaataccgagctgaaccgtttgaaaacggaagtcgccgctacgaaagcgcagatttcccgtttcgtatcggggaactataaaaacagccagccgaatgcggttgccctgttcctgaaaaacgccgaaccgggtcagaaaaaccgctttttgcgttatacgcgttatgtaaacgcctccaatcgggaagttgtcaaggatttggaaaaacagcagaaggctttggcggtacaagagcagaaaatcaacaatgagcttgcccgtttgaagaaaattcaggcaaacgtgcaatccctgctgaaaaaacagggtgtaaccgatgcggcggaacagacggaaagccgcagacagaatgccaaaatcgccaaagatgcccgaaaactgctggaacagaaagggaacgagcagcagctgaacaagctcttgagcaatttggagaagaaaaaggccgaacaccgcattcaggatgcggaagcaaaaagaaaattggctgaagccagactggcggcagccgaaaaagccagaaaagaagcggcgcagcagaaggctgaagcacgacgtgcggaaatgtccaacctgaccgccgaagacaggaacatccaagcgccttcggttatgggtatcggcagtgccgacggtttcagccgcatgcagggacgtttgaaaaaaccggttgacggtgtgccgaccggacttttcgggcagaaccggagcggcggcgatgtttggaaaggcgtgttctattccactgcaccggcaacggttgaaagcattgcgccgggaacggtaagctatgcggacgagttggacggctacggcaaagtggtcgtggtcgatcacggcgagaactacatcagcatctatgccggtttgagcgaaatttccgtcggcaagggttatatggtcgcggcaggaagcaaaatcggctcgagcgggtcgctgccggacggggaagaggggctttacctgcaaatacgttatcaaggtcaggtattgaacccttcgagctggatacgttga

SEQ ID NO: 54710 - DNA, 759 bp, Neisseria meningitidis
atgaaaatcacacccgtcaaagccctaaccgacaactacatctggatgatacagcacggcaaccatgccgtctgcgtcgacccttccgaaccctcgcccgtcttagaattcctcgtccgcaaccgcctcatgcttgcccaaacatgggtaactcacccccaccccgaccacgagggcggtgcggcggcactctggcgcggctacatggaatcgcccgtttacggcgaatccgacatcgaagcagcaacccacaccgtaaccgccggcacccaattcaccttcggcgacggacaggttaccgtttgggcaacacccggccacacagaccgccacaccagctaccttctcgaaacttcagacggcatacacgtcttttgcggcgacacccttttttccgccggctgcggacgcgtgtttaccggcacaatcgaacagctttacgacagcttccaacgcttcaaccgcctgcctgaaaacaccctgttctacccggcacacgaatacaccgccgccaacctgcgtttcgccgcccatatcgagccggacaacgccgacattcagacggcactgaaagcggcggcgcatacgcctaccctgcccgttaccctcgcgcacgaacgccgcgtcaatccgtttttgcgcgtcgacctgccgcacgtcagagaccgcgccgaggcattgagcgggaaaacgttaaacagcagcctcgatacctttgtcgcgctgcgtgaacttaaaaaccaataccggacgaaataa

SEQ ID NO: 54711 - DNA, 762 bp, Neisseria meningitidis
atgatgggcgattccgtcatttattatgtagaacaggcagacgaaccggtaaaccgtgccggcgaacgcgcccgtaaaacattcaaatacttttggcgcgagcttttttgggaacgccgccgcatcattcccgccttagattttgccatggtcaaagccccttttttccaagacggcgaagacggcgaaatttgcgaacatatgtggatcgacgatatttattttgacggtctttacatttacggtgtgctgaacaataaacccggcgaactgactaatgtcgaacaaggcgaaagcatttgcgttccggttgacgacatcagcgactggatgttcgtgtgcaacggcattccctacggcggctttaccatacaggcaatgcgtggacagatgacggaagaggagcgtaccgaacacgatgccgcatggggaatcgatttcggcgatcccgggcaggtattgctggtgtatgaagaaaaagaacatcccgaaaatctggaagagcatccgatgtgccggaactgtattgacgattttcggcaacagttgtcccaaaatccggattttctgcatgagcaggacgaagacggctatacgccgcttcatcatgaagccatcgcaggaaatgcacttatggttcaagccatgcttgaatacggcgcaaatcctgcctcaaagacatcggaaggctataccgccctcgattttgcccgcctgacgggctggcaaaatgttgccgacctgctcgaaccgcgacattag

SEQ ID NO: 54712 - DNA, 795 bp, Neisseria meningitidis
atgaatacgattttggctttcgatattgaaaccgtacccgatgtgcagggtatccgaacattgtacgagctgccgtcctcgctgcccgacgatgaagtggtgctgtttgcccagcagaaacgccgcgcccaaacgggcggcgattttatgcagcatcatcttcatcaggttgtggcgatttcgtgctgtatgcgttgggggcaggataaagtccatgtcggtacaatcggcgagatggatgacggcgaggaagtggtcattgccaaatttttcgaattgattgaaaaacatacgccgcaactggtcagttggaacggcggcggtttcgacctgccggttctgcattaccgctccctgatatacggcattaacgccgcgcgctattgggatatgggcgacggcgatttcggcgacagccgcgatttcaagtggaacaactacatcagccgttatcaccaacgccactgcgatttgatggatttgctcgcgctttaccagccgagggcaaacgtgccgctggacgatatggcgaaactgtgcggttttccgggcaagctgggtatggacggcagcaaggtgtgggatgcgttccacgcgggcaggctgaaagaaatccgcaattattgcgaaaccgatgccgtgaatacgtatttgatgtatctgcgtttttgtctggtcagcggcagattcgacgcggacgaatacgaaatggaaatcaagcggatcagaaactatctttccgcccaaacagaagataaaccgcattggtcagaatttgcccaagcgtggaaatag

SEQ ID NO: 54713 - DNA, 1296 bp, Neisseria meningitidis
gtgattgccatgatttacatcgtactgttcctcgccgccgtcctcgccgttgtcgcctacaatatgtatcaggaaaaccaataccgcaaaaaagtgtgcgaccagttcggacactccgacaaagatgccctgctcaacagcaaaaccagccatgtccgcgacggcaaaccgtccggcgggtcagtcatgatgccgaaaccccaaccggcggtcaaaaaaacggcaaaaccccaagaccccgccatgcgcaacctgcaagaacaggatgccgtctacatcgccaagcagaaacaggcaaaagcctccccgttcaaaaccgaaatcgaaaccgccttggaagaaagcggcattatcggcaactccgcccacaccgtttccgaaccccaaaccggacattccgcaccgaaacctgccgacgcgccggcaaaacctgcacccgttccgcaaacacctgcaaaaccgctgattacgctcaaagaactgtcaaaagtcgaattaccctggtttgacgtgcgcttcgacttcatctcctatatcgcgctgaccgaagccaaagaactgcacgcactgccgcgcctttccaaccgctgccgctaccagattgtcggctgcaccatggacgaccatttccagattgccgaacccatcccgggcatccgctatcaggcatttatcgtgggtattcaggcagtcagccgcaacggacttgcctcgcaggaagaactctccgcattcaaccgccaggtggacgcattcgcacaaagcatgggcggtcagacgctgcacaccgaccttgccgcctttatcgaagtggcttccgcactggacgcattctgcgcgcgcgtcgaccagaccatcgccatccatttggtttccccgaccagcatcagcggcgtagaactgcgttccgccgtaacgggcgtgggtttcgtcctggaagacgacggcgcgttccactataccgacacgtcgggctcgaccatgttctccatctgctcgctcaacaacgagccgtttaccaatgcccttttggacaaccaatcctataaaggcttcagtatgctgctcgatattccgcactctccggcaggcgaaaaaaccttcgacgatttgtttatggatttggcggtacgcctgtccggccagttgaacctgaatctggtcaacgacaaaatggaagaagtttcaacccaatggctcaaagacgtacgcacttatgtattggctcgtcagtccgagatgctcaaagtcggtatcgaaccgggcggcaaaaccgcattgcgcctgttctcctaa

SEQ ID NO: 54714 - DNA, 513 bp, Neisseria meningitidis; identical to SEQ ID NO: 37445

SEQ ID NO: 54715 - DNA, 2394 bp, Neisseria meningitidis
atgaaactgaaacagattgcttccgcactgatggtcttgggcatatcgcctttggcacttgccgacttcaccatccaagacatccgcgtcgaaggcttgcagcgtaccgagccgagtaccgtattcaactacctgcccgtcaaagtcggcgacacctacaacgacacacacggcagtgccatcatcaaaagcctgtacgccaccggtttctttgacgacgtacgcgtcgaaactgcggacgggcagctcctgctgaccgttatcgaacgccccaccatcggctcgctcaacatcaccggcgcaaaaatgctgcaaaacgacgccattaagaaaaacctcgaatcgttcgggctggcgcagtcgcaatactttaatcaggcgacactcaatcaggcagtcgccggcctgaaagaagaatacctcgggcgcggcaaactcaatatccaaatcacgcccaaagtaaccaaactcgcccgcaaccgcgtcgacatcgacatcacgattgacgagggcaaatccgccaaaatcaccgacatcgaatttgaaggcaaccaagtctattccgaccgcaaactgatgcggcagatgtcgctgaccgaaggcggcatttggacatggctgacacgaagcaaccaattcaacgagcagaaatttgcccaagacatggaaaaagtaaccgacttctaccagaacaacggctacttcgatttccgcatcctcgataccgacatccaaaccaacgaagacaaaaccaagcagaccatcaaaatcaccgtccacgaaggcggacgtttccgttggggcaaagtctccatcgaaggcgacaccaacgaagtccccaaagccgaactggaaaaactgctgaccatgaagcccggcaaatggtacgaacgccagcagatgaccgccgttttgggtgagattcagaaccgcatgggctcggcaggctacgcatacagcgaaatcagcgtacagccgctgccaaacgccgaaaccaaaaccgtcgatttcgtcctgcacatcgaaccgggccggaaaatctacgtcaacgaaatccacatcaccggcaacaacaaaacccgcgacgaagtcgtgcgccgcgaattgcgccaaatggaatccgcgccttacgacacctccaagctgcaacgctccaaagagcgcgtcgagcttttgggctacttcgacaacgtacagtttgatgccgtcccgcttgccggcacacccgacaaagtcgatttgaacatgagcctgaccgaacgttccaccggctcgctcgacttgagcgcgggctgggtacaggataccggcctggtcatgtccgcaggcgtttcccaagacaacctgttcggtacgggcaagtcggccgccctgcgcgcctcacgaagcaaaaccacgctcaacggctcgctgtcgtttaccgacccgtacttcacggcagacggggtcagcctaggctacgatgtttacggaaaagccttcgacccgcgcaaagcatcgaccagcatcaaacaatataaaaccaccacggcaggcgcaggcatccgcatgagcgtgcctgttaccgaatacgaccgcgtgaatttcggtttggtggcagaacacctgaccgtcaacacctacaacaaagcgcccaaacactatgccgactttatcaagaaatacggcaaaaccgacggcacagacggcagcttcaaaggctggctgtacaaaggtaccgtcggctgggggcgcaacaaaaccgacagcgcgttatggccgacgcgcggctacctgacgggcgtgaacgctgaaatcgccctgcccggcagcaaactgcaatactactccgccacccacaaccaaacctggttcttccccttaagcaaaaccttcacgctgatgttcggcggcgaagtcggcattgcgggcggctacggcaaaaccaaagaaatccccttctttgaaaacttctacggcggcggcctgggttcggtgcgcggatacgaaagcggcacgctcggtccgaaagtgtatgacgaatacggcgaaaaaatcagctacggcggcaacaaaaaagccaacgtctccgccgagctgctcttcccgatgcccggcgcgaaagacgcgcgcaccgtccgcctgagcctgtttgccgacgcaggcagcgtgtgggacggcaaaacctacgacgacaacagcagttccgcgaccggcggcagggttcaaaacatttacggcgccggcaatacccataaatccacctttaccaacgaattgcgctattccgccggcggcgcggttacctggctctcgcctttaggcccgatgaaattcagctacgcctacccgctgaagaaaaaaccggaagacgaaatccaacgcttccaattccaactcggcacgacgttctaa

SEQ ID NO: 54716 - DNA, 585 bp, Neisseria meningitidis; identical to SEQ ID NO: 45789

SEQ ID NO: 54717 - DNA, 408 bp, Neisseria meningitidis
atggaaattcgggcaataaaatatacggcaatggctgcgttgcttgcatttacggttgcaggctgccggttggcaggttggtatgagtgttcgtccctgtccggctggtgtaagccgagaaaacctgccgccatcgatttttgggatattggcggcgagagtccgccgtctttagaggactacgagataccgctttcagacggcaatcgttccgtcagggcaaacgaatatgaatccgcacaacaatcttacttttacaggaaaatagggaagtttgaagcctgcgggttggattggcgtacgcgtgacggcaaacctttgattgagacgttcaaacaggaaggttttgattgtttgaaaaagcaggggttgcggcgcaacggtctgtccgagcgcgtccgatggtaa

SEQ ID NO: 54718 - DNA, 2790 bp, Neisseria meningitidis
atgaccgattacagtaaaaccgtaaacctgctcgagagcccgtttccgatgcgcggcaaccttgccaagcgcgagcctgcatggctgaaaagctggtacgagcaaaaacgctaccaaaaactgcgcgaaatcgccaaaggccgtccgaaattcatcctgcacgacggccctccgtatgccaacggcgacatccacatcggtcatgccgtcaataaaatcctcaaagacatcattatccgcagcaaaactcaagccggttttgacgcgccttatgtgccgggttgggactgtcacggtttgcctatcgaagtgatggtggaaaaactgcacggcaaagacatgcctaaagcccgtttccgcgaattgtgccgcgaatacgccgccgaacagattgcccgtcagaaaaaagactttatccgtctgggtgtgttgggcgactgggacaatccttacctgaccatggatttcaaaaccgaagccgataccgtgcgtatgctcggcgaaatctacaaatccggctatctctaccgcggcgcgaaaccggttcaattctgcttggactgcggttcttcgctggcggaagcggaagtggaatacaaagacaaagtatcgcctgcgattgacgtgggctatccgtttaaagacactgccgcgcttgccgccgcattcggtttggcaggcatcgagggcaaagcgtttgccgtcatttggacgactacgccttggacgctgccggcgagccaagccgtatcggcgggcgcggacgtggtttaccaactgattgatacgcccaaaggcaaattggtgctggcgaaagatttggcggaagacgctttgaaacgctacggcttttcagacggcatcgccatccttgccgaaaccaccggcgacaagctggaaaacctgcacatgaatcatccgttcctcgagcgtgatattcccatgctcaacggcgaacacgttaccaccgacgccggtacgggtttggtacataccgcccctgcgcatggtttggaagactacgctgtctgcaataaatacggtatcgagctttacaaccctgtaaatgccgaaggcaaatacatcagtgaaacgccacgcgttgccggtatgcgcgtttgggaagccaattccgttatcctgcaatggctggaagaaaccggcaaccttttggcaagcagcaaaatcgaacacagctacgcccactgctggcgccacaaaacgccgctgatttaccgcgcgacaggtcaatggtttgtcggtatggacaaagccggtgccgacggtaaaaccctgcgcgacaaagccatcaaagccgtggacgacaccgaattcttcccgtcttgggggcgcgcgcgtttggaagcgatgatcgaaggccgccccgactgggtggtttcgcgccaacgctattggggcacgccgatgactttctttgttcacaaagaaacgggcgagctgcatccgaactctgccgaacttttggaaaaagtcgcgcaacgcatcgaagaaaaaggcatcgaggcttggttctccctcgataagggcgaattgttgagcgcggaagattgcgaacattacgacaaactctccgacacgatggacgtatggttcgactccggttcgacccattattccgtcttgaaacagcgcgaagaattggactggccggctgatttgtatctcgaaggcagcgaccaacaccgcggctggtttcaatcgtccatgctgaccggctgcgcctcatcaatgggtcgcgcaccgtataaacagctgctgacccacggttttgttgtagacggcgaaggcaaaaaaatgtcgaaatccatcggcaacgtcgtcgcgccgcaagaagtctataacgaattcggcgcggacatcctgcgtctgtgggcggcatctaccgattacagcggcgaattggcgatttctaaagaaatccttaagcgcgtaaccgaaagctaccgccgtatccgcaataccttgagctttttgtttgccaacttgagcgactttaatccgattgaagatgccgtgcaacaggcggatatggtggaaatcgaccgctatgccctggtgttggcgcgtcggctgcaagagcgtctggcaggcgattactatccgcgttatgccttccattttgccgtgaaagaaatggtttctttctgctcggaagacttgggcgcgttctacctcgatatcctgaaagaccgcctctacaccaccaaagccgacagccgcgcccgccgcagcgcgcaaaccgccctgtaccacatcacgcgcagcctggttctcttgattgcaccgattttgtgctttaccggcgaagaagcgtgggacatcatcggcggcggcgaagaagacagcgtcctcttccatacttggcacgagttcccgaccatcaacgaaaaaaccgaagccgaactggtgaaaaaatggacggcaatccgcgaagcccgcgaagcggtaaccgccgccatcgagcctttgcgcgccgacaaaaccgtcggttcgtccttgcaagccgaagccgaaatcaccgcgccggaagaaatggccggctacctgaacgccttgggcgaagaattgcgctttgccatgctggtgtctaaagcagaagtgaaagtaggcagcgaacttgccgttgccgctaaagccagtgatggtgaaaaatgcgaacgctgctggcactacacccgcgatgtgggcgcggttgcaggctatgaaaccgtctgcaaacgctgtgcagagaatgtcggcggagaaggcgaaacgcgccattacgcctga

SEQ ID NO: 54719 - DNA, 255 bp, Neisseria meningitidis; identical to SEQ ID NO: 39349

SEQ ID NO: 54720 - DNA, 2781 bp, Neisseria meningitidis
atggcgaataataaaactttgtttgaagtaattgaaaaccgcaaagctgtgtatttggaagacggagatgatgaaaaatacaggctgcctaaatttgtttcaaataatttgaaatatccgttttttgaatggcaaaaatcggctttagaaaactttgtgatttttgaccgcacttcaaaattaaaggattttcccgatatcaaaaaccgccctactcatttgctatttaatatggcaacaggtgcaggcaaaacgataatgatggcggcattgattttgtattattttgaaaaagggtatcggcattttctgttttttgtgaatcaaaacaatatcgtggataaaacggaaaataattttattgacccgacacacgcaaaatttttatttaccgagaagattttgcagggcgatacggtaattcccattcgcaaagtggaaacgttcagcccacattcagacggcattgaaattaaatttaccagcattcaaaagctgtataacgatattcacaccgaacgggaaaaccaaaccacattggcggatttgcacgaattgaatcttgtgatgctgggcgatgaagcacaccatttaaacgcgcaaaccaaaggcaaaaaacaaggcgagttggatttggaagtggaattaaaagccaatgcaggcaatgccgaaattgaacgcaaaggctgggagcatatggttttggaattgttactcaataaaaatggcaatcccagccaaaatgtgctgttggaatttaccgccacgctgcctgaaaatgctgacgtgcaacaaaaatacgcggataaaatcatcacaaaatttggcttaaaagaatttttgcaaaaaggttataccaaagaaatcaatttggtatccagtacgctgggcaagaaagagcgggtgttgcacgctttattatttgcttggtatcgccatcaaatcgctttgaaatatggcattgccaatttcaagcctgtgatgttgtttagaagtaagacgattgatgaatcaaaagcggattatctggcatttttaaattgggcagaaaatgtgcaggcggttgatttttcgtttttaactacattttcaacaagcttgaacgatagcgatagcgataacgccaacgaacaaggcaaaacccgcactgaacaagccctaaaatttatgcaggaaaaaggcgttgagtttgcacatttggcagattgggtaaaacaaaattatcaaaaacacaatgtgattattaccaactccgaaaccaacaaaaccaaaaccgaaaaaaccgacagcgaaacagaaaaattgctgaataatttggaagcggctgataatccgattcgtgccatttttacggtggacagattaaccgaaggttgggacgttctgaatttgtttgatattgtgcgtttgtatgaagggcaaaacggcggcggttcaaataaaaaatcaggcaaaacggctgccgccaccgtatcggaaaagcagttgattggtcgtggcgtgcgttattttccatttgcgtttgaaggtaaacagccgaataaacgcaaatttgacaacgatatgcaacacgaattgcgtatcttggaagaattgttttattacacgcacgatgagcaatcccgctatatttcagaactgaaaaacgagttgcgaaaagacggttatttgcctgaaaaagacgatgataaggtattggcaacatttaaactcaaatctgaatttgccgctaataaggattttagagaattgttaatttgggcgaataaaaaaatccccaacccaaacgccaaaaccaataatgcaaacagcctgcaagccaatccgcaaacgctttcattccaagttcacggcaatcaactgttgcaggaaacgcaatttacagccgatgaaaatgatgaaaaagtcaagcaacttggcacgcaaaataattttactcaaaccataaaaatgagtgaaatggagcggcacattttcaataaagccctgcatatcaaagggaaaaatagtcaatctttattccattttgaccgcctgcaaagcaaactcaatattcaaaatcgcaatgaattgcaaaataaattgttgaaagactggcaaattgaatttttaggattagggcaagacaaacaggtttgcccggacgataaacttgcaggctgcctgaaaatcttggaaatggttgaaaagcatttgaatgaaagtgataagccatttatcggtacaaaagaatttacgcctaaaaaattatgggaaattttcggcacgccaaaacaaaaatgggtcaaaaaagatgatgtaaaaacgactattgccacgcaaaatgattggtatgtgatgaataattttgccggaacgggtttggaagaagcgttaattcaatttatttcagcgcgtttgggcgatttgaaatctcaatatgacattcatttaatccgtaacgaagaagtgtttaaattgaataactttgccaatggcgaaggatttatgcccgactttattttattgctgaaagataaacaaaaatcttcttccaatggcgtgaatgactttttgcattaccaaattttcattgagcccaaaggtgagcatttagtggaaactgatggatggaaagaagaatttttagaagccatcacagtggaatatgggatggataagatcctgcaaaaagatacaccgcattatcgtttgatcggtttaccgttttttactgatcatcagaaaaatggacaatttacggagtcattccctttaggtgcggcatcgcttgaaaaatag

SEQ ID NO: 54721 - DNA, 606 bp, Neisseria meningitidis
atgacccgtcaatctctgcaacaggctgccgaaagccgccgttccgtttattcgttaaataaaaatctgcccgtcggcaaagatgaagttgtccaaatcgtcgaacacgccgttttgcacacaccttcttcgttcaattcccaatctgcccgcgtggtcgtgctgtttggcgaagagcatgataaggtgtggcaatttgtcgaagacgcgctgcgtgccgtcgtgcctgccgacagttttgaaccgaccgcgcaaaaattgaacctgtttaaggcgggtgcggcaaccattttgttttatgaagatcaaaatgtcgtcaaaggtttgcaggagcagttccctgcttatgccgccaactttcccgtttgggcggaccaggcgaacgcgatggtgcagtatgccgtttggacgacacttgccgcggtcggcgtaggtgcaaacctgcaacattacaatcccttgcccgatgcggcgattgccaaagcgtggaatatccccgaaaactggttgttgcgcgcacaaatggttatcggcggtattgaaggggcggcaggtgaaaagacctttgaaccagttgcagaacgtttgaaagtgttcggcgcataa

SEQ ID NO: 54722 - DNA, 1578 bp, Neisseria meningitidis
atgcgcgccaaccccaaaacacaggcaatgccgtctgaaaccatatccctgatgaaaacacgcagcctaatttcccttttatgcctccttctctgttcatgttcttcatggttgcccccactggaagaacggacggaaagccgtcatttcaatacttccaaacccgtccgcctggacaacatcctgcaaatccggcacacccctcataccaacgggctatccgatatctatctgttgaacgacccccacgaagcctttgccgcccgcgccgcccttatcgaatctgccgaacacagcctcgatttgcaatactacatctggcgcaacgacatttccggccgactgctgttcaacctgatgtaccttgccgcagaacgcggtgtgcgcgtacgcctgctgttggacgacaacaacacgcgcggattggacgacctcctgctcgccctcgacagccatcccaatatcgaagtgcgcctgttcaaccccttcgtcttccgcaaatggcgcgcactcggctacctgactgacttcccccgcctcaaccgccgcatgcacaacaaatcctttaccgccgacaaccgcgccaccatactcggcggacgcaatatcggcgacgaatacttcaaagtcggtgaggacaccgttttcgccgacctggacatcctcgccaccggcagcgtcgtcggcgaagtatcgcacgacttcgaccgctactgggcaagccattccgcccacaacgccacgcgcatcatccgcagcggcaacatcggcaagggtcttcaagcactcggatacaacgacgaaacgtccagacacgcgctcctgcgctaccgcgaaaccgtcgaacagtcgcccctctaccaaaaaatacaggcaggacgcatcgactggcagagcgtccaaacccgcctcatcagcgacgaccctgcaaaaggactcgaccgcgaccgccgcaaaccgccgattgccgggcggctgcaagacgcgctcaaacagcccgaaaaaagcgtctatctggtttcaccctatttcgtccccacaaaatccggcacagacgcactggcaaaactggtgcaggacggcatagacgttaccgttctgaccaactcgctacaggcgaccgacgttgccgccgtccattccggctatgtcaaataccgaaaaccgctgctcaaagccggcatcaaactctacgagctgcaacccaaccatgccgtccctgccacaaaagacaaaggcctgaccggcagctccgtaaccagcctgcacgccaaaaccttcattgtggacggcaaacgcatcttcatcggttcgttcaacctcgacccccgttccgcacggctcaacaccgaaatgggcgttgttatcgaaagccccaaaatcgcagaacagatggagcgcacccttgccgataccacccccgaatacgcctaccgcgttaccctcgacaggcacaaccgcctgcaatggcacgatcccgccacccgaaaaacctacccgaacgaacccgaagccaaactttggaaacgcatcgccgcaaaaatcctatccctgctgcccatagaaagtttattatag

SEQ ID NO: 54723 - DNA, 918 bp, Neisseria meningitidis
atggaaaaagcagaacatttgaacagcagccggttcgtcaatctggtcaaaagcggcggcggcagctatgtggagggcagctaccgtttcgatactttgtccaacggcatttccatccacggcggcacggtaacggcacggtgcgatttttgcagcagccgcctcgccgaaccttatgtgtcgttcgtgctcttgctggaaggcagtttggacttcggcatcaaccgccgccgcttccaaatcgatgcggatggcggcaagatcgtcctaattgctgtcggggaagaggtcctgttcagccgctatctttaccgaggcggcaaaacggtcaaaatgaccattaaaggtatggaacaatggctgctgcgtccggagtatgcgcgtttcgcacccctgctttaccgcgaaccggtcagaatatggaatttgtccccaaacctgcgcggcttggcggcatcctgcctgaaagctgtcccaaaggggcatttgggcgaaacattgcgccgcgaggcggacgttttgcggctgctgtcggacttgtgggacacggtttcagacggcatcgggccggcggcggggcaaacggcggaagcagacgctatgccgtctgaagacttcaaccgcaccctaaatgccgcgtttgccgacggcgcacaccaagtcaaccggctgacagacgcgctgaacatcagtgaaaggacgctgcaacgccgtatgcgcgaccatttcggtattaccgcaagcgagtggctgcaccacaaacaaatgcagcacgcgctctacctgttgcaaaacgggggcaaaagcataggcgaaaccgcgtatttgtgcggctaccgccacgtttccagctttactcaggcattcaggcaatatttcggcagcacgcctgcggaaaccaaaaaagaaaaccgataa

SEQ ID NO: 54724 - DNA, 723 bp, Neisseria meningitidis
atgaaacccgcctatttcatttccgacctgcatttgagcgaaaagcagcccgaactgaccgcgctgttgctgcgttttttacgttcttccgccgccgggcaggcgcggacgatttatattttgggcgatttgtttgatttttgggtgggcgatgacgaagtttccgagttgaatacttcggttgcgcgggaaatcaggaaattgtccgacaaaggcgttgccgtgttcttcgtcaggggcaaccgcgacttcctgatcggtcaggatttttgccggcaggcgggtatgacgctgctgccggattactcggttttggacttgttcggctgcaaaaccctcatctgccacggagacacattatgcaccgacgacaaggcataccaacgtttccgcaaaatcgtgcatcggaagcggctgcaaaaactgttcctgatgctgcccctaaagtggcgcacgcgccttgctgccaaaatcaggcgtgtcagcaaaatggaaaaacaggtcaagcccgccgatattatggatgtcaatgccgcctttaccgcgcggcaggttcgcgcctttaacgcggaaaggctgatacacggacacacccaccgcgagcatatccatcacgaaaacggctttacccgcatcgttttgggcgactggcataacgactatgcttcaatcctccgcgtggacggggacggcgcggtattcatgccgctggaaaaatgctga

SEQ ID NO: 54725 - DNA, 1458 bp, Neisseria meningitidis
ttgaacaccctcaaaacagacggcatctattccctgccgacggcggtcggcagctccaacctgcccgttgaaaacaccgcctgccatatccaagtcatcgccggcacgaaacacggctggtgcaggcagttgggttatcccgcctacacgtccgacgtgtacgaacgccaccaggtaagcagcgcaaacgacaactggtccgcatggaaaaaactcaattcggacggcatccccgtcggcgcgatcgtatcctttcccaaagccgtccgaaaccccgcaggctatctcaaagccaacggcacgacctttgcacaaaacaccttccccgacctctaccgcgccctgggcaacagcaaccgcctgcccgatttaagccgtaccgacatcggcatcaccgcatggtttccgtccgaccaaatcccgaccggctggctggcgtttgacgacatccgcacgcgcgtaaccgaaaccgcttatcccgagctgtaccgcctgctgaccggaaaatacggcagcatccaaaacgtcccgcaggcggaagaccgctttatccgcaacgcaggcaacagcttggcagtcggaacgaagcaggaagacgaaatcaaacggcacgtccacaaagtattttcacactggacaaaccacacagacacggcagccgtcggttacgaagaccgcaacgaaaggcagagaagcgcgctcgtatcgacttggacggacgaaaatttaaacgacaacggctttttaaccccgcgcccggacagcaaaatggcgacaggcggcgacgaaaaccgccccaaagccctggttttaaaactgtgcatcaaagccgccgacaccttgggcgaagccgtgttttggataaagtcccacggcgaaaccatcaacgcaggcgcgctggacgcgggcacgctggcgcaaggtttgcaagacaaagccgaccgcgaccacacccacaccgccgcccaaatccaagggctggacgaaaaaatcagcaccgccgttgccgcgcaattcacacgccaaaccatcggcggcgtggatattgtcagattccccgacggcacaatgatacagaccggcagctacaggttcacacgaagcggcggccccatcgaaaacgaagtcgtcttccccgtcgcctttgccgacggcaacgtcaaatgcttcgtatccgaacgccattcggaacgcgttaccggcgatcgaaggcaacacaactggctgtttatccgcgcaaaaaaccacgccgccgccattattaccaactggtacgaaggcagttgcgactggatggccatcggcaaagccgcctcgggaaacgccgccagctccccgataggccccgaaatacctgaaaccaacgaagaaccgcaaagagagagtggaagaacatcaaccggaccccgaaaccgccgccgccaccgagacggcttgctcgaggcactgcaagactag

SEQ ID NO: 54726 - DNA, 711 bp, Neisseria meningitidis; identical to SEQ ID NO: 42623

SEQ ID NO: 54727 - DNA, 492 bp, Neisseria meningitidis
atgttttggcaactgaccgttgtttcagtaaccgccgtcattgcactggggacaatattcatcaataagaaaacttcaaagcaaaaggcgacattagatgttattttgaatgattaccaagatgcacaatttgtagaagccgacaatcatatttcgccttatattcgcggcacggcagttgacgacaacaacgcgcggatcgacctgtatgaaatttatcaaaataagggcggacaatgggaaaaagagagagggcatttacttaccgtaatcaatcggcacgagttttatgcgtgcgaaatcaactcgggagtattggatgaggatttgtttaaacggctgcattgcaccaacttcataaaattgtggaatgcagtttcgcctcttgttatgaaaatacgcgaagaagaacgcaaagacacaatatttagagagttggaaattttggttgcattatggaaagcaaaccccctaaaggcatctgatttgtga

SEQ ID NO: 54728 - DNA, 750 bp, Neisseria meningitidis
atgaaagcactggtcgcagtaaagcgcgtagtggactacaacgtcaaagttcgtgtaaaagccgatggttcggatgtggatatcggcaatgtcaaaatgtcgatgaatccgtttgacgaaatcgctgtggaagaagccgtccgtttgaaagaagccggaaaagtaagcgagatcgtagcggtttctttgggcgaaaagaaatgcgaagaaacgttgcgtaccgctttggcgatgggtgccgaccgtgcaattcatgttgaaaccgatgcgaaattggagccgctggcagttgccaagttgctgaaagccgttgcggacaaagaaaatccgcagattttctttttgggcaaacaggcgattgatgatgatgccaaccaagtggcgcaaatgctggctgctttgctgaatgcggcgcaaggtacgttcgcgtccaaagtacaaattgaaggcgacgaagtgcagattgtgcgggaaatcgatggcggcgaagaaaccatcgcattgaaactgcctgctgttatcagtgctgatttgcgtttgaacgagccgcgctttgtcaaactccccaatattatggcggcaaagaaaaaacctctggaaaaactggcgcctgccgatttggctaccgatattttacctcgtctgaaaacggtgaaatttgccgaacctaaggcgcgtcaggcaggcgtaaaagtagcaagcgttgccgaattggttgaaaaattgaaaaacgaagccaaagtgatttga

SEQ ID NO: 54729 - DNA, 2106 bp, Neisseria meningitidis
atggctcgtaagaccccgatcagcctgtaccgtaacatcggtatttccgcccatatcgatgcgggtaaaaccacgacgacagaacgtattttgttctataccggtttgacccacaagctgggcgaagtgcatgacggtgcggctactaccgactacatggaacaagagcaagagcgcggtattaccattacctccgctgccgttacttcctactggtccggtatggcgaaacaattccccgagcaccgcttcaacatcatcgacaccccgggacacgttgactttaccgtagaggtagagcgttctatgcgtgtattggacggcgcggtaatggtttactgcgcggtgggcggtgttcaaccccaatctgaaaccgtatggcggcaagccaacaaataccaagtgccgcgcttggcgtttgtcaataaaatggaccgtcagggtgccaacttcttccgcgttgtcgagcaaatgaaaacccgtttgcgcgcaaaccctgtacctatcgtcattccggttggtgcggaagacaacttcagcggtgtggttgatttgttgaaaatgaaatccatcatttggaatgaagccgataaaggtacaacctttacctatggcgatattcctgccgaattggtcgaaactgccgaagaatggcgtcaaaatatgattgaagccgcagccgaagccagcgaagaactgatggacaaatacttaggcggcgacgagctgaccgaagaagaaatcgtaggcgcgttgcgtcaacgtactttggcaggcgaaattcagcctatgctgtgtggttctgcatttaaaaacaaaggtgttcaacgtatgttggacgcagttgtagaattgctgccagctcctaccgatattcctccggttcaaggtgtcaacccgaataccgaggaagccgacagccgtcaagccagcgatgaagagaaattctctgcattggcgttcaaaatgttgaacgacaaatacgtcggtcagctgacctttatccgcgtttactcaggcgtagtaaaatccggcgataccgtattgaactccgtaaaaggcactcgcgaacgtatcggtcgtttggtacaaatgactgccgcagaccgtactgaaatcgaagaagtacgcgccggcgacatcgcagccgctattggtctgaaagacgttactaccggtgaaaccttgtgtgcggaaagcgcgccgattatcttggaacgtatggaattccccgagccggtaatccatattgccgttgagccgaaaaccaaagccgaccaagagaaaatgggtatcgccctgaaccgcttggctaaagaagacccttctttccgtgtccgtacagacgaagaatccggtcaaaccattatttccggtatgggtgagctgcacttggaaattattgttgaccgtatgaaacgcgaattcggtgtggaagcaaatatcggtgcacctcaagtggcttaccgtgaaactatccgcaaagccgttaaagctgaatacaaacacgcgaaacaatccggtggtaaaggtcaatatggtcacgttgtgattgaaatggaacctatggaaccggggggcgaaggttacgagtttatcgatgaaattaaaggtggcgtgattcctcgcgaattcattccgtctgtcgataaaggtatccgcgatacattgcctaacggtatcgttgccggctatcctgtagttgatgtacgtatccgtctggtattcggttcttaccatgatgtcgactcttcccaattggcatttgaattggccgcttctcaagcgtttaaagaaggtatgcgtcaagcatctcctgccctgcttgagccgattatggcagttgaagtggaaactccggaagaatacatgggcgacgtaatgggcgacttgaaccgccgtcgcggtgttgtattgggtatggatgatgacggtatcggcggtaaaaaagtccgtgccgaagtacctctggcagaaatgttcggttattcgaccgacctgcgttctgcaacccaaggccgcgctacttactctatggagttcaagaaatattctgaagctcctgctcacatagctgctgctgtaactgaagcccgtaaaggctaa

SEQ ID NO: 54730 - DNA, 1305 bp, Neisseria meningitidis
atgaagccgtttgccgaaaatatcccccacagccttcgcggcaactgctgcgacgaagccctgccgccgcatacggtagattgtccggaatgcggctgccgcgcggatgtaccccggttggacagtggagaagcggcgttctgtccccgttgcggacacaaactcttcagggtgggcaggcatcctttttccgccccgcccgcctatgcggcggcttcgctgattttaatggcgtttgcttacggtatgacgtatatcgaggtcgggataccgggtgcggcatccgtcctttcgctgcccgagatgatgcgcctgatggtgtttcaggattatggttttttggccgaagtgatgtttgtgctgactttcggcgcgccggttctgtttctgctgctgtgcctgtatgtctatgccgcgctgatacggaaacaggcgtatcctgcgctgcgtttggcaacgcgtgtgatggtgcgcttgagacaggcgatgatggtggatgtgttttttgtttccactttggtggcgtatatcaagctctcgtctgtggcagaggttcgcttcgggccggcgttttatctgatgttcgcgctgtcggttatgctgattcggacttcggtatcggttccccagcattgggtgtattttcaaatcgggcggctgacgggggataatgcggttcagacggcatcggaaggtaaaacctgttgcagccgctgcctgtatttccgcgacagtgccgaatccccctgcggcgtgtgcggtgcggaactgtaccgccgacggccgaaaagtctgagtatttcgtcggcgtttctgacggcggcggttattttgtatttccctgccaatatcctgccgattatgatttcgtccaatcctgccgccacggaggtcaataccatccttaacggcatcgcttatatgtgggacgagggcgacaggctgattgcggcggttattttcagcgcgagtattttggtgccggtactgaagattgcggcaatgtcggttttgattgcgtccgcccgcttcgctttgccaacgggtgcaaagaaattgtcgcacctctaccgcatcaccgaagcggtcggccgctggtcgatgattgatatttttgtgattattattttgatgtgttcgttccacacttatgccgcgcgcgtcattccgggcagtgcggcagtctatttctgcctggtcgtgattctgacgatgctgtccgcctattatttcgacccgcgcctgctttgggacaaacgcgcttcagacggcattgctttcaatgaaacggaaaaacatgactga

SEQ ID NO: 54731 - DNA, 552 bp, Neisseria meningitidis
gtgaactattgcgaatttgccgcctcacttcccgaaaacaccgataacccgaacaaacattaccacgacacgcaatacggttttccgattgacagcgacaacggactgtttgaacggctggtgttggaaatcaatcaggcaggattaagctggacgctgatgctgaagaagcggcaggcgtttcagacggcatttgaaggtttcgacatcaataccgttgccgccttcgacgacaccgaccgcgaacgcctgcttgccgacgcgggcatcgtccgcaaccgcctgaaaatcgatgccgccattttcaatgcacggcaaatccaagcgttgcaacaagaatacggctcgttcaagaactggctcgacgcgcaccatccgcgaagcaaagacgaatgggttaaactctttaaaaaacatttcaaattcgtcggcggcgaaatcgtcggcgaatttctgatgagtaccggctacctcaaaggcgcgcacgccgaaagctgtccggtttaccgtgaaaccctgaaataccacccgaaatggctcgatgccatctga

SEQ ID NO: 54732 - DNA, 1356 bp, Neisseria meningitidis
atgagtatccaatccggcgaaattttagaaaccgtcaaaatggttgccgaccagaattttgatgtccgcaccattaccatcggcattgatttgcacgactgcatcagcagcgatatcaatgtgttgaaccaaaatatttacaataaaattaccacagtcggcaaagacttggtcactacggcaaaatatctgtctgccaaatacggcgtaccgattgtgaatcagcgcatttccgttacgccgattgcccaaatcgcggcggccacccatgctgattcttacgtcagcgtggcgcaaactttggataaagctgccaaagccatcggtgtgtcttttatcggcggtttttccgcgttggtgcaaaaagggatgtcgccttcggatgaggtgttaatccgctccattcccgaagcgatgaagactaccgatattgtgtgcagctccatcaatatcggcagtacgcgtgccggtatcaatatggatgcggtcaagctggcgggcgaaaccgtcaaacgcacggcggaaatcacgcccgaaggtttcggctgcgctaaaattgtcgtgttctgcaacgcggtggaagacaacccgtttatggcgggcgcgtttcatggttcgggcgaagcggatgccgttatcaatgtcggcgtatccggcccaggtgtcgtaaaagccgcgttggaaaattcagatgcaacgacattgaccgaagttgcggaagtagtgaagaaaactgctttcaaaattacccgcgtgggcgaactcatcggccgcgaagcctcaaaaatgctgaatatcccgtttggtattctcgacttgtcgctggcgccgacccccgccgtcggcgactcagtggcacgcattcttgaagaaatgggcttgagcgtctgcggtacgcacggcacaacagcagctttggcattgctgaacgatgccgtgaaaaaaggcggcatgatggcttccagcgcggtcgggggtttgagtggcgcgtttatccccgtttccgaagacgaaggtatgattgccgccgccgaagcaggcgtgctgacgctggacaaactcgaagccatgaccgccgtttgttcggtcggcttggatatgattgccgttcccggcgacacacccgcgcacaccatttccggcatcattgccgacgaagccgccatcggcatgatcaacagcaaaaccactgccgtgcgcattattccggtaaccggtaaaaccgtcggcgacagcgtcgagttcggcggcctgttgggctacgcgcctgtaatgccggtaaaagaaggctcatgcgaagtgttcgtcaaccggggcggcaggattcccgcaccggttcaatcgatgaaaaactga

SEQ ID NO: 54733 - DNA, 1470 bp, Neisseria meningitidis
atgccgtctgaaaccgatatgttctgtgtcggcaatgtttcagacgaaaacggaaggacaaagattatgaaaaaaattcaagcggatgtcgtcgtaatcggcggcggtactgccggtatgggtgcgtttcgcaatgcccgtttacattcggataatgtttacctgattgaaaacaatgtgttcggcacgacctgcgcgcgcgtgggctgtatgccttccaaactcttgattgccgccgcagaggcgcgtcatcacgcattgcataccgacccgttcggcgtgcatttggacaaagacagcatcgtcgtcaacggtgaagaggtcatgcagcgcgttaaatccgagcgtgaccgttttgtcggctttgtcgttgccgatgtggaagagtggcctgccgacaagcgcattatgggttcggctaaatttatcgacgagcataccgtccaaatcgacgagcatactcaaattacggcaaaaagtttcgtgattgctaccggttcgcgtcccgtcatcctgccgcaatggcagtctttgggcaatcgtttgattatcaacgatgacgttttctcatgggatacgctgcctaagcgcgttgccgtgttcgggccgggtgttatcggtttggaactgggtcaggcattgcaccgtttgggcgtgaaagttgaaattttcggtttgggcggaatcatcggcggcatttccgaccccgtcgtttcagacgaggcgaacgccgtgttcggcgaagaattgaaactgcatctggatgctaaaaccgaggtcaaactcgatgcagacggcaatgtagaagtccattgggagcaggatggcgaaaaaggcgtatttgttgccgaatatatgctggcagccgtgggccgccgtccgaacgttgacaatatcggtttggaaaatatcaatatcgaaaaagatgcgcgcggcgtacctgttgccgacccgctgaccatgcagaccagtattccgcatatcttcatcgcaggcgatgcgtccaaccaactgcctctgctgcatgaagctgccgaccaaggcaagattgccggcgataacgcgggccgctacccgaatatcggcggcggtttgcggcgcagcaccatcggcgtggtgtttaccagtccgcaaatcggctttgtcggtctgaaatacgcgcaggttgccgcgcaataccaagccgacgaatttgtcatcggcgaagtatcgttcaaaaaccaaggccgcagccgcgtgatgctggtgaacaaaggccatatgcgcctgtatgccgaaaaagccaccggccgctttatcggcgcggaaatcgtaggccctgccgccgaacatttggcgcacctgttggcttgggcacatcaaatgaagatgaccgttccgcaaatgctggatatgccgttctaccatcccgttatcgaggaaggtctgcgtaccgcgttgcgcgatgccgatgcgaaattgaaagcctga

SEQ ID NO: 54734 - DNA, 264 bp, Neisseria meningitidis; identical to SEQ ID NO: 36383

SEQ ID NO: 54735 - DNA, 1479 bp, Neisseria meningitidis
atgaaatacaaagacctgcgcgacttcatcgccatgctcgagcagcagggcaaactcaaacgcatcgcgcaccccgtttccccgcatttggaaatgaccgaaatcgccgaccgcgtgctgcgcgccgaagggccggcattgttgtttgagaatccgattaagcctgacggtacgcgctacggttatcctgtgttggcaaacctgttcggcacgcccgaacgcgtggcgatgggtatgggcgcggacagcgtgtccaagctgcgcgaaatcgggcagacgctggcgtatttgaaagaacccgaaccgcccaaaggcatcaaagatgcgttttccaaactgccgctactgaaagacatttggagcatggcgccgaacgtggtgaaaaacgcgccgtgtcaggaaatcgtgtgggaaggcgaaaacgttgatttgtataaacttccgattcagcattgctggccggaagacgttgcgccgctggtaacatggggcttgaccgtaacgcgcgggccgcacaaaaaacgccaaaatctcggcatttaccgccaacaactcatcggcaaaaacaagctgattatgcgctggctgtcgcatcgcggcggcgcgttggattatcaggagttccgcaaactcaatcccgatacgccgtatcccgtcgccgtcgtgctcggctgcgaccctgccaccattttgggcgcggtaacgcccgttcccgataccttgagcgaataccagtttgccggactgctgcgcggttcgcggacggagctggtgaaatgtatcggcaacgatttgcaagtgcctgcacgcgcagaaatcgtgctggaaggtgtgattcatccgaacgaaaccgcgttggaaggcccgtacggcgaccacacgggctattacaacgagcaggattatttccctgtgtttacggtcgaacgcatcaccatgcgcgaaaacccgatttaccattcgacctacacaggcaaaccgcccgatgagcctgccgttttgggcgtggcgttgaacgaagtgttcgtaccgctcttgcaaaagcagttccccgaaatcaccgatttctacctgccgcccgaaggctgctcctaccgcatggcggtggtcagcatgaaaaaacagtacgccggacacgccaagcgcgtgatgatgggctgctggtcgttcttgcgccagtttatgtacaccaaattcatcatcgtggtcgatgacgacgtgaacgtgcgcgactggaaagaagtcatctgggcggtcaccacgcgcatggaccctgtgcgcgacactgttttggtagaaaacacgcccatcgactatctcgacttcgccagccccgtcagcggactcggcggcaaaatgggtttggacgcgaccaacaaatggccgggcgaaaccgaccgcgaatgggggagcgtcatcaaaaaagaccctgcggttacggctaagattgatgggatttgggaggaattggggttgtag

SEQ ID NO: 54736 - DNA, 1158 bp, Neisseria meningitidis; identical to SEQ ID NO: 53801

SEQ ID NO: 54737 - DNA, 828 bp, Neisseria meningitidis; identical to SEQ ID NO: 36245

SEQ ID NO: 54738 - DNA, 642 bp, Neisseria meningitidis
atgaaactgtatatttacgaccattgcccgttttgcgtgcgtgcgcggatggctgccgggctgtttggcgcggacgttgaagaagccgtgctggcaaacgacgacgaggcaacgccgatcggtatgatcggtgcgaaacaagtgcccgtcctgcaaaaagaagacggttcgtttatgggcgagagtttggacattgtgcggcatttcgaccgcgaagaccgtctgaaagacgaagtccgccccgagatacgggcgtggctggacaaggtgggcggatacaacgacaaactggtgcagccgcgcgtgatcaaaatcgggctgcctgaatttgcaacgccggaagcggtgaaatattttacagacaaaaaagagaaaagcatcggcagcttttccgccaatttgaataaaaccgcccaatacctcgaacggataaacgcagatttgcaagagttggaaaatttgatggacggtgcttcagacggcatcaacggcggaatcggtatggaggatattttggttttccccgttttgaggaatctgaccgtggtgcgcggcatcgcgttccctcggaagacgatggattatttaatcggtatgagtgaaaaatcgggcgtgccactttatttcgacagggcattgtaa

SEQ ID NO: 54739 - DNA, 375 bp, Neisseria meningitidis; identical to SEQ ID NO: 36393

SEQ ID NO: 54740 - DNA, 198 bp, Neisseria meningitidis
atgaaatggaccgacacccggcgtatcgccgaagaactctatgacctgcacggcgaaaccatcgatcccagaaccgtgcgctttacccaactgcgcgacctgattatggcattgcccgaatttgatgacgatcccgcccgttgcggcgaacgtattctcgaagccgtgcagcaggcatggatagacgaggcagaataa

SEQ ID NO: 54741 - DNA, 1482 bp, Neisseria meningitidis
ttggcaacagacattcccatccccgacctcaaacggctggcggggcatattgcggaacgcctggatgtattggcgcaatgcgaatcgccggtttatattgccgacattctcgaaagcgtgctgtccgttatcaaaaacgtcgataccggaggcaagcgcgcacgggaaaatttcaaacagattctgaaaaccgaattcatctacgccgccgctgcggtattgaaaaacaaaaccaaatgggaaatccccgaaaatacccgcaatctcgattcggacatcatctgtacctatatctgcgaagtgttcctaaaatcgcacctgctcggcaacagttttccgatgatgcgcccgcgcgaagtgaagcagatgcccgaaccggtgtttgacaaagtattgtttgccgaacagcgcgcccgccagttggaagttatccgaacgtcaaaatacatcttcgccatcgcgccttattacaccgacgatattccgttttccctgcgccgcttcctgtcggaagacaaactttataccagctacaaccgctattacaccgccatccatatccccgtccgcaacatcactcagaatgatgccctgcgttttgccaacggtttgaaacagattctctcgctgcaatccggcgtgagctgggaaatcatcgatatgatggacaggatagaggaaaactacgacaaaaaagccctgccgctgttgttttcgccattccccgcgcaagtcgaacgcacgcaggcgattgccgccagattggaccaattcgagcggctgttgggcgacaccgtcctcgatccgttctactattgcctgacgcgtatggcgaagggcgaggaagatttgaaatatatttatatcgccttccgccagtctttcggcggcatcttcaattcgtttgaaaacttccgcctgctgcccgcgctgtggatgagcagggatgcggaaaatatgtccgaccgcatgaacgcctatatttccgcaatggaagaccgccgccgcgagatattgtccattcggcagggaaagcctgaagaagaattttcccgcaagatggtcgtctgcctgatcgacttggaaaattgtttggaaaaacacctcgaacagttcaagccggtatcggaaagcatcgaagcctgtaccgccaaactgcaggagcaaccgtcgttcttcaacaggctgatgaaaaccaacgacaagctcaacaggcagattgacgtgttgcagaaacagtcggcagccatccacaacgaagcctatatcgaaatgaacacgctgctttaccgccaccgcgaagtggtttccgtccacaaccgcaaagcagattatgcggaaaagggcaaagagcagattgcgctgttcccgcgcggattgaacggcatcaccaagctgcccgccgccgtcctgttgcccgagcgtccctaccattttgatatgaaggaggttctgcatatattctcctggataccgaggtag

SEQ ID NO: 54742 - DNA, 378 bp, Neisseria meningitidis; identical to SEQ ID NO: 53475

SEQ ID NO: 54743 - DNA, 936 bp, Neisseria meningitidis
atggggcacaatatgatgaccacccaaaaatggtatgagcatattactaatgtaatcataggcaatactgctaatttcaatagcggttgccttgactctatagattatgtagatgaaagaaaaggcgttccgcttgcagctatgcaacatattttcatggacgttagagctgcagcttcccatgcctatctatttgaacatgatcttaagaaattcaagcaatatgcttatgttgcaggaaagctgggggttttgctgagtgtaaattctacagaccctgaacccttcttctttccctgtgacatgctcaacattcaaaatccgatgtttctgatgctgatgagcgacagcccacagctgcgcgagtttctggtgcgcaatatcgacaacatcgccaacgatacagaagcctttataaaccgctacgacctcaaccgtcatatgatttacaatactctgctgatggtagagggtaagcagcttgatcggttgaaacaacgtagcgagaaagtcttggcgcatcccacccctagcaaatggctgcaaaagcggttgtacgattaccgcttcttcctcgctttcgccgaacaggatgccgaggcgatgaaagccgccttagagccgcttttcgataaaaaaaccgcgcgtatggctgccaaagaaacattgtcctatttcgatttctacctgcagccgcaaatcgttacctacgccaaaatcgcatccatgcacggtttcgatttgggcatagatcaagaaatcgcaccgagggatttgactgtttacgatccgctgccggcagacgaatatcaagacatcttcgattttatgaaacagtatgacttgtcttacccgtatgaatatctgcaggattggatagattactatacgttcaaaaccgataagctggtatttggtaacgcgaagcgagagtga

SEQ ID NO: 54744 - DNA, 648 bp, Neisseria meningitidis; identical to SEQ ID NO: 37687

SEQ ID NO: 54745 - DNA, 1344 bp, Neisseria meningitidis
atggaagataagcaagggatgacaaaggcggttgccggcgtgatgacggacgcgccagcggacggcaggaagccggcaaccgcttcaaaccttccccccttatctaacaggggggggacagaaaccgaaacggcaggcagggttcaggaagtcttcgaatgttacgaaacgtacataacggacggcaaaggaaacctgttaggcgttcctcttcggcgcggtgtatcagattcggctttcattgatcaaattagcttttcatttcatgaaaaaccctttttcgataaatacggcgttcgtgtaagtcttttggaagacgaagattttattcgcgcagcgtccatgctcgccgaagaagttttcggtttcggtatctacaaagagtccaaaggctcgggcggccgtttttatgagcgctgttggttgatgggttcggaagacgtcctatacggtcgcgtccattttggcggacaaaacaataccattcttttcgaactgaccggcaccggttgcggcgtcgcaaaagaaggctgggaatcacgacttttcgcattcctgactaatgcaatccgcccaaaaatcacacgcgttgacatcgcaaaagactttttcaacggcgaatacagcccgaaccaagcccgtgaagaccgaaataaaggtatgtttacctgtcatcacgtcaaaccaaaaggcgaatgtttggggtcagattgggaagaagacgatgaagccaaaatgaccaaaggcaagacctatggtatcggctcccgtgaatcgtccaaatatgtccgcgtctatgaaaaaggcaagcagttgggcgataaaacaagcacatggacgcgatttgaaattgaattcaaagcaaaagatatcgttatccctttcgaagttttgcagaatccgggcgaatatttcggcggcgcatatccgatttgcgaacgattcgtccaaaaggcaacgcgcatacacgcggttaaggaagataaggtcatttcagccgaccgctaccttgaatgggtaaaaaaacagttcggacgtgcggcaaacggtctgaaattcatttttcccgaattggacaaagccaaactgtttgaactgattgagccgagtcatcacaagctgcccaagtctttggctcccgaagcctacgactgcgcctttttgaaagctcaagccattcatgaacagcccgcattcaaaccgtacaatgacccttactatatgtacgaatattacgagaatcttgaaaaacagcttgaacagcaaaaacacgtcaacaatgaagaaagctataacaacttcatttacgacaaattcgcaagactaccgatttcatgggcttaa

SEQ ID NO: 54746 - DNA, 390 bp, Neisseria meningitidis; identical to SEQ ID NO: 39501

SEQ ID NO: 54747 - DNA, 1134 bp, Neisseria meningitidis
atgtttaaaaaattcaaaccggtactgttgtcattttttgcacttgtatttgccttttggctggggacgggtattgcctatgagattaatccgcgttggtttttgagcgatacggcaactgaaatacctgaaaatccgaatgcttttgtggcgaaacttgcccgcctgttccgaaatgccgacagggcggttgtcatcgtgaaggaatcgataaggacggaggaaagtcttgccgaaactgtggatgacggtccgttgcagtcggagaaggattatctcgcgctcgctatccggctcagtcgtttgaaagaaaaggcgaaatggtttcacgtaacggagcaggaacatggggaagaggtttggctggattactatatcggcgagggcggtttggttgcggtttcgcttttgcaacgctcgccggaagcgtttgttaatgccgaatatctgtatcggaacgatcgtccgttttctgtaaatgtgtacggcggaacggctcacggggaaaattatgaaacgacaggagaatatcgggttgtttggcaaccggacggttcggtatttgatgcggcagggcgcgggaaaatcggggaagatgtttatgagcattgcctcgggtgttatcagatggcccaggtatatttggcgaaataccgggatgtcgcgaatgacgagcagaaggtttgggacttccgcgaagagagcaaccggattgcgtcggactcgcgcaattctgtgttttatcagaatatgcgggaattgatgccccgggggatgaaggcgaacagtcttgtggtcggctatgatgcggacggtctgccgcaaaaagtctattggagtttcgacaatgggaaaaaacgccagagtttcgaatattatttgaaaaacggaaatctttttattgcacaatcttcgacggtagcattgaaagcggatggcgtaacggcggatatacagacctatcatgcgcaacagacgtggtatttggatggcgggcggattgtccgcgaagagaaacagggagacagactgcctgattttcctttgaacttggaaaatttggaaaaagaggtgagccgttatacagaggctgcggcgagacgttcgggcggcaggcgcggcctttcttactga

SEQ ID NO: 54748 - DNA, 303 bp, Neisseria meningitidis; identical to SEQ ID NO: 39628

SEQ ID NO: 54749 - DNA, 270 bp, Neisseria meningitidis; identical to SEQ ID NO: 48993

SEQ ID NO: 54750 - DNA, 252 bp, Neisseria meningitidis; identical to SEQ ID NO: 37235

SEQ ID NO: 54751 - DNA, 639 bp, Neisseria meningitidis
atgcaaatcgccattatcgattacggtatgggcaacctgcattccgtattgaaatccgtctggacggcggggcagcttgccggaaaaaataccgaaatctttttaagcggcgaccccgaacgcgtgtcccgcgccgacaaagtcatttttcccgggcagggcgcgatgcccgactgtattgcggcactgacgcgcggcggcttggacgaggcagtcaaagatgccttaaaaaacaaaccctttttcggaatctgcgtcggcgcgcaacttttattcgaccacagtgaagaaggaaacaccgacggcttgggctggttcggcggcaaagtcagacgctttgagcgcgacctccgcgaccggcagggatgccgtctgaaagtcccgcatatgggctggaacaccgtgcgccaaacccaaaaccacccgctgtttaaagatattccccaaaacacgcgtttttacttcgtccacagctactatttcgaccccgaaaatcccgaaaccatattgggcgaaagcgactacccgtccccgtttgcctgcatcgtcggcaaagacaacgtattcgccacgcaatttcacaccgaaaaaagccacgatgccgggctgacgatgttgaaaaactttttaaactggtaa

SEQ ID NO: 54752 - DNA, 1419 bp, Neisseria meningitidis
atgtctattaaaaacgccgtaaaattgattgaagaaagcgaagcccgctttgtcgatttgcgctttaccgataccaaaggcaagcagcaccactttaccgtgcctgcgcgcatcgtgttggaagaccccgaagagtggtttgaaaacggtcaggcgtttgacggttcgtctatcggcggctggaaaggcattcaggcttccgatatgcagttgcgtcccgatgcgtctacagccttcgtcgatcctttttatgatgatgttaccgtcgtcattacctgcgacgtcatcgaccctgccgacggtcagggttacgaccgcgacccgcgctccatcgcacgccgcgccgaggcctatttgaaatcttccggcatcggcgacacggcatacttcggccccgagcctgaattcttcgtcttcgacggcgtagaatttgaaaccgacatgcacaaaacccgttacgaaatcacttccgaaagcggcgcatgggcaagcggcctgcacatggacggtcaaaacaccggccaccgccctgccgtcaaaggcggttacgcgcccgttgctccgattgacgcgggacaagacctgcgctccgcgatggtaaacattttggaagaactcggcatcgaagtcgaagtccaccacagtgaagtcggtaccggcagccaaatggaaatcggcacgcgtttcgccaccttggtcaaacgcgccgaccaaacccaagacatgaaatatgtgattcaaaacgttgcccacaacttcggcaaaacagccacctttatgcccaaaccgattatgggcgacaacggcagcggtatgcacgttcaccaatccatttggaaagacggtcaaaacctgttcgcaggcgacggctatgccggcttgagcgacaccgcgctctactacatcggcggcatcatcaaacacgccaaagccttgaacgcgattaccaatccgtccaccaactcctacaaacgcctcgtgccgcactttgaagcgccgaccaaactggcatactccgccaaaaaccgttccgcttccatccgcattccgtccgtgaacagcagcaaggcgcgccgcatcgaagcgcgtttccccgatccgaccgccaacccgtatttggcatttgccgccctgttgatggcgggtttggacggcattcaaaacaaaatccatccgggcgaccctgccgataaaaacctgtacgacctgccgccggaagaagacgcgctcgtcccgaccgtttgcgcttctttagaagaagccctcgccgcgctcaaagctgaccacgaattcctcctgcgcggcggcgtgttcagcaaagactggatcgacagctacatcgcctttaaagaggaagatgtccgccgcatccgcatggcgccgcacccgctggaatttgaaatgtattacagcctgtaa

SEQ ID NO: 54753 - DNA, 1254 bp, Neisseria meningitidis
gtggacaaactgaaaatctccgcaaacggcccgctcaacggggaaataacggtctcgggcgcgaaaaacgcggcattgccgctgatgtgcgcgggtttgctgacatcgggtacgttgcgcctgaaaaacgtccctatgctggcagatgtcaaaaccacgcaaaaactgcttcaggggatgggcgcgcgcgtcctgaccgacaatatcagcgaatttgaaatcaacggcggtacggtcaacaacacgtgcgccccttacgagttggttcggacgatgcgcgcttcgattttggtgctgggcccgacgctggcgcgtttcggcgaggcgcaagtcagcctgccgggcggctgcgccatcggttcgcgccccgtcgatcagcatttgaaaggcttggaagcgatgggggcggaaatcgtcatcgaacacggttacgtcaaggctaagggtaaactcaaaggtacgcgcgtggcgatggatgtcgttaccgtcggcggcacggaaaacctgctgatggcggcgacgctggcggaaggtacgacggttttggaaaactgcgccatcgagcctgaagtggtcgatttggcggaatgcctggttaaaatgggcgcgaaaatcagcggcatcggaacatcgaccatgatcgtggaaggtgtggacgagctgcacggctgcgaacacagcgtcgtccccgaccggatcgaggcggggacgttcctgtgcgcggtggcgataaccggcggcagggtggttttgcggaatgccgccccgaaaacgatggaagtggtgttggacaaactggttgaggcaggtgcggtgattgaggcgggcgacgattggattgccatcgatatgcggcagcgtccgaaggcggtggacatccgcacggtcgtccaccccggcttccccacggatatgcaggcgcagtttatggcattgaatgccgtggcagagggaagctgccgcgtggtggaaacgatttttgaaaaccgctttatgcacgtccccgagttgaaccggatgggggcgaacatcacaaccgagggcaatacggcatttgtgcagggtgtggaacagctttccggcgcggtcgttaaggcgacggatttgcgtgcgtccgcaagcctcgttatcgccggtttggcggcgcgcggcgaaaccgtggtcgaacagatttaccacttggatcgcggttatgaaaatattgaaaaaaaactcggcagcgtcggcgcgaaaatcgagcgcgtatccggctga

SEQ ID NO: 54754 - DNA, 1386 bp, Neisseria meningitidis; identical to SEQ ID NO: 44355

SEQ ID NO: 54755 - DNA, 1575 bp, Neisseria meningitidis
atggctcaaatccaaatgagcgcaaatgttaaaaccatcaacgccgtctttgccgccatgctggtaggtacagtcggctattttatttattggggcttgggttatacccattacaattacgccgccttattcattattgccacgatgttcggcgtgtttatggcgttcaacatcggcggcaacgatgttgccaattctttcggcaccagcgtcggtgcgggtacgctgaccatcccgcaggctttgctgattgcggcggtatttgaggtcagcggcgcggtcatcgcgggcggcgaggtaaccaataccatacgcaaaggcatcgtcgatttgaagggtgttgatttcgaacccatacagtttgtgtttattatgatgtccgcgcttttggcggcggcgttgtggctgttgtttgcctcgaaaaaagggcttccggtatctaccacccattccattatcggcggcattgtcggcagcgcggtatgtatggcggtaatgaacgatgccgcatcgggcgatttgatacgttggggcaagctgggcggtattggtgtttcttgggtattgtcgcccgtgttgggcggcgcggtgtcctatttcctgttttcgcgcgtcaagaaaaacgtcttagattacaacgcttgggcggaaggcacgctcaagggcatcaagcaggaaaaaaaggcctataaagaacggcaccgcctgtttttcgagggtttgtccgaagccgaaaaagtcgagtacgccaccaaaatggcgcacgacgcgcaaatttacgacgaacccgaattcgatccgcaagagctgcaatcggagtattaccgcggtctttatgcattcgacaaccgtaaaaacaatgtcgattcctacaaagcgctgcattcttggattccctttatcgcttcgttcggcgcgatgatgatttccgctatgctgattttcaagggcttgaaaaacctgcatttggggatgagcaacgtcaacagcttcctgaccatctttatgataggcgcggcggtgtggatggggacgtttgtgtttgccaaaagcctcaagcgtaaagacttgggcaaatcgacctttcagatgttttcatggatgcaggtctttaccgcctgcggcttcgcattcagccacggtgcgaacgatatcgccaacgccatcggtccgtttgccgcgattatggatgttttgcgtaccaacagcgttgccgcgcaaaatgtcgtccccccgattgcgatgctgactttcggcatcgcgctgattgtcggtttgtggtttgtcggtaaagaggtgattaaaaccgtcggtacgagtttggcggaaatgcatcctgcttcgggttttaccgccgaactgtccgccgcatccgtcgtgatgggcgcgtcgctgatggggctgcccgtgtccagtacgcatatcttggtcggcgcggtactcggcatcggtctggtcaaccgcaatgccaactggaaactgatgaagcccatcggtttggcgtgggtcattaccctgcctgccgccgccgtattgtcggttgtctgctacttggttttacaggcagtattctga

SEQ ID NO: 54756 - DNA, 1239 bp, Neisseria meningitidis
gtgattgcatcgctgacgggcgcggccgtgggcggcacgccggtagatgcgcaaaccggaggtgcggtcggacagaatgcggtggaaaacaacctctatctgacatcggaagccttaaagaaggacaagcagacagctcgtaaaatttattccgtcataaaagagcaagtcaagcatgaatgcagttccacaggaagaattaccgaatgtcgtcaaaatataggacgcattatcgaatttacccaagacaaacgctttgacagtaggtttaaggacttaaaaaaagaatccttatattacctaaataaacatcctgatttagtagcctcttatttgaaggctgaatacgaaaagctggatagggaagacaaaagtatcctgcaccgctacatctcacccggggctgaaatcgtttcgggcagtttgggggttgttctttcaggagtagccggaggcggatcttgtgccgagactttcggcttaggctgtgccgccgctttggttggtgtaacgtcttcctacgatcatgtcattactgggacgaaaaacttcggaaaaaaagccagcgagcaacgaccgacgattgcggttcaggccttgaagcagttggggctgtcggagcaggctgcggaatatgttcagttctctatagatttgttcagtgtgggtaaatcggggggtggtatacctaaggctaagcctgtgtttgatgcgaaaccgagatgggaggttgataggaagcttaataaattgacaactcgtgagcaggtggagaaaaatgttcaggaaacgagaagaaggagtcagagtagtcagtttaaagcccatgcgcaacgagaatgggaaaataaaacagggttagattttaatcattttataggtggtgatatcaataagaaaggcacagtaacaggagggcatagtctaacccgtggtgatgtacgggtgatacaacaaacctcggcacctgataaacatggggtttatcaagcgacagtggaaattaaaaagcctgatggaagttgggaggtgaaaacgaaaaaaggtgggaaagtgatgaccaagcacaccatgttcccaaaagattgggatgaggctagaattagggctgaagttacttcggcttgggaaagtagaataatgcttaaggataataaatggcagggtacaagtaaatcgggtattaaaatagaaggatttaccgaacctaatagaacagcatatcccatttatgaatag

SEQ ID NO: 54757 - DNA, 372 bp, Neisseria meningitidis; identical to SEQ ID NO: 36794

SEQ ID NO: 54758 - DNA, 618 bp, Neisseria meningitidis
atgagccacaaaaaacaagatgccttccaaggattgatcgacgcgctgaaggttttacccaacgtcgggccgaaatcggcacagcggatagcgtatcatttgctccaacacaagcgcaaagaggctgaaaaactggtggatgccttgcagacggcattgaagcaggttcaccattgcgcgatgtgcaacacgttttgcgaaggcggattgtgcgatatttgtgccgatgaaacacgcgacgggcggcggctgatggtggtgcatatgcctgccgacgtgtcgaatatggaagtggcaaactgccacgacgggctgtatttcgtcctgatggggcaaatcaatacggcattgggaatggacgtatccgccatcgcattggacaggctggcgcaacggctgggcggcggggaagtcgaagaaatcattattgcaaccgcttttaccgcagaaggcaatgcgacggcgtatgtcctgtccgagttttttaaaaacctgccttacaaagtcagcaggctgtcgcagggcatccccttgggcggcgaattggaatatgtcgatgcgggaacgctggcgcaggcggtgtacgaacgccgcctgattaaagaaggcggggcataa

SEQ ID NO: 54759 - DNA, 738 bp, Neisseria meningitidis
atgggcggacaaaaaacgcatttcgggtttagcacggtcaacgaagatgagaaagccggaaaagtggcggaagtgttccactccgtcgccaaaaactacgacattatgaacgatgtgatgtcggcagggctgcacagggtgtggaagcatttcaccatcaacacggcgcacctgaaaaaaggcgataaagtgttggacattgccggcggtacgggcgatttgtcgcgcggttgggcgaaacgggtcggcaaggaaggcgaggtttggctgaccgatattaattcctctatgctgaccgtcgggcgcgaccgtcttttgaacgaaggcatgattttgcccgtgtcgcttgccgatgcggaaaaactgcctttccctgacaattatttcaacttggtttccgtggcgttcggcttgcggaacatgacgcataaagatgccgcgctgaaagagatgtaccgtgttttgaaacccggcggcacgttgctggtgttggagttttccaaaatctacaaacctttggaaggcgcgtatgatttctattcgttcaagctgctgccggtcatgggcaaactgattgccaaagatgcggagagttatcaatatcttgccgaatccatccgtatgcaccccgatcaggaaactttaaagcaaatgatgctggatgccggatttgacagtgtggactatcataatatgagtgcggggatcgttgcgctgcataagggcgtgaaattttaa

SEQ ID NO: 54760 - DNA, 813 bp, Neisseria meningitidis
gtgccgtctgaaaccgtttcagacggcacggacaaaccacctccactcaatcctgccgtgttagcgtgtataatcaggcattctatccgaaattcacaacaggtcagcaatatgtctttgaaaacagtagccgttatcggcgcaatggaacaagaaatcgagcttttgcgcgagatgatggaaaatgtcaaagccgtctctttcggcaagtttgccgcctatgaaggcgaattagcgggaaaacgcatggtgcttgcattgagcggcatcggcaaggtcaacgcggcggttgcaacggcttggcttatccatcaattcgcaccggactgcgttatcaacaccggcagcgcgggcggcttgggcaagggtttgaaagtcggcgatgtcgtggtcggcacagaaatcgcgcaccacgatgtcgatgtaaccgcattcggctatgtttggggacaagtgccgcaactgcccgccgtatttgtttcagacggcctcttggtcggcaaagcaaaacaggcggcggaagtgtttgaaggcgcggcggtagaacaaggcctgattgtcagcggcgaccgcttcgtccacagcagcgaaggcgtggcggaaatccgcaagcacttccccaaagtcaaagcagtggaaatggaagcggcggcgattgcccaaacctgtcatcagttggaaacgcctttcgtcatcatccgcgcggtttccgattcggcggacgaaaaggcagacatcagctttgacgaatttttgaaaacggcggcggcaagttctgcaaaaatggtggcagaaatcgtcaaatctttataa

SEQ ID NO: 54761 - DNA, 990 bp, Neisseria meningitidis
atgaaaattaccgttatcggcgcaggttcgtggggtacggcgctcgccctgcacttttcccaacacggcaaccgcgtatccctgtggacgcgcaacgcagaccaagtccgccaaatgcaggaagcgcgtgaaaacaaacgcggactgcccggcttttcctttcccgaaaccttggaagtgtgtgcggatttggcagacgcgctcaaagacagcggacttgtccttatcgtaacctccgttgccggattgagaagcagcgcagagctgctcaaacagtacggcgcgggacacctccccgtcctcgccgcctgcaaaggattcgagcaggatacagggctgctgacctttcaagtattgaaagaagtattgcccgacaataagaaaatcggcgtactctccggtccgagttttgcacaggaactcgccaaacaactgccctgtgccgtcgtcctcgcttccgaaaaccaagagtggattgaagaactcgtaccgcagctcaacacgactgtcatgaggctttacggcagtaccgacgttatcggcgtggcggttggcggcgcggtaaaaaatgttatggcgattgccaccggattgtccgatggcctagagtacgggcttaacgcccgtgccgcactggttacgcgcggattagctgaaatcacccgccttgcctccgcaatgggcgcacagcccaaaaccatgatggggcttgctggcatcggcgacctcatcttgacctgcactggcgcactctcacgcaaccgccgcgtcggcttgggtttggcagaaggcaaggaactgcatcaggtgctggtcgaaatcggacacgtttccgaaggggtcagcacgatagaagaagtcttcaatactgcctgtaagtaccaaatcgacatgccgattacccaaaccctgctgcaactcatccgcaaagaaatgacccctcagcaggtcgtcgaaaggctgatggaacgtagcgcgcgttttgaataa

SEQ ID NO: 54762 - DNA, 1230 bp, Neisseria meningitidis
atggcgttcggcaaatccttatttcatgcgatcggccgcgtcagcctggtcaggcagattgccgccggtttggcgttgggtatcgtaatcggttcggtttccccgcaactgggcttggcggcaggcttgttcggcagcctgtttgtcggcgcgctcaaagcggtcgcgccggttttggtatttattttggtggcggccacaatcgcgcagcaccaaaaaggcaacaaggcgcatatcaggccgattatcgtcctttacctcatcggtacgttttccgcagccctgaccgccgtcatcgctggtatggttttcccgacgcacattgttttggcgggcgcgggcgatgtgtccgccgcgccgccttccggcattgtggaagtattgaaatcgctgctgatgaacctggtcgccaacccgattaacgcgattgccaatgccaactatatcggcattttggcttgggctttggttttgggcgcggcgttgcggaatcacggttcggacgttacgcggcaggtcgttgccgatttggcggaagcggtttccaccgtcgtgaaatggattatccgttttgcccctttgggcattttcgggttggtgtcgtccacaatcgcggagacgggtttcggcgcgctggcgggttatgcgaagctgcttgcggtactgttgggctgtatggcgtttatcgcgctggtggtcaatcccgccatcgtgtggtggaaaatccgccgcaacccttatccgctggtgtttacctgcctgcgcgaaagcggcgtgtatgccttctttacccgttcttccgccgccaatatccccgtgaatatggctttggcgaaaaaactggggctgcacgaagacacttattcgatttccatcccgttgggggcgaccgtcaatatgggcggcgcggcgattacgattaccgttttggctatggcggcggcgcacacccaaggcatacaggttgattttgccaccgcgctgctgttgagcctggtggcgacggtcagcgcgtgcggcgcgtccggtgtggcaggcggttcgctgctgctgattccgctggcgtgcagcctgttcggcatcagcaacgatgtcgctatgcaggtggtcgccgtcggctttatcatcggcgtgattcaggattcggcggaaacggcgttgaattcttcaaccgacgttttgtttaccgctgccgccgatttgggccgacagagaaaccgggcggaataa

SEQ ID NO: 54763 - DNA, 2121 bp, Neisseria meningitidis
atgcgccgttttctaccgatcgcagccatatgcgccgtcgtcctgttgtacggactgacggcggcaaccggcagcaccagttcgctggcggattatttctggtggattgttgcgttcagcgcaatgctgctgctggtgttgtccgccgttttggcacgttatgtcatattgctgttgaaagacaggcgcgacggcgtattcggttcgcagattgccaaacgcctttccgggatgtttacgctggttgccgtactgcccggcgtgtttctgttcggcgtttccgcacagttcatcaacggcacgattaattcgtggttcggcaacgatacccacgaggcgcttgaacgcagcctcaatttgagcaagtccgcattgaatctggcggcagacaacgccctcggcaacgccgtccccgtgcagatagacctcatcggcgcggcttccctgcccggggatatgggcagggtgctggaacattacgccggcagcggttttgcccagcttgccctgtacaatgccgcaagcggcaaaatcgaaaaaagcatcaacccgcacaagctcgatcagccgtttccaggtaaggcgcgttgggaaaaaatccaacgggcgggttcggtcagggatttggaaagcataggcggcgtattgtacgcgcagggctggctgtcggcgggtacgcacaacgggcgcgattacgccttgtttttccgtcagccggttcccaaaggcgtggcagaggatgccgtcttaatcgaaaaggcaagggcgaaatatgctgagttgagttacagcaaaaaaggtttgcagacctttttcctggcaaccctgctgattgcctcgctgctgtcgatttttcttgcactggtcatggcactgtatttcgcccgccgtttcgtcgaacccgtcctatcgcttgccgagggggcgaaggcggtggcgcaaggcgatttcagccaaacccgtcctgttttacgcaatgacgagttcgggcgtttgaccaagttgttcaaccacatgaccgagcagctttccatcgccaaagaagcagacgagcgcaaccgccggcgcgaggaagccgccagacattatcttgaatgcgtgttggaggggctgaccacgggcgtggtggtgtttgacgaacaaggctgtctgaaaaccttcaacaaagcggcggaacagattttggggatgccgcttacccccctgtggggcagcagccggcacggttggcacggcgtttcggcgcagcagtccctgcttgccgaagtgtttgccgccatcggcgcagcggcaggtacggacaaaccggtccatgtgaaatatgccgcgccggacgatgccaaaatcctgctgggcaaggcaaccatcctgcccgaagacaacggcaacggcgtggtaatggtgattgacgacatcaccgttttgatacacgcgcaaaaagaagccgcgtggggcgaagtggcaaaacggctggcacacgaaatccgcaatccgctcacgcccatccagctttccgccgaacgtctggcgtggaaattgggcgggaagctggatgagcaggatgcacaaatcctgacgcgttcgaccgacaccatcgtcaaacaggtggcggcattgaaggaaatggtcgaagcattccgcaattatgcgcgttccccttcgctcaaattggaaaatcaggatttgaacgccttaatcggcgatgtgttggcattgtatgaagccggtccgtgccggtttgcggcggagcttgccggcgaaccgctgatggtggcggcggatacgaccgccatgcggcaggtgctgcacaatattttcaaaaatgccgccgaagcggcggaagaagccgatgtacccgaagtcagggtaaaatcggaagtggggcgggacggtcggattgtcctgacggtttgcgacaacggcaaagggttcggcagggaaatgctgcacaacgccttcgagccgtatgtaacggacaaaccggcgggaacgggattgggtctgcccgtggtgaaaaaaatcattgaagaacacggcggccgcatcagcctgagcaatcaggatgcgggtggggcgtgtgtcagaatcatcttgccaaaaacggtaaaaacttatgcgtag

SEQ ID NO: 54764 - DNA, 195 bp, Neisseria meningitidis; identical to SEQ ID NO: 38181

SEQ ID NO: 54765 - DNA, 438 bp, Neisseria meningitidis
atgcccgtgaaaaaagttgaaaaaaacatcttggtgctgcacggcgcggacaaaatgttcgagctggtcgacaaggttgaggattacccgcactttctgccgtggtacagcaagaccgaagtcatcgggcgtagcggcaacgaactgaaggcgcggctgtttatggattatatgcacgttcgccaatcgtttgccacgcacaaccgcaacattccgggcagggaaatccgtatggaactgctcgagggtccgttcaaaaccttacgtggaacgtggaaatttatcgatttgggcgacgatatgtgcaaaatcgaattcaatttggaatacgatttttccaatgccgttttgtccgccttaatttcccccgtcttcaaccacctttccaccacgctggtcgaagcgttcgtcaaagaggcagaccgccgttatgcttga

SEQ ID NO: 54766 - DNA, 162 bp, Neisseria meningitidis
atggcatatttcggcggatttgttcgcactttgttcgatcttggcgtgtttgaacgcggcggcgtgaaaggaagggagaaatggttttcccgcgtttggcggcggtcggaggtgctgtgcctgatgtgcggcggcatattttcggtgaaattgattttatag

SEQ ID NO: 54767 - DNA, 894 bp, Neisseria meningitidis
atggtaacgttttcaaaaatcagaccgcttttggcaatcgccgccgccgcgttgcttgccgcctgcggcacggcgggaaataatgctgcccgcaagccggtgcaaaccgccaaacccgccgcagtggtcggtttggcactcggtggcggcgcatctaaaggatttgcccatgtaggcattattaaggttttgaaagaaaatggtattcctgtgaaggtggttaccggcacatcggcaggttcgatagtcggcagcctttttgcatcgggtatgtcgcccgaccgcctcgaattggaagccgaaattttaggcaaaaccgatttagtcgatttaaccttgtccaccagtggttttatcaaaggcgaaaagctgcaaaattacatcaaccgaaaagtcggcggcaggcggattcagcagtttcccatcaaatttgccgctgttgctactgattttgaaaccggcaaggccgtcgctttcaatcaagggaatgccgggcaggctgtgcgcgcttccgccgccattcccaatgtgttccaacccgttatcatcggcaggcatacatatgttgacggcggtctgtcgcagcccgtgcccgtcagtgccgcccggcggcagggggcgaatttcgtgattgccgtcgatatttccgcccgtccgggcaaaaacatcagccaaggtttcttctcttatttcgatcagacgctgaacgtaatgagcgtttccgcgttgcaaaatgagttggggcaggcggatgtggttatcaaaccgcaggttttggatttgggtgcagtcggcggattcgatcagaaaaaacgcgccatccggttgggtgaggaggcagcacgtgccgcattgcctgaaatcaaacgcaaactggcggcataccgttattga

SEQ ID NO: 54768 - DNA, 1998 bp, Neisseria meningitidis
atgaagaaaattacccctcaaaacctgcgccccctgctttcggaaagcttgggacataccgattttgtcaacgtcctcaacgcactgattaaatttttgcgccgtggcggcaaaaaatgtgcgggggaacgtttcgacctgattatcgacacattcaaacaagacagggaattactgtcccgcttcagccggtgtttttacatctggctcgcgcaaatacacatttatccggcactcatcaaactcggcatcttctcgcgccacagctttgcccgggaaatgggcatacgcatctacgaacgcttcagcccgtcatataaagattttgccaacttgggcgaagtcttcctttatcttttccattccgaaaacgacgacaaatggctgcaaacgctcaatatccgccaatggctggttttatacgaactcatccggagccacgccgagccgtccaaattgcagacggcgggcatccgccttgccgatgcgcgtttgcgcgccatcgaaatgctgtctgtctggacggcatccgaagccatcgaacccgacctcatccgcatcgccccgcgcctgctggaggccgattcttccttcgtcgccctccaacgcgaaaccgccaaactggtcgaacactaccgcaacggcaccgcgccttacgacaccgcccacctcgaagtgatgttcgaccaatgtttcagccagattgactatttgcgccgcaaagggacgggcgcaggctccggttcgtcggtcaaagtcgcccacctgctcgaacggctccggcaaaccgtaggccgtctgaagctgcttaccgacatccaaaccggtgttggcaacagcaaccgcctgaccatcgcgctgatgaactccctcatctacgcggcagtcgaacaatacagcacccgccacctgcgccgcagcagcatccgtatgctcgcccgcagcattaccgaaaacaaaagccaccacggcgaacactacatcacccgcaaccgcaaagaatatttcaaaatgttctactcggcggcaggcggcggcatcatcatcgccctgatggcgctgctcaaaatccgcatcggctcactcggcctcagccccttcctcacttccttgtcggctgggttcaactacggcatcggctttatgatcatccatatgctgcactgcaccgtcgccaccaagcagcccgcgatgactgccgccagctttgccgaacaggtcgatctcaacgaaggcggcaaagcggtggacaacaaactcgccaagctcctcatcgacgtatgccgctcccaaagtgtcgccgtcttcggcaacgtttccatcgccatccttttggcgtgcgccatatcgttcggctatgcccatctgtaccggctgcccatactcgatgcccacaccgccgcctaccagttcaaatccatagacatcatcgcttacccgacgctgtggtatgccgccattgcaggtctgtggctgttctgctccggcatcatcgcaggttttttcgacaaccgcgccgactacctcaacctgcgccaacgcctgcccttcaaccccttgctgcgtaaaatcatgcgccccgggccccgccgcgtcctcgccgcctacatccacaaacactacggctcgttggtaggcaacttcatcttcgggatgctcttgggtatgaccggctatttcggacacctcctcgggctgccgctggacatccgccacgtcgccttttcctccgccaacctcggctatgccgccgtcagcggcaacgtcggtttgggcacgttcgtactcggcattttcagcgtcctcaccatcggcctggtcaacctctgcgtcagtttcagcctcgccctcttcgtcgccctgcgctcgcgcggcacgaaaatcggcagcatccgcaatctgattaagagtttttggaatcagattaaaagcaatccctgcatacttttcctcccgcccgccaaagaacagggacatcctccttcggacaagccttga

SEQ ID NO: 54769 - DNA, 834 bp, Neisseria meningitidis
atggcaatcgttaaaatgaagccgacctctgcaggccgtcgcggcatggttcgcgtggtaacagaaggtttgcacaaaggtgcaccttatgcgcccttgcttgaaaagaaaaattctactgccggccgtaacaataatggtcatatcaccacccgtcacaaaggcggcggtcataaacaccattaccgtgttgtagactttaaacgtaacaaagacggcattcctgccaaagtagagcgtatcgaatacgatcctaaccgtactgccttcatcgcactgttgtgctatgcagacggcgagcgtcgttacatcatcgctcctcgcggtattcaagtcggtgccgtattggtttccggtgctgaagctgccatcaaagtaggcaacaccctgccgatccgcaacattcccgttggtacgactatccactgtatcgaaatgaaacccggtaaaggtgctcaaatcgcacgttctgccggtgcttctgcggtattgctggctaaagaaggcgcgtacgctcaagtccgcctgcgctctggcgaagtccgtaaaatcaacgtagattgccgtgcaaccatcggtgaagtcggtaacgaagagcaaagcctgaaaaaaatcggtaaagccggtgccaatcgttggcgcggtattcgtccgactgtacgtggtgttgtcatgaaccctgtcgatcacccgcatggtggtggtgaaggccgtacgggcgaggcccgcgaaccggtcagcccatggggtactcctgctaaaggctaccgcactcgtaataacaaacgcacggataacatgattgttcgtcgccgttactcaaataaaggttaa

SEQ ID NO: 54770 - DNA, 1068 bp, Neisseria meningitidis
atgagcaccttcttccagcaaaccgcccaagccatgattgccaaacacatcgaccggttcccactattgaagttggaccgggtaattgattggcagccgatcgagcagtacctgaatcgtcaaagaacccgttaccttagagaccaccgcggccgtcccgcctatcccctgttgtccatgttcaaagccgtcctgctcggacaatggcacagcctctccgatcccgaactcgaacacagcctcatcacccgcatcgatttcaacctgttttgccgtttcgacgaactgagcatccctgattacagcaccttatgccgctaccgcaactggctggcgcaagacgacaccctgtccgaattgctcaaactgattaaccgacaactgaccgaaaaaggtttaaaaatagagaaagcatccgccgctgtcgttgacgccaccattattcagaccgccggcagcaaacagcgtcagaccatagaagtcgatgaagaaggacaagtcagcggccaaaccacaccgagtaaggacagcgatgcccgttggatcaagaaaaacggcctctacaaactcggttacaaacaacatgcccgtaccgatgcagaaggctatatcgagaaactgcacattacccccgccaatgcccatgagtgcaaacacctgtcgcctttgctggaaggattgcccaaaggtacgaccgtctatgctgataaaggctatgacagtgcggaaaaccggcaacatctggaagagcgtcagttgttagacggcattatgcgcaaagcctgccgcaaccgtccgctgacggaaacgcaaaccaaacgcaaccgatatttgtcgaagacccgttatgtggtcgaacagagcttcggtacgctgcaccgcaaattccgctatgcgcggtcaacctatttcggactgattaaagtgagtgcgcaaagccatctgaaggcgatgtgtttgaacctgttgaaagccgccaacaggctaagtgcgcccgctgccgcccaaaaggcgaccggatgcctgattatcgggtatccagggaggattaagggggtatttgggtaa

SEQ ID NO: 54771 - DNA, 507 bp, Neisseria meningitidis
atgaacacccttcaaaaaggttttacccttatcgagctgatgattgtgattgccatcgtcggcattttggcggcagtcgcccttcctgcttatcaagactacacagcccgcgcacaagtttccgaagccattcttttggctgaaggtcaaaaatcagccgtcacagagtattacctgaatcacggcgaatggcccggcaacaacagtgatgccggcgtggcatcctcaaccgacatcaaaggcaaatatgttcaaagcgttgaagtcaaaaacggcgtcgttaccgccacaatggcttcaagcaacgtaaacaacgaaatcaaaggcaaaaaactctccctgtgggccaagcgtcaagccggttcggtaaaatggttctgcggacagccggttacgcgcgccaacaccgccaccgacgccgccatcaccgccgacaccgacaccaacggcaagatcgacaccaagcacctaccgtcaacctgccgcgatgcagcatctgccggctaa

SEQ ID NO: 54772 - DNA, 402 bp, Neisseria meningitidis
atgaaagacaagcacgattcttccgccatgcggctggacaaatggctttgggcggcacgttttttcaagacccgttcccttgcgcaaaagcacatcgaactgggtagggttcaagtaaacggctcgaaggtcaaaaacagtaaaaccatagacatcggcgatattatcgacctgacgctcaattcccttccctataaaatcaaggttaaaggtttgaaccaccaacgccgcccggcatccgaggcgcggcttctgtatgaagaagacgcaaaaacggcagcattgagggaagagcgcaaacagctcgaccaattcagccgcatcacttccgcccatcccgacggcagaccgaccaagcgcgaccgccgccaactggataggctgaaaaaaggagactggtaa

SEQ ID NO: 54773 - DNA, 2274 bp, Neisseria meningitidis
atgaacattactcaaattctttcccaagaactctccgcgactgccgcgcaaatcaccgccgccgtcgagcttttggacgacggcgcgaccgtgccgtttatcgcccgctaccgcaaggaagcgacgggcgggttggacgatacgcagttgcgccggcttgccgagcggctgcaatacctgcgcgagttggaagagcgcaaagccgttgtgttaaaaagcattgaagagcaaggcaaactttcagacggcctccgcgcgcaaatcgaagccgccgacaacaaaaccgcgctggaagacctgtatctgccctacaagcccaaacgccgcaccaaggcgcaaattgcgcgcgaacacggtttgcagccgctggcggacgtgttgcttgccgagcagtcgcaggacgtggaagccgccgcacaaggctacctgaacgaaaacgtccccgatgccaaagccgcgttggacggcgcgcgtgcgattctgatggagcagtttgccgaagacgcggaactcatcggcacgctgcgcgacaagctgtggaacgaagccgaaatccacgcgcaagttgttggaggcaaagaaaccgaaggcgaaaaattcagcgattattttgaccaccgcgaacctattcgtgcgatgcccagccatcgtgcgctagcggttttgcgcggacgcaacgaaggcgtgttgaacatcgcgctcaaatatcagcccgacgacacgccgattacgcagcaaagcgaatacgagcaaatcatcgcccgccgcttcaaagtttcagacggccacaaatggctgcgcgacaccgtgcgcctgacttggcgcgcgaaaatctttttgtcgttggaacttgaagctctcaatcgtttgaaagaagccgccgacaccgacgcgattaccgtgttcgcccgcaatctcaaagacttgctgcttgctgcgcccgccggacggctgaccacgctgggtctcgaccccggctaccgcaacggcgtgaaatgcgccgtggtggacgacaccggcaagctgctggataccgtcattgtctatttgcatcaagaaaacaatatgttggcaacgctgtcgcgcctgattaaacagcacggcgtgaagctcatcgccatcggtaacggcaccgccagccgcgaaactgacaaaatcgcgggcgaactggtgcgtggaatgccggaaatgggactgcacaaaatcgtcgtttccgaagccggcgcgtcgatttattccgcgtccgaactggcagcgcgcgagttccccgacttggacgtttccctgcgcggcgcggtgtccatcgcccgcaggctgcaagacccgcttgccgagctggtcaaaatcgaccccaaatccatcggcgtgggccagtatcagcacgacgtgaaccaaagccagctcgccaaatcgctggacgcggtggtcgaagactgcgtgaacgccgtcggcgtggacgtgaatactgcctccgccccgctcttggcgcggatttccggtttgaatcagacccttgcccaaaacatcgtcgcctaccgcaatgaaaacggcgcgttcgacagccgcaaaaaattgctgaaagtaccgcgtttgggcgaaaaaaccttcgagcaggcggcaggctttttgcggattaacggcggcacagagccgttggacgcgagcgccgtccaccccgaagcctatcccgtcgtcgccaaaatgctggcgcaacaaggcattagcgccgccgaactcatcggcaaccgcgagcgcgtgaagcaaatcaaagcgtccgacttcaccgacgaacgcttcggcctgccgaccattttggacatcctgtccgaactggaaaaacccggccgtgatccgcgcggcgcgtttcagacggcatcgtttgccgaaggcatccacgaaatcggcgacttgcaagtcggtatgattttagagggcgtggtttccaacgttgccaacttcggcgcgttcgtggacatcggcgtgcatcaggacggcttggtgcacatctccgccctatccaataaattcgtccaagacccgcgcgaagtggtgaaagccggcgatgtagtgaaagtgaaagtgctggaagtcgatgccgccagaaaacgcatcgcgctgaccatgcgcttggatgacgaaccgggcggcgcaaaacataaaatgccgtctgaaaaccgcagccgcgaacggacagccggccgcaaaccccaacgcaacgaccgcgccccagccaattcggcgatggcggatgcgtttgcgaagctgaagcggtaa

SEQ ID NO: 54774 - DNA, 417 bp, Neisseria meningitidis; identical to SEQ ID NO: 42505

SEQ ID NO: 54775 - DNA, 366 bp, Neisseria meningitidis
ttggactaccgcttcggaaggcagtaccgcttgttgaaaacggatgatttttcatccgtttttgcattcagaaaccgccgcagccgcgacctgctgcaagtttcgcgttcaaacggcaacgggctggaccatccccgcatcggtctggtggtcggcaaaaaaaccgccaaacgcgccaacgaacgaaattatatgaagcgcgtcatccgcgactggttcagattgaacaaaaaccggctgccgccgcaggatttcgtcgtgcgcgtccgccgtaaattcgacagggctaccgcaaaacaggcaagggcggaactggcacaactcatgttcggcaaccccgcaaccggatgcaggaaacaggcatga

SEQ ID NO: 54776 - DNA, 645 bp, Neisseria meningitidis
gtgacccgccccgccaaaatcaatacttacacacgcatcatcgacgccagccttgcgcttttcaacgaggaaggcgagcgcaacatcagcaccaaccatattgccgcccacttgggcatcagtccgggcaacctctattaccacttccgcaacaaagacgaaatcatcgtccaactgttcaaacgttacagcgaagccctgctggaatacctcaacgaagccgtgttgccgtctgatgtggaagactccatcaactatatggcgggcatttacgacgtgatgtgggaataccgcttcctattcagcgacgtgaacaccctgcttgcacgcagtgccgaactattgggcgaacacaataccttcacccaagccaaagtctccccgctcttggtcaacctgctgacccagctcaacggtctgaacatcatccaagccgaccaaaccgctatgaacgacctcgccgtcaatatgtggatggtcacgaaatactggttcgacttcgacagctccctgcgcggccgcaccaagctgaccgaagactccaaagcacgcggcatccgccgcaccttaagcctccttcgtccttatcttttgcccgaacaccgcgagaaatacgaccggaaaatcggcaacggcaacccgtaa

SEQ ID NO: 54777 - DNA, 912 bp, Neisseria meningitidis
atggacaccctgttcagcctcaaggttttccgccaagtcgtccaaagcggcggcttcacccgcgccgccggcgcgctcggcatctccaccgcaatggcaagcaaacacgtcagccacttggaaaacaccgtccaagccaaactcctgcaccgcaacagccgcaacctcagcctgaccgaagccggggaagaatactaccggcaatgcagttacgcgctcgacacgctcgacgatgccgcgcaaaaagccgccggggggacggaaaaaccgcaggggctgctgcgcgtaacgatgccactgtggtttgccggcagccagatatgcaactggctggcggaataccgcgaacgttatcccgaagtgacattagaactgattttggacaaccgccacgtcgatttgattgccgaaggcgtggatttggcgttgcgcgtttcccaaaccctgtccccgtcactgattgcgcgcccactggcggaaatcgaatttgccctgcttgcctcgcccgacttcctgaggcgcaacggcgtgccggaaacgccggaagaagtggcggggctgcccgccgtcctgccgacctacaccaaccagcagaaactcgacctcacccgcaaatcggacggcaaaaaataccggcttgaactgacccccgtcatccgtaccgacaacacgctgatgatgcgcgaaatgattaaggcgggcgcgtgcatcggttatcagccgctttgggcggcggaacacgatttgcgctgcggcacgctggtgaggctgctgcccggatacgccgtcccgaccgaccggctgaatgccgtttatgcagacagggcattcttaagcgcgaaagtccgcagcttcatcgattttctgaacgaaaaaatcgccagcaggaaaggctgccgaaatgccgtctga

SEQ ID NO: 54778 - DNA, 957 bp, Neisseria meningitidis
atgattttaacaccgccggacacgccctttttcctccgcaacggcaatgccgacacgattgccgccaaattcctgcaacgccccgcacccacataccgccgcgagctgcttcccgacagcacgggtaaaaccaaagtcgcctacgatttttcagacggcatttcgcccgatgcgccgctggtcgtgctgtttcacggtttggaaggaagcagccgcagccattacgcggtcgaactgatgctcgcggtacgcagccgcggttggcacggcgcagtcgtccatttccgcagctgcggcggcattgccaacaccgctccggtgttctaccacttgggcgataccgccgaaatcgcctttactttggacacgcttgccgcgcgttaccgtgaaatatacgccgtcggcgtatcactgggcggcaacgcgctggcaaaatatttgggcgaacagggcgaaaacgcgctgccgcaagccgctgccgtcatctccgcccccgtcgatgcagaggcggcaggcagacgcttcgacagcggcatcacgcggctgctctacacgcgctacttcctccgcaccctgatacccaaagcacggacagttccgggttttcagacggcatttgccgcagggtgcaaaacactgggcgagtttgacgaccgtttcaccgcaccgctgcacggctttgccgaccggcacgactactaccgccgaacttcctgcaaaccgctgctcaaacacgttgccaaaccgctgctcctgctcaacgccgccaacgaccccttcctgccgcccgaagccctgccccgcacagacgaagtgtccgaagccgttaccctgttccagccggcacacggtggtcatgtcggctttgtcggcagcaccggtggcaggctgcacctgcaatggctgccgcagaccgtcctgtcctatttcgacagcttccgcacaaacagtcgttaa

SEQ ID NO: 54779 - DNA, 921 bp, Neisseria meningitidis
atgagaatcaggctggggcggcacaacgcgcccgactttccgcacggggccgccgtaaccataggcaattttgacggcgtacacctcggacacaaacacatcctccaaaaactccgcctcgaagccgatacgcgcggattacccgtcgtgaccgtcgttttcgaaccccaacccaaagaatttttcgcactccgcaccggcaggatgccaccgtgtcggatcagccccctgcgcaccaagctcgaattattggaaggcacaggctgtgtcgatgccgtctgggttttgcgtttcgatcaaaatttttccgaaatatccgcgcaagggtttatcgaccgcctgctgcgtcaaaccttgaatacgcgttatttgctcgtcggcgacgatttccgtttcggtgcggggcgggaaggctgttttgaacttttggcacaacagcccgatatgcagaccgagcgtacgccttccgtcatcgtcgaagacatccgtaccagcagcaccgccgtccgccaagccctttcagacggcaaccttgcctatgcgaaaaaacttttgggacacgactacgtcttgagcggcagggtggtgcacggcagaaaactcggacgcaccttaaacgccccgactgccaacatccgcctgcccggccaccgttatgcactcggcggcgtgttcgtcgtcgaagcggacggcgcattcggcacgcggcgcggcgtggcgagcttcggcttcaatcccaccgttgatagcggctgttctcaaaagcttgaagtccacctgttcgactttcaaggcgacctgtacggacaacggctgaacgtccgcttcctgcacaaactgcgcgatgaggaaaagtttgacggtatggaagaactgaaaaggcagatagcagccgatatggaagccgcaaagtgttggtag

SEQ ID NO: 54780 - DNA, 1098 bp, Neisseria meningitidis
ttgccccatgccgtttttttacactacaatcccctagactatcctgcaaaacgcaccaaaggaatacgccacaataacctgccgcccttcagacggcacaaacctttccgaaacgagcaaactatggacacactgacccgattcctccccgaacacctgcaacaaaaccagctgcccgaagcactcggcggcgttttactgtccgttgtttccgcctgcaccgaaatcaacgccaaagtccgcctcggcgcactggccggcgtattgggtatggcgggcacgggcaatattcagggcgaagaccaaaaaaaactggatgttatcgccaacaacatcatgattgacacactcaaagccaaccctgccgttgccggtttggcaagcgaggaagaagactctttcgtaagtgccggtgaaaacggacgctatctcgtcctattcgaccctttagacggatcgtccaatattgatgtcaacatttccgtcggtacaattttctccatccttgaaaaacccgaaggcgcattggcaaccgaatcattccttcaaacgggcagacagcagcttgccgcaggctatatcctctacgggcctcaaacccagctcgtattcacattcggacacggcgtatatatgttcacgctcaatgccgaaaacgaatttgtgctgaccaaagaaaaaccgaaagtacccgaaagtaccaaagaatttgccatcaatatgtccaaccgccgccactggctgccccccgtccaacaatacatcgacgagctcttggcgggcgaaaccggcacgcgcggcaaaaactacaatatgcgctgggtagccagcatggttgccgaaatccaccgcatcctgatgcgcggcggcgtgttcatgtatccgcaagacaaacgcgacccgtccaaacccggcaaactgcgcctgatgtacgaagccaaccctatgagcctgatactcgaacaggcgggcgcatcggcaagcaacgcatatcaagccatgctcgacatacagcccgaaaacctgcaccaacgcgtcgccgtcttcatgggcagcagcgaagaagtcgcctatctcgaccgcctgcacgcaaaatag

SEQ ID NO: 54781 - DNA, 930 bp, Neisseria meningitidis; identical to SEQ ID NO: 36746

SEQ ID NO: 54782 - DNA, 789 bp, Neisseria meningitidis
atgaaacaatctatgaaaaattggtttgctgccttgctgttggcagtacccatgggtgcggcatttgcttcgggcggtcatgcacactatgagaaagtcgatatcgatttgcgcgaccaagtcagcctgcagcgcggcgcacaaatctttaccaactattgcctgtcctgccactcggcaagcggtatgcgtttcaaccgtttgaaagacatcggtttgactgacgaagaaatcaagaaaaacctgatgtttaccaccgataatgtcggcgatgtcatgcattcggcgatgaacccgaaagatgcggcaaaatggtttggtgctgctccgcccgatttgacattgattgcgcgttccaaaggtgcagactacctttacgcttatatgcgcggcttctataaagatccgacccgtccgagcggctggaacaatactgtattcgataaagtcggtatgccccacccgttgtgggaacagcaaggcgttcaagccgttgagttggatgccaaaggtcagccggttatggtaaaagacgaacacggcgagatgaagcctaagctgtattgggaatctaccggtttgcacagccgccgtctgcctaacggcaaagtgatccaaaaagagtacgacgcatatgtacgcgatttggtcaattaccttgtgtacatgggcgaacctgcacaactgcaacgcaaacgtataggctatgtcgtgatgattttcctatttgcggttatgctgcctttggcgtatttcctgaaaaaagaatattggaaagacgtacactaa

SEQ ID NO: 54783 - DNA, 1050 bp, Neisseria meningitidis; identical to SEQ ID NO: 54608

SEQ ID NO: 54784 - DNA, 408 bp, Neisseria meningitidis
atgaagcggcaggctttcttcaaactgatggcgtgtgcggcatttctgtctgccgtttcgctgcgcctccccgtattgggcgcgtgttacgcaatattgtccctctatgcgtttgcactttacggcatcgacaaacggcgtgccgtgcggggaaaacgccgcattcccgaacaccgcctgctgctgcctgccttgttcggcggttgggcgggcgcatacttgggcagcaggatattcaggcataaaacggcgaaaaagcgttttgttgtgctgttccgtctgactgtttcgggcaatgtcctggcgaccctcatcctgatttatagtggattaaatttaaaccagtacggcgttgcctcgccttgccgtactatttgtactgtctgcggcttcgtcgccttgtcctga

SEQ ID NO: 54785 - DNA, 483 bp, Neisseria meningitidis
atgaaatacttgaatcttgccgcaatcacccttgccgccacatttgccgcacataccgcctcggcagacgaactggccggatggaaagacaacaccccgcaaagcctgcaatcactcaaagcccccgtacgcatcgtcaacctttgggcaacctggtgcggcccgtgccgaaaagagatgcctgccatgtccaaatggtacaaagcgcagaaaaaaggcagtgtcgatatggtcggcatcgcgctcgacacatccgacaatatcggcaacttcctcaagcaaacccctgtttcctacccgatttggcgttacaccggggcgaacagccgaaactttatgaaatcctacggaaacaatgtcggcgtactgccctttaccgtcgtcgaagccccgaaatgcggatacaaacaaaccattaccggggaagtgaacgaaaaaagcctgaccgaagccgtcaaactcgcccattcaaaatgccgttaa

SEQ ID NO: 54786 - DNA, 1557 bp, Neisseria meningitidis
atggatttcagttggttggcagaaccgcatacctggataggttttgccacgcttttggtgttggaagtcgtattggggatagacaatcttgtctttgtggcgattttggcaaacaaggtccagcccgcacggcgcgaccgcgcacggattatcgggctggggctggcagtcgtcatccgcatcattatgcttgcttttatggcgcacatcatcacgctgaccgagccgctgttccaaatcggcggcctcgccgtttccggcaaggacatgattatgctcgcgggcggtattttcctgctttacaaagccaccaccgaactgcatgaacgcctcgaagggcacaaccgttttactgttgccgacaaccaaaaaaaacacgcgccgttttggggcgtggtcgcgcaaatcctgatactggatgccgtgttttccatcgattcggtcattactgcggtggcgatggtcgatcatatcgtcgtggcgatgggtgcggtcgtcgtcgcaatggctgtaatgatttctgccagcaaactcttgaccgaatttgtcgacagacaccctaccgtcgtgatgctctgccttggttttttgttgatgatcggtttcagcctgattgccgaagccttccatttccacattcccaaaggctacctctacgccgccatcggcttctcgattttaatcgaactgtttaaccagatttcccagcgcaacagccgcaaaaacgactacatcggcagctcgtggcgcaaacggactgctgaaaatgtcttgggtatgatgggcatacgcgaaagcgtgcttgccgacgcgggcggcgaatccggggacgacgcgcattttgaagaaaacgaaaaatcgatgatacgcagcgtgctgacgcttgccgaacgcccgattatgggggtgatgatcccacgccgcgacatcgaacggctggacatttcccaaagccgcgaagaacagtatgcccaactgcaaaacacgccttacagccgcctgctcgttgtcggaaaggcgggcgtggacgaacctttgggctacatcaacaaaaaagacctgctgtcccaactgctggaaacaggcggtctcgacattcagacggcattgcgccagccgctcgtcctacccgacggcacgaccgccttgggcgcgctcgaactcttccgccaaagcagcgcggattacgccctcgtcgtggacgagttcggcgcggtgttgggtatggtgacgatgaaagacctgttggaagccattgccggcgactttcccgaagaattcgaacgcgaagaagaaccagccgttcaggggaatcccgatgaaagcctgacggtggaaggcgcgttggaatatgtggagctggcatcccaactcaatctgccgcagcaggaggaagatgccgatttccatacggttgccgggctgattatggaagaattgcaaaccatccccgatgtcggtgattttgccgatttccacggctggcggtttgaagtggtcgaaaaagaagggcagcgcatcgagcgggtcaaaatcaccaaattgcccgaagaataa

SEQ ID NO: 54787 - DNA, 1281 bp, Neisseria meningitidis
atggaaaactcattgaaagaagccgccctcaagttccacgaattacccgttccgggcaaaatttccgttaccccgaccaaatctttggcgaccgacaaagatttggcgttggcgtactctccgggcgtagccgctccttgtatggaaatccatgccgatccgcaaaatgcctacaaatacaccgccaaaggcaacttggtcgccgtcatttccaacggtacggccgttttgggcttgggcgacatcggcgcgctggcgggcaaacccgtgatggaaggcaaaggcgtattgttcaaaaaattcgccggtgtggacgtgttcgacatcgaaatcgatgaaaaagacccgcaaaaactcgtggacatcatcgccgctttagagccgaccttcggcggcatcaacctcgaagacatcaaagcacccgagtgtttctacatcgaacgcgaattacgcaaacgctgcaaaatccccgtattccacgacgaccagcacggcacggccatcattaccgccgctgccgtattgaacgccctgcgttttaccggccgtaaaatcgaagaagcgactttggtgtgttccggcgcaggtgcggccgcgattgcctgcttgaaccaattgctggatttgggcttgaaacgcgaaaacgtgaccgtttgcgactccaaaggcgtgatttaccaaacccgcgaagacaaagatcgcatggacgaatccaaaaaattctacgccgttgaagacaatggccagcgcgtacttgccgatgccgtcaaaggtaaagacatcttcttgggcctctccggcgcgaacctgctgacccccgaaatgttgaacacgatgaacgaaaaacccatcgtgttcgccatggccaacccgaatccggaaatcctgccgctgctggcaaaagaaacccgtccggacgtggttatcggtaccggccgttccgacttcccgaaccaagtgaacaacgtattgtgcttcccattcatcttccgtggcgcgttggatgtcggcgcgacgaccatcaacgaagaaatgaaacgctcctgcgtgtatgctttggcggatttggcgatggaagaagtaaccgaagaagtggttgccgcttacggtaagaaatttgaattcggcgcggaatacctgattccgactccgttcgattcccgcctgctgccgcgcgttgctacggctgccgccaaagcagcgatggaaagcggcgtggcaacccgtccgattgccgactttgaagcctacgccgccaagctgggcgaatggaagctgtaa

SEQ ID NO: 54788 - DNA, 510 bp, Neisseria meningitidis
atggatattttattgaaatactggaagccggtaggcgtattgctgctgatagtcctgatttttaccgcatggcatttcgaccgtgccgaaaaataccgcatgggacgggaggctgctgctgccgaaatttcgaatcgtctgaaagacggctatatcgagcaggcaaagcaggcgcgttctgccgagcagaaggccgctgccgcgtttgccgaacgacaaaccaaattagaagaggaaaaacaaaatgctgaaaaaactgttgccgctatgcgtcttgagcttaaccgcctgcgccactacgccgccgcccaaaatcgcagcagaaacctgcccgcaaccactaccgccgccaccgcatctgatggcgcgtcagattcccaaggctggctattattcggacagtgcgctgaaaaatatgcaggactggcagaaacagccgacggacatgcagccgatttaagggaatggcaggcatatggtcatgcagtaagcagtcagcgtgccgaataa

SEQ ID NO: 54789 - DNA, 867 bp, Neisseria meningitidis
atggcaggtgaaaccattaccgctgccgactacatcaagcaccacttgcagagcttgaccagtttgtcggatgttactcagggtcagggactgaaaaacattgctgatttttcgtttattaaccttgatgccgtcttttttgccgtcctgttgggcgtaatcggcagcttcctgttgtggcgcggtgcgaaaaaagcaacggcaggcgttcccggacgtttccaggctgccgtggaaatcttgtttgagtttgtggacgatatgtgtaagagcatcattcacaacgaaaagtctagaaaagccgtcgcgccgttgggtctgacgctgtttgtctggatttttctgatgaacgcgatggatatgctgccggtcgatttgctgccgatggtatggcagggcattaccggcaaccatcacgccctgctgcgcgtcgtaccgactgccgatttgaacaccactttggcactcgctgtcggcgtgttgctgatttgtatctattacaacatcaaaatcaaaggattgggtggctggtttcacgagttgttcagcgcgccgttcggtgcaaaactcgcacctgcgaactttctgttgaatttggtcgagtttctttctaaaaccgtatcccacggtatgcggttgttcggcaatatgtatgcgggcgaattggtattcttgctgatagccttgcttggcggtgcttgggcggcttccggcagcgtcgaagtcatggatccgattctgtttgtattccacattattgccggtttggcatgggcgattttccatattttggtgattaccctgcaggcgtttattttcatggcgttggcgttcgtctatatcggacaggcacatgatgcgcactga

SEQ ID NO: 54790 - DNA, 1389 bp, Neisseria meningitidis
ttgggatgtatcgtatgttcggacggcattgtctgccgtctgaaatttttgccctttgcggcaggtgcaaacagaatgacaggtggttttttgaagatttcggaagtattggtaaaagtgggcgacggtgtccacactctgctgctcgacaggcagattgtgcgcgacggcaggaaattcgacgcgccgcttttgtggatggtggtgctgatgacggcgttcagcctgctgatgatttattcggcttctgtgtatttggcatcaaaagaaggcggcgatcagtttttctatttgaccagacaggcggggttcgtcgttgccggcttgatagcgagcggttttttatggtttctttgcaggatgaggacatggcggcggcttgtgccgtggatttttgccttatccggcctgttgctggtagtcgtattgattgccgggcgcgaaatcaatggcgcgacccgttggatacctttgggtccgttgaatttccagccgaccgagctgttcaagctggcggtcatcctttatttggcaagcctgttcacgcgccgtgaagaagtgttgcgcagcatggaaagtttgggttggcagtcgatttggcgggggacggccaatctgatcatgtccgccaccaatccgcaggcacgtcgtgaaacattagaaatgtacggccgtttccgggcgatcatcctgccgattatgctggtggcgttcggtttggtgctgataatggtacagccggatttcggttcgtttgtcgtcattaccgtcattgccgttggaatgctgtttttggcaggattgccgtggaaatattttttcgtcctggtaggcagcgtcttgggcgggatggtgctgatgattaccgccgctccctaccgtgtgcagcgggtagtggcatttttggacccgtggaaagacccgcagggtgccggctaccagcttacccactctctgatggcaatcgggcgcggagagtggttcggtatgggtttgggtgcgagtttgagcaaacgcggctttctgccggaagcgcataccgattttatttttgccatcatcgccgaagaattcggtttcttcggtatgtgcgtgctgatattctgttacggctggctggtggtgcgggcgttttccatcggcaagcagtcgcgcgatttgggtttgactttcaacgcctatatcgcttcgggtatcggcatttggatcggtatccaaagtttcttcaatatcggtgtgaacatcggtgctttgccgaccaaaggtctgacgctgccgttgatgtcctatggcggttcgtcagtctttttcatgctgatcagcatgatgctgctgttgcgtatagattatgaaaaccgccggaaaatgcgcggttatcgggtggagtaa

SEQ ID NO: 54791 - DNA, 285 bp, Neisseria meningitidis
atgttcggcggtcgtctgaaaaacgctccatccattaccgccaaacactttttgaaggaaaatatcatgaaatttattaacacctgccgtaaatacggcgcaaaactggctgttgtaacagctgctcccctggctttggccgcacatgcaaatgcaacgttgcccgatacagcaaaaaacgctttggaagccgcaaaagccgacggtatggaagccggttggattgtcgttggcgttttcgccgcgctttttgtcttttccatcgttaagagagtgatgaagtaa

SEQ ID NO: 54792 - DNA, 813 bp, Neisseria meningitidis
atgtcggttgggcattatgaaaattttcccgtcggttcgctgattttgccgcgcaggttgaggaagccggttcacgcggtgtacgcgtttgcacggacggcggacgatatggcggacgagggcagtatgccgtctgaagccaggttggcggggttggagggtttgcggcgcgagttggacgtgttggcatcgggcggccggtcggcgcatcctttgattgcacgattggatgccgaggcggttgtgccgttcggtttggatttgcagccgttttatgatttgctttctgcattttctcaggatgtggttaaaacaaggtatggaaatttcggcgagctggccgattattgccgacgttctgccaatcctgtcggacgcattatgctggctttgtacgggaaaacggatgcggtgtgcgtggcgcaaagcgacggcatctgtacggctttgcaactggtgaatttttggcaggatgtggctgtggattggcaaaagggcagggtttatattccgcaggacgatttgttgaaattcggtgtttccgaaggacagattgcggagggtagggcggatgcggcgtttcagcggctgatggcgtatgagtgccggcgcgcatttcgtatgctgaaggcgggttcgcctttagcgcgcgaattgaaagggcgtatcggtttggaactccgtatgattgtgttaggggcgcagttgattttgcagaaactggacgcgtgccgatacgatgtgtttgcacaacgccccgttttggataagaaggattggttgattatgctgaaacgcgcgttgtggaaatga

SEQ ID NO: 54793 - DNA, 2376 bp, Neisseria meningitidis
atgaataaaaatattaaatctttaaatttacgggaaaaagacccgtttttaagtcgtgaaaaacagcgttatgaacatcctttgcccagtcgggaatggataatcgagctgcttgaacgtaaaggcgtaccatccaagattgaagctttggtacgcgaattgtcgattaaggaagaagagtacgaatttttcgaacgtcgtctgaaggcgatggcgcgggacggtcaggttttaatcaaccgtcggggcgcggtttgcgcggcggacaaattggatttggtcaaatgccgtgtcgaggcgcacaaagacggcttcggtttcgccgtgccgctcacgcccgccaaagacggtgattttgttttgtacgaacgccagatgcgcggcattatgcacggcgatattgtcactgttcgtcctgccggcatggaccgtaggggccgccgcgaagggacggttctggatattgtcgaacgcgcgcaaagcaaagttgtcggccgtttctatatggataggggcgtggcgattttggagccggaagacaagcgtctgaaccaaagcatcgtattggaaccggacggcgtggcgcgtttcaaacctgaatccggtcaggtcatcgtcggcgaaattgaggtttatcctgagcaaaaccggccggcagtggcaaaaatcatcgaagttttgggcgattatgccgacagcggcatggagattgaaattgccgtgcgcaagcatcatttgccgcaccaattcagtgaagcgtgtgccaaagccgcgaaaaaaattcccgaccatgtacgcaaaagcgatttgaaaggccgcgtcgatttgcgcgatttgcctttggtaacgatagacggcgaaacggcgcgcgattttgacgatgccgtgtttgccgaaaaaatcggacgcaattaccgtctggtcgtggcgattgccgatgtcagccattatgtccgccccgatgacgctatcgacacggacgctcaggaacgcagcaccagtgtttacttcccgcgccgcgtgattcccatgttgccggaaaacctgtccaacggcatctgctcgctcaatcctaatgtcgagcgtttgtgtatggtgtgcgatatggtcatcacttacgcgggcaatattaaagaataccgcttctaccccgccgtgatgcgctctcatgcccgcctgacctacaaccaagtttggaaatggcttttagacggcatcgggcatccgttcaaagcacaaatcgacacgctttacaaactcttcaaaatccttcagaaaaagcgtttcgaacgcggggcggtggagtttgacagcatcgaaacccaaatgcttttcgacgacaacggtaaaattgaaaaaatcgtccccgttgtccgcaacgatgcccacaagctgattgaagaatgtatgttggcggcaaacgtttgcgcagcggattttctgttgaaaaacaagcataccgcattgttccgcaaccatttggggcccacgcccgaaaaactcgccgccttgcgcgagcagctcggtctgttggggcttcaacttggcggcggcgacaacccgtcgccgaaagactatgccgcgcttgccggacagttcaaaggcaggccggatgccgaattgctgcaagtcatgatgttgcgctccatgcaacaggcggtttacgaaccgcattgcgacggacactttggtcttgcctacgaagcatacgcccacttcacctcgcccatccgccgctatcccgacctgaccgtacaccgcgccatcaaagccgtgttgaatcagcaaacctacacgccaaaaaaaagctggcaggctttgggcgtgcatacctcgttctgtgagcgccgtgccgacgacgccagccgcgacgtggaaaactggctgaaaacctattatatgcgcgataaggtcggcgaagtattcgaaggtaaaatctccggcatgaccagttttggtatctttgtaacactggacggcatccacattgacggcttggtgcatatcagcgatttgggcgaagactatttcaacttccgccccgaaatcatggcaatcgaaggcgaacgcagcggcatccgtttcaacatgggggacagggttgccgtccgggtcgcccgtgccgatttggatgatggaaaaatcgattttgtcctgattgccgaggggagcggcagggggcggaaagttaaatcatccgcgtctgccaaaccggcagggacggcggggaaagggaaaccgaaaaccgccgccgagaaaaaaacagcccgaggcggcaaagtaaggggaaggggcgcgtctgccgccgcagaatcggggaaaaaggcaaagaaaccggttccgattaaggtaaaaaaacggaaaggcaaatcataa

SEQ ID NO: 54794 - DNA, 870 bp, Neisseria meningitidis
atgaaacgtatctttttgtccgccttgcccgccatcctgcctttatccacttatgccgacctgcccttgacgattgaagacataatgaccgacaagggaaaatggaaactggaaacttcccttacctacctgaatagcgaaaacagccgcgccgcacttgccgcaccggtttacattcaaaccggcgcaacctcgtttatccccattccgaccgaaatccaagaaaacggcagcaataccgatatgctcgccggcacgctcggtttgcgctacggactgaccggcaataccgacatttacggcagcggcagctatctgtggcacgaagaacgcaaactcgacggcaacggcaaaacccgcaacaaacggatgtccgacgtatccctcggcatcagccacaccttccttaaagacgacaaaaaccccgccctaatcagctttcttgaaagcacggtttacgaaaaatcgcgcaacaaagcctcgtcgggaaaatcgtggctcatcggcgccaccacctacaaagccatagatccgattgtcctttccctcaccgccgcctaccgcatcaacggcagcaaaaccctttcagacggcatccgctacaaatcgggcaactacctgctgctcaaccccaacatctcatttgccgccaacgacagaatcagcctgaccggaggcatccaatggctgggcaaacagcccgaccgcatagacggcaaaaaagaatccgcaagaaacacatccacctacgcccatttcggcgcaggtttcggtttcaccaaaaccacggctttaaacgcatccgcacgtttcaacgtttcagggcaaagcagttccgaactgaaattgggcgtacagcatacattttaa

SEQ ID NO: 54795 - DNA, 474 bp, Neisseria meningitidis; identical to SEQ ID NO: 49535

SEQ ID NO: 54796 - DNA, 900 bp, Neisseria meningitidis
atggttgcaaaaataaaaaaattctcagattcaaccctttccgttttgaataacggcgagcgtcggttttatgtctattgtctgaccgacctgaaaaaagacaaaatcctctacatcggcaaaggctgcggtaatcgtatcttcgagcatgaatgggttgctagtcgttcacaagacccagtctccggcgagattatcgatcggaaactcaaagccatctccaaatgcaagaaactcggccgctatatcatcagctatcatctgactgaagtcgaagcactcgccgccgaatctgccttaattcattttgttaaatctgtcttgggtaaaaaactcaaaaataaaattgccgggcatggtccgggtggtattagcgtagaagaactagatcgccgctttggattctcttctctcccacttaacgagattaaccccgacgggctgattctcgccatcaaaatccacaatgctttcgatttagatactgacgaagaattagactaccttttcgacaaccaagacgatgccaacctcaaatcgcgtacgttgggcaactgggttatcggtaaagatgttgcttcaaaagtgaaatacgttatcggcgttcacaccggtctgcaaaacgctgttgtcagtgcatacgaagtggacggttttgaaacaatggttgaggaaaccaaaaacggtagaaaacaatcccgttaccgtttccgcactacctctcgtagcgaagaggtattagccaaactcggtctgcaacaaaaatgcctgcccgaattgaagtttggtagcgggggagaaaaagcgtatatcagacccaaaacagagacagaaactgaacaagagaatattcagacgacccccaatccaaaaataaaaaaggaaaaaaccaaatcatga

SEQ ID NO: 54797 - DNA, 483 bp, Neisseria meningitidis; identical to SEQ ID NO: 37786

SEQ ID NO: 54798 - DNA, 1311 bp, Neisseria meningitidis; identical to SEQ ID NO: 39855

SEQ ID NO: 54799 - DNA, 1527 bp, Neisseria meningitidis
atgaatcccatgtacattacttttgcaatctatctggttgcagtccttctcatcgggcttgccgcctatttttctacgcgcaatttcgacgattatattttgggcgggcgcagcctaggcccgtttgttaccgcgatgtcggcaggcgcgtccgatatgtccggctggctgctgatgggtctgccgggcgcgatttacctgagcggtttgaatgaggcttggattgccatcggcctcttggtcggcgcgtatttcaactggctcttggtggcgggccgcctgcgcgtgcataccgaatacgccaacaatgcgctgacgctgccggattatttcttccaccgcttcggcgcgggcggacacttgatgaaagtggtttccgcactgattatcctgttcttcttcacgatttattgcgcctcgggcattgtggcgggcgcaaccctgttccaaagcctgtttgaaggtatgacttacaatcaggcaatgtggctgggcgcgggcgcgaccatcgcctataccttcttgggcggtttcttggcggtcagctggacggatacgctgcaggcttctttgatgattttcgccctgattttaacgccggtgatggtctatctgggcttgggcggcgcggaacagatgtctgccgcgattcaaagcgtcgccgcaggcacgggcaaagaatacggcagcctgtttgccggtacgaccgtcatcggcatcatttccaccgccgcatggggcttgggctatttcggacagccgcacattttggcgcgctttatggcggccgaaagcgcgaaatcgctggtatccgcacgccgcatcggtatgacttggatggcgttgtgccttgcgggcgcggtagcggtcggttatttcggcattgcgtatttcggtgcaaatcccgacaaagtttcttctatgagcggcaaccacgaacgcatcttcatcgcgctttccaccctgctgttcaacccttggatcgccggcattattttgagcgcgattttggcggcggtgatgtccaccctgtcctgccagcttttggtttgctccagtgcgattaccgaagacttctacaaaggctttttgcgtaaaaacgcgcaacagtcggaactggtatgggtcggccgcctgatggtcttggcgattgccgtgatttccatcctgattgcttccgatccgaacagcaaagtattgggactggtgtcttatgcgtgggcaggtttcggtgcggcattcggcccgattgtgattctgtccgtattgtggaaacgcatcactgcctacggcgcgttgtcgggtatggttgcaggtgcgttaaccgtagtcgtatgggcggaatgggtgaaaaaaccggctcaagcggcaggcgaaagcggcttgttgacgatgtacgaaatcgtcccgggctttattgtttgcttgatcgttgccgtattggtttccctgttcaacaaagaaccttcgcgcgaaacccaagaacgctttgaaaaagccgacgcagattaccgcgccgcccgataa

SEQ ID NO: 54800 - DNA, 1449 bp, Neisseria meningitidis
atgaaaggcgatattggcgtaatcggtttggcggttatggggcaaaacctgattttgaatatgaacgattgcggatttaaggttgtcgcctacaaccgaacaatcggtaaggtggacgaatttttaaacggcgcggctaagggaacggatattatcggcgcgtattccctgcaagacttggtcgataagctggcaaacccgagaaaaatcatgatgatggttcgcgcaggttcggtggttgacggctttatcgaacaactgcttccgttgttggaagaaggtgacatcattatcgacggcggtaatgccaattaccccgacacgacacggcggacacattaccttgctgaaaaagggattttgtttgtcggcgcgggcgtatccggcggcgaagaaggcgcgcggcgcgggccgtccattatgccgggcggggataagcgcgcttgggaagccgtcaagccgatttttcaggcgattgctgccaaaacgccgcagggcgaaccgtgttgtgactgggtcggcagggacggcgcagggcattttgtcaaaatggtgcataacggcatcgaatacggcgatatgcagttgatttgcgaagcgtaccagttcatgaaagatggtttgggattgtcctacgatgaaatgcaccgcgtgtttgccgagtggaacaaaaccgagctggattcttatctgattgaaatcacagcggcaattttgggctataaggacgaaggcggcgaaccgctggtcgagaaaatcctcgatacggcagggcaaaaaggcacgggcaaatggacgggcatcaatgctttggatttgggtattccgttgacgctgatttccgaagcggtattcgcccgctgcgtttcgtcgttcaaagaacagcgcgtacagaccggcaagctattcgcccgaaccgttacgcccgtcgaaggcggcaaacaagaatgggttgaggcgttgagacaggccctgcttgcatccaaaatcatttcctacgcacaaggctttatgctgatccgcgaagcgggcgaaagctacggctgggatttggactacggcaacactgcgctgctgtggcgcgaggggtgcatcattcgcagcgcattcttaagcaatatccgcgacgcgtatgaaaacaatcccgatttggtgttcttgggtgcggatccgtatttcaaaaatattttggaaaactgcctgccgacgtggcgcaaggtggttgccaaggcggtcgaatgcggcatccctatgccctgcatggcttcggcgattacgttcttggacggctacacgaccgaacgtctgcctgccaacctcttgcaggcacagcgcgactacttcggcgcgcacacttacgaacgcaccgacaaaccgcgcggcgagtttttccataccaactggacgggcaagggcggagataccgcttcgacaacctacgatatttga

SEQ ID NO: 54801 - DNA, 4170 bp, Neisseria meningitidis
atgaccgataccgcaccgacagataccgatccgaccgaaaacggcacgcgcaaaatgccgtctgaacaccgccccaccccgccggcaaaaaaacgccgcccgctgctgaagctgtcggcggcactgctgtctgtcctgattttggcagtatgtttcctcggctggctcgccggcacggaagcgggtttgcgcttcgggctgtaccaaatcccgtcttggttcggcgtaaacatttcctcccaaaacctcaaaggcacgctgctcgacggcttcgacggcgacaactggtcgatagaaaccgagggggcagaccttaaaatcagccgcttccgcttcgcgtggaaaccgtccgaactgatgcgccgcagcctgcacattaccgaaatttccgccggcgacatcgccatcgttaccaaaccgactccgcctaaagaagaacgccctccgctcagccttcccgacagcatagacctgcctgccgccgtctatctcgaccgcttcgagacgggcaaaatcagcatgggcaaagcctttgacaaacaaaccgtctatctcgaacggctggatgcttcataccgttacgaccgcaaaggacaccgcctcgacctgaaggccgccgacacgccgtggagcagttcgtcggggtcagcctcggtcggcttgaaaaaaccgtttgccctcgataccgccatttacaccaaaggcggactcgaaggcaaaaccatacacagtacggcgcggctgagcggcagcctgaaggatgtgcgcgccgaactggcgatcgacggcggcaatatccgcctctcgggaaaatccgtcatccacccgtttgccgaatcattggataaaacattggaagaagtgctggtcaaagggttcaacatcaacccggccgccttcgtgccctccctgcccgatgccgggctgaatttcgacctgaccgccatcccgtcgttttcagacggcatcgcgctggaaggttcgctcgatttggaaaacaccaaagccggctttgccgaccgcaacggcatccccgtccgtcaggttttaggcggctttgtcatccggcaggacggcacggtgcatatcggcaatacgtccgccgccctgctcggacggggcggcatcaggctgtcgggcaaaatcgacaccgaaaaagacatcctcgatttaaatataggcatcaactccgtcggcgcggaagacgtactgcaaaccgcgttcaaaggcaggttggacggcagcatcggcatcggtggcacgaccgcctcgcccaaaatctcttggcaactcggcatcggcacggcgcgcacggacggcagcctcgccattgcaagcgaccccgcaaacggacagcggaaactggtgctcgacaccgtcaacatcgccgccgggcaaggcagcctgaccgcgcaaggctatctcgagctgtttaaagaccgcctgctcaagctggacatccgttcccgcgcattcgacccttcgcgcatcaatccgcaacttccggcaggcaatatcaacggctcaataaaccttgccggcgaactggcaaaagagaaattcacaggcaaaatgcggtttttacccggcacgttcaacggcgtaccgattgccggcagtgccgacattgtttacgagtcccgccaccttccgcgtgccgccgtcgatttgcggctggggcggaacattattaaaacagacggcggcttcggcaaaaaaggcgaccggctcaacctcaacatcaccgcacccgatttatcccgtttcggtttcggactcgcggggtctttaaatgtacgcggacacctttccggcgatttggacggcggcatccgaacctttgaaaccgacctttccggcgcggcgcgcaacctgcacatcggcaaggcggcagacatccgttcgctcgatttcacgctcaaaggttcgcccgacacaagccgcccgatacgcgccgacatcaaaggcagccgcctttcgctgtcgggcggagcggcggttgtcgataccgccgacctgatgctggacggcacgggcgtgcagcaccgcatccgcacacacgccgccatgacgctggatggcaaaccgttcaaattcgatttggacgcttcaggcggcatcaacagggaacttaccctatggaagggcagcatcggcattctcgacatcggcggcgcattcaacctaaaactgcaaaaccgtatgacgctcgaagccggtgcggaacgtgtggcggcaagtgcggcaaattggcaggctatgggcggcagcctcaacctgcaacacttttcctgggacaggaaaaccggcatatcggcaaaaggcggcgcacgaggtctgcatatcgccgagttgcacaatttcttcaaaccgcccttcgaacacaatctggttttaaacggcgactgggatgtcgcctacgggcgcaacgcgcgcggctacctcaatatcaatcggcaaagcggcgatgccgtattgcccggcgggcaggctttgggtttgaacgcattttccctgaaaacgcgctttcaaaacgaccgtatcggaatcctgcttgacggcggcgcacgtttcgggcggattaacgccgatttggacatcggcaacgccttcggcggcaatatggcaaatgcaccgctcggcggcaggattaccgcctcccttcccgacttgggcacattgaagccctttctgcccgccgccgcgcaaaacattaccggcagcctgaatgccgccgcgcaaatcggcggacgggtcggctctccgtccgtcaatgccgccgtcaacggcagcagcaactacgggaaaatcaacggcaacatcaccgtcgggcaaagccgctctttcgataccgcgcctttgggcggcaggctcaacctgaccgttgccgatgccgaagtattccgcaacttcctgcccgtcggacaaaccgtcaaaggcagcctgaatgccgccgtaaccctcggcggcagcatcgccgacccgcacttgggcggcagcatcaacggcgacaagctctattaccgcaaccaaacccaaggcatcatcttggacaacggctcgctgcgttcgcatatcgcgggcagaaaatgggtaatcgacagcctgaaattccggcacgaaggaacggcggaactctccggcacggtcggtatggaaaacagcggacccgatgtcgatatcggcgcggtgttcgacaaataccgcatcctgtcccgccctaaccgccgcctgacggtttccggcaacacccgcctgcgctattcgccgcaaaaaggcatatccgttaccgggatgattaaaacggatcaggggctgttcggttcgcaaaaatcctcgatgccgtccgtcggcgacgatgtcgtcgtattaggcgaagttaaaaaagaggcggcggcaccgctccccgtcaatatgaacctgactttagacctcaatgacggcatccgcttcgccggctacggcgcggacgttaccataggcggcaaactgaccctgaccgcccaatcgggcggaagcgtgcggggcgtgggcacggtccgcgtcatcaaagggcgttataaggcatacgggcaggatttggacattaccaaaggcacggtctcctttgtcggcccgctcaacgaccccaacctcaacatccgcgccgaacgccgcctttcccccgtcggtgcgggcgtggaaatattgggcagcctcaacagtccgcgcattacgctgacggcaaacgaaccgatgagtgaaaaagacaagctctcctggctcatcctcaaccgcgccggcagtggcagcagcggcgacaatgccgccctgtccgcagccgcaggcgcgctgcttgccgggcaaatcaacgaccgcatcgggctggtggatgatttgggctttaccagcaagcgcagccgcaacgcgcaaaccggcgaactcaaccccgccgaacaggtgctgaccgtcggcaaacaactgaccggcaaactctacatcggctacgaatacagcatctccagcgtggaacagtccgtcaaactgatttaccggctgacacgcgccatacaggcggttgcccgtatcggtagccgttcgtcgggcggcgagctgacatacaccatacgtttcgaccgcttctccggttcggacaaaaaagactccgccggaaacggcaaaggaaaataa

SEQ ID NO: 54802 - DNA, 1428 bp, Neisseria meningitidis
atgtttttctccgccctgaaatcctttctttctcgatacattactgtatggcgcaatgtttgggcggtgcgcgaccagttgaaaccgcccaaacgcacggcggaagaacaggcgtttttgcccgcgcatttggaactgaccgatacgccggtctctgccgctccgaaatgggcggcgcgttttattatggcgtttgcgcttttggctttgttgtggtcctggttcggcaaaatcgatattgtggcggcggcttcgggcaaaacggtgtcgggcgggcgcagcaaaaccatccagccgctggaaacggcggtggttaaggcggtacatgtgcgcgacgggcagcatgtgaaacagggagaaacgctggcggaactggaggctgtgggaacagacagcgatgtggtgcagtcggagcaggctttgcaggctgcccaattgtccaaactgcgttatgaagcggtattggcggcattggaaagccgtaccgtgccgcatatcgatatggcgcaagcacggtctttaggtctctccgatgccgatgtgcaatcggtgcaggtgttggcgcagcaccagtatcaggcatgggcggcgcaggatgcgcaattgcagtcggctttgcgcggccatcaggcggaattgcagtcggccaaggcgcaggagcagaagctggtttcggtgggggcgatcgagcagcagaaaacagcagactaccgccgtttgcgggccgacaattttatttcggaacatgcgtttttggagcagcagagcaaatcggtcagcaattggaacgatttggaaagtacgcgcggtcagatgaggcagattcaggcggccattgcacaggcggagcagaatcgggtgctgaatacgcagaacctgaaacgcgatacgctggatgcgctgcgccaggcaaacgaacagattgaccaataccgcggccaaacggataaggcaaagcagcggcagcagctgatgacaatacagtcgcctgcggacggcacggtgcaggaattggctacctatacggtgggcggtgtggtgcaggctgcccaaaaaatgatggtgattgcgcccgatgacgacaaaatggacgtggaagttttggtattgaacaaagacatcggttttgtggaacagggacaggatgcggtggtgaagattgagagctttccctatacgcgctacggttatctgacgggcaaggtgaaaagtgtcagccatgatgcggtaagccacgaacagttgggcttggtttatacggcggtggtgtcgctggacaaacataccttgaatattgacggcaaagcagtgaatctgacggcgggcatgaatgtcacggcggagattaaaacgggtaaacggcgggtgctggattatctgttaagcccgctgcaaaccaaattggacgaaagctttagggagcgatag

SEQ ID NO: 54803 - DNA, 486 bp, Neisseria meningitidis
atgtttgtgaacgagaaagatccttatgcggctctgtttgcgggactggtgtttttgacgctgccgtttgcgttggcggtgcatgatgcctttgcgcttgcgttcggacgggcggggctgctggtgtcggtgtcggacggcggattcggctggcgtggcggttgggacggcgtggtgtggtttgtattcggtatgtttgcgtttttgaatgtggttgtgtcggcgggcctgacgaaactggcgtacaaaaagatgatgcggcggcattcgcgttacgcgctgtttctgtcgggcgtggcggcttgcgcggctgctgcggtcgcgtggattttcgagctgttgttgggcagtgccgccttgggcgggctgcgcggggaggcggtgtcggaatatgcgtttgccgtgtggctggtgtctatgctgacgctgcccaaacgcctgacgcgcgcgccggtgcagccggtggtgtttcacaggaaaaaatag

SEQ ID NO: 54804 - DNA, 2829 bp, Neisseria meningitidis
atgatggacgaaaaactcaatttctcttacctgttcggttcgaacgcaccctacattgaggaattgtacgaggcttttttggaaaaccccgatgcggttgatgaaaaatggaagcagtatttcaccgatttgagcaaacagccggggacggttgctgtcgatgtcgcacacacaccgattcgcgaatcatttgttactttggcgaaaaagaaaattgcatctgccgttgtgggcggtgcggatgaggcaatgctgaaaaagcaagtcagcgttttacggctgatttccgcctatcgtatccaaggcgtgggtgcagcccaacttgatccgctcaaacgtatccccccgcgcgatattgaagccctcgatccgaaattccacggtctgtcagataccgatatggcgcttcaattcaatatgggcgagggcgattttgccaatcgcggcaaactgcctttgtcccaaatcatcagcaacctcaaacaaacctactgcggccacatcgcattggaatatatctatattcccaataccgaagagcgccgctgggtacgcaattattttgaaagcgtattgtccacaccgcattacaatgccgatcaaaaacgccgtatcttgaaagagatgactgctgccgaaactttggaacgttatctgcataccaaatatgtcggtcagaaacgtttcggtgtcgaaggcggcgaaagcgcgattgccggtttgaactacctgattcaaaacgccagtaaagacggcgtggaagaagtcatcatcggtatggcgcaccgtggccgtctgaatgttttggtgaacattttgggcaaaaaacccggcgatttgtttgccgaatttgaaggtcgtgccgaaatcaaactgcccagcggcgacgtgaaataccatatgggcttcagctccgatattgctaccccgcacggcccgatgcatgtttctttggcgttcaacccgtctcacttagaaatcgtcaacccggtggtggaaggttctgcgcgcgccaaacaaaaacgtttgggcgaaaacggccgcgacaaagtcttgccggtattgattcacggcgactccgcatttatcggtctgggagtcaaccaagcgacattcaacctgtctaaaacgcgcggttataccaccggcggtacggttcatatcgtcatcaacaaccaaatcggctttaccacttccgatatccgcgatacccgttcaaccgtacactgtaccgatatcgcaaaaatggtttccgctccggttatccatgtgaacggcgatgatcctgagcgtgtttgctttgccatccaagccgctttggattaccgcaaaaaattccataaagacatcgtgattgacgttgtctgctaccgtaaatggggtcacaacgagggcgatgatccgaccttgacccaaccgatgatgtacaaaaaagtatcgcaacaccccggtgcgcgtgctttgtacaccgagcaactgattgccgaaggcgtggtaacccaagccgaggcagacggttacatccaagcctaccgtgatgctttggacaaaggcgaacacgtcgagcaaacaacgttgagcaactttcaacgcacgcaaatcgactggagcaaataccaaggcaaagattggcgcgaacacatcgaaaccggtttgcctgccgcagatattgagcgtctcactgagaagtttaccgccgtaccggaaggctttgccctgcatccgactgcaaaacgtgtgattgaagcgcgtaaagccatggcatccggcaaacaagccatcgactggggtatggcggaaaccctcgcatacgccagcctcgtaaccaaaggccatggcgtgcgtatttccggcgaggactctgggcgcggtacattctcacaccgtcatgcggtattgcacgatcaaaaacgcgaaaaatgggacgacggtacttatgtccctctgcgccatatgggcgaaggtatgggcgagttcctggttatcgactccattttgaacgaagaagccgtgatggcgttcgagtacggctttgcctgctccgcgcctgacaagctgaccatttgggaggctcaattcggtgacttcgccaacggcgcgcaagtgactattgaccaattcctgtcttcaggcgaaaccaaatggggtcgtttgtgcggtctgaccaccatcctgccgcacggctacgacggtcaaggccccgagcactcctctgcacgcgtagaacgttggttgcaactgtgttccgagaacaatatgcaagtcatcatgccgtctgaagcgtcgcaaatgttccacctcttgcaacgccaagttttgggttcataccgcaaaccgctggtgattttcatgtccaaacgcctgttgcgcttcaaaggtgcaatgagcccgctggaaaacttcaccgaaggttcgactttccgtccggttatcggtgataccgccgaacgcgcaagcaacggcagcgtgaaacgtgtggtattgtgtgccggtcaggtttactatgacttggaagcaggccgtaccgagcgtaaactggaagatgatgttgcgattgtccgcgttgagcagctgtatccgttcccatacgaggaggttaaagccgaactggcgaaatatccgaacgcaaaatctgtggtttgggcacaagaagagccgaaaaaccaaggtgcgttctaccaaatccgccaccgcatcgaagacgttatcagcgaagagcaaaaactgtcttatgccggtcgtccaagcagcgcatcgcctgcagtgggctactcaagcaaacatattgcccaattgaaacaattggttgaagacgctttggcgttgtaa

SEQ ID NO: 54805 - DNA, 492 bp, Neisseria meningitidis; identical to SEQ ID NO: 45059

SEQ ID NO: 54806 - DNA, 1047 bp, Neisseria meningitidis
atgccgtctgaagccttcagacggcatcgtgcctatcgggagaataaattgcagcctttagtcagcgtattaatctgcgcttataacgtagaaaaatatttcgcccaatcattagccgccgtcgtgaatcagacttggcgcaacttggatattttgattgttgatgacggctcgacggacggcacacttgccattgcccggcgtttccaagaacaggacggccgcatccgtatcctcgcgcagccgcgcaattccggcctgattccctctttaaacatcgggctggacgaattggcaaagtcaggaatgggggaatatattgcacgcaccgatgccgacgatattgccgcccccgactggattgagaaaatcgtgggcgagatggaaaaagaccgcagcatcatcgcgatgggcgcgtggctggaagttttgtcggaagaaaaggacggcaaccggctggcgcggcatcacaggcacggcaaaatttggaaaaagccgacccgacacgaagatattgccgactttttccctttcggcaaccccatacacaacaacacgatgattatgaggcgcagcgtcattgacggcggtttgcgttacaacaccgagcgggattgggcggaagattaccaattttggtacgatgtcagcaaattgggcaggctggcttattatcccgaagccttggtcaaataccgccttcacgccaatcaggtttcatccaaatacagcatccgccaacacgaaatcgcgcaaggcatccaaaaaaccgccagaaacgattttttgcagtctatgggttttaaaacccggttcgacagccttgaataccgccaaataaaagcagtagcgtatgaattgctggagaaacatttgccggaagaagattttgaacgcgcccgccggtttttgtatcaatgtttcaaacggacggacacgccgcccgctggcgcgtggctggatttcgcggcagacggcaggatgcggcggctgtttaccttgaggcaatacttcggcattttgcaccgattgctgaaaaaccgttga

SEQ ID NO: 54807 - DNA, 510 bp, Neisseria meningitidis
atgattatcctgcacaccaacaaaggcgacatcaaaatcgaactcgatttcgacaaagcccctgttaccgccaaaaacttcgagcaatacgtcaaagacggcttctacgacggcgtaatcttccaccgcgtcatcaaaggcttcatgattcaaggcggcggcatggatgaaaacatgaacgaaaaagaaacccgcgatccgattcaaaacgaagcgtccaacggcctgcccaacgataaatacaccatcgccatggcacgcacttccgacccccattccgccagcgcgcaattcttcatcaacactgccgacaacgctttcctgaacttccgttctaaagagctgtacggcaaaaccgtcgtccaagactggggctatgccgtattcggtaaagtcgttgacggttttgatgttgtcgatgccatcgaaggcgtatccaccaaacgccacggctaccatgacgacgtaccgagcgaacctgtcgtcatcattaaagccgaagcggtataa

SEQ ID NO: 54808 - DNA, 1098 bp, Neisseria meningitidis
atggaagttcaactgccgaaaattaaaacagtacgcgtaatgttggcggggatgacggcgcagcaggaatccgttttcaaaatggcattcaaaatgcacaataccacccgttatgaaacagtatccccttcagacggcagtgccgtgcccgatttggttttggcggataccgatgccgagggcggttttgaactttggaaagagcttgccgagcgttataaggatatacccgtcgccgtctgttcggagaaagttcccgattctgaagttccctacctgcccaaaccgattcggtttgaaacattgtttcctatgctccgcaaattgttgcagggcgagaatgtttatgggaaatcgtttattgcacccgcagaccggtcggcgaaaaataacgggaatgtgcagcgtacggttacgatacgccagtttaacccgaataaaggattattgggggcgttgcggtttgcggaaaagaacaggcaggacatcgctatcttgcatggaaataagccggtccttattgttttcccctcgatacaacgggttttgctgacagaaagtgtgcaaaaactcgaagaattgtgcaaagacgaaaatttgcaggtcagctgcaagactgttcccgataacccgcaatggcgcgaaaaggctaaagtaggcattatgtcctgtatgtggcagttttccatttggacggcgcagggcaggttgatttatccgatttctcccgatactccgtttacgttgaaatcttggccaaacctgacccggttggcaaatgtgccggggtcgatacgcttgtcggcatttctgaccaaggcatccgtcaaccttaacgtgttgtataaagtgatgcctttaaacctcaatgatattctgaattatcttgcggcaacctatacaaccgggtttttgtcggtagatttaaaaacggtttcacaacaggcatactccgatatggcggataaaataaatatcggagccgattctgcctctgatagtgaaatgatgaaaaaagcggaaaaaatcacaacaccatcccaatcccagtcgcgcggtcttctgcaaaggctgatgaaaaaactgttgggcagctaa

SEQ ID NO: 54809 - DNA, 558 bp, Neisseria meningitidis; identical to SEQ ID NO: 54438

SEQ ID NO: 54810 - DNA, 288 bp, Neisseria meningitidis; identical to SEQ ID NO: 36916

SEQ ID NO: 54811 - DNA, 318 bp, Neisseria meningitidis
atgaacaagccgtttatcactcaggcgcagttggcactttataaatatcagccgtcaagcaagtattttgggcaatcgatggcggttatagcgcaatctgaatttgttgaatttgcgaagattaataagtctgaaaatgttattgattgtttctcttttttctggaatagaagaattaaacatgatatttggctaatctcattttctgataattcagaaatggtaattaaagaatccctgaaagatggtcataaaatatacaaatttgaattttgcgaaattgtcgataattgcaattttgatgatgtattcgtttga

SEQ ID NO: 54812 - DNA, 1056 bp, Neisseria meningitidis
atgataggggcttctttgttttcgagtgcagggattgcagaaacctacttgcataatgcgggtattaagattatagctgcaaatgaattggtgccagaacgtgctaatttatataaagctctatatcccgaaagtaaaatgattataggtgatatacttcatgaggaagtgtttcaaaatttaatacagagcgtgccgaatcgattagattttttaattgcttctcctccttgtcaaggcatgagtgttgcagggaaaaatcgtaacattcaagagatggctaatgataaacgtaatcatttaatattcagagtaatcgaatttattttattaaaacgcccaacttttgttttgattgaaaatgttccattttttttaaaaattaagttaccttataaggggacattacaaacagtagaagtaattttgcaagatttatttggttgcgaatattatattcaaactcatatttttgattctgccgattatggtgttgcacaacatcgtaaacgagctattattcgtatgaataaacattcaactatttggggaatgccggaaaaagttacaaaaaccatttctgttcgtgatgctattagttttttgcctagtattgagtctggacaaaagtctaatgtgaaatggcattttgcacgtacacatgctccggagcacattatatggctaaaaaatacgccaacaggacgatctgcttttgataatatagaacattatccaaagaaaaaaaatggtgaaaaaattaaaagttataatacaacttatcgccgtatggagtgggatgctcctgccccaactattactattcgtaatgacgctatcagttcacaattaaatgttcatcctggacggtctatgcctgatggaacatattcagatgcaagagttttaacaccattagagttaatgcttttaacatcattacctattgattggaatattcccgacgatacatcagaattattaattcggcaatgtattggtgaatctattcctccattgttaattaaaaaaattgtagagagaataggaaaatag

SEQ ID NO: 54813 - DNA, 2082 bp, Neisseria meningitidis
atgaaatcactcaaaaccttcctcatttggggcatagtggtactggtcggcttagcatcctttaccactctggctctcagccgaggcgaacaggtcagcgcggtatggatggttaccgccgccatatccgtttactgcatcgcctaccgtttttacagcctctacatcgccaaccgcgtaatgcggctcgatcctaaccgcctgactccggcagaacgccacaacgacggcttggactacgttccgacgcacaagggcgtattgttcggacaccactttgccgcgattgccggcgcgggccctttggtcggccctgtactggctgcgcaaatgggttacctgcccggtactttgtggattatcttcggcgtggtttttgccggcgcggtacaggatatgatggtactgtttgtttctatgcgccgtgacggtaagtctttgggcgatattgtgaaacaggaactcggcactgtccccggcgtgattgcctccatcggtattttgatgattatggtcatcattatggcggtgttggcgttgattgtcgtaaaagcacttgttcacagcccttggggtacgtttaccatcgccgccactatgccgattgccctgtttatgggtatttacacgcgctatatccgtccgggcaaaatcggcgagatttccatcgtcggctttattttgctgatgctggcggtaatttacggcgaagatgtggcgaaaagttccatcggacattggttcgaccttgacggcatccagctcacttgggcgattatgatttacggctttgtcgcctccgtattgcccgtatggttgctgctcactccgcgcgactatctctccaccttcctgaaaatcggtacgattgcggccttggctttgggcatcgtcatcgtcaatcccactttgcaaatgcctgccgtaacccactttatcgacggttcgggtccggtattctcaggcgcattgttcccgttcctcttcatcaccatcgcctgcggtgcggtttcgggcttccacgcgctgatttcctccggcaccacgccgaaaatgctggaaaacgaaacccacgtccgtatgattggttacggcggtatgttgatggaaagtttcgtagccattatggcgcttgccgccaccgcatcgcttgatcccggcgtgtacttcgccatgaacagccctgccgccctgatcggtacggatgccaacaccgccgccgaagtgattaccaccaagctgcaattccctgtcgatgcggcaaccctgttgcataccgctaaggaagtgggcgaaaacaccatcctttcccgtgcaggcggtgcgccaaccctcgcagtcggtatggcgcacattatgagccgcctgattccgggcgaggcgatgatggcgttctggtatcacttcgccctattgtttgaagccttgttcatcctgaccgccgtcgatgccggtacgcgcgtcgcacgttttatgattcaagacttgggcagcatcttctacaaacctttcggcaacaccgactccatccccgccaacctgattgcgaccttcttcgccgtggcattgtggggctacttcctctacaccggcgtaaccgacccgctgggcggcatcaactcgctctggcctttgttcggcatcgccaaccaaatgctggcaggcgtggccttgattatgtgcgccgtggtgctgattaagatgaaacgcgaccgttatgtttgggtggtactcgttcccgccgtcggcgtactgttcgtaacctgctacgccggcctgcaaaaactgttccacagcgacccgcgcatcagcttccttgcccacgccggcaaatacagcgacgcattggctaaaaacgaagtccttgcgcctgccaaagacatcggcgaaatggcgcaaatcatcttcaacgacaagattaatgccggtctgaccatcctcttcttgtcggttgtcgtgattgtcgccgcgtacggtttgcgtaccgccctcaaagcacgcaaagtcggctggccgaccgccaaagaaatcccggcggtgtaccgcgacggcaagcagccggaggcacaaagtgaagcataa

SEQ ID NO: 54814 - DNA, 876 bp, Neisseria meningitidis
atgttacaaggtagcctggttgccctgattaccccgatgaatcaagacggcagcatccattacgaacaactccgcgatttgatcgactggcacattgaaaacggcacggacggcatcgttgccgtcggcacgacaggcgaatccgccaccctctccgtcgaagaacacaccgccgtcatcgaagccgtcgtcaaacacgttgccaaacgcgtccccgtcatcgccggcacaggggcaaacaacaccgtcgaagccatcgccctttcccaagccgccgaaaaagccggtgcagacttcactctctccgtcgtcccctattacaacaagccctcccaagaaggcatttaccaacatttcaaaaccatcgccgaagccacttcgattccgatgattatctacaacgtgcccggccgtaccgtcgtcagcatgactaacgacactatcctgcgccttgccgaaatccccaacatcgtcggcgtgaaagaagccagcggcaacatcggcagcaacatcgaactcatcaaccgcgcgcccgaaggcttcgtcgtcctttccggcgacgaccataccgccctgccgttcatgctgtgcggcggacacggcgtgattaccgtagccgccaacgccgcacccaagctctttgccgatatgtgccgcgccgcgctgcaaggcgacattgccctcgcacgcaagctcaatgaccggctgattccgatttacgacaccatgttctgcgaacccagccccgccgcaccgaaatgggcggtatccgccctgggcagatgcgaaccgcacgtccgcctgccgctcgttccgctgacggaaggcggacaggcaaaagtccgcgccgccctgaaagcctcaggacaactctaa

SEQ ID NO: 54815 - DNA, 369 bp, Neisseria meningitidis; identical to SEQ ID NO: 37026

SEQ ID NO: 54816 - DNA, 1620 bp, Neisseria meningitidis
  misc_feature 1601, 1602, 1603, 1604, 1605: 'n' is a, c, g or t
atgaccgacgcaaccatccgccacgaccacaaattcgccctcgaaaccctgccggtaagccttgaagacgaaatgcgcaaaagctatctcgactacgccatgagcgtcattgtcgggcgcgcgctgccggacgttcgcgacggtctcaagccggtacaccgccgcgtactgtacgcgatgcacgagctgaaaaacaactggaatgccgcctacaaaaaatcggcgcgcattgtcggcgacgtcatcggtaaataccacccccacggcgataccgccgtatacgacaccatcgtccgtatggcgcaaaatttcgctatgcgttatgtgctgatagacggacagggcaacttcggatcggtggacgggcttgccgccgcagccatgcgctacaccgaaatccgcatggcgaaaatttcccacgaaatgctggcagacattgaggaagaaaccgtcaatttcggcccgaactacgacggtagcgaacacgagccgcttgtactgccgacccgtttccccacactgctcgtcaacggctcgtccggcatcgccgtcggcatggcgaccaatatcccgccgcacaacctttctgataccgtcaatgcctgcctgcgcctgctcgatgcacccgacaccgaaatcgacgaactgatcgacattatccaagcccccgacttcccgaccggggcaaccatctacggcttgagcggcgtgcgcgaaggctataaaacaggccgcggccgcgtcgttatgcgcggtaagacccatatcgaacccataggcagaaacggcgaacgcgaagccatcgttatcgacgaaatcccctatcaggtcaacaaagccaagctggtcgagaaaatcggcgatttggttcgggaaaaaacactggaaggcatttccgagctccgcgacgaatccgacaaatccggtatgcgcgtcgttatcgagctgaaacgcaacgaaaatgccgaagtcgtcttaaaccaactctacaaactgactccgctgcaagacagtttcggcatcaatatggtggttttggtcgacggacaaccgcgcctgttgaacctgaaacagattctctccgaattcctgcgccaccgccgcgaagtcgttacccgacgtacgcttttccggctgaagaaggcacgccatgaagggcatatcgccgaaggcaaagcggtcgcactgtccaatatcgatgaaatcatcaagctcatcaaagaatcgcccaacgcagccgaggccaaagacaaactgcttgcgcgtccttggcgcagcagcctcgttgaagaaatgctgacgcgttccggtctggatttggaaatgatgcgtccggaaggattggctgcaaacatcggcttgaaagagcaaggttattacctgagcgagattcaggcagatgctattttacgcatgagcctgcgaaacctgaccggcctcgatcaagaagaaattgtcgaaagctacaaaaacctgatgggtaaaatcatcgactttgtggatatcctctccaaacccgaacgcattacccaaatcatccgcgacgaactggaagaatcaaaccaactatggcgacgacgccgcagcgaaatcaacccgtnnnnncacacacttaattaa

SEQ ID NO: 54817 - DNA, 447 bp, Neisseria meningitidis; identical to SEQ ID NO: 50774

SEQ ID NO: 54818 - DNA, 1164 bp, Neisseria meningitidis
ttgccgtatttgttggaacaggatatgagtcaaaatgcctcggtgggcattgtaatgccccaaaaaattccgtttgaggtgccgctggttttggaaaacggtaaaactttgccgcgtttcgatctgatgattgaaacctacggcgagctgaatgctgaaaaaaacaatgcggttttaatctgccacgcgctgtcgggcaaccatcatgttgcgggcaggcattcggcggaagataaatatacgggctggtgggacaatatggtcggacctggcaaaccgattgatacggaacgttttttcgtggtcggtttgaataatctgggcggctgcgacggcagcagcgggcctttgtcgatcaatcctgaaacgggtagggaatacggcgcggattttccgctggttacggtgaaggactgggtaaaatcccaagccgcgcttgccgattatctcagcatcgggcaatgggcggcggttgtcggcggcagcttgggcggcatgcaggctttgcagtgggcgatttcctatcccgaacgcgtgcgccacgccttggtgattgcgtccgcgccgaaactgtccacgcaaaatatcgcgttcaacgatgtggcgcgtcaggcgattttgaccgatcccgatttcaacgaaggacattaccgcagccgcaacaccgttcccgctcggggcttgcggattgcccgcatgatggggcacatcacctatcttgccgaagacggtttgggcaaaaaattcggacgcgatttgcgttccaacggctatcaatacggctatggcgttgaatttgaagtagaatcctatctgcgctatcaaggcgacaaattcgtcgggcggtttgatgccaacacctatttgctgatgaccaaggctttggactatttcgatccggcggcagatttcggcgacagcctgacccgcgccctgcaaaatgtgaaagcgaaattctttgtcgccagcttcagcaccgactggcgtttcgcacccgaacgttcgcacgaactggtcaaggcactgattgccgcccaaaaatccgtgcagtatatcgaagttaaatccgcacacgggcacgatgcctttttaatggaagacgaagcctatatgcgtgcggtcgccgcctatatgaacaacgtttataagggatgtcagcaatga

SEQ ID NO: 54819 - DNA, 225 bp, Neisseria meningitidis; identical to SEQ ID NO: 36622

SEQ ID NO: 54820 - DNA, 471 bp, Neisseria meningitidis
atgcggattatacaggcaaacgcgttcagacggcatctgaacgccatgccgtctgaacacgcggcttatgccgacttgacggcgagttccgccaagcgtttgctttgtgcgaaggcgatattgttttcttcggcggtcaggacgggagccgctgtcgggaatatcttttttgacggcttcgcagacggcggagactttggggacggtgcgcaatacggcttcgcaaccttcaacgctgtcgatgccgcgagcgattcggcgggcgggattgcgggggctgccgttttgggaatagtagaggacgaggattttgagggggatttgggttcatgggcggattccgttaaaatggttcggtcttcaaacggcataacagttgttccgatgccgtctgaaacagccgcagttcaggcatttgttcctgacggcaaacttggctataacatcgggcatcaatgcccaacttactga

SEQ ID NO: 54821 - DNA, 465 bp, Neisseria meningitidis
atgaaatgcccgttttgcgcccaccccgacacccgcgttgccgattcgcgcctgatggacgaacgcaacgccgtccgccgccgccgatactgccccaactgcggcaaacgcttcggcacgctcgaaaccgccgaactcaaaatgcccgccgtcatcggtccggacaaaaaacgttcgccctttaatgcacaacgcctccgcaacgacctgaccgccgccgcccgaaaatccgccctgacacccgaacagatcgacgaaaccgtccgcctgacggaacacaggctctacacttcgggtcagcgcgacatcccctctgccgcacttgccgacatggtgctaaaagaactgctccgacaagatacggaagccgccgtccgtttcgccgccctgcacaaacgcttcgacaatccggcagactttgcctcgtggctggcgcaagccgtcaaaacagaccgcaaagcctga

SEQ ID NO: 54822 - DNA, 1362 bp, Neisseria meningitidis
atgctgaaaaaatggttgaataagatgctgccttccggtcggagcagtaaaaaagcggaaagtaaaacaatcattcctgccgaaagacacaacatccgtgccgaaatgttgagctttgccgccgaaaacgtcatacgccgcctgaaaggggcggggtttcaggcttatgtggtcggcggcgcggtcagggacctgctgctcggcatcgaacccaaggatttcgatgtcgcaaccgatgccacgcccgaacaggtgcacaaactcttccgccgcagccgcatcatcggcaggcgttttcagattgtccatgtgatgaacggtgcggagattatcgaagtaacgacgtttcgcggcggtgcgaaggttcatcagaacgcgcacggcagaatcatgaaggacaacacctacggcagcatcgaagaagatgcgatgcggcgcgattttacctgcaatgccttgtattacgatcctgaaaaagaagagattttggatttccacaacgggattgccgatgttgccgcccgcaggctggttatgattggtgatgccgccgaacgctatcaggaagaccctgtcaggattttgcgcgccatccgcctgtcgagcaaattgggctttgatctgtcggaagaaaccgccgcaccgattgccgaatcgatatgccgtctgaagcacgaaccggtagcgcggctgttcgacgaaattatgaaactgctgttttcagggcacgcgcgcgagtgtctgaaacgtttgaacggatttgacataccggacgacatccatccgctgctcaatgccttgcgcgtttcagacggcatcgccggaaaaatgacggtgcttgccctgaaaaataccgatgagcggctgcgtgccgacaaatcggtttcggtcggtttcgtactggcggccctgatgtggcccgagttggaacgccattggaaaagcaatctgcaacagggtttgaaacccgtgcccgccctgtccgatgcaatcaatacgatgcgcgaaaccgtcgaacgcggttggggcgtgccgcaacgcttttccgccacgatgcgcgaaatttggatgttccagccgcagtttgaaaatcgcaaaggcgcacgtccgcacaaactgtttgcacaggcgcgtttccgtgccgcctatgatttcctgctcttgcgcgccgaaaccggcaatgcggaccgcgcccttgccgagtggtggacggcgtttcagacggcatcgacggaacagcggtcggagatgaccaaaaacgaagccgccgcccgacacgaaaaaaacgaaggacaggcgaaaaaacgccgccgtcgcaggcgcaaacccaagccgaaggttgtgggaacggattgggaataa

SEQ ID NO: 54823 - DNA, 912 bp, Neisseria meningitidis
gtgttcctaaacggtttttcagacggcatcgggtttgccgtttgttttatggcggtttgccgcctgtttggatattgggggaatcagatgattaagaagacaatcggcggcatcataccgatttttacggcggttttcatccctgcatcagcaggcgcggcggatttgatgctggcgcaggaatacaaagaccaagagattgcaggctgggcaatgagcgagaaactcgacggcgtgcgcgcctattgggacggaaagcacctgataagccgtcagggctacgcgtttacgccccccaaaggctttaccgcgcagtttccgccttatcctttggacggcgaattgtatagcggacgcggtcagttcgagcagatttccgctaccgtgcgttctgtttcttcagactggcgcggcatccgcctgcacgttttcgatgtacccaaggcgcagggcaatctctaccaacgtttggcagtcgcaacgcagtggctgaaaacgcatccgaacgcgccgattaccatcatcccgcaaaccaaagtgcgcgaccggcagcacgcgatggactttttaaaacaaatcgaagcgcagggcggcgaaggcgtgatgctgcgtcagcccgaatcccgttatagcggcggcaggagcagccaattattgaagctgaaaagccaatacgacgacgaatgcacggtaacacggcactatgagggcaaagggcgaaacgccggacggctgggcgcggtcggctgcaaaaaccgacacggcgaattccgcatcggcagcggtttcaaagacaaagaccgcgacaacccgcccaaaatcggcacactgattacctaccgctaccgtggttttacgcggaaaggcacgccgaaatttgccacatttgtgcgcgtgcgtaccgaccgctga

SEQ ID NO: 54824 - DNA, 630 bp, Neisseria meningitidis
ttggtcaaaacggcagacggctacaaagctattgcccatatccgagtcggcgagagcgttctttccaaggacgaggcaagcgggaaaacaggatacaaacccgttaccgcccaatacggtaatccgtatcaagaaaccgtttacattgaaatttcagacggcatcggtaacagccaaacccttgtttccaataaaatccacccgttttacagtcaaggaaaatggatacaggcaggtcgtctgaaaaaaggcgacaccctgctttccgaaagcggtgcaaaacagacagttcaaaacattaccctcaaacagcagccgctcaaagcctacaatctgaccgttgccgactggcatacttactttgtcaaaggcgataaggcggaaacggaaggagtttgggttcataattcttgtccgcctaaaagaacaggaagctccaagaatgaaaaacatggagatggcggtcgaagtcaaatatcagcggaatcaaaaattgctgaattaacaaataaaattattcccggaatgtccaaaaatgaacgcttaaagattgagcgaacaatcagaaatattacaaaaaatgccaatcgaaaagcaaaaggagaagagcatggtcgacgcggtcgttaa

SEQ ID NO: 54825 - DNA, 456 bp, Neisseria meningitidis; identical to SEQ ID NO: 40384

SEQ ID NO: 54826 - DNA, 864 bp, Neisseria meningitidis
atggaattgaacgaatttctcgataaagcctatgccgttttgcggcgtttggatgccgtgcttccgcccgaacccgggcatacggattggaacgcgcttgccttccgctggcagagtgcgggcaaaaaaggttttttggaacacttgcccgatccgcacacctttcccttggtaaggctggcgggagtcggcaggcaaaccgaattgctggtgcgtaataccgaacagttcattgtcggcagacccgcgaacaatgtattgatgagcggcgcgcgcggaacaggcaaatcctcgctggtcaaagccctgctacacgaatatgcggataagggattgcgcctgatcgaagtcgataaaagcgatttaatcggcctgccttacctgttgacgcttttgaagggacgtccggaaaaatttatcgtattttgcgacgatttgtcgtttgaaagcggcgatgaaacctataaggcattgaaaaccgcgttagacggcggtctgtctcaacgttgcgccaacgttttggtttacgcgacttccaacagacggcacctgatgcccgaatattttgacgagaatgccggtacgacggggatgcggggggaaatccatcagaaagaagcggtggaagaaaaaatatccctgtccgaccgattcggattgtggctcagtttttatccgttcgatcaaaacgattatctggcggcggtgcaaaattggctggaagatttcggcgtgccgtatgatgaaaccgcacagatggcggcattgcagtgggcgcagacgcggggcagccgttcgggacgttccgcgtggcagtttgcctgcgactgggcgggcaggctgccgaaacaacgggcgttgtga

SEQ ID NO: 54827 - DNA, 558 bp, Neisseria meningitidis
atgaaacccaaattcaaaaccgttttaaccgcgctgcttttggcggcttccctgccgtctatggcggcaacccatgttttgatggaaaccgatatgggcaatatccgtttggttttggacgaatccaaagcccccaaaaccgttgccaatttcgtgcgctatgcccgaaaaggtttttacgacaacacgattttccaccgcgttatcgacggttttgttatccagggcggtggattgaccgaggacttggcacaaaaggcaagcgataaggccgttgccaacgaatccggcaacggcttgaaaaacaccgccggcaccatcgccatggcgcggacgacagcccccgattccgccaccagccaattctttatcaatctggcggacaacgcttcgctcgactacaaaaacggacaatacggctataccgttttcggcagggtcgaaagcggcatgaacaccgtttccaaaatcgcccgcgtcaaaaccgccacgcgcggcttttatcaaaacgtacccgtacagcccgtcaaaatccgtcgcgttgttgtcgggcagtaa

SEQ ID NO: 54828 - DNA, 1367 bp, Neisseria meningitidis
atgcagcatctgactgaaagaatgacgcaaattgccaagctgctgaattcttccgcaaacaatcctgatatagacattcccgattttcttactgaaatcaaagattattcagaattttccgtgacagatgaaaatggaacctacctgcattgggacaaattccgccagattcacacggaagatacgcggatgaaatggcgcgccgttaaggaaagccgcaaaaaaatccaaaaaccaattgatttcccgtttgaacatcagttttggttctgcattcccgactctttgcaggcacggcttcatttgattgacaaaagctgcggcagttctatcggcacgtctagcttgggtggcttcggcagaagcgagcaaaacagattcttgctcaagtctctgattatggaagaagcgattacatccgcccaactggaaggtgcggctaccacgcgtaaagtggccaaggatatgctcaaatcgcagcgtaaacccaaaacaaaagacgaaatcatgatagtgaacaactatcacttgatgaaaaaagcggtagaattgaaaaatacgccgttaagtgttgaaatgattttggatttgcaccgcattgctaccagcaacgctattgaaaacaaggccgaccccgggcaattcaggcgggacgacgaaatctttatcgccgataacgacggcaacagcctgtaccaaccaccgccacacgggcaggttcatacgctgatggaagcggtatgcacgtttgccaacaacacttatgacggcgtggaaaatccgtttatccatccgattgtccaagctatcatcctgcatttcctgattggctacatccatccgttcggagatggcaacgggcggatagcgcgggctttgttctattggtttatgctcaaaaacagctactggctgtttgaatacatatcaatcagccgtcttctgaaaaacgctccggcccaatacgccaaatcctatttgtatgcggaaactgacgattcagatttaacctatttcatctattaccaatgcgatattatcaagcgggcggttgccgatttggagcactacatttccgacaaacaaaaacaccaacaggaattcaaagcagcgattgcccaatatactgaaaagataggaaagttgaaccaacggcaaattggtatcctgcaaaaagcagtggaagaaagcggaaaaatctttactgcactagaaattgccaaccaatacggcatctccctgaatactgcccgtagcgatttgagcaaactgggagaatatagattcctagtaccgttcaaatcaggaaatgctttagagtatgttgctcctcaggatttattggaaaggttagaaaaaaaaaatag

SEQ ID NO: 54829 - DNA, 720 bp, Neisseria meningitidis
atggcgacactgtccaacaaaaccatcttagttaccggcgcatcgcaaggtctgggcgaacaggtcgccaaagcctatgcggcggcaggcgcaaccgtgattctggtggcacgccatcagaaaaaactggaaaaagtctatgacgcgattgtcgaagccggacaccccgaacccttcgccatccgtttcgacctgatgagtgcggaagaaaaagaattcaatcagttcgccaccaccattgccgaagccacgcaaggcaaactggacggcatcgtccactgcgccggctatttttacgccctctcgccgctggatttccaaaccgtcgccgaatgggtcaaccaataccgcatcaacaccgtcgcacctatggggctgacccgcgccctgttcccgctgctgaagcagtcgcccgacgcgtccgtcatcttcgtcggcgaaagccacggcgaaacacccaaagcctactggggcggcttcggcgcgtccaaagccgcgttgaactacctgtgcaaagtcgccgccgacgaatgggaacgcttcggcaacctgcgcgccaacgtcctcgtccccggacccatcaattccccgcaacgcatcaaatcccatccgggcgaagccaaaagcgaacgcaaaagctacggggacgtgctgcccgcatttgtctggtgggcaagtgccgaaagcaaagggcggagtggcgaaatcgtttacctctaa

SEQ ID NO: 54830 - DNA, 855 bp, Neisseria meningitidis; identical to SEQ ID NO: 51563

SEQ ID NO: 54831 - DNA, 1014 bp, Neisseria meningitidis
atgcaagtctattacgataaagatgccgatctgtccctaatcaaaggcaaaaccgttgccatcatcggttacggttcgcaaggtcatgcccatgctgccaacctgaaagattcgggtgtaaacgtggtgatcggtctgcgccaaggttcttcttggaaaaaagccgaagcagccggccatgtcgtcaaaaccgttgctgaagcgaccaaagaagccgatgtcgttatgctgctgctgcctgacgaaaccatgcctgccgtctatcacgccgaagttacagccaatttgaaagaaggcgcaacgctggcatttgcacacggcttcaacgtgcactacaaccaaatcgttccgcgtgccgacttggacgtgattatggttgctcccaaaggtccgggtcataccgtacgcagtgaatacaaacgcggcggcggcgtgccttctctgattgccgtttaccaagacaattccggcaaagccaaagacatcgccctgtcttatgcggctgccaacggcggcaccaaaggcggtgtgattgaaaccactttccgcgaagaaaccgaaaccgatctgtttggcgaacaagccgtattgtgcggcggcgtggtcgagttgatcaaggcgggttttgaaaccctgaccgaagccggttacgcgcctgaaatggcttacttcgaatgtctgcacgaaatgaaactgattgttgacctgattttcgaaggcggtattgccaatatgaactactccatttccaacaatgcggagtacggcgaatacgttaccggccctgaagtggtcaatgcttccagcaaagaagccatgcgcaatgccctgaaacgcattcaaaccggcgaatacgcaaaaatgtttatccaagagggtaatgtcaactacgcgtctatgactgcccgccgccgtctgaatgccgaccaccaagttgaaaaagtcggcgcacaactgcgtgccatgatgccttggattactgccaacaaattggttgaccaagataaaaactga

SEQ ID NO: 54832 - DNA, 375 bp, Neisseria meningitidis
atgcagtatctgattgtcaaatacagccatcaaatcttcgttaccatcaccattttggtattcaacatccgtgttttcctactttggaaaaatccagaaaagcccttggtcggcttttggaaggcactgccccaccttaacgacaccatgctgctgtttacgggattgtggctgatgaagattacccatttctccccgttcaacgcaccatggctcggcacaaaaatcctgcttctgctcgcctatatcgcattgggtatgatgatgatgcgcgcccgtccgcgttcgaccaagttctacaccgtttacctgctcgccatgtgttgcgtcgcctgcatcgtttaccttgccaaaaccaaagtcctgcctttctga

SEQ ID NO: 54833 - DNA, 3987 bp, Neisseria meningitidis; identical to SEQ ID NO: 37428

SEQ ID NO: 54834 - DNA, 699 bp, Neisseria meningitidis
gtgcaggcggatttagcttatgccgccgaacgcattacccacgattatccgaaaccaaccggtgcaaacaacacaagcacagtaagcgattatttcagaaacatccgtgcgcattccatccacccccgggtgtcggtcggctacgatttcggcgactggaggatagcggcagattatgccagttacagaaaatggaacaacaataaatattccgtaaacacaaaagaggtgggaagaaacaataacaataacattgacatctggaaagaactgaagacggaaaatcaggaaaacggcagcttccacgccgcttcttctctcggcttatccgccatttacgatttcaaactcaacgataaattcgataaattcaaaccctatatcggtgcgcgcgtcgcctacggacacgttaaacatcaggttcattcggtgagaaaagaaaccacgactgttttcagtaaaccaagtggtagcgttacaaagccaggcgagatcgtagaaactccgaccagcaaacctgcctatcacgaaagccacagtatcagcagcttgggtcttggtgtcatcgccggtgtcggtttcgacatcacgcccaagctgaccttggacaccggataccgctaccacaactggggacgcttggaaaacacccgcttcaaaacccacgaagtctcattgggcatgcgctaccgcttctga

SEQ ID NO: 54835 - DNA, 876 bp, Neisseria meningitidis
gtgtttgggtttcggctgtcgggagggaaaggaattttgcaaaggtctcaggtcgccctcgtcgtgacggaaagtactggcggtctcgaaatccccgccgccaaagccatccgccgagcaggcatagccgtgattatcgccaacccgcgtcagacgcatcagtttgcccaatcgcagccgctgaccaaaaccgacgccaaagatgccaaaatgctcgccttcttcgcacagatgatgacgcagaaagaagattggcaaaccatgccctaccaaccgcccacagaagcggaagaagtgttggaagccttggttaaccgccgcaaccaatcggcggatatgcggactgccgagaaaaaccgtctgcatcaggttcacgaaacgcaagtcggaagcgtcaaacaactgattgcccattttgaccggctgattgacgaattggacaaacaaatcgacgaccacacccacacgcattttgacggcaaagcccaagtggcggagcaaatcaaaggcatcggttcgataacgacggctacgctgatggcgatgctgcctgagttggggcggctgtcgcacaaacggatagcgagtttggccggcattgccccgcacccgagggagagcgaggaaaccaaattcaaaagccgctgcttcggcggaaggtctgcggtacgtaaggcgctgtatatggctaccgtggtagcgacacgttttaaaccgcttattcgggatttctaccaacgcctgccgtccgagggtaagccgtataaggttgccgttacggcatatatgcgcaaactgctgacgatatcgaatgcccggatgcgtgattattttgccgaaaacgataccgccgaaaacggtatccggacggcttga

SEQ ID NO: 54836 - DNA, 924 bp, Neisseria meningitidis
atgaaaaaacgcaataatcctcttcctctgttgaacggtgtcaaacccagttatttggtgctgccgcatgaaaagcagttttacgggctgccgctgctgcattttctgtgcatccgctttccttttgtgggcgcggacgattggcgcaggcggttgaacagcggttttgtggtcggttcggatggtgcgacgttggacgaacatactttgttcgagccgggtaaggtgatgttttattatcgggaaaccagcagtgaggatgagccgcgtattccgtttgaagaaaagattttgcatattgatgagcatttgattgtggtggacaagccgcattttctgcccgtcatccccagcgggcgttttttgagggaaacgctgctcacacgtctgcgcctgcgtcctgaattgcagcatttgaatgttgaggacattacgccgctgcaccgcttggacaaggatacggcaggcgtgatgctgctgtcgcataatcctgccacgcgcggagcctatcagacgatgtttcaaaacaaaacggtatggaaaacgtatgaggcacttgcgccgacaaggacggatttgccgtatccgctcgatgtggtttcgcgtttggtgaggggtgagaaattttttacgacgcaagaggcggaaggcgaaccaaacgcacatacgacggtcgaactgattgaaaacaggggggaattcagcctttaccgccttacgccgcataccggcaagaaacaccagttgcgcgtgcatatgatgggtttgggtatgccgctgttgaatgacgcgctctatcccgtgccgtctgaagcgggcagcgaggattatcggaaacctttgaagttattggcaaaaaagattgcgtttgcagatcctttgtcgggtcgggaaagggtgttttgcagtaggttttgcctataa

SEQ ID NO: 54837 - DNA, 672 bp, Neisseria meningitidis; identical to SEQ ID NO: 47737

SEQ ID NO: 54838 - DNA, 1008 bp, Neisseria meningitidis
atgagcaccttcttccagcaaaccgcccaagccatgattgctaaacacatcgaccgcttcccactattgaagttggaccaggtgattgattggcagccgatcgaacagtacctgaaccgtcaaaaaacccgttaccttagagaccaccgcggccgtcccgcctacccgctgttgtccatgttcaaagccgtcctgctcggacaatggcacagcctctccgatcccgaactcgaacacagcctcattacccgcatcgacttcaacctgttttgccgtttcgacgaactgagcatccctgattacagcaccttatgccgctaccgcaactggctggcgcaagacgacaccctgtccgaattgctcaaactgattaaccgacaactgaccgaaaaaggtttaaaaatagagaaagcatccgccgctgtcgttgacgccaccattattcagaccgccggcagcaaacagcgtcagaccatagaagtcgatgaagaaggacaagtcagcggccaaaccacaccgagtaaggacagcgatgcccgttggatcaagaaaaacggcctctacaaactcggttacaaacaacatacccgtaccgatgcagaaggctatatcgagaaactgcacattacccccgccaatgcccatgagtgcaaacacctgtcgcctttgctggaaggattgcccaaaggtacgaccgtctatgctgataaaggctatgacagtgcggaaaaccggcaacatctggaagagcgtcagttgttagacggcattatgcgcaaagcctgccgcaaccgtccgctgacggaaacgcaaaccaaacgcaaccgatatttgtcgaagacccgttatgtggtcgaacagagcttcggtacgctacaccgtaaattccgctatgcgcgggcagcctatttcggactgattaaagtgagtgcgcaaagccacctaaaggcgatgtgtttgaaccttttgaaagccgccaacaggctaagtgcgcccgctgccgcctaa

SEQ ID NO: 54839 - DNA, 564 bp, Neisseria meningitidis
atgaaaaaaatcatcttcgccgcactcgcagccgccgccatcagtactgcctccgccgccacctacaaagtggacgaatatcacgccaacgcccgtttcgccatcgaccatttcaacaccagcaccaacgtcggcggtttttacggtctgaccggttccgtcgagttcgaccaagcaaaacgcgacggtaaaatcgacatcaccatccccattgccaacctgcaaagcggttcgcaacactttaccgaccacctgaaatcagccgacatcttcgatgccgcccaatatccggacatccgctttgtttccaccaaattcaacttcaacggcaaaaaactggtttccgttgacggcaacctgaccatgcacggcaaaaccgcccccgtcaaactcaaagccgaaaaattcaactgctaccaaagcccgatggagaaaaccgaagtttgtggcggcgacttcagcaccaccatcgaccgcaccaaatggggcatggactacctcgttaacgttggtatgaccaaaagcgtccgcatcgacatccaaatcgaggcagccaaacaataa

SEQ ID NO: 54840 - DNA, 1536 bp, Neisseria meningitidis; identical to SEQ ID NO: 40021

SEQ ID NO: 54841 - DNA, 360 bp, Neisseria meningitidis; identical to SEQ ID NO: 42625

SEQ ID NO: 54842 - DNA, 369 bp, Neisseria meningitidis
atgcggatattcaaaaaccaatggatagtgaaatttgccaagaagcacaaaatcaacgattccgagctgctggaagcggtagagcgggcggataacgggctgatagacgcagatttaggcggcggtgtgattaagcagcgcatagcaaggcaaggacaaggcagaagcggcggctatcgcagcctgatattgttcaaacaggcagatagggcatttttcgtttacgcctttgccaagaacgacagggaaaacatttcggataaagaactggacgtttaccgaaaagccgccgcatattatctgaaatacacgcgggcagagctggcggctttgaaagaagacggcattatcacggagatagaatcatga

SEQ ID NO: 54843 - DNA, 2280 bp, Neisseria meningitidis
atgaatacaccgactgatttgaaagtaaccaaacgagacggaagattagaagccattgatttggataagattcaccgtgtcgttacttgggcggcggaaggattggaaaatgtttccgtgtcgcaggtcgagttgaaatcgcacatccagttctacaacggcatccgcaccgacgacatccacgaaaccatcatcaaggccgctgccgatttaatttcggaagatactccggactaccaataccttgccgcgcgtttggcgattttccatctgcgtaaaatagcctacggcgaatacgagccgccgcacctttacgaccacgttaaaaagctcaccgatgccggaaaatacgacaggcatatccttgaggattacagccgcgaagaatttgatgaactgaacgcctatatcgaccacgaacgcgatatgtccttttcctatgccgctgtcaaacagctcgaaggcaaatatctggtacagaaccgcgttaccagccagatttatgaaacaccgcagttcttatatgttctggtggcgatgtgtcttttcagcaaatatcccaaagaaacacgcctcgattacgtcaaacggttttacgatgccgtttccacatttaaagtatcgctgccgaccccgattatgagcggcgtgcgtacgcctacgcgccagttctcaagctgcgtactgatcgaatgcgacgacagcctggattccatcaacgccaccaccagcgcgattgtgaaatacgtttcccagcgtgcgggcatcggcatcaatgccggacgtatccgcggtttggacagcgaaatccggggcggcgaagcgcggcataccggctgcattccgtttttcaaaatgtttcaggcggcggtcaaatcctgttcgcaaggcggcgtgcgcggcggagcggcaactttgttctaccccttgtggcatatcgaagccgaaagcctgctggtgttgaaaaacaaccgcggtgtggaagacaaccgtatccgtcagcttgattacggcgtgcaaatcaaccgcctgctgtacacccgcctgattaagggcggcaacattacgctgttttcgcccaacgaggttccggggttgtacgaagcgttttttgccgaccaagacgaatttgagcggctctatacgaaatacgagcaagacccgaacatacgcaagcgtatcattccggctgccgacctgttttccacgctgatgcaggagcgtgccgggaccgggcgcatctacattcaaaacgtcgatcactgcaatacgcacagcccgttcgatccgtgcgtcgcgcctgttcatcagtccaacttgtgtatggaaatcgccctgccgaccaaaccgctggacaatatcaacgatccgaacggcgaaatcgccctgtgtacactgtctgcctttaacttgggcgcattaaacagcttggacgaattggaagggcttgccgacttgaccgtgcgtgcgctcgatgcacttttagattatcagggatatccggtagaagccgcgcgtacctctactatgggtcgccgttcgctcggcatcggcgtgattaactatgcttattatctggcgaaaaacggtgtccgctacagcgacggctccgcgctcggtctgacccaccgtacctttgaagccatacagtattacctgctcaaagcatcggcaaaccttgccaaagaatacggtgcgtgcacgctctttaaccaaaccgtttattcgcaaggcaaactgcccatcgacacttacaaaaaagatttggatgccgtctgcggcgagcctttgcattacgactgggaaagcctgcgtgccgacatcgtcaaatacggcctgcgtaactccaccctgaccgcgctcatgccgtctgaaaccagttcgcaaatcgccaacgccaccaacggcatcgagccgccgcgcggattggtaacggtcaaagcatcgaaagacggcattttgaaacaagtcgtgccggagtttgaaaccctgaaaaatgcctatgaaaccctgtggcagcttcccggcaacgaaggctacctgaaacttgtcggcgtgatgcaaaaattcgtcgatcaatcgatttccgccaataccgcctacgacccgggcaaattcgaaggcggcaaagtttctatgaaacaaatgctcaaagacctgctgaccgcctacaaatacggcgtcaaaaccctgtactaccataacacccgcgacggcgcggacgatacgcagaccgatattcaggatgacggctgcgcgggcggggcttgtaagatttga

SEQ ID NO: 54844 - DNA, 1677 bp, Neisseria meningitidis
atgagcgtaggtttgctgaggattctggttcaaaaccaggtggttactgttgagcaggccgagcattactacaatgagtcgcaggcgggtaaggaagtgttgccgatgctgttttcagacggtgtcatttcgcccaagtcgcttgcggcattgattgcgagggtgttcagttattcgattcttgatttgcgtcattatccgcgccacagggtgctgatgggggtgttgacggaggagcagatggtggagttccactgtgtgccggttttccgtcggggcgacaaagtattttttgcggtttccgatccgacacagatgccgcaaattcagaaaaccgtttctgccgcagggattgaggttgagttggtcattgtcgaggatgaccagttggcgggtttgctcgattgggtgggttcgcgttcgacatcgctgcttcaggagcttggggaggggcaggaggaagaggaaagccacaccctgtatatcgacaacgaggaggcagaagacggccctgttccgaggtttatccataagactttgtcggatgccttgcgcagcggggcatcggacatccatttcgagttttacgaacacaatgcccgtatccgtttccgtgtggacgggcagctccgcgaggtggttcagccgcccattgcggtaagggggcagcttgcttcccggattaaggtaatgtcgcgtttggacatttccgaaaaacggataccgcaggacggcaggatgcagctgacctttcaaaagggcggcaagcctgtcgatttccgtgtcagcacattgccgacgctgtttggcgaaaaggtcgtgatgcggattttgaattccgatgccgcgtctttgaacattgaccagctcggttttgagccgtttcagaaaaaattgttgttggaagcgattcaccgtccctacgggatggtgctggtaaccggtccgacgggttcgggtaagacggtgtcgctctatacctgtttgaatattttgaatacggagtcggtaaatattgcaacggcggaagaccctgccgagattaacctgccgggcatcaatcaggttaacgtcaatgataagcagggtctgacttttgccgctgctttgaagtctttcctgcgtcaggacccggacatcattatggtcggtgagattcgtgatttggaaactgccgatattgcgattaaggcggcacaaacagggcatatggtgttttccaccctgcacaccaataatgcgccggcgacgttgtcgcgtatgctgaatatgggtgtcgcgccgtttaatattgccagttcggtcagcctgattatggcgcagcgtcttttacgcaggctgtgttcgagctgcaaacaggaagtggaacgcccgtctgcctctgctttgaaggaagtcggcttcaccgatgaggaccttgcaaaagattggaaactttaccgcgccgtcggttgcgaccgttgccgggggcagggttataaggggcgtgcgggcgtgtatgaggttatgcccatcagcgaagaaatgcagcgtgtgattatgaacaacggtacggaagtggatattttggacgttgcctataaggagggtatggtggatttgcgccgggccggtattttgaaagttatgcagggcattacttcattggaagaggtaacggcaaataccaacgattag

SEQ ID NO: 54845 - DNA, 1806 bp, Neisseria meningitidis
atgcgtaaggtgtgtgcttcagcacgcacgcgttccatgatttacggctcaatgccgtctgaaaagctcacaatttttcagacggcatttgttatgcaagtaaatattcagattccctatatactgcccagatgcgtgcgtgctgaagacaccccctacgcttgctatttgaaacagctccaagtcaccaaagacgtcaactggaaccaggtacaactggcgtacgacaaatgggactataaacaggaaggcttaaccggagccggagcagcgattattgcgctggctgttaccgtggttactgcgggcgcgggagccggagccgcactgggcttaaacggcgcggccgcagcggcaaccgatgccgcattcgcctcgctggccagccaggcttccgtatcgctcatcaacaacaaaggcaatatcggtaacaccctgaaagagctgggcagaagcagcacggtgaaaaatctgatggttgccgtcgctaccgcaggcgtagccgacaaaatcggtgcttcggcactgaacaatgtcagcgataagcagtggatcaacaacctgaccgtcaacctagccaatgcgggcagtgccgcactgattaataccgctgtcaacggcggcagcctgaaagacaatctggaagcgaatatccttgcggctttggtgaatactgcgcatggagaggcagccagtaaaatcaaacagttggatcagcactacattgcccataagattgcccatgccatagcgggctgtgcggcagcggcggcgaataagggcaagtgtcaggatggtgcgataggcgctgcagtcggtgagattgttggtgaggctttggttaagaatactgatttcagtcgtatgagtgcgaccgaaatcgaaaaagctaaagcgaagattactgcctattcaaaactggttgccggcactgcgtctgccgttgtaggcggggatgtgaatacagcggcgaatgcggcacagatagcggtggagaataatactttgtatcctagatgcgttggtgcaaagtgtgatgaatttcaaaaggaacaacaaaaatggatacgtgaaaatcctgaagaatatcgagaagttttgcttcttcagacaggatttattccaattatcggtgatatacagagttttgtacaagcacagaccgctgccgatcacctgtttgctttgctgggtgtggttccgggtatcggtgaatcgatacaggcctataaagtagcgaaagcggcaaaaaatttacaaggcatgaaaaaagccttggacaaggcagcaaccgttgccactgcacagggctatgtcagtaaaaccaaaatcaaaatcggtcaaactgaattaagggttactgcagcaactgacaaacaattgctgaaagctattggcgaaggaagggacacgacaggtaaaatgaccgagcagttatttgactctttagctaaacaaaatggcttcagagtgctttcgggcggcaaatacggcggaaataacggttttgatcatgtatggcaggctgccgatggtagtgttgttttgattgtagaaagtaagcagattaggaacggtacggtacagctgaatccgaatggtgcgggtggatatacgcaaatgagtgaggattggattagacaagttttagatcaattacccgatggtagtcccgctaaagctgctgtcttcaaagcaaataagaacggcacattaaaaacagcaatagcaggcgttgatcgtcaaacaggtaaggccgttattcttcctgtcaaagttccttctaaagccaatataaggagataa

SEQ ID NO: 54846 - DNA, 420 bp, Neisseria meningitidis
atggcacaattacccctgtatcggactgccgaaatcgaaaattttactgtcggcacgcccgaagttttagaatcattttccaaacatatcccttatggtgttgtctttgaagacgacggcgacacaggctacttctatgccgcttcgcaagacgggattttagatgccttgcacatttacaatgtcgaagatgtatccgataaacatatccccaatcatgtcttgattttatgggatgatgcctgcaccatagccgcattgtgtatcaacgactacattcatgccgtctatgattttgtcgaacaggcaggatattgccgcaacggcttccctgaagcacaaggcgaatggccgaaagtcacagaccgcgtattggacgatgaattgcaggacaaaatcctatcccgaaaacctacataa

SEQ ID NO: 54847 - DNA, 993 bp, Neisseria meningitidis
atgaaacaaaaaatcttcgtcctctacacaggcggcaccataggcatgacccaaagcagcgaaggcctgcgccccgataccgcactggttagccaagccctttcccccttttcaggcggcctcgatttcgagtggcacgtctgcaatcccttgattgattcctcctccgttacgctgcaacactggcgcgattggctggacatcattgccgacaaactcccttcatgcgacggcatcctgatactgcacggcacggacagcatggcgtacaccgccaatctcctcgcgctcgctctgcaaggtttgggcaaaccgattgtcctgactggttcccaatggccttacgccgccgaaaacagcgatgccccgcgcaacctctccaccgccgttgccgccttcagcctcaagctcaaacaaaccgtcatcgcgtttgacggcaaactgtatcccgccgtcggcagcagcaaagtcagcaccgaaaccgcctcaggcttcgataatccgcatttcggtgtcatcgccgaatgggatgaaactcaaggctggtacaatcttcgtattccgtcccaagatgcggcggccgtttcagacggcctcaaaatccgctatcctgacccgcaggcaaaaatcgccgtccgcacgcttatccccggctttgccgtccaagaacttgccgacggactcggacagtttcccgcccaagcccttatcctgcaaagctacggacacggcaacacgcccgcagacgaaggttttatccgcgccgtccgagacttcgcgcggcagggcaaactgctgctcaacatcagccaagtccgacaaggcaaaaccgccgccgtttacgcgcaaggcaacgcgttccgcaactcgggcatcatcaacggcggcaaatgcaatttggaaaccgcaaccgcattgatgacgcttgccgtttctgaaggatggggcgcggacgaggtgaaacacgagttgcagcggttggggctggtgtga

SEQ ID NO: 54848 - DNA, 1185 bp, Neisseria meningitidis
atggctaaggaaaaattcgaacgtagcaaaccgcacgtaaacgttggcaccatcggtcacgttgaccatggtaaaaccaccctgactgccgctttgactactattttggctaaaaaattcggtggtgctgcaaaagcttacgaccaaatcgacaacgcacccgaagaaaaagcacgcggtattaccattaacacctcgcacgtggaatacgaaaccgaaacccgccactacgcacacgtagactgcccggggcacgccgactacgttaaaaacatgattaccggcgccgcacaaatggacggtgcaatcttggtatgttccgcagccgacggccctatgccgcaaacccgcgaacacatcctgctggcccgtcaagtaggcgtaccttacatcatcgtgttcatgaacaaatgcgacatggtcgacgatgccgagctgttggaactggttgaaatggaaatccgcgacctgctgtccagctacgacttccccggcgacgactgcccgattgtacaaggttctgcactgaaagccttggaaggcgatgccgcttatgaagagaaaatcttcgaattggctgctgcattggacagctacatcccgactcccgagcgtgccgtggacaaacctttcttgttgcctatcgaagacgtgttctccatttccggccgaggtacagtagtaaccggccgtgtagagcgcggtatcatccacgttggtgacgagatcgaaatcgtaggtctgaaagaaacccaaaaaaccacctgtaccggcgttgaaatgttccgcaaactgctggacgaaggtcaggcgggcgacaacgtaggcgtattgctgcgcggtaccaaacgtgaagacgtagagcgtggtcaagtattggctaaaccgggtaccatcactcctcacaccaagttcaaagcagaagtatacgtactgagcaaagaagagggtggccgtcacactccattcttcgccaactaccgtccgcaattctacttccgtaccaccgacgtaaccggcgcggttactttggaagaaggtgtggaaatggtaatgccgggtgaaaacgtaaccatcaccgtagaactgattgcgcctatcgctatggaagaaggtttgcgctttgcgattcgcgaaggcggccgtaccgtgggtgccggcgtggtttcttctgttatcgcttaa

SEQ ID NO: 54849 - DNA, 1515 bp, Neisseria meningitidis
atgactacctccaaatgccctgtaacccatctgaccatgaacaacggcgcgcctgttgccgacaatcaaaacagcctgaccgccggtcctcgcggccctctgctggcgcaggatttgtggctgaatgaaaaactcgccgacttcgtgcgcgaagtcatccccgaacgccgtatgcacgccaaaggttcgggcgcgttcggtacgtttaccgtaacgcacgacatcaccaaatacacccgcgccaaaatcttcagcgaagtcggcaaaaaaaccgagatgttcgcccgtttcaccaccgtggcaggcgaacgcggcgcagccgatgcagaacgcgacatccgcggttttgccttgaaattttataccgaagaaggcaactgggatgtggtcggcaacaacacgcccgtgttcttcctgcgcgacccgcgtaagttccccgacctgaacaaagccgtcaaacgcgacccgcgcaccaatatgcgctctgccacaaacaactgggacttctggacgctgctgcccgaagcactgcaccaagttaccatcgtgatgagcgaccgcggcatccccgccggctaccgccatatgcacggcttcggttcgcatacctacagcttctggaacgaagcaggcgagcgtttttgggtgaaattccatttccgcacccaacaaggcattaaaaacctgaccaacgaagaagccgccaaaatcatcgccgacgaccgcgaaagccatcagcgcgacttatacgaagccatcgaacgcggcgagtttccgaaatggacgatgtacatccaagtcatgcctgaagcagacgcggaaaaagtaccttatcatccgtttgacttgaccaaagtttggccgaaaaaagactatccgctgattgaagtgggcgaattcgagttgaaccgcaatcccgaaaacttcttcgccgatgtggaacaatccgccttcgcaccgagcaacctcgttcccggtgtcggcgccagcccagataaaatgttgcaagcccgtttgttcaattacgccgacgcgcaacgctaccgcttgggcgtgaacttccgccaaatccctgtcaaccgtccgcgttgccctgttcacagcaaccagcgcgacggacaaggacgcgccgacggcaactacggcagcctgccgcactacgaacccaacagcttcggccaatggcagcagcagcccgacttcgccgaaccgcctttgaaaatcaacggcgacgcggcgcactgggactaccgccaagacgatgacgactatttcagccaaccgcgcgccctgttcaacctgatgaacgacgcgcagaaacaggcattgttcggcaacaccgccgccgcaatgggcgacgcgcccgacttcatcaaataccgccatatccgcaactgctaccgttgcgatccggcatacggcgaaggcgtggcaaaagccctcggactgactgtcgaagacgcacaagccgcccgcgcgaccgaccccgcactgggtcaggccggtttgctgtaa

SEQ ID NO: 54850 - DNA, 405 bp, Neisseria meningitidis
atggcaaaccgatttcagcagcgcaaatccgcataccgccgccttagcggcaagccgttgttttcagacggcattgcggccaacctttgcggcgggcgaaaaaccttgtcctataatttatcccgtttcaaaatcagcatacggtcggaaatgcaaaaaatatctttcaatttgttgaagcctgcaaactccccgaaaatagggaaacgccgccccggtttgaacggtgcgccgcatattccgatgccctccccccgataccttccggcaagcccagaaatgcccggcaacaatatccatccggcaaaaatccgaaacaacacacccggtggcaggcagagtcaaaccgccccgcaaagcatccgccatcagaaaaacaaaccgcctccgagggcttcatcctaa

SEQ ID NO: 54851 - DNA, 996 bp, Neisseria meningitidis; identical to SEQ ID NO: 42282

SEQ ID NO: 54852 - DNA, 2451 bp, Neisseria meningitidis
gtgagcattagcgcaccgtatgccaatgagaacagtcgcatcctgctcagcaccacggatatcagttcggaaaacggcaaaatcaaaattcaatcttacggtgaccaatattactatgcgagacagagcgaactctatacctttgaacgccgcagctacaaaaccggcaaatggtacaaccgcaaacacattaccgaagtcaaagaacacaaaaacgccaagcccgacgcagtaaacctcagcgcatcccaaggcatcgacatcaaatctggtggcagcatcgacgcctacgccaccgcattcgatgcccccaaaggcagcattaacatcgaagccgggcggaaattgacactctatgccgtagaagagctcaactacgacaaactagacagccaaaaaaggcgcagatttctcggcatcagctacagcaaagcacacgacaccaccacccaagtcatgaaaaccgcgctgccctcaagggtagttgcagaatcagccaatctgcaatcaggttgggataccaaactgcaaggcacacagtttgaaaccacactgggtggcgcaaccatacgcgcaggcgtaggcgagcaggcacgggcagatgccaagattatcctcgaagggatcaaaagcagcatccacacagaaaccgtgagcagcagcaaatctactctatggcaaaaacaggcaggatggggcagtaacatcgaaaccttgcaattgccgagtttcaccggtcccgttgcgcccgtactgaccgctcccggcggctatatcgccgacatccccaaaggcaacctcaaaaccgaaatcgaaaaactcgccaaacagcccgagtatgcttatttgaaacaacttcaagttgcgaaaaacatcaactggaatcaggtgcagcttgcttacgataaatgggactacaaacaggagggcatgacacccgcagcagcagctgtcgtcgttatcgtcgtaactgtattgacctacggcgcactgtccgccccggcagccgccggaacggcgggcgcggcaggcgcaggagcgggaggagccgcagcaggaacggcagccggaactggagtagcagcaggaacggcagccacaaccggagtagcagcaggcacatcagctgcagctatcaccacagccgcaggcaaagccgcactggccagtctcgccagccaagccgcagtttccctcatcaacaacaaaggagacataaaccataccctgaaagaactgggcaaaagcagcaccgtcagacaggccgccaccgccgccgtaaccgcaggcgtactgcagggcataagcgggctgaacacccaagcagccgaagccgtcagcaaacattttcacagtcccgcagcaggcaaactgaccgctaacctgatcaacagcaccgctgccgcaagtgtccataccgccatcaacggcggcagcctaaaagacaacttgggcgatgccgcactgggtgcgatagtcagtaccgtacacggagaagtagcgagcaaaatcaaatttaatctcagcgaagactacattgcccacaagatagcccatgccgtagcaggctgtgcatcggcggtagcaaataaaggcaaatgtcgggacggcgcaatcggcgcggcagtcggcgagatggtgggagaaaccctgttggacggacgcgatgtaggcaaactgtcaccccaagaacgccaaaaagtcatagcctactcgcagattatcgcaggcagcgtagtggcattggttaaaggggatgtgaatacggcggcgaatgcggctactgtggcagtggagaataatagtcttttagctcgcaggagggtaaatatacgttggactccgcgacaagaattggaacatgaatatgccattcttgaaatccaggccattaccaatcaaatccgaaggctggatccgaaatttaacgggattgctattctgaggactcctggagagccgtggacaagacatgatgtacaaacatacaggcaatattataatcaattaagggaatccagaggctttgctgttgacccaatttatagaatcaggataaacaacggcaatgaatttaaccgtatcatgtcatcaaaatacccttataatgagctttatgtagccaatcctaaatcggcgacggggtattttagggtagattcgtataatcctgcgacagaggaaattatttcaagaaaatttacccaattttctcaaatccaagaaagtacggggattggttatatcaaggaggctgttagaaaatatagccctggtgctgtcatttccaatgttccaagtacacctactacgataagaggaagaaagcttgaaggaaaacttattttagaagttcctgctcaggtcaatccaattccacaatctgtattaagggcggcacaagaagaaaatgttatcattagagatacaacaggaaggatttacaaatga

SEQ ID NO: 54853 - DNA, 516 bp, Neisseria meningitidis
atgtacacttgcacttcctgcggcgaaaaacatgaagatatgcccgcaatcggctttaccgcccccgatccctataatcaactcagtgaagaagaacgcattgcttatcaagcagaatgcgattctgatttctgcatcatccgctatcccgaccaaaccgaccgctttatccgcgcggtgctgccgattccgattatcgggcatgaggaaacgctggaatatggggtgtgggtatccgtcagcgaaaagagttttaacgactatcaaagccgcttttacgacaaccttgaaaacgctgtttatttcggcatgatctgcaaccggctgcccccttatgaaaccgaccccttcggtttgcattgcaatgtcgttacccaacccgatggtcaacgtcctttgttgcaactccatcaaggcggcgaacatccgctggtacgcgacttttatcacggcatagaatatgccgaagcgcaggcaaggataggggcggtatccgaatcggattgctcaggataa

SEQ ID NO: 54854 - DNA, 126 bp, Neisseria meningitidis; identical to SEQ ID NO: 38379

SEQ ID NO: 54855 - DNA, 636 bp, Neisseria meningitidis
ttgaacatcaaatattcgggcatcgaaaacaggtttgaaaccgccatcctgaagaaaaacggcgtaagatccggcttcgtctccttcgcccccaaccttgccgccgtcaaactgaacgattatgccaaagttagaaaacggattaccaaaaccaaacagaaagccgacatcgtcattgtgatgttccacggcggcgcggaagggaaacaggcggaacacctgccgttcgataccgaaatcttctatggggaaaacaggggcaacgtcgttgagtttgcgcggcttgccgtcgattccggcgcggatgtcgtattcgggcagaggccgcacgttactcgcgccgtcgaactttaccgcgaccgcttcatctcctacagcggcggcaactttgccacctacggcgcaatcaacacctccggcatcagcggcatcgcccccatttttaaaattatcaccgacaaacaggggcggttcgtttccggcaacattatccccatcactcaaatcggcgataaaatccccaaaatcgaccccgagaaaaccgttatcgggcggattatttatctgaaccgcagcgatttccccaaggggaacgggctggatgtctcgcccgacggcagcatcacgcgccggtaa

SEQ ID NO: 54856 - DNA, 492 bp, Neisseria meningitidis; identical to SEQ ID NO: 38741

SEQ ID NO: 54857 - DNA, 465 bp, Neisseria meningitidis; identical to SEQ ID NO: 46412

SEQ ID NO: 54858 - DNA, 522 bp, Neisseria meningitidis; identical to SEQ ID NO: 43029

SEQ ID NO: 54859 - DNA, 1347 bp, Neisseria meningitidis; identical to SEQ ID NO: 38402

SEQ ID NO: 54860 - DNA, 654 bp, Neisseria meningitidis
atgaagataacgcactgcaaattaaagaaaaaagtacagaaagaactgctccgtttttttgtactggaagttaccgcccgttctgccgccgatattttgggtatccatcccaattcggcagtactgttctaccgcaaaatccgcacggttatcaactatcatttggtcttggctgccgatgaggtttttgagggccctgtcgagccggacgaaagcgatttcggcggacggcgtaaaggcagacgtggtcgcggtgcggcaggaaaagtggttgtcttcggcattctgaaacgcaacggacggggctataccgttgtcgtagataatgccaagtctgaaacgttactccctgtcatcaaaaagaaaatcatgccggacagtattgtttataccgatagtctgagcagctgcgacaagttggacgtgagcggttttatccattaccgcatcaaccattccaaggagtttgcagaccgtcagaaccacattaacggcattgagaatttttggaatcaggcaaaacgtgtcttgcgaaaatacaacggaatcgattgcaaatctttcccactgttcttgaaagaatgcgaatttcgatttaacttcggcacaccgtctcaacagcttaaaatcctgcgggattggtgtgggatttag

SEQ ID NO: 54861 - DNA, 375 bp, Neisseria meningitidis; identical to SEQ ID NO: 38650

SEQ ID NO: 54862 - DNA, 462 bp, Neisseria meningitidis; identical to SEQ ID NO: 39618

SEQ ID NO: 54863 - DNA, 426 bp, Neisseria meningitidis
atgaaaacagcccgccgccgttcccgcgagcttgccgtacaagccgtttaccaatcccttatcaaccgcaccgccgcgcccgaaattgctaaaaacatccgcgaaatgcccgactttgccaaagcggacgaagaattgttcaacaaacttttcttcggtacgcaaaccaacgcagcggactacatccaaaaaatccgccccctgctcgaccgcgacgaaaaagacctcaatcccatcgaacgcgccgtcctgctgaccgcctgccacgagctgtccgccatgcccgaaacaccctaccccgtcatcatcaacgaagccatcgaagttaccaaaaccttcggcggcacggacgggcacaaattcgtcaacggcatcctcgacaaactcgccgcccaaatccgccccgacgagcccaaacgccgttga

SEQ ID NO: 54864 - DNA, 645 bp, Neisseria meningitidis
atggaatcaacactttcactacaagcaaatttatatccccgcctgactcctgccggtgcattttatgccgtatccagcgatgcccccagtgccggtaaaactttgttgcacagcctgttgaaagcggatgtggacgaaatggtcagcagtgagaagctgcttacctgggcggacaccgccgacatcgataccgctttgaacctgttgtaccgtttgcaaaaactcgaattcctctatggcgatgaaaacggtcattcagacggcatcaatttgtcggacgagcaattgccgttgctgatggaacaattgtccggcagcggtaaggcgttattggtcgatcggaacggtctgtatcttgccaacgccaatttccatcatgaggcggcggaagagttggggttgttggcggcagaagtcgcacagatggaaaagaaataccggctgctgattaagaacaacctgtatatcaacaataacgcttggggcgtttgcgatccttccggtcagagcgaattgacatttttcccattgtatatcggttcaaccaaatttattttggttatcggcggcattcccgatttgggcaaagaggcatttgttactttggtaaggattttataccgccgttacagcaaccgcgtgtaa

SEQ ID NO: 54865 - DNA, 483 bp, Neisseria meningitidis
atggctatcgtgaagaattccgtggtttcgctgcattatgagatgtatgatgccaacaatcagcttttggacaaaaccgaagaaccgattgcgtatctgcacggcggttacgacggcattttccctttggtggaagaggcgttgcacggtaaggatgccggcgatacggtcgatgtggcgctttcgcccgacgatgcgttcggcgagcaggatccggagttggtccgtattgaagatgcgggcgtgttccctgttgaagtcgaagtcggcatgatgtttgaagccgacgatcctgaaaccggcgatgttgtcgtctatcgtgtaaccgatgttgccgacggtaaggcggtggtggacggcaaccatcctttggcaggcatgaaaatccgctttaaggctacggttgaaagtgtgcgcgatgcatccgatgaggaaatcgcacacggtcatgtccacggcccgcacggtcatcaccaccactga

SEQ ID NO: 54866 - DNA, 627 bp, Neisseria meningitidis; identical to SEQ ID NO: 36517

SEQ ID NO: 54867 - DNA, 780 bp, Neisseria meningitidis
atggcagcctcgcccgaagcaaaattcactgaagaaaagattttgtgggtcaaacaccacacgccgaaactcatcactttcgccatcagccgtcccgaatcctaccgttttaaagccggacagttctcccgactcggtttctacgaaggggaaggctttatttggcgtgcctactccatcgtttccgcagaatatgccgacacgctcgaatattttgccgtactcatccaagacggccccatgtcggcccgtttcgccaaaatgcaacagggcgataccatcctgctcgataaaaatgccaccggcttcctcctgcccgaacgcttccccgacggcaaggatttggtgatgctctgcaccggctccggcatcgcccccttcctttccattctcgaacaacccgaaatccggcagcgtttcgataccgtcaacctgatacattccgtatcttttcccgaagaattgattttcaacgaccggctcgccgcattggccgaacatcccctggtaggcgaatacggacactcgttccgtttcgtccctgttaccacccgtgccgccaacccctcgggcttaggcggaaaacgcattccggaactcttaaaaaacaacagcatcgaacaggcgctgcataccaagtttacccccgaatccacacggtttatgatttgcggcaatccggaaatggtcaaagacaccttccaaacgctgcttgacatgggttacgccatgcaccgcaaccgcattcctggtcaaatcatgatggaaaacggcttctaa

SEQ ID NO: 54868 - DNA, 1104 bp, Neisseria meningitidis
atgaatacgacagcaaacccttccaatatcatcgtcgggctctccggcggtgtcgattcttccgtaaccgccgccctgctcaagcagcagggttatcaagtgcgcggtgtgttcatgcagaactgggaagacgacgacaacgacgaatattgcagcatcaaacaggattcgttcgatgccatcgccgttgccgatattatcggcatcgacatcgacatcgttaatttcgccgcgcaatataaagacaaagtctttgcttattttcttcaggaatacagtgcggggcgcacgccgaatcccgatgtgttgtgcaacgccgaaatcaaattcaaatgctttttggattacgccgtagggcagggcgcggataccatcgccaccggacactatgcgcgcaaagaagtccgcaacggcgtgcattacctgctcaaaggtttggatcgaaacaaagaccaaagctatttcctctaccgcctcaagcctttccaactcgagcgcgcgatttttccgttgggcggtttggaaaaacctgaagtccgccgccttgccgccgaatttaatttgccgaccgccgccaaaaaagacagcacgggcatctgcttcatcggcgaacgcccgtttcgcgagtttctgcaaaaatacctgccgaccgacaacggtaaaatggttacgcccgaagggaaaaccgtcggcgaacacgtcgggctgatgttctacacgctcggacagcgcaaaggtttgggcatcggcggcgcgggcgaaccgtggtttgttgcggctaaagatttgacgaaaaacgaactgattgtcgtgcaaggacacgaccatccgctgctctatacccgcagccttgtgatgaacgatttgagtttcacgcttcccgaacgcccgaaggcaggacgctatacctgcaaaacgcgttaccgtatggcggacgcgccttgtgagttgcgctatttggatgaagaaaccgccgagctggtgtttgacgaaccgcaatgggcggttacgccgggccagtctgccgtgctgtacgacggcgacatctgtttgggcggcggcatcattcaaacgaccgacaagcctgtcatcatcacacgataa

SEQ ID NO: 54869 - DNA, 483 bp, Neisseria meningitidis; identical to SEQ ID NO: 37940

SEQ ID NO: 54870 - DNA, 1245 bp, Neisseria meningitidis
atggaacagcagcaaagatacatcagcgtactggatatcggtacgtctaaagtcctcgcactgatcggggaagttcaagatgacgacaaaatcaacatcgtcggtttggggcaggctccttcacggggcttgcgcgcgggcatggtaaccaatatcgatgccaccgtccaagccatcaggcaggcggtcaatgatgccgagctgatggcggataccaaaattacccacgttaccacaggtatcgcaggcaaccacatccgcagtctcaattcgcaaggtgtggttaaaattaaagacggggaagtcacgcaggcagacatcgaccgcgccattgaaacggcaaaggcaatcaatatcccgcccgatcaaaaaattctcgatgccgtggttcaagactacattatcgacacccaacttggcgtgagggagcccatcggtatgagcggtgtgcgtctggatacgcgggtgcacatcattaccggtgcaagtacggcagtgcagaatgtccaaaaatgtatcgagcggtgcggtttgaaaagcgatcagattatgcttcagccgttggcaagcgggcaggcggtgctgactgaagatgaaaaagacctcggtgtatgcgtcatcgacattggtggcggaacgaccgatattgccgtttatatgaacggcgccatccgccatacgtccgtcattccggccggtggtaatctgattaccaaagatttgtccaaatcgttgagaacacctctcgatgccgccgagtacattaaaatccattatggcgtggcatcatgcgatacggaaggcttgggtgagatgattgaagttccgggcgtgggtgaccggacatcgcgtcaggtttccagtaaggttttggcagcaatcatcagtgcacgtattcaggagatttttggcgtagtgctgggcgagctgcaaaaatcgggtttccccaaagaagtgctgaatgcgggtatcgttctgaccggcggtgtgtccatgatgaccgggattgtggaatttgccgaaaaaatcttcgatttgcctgtacgcaccggtgcaccccaagaaatgggcggtttgtccgaccgcgtccgcacaccgcgtttttctaccgctatcgggctgcttcatgcagcatgcaagctggaaggaaacttgccgcagccggaaaacggtgcagtgcaagagagggaagggggcggcggtttgttggcaagattgcaacggtggattgaaaacagcttctga

SEQ ID NO: 54871 - DNA, 1005 bp, Neisseria meningitidis
atgaccatcatcgtaacaggcgcggccggctttatcggcagcaacatcgtcaaagcacttaatcaacgcggtattaccgacatcgtcgccgtcgataatttgagcaaaggcgaaaaattcaaaaaccttgccgagtgcgaaatcgcccattatctcgacaaacacgaattcatccgccaagtgagggaacacattttaccttatcaaaacatcgaagccgttttccatcaaggcgcgtgttccgatacgatgaaccacgacggtttgtatatgatggaaaacaactaccagtacacgctggatttgttgaactggtgtcaggacgaacgcattcccttcctttatgcctccagtgcggcggtttacggcaaaggcgaaatcttccgcgaagagcgcgaactcgaaaaaccgcttaatgtgtacggctactccaaattcctgttcgaccaagtattgcgccgccgcatgaaagaaggtctcaccgcccaagtcgtcggcttccgctacttcaacgtttacggacaacacgaacaacacaaaggccgcatggcatccgtcaccttccaccatttccaccaataccgcgaacacggttacgtcaacctgttcggcagcaatgacggttacggcaacggcgaacaaacccgcgactttgtcagcgtcgaagacgttgccaaagtcaacctctacttcttcgaccatcccgaactttccggcatctacaacctcggtaccggccgcagccaacagtttaacgaactcgccgccgccaccgtcaacgcctgccgcgccgccgaaggcaagcctgaaatgagcttgaaagagctggtggaagaagaacttatccgctacatccccttccccgacgcactcaaaggcaaataccagagcttcacccaagccgacatcaccaaattgcgtgaggcaggttatacggaagaatttttcgatgtcaaatcaggcgtcgagcgctacgtcaaatggatgctggaaaatttggcttaa

SEQ ID NO: 54872 - DNA, 393 bp, Neisseria meningitidis
atgtattcgtttgaagcgaatgcaaatgcagtaaaaatatctgaaactgtttcagttgataccggacaaggtgcgaaaattcataagtttgtacctaaaaatagtaaaacttattcatctgatttaataaaaacggtagatttaacacacatccctacgggcgcaaaagcccgaatcaacgccaaaataaccgccagcatttcccgcgccggcgtattggcggggggcggcaaacttgcccgcttaggcgcgaaattcagcacaagggcggttccctatgtcggaacagcccttttagcccacgacgtatacgaaactttcaaagaagacatacaggcacgaggctaccaatacgacaccgaaaccgacaaatttgcaaaggtctcaggctaa

SEQ ID NO: 54873 - DNA, 1557 bp, Neisseria meningitidis; identical to SEQ ID NO: 44681

SEQ ID NO: 54874 - DNA, 2151 bp, Neisseria meningitidis
ttgggtagcgattgggtttcagacggcatacattcaggatttcaccgccttatgccgtctgaaagacgtttccgacccatccctactacacgctttgtccgcaaacgcatcacaggcaagattatggaagtcattcgataccccgattcccccttcaaactccaccaacccttcccgcccgcaggcgaccagcctaccgctattgccgacttgctcgaagggctttcagacggccttgcctaccaaaccctgctcggcgtaaccggttcgggcaaaacctacaccatggcgaacgtcatcgcccaaagcggccgacccgccatcatcatggcgcacaacaaaacccttgccgcccagctttatgccgaaatgcgcgagtttttccctgaaaacgcggtggaatatttcgtctcctactacgactattaccaacccgaagcctatgtgccaagccgcgatttgttcatcgaaaaagacagtgcgatcaacgaacacattgaacaaatgcgcctttctgccaccaaaaacctgatgacgcgcgatgacgtgattatcgttgccactgtgtccgccatttacggtatcggcgacccgactgagtatcaacaaatggtgttgtccgtcaaagaaggcgacaccatcgagcagcgcgacatcatcgccacgctcgtttccatgcagtacgaacgcggcgatttggatttcaaacgcggcagcttccgcgtgcgcggcgacgtgattgacgtgtaccccgccgaaagctccgaaaacgccttgcgtatcagcctgtttgacgacgaaatcgaccgcctcgatatgtttgacccgctttcaggcagcctgcaccaacgcgtcggccgctacaccgtcttcccgtccagccactacgttaccccgcgcgacaccgtattgcgcgcctgcgagtccatcaaagaagaattgcgcgaacgcattgatttctttaccaaagaaaaccgtcccgtcgagcaacaacgcatcgaacagcgcacccgtttcgacctcgaaatgctctacgaaatgggcttctgcaaaggtatcgaaaactactcccgtcacttctccggcaaaaaagaaggcgaaccgccgcccacgctgatggactacctgcccgacaacgccatcatgttcatcgacgaaagccacgttaccgtcacacaaatcggcggcatgtacaaaggcgacgcatcgcgcaagcaaaacctcgtcgattacggcttccgcctaccttccgcccgcgacaaccgcccgctcaaattccacgaatttgaaaaagtcatgccgcaaaccgtcttcgtttccgccacccccgccaaatacgaagaagaacacgccggacaagtggtcgaacaagtcgtccgccccacagggctggtcgaccctcaaatcatcatccgccccgtcgccacccaagttgatgacttaatgagcgaaatcaacgaccgcatccaaaaaggcgaacgcgtactcgttaccacccttaccaaacgcatggcggagcaactcaccgactattacagcgaactcggcatcaaagtgcgctacctgcacagcgacatcgacaccgtagagcgcgttgaaattattagagatttacggctcggattgtttgacgtactcgtcggcatcaatctcttgcgcgaaggcctcgacatcccagaagtctccctcgtcgccatcctcgacgcagacaaagaaggcttcctgcgctcccaccgcagcctgattcaaaccataggccgcgctgcgcgcaacgtgaacggcgtcgcgattctgtacgccgacaaaatcaccgactctatgaaagccgccatcgacgaaaccgaacgccgccgtgaaaaacaaattaaattcaacgaagaacacggcatcgtgccgcaacagattaaaaaacaggtcaaagacatcattgacggcgtgtaccacgaagaagacagcggcaaaggccgtagacaaggcaaaaacaaagttaaagtcggcgaaattcacaacgaagaagacgcgattaaagaaatcgccaaactcgaaaaagccatgcaacaggcggctagggatttgcagtttgaagaagcggctgttcttcgtgataggatacggaatattaaagagagtttgttgtttggggcggaataa

SEQ ID NO: 54875 - DNA, 654 bp, Neisseria meningitidis; identical to SEQ ID NO: 44597

SEQ ID NO: 54876 - DNA, 1287 bp, Neisseria meningitidis
atgacggcacaacaccaaaccccgctccgcttcattaccgccggcagcgtcgatgacggcaaaagcaccctaatcggacgactgctctacgacagcaaagccctgctgtccgaccaaatcaaaaccttggaatccggcaaaagcaacggtttgaaagaaaccatagacttctccatcctgaccgacggactggaagccgaacgcgaacagggcattacgatcgatgtggcataccgctatttttccacggcgaaacggaaattcatcatcgccgacacgccggggcacgaacaatacacgcgcaatatggttacgggcgcaagcaccgcttcggcggcagtcgtactggttgacgcatcccaactggatttcggcgcgcagcccttgcagcttctgccgcagaccaaacgccattccgccatcctccgccaactcaactgcccgcatattgtggtggcggtcaacaaaatggacctgctggattacagcgaagacaaattcaacgccattgtggaggcataccgccgacttgccgaacagctcggtttgaaagacgtgcatttcgtaccggtgtccgcactcttgggcgacaacatcgtttaccccggcggcaatatgccttggtataaaggcgaacccttattgtccattttggaaaacctgccgggggcggacgaaaccggtcgttccgctgccgatttttatttccccgtccaactggtcgtccgccaagatgccgacaaggccgatgatttccgaggctatcaggggcgcatcgaacgcggttcggtcgccgtcgggcaaaccgtccgcatcgaaccgaacgggctgaccgccgaagtgtccgaaatcatcacgccgaaaggggaagtggcgcaggcttttgccggcgaggcggcaaccctccggctggaccgcgacatcgatgtttcgcgcggcgacctttttgtcgataaaaattccccgctcgccccgcaaaaacatctggaagccacgctttgctggtttgacgaacgtccgctcaacaccgcgcgcaaatacctgctcaagcacggcacgcaaaccgtgccggcaaaagtcggggaaattgaaagcgttttggatgtccgcacgctggaacaagaggccggcgcggaatccttgaagatgaacgacatcgccaaagtccgcatcaaccttcaaaaacccgttacggcaacgccttatgcggaaaacaccgccgccggttcgtttatcctgatagacgaagcgacatacggcactgttgcggcaggtatgattttatga

SEQ ID NO: 54877 - DNA, 510 bp, Neisseria meningitidis
atgaaaaagaaactgctttcgggcatcaaatttgccgttcagacggcattggtgtttttattggtgtcgctgtttttggattgggtacgcaagcccgacgaacctgccggcgcggcagggcggcctttgaccctgctgtcggggcagcggctgactttgggacagtttagccgggataggacggtgctggtgtatttttggggaagctggtgcggcgtgtgccgttatcagtcgccgataatcgatgatttggcggcggacggcgtgccggtcgtcggcgtggcggtacgttccggcagttcggcggaagtggcggcgtatatggcaaaacgcggcttgggctttccgactgtcaacgatgaggacgggggtttggcaaggtcttggcggattgtcgcaacgcctgccgtcgttttggtcaaaaatgggaaaatggttcactatacgacgggaatcagcagttattggggcttgcgcgcacgaatttttcaggcggatgttttcggttaa

SEQ ID NO: 54878 - DNA, 1986 bp, Neisseria meningitidis
atggctaaaaacaaccaatacagcgaatccagcatcaccgtcctcaaaggcttggagccggtcaaagaacgtcccggcatgtacacccgcaccgacagcccgacccacatctgtcaggaagtgattgataatgcggcggacgaggcgttgggtggtttcgcgactgcaatcgacgtgcaaattcatgaagacggttcgctttccgtccgtgataacggccgcggtattcccgtcggcctgcaccctgaagaaggcgtacccgtagtcgaactcgtgttcacccgtctgcacgcgggcggcaagttcaacaaaaaagacggcggcagcgcgtatgccttttcaggcggactgcacggcgtgggcgtatccgtcaccaacgccctctccacccgccttgaggtaacggtcaaacgtgaaggcaaaatccaccgtatcgtgtttgccggcggcgacgtggtcgaaccgttggcacaagtgggcaaatgcgccgtcaaagacagcggcaccgaagtgcgcgtctggccggacggcaaatattttgaaagcccgaattacagcattcccgaactcgaacgcctgctgcgtgccaaagccgtgctgctgccgggtgtgcgcgtttccctgacccgtccggtcaaaggcgaagacgaagcgcacacccaaacctggcactaccccgacggcctgaaaagctatctgaccgacctgattgccgacgcgcaggaagccgtgcctatcttctcttgcgaaaactacatttcagacgaccacaacggcgatttcagcatcggcgaaggcgccgcctttgccctgacttggctggaagaaggctcgtgtgccaacgaaagctacgtcaacctgattcccacccctttgggcggcacgcatgaagcaggcttgaaacaagccgtgttcaacgccgtcaacaatttcatcaatctgcacaacctcttgccgcgcggcgtgaaagtacaaagcgacgacgtgttcggcaaaaccgcctttgtcctctctgcccgtgtcctcgacccgcagttccaaggtcagaccaaagacaagctgaccaaccgcgacgcgctgaaacttgtcgccgctgtagcgggcgaccctttggaattgtggctgaaccaaaacgtggacttcggtaaaaaaattgccgaactcgccatccgtcaggcgcaggcgcggatgcgttcggttaagaaaatcgaaaagaaaaaaggcagcggcgtcgccgtcctgcccggcaagctgaccgactgcgaaagcgaagacatccgcgaaaacgaactcttccttgtcgaaggcgattccgccggcggctcagccaaactcgcccgcgacaaagccacccaggccatcctgcccctgcgcggcaaagtgctcaacagctttgaagtccaccccgaccagctcttcggcaacgccgaaatccacgacatttcagttgccatcggcgtcgatccgcacggcatcaacgaccatcccgatttaagcggcctgcgttacggcaaaatcgccatcctgtccgatgccgacgtggacggctcgcatattcaagttttgctgctgaccctgttctaccgccacttcccgaaactggtcgctgacggacacatctacgtcgcccagccgccgctgttccgcgtcgatgtcaacgcacaaggcaaaagcaaacccgcccgcaaattctacgcgctcgaccaaaacgaactcgacagcattttggagcggctgcaaaaagaaggcgtcaaagaaaccgcctattccatcagccgtttcaaaggcttgggcgagatgaaccccgaccagctcaaagacaccaccatgcaccccgacacccgccgcctgttgcaggtacaaatcccagaaggtgcagatgacgagacgcgcgacatcttcgtcaaactgatgggcaaaggcgaagccgccgcccgccgcgcttggatggaacgcgaaggcgatacggcggaattggatatttga

SEQ ID NO: 54879 - DNA, 534 bp, Neisseria meningitidis
atgtttccccccgacaaaacccttttcctctgtctcagcgcactgctcctcgcctcatgcggcacaacctccggcaaacaccgccaaccgaaacccaaacagacagttcggcaaatccaagccgtccgcatcagccacatcgaccgcacacaaggctcgcaggaactcatgctccacagcctcggactcatcggcacgccctacaaatggggcggcagcagcaccgcaaccggcttcgattgcagcggcatgattcaattcgtttacaaaaacgccctcaacgtcaagctgccgcgcaccgcccgcgacatggcggcggcaagccgcaaaatccccggcagccgccttaaggccggcgacctcgtattcttcaacaccggcggcacacaccgctactcacacgtcggactctatatcggcaacggcgaattcatccatgcccccagcagcggcaaaaccatcaaaaccgaaaaactctccacaccgttttacgccaaaaactacctcggcgcacatactttctttacagaatga

SEQ ID NO: 54880 - DNA, 372 bp, Neisseria meningitidis
atgagaaaaccccaacgcggctatgcccgccaagaccgtgtcaaagaacaaattatgcgcgagcttgccgaactcgtccgtaccggactgaaagacccgcgcgccggcttcattaccgtcaacgaagtcgaagttacccgcgattacagccacgccaccgtgttctacaccgttttaaaccaagacgcgcgcgaaattacggaagaagtgctggaacacgcgcgcggacacctccgcagcgaattggccaaacgcatcaagctgttcaaaacgcccgaactgcatttcaaatacgacgaatctttggaacgcggtttgaacctgtccgcccttatcgaccaagtagcggcgggaaaaccggttgaagactga

SEQ ID NO: 54881 - DNA, 483 bp, Neisseria meningitidis; identical to SEQ ID NO: 36693

SEQ ID NO: 54882 - DNA, 215 bp, Neisseria meningitidis
atgaaggcaattcatccgtatgcatgtccgcgctgctgccggctgcctgccaacacgtttcggacaggcatggcaaattccgcttccaaattctgcattgccaaaggcggcagacgggaagtaaaaaagacgaaagcggcggcggatatgccctgtgccatttgccggacagcaggattgtcgaggagtgggaatatttccgttcacaacattga

SEQ ID NO: 54883 - DNA, 354 bp, Neisseria meningitidis
atgggaataaaaaatgaacaaataataatttgtaaaaaatataatacagaaatatatcctgtttccgatgtttcaaaaatcggtgttgctgaaaatgtcaaacaggcaaacctgtatccgattaacgggttaaggcaccgtcccaaaggtgatactaacggttggtatatctgggccggtgaaaacttctcctatgataaaaattttttcctgcccttgcatactttccatttgcaaatatggcgacccgaaatcatcccctttttgacacttccgcccggttaccgttttttaattggggaaaacggttatgaagacgtatggtttgatgagttgctattaaatgataattga

SEQ ID NO: 54884 - DNA, 1188 bp, Neisseria meningitidis
atgaataccttactcaagcagctcaaaccctatccctttgcccgactgcacgaggcgatgcagggcatttccgcgcctgaaggcatggaagccgtcccactgcatatcggcgaaccgaaacatccgacaccgaaagtcattacggatgcgctgaccgcctcattgcacgagttggaaaaatatccgctgacggccggtttgcctgaactgcgtcaggcgtgtgcgaactggttaaaacgccgttatgatgggttgacgctgaattccgacaccgaaattctgccggttttgggaagtagggaggcgttgttttcttttgtccaaaccgtgttgaaccctgtttcagacggcctcaaacccgtaatcgtcagcccgaatcccttttatcagatttatgaaggtgcgacacttttgggcggcggtgaaatccattttgctaattgccccgcgccgtctttcaaccccgattggcgcagtatttccgaagaggtttggaaacgcaccaaactggtgttcgtctgctcgcccaacaaccccagtggcagcgtgctggatttggatggctggaaagaagtttttgatttgcaagacaaatatggtttcattattgcctcggatgaatgctattccgaaatctatttcgacggcaacaaacctttgggctgcctgcaagccgctgcacagttgggtcgaagcaggcaaaaactgcttatgttcaccagtttgtccaagcggtccaatgttccgggcctgcgttccggttttgtcgccggcgatgccgaactgcttaaaaactttctgctttaccgaacttatcacggcagcgcaatgagcattcccgtgcagcgtgccagtattgccgcctggaatgacgaacagcacgttattgacaaccgccgcctgtatcaggaaaagtttgaatgggttattcctatcctgcaacaggtatttgacgtcaaattaccggatgcctcgttttacatctggttgaaagtccccgatggcgacgatttggcatttgcacgcaatttatggcaaaaagccgctatccaagtattgcccggacgctttttggcacgggataccgaacagggcaatcccggggaaggttatgtgcgtatcgctttggtcaccgatgtcgcaacttgtgtcaaagctgcggaaaccattgtttccctatatcggtaa

SEQ ID NO: 54885 - DNA, 171 bp, Neisseria meningitidis; identical to SEQ ID NO: 36504

SEQ ID NO: 54886 - DNA, 792 bp, Neisseria meningitidis; identical to SEQ ID NO: 39568

SEQ ID NO: 54887 - DNA, 756 bp, Neisseria meningitidis; identical to SEQ ID NO: 51882

SEQ ID NO: 54888 - DNA, 279 bp, Neisseria meningitidis; identical to SEQ ID NO: 36930

SEQ ID NO: 54889 - DNA, 2262 bp, Neisseria meningitidis
atgttacaaatcgaaatcgacggcaaacaagtatctgtggagcagggcgcgacggtgattgaagccgcgcacaagctcggtacttatattccgcatttctgttaccacaaaaaactttccatcgccgccaactgccgtatgtgtctggtgaacgtagaaaaagccccaaaacccctgcctgcctgtgccacgccggttacagacggcatgattgtgcgtacgcattcggcaaaagcccgagaggcgcaggaaggcgtgatggagttcctgctcatcaaccatccgcttgattgtccgacctgcgaccaaggcggggaatgccagttgcaggatttggcggtgggctacggaaaaaccaccagccgctacaccgaagaaaaacgttccgtcgtcggcaaagacatggggcctttggtttccgccgaggaaatgagccgctgtatccactgcacccgctgcgttcgtttcactgaagaaatcgccggtttgcaagaaattgcgatggtgaatcgcggcgaacactccgaaatcatgccctttatcggcaaaacggtggaaaccgagctgtcgggcaacgtcatcgatttgtgtcctgtcggcgcattgaccagcaaaccgttccgcttcaacgcgcgtacttgggaattgaaccgccgcaaatccgtttccgcccatgacgctttgggcagcaacctgattatacaaaccaaagaccataccgtccgccgcgtgttgccgctggaaaacgaagcgattaacgaatgttggctgtctgaccgcgaccgtttcgcctacgaaggcctgtatcacgaaagccgtctgaaaaacccgaaaatcaaacagggcggcgagtggatggacgtggattggaaaaccgcgttggaatatgtccgcagcgcgattgaatgtatcgccaaagacggcaaccaaaaccaagtcggcatttgggccaatccgatgaatacggttgaagagctgtatctggccaaaaagcttgccaatggtttgggtgttaaaaactttgccacccgtctgcgccaacaagacaaacgtcttttagacgaccttaaaggtgcacaatggttgggacaaagcattgaatctttggctgacaacgatgccgtattggtagtcggtgcgaacttgcgcaaagaacagccgctcctgaccgcccgcctgcgccgcgccgccaaagaccgtatggccttgagcgtattggccggcagcaaggaagagttgttgatgccgcttctctctcaagaagccgcacatcccgacgagtgggcaggccgtctgaaaaacctgtctgccaatgcggaacacgccgttaccgccagcctgaaaaatgctgaaaaagcagcggtgattttgggcgcggaagtgcaaaaccatcctgattacgccgccatttatgctgccgcgcaagagctggcagccgcgaccggcgcagtgctgggtattttgccgcaagccgccaacagcgttggtgcggatgtcttgggcgtgaactcgggcgagagcgttgccgaaatggcaaacgcgccgaaacaggcggtcttgctactcaacgtcgaaccggaaatcgatacggcggacggtgcgaaagccgtggccgcgttgaaacaggcgaaaagcgtgatggcgtttacaccgtttgtcagcgaaacgctgctggatgtgtgcgacgtgttgttgccgattgcgccgtttaccgaaacctcgggcagcttcatcaatatggaaggccgtctgcaatccttccacggcgtggtacaaggcttcggcgattcgcgtccgatgtggaaagtattgcgcgtattgggcaacctgtttgacctgcaaggttttgaataccacgataccgctgcgattctgaaagatgcgctggatgtagaaagcctgccgtccaaactggacaaccgcaacacatggacaggggagggcgttcagacgacctcagaccgcctcgtccgtgtcggcggcgtcggtatttatcacactgattctatcgtgcgccgttccgcaccgttgcaagaaaccggccatgccgccgtgcccgccgcgcgtgtcaatccgaacactttggcacgcttgggcctgcaaaacggacaaactgctgtcgccaaacaaaacggcgcaagcgtatcggttgccgtcaaagccgatgccggtttgcctgaaaacgtggtgcatctgccgctgcataccgaaaatgccgcgctgggtgcgttgatggacactattgaactggcgggagcttga

SEQ ID NO: 54890 - DNA, 693 bp, Neisseria meningitidis
atgaaacttatcaaatacctgcaatatcaaggcataggaagccgcaagcagtgccaatggctgattgccggcggttatgttttcatcaacggaacctgcatggacgacaccgatgcagacatcgattcctcatccgtcgaaacgttggatattgacggggaagcagtaaccgtcgttcccgaaccctatttctacatcatgctcaacaagcctgaagattacgaaacttcgcacaaacccaagcactaccgcagcgtattcagcctgttccccgacaatatgcggaacatcgatatgcaggcggtcggcaggctggatgcagatacgaccggcgtattgctgattaccaacgacggcaaactgaaccacaacctgacttcgccgagcagaaaaattcccaagctatacgaagttacactcaagcaccctgccggcgaaacgctttgcgaaaccctgaaaaacggtgtcctgctccacgacgaaaacgaaacggtttacgccgccgatgccgtattggaaagcccgtccgcattgctcctgaccattaccgagggaaaataccaccaagtcaaacgtatggtcgccgccgcaggcaaccgcgtgcaacaccttcatcgccggcgattcgcacatttggaaacagaaaacctgaaacccggcgaatggaaatttatcgattgtccgaaattctaa

SEQ ID NO: 54891 - DNA, 180 bp, Neisseria meningitidis; identical to SEQ ID NO: 39090

SEQ ID NO: 54892 - DNA, 2217 bp, Neisseria meningitidis
gtgctagaatacgccgcccgaagccgccgttcagacggcattccgacgcaccgacagaaacatcacgaccgaaaccaagagaaaaatatggcctatcaagttctcgcccgaaaatggcggcccaaaacctttgccgacttagtcggtcaggaacacgtcgtcaaagccctgcaaaatgccttggacgaaggcaggctgcaccacgcctacctgctgaccggtacgcgcggcgtgggcaaaaccaccatcgcccgcatccttgccaaaagcctcaactgcgaaaacgcgcaacacggcgaaccttgcggcgtgtgccaaagctgcacccaaatcgatgccggacgctatgtcgacctgctcgaaatcgacgccgcctccaacacaggcatcgacaacatccgcgaaatcttggaaaacgcccaatacgcgccgactgccggcaaatacaaagtctatatcatcgatgaagtgcatatgctttccaaaagcgcgttcaacgctatgctcaaaacgctggaagagccgcccgaacacgtcaaattcatcctcgcgaccaccgatccgcacaaagtccccgttaccgtattaagccgctgcctgcaattcgtcttacgcaatatgaccgcgcagcaggttgccgaccacctcgcccacgtcctcgacagcgaaaaaatcgcctacgaacccgccgccctgcaacttttgggacgtgccgccgccggatcgatgcgcgatgccttaagcctgctcgaccaagccatcgccctgggttcgggcaaagttgccgaaaacgatgtccgccaaatgatcggcgcggttgacaaacaatacctttacgaactgctgacaggcatcatcaaccaagacggcgcagccctgaccgccaaagcgcaggaaatggcggcgtgtgccgtcggctttgacaacgccttgggcgaactcgccatactgctgcaacacctcgccctgatacaggcagtgccgaatgccttggcgcacgacgaccccgattccgatattttgcaccgcctcgcccaaaccataagcggcgaacaaatccagctttactaccaaatcgccgtccacggcaaacgcgacctgagcctcgcccccgacgaatacgccggctttatgatgaccctgctgcgtatgctggcgtttgcgcccttggcagcagcatcgtgtgatgcaaatgccgtgattgaaaataccgaactaaaatccccatcggcacaaaccgccgaaaaggaaaccgccgcaaaaaagccccaaccgcgccctgaagcggaaaccgcccaaacacccgttcagacggcatccgcagcggcaatgccgtctgaaagcaaaactgccgaacccgtttccaatcaagaaaacaacgatgttccgccttgggaagacgcgccggacgaagcccaaaccgcagccggcacggcgcaaacgtcggcaaaaagcattcagacggcatccgaagccgaaacgccgcccgaaaaccaagtttccaagaacaaggcagccgacaacgaaaccaatgcccccttgtccgaaacgccgtctgaaaaccccattcaggcaacaccgaataatgaagccgttgaaacggaaacatttgcacacgaagcccctgcagaacctttctacggttacggctttccggataatgactgccccgtagaagacggcgcagaaatcccgccgcccgattgggaacacgccgcccctgccgataccgcaggcggaggcgcggacgaagaagcagaagcaggcggcatcggcggaaacaacacgccgtccgccccgccgcccgaattttccaccgaaaactgggcagccatcgtccggcatttcgcccgcaaactcggcgcggcgcaaatgccggcgcaacactccgcgtggacggaataccatcccgacaccggcctgatggttttggcgatgaccgccgaagcccgcgccaccgccgacaaaaaacgtctcgacaaaatccgcgacacccttgcccaagcctacggactgcaactcaccctgcaaacccaagactggcgcgacgaagccggcagggaaacccccgcgatgcaggacaagcgcgtccaagccgaagacaggcaaaaagcacaagcattgctcgaagccgaccccgccgcacaaaaaatcctccaagcattcggcgcgcaatggcagcccgaatcagtggaattggcagcaaaccggccataa

SEQ ID NO: 54893 - DNA, 747 bp, Neisseria meningitidis
atggaaaccccgaccaacaccccgcaacgctccctgcgtcaaaacagtatctacctgctgcccaactcctttaccatcgccgcgctgttttccgcattttacgcaatcacccaatccatgcacggacgttatgaaaccgccgccatcgcggtattcatctctatgttgctggacggtatggacgggcgcgtggcgcggctgaccaacagccaaagcgcgttcggggagcagctcgacagccttgccgatatggtcagcttcggcgttgctcccgctctgattgcctacaaatggcagctttggcagttcggcaaaatcggttattccgtcgccttcatctactgcgcctgcgccgccctgcgccttgcgctgttcaacacgctcatcggcaaggtggacaaacgctggtttatcggcgtgcccagtccgactgccgccgcgctgattgtcgggctgatttgggtcaaccacagcgtcgaaaaattccccgccgtccactggtgggcattgggcatcacactgtttgccggcctgtcgatgattgtccaaatccctttttggagttttaaagaaatcaacatccgcagacaagtcccctttgtcggaatgctgcttgccgtcttactgctgcttctggtcacttgggaaccgtcgctcgtcctcttcctgttctttctcggatacagcctgtccggctacattatggcggcacgccgattctggaaaaaatacagaaaggcggattaa

SEQ ID NO: 54894 - DNA, 1311 bp, Neisseria meningitidis
atgtacgctaaaaaaggcggtttgggactggttaaaagccgccgtttcgcacctcttttcgctacgcagtttctcggcgcgttcaacgacaatgtgttcaaaaccgcgctgtttgtgatgattgggttttacggtttggggcaaaacggcttcctgcctgccggacagatgttgaacttgggcgcgttgctgtttattttgccgtatttcctgttttcctcgctgtcggggcagttgggtaacaaattcgacaaggccgttttggcgcgttgggtcaaggtgctggaaatgatcattatggcggtggcggcatacgggttttatatccggtctgccccgctgcttttggcgtgtctgttttgcatgggcgcgcaatcgacgctgttcgggccgctgaaatacgccatcctgcccgattatctcgacgacaaagagttgatgatgggcaacagcctgattgaatcgggtacgtttgtcgccatcctgttcggtcagattttgggaacggcggtggcaggtgtaccgccttatattgtcgggatactggttttgctggtcgccgtcggaggcacggtcggcagcctgtttatgccgtccgtacccgccaaggctgccgatacacaaattgagtggaatattgtccgtggcacaaaatccctgctgcgtgaaacggtgcggcacaagcccgtttttaccgccattatcggtatttcgtggttttggtttgtcggcgcggtttataccacgcaactgccgacctttacccaaatccatctgggcggcaacgacaatgttttcaacctgatgcttgctctgttttccatcggtattgccgccggttcggtactgtgtgccaagttcagcagggaacgcctgatgttggcttgggtaacggttggtgcgttgggtttgacggtttgcggcctggttttggtgtggctgacgcacggacaccgttttgaagggctgaacggcattttttggtttttatcgcaaggatgggcatatcccgtgatggcggtgatgacgctgatcggctttttcggcggatttttctccgttccgctctatacctggctgcaaaccgccagtagcgagactttccgcgcccgcgccgttgccgccaacaatatcgttaacggtatttttatggtttccgctgccgttttgagcgcggtgttgctgtttttgtttgacagcatttccttgttgtatctgattgtcgctttgggcaatattccgttgtcggtatttttgattaagcgcgaaaggcggtttttaggcgcggcggcaatcaggaaaaaaccttga

SEQ ID NO: 54895 - DNA, 1101 bp, Neisseria meningitidis
atggcaggcaacactttcggacaactcttcaccgttaccaccttcggcgaaagccacggcgcgggtttgggctgtatcatcgacggctgcccgcccggcttggaattaagcgaagcggatatccaatttgacctcgaccggcgcaaacccggcaccagccgccacgttacccaacgccgcgaagccgaccaagtcgaaatcctctccggcgtattcgaaggcaaaaccaccggcacacccatcgccctcttaatccgcaataccgaccagcgcagcaaagactacggcaacatcgccaccagcttccgccccggccacgccgactatacctattggcacaaatacggcacgcgcgactaccgcggcggcggcaggagctccgcccgtgaaaccgccgcccgcgttgccgccggagctatcgccaaaaagtggctgaaagaaaaattcggcacggaaatcaccgcctacgttacccaagtcggtgaaaaagaaattcagtttgaaggctacgaacacatttcccaaaatccttttttcgccgccaaccaaagccaaatcgccgagctggaaaactatatggacagcgtgcgcaaatcgttggattccgtcggcgcgaaactgcatattgaagccgccaacgtccccgtcggcttgggcgaacccgttttcgaccgcctcgatgccgaaatcgcctacgcgatgatgggcatcaacgccgtaaaaggcgtggaaatcggcgcaggttttgacagcgtaacgcaacgcggcagcgaacacggcgacgaactcaccccgcaaggcttcctgtccaaccactcaggcggcatcctcggcggcatcagcaccggacaagacatccacgtcaatatcgccatcaaacccaccagctccatcgccaccccgcgccgcagtatcgacatcaacggcaaccccatcgaactcgccacgcacggcaggcacgacccctgcgtcggcttgcgcgccgcgccgattgcagaagctatgctggcattggttttaatcgaccacgccctgcgccatcgcgcgcaaaatgcggatgttcaggttaatacgcccgacattaccctttcaaacaaataa

SEQ ID NO: 54896 - DNA, 2712 bp, Neisseria meningitidis
atgctatatcatcatagttatgccgaagatgcagggcgcgcgggcagcgaggcgcagatacaggttttggaagatgtgcacgtcaaggcgaagcgcgtaccgaaagacaaaaaagtgtttaccgatgcgcgtgccgtatcgacccgtcaggatatattcaaatccagcgaaaacctcgacaacatcgtacgcagcatacccggtgcgtttacacagcaagataaaagctcgggcattgtgtctttgaatattcgcggcgacagcgggttcgggcgggtcaatacgatggtggacggcatcacgcagaccttttattcaacttctaccgatgcgggcagggcaggcggttcatctcaattcggtgcatctgtcgacagcaattttattgccggactggatgtcgtcaaaggcagcttcagcggctcggcaggcatcaacagccttgccggttcggcgaatctgcggactttaggcgtggatgacgtcgttcagggcaataatacctacggcctgctgctaaaaggtctgaccggcaccaattcaaccaaaggtaatgcgatggcggcgataggtgcgcgcaaatggctggaaagcggagcatctgtcggtgtgctttacgggcacagcaggcgcagcgtggcgcaaaattaccgcgtgggcggcggcgggcagcacatcggaaattttggcgcggaatatttggaacggcgcaagcagcgatattttgtacaagagggtgctttgaaattcaattccgacagcggaaaatgggagcgggatttacaaaggcaacagtggaaatacaagccgtataaaaattacaacaaccaagaactacaaaaatacatcgaagagtatgacaaaagctggcgggaaaacctggcaccgcaatacgacattacccccatcgatccgtccagcctgaagcagcagtcggcaggcaatctgtttaaattggaatacgacggcgtattcaataaatacacggcgcaatttcgcgatttaaacaccaaaatcggcagccgcaaaatcatcaaccgcaattatcagttcaattacggtttgtctttgaacccgtataccaacctcaatctgaccgcagcctacaattcgggcaggcagaaatatccgaaagggtcgaagtttacaggctgggggcttttaaaggattttgaaacctacaacaacgcgaaaatcctcgacctcaacaacaccgccaccttccggctgccccgcgaaaccgagttgcaaaccactttgggcttcaattatttccacaacgaatacggcaaaaaccgctttcctgaagaattggggctgtttttcgacggtccggatcaggacaacgggctttattcctatttggggcggtttaagggcgataaagggctgctgccccaaaaatcaaccatcgtccaaccggccggcagccaatatttcaacacgttctacttcgatgccgcgctcaaaaaagacatttaccgcttaaactacagcaccaataccgtcggctaccgtttcggcggcgaatatacgggctattacggctcggatgacgaatttaagcgggcattcggagaaaactcgccgacatacagggaacattgcaaccagagctgcggaatttatgaacccgtattgaaaaaatacggcaaaaagcgcgccaacaaccattcggtcagcattagtgcggacttcggcgattatttcatgccgttcgccagctattcgcgcacacaccgtatgcccaacatccaagaaatgtatttttcccaaatcggcgactccggcgttcacaccgccttaaaaccagagcgcgcaaacacttggcaatttggcttcaatacctataaaaaaggattgttaaaacaagatgatacattaggattaaaactggtcggctaccgcagccgcatcgacaactacatccacaacgtttacgggaaatggtgggatttgaacgggaatattccgagctgggtcagcagcaccgggcttgcctacaccatccaacaccgcaatttcaaagacaaagtacacaaacacggttttgagttggagctgaattacgattatgggcgttttttcaccaacctttcttacgcctatcaaaaaagcacgcaaccgaccaacttcagcgatgcgagcgaatcgcccaacaatgcgtccaaagaagaccaactcaaacaaggttatgggttgagcagggtttccgccctgccgcgagattacggacgtttggaagtcggtacgcgctggttgggcaacaaactgactttgggcggcgcgatgcgctatttcggcaagagcatccgcgcgacggctgaagaacgctatatcgacggcaccaacgggggaaataccagcaatgtccggcaactgggcaagcgttccatcaaacaaaccgaaacccttgcccgccagcctttgatttttgatttttacgccgcttacgagccgaagaaaaaccttattttccgcgccgaagtcaaaaatctgttcgacaggcgttatatcgatccgctcgatgcgggcaatgatgcggcaacgcagcgttattacagctcgttcgacccgaaagacaaggacgaagacgtaacgtgtaatgctgatggcttgtgcaacggcaaatacggcggcacaagcaaaagcgtattgaccaattttgcacgcggacgcacctttttgataacgatgagctacaagttttaa

SEQ ID NO: 54897 - DNA, 357 bp, Neisseria meningitidis; identical to SEQ ID NO: 36545

SEQ ID NO: 54898 - DNA, 2019 bp, Neisseria meningitidis
atgatgggcgagaaagacggattttatcggcatttggcggtagagggcaatttcggcggcacggcccaatccttagcggtttgctcaactatcggcgcaaattctgttaaaatgccgacttccttcctttacacaccgcaccgacaggcagaatttatggctcttttgcagatttcagaaccgggtatgtccgccgccccgcaccgacaccgtttggcggcaggcatcgatttgggtacgaccaacagcttggttgccaccgtccgcagcggcagtgccgcctgcctgcccgatgccgaagggcgcgttaccctgccttccgtcgtccgctatctggaaaacggcggcattgaagtcggcaaaaccgccctgtccgcccaaaaaaccgacccgctgaacaccgttagctccgccaaacgccttatcgggcggacgcttgccgatctgcatcaaaatacgcattacctgccttaccgtttcggcgacaatcaacgcgttatcgaactgcatacgcggcagggggtgaaaacgcctgtcgaagtgtcggcggaaatcctcaaaacccttaaatcgcgcgccgaagaaaccttgggcggcgatttggtcggcgtggtgattaccgtccctgcctatttcgatgatgcccaacgccaagccaccaaagatgccgcgcgtctggcgggtttgaacgtattgcgcctgctcaacgaacccaccgctgccgcaatcgcctacgggctggacaacgcctcggaaggcacgtttgtcgtgtacgacttagggggcggcacattcgacgtatccgtattgcaactgaccaaaggactgtttgaagtcaaagccaccggcggcaacagcgcgttgggcggcgacgatttcgaccaccgcctgttctgccgcctgctcgaacaaaacggactctcccaactcaacgaacaagacagccaactcctgctctcgctcgtccgcgccgccaaagaacaattaaccacgcaaaccgaagcgcgcattcaggcgacgctttcagacggcatggcaatcgacacaagcatcagtcgcgccgagttccacaacctgacgcagcatttggtgatgaaaacgctcgaaccggtcacacaggcgttgaaagatgccggtgtcggtaaaaacgaagtcaaaggcgtgattatggtcggcggttcgacccgtatgctgcacgtccaacaggcagtcgccaccttcttcggacaaaccccgctgaacaacctcaatcccgacgaagtcgtcgcgctcggcgccgccatacaggcaaacgtcctcgcaggcaacaaaaccgacggcgaatggctgctgctggacgttacacctttgtcgctcggtttggaaacctacggcggcttggcggaaaaaatcatcccgcgcaattccaccatccccaccgcgcgcgcgcaggactttaccaccttcaaagacggtcaaaccgcgatgacgatacacgtcgtgcaaggcgagcgcgagctcgtttctgactgccgcagccttgccaaattcaccctgcgcggcattccaccgatggcggcgggtgcggcgcgtatccgcgtaaccttccaaatcgatgcggacgggctgctgtccgtttccgcccaagaacaaagcaccggcgtacaggcgcaaatcgaagtcaaaccttcctacggcttggacgacggcgcgattacccgaatgcttaaagacagtatggacaacgccgccgaagatatggcggcacgcgcccgcgccgaagccgtagtcgaagccgaaagcctgaccgatgccgtcaacgccgccctcgagttggacagcgatttactggatgccaaagaattgcaacagatccggcaaggcatcgccgatttgcaaggccgtctgaaagacggaaaagccgaagacatccgctccgccgtcgccaaactcagccgcagcaccgacaacttcgccgccaaacgcatgaaccgcaatatccaacgcgcgttgactggtcaaagcgttgataatatttga

SEQ ID NO: 54899 - DNA, 183 bp, Neisseria meningitidis; identical to SEQ ID NO: 51542

SEQ ID NO: 54900 - DNA, 657 bp, Neisseria meningitidis
atggaacaaaaaaggcggtttgccgcttccctgctcctcgccgccgtcctgccgctttgtgcgcattcttttccctttgcggaagaaaaccccatagcctacggcaaagtcaaaatacagagttggaaagagaggcgcgatttcaatattgtaaagcaggatttggatttttcctgcggggcggcttcggtggcgacgcttttgaacaatttttacgggcaaacgctgacggaagaagaagtgttgaaaaagctggataaggagcagatgcgtgcgtcgtttgaggatatgcagcgcattatgcctgatttgggttttgaagcgaaaggctatgccctgtctttcgagcagcttgcacagttgaaaatccccatcatcgtgtatctgaaataccgcaaagatgatcatttctcggtgttgcgcggcatagacggcaatacggttttgcttgccgatccgtcgctgggtcatgtttcgatgagcagggcgcagtttttggatgcttggcaaacccgtgagggaaatttggcaggtaagattttggcggtcgtgccgaaaaaagccgagacaatttcaaataaattgtttttcacacatcatcccaagcggcagacagagtttgcagtccgacaaatcaggcaagcacgtgcagagtaa

SEQ ID NO: 54901 - DNA, 1215 bp, Neisseria meningitidis; identical to SEQ ID NO: 36211

SEQ ID NO: 54902 - DNA, 558 bp, Neisseria meningitidis
atggatgctttaaaattattgacgaaccgccgatcttccaaaaagctgaagcaccccgcccccgatgcggcggagttggaacaaatatttcaggcggcaacccaagttcccgatcacggcaatatgcgccccttccgttttaccgtgattcaaggcgaggtaggattgcaacgttttcgcgatgtgttaaagcaaacggttgccgaattgaatttcggcgacgatgcgatgaaaaaggcggaaaaagtgggcaatatgtcgccgatggttatcggggtaacgtttgcgccgaaccgcgatgtgcctaagccgaaaccggaatgggagcagatgctgacggcgggttgtgcggcgtatgcgctgcaactggcggcaacggcgcaaggtttcgacaatgtctggattacggggatgtgggtcaacagccccctgttgcgtgaggctttcggatgtgcggataaggataaaatcatcgggctgatgatggtcggcacgccgacagaggaagtgcataagcccaagaataccgatttggaagcgtttgtcagccattggtaa

SEQ ID NO: 54903 - DNA, 1257 bp, Neisseria meningitidis
gtggccaataaattaagaaactacaccatcaacttcggcccgcaacaccctgcggcgcacggcgtattgcgtatgattttggagctggacggcgaacaaatcgtccgtgccgacccgcatatcggcctcctgcaccgaggtactgaaaaactggctgaaaccaaaacctatctgcaagccctgccctatatggatcgcttggactatgtttccatgatggtcaacgagcaggcgtattgcttggcagtagaaaaacttgccggtatcgatgtacctatccgcgcccaatatatccgcgtgatgttcgccgaagtaacgcgcatcctcaatcatttgatgggcatcggttcgcacgcattcgacattggtgcgatgaccgccatcctttatgccttccgcgaccgcgaagagttgatggacttgtacgaagccgtgtccggcgcacgtatgcacgcagcctacttccgtcccggcggcgtttaccgcgacctgcccgacttcatgcccaaatacgagggcagcaaattccgcaatgccaaagtattgaagcagctcaacgaatcccgcgaaggcacgatgctcgactttatcgatgccttctgcgaacgtttcccgaaaaacatcgacacactcgaaaccctcctgaccgacaaccgtatttggaaacagcgtaccgtcggcatcggcgtcgtctcccccgaacgtgccatgcaaaaaggctttaccggcgtgatgttgcgcggttcgggcgtggaatgggacgtgcgtaagacacagccttacgaagtgtacgacaaaatggatttcgacatccctgtcggcgtgaacggcgactgctacgaccgctacctctgccgtatggaagaaatgcgtcaatccgtacgcatcatcaaacaatgttccgagtggttgcgtgtcaatccgggtccggtcattaccacaaaccacaaatttgctccgcccaaacgtaccgaaatgaaaacaggtatggaagacctgattcaccatttcaaactctttaccgagggtatgcacgttcccgagggcgagacctacaccgctgtcgaacatccgaaaggcgagttcggcgtttacatcatttcagacggcgcaaacaaaccctaccgcctgaaaatccgcgcacccggcttcgcccatctgcaaggcatggacgaaatggcaaaaggccacatgctcgccgacgtcgttgccatcatcggtacgcaggacatcgtattcggggaggttgaccgataa

SEQ ID NO: 54904 - DNA, 1428 bp, Neisseria meningitidis
atgaacgagaactttaccgaatggctgcacggctgggtcggcgccatcaacgatccgatgtggtcatacttggtttatatgcttttgggtacggggcttttcttcaccgtaaccacgggctttgtccaattccgcctgttcgggcgcagcatcaaagaaatgctcggcggccgcaaacagggggacgaccctcacggcatcacgccgtttcaggcatttgtaaccggccttgccagccgcgtgggcgtgggcaatatcgcgggcgtggccatcgccatcaaagtcggcggaccgggcgcggtgttttggatgtgggtaaccgccttaatcggtatgagttcggcgtttgtcgaatcttcgctggcgcagctctttaaagtccgcgactacgacaaccaccatttccggggcggccctgcctactacatcactcaagggctggggcagaaatggctgggcgtgttgttcgccctgagcctgattttctgtttcggctttgtgtttgaagcggttcagaccaataccattgccgataccgtcaaagcggcgtggggttgggagcctcattatgtcggcgtcgccctggtgattttaaccgcgccgattatcttcggcggcatcaggcgcatatctaaagcggcggaaatcgtcgtccccctgatggcggttttgtacctctttatcgcgcttttcatcattttgaccaatattccgatgattccggacgtgttcggtcagattttttcgggcgcgttcaaattcgacgcggcagcaggcggcttactcggcggtctgatttcgcaaacgatgatgatgggcatcaaacgcggcctgtattccaacgaggcgggtatgggttccgcgccgaacgccgccgccgccgccgaagtgaaacaccctgtttcgcaaggtatgattcaaatgctgggcgtgtttgtcgataccatcatcgtttgttcttgcaccgccttcatcatcttgatttaccaacagccttacggcgatttgagcggtgcggcgctgacgcaggcggcgattgtcagccaagtggggcaatggggcgcgggcttcctcgccgtcatcctgtttatgtttgccttttccaccgttatcggcaactatgcctatgccgagtccaacgtccaattcatcaaaagccattggctgattaccgccgttttccgtatgctggttttggcgtgggtctatttcggcgcggttgccaatgtgcctttggtctgggatatggcggatatggcgatgggcattatggcgtggatcaaccttgtcgccatcctgctgctctcgccactggcgtttatgctgctgcgcgattacaccgccaagctgaaaatgggcaaagaccccgagttcaaactttccgaacatccgggcctgaaacgccgtatcaaatccgacgtttggtaa

SEQ ID NO: 54905 - DNA, 1341 bp, Neisseria meningitidis
ttgcacacccttctagcttttatcttcgccatcctgattttggtcagcctgcacgagttcggacactacatcgttgccagattgtgcggcgtcaaagtcgtacgcttttccgtcggcttcggcaaaccgtttttcacccgaaagcgcggcgacaccgaatggtgcctcgccccgattccgttgggcggttacgtcaaaatggtcgatacgcgcgaaggcgaagtatcagaagccgatttaccctacgcttttgacaaacaacaccccgccaaacgcatcgccatcgtcgccgccggcccgctgaccaatctcgcactggcggttttgctgtacggactgagcttttccttcggcgtaaccgaactgcgcccctatgtcggcacagtcgaacccgacaccattgccgcccgcgccggcttccaaagcggcgacaaaatacaatccgtcaacggcacacccgttgcagattggggcagcgcgcaaaccgaaatcgtcctcaacctcgaagccggcaaagtcgccgtcggcgttcagacggcatcaggcgcgcaaaccgtccgcaccatcgatgccgcaggcacgccggaagccggtaaaatcgcaaaaaaccaaggctacatcggactgatgccctttaaaatcacaaccgttgccggtggcgtggaaaaaggcagccccgccgaaaaagcaggcctgaaaccgggcgacaggctgactgccgccgacggcaaacccattacctcatggcaagaatgggcaaacctgacccgccaaagccccggcaaaaaaatcaccctgaactacgaacgcgccggacaaacccataccgccgacatccgccccgatactgtcgaacagcccgaccacaccctgatcgggcgcgtcggcctccgtccgcagccggacagggcgtgggacgcgcaaatccgccgcagctaccgtccgtctgttgtccgcgcattcggcatgggctgggaaaaaaccgtttcccactcgtggacaaccctcaaatttttcggcaaactaatcagcggcaacgcctccgtcagccatatttccgggccgctgaccattgccgacattgccggacagtccgccgaactcggcttgcaaagttatttggaatttttggcactggtcagcatcagcctcggcgtgctgaacctactgcccgtccccgttttggacggcggccacctcgtgttttatactgccgaatggatacgcggcaaacctttgggcgaacgcgtccaaaacatcggtttgcgcttcgggcttgccctcatgatgctgatgatggcggtcgccttcttcaacgacgttacccggctgctcggttag

SEQ ID NO: 54906 - DNA, 450 bp, Neisseria meningitidis
atgagtatttatgccgtcgcgcacatcgtccacctgtattgcgccattgcctttgtcggcggcgtgttttttgaagtgctggttttgtccgtcctgcatacgggacgggtgtcgtgcgaggcgcggcgcgaagtggaaaaggcaatgtcttaccgcgccgtcagggtgatgccgtttgtggtcggactgctgttcgccagcggcgtcgtgatggcggcaaaccgctatctttctatattgggcgaaccgtttgccacttccttcggtacgatgctgacgctgaaaatcctgttggcgttcagcgtgttggcgcacttcgccatcgccgtcgtcaaaatggcgcgttccacactgaccgtcggctggtcgaaatacatacacgccgtcgtctttgcccatatgctgctgattgtctttttggcaaaagcgatgttttatatcagctggtaa

SEQ ID NO: 54907 - DNA, 1809 bp, Neisseria meningitidis; identical to SEQ ID NO: 39112

SEQ ID NO: 54908 - DNA, 630 bp, Neisseria meningitidis
atggcagcccatttggaagaacaacaagagttggacaactttaaatatttttggaaaaccacgggcaaatggctgtttgccctgctgattttggcggcgctcggctacttgggatacacggtttaccaaaaccgtgcgacttcccaaaatcaggaagcggcggcggtgctggcaaacatcgtggaaaaggcgcaaaacaaagccccgcaaagcgaaatcaatgccgaattgaccaaactccagcaaagctacccgcattccatttccaccgcccaagccacgctgatggcggcggcaaccgaatttgacgcacagcgttacgatgttgccgaaggccatttgaaatgggtgttgtccaaccaaaaagacagcctgattcaagcgttggcggcgcagcgtctgggcgttgtgttgttgcaacaaaaaaaatacgatgccgcgcttgccgcgctcgatacgccggttgaagcggacttcgcccccctgctgatggaaaccaaaggcgatgtctatgccgcacagggaaaaagccaggaagccttaaaaaactacggacaggctttagaaaaaatgcctcaagattctgtcggtcgcgaattggttcaaatgaaacttgattcgctgaaataa

SEQ ID NO: 54909 - DNA, 1089 bp, Neisseria meningitidis
atgaatgactacacgcagcagcttcaaggtaaaaaagactaccttaaaaccctttttgcaggtttggatgttcctgagtgggaagtgtacgaatctccggacaaacattaccgtatgcgtgccgagttccgtatttggcacgaaggcggggaaatgttttatgccatgtttgaaaaagggcagaaagccagcggcgcaagcatgatacgctgcgaccgttttgaagcagcttccgaggctgtcaaccgcctcatgcccgagctgatcgccgccgccgcgcaatcccccgaactcaaaaaacgctggtatgccgtcgaatttctgtccacgctcagcggggaaatgctggttaccatgatttaccacaaaaggcttgatgctgagtggatgcaggcggcgcaagcgttacagcaacagttggatatttccgttattgggcggagcaggggacagaaaatagtcttaaaacaggactatgtaacggaaactttgaaggtcggcaaccgggatttccgttatcggcaaattgaaggcagttttacccaaccgaatgccgccgtgtgtcagaaaatgcttgaatgggcctgcggtgcagcagaaggattggatggggatttgctcgaactgtattgcggaaacggcaactttacgcttcctttatctgaaaagtttgaacgtgttttggcaaccgaaatctccaaaacctccatcagcgcggcgcaatggaatatcgaagccaaccgcatcggcaacatcaaaatcgcccgtctgtctgctgaagaatttaccgaagcctataccagaaaacgtgagtttaaacgccttaaggatggcggtattgctttgacggattacgcattttccactattttcgtcgatccgccgcgtgccggtatcgatgaggaaactttgaagctggtgtcgcagtttgacaacatcatctacatttcctgcaatcccgaaacgctgcgtgccaatttggacaccttggtggaaacccatgcggtcgaacgcgccgccctgttcgaccaattcccgtttacgcaccatatcgaaagtggtgtattgttgaaaaagaaaatcctttga

SEQ ID NO: 54910 - DNA, 279 bp, Neisseria meningitidis; identical to SEQ ID NO: 37465

SEQ ID NO: 54911 - DNA, 855 bp, Neisseria meningitidis
ttgttttccgaacacggcggacttgagatgaaactcgatatttatgctttgctggaacgcgccctgctttcgggcgacccagatgaaaaaggacggctgacggatgaggcgtttgccgccgttcaaaatgcggacggggcggaagcaaacgcgccgccggcggacttcccccgagcgggacggccggacaagcctgttttggtcgcgccgtcgcaactgaccccgcgcaaaatgaacacaaccgaaggttatgcggcgatgctgcacgcgattgcgcatatcgaattcaacgccgtcaatctagctttggacgcggcataccgtttccgcacgctgccgtttcagtttgtccgcgactgggtgaaagtggcgaaggaagaggtgtaccatttccgcctgatgcgcgacagattgcgcgctttcggcttcgattacggcagtttcgaggcgcacaaccatttgtgggatatggcgtacaaaaccgcctacgacccgctgttgcgtatggcgttggtaccgcgcgtgttggaagcgcgcgggctggacgttacgccggggatacgcgcgaaggtggcgcagcgcggcgattcggaaacctgcggcgtattggacatcatttaccgcgacgaagtgggtcatgtcgccatcggcaaccattggtatcaacacctctgccgcgaacgcggtttggaaccgattaccctgttccgcagtctgattgcccgttacgatatgtttatcttccggggctatgtgaacatcgaagcgcgcgaaaaagcaggcttcagccgctttgaattggatatgttggaagatttcgagcagggtttgaaacaaaataaacatgccgtctga

SEQ ID NO: 54912 - DNA, 1443 bp, Neisseria meningitidis
atgaaacaattggccatgtacatcaacggacgctttgaaaacgatttcaacggcgaatggcgcgacgtattgaacccgtccaccgaagaggccatcgcccgcgaacccaaaggcggcagggcggacgttgaccgcgccgtagcggcggcgcgtgcggcgcaaccggcttgggagcgtctgcctgcggtcgaacgcggcgcgtatttgcgcaaaatcgcccaaggcatactcgaacgcgccgacgagctgaccgacaccatcgttgccgaaggcggcaaaaccaaagacttggcgcgcgtggaagtgatgttcaccgccgactatctcgattaccaagccgaatgggcgcgccgttacgaaggcgaaatcatccaaagcgaccgcccgcgcgaaaacattttattgttcaaacgtccgctgggcgtaattgccggcattttgccgtggaacttccctttcttcctgattgcccgcaaaatgggtcccgccttagtaacgggcaacaccatcgttgtcaaacccagcagcgtaaccccgatcaactgccacatcttcgccgaaatcgtcgatgcggtcggattgcccgcaggcgtgttcaacgtggtgaacggtccgggtgcggaaatcggcaatgccttgtccgcccatccgcaagtcgatatggtcagcctgaccggctccgtcgaagcgggccgccaagtgatggaagccgcttccgccaacatcaccaaagtttcgttggaactcggcggcaaagcccccgccatcgttttgaaagacgcggatttggatttggcggtgaaatccatcttggcttcgcgtgtcggcaacaccggtcaaatctgcaactgcgccgagcgcgtttatgtccacagcagtctgaaagacgcattcattgaaaaaatgactgccgccatgaaaggcgtgcgctacggcaaccctgccgaagccgaagcaggcgcgctggaaatgggtccgctgattgaagagcgcgccgtcaaagccgttgccgaaaaagtggaacgggcagtcaaacaaggtgcgaaactggtctgcggcggcaaacgcgccgaaggacgcggttatttcttcgagccgaccctgctgaccgacaccgacaacagtatggacattatgaaagaagaaaccttcggccccgtgctgcccgtttccgctttcgacacgcttgaccaagtcatcgcactggctaacgattgcgagtttggtctgaccagttctgtttatacgactaatttaaacgaagccttctacgttacccgccgcctgcaattcggcgaaacctacatcaaccgcgaaaactttgaagccatgcaaggcttccacgcgggctggaaaaaatccggcatcggcggcgcggacggcaaacacggtttggaagaatatctgcaaacccaagtcgtttatctggaaaccgacatttaa

SEQ ID NO: 54913 - DNA, 378 bp, Neisseria meningitidis; identical to SEQ ID NO: 38701

SEQ ID NO: 54914 - DNA, 348 bp, Neisseria meningitidis; identical to SEQ ID NO: 38212

SEQ ID NO: 54915 - DNA, 1143 bp, Neisseria meningitidis
atgaaggtttttaaacaacagcttgaacaactcggcgcgcaaaaccaatatcgttcgattccggatttgattcatcaagggcggtatattacgcgggaaaactgcaaaatgctgaatatgtcgtctaatgattatttgggtttggcatcagatgaaaacttgcgccggtcttttttgcagcaatacggcggtaattttccctcttttaccagttcttcatcgcgtttattaacgggcaactttcctatttataccgatttggaagagcttgtcgcacaacgtttccaacgggaaagcgcgttattgttcaacagcggctatcacgccaatctcggtattttgcctgctttgacgacgacgaaaagtttgattttggcagataaatttgttcacgccagtatgattgacggcatccgtttgagccggtgtgcgttttcccgttatcgtcataatgattatgaacatttgaaaaatctgcttgaaaaaaacgtcggaaaatttgaccgcacttttatcgttaccgaatctgttttcagtatggacggcgatgtggcggatttgaaacagcttgtccaattaaaaaaacagtttcccaatacttatctttatgtggatgaagcccacgcaatcggtgtttatgggcaaaacggattggggattgccgaacgggataatttgattgccgagattgatttactggtcggcactttcggtaaagccttagcctcggtgggggcgtatgccgtctgcaaccaagtattgaaagaatgtttgattaatcaaatgcgcccattgattttttcaaccgcattgccgccgtttaatgtggcttggacttattttatttttgaacgattgccgcaattctcaaaagaaagaagccatcttgagcagttaagtgcatttttacggcgggaagtggcgcatcggacgcaaataatgccgagccaaacctgtatcgtcccctatattttaggcgggaatgaagccacccttgccaaagcggaatacctgcaaaggcagggttattattgcctgcccatcagaccaccgacagtaccaaaaggtacatccagaatacgattgtctttgacggcagatatgacaatggatgaagtgcggcagtttgcggcgtgcctgtaa

SEQ ID NO: 54916 - DNA, 504 bp, Neisseria meningitidis; identical to SEQ ID NO: 44607

SEQ ID NO: 54917 - DNA, 456 bp, Neisseria meningitidis
atggatttgcgcaaattaaaaaaactgattgatttggttgaagaatcgggtatcgccgaaatcgaagtaaccgaaggcgaggaaaaagtccgcatcacccgaaccatcgccgccgcacccgtttacgccgcgcccgtacctgccgccgcgccggccgtaacgcctgccgccgcacccgttgcggcatccgcgcctgccgccgcacctgccgcccgcgatttgtccgacgcgcaaaaatcacctatggtcggcacgttctaccgcgcacccggcccgaatgccgcgccttttgtcgaagtcggccaacaggttaaagccggcgacacgctgtgcatcatcgaagcgatgaagctgatgaacgaaatcgaagccgaaaaatccggcacggtcaaagaaattttggtcgaaaacggtacgcccgtcgaattcggcgaaccgctcttcatcatcggataa

SEQ ID NO: 54918 - DNA, 738 bp, Neisseria meningitidis
atgattattttggacaaggtttccaagcattaccaaacgcgcgacaagacccgttttgccgccgtcgagccgaccagcctcgaaatccgcgacggcgaaatcttcgggctgatgggctattccggcgcgggcaaatccaccctgttgcggctgattaacctgttggaacgccccgacacgggcaaggtcaacgtctgcggacaagagctgaccgcgctcgatgccgccgcattgcgtcaggctcggcagaatatcggcatggtgtttcagcagttcaacctgttgaacaaccgcaccgtcgccggcaacgtcgccttcccattggaaatcgccggatggccgtctgaaaaaatcaaagcgcgcgttgccgaatgtctcgaaatcgtcggactgaccgaacgcgccggccactatcccgcccagctttcaggcgggcagaaacagcgtgtcggcatcgcccgcgcactcgcgcccaaaccccaagtcatcctcgccgacgaacccacttccgccctcgaccccgccaccacgcgcagcgtcttggaatgtttggaagacatcaacaaacgattcaacgtaaccatcgtcatcgtaacccacgaaatgagcgttatcagacgactgtgcgaccgcgccgccctgttggataaaggcaaagtcgtcgaaatcgtcgaagtacgcggcaaccaaatccacgcccgatccgacatcgggtgcgaactgattcgggaggactga

SEQ ID NO: 54919 - DNA, 789 bp, Neisseria meningitidis
atgctcaccctatacggagaaactttcccttcgcggctgctgctcggcacagccgcctacccgacccctgaaatcctcaaacaatccgtccgaaccgcccggcccgcgatgattaccgtctcgctgcgccgcgcgggatgcggcggcgaggcgcacggtcaggggttttggtcgctgcttcaagaaaccggcgttcccgtcctgccgaacacggcaggctgccaaagtgtgcaggaagcggtaacgacggcgcaaatggcgcgcgaagtgtttgaaaccgattggattaaactcgaactcatcggcgacgacgacaccttgcagccggatgtgttccaacttgtcgaagcggcggaaatcctgattaaagacggcttcaaagtgctgccttattgcaccgaagacctgattgcctgccgccgcctgctcgacgcgggctgtcaggcgttaatgccgtgggcggccccgatcggcacgggtttgggcgcggttcatgcctacgcgttgaacgtcctgcgcgaacgcctgcccgacacgccgctgattatcgacgcgggcttgggtttgccctcacaggcggcacaagtgatggaatggggctttgacggcgtgcttttgaacaccgccgtttcccgcagcggcgatccggtcaatatggcgcgcgcttttgcactcgccgtcgaatccggacggctggcatttgaagccggaccggtcgaagcacgcgacaaagcgcaagccagcacgccgacagtcggacaaccgttttggcattcggcggaatattga

SEQ ID NO: 54920 - DNA, 288 bp, Neisseria meningitidis; identical to SEQ ID NO: 41116

SEQ ID NO: 54921 - DNA, 999 bp, Neisseria meningitidis
atgagcagacccgtacccgccgtattcggcagcgtttttcacagtcaaatgcccgtcctcgcctaccgcgaaggcaaatggcagccgaccgaatggcaatcttcccaagacctctccctcgcaccgggtgcgcacgccctgcactacagcagcgaatgtttcgagggactgaaagccttccgtcaggcagacggcaaaatcgtactgttccgtccgactgccaacatcgcgcgtatgcggcaaagtgcggacattttgcacctgccgcgccccgaaacccaagcctatctcgacgcgctaatcgaattggtcaaacgcgccgccgatgaaattcccgatgcgcctgccgccctgtacctgcgtccgaccttaatcggtaccgatcccgtcatcggcaaggccggttctccttccgaaaccgccctgctgtatattttggcttcccccgtcggcgactatttcaaagtcggctcgcccgtcaaaattttagtggaaaccgaacacatccgctgcgccccgcatatgggccgcgtcaaatgcggcggcaactacgcttccgccatgcactgggtgctgaaggcgaaagccgaatacggcgcaaaccaagtcctcttctgcccgaacggcgacgtgcaggaaaccggcgcgtccaactttatcctgattaacggcgatgaaatcattaccaaaccgctgaccgacgaatttttgcacggcgtaacccgcgattccgtactgacggttgccaaagatttgggctataccgtcagcgaacgcaatttcacggttgacgaactcaaagctgcggtggaaaacggtgcggaggcgattctgaccggtacggcagccgtcatctcgcccgttacttccttcgtcatcggcggcaaagaaatcgaagtgaaaagccaagaacgcggctatgccatccgtaaggcgattaccgacatccagtatggtttggcggaagacaaatacggctggctggttgaagtgtgctga

SEQ ID NO: 54922 - DNA, 1056 bp, Neisseria meningitidis
atgacacaccattaccccacagacgatattaagattaaagaagttaaagagttgttgccgccgattgcccatctttacgagctgccgatttccaaagaggcttcgggcttggttcaccgcacccgtcaggaaatttccgatttggttcacggcagggacaagcggctgttggttattatcgggccgtgttcgattcacgatccgaaagcggcgttggaatatgcggagcgtttgttgaaactccgcaagcagtatgaaaacgagcttttgattgtgatgcgcgtttatttcgagaagccgaggacgacggtgggttggaaaggtttgattaacgacccgcatttggacggtacgttcgatatcaatttcggtttgcgtcaggcgcgcagcctgttgttgtcgctgaacaatatgggtatgcctgcctctaccgagtttttggatatgattacgccgcaatattatgcggacttgatttcttggggggcaatcggtgcgcggacgaccgaaagccaagttcaccgcgaattggcaagcgggctgtcctgccccgtcggctttaaaaacggtacggatggcaatttgaagattgccatcgacgcaatcggtgcggcgagccattcgcatcatttcttgtctgtaaccaaggccggacattccgccattgtccataccggcggcaatcccgactgtcatgtcattttgcgcggcggaaaagagccgaattatgatgcgggacacgtcagcgaggcggcggaacaactgcgtgcggcaggggtaaccgataagctgatgatagattgcagccacgccaacagccgcaaggattacacccggcagatggaagtggcacaagatattgctgcccaattggaacaggacgggagcaatattatgggcgtgatggtggaaagccatttggtcgaaggcagacaggataagccggaagtgtacggcaaaagcattaccgatgcgtgtatcggttggggcgcgactgaagaactgttggcattgttggcaggtgcaaacaaaaaacgtatggcgcgcgccggttga

SEQ ID NO: 54923 - DNA, 201 bp, Neisseria meningitidis; identical to SEQ ID NO: 41439

SEQ ID NO: 54924 - DNA, 210 bp, Neisseria meningitidis; identical to SEQ ID NO: 39306

SEQ ID NO: 54925 - DNA, 864 bp, Neisseria meningitidis
atgaaaaccttactgccctttttcggcgtggtacgcgtcagcggcgaagaccgccaaaccttcctgcacggacagctttccaacgacatcaataatcttcagaccgggcaggcgtgttatgcgacttacaacacgcccaaaggccgtgtcatcgccaatatgattgtcgtcaaccgaggcggcgatttgctgctgattatggcgcaagacttgcttgaagcaacggtcaaacgtttgcggatgtttgtgttgcgtgccaaagccgtttttgaaatccttgaagattacgccgtcggcgcggaattggaagcatccgccgaaccgcttgccgcgcaagaacccaaccttgcctttgccgcacaacaagattcagacggcatctgctctatcgctctgcctcatggcggcatccttcgcatcgcccccaaaaacaccttgccgccttatgatgccgccgccgaaaacgcgtggcggctgcacgaaatccgtagcggttatccgtggatatgcgcggctaccaaagaaactgccgttgcccaaatgctcaaccagcacatcatcggcggcgtacacttcaaaaaaggctgctatcccggtcaggaaatcattgcccgtgcccagtatcgggggcaggtcaaacgcggcttggcggtattgtcgggaaattcggccgtcgaagcaggaaccctgctgacggcggacggcgaagaggccggcatcgtactcgacagcgttcaagattcggaaaactttaccgcccttgccgtgattaaattctccgccgcacaaaaagaactcgccgccccaaacggcggtatcttcaaagcggttcatctcttctttaaaaccgaaaatgcagaataa

SEQ ID NO: 54926 - DNA, 489 bp, Neisseria meningitidis
atgaccgccttgctcgtcatcctcgccctcgccctgatagccgccggtacggcgggcatcgtttaccccgccctgcccggattggcattgatgtttgccggaacctggctgctcgcctactccggcggctaccaaatctacggcgcgggcgttttgtggacggtcggactcatcagccttgccggcatactggcggactatgtggcaggcatatgggggacaaaatataccggagcgggcaagctcgccgttcgcggcgcattggtcggcagtatcatcggtatgtttttctcccttcccggactaatactcggtccctttatcggcgcggcggcaggcgaactgatcgatcggcgcaatatgcttcaggcaggtaaagcgggcttgggtacgctgttggggcttgtcgtcggcacggcgttcaaaatcggctgcgccgtatccatcttgtttatcctgttggtgaaatacatcgcctacctgttttaa

SEQ ID NO: 54927 - DNA, 942 bp, Neisseria meningitidis
atgccgaccccgaaagcctttgccctgctcgggccgaccgcctgcggcaaaaccgcgctcgccctcaaaattgccgaaaccttgcctgtcgaaatcatcagcctcgattccgcgctggtttaccgcgatatggacatcggcacggcgaaaccgtctcatgccgagcgttcctttgtaccgcaccaccttatcgacatcattacgcctgttcagacatacagtgccgcccgttttgtcgaagactgcacgcgtctgattggcgaaatcacggcgcgtgggaaatatccgctgattgtcggcggcacgatgatgtatttccgcgccctgacccaaggtttgaacgatttgcccgaagccgacgcctgcctgcgtgccgacttggacgaacaaaaacaaatgtacggcttggatttcctctaccgcaccctgcaaaaagtcgaccctgaaacagcatgccgtctgaaaccgaacgacagccagcgtatcggacgcgctttggaagtttattatttaaccggcaaaccgatgagtacgcatctcggcagcccaacctcccatacgctccccttcgatttgcataccgccgccctgattcccgaaaaccgcgcccgcctgcatgaaaacatcgccctgcgtttccacctgatgcttgaacagggctttatcggcgaagtagaaaacctgcgccgcctctatcccagcctgaccgccgactcccctgccatacgctgcgtcggctaccgtcaggcatgggaatatctggacggaaaaaccgatttcccggcatttgtcgagaaaggcattgccgccacgcgccaacttgccaaacgccaactgacttggttgcgcaaaacacctttagactgcgttaccgacccgttttcagacggcaattcatgcacacgcctgattgaggcggcaaaacggtttttcggcgcataa

SEQ ID NO: 54928 - DNA, 663 bp, Neisseria meningitidis; identical to SEQ ID NO: 38761

SEQ ID NO: 54929 - DNA, 966 bp, Neisseria meningitidis; identical to SEQ ID NO: 42827

SEQ ID NO: 54930 - DNA, 429 bp, Neisseria meningitidis
atgatgttttcttggttcaagctgtttcacttgttttttgtcatttcgtggtttgcagggctgttttacctgccgaggattttcgtcaatatggcgatgattgatgtgccgcgcggcaatcccgagtatgtgcgtctgtcgggcatggcggtgcggctgtaccgttttatgtcgccgttgggcttcggcgcggtcgtgttcggcgcggcgataccgtttgccgccggctggtggggcagcggctgggtacacgtcaaactgtgtttgggcttgatgctcttggcttaccagttgtattgcggcgtgctgctgcgccgttttcaggattacagcaatgctttttcacaccgctggtaccgcgtgttcaacgaaatccccgtgctgctgatggttgccgcgctgtatctggtcgtgttcaaaccgttttga

SEQ ID NO: 54931 - DNA, 624 bp, Neisseria meningitidis
atggaacgcaaagaacgcctgcgtgcaggcattgccgcgatggggctggatatttcggaaacggcgcaggacaggcttttggcctatgtggatttgttgaaaaagtggaacaaaacctacaatctgaccgccctgcgcgacgaggaaaaaatgattgtccatcatcttttggacagcctgacgctgctgccccatatcgagggtgtgcaaacgatgctggatgtcggttcgggcggcggtcagcccggcattccggcggcggtgtgccgtccggatgtgcagataacccttttggatgcgaatacgaagaaaacggcttttttacagcaggcggttatcgagttggggttggacaatgtgcgcgtggtatccggacgcgtggaggcggtttcggacgtgcgtgccgatgtggttaccagccgtgcgtttgcagaactggcggattttgtgtcgtggacggtgcatctgttgaaagacggcggctactgggcggcgatgaagggcgtgtatccgcaggaagaaatcggccgcctgccgcaggatgtgtgcgttgaaaaagtccaaaggctcgacgtgccgggcttggatgcggaacgccatatcgtcatcctgagcaagcgttga

SEQ ID NO: 54932 - DNA, 1635 bp, Neisseria meningitidis
atgataaaaccgaacctgaggccgaagctcggctcttccgcgctgattgccttcctttccctgtattcctcgctggtattgaattacgccttttttgccaaagttgtcgagcttcatccttttaacggcaccggggcggatatcttcctctatacgatgccggtggtgctgttttttttaagtaatttcgtttttcacgtcattgccctgcctttcgtgcataaggtattgattccgttgatattggttatcagtgcggcggtgtcttaccaagaaatatttttcaatatctatttcaacaagtcgatgttgaataatgtcttgcaaactacggctgccgaaagcgcgcgcctgattacgccgggctatgtgctgtggattgtatgtttgggcgtattgcccgcgctggcgtatatcgccgtcaaggttaaataccgcgtttggtataaggagcttttgacgcgccttgtgcttgccgccgtttcctttttgtgcgcgttgggcatcgcaatgttgcaatatcaggattacgcctcgtttttccgcaacaataaatcagtaacccatctgattgtgccatctaatttcatcggcgcgggcgtgtcgaaatacaaagattggaagcgttccaatattccttatacgcaattggatatggcggtcgtgcaaaaccgcccggccggcagcctgcgccgtttcgtggtgctggtcgtgggcgagaccacgcgtgccgccaactggggtttgaacggttacagccgccaaactacgccgctgcttgccgcgcgcggcgatgaaattgtcaatttcccgcaggtcagaagctgcggcacatcgaccgcgcactccctgccgtgtatgttctcaaccttcgaccgcacggattatgacgaaatcaaagccgaacaccaagacaacctgctggacatcgtgcagcgcgccggcgtggaagttacctggttggaaaacgattccggctgcaagggcgtgtgcggcaaagtgccgaataccgacgttacctcgctcaacctgcccgaatactgccgcaacggcgaatgcctcgacaatatcctgctgactaagttcgacgaagtcctcaacaaaaacgataaagacgcggttttaatcctgcataccatcggcagccacgggccgacgtattacgaacgctataccgaagccgaacgcaaattcacgccgacctgcgacaccaacgaaatcaacaaatgcacccgcgccacgctggtcaacacttacgacaatacggttttgtatgtggaccagtttatcgacaaggttatccgcaaacttgaaaaccgcgacgatttggaaagcgtggtgcattatgtttccgaccacggcgaaagtttgggcgaaaacgggatgtacctgcacgccgcgccttacgccatcgcgccttccgggcagacgcatatcccgatggttatgtggttttccaaagccttccgccaacacgggggcatagatttccaatgcctcaaacaaaaagcggcggaaaacgaatattcgcacgaccactatttcagcacggtattggggctgatggacatttccaatagccaaacctatcggaaggaaatggatatattggcagcctgccgccgtccgcgctga

SEQ ID NO: 54933 - DNA, 231 bp, Neisseria meningitidis; identical to SEQ ID NO: 39231

SEQ ID NO: 54934 - DNA, 2145 bp, Neisseria meningitidis
atgaataccccattgttccgtctcagcctgctctcgcttaccctagcggcaggttttgcccatgcggcagaaaataatgccaaggtcgtactggataccgttaccgtaaaaggcgaccgccaaggcagcaaaatccgtaccaacatcgttacgcttcaacaaaaagacgaaagcaccgcaaccgatatgcgcgaactcttaaaagaagagccatccatcgatttcggcggcggcaacggcacgtcccaattcctgacgctgcgcggcatgggtcagaactctgtcgacatcaaggtggacaacgcctattccgacagccaaatcctttaccaccaaggcagatttattgtcgatcccgctttggttaaagtcgtttccgtacaaaaaggcgcgggttctgcctctgccggtatcggcgcaaccaacggcgcgattatcgccaaaaccgtcgatgcccaagacctgctcaaaggcttggataaaaactggggcgtgcgcctcaacagcggcttcgccagcaacgaaggcgtaagctacggcgcaagcgtattcggaaaagagggcaacttcgacggcttgttctcttacaaccgcaacaatgaaaaagattacgaagcaggtaaaggcttccgtaataatttcaacggcggcaaaaccgtaccgtacagcgcgctggacaaacgcagctacctcgccaaaatcggaacaaccttcggcgacggcgaccaccgcatcgtgttgagccatatgaaagaccaacaccgaggcatccgcactgtgcgtgaagaatttaccgtcggcagcgaagattcacggataaatattaaacgccaagcccctgcttaccgcgaaaccacacaatccaacaccaatttggcgtacacgggtaaaaacctgggctttgtcgaaaaactggatgccaacgcctatgtgttggaaaaagaacgctattccgccgatgacagcggcaccggctacgcaggcaatgtaaaaggccccaaccatacccgaatcaccactcgtggtgcgaacttcaacttcgacagccgccttgccgaacaaaccctgctgaaatacggtatcaactaccgccatcaggaaatcaaaccgcaagcgtttttgaattcacaatttaaaattgaagataaagaaaaagcaactgatgaagagaaaaataagaaccgtgaaaatgaaaaaattgccaaagcctaccgtctgaccaacccgaccaaaaccgatgccggcgcgtatatcgaagccattcacgagattgacggctttaccctgaccggcgggctgcgttacgaccgcttcaaggtgaaaacccacgacggcaaaaccgtttcaagcagcaaccttaacccgagtttcggcgtgatttggcagccgcacgaacactggagcttcagcgcaagccacaactacgccagccgcagcccgcgcctgtatgacgcgctgcaaacccacggcaaacgcggcatcatctcgattgccgacggcaccaaagccgaacgcgcgcgcaataccgaaatcggcttcaactacaacgacggcacgtttgccgccaacggcagctacttctggcagaccatcaaagacgcgcttgccaatccgcaaaaccgccacgactctgtcgccgtccgtgaagccgtcaacgccggctacatcaaaaaccacggttacgaattgggcgcgtcctaccgcaccggcggcttgactgccaaagtcggcgtaagccacagcaaaccgcgcttttacgatacgcacaaagacaagctgttgagcgcgaatcctgaatttggcgcacaagtcggccgcacttggacggcttcccttgcctaccgcttccaaaacccgaatctggaaatcggctggcgcggccgttatgttcaaaaagccgtgggttcgatattggtggcaggtcaaaaagaccgcaacggcaaattggaaaacgttgtacgcaaaggtttcggtgtgaacgacatcttcgccaactggaaaccgctgggcaaagacacgctcaatgttaatctttcggttaacaacgtgttcaacacgttctactatccgcacagccaacgctggaccaataccctgccgggcgtgggacgtgatgtacgcttgggcgtgaactacaagttctaa

SEQ ID NO: 54935 - DNA, 738 bp, Neisseria meningitidis
atggctttgcaagatcgtaccggtcaaaaagtaccttccgtagtattccgcacccgcgtcggcgacacttggaaagatgtgtctaccgatgatttgttcaaaggcaaaaaagtagtcgtattctccctgcccggtgcatttaccccgacttgttcttcttcacacctgccgcgttacaacgaattgttcggcgcgttcaaagaaaacggcgttgacgcaatctactgcgtatctgtaaacgatacgttcgtaatgaacgcttgggctgccgaagaagaatccgacaacatctacatgattcctgacggcaacggcgaatttaccgaaggtatgggtatgctggtcggtaaagaagacttgggcttcggtaaacgctcttggcgttactccatgctggttaacgacggcgtggttgaaaaaatgttcatcgaacctgaagaaccgggcgatccgttcaaagtatccgatgcagatactatgctgcaattcgttgctcccgattggaaggctcaagagtctgtggcaattttcactaaaccaggttgccaattctgcgctaaagccaaacaagctttgcaagacaaaggtttgtcttacgaagaaatcgtattgggcaaagatgcaaccgtcacttccgttcgcgccattaccggcaagatgactgcccctcaagtcttcatcggcggtaaatacatcggcggcagcgaagatttggaagcttacttggctaaaaactga

SEQ ID NO: 54936 - DNA, 891 bp, Neisseria meningitidis; identical to SEQ ID NO: 46844

SEQ ID NO: 54937 - DNA, 624 bp, Neisseria meningitidis; identical to SEQ ID NO: 39191

SEQ ID NO: 54938 - DNA, 528 bp, Neisseria meningitidis
atggtactcttttaccggctgttgaaaaatatgtcttcatctgtttcaagtaaaacgcgctattgggtattggcacttgccgccatcgtgctggaccagtggtcgaagtgggcggtgctgtcgtcgtttcagtatcgggaacgcgtcaatgtcattccttcctttttcgatctgacgctggtgtacaacccgggtgcggcgttcagcttccttgccgatcagggcggctggcaaaaatacttttttttggtgctggcggtggcggtgagcgcgtatttggtacgcgccatcttgcgcgatgagtttgcaaccctcggcaaaacgggtgcggcaatgattatcggcggtgcgttaggcaatgtcatcgaccgcctgatacacggtcatgtcgtcgatttcttattgttttattggcaaaattggttttatcccgcctttaatattgccgacagctttatctgcgtcggtgcggtgttggcagtgttggacaacatcgtccaccgtaaaacccaagaagaaaaatattga

SEQ ID NO: 54939 - DNA, 384 bp, Neisseria meningitidis; identical to SEQ ID NO: 38550

SEQ ID NO: 54940 - DNA, 633 bp, Neisseria meningitidis
atggatttgcacaatattcgggaagattacagtaaacgggaattgtcggaaggcgattgcgccgacaatccgatcgagcagttcgagcggtggttggacgaggcggtacgcgcacaggtcaacgagccgacggcggttaatgtggcggcggtcgacggacgcggcagacccaacagccgtatggtgctgctgaaggaagttaattctgaaggttttgttttctttacgaattatcacagccgtaagggacgttcgctggatgctcatccatttgcggcgatgacgtttttttggccggagctggagcgtcaggtgcgcgtggaagggcgtgttgaaaggctggcggagaagttgtcggacgaatattttgagagccgcccgtatcagagccgtttgggtgcgtgggcaagtgcgcagagcgaggtgattccgaacaaggcggtattggtggcaaaggcggcggcggtcggactcaaacatcctttgcacgtgccgcgtccgccgcattggggcggctatattgtgattcccgatttgattgagttttggcagggcaggccgagcaggctgcacgaccgcatccaataccgtttgctggatggtggctggatacgcgagcggctgtcgccttga

SEQ ID NO: 54941 - DNA, 309 bp, Neisseria meningitidis
ttgaccccttgggcggatgcatatgcagatttgcgcggcaaaaccaaagtgatgacgacccagatgggtgcttcccgcgatgtcagcaaaagcgccaaaggttggagtgtcggtatcggtctgaatgtaggcaaacagttgaccgacagcgtcggtctcgagtttgatccatactaccgtcacaaaacaatctacaaaccccgtgagattgtcttggacggtgacaaaaccaaaatgggccgctccaaatccaacgagtacggcttccgcgtagccgcaacgttctatagtcaattaaaatcaaaatag

SEQ ID NO: 54942 - DNA, 984 bp, Neisseria meningitidis; identical to SEQ ID NO: 38332

SEQ ID NO: 54943 - DNA, 948 bp, Neisseria meningitidis
atgaccgacatcacaccgtttgccaaccgcttgggcaaaaacatcaaacaccttatgaaatgggtgaaacgcaacggcatcgaagcctggcgcatttacgaccgcgacatcccccaattcccctttgccgccgatgtttacggcgatcgaatccaccttcaggaatacgataccggctggctgatgcggcccgaagaatacgaagcgtggcttgccgaagtcttggaagccgtcgctttcgttaccggttttgcgcccgaacaaatccgcctcaaacgccgcgaacgccaaaaaggtttgcagcagtacgagaaaaccggcaaggcgggcgacgatttcgtcatcaccgaaaacggccgcaagttttgggtcaaccttgataaatatttggatacggggctttttttggatcatcgaaacacgcgcaaaaaagtcggcgaaacggcggcgggcaaacgttttttaaacctgttttcctacactggcagcttcaccgtctatgccgccaccggcggcgcggcatccagcgaaaccgtcgatttgtccaacacatatcttgattgggcgaaacgcaattttgaattgaacggcatcgatacggaacgacacaaaatcgtccgcgccgacgtgtttcaatatcttcagacggcatatggggaaggcaggcggttcgacctcattgtgatggacccgcccagcttctccaacagcaaaaagatgctcgacattctcgacatccagcgcgaccacaaaaagctgattgacggcgcggtgaagctgctcgcttcagacggcattttgtacttttccaacaacctgagcagcttcgtcttagacgacttggtatcggaacaatacgccgtcaaagacatttccaaacaatccgttcccgaagatttccgcaacaaaaaaatccataggtgctgggaaatccgccacaaatcttaa

SEQ ID NO: 54944 - DNA, 2214 bp, Neisseria meningitidis
atgaccgccatcagcccgattcaagacacgcaaagcgcgactctgcaagaattgcgcgaatggttcgacagctactgcgccgcgctgccgaacaacgataaaaaacttgtcttagccgcccgttcgctggcggaagcacattaccccgccgatgccgccacgccgtatggcgagccgctgcccgaccacttcctcggcgcggcgcaaatggttcatgaactcgacctgctccccgatgccgtcgccgccaccctgcttgccgacatcggacgctacgtccccgactggaacctattggtttccgaacgctgcaacagtaccgtcgccgagctggtcaaaggtgtggacgaagtgcagaaactcacccacttcgcccgggtggacagcctcgccacaccggaagaacgcgcccagcaggcagaaactatgcggaaaatgctgctggcgatggttaccgacatccgcgtcgtgttaatcaaactggcgatgcgtacgcgcaccctgcaatttttaagcaacgcccccgacagccccgaaaaacgcgccgtcgccaaagaaaccctcgacatcttcgccccgctcgccaaccgtttgggcgtgtggcagctcaaatggcagctcgaagatttgggcttccgccatcaagagcccgaaaaataccgcgaaattgccctgcttttggacgaaaaacgtaccgaacgcctcgaatacatcgaaaacttccttaatatcctgcgtacggaactcaaaaaatacaatatccactttgaagtcgccggccgtccgaaacacatctactccatttacaaaaaaatggtgaagaaaaaactcagcttcgacgggttgttcgacatccgcgccgtgcggattctggttgataccgtccccgagtgttacaccacactgggcattgtccacagcctctggcagcccattcccggcgagttcgacgactacatcgccaacccgaaaggcaacggctataaaagtttgcacaccgtcatcgtcggcccggaagacaaaggcgtggaagtgcaaatccgcaccttcgatatgcaccaattcaacgaattcggtgtcgccgcgcactggcgttacaaagagggcggcaaaggcgattccgcctacgaacaaaaaatcgcctggttacgccaacttttggactggcgcgaaaacatggcggaaagcggcaaggaagacctcgccgccgccttcaaaaccgagcttttcaacgacacgatttatgttttgaccccgcacggcaaagtcctctccctgcccacaggcgcgacccccatcgacttcgcctacgccctgcacagcagcatcggcgaccgttgccgcggtgcgaaagtcgaagggcagattgtgccgctgtccaccccgctcgaaaacggacagcgtgtcgaaatcattaccgccaaagaagggcatccttccgtcaactggctttacgaaggctgggtcaaatccaacaaggcaatcggcaaaatccgcgcctacatccgccagcaaaacgccgacaccgtgcgcgaagaaggccgcgtccaactcgacaaacagcttgccaaactcacgcccaaacccaacctgcaagagcttgccgaaaatctcggctacaaaaagccagaagacctctacaccgccgtcggacaaggcgaaatttccaaccgcgccatccaaaaagcctgcggcacgctgaacgaaccgccgcccgtacccgtcagcgaaaccaccatcgtcaaacagtccaaaatcaaaaaaggcggcaaaaacggcgtgctcatcgacggcgaagacggtctgatgaccacgcttgccaaatgctgcaaacccgcgccgcccgacgacattgtcggcttcgttacccgcgatcgcggcatttcggtacaccgcaaaacctgcccctctttccgacacctcgccgaacacgcgcccgaaaaagtactggacgcaagttgggcggcgttgcaggaaggacaagtgtttgccgtcgatatcgaaatccgcgcccaagaccgctccgggcttttgcgcgacgtatccgacgcgctcgcccgccacaaactcaacgttaccgccgtgcaaacccagtcccgcgacttggaagccagtatgcggttcacgctcgaagtcaaacaggtcaacgacctcccgcgcgtcctcgccagcctcggcgacgtcaaaggcgtattgagcgttacccggctttaa

SEQ ID NO: 54945 - DNA, 672 bp, Neisseria meningitidis; identical to SEQ ID NO: 37112

SEQ ID NO: 54946 - DNA, 876 bp, Neisseria meningitidis
atggaagaaggtttgatcgacaggctgcttgaaacgctgtggttggacaggcggctcagtcagaatactttaaacggttaccggcgcgatttggaaaaaatcgcccgccgcctgtcccaatcgggcagaatgctgaaggatgcggacgaagcggatttggcggcggcggtttatgttgacggagagcaacggagttcgcaggcgcgcgcattatcggcgtgcaaacgcctgtatatatggatggagcgtgaaggcataaggacggacaatcccacccgtttgctgaaaccgcccaaaatcgacaagaatattccgacactgattacagaacagcagatttcccggctgcttgccactccggatactgatacgccacacggtttgcgggacaaggcactgctcgaattgatgtacgcgaccggcttgcgcgtcagcgaggcggtcgggctgaacttcggcaatgtggatttggacaggggctgtattaccgcgctgggcaagggcgataagcagaggatggtcccgatggggcaggagtcggcgtattgggtggaacgctattatacggaggcacgcccacttctgctgaaaggcaggaattgcgacgcattgtttgtcagtcagaaaaagacgggcatttctcgtcagttggcatggatgattgtcaaagaatatgcaagtcaggcaggcatcgggcacatcagcccgcacagcctgcgccacgcctttgccacgcacttggtgcagcacggattggatttgcgcgtggttcaggatatgttgggacatgccgatttgaatacgacgcagatttacacccatgttgccaatgtatggttgcagggtgtagtgaaggaacaccattcccgaaactga

SEQ ID NO: 54947 - DNA, 300 bp, Neisseria meningitidis; identical to SEQ ID NO: 43627

SEQ ID NO: 54948 - DNA, 318 bp, Neisseria meningitidis
atgcaaaaacgtattgatgaaatccaaagcaaataccgcgaatggtgtcatttactaccgcaattggaagaagacatccgccgttggaaacatgccgtcgctttgattcgcgatatggacaatttttatacccacgaatatcaggcttgtcatcgggctattgaagatggagcggaggtggatttgcgcacagaaggcgaatacagcattatgagtgaagatgcgctatggaacgcgctgggcgaattccatcaactggcttggttatatttgcgctccagcgtcgatgccttagacaaatatacacaagaagattag

SEQ ID NO: 54949 - DNA, 600 bp, Neisseria meningitidis; identical to SEQ ID NO: 41967

SEQ ID NO: 54950 - DNA, 1989 bp, Neisseria meningitidis
atgaaaatatctgcatctgatattgcgaaattaggaattccgagcctaccaactgatagacaagggattgaataccatgccaagaaaaataattggcaacactgttttgagcaaaaaggaagaggccgtcctaaaaaactgtatgaaatcgcttccctccctgccgaaatccgagcagccatcatgaaacggcagtcggacgagctggcggagaagatgccgaaaatgctgccccaagtcagaccggggacggcgatgtcggctcaggcactggctgaagcggccaagctgttgaacgagaaacaacggtcggtggcggatgcgcgatgtgcggtggtggcggcggtattggggattaaatacgaatacgattgctctgccaaggctgcggtggctcagtttttgggcttgctggcagaaggtaaattggacgcggtcacgcttgggaacttggaaaaggccaatgaccgcagccggtcggcgaaggttggcgaacgtactttagacggctggatttctgcttatttgaaagcggaaaacgcgatagagcggttggttgctttggctccgaagacgacgaaggcggtcaagccgattgagagctacggttggttgccgatgtttatgcggtttcacaacatcccttcggctccgaaactggcgcacagctaccgccggtttgtgcagtgggcggaagcggaaaatatgccggtcaatgatgtgcctaatttgagtatggtgcggcgcgtttgggacaagctcccgctaattatgcaggagcgcggcaggaaaacgggggcggcttataaatcgctgctgccttatgtgaaacgtgattggggggctttgaagccgaacgatgtttggatcggcgacggccacagctttaaggcgaaggtggcacaccctgtacacggcaggccgtttaagccggaagtgacggtgattattgatggttgtacgcggtttgtggtcgggttttcggtttcgttggctgaaagttgtgtggcggtatcggatgctctgcgtatcggggtcaagcattttggtttgccgattatctattactcggataacggcggcggccaaaccggcaagacgatagaccatgaaatcacgggtattacgtcccgactgggtatccgccatgaaacgggtatcgcgggcaacccgcaaggtcgaggcatcatcgagcgatggtggaaagacaatctgattgagatggcgcgccagtatgagacgtttgcgggcgcaggaatggacagtagcacgaagaatctgatgtaccgcaagatggaaagtgcgtttaacgctttggaaaaaggcaaggatttaacggaggaacagcaaaaatatttgaaaaaactgccgagctggtcgcgttttatcgcggatgtggtcaagtgtatcgatgattacaacaaccgtccgcacggcgagctgccccgacatccggacggcgggcattattcgccgaaggcttatcgggaaataaggctggaacaggacggtatcgcgccggatatgttgtcggcggaagagctggcgacgatgtttatgccgcaggaagtgcgaaaggtacagcgcggttggctggatttgttcagcaactcttatttctcaaccgagctggcggagtatcacaaagacgaggtacgggtcagctacgatttgagcgatgcgtcggcggtcaatgtgtttgatatggacggcaagtttattactaaggcgcaggccaacggcaatacccgcgaggctttcccgacagcgcgtatcgaccaactggcggaaaaacgccgaaaaggcaaaatcaagcgggcggaaaatgcaatcaagctcgcgaatgcggaagtcaatccggcactggaacaggcggcagcttgggacgagctgggacatttgggcggaaacgtcatcgaggcggagtatgcggtattgccgaaaacgggcacggacgacgggattttcttgtttgaggcggatatgtaa

SEQ ID NO: 54951 - DNA, 936 bp, Neisseria meningitidis
atggaactctttaaaatcaaacgcgatattccgtttatgagctacggcaaactgacgacctttatttcgttggttacctttattgccgccgtattctttttggttaccagaggtctgaatttctctgtcgaatttaccggcggtacggtaatggaagtccaatatcagcagggtgcggatgtcaataagatgcgcgaacgcctcgatacgctgaaaataggtgatgtacaggttcaggcattgggtacgaacaaacacatcatgatccgcctgccgaacaaagaaggtgttacttccgcacagttgtccaatcaggttatggatttgctgaaaaaagacagtcccgacgttaccttgcgccaagtcgaatttatcggcccgcaagtcggtgaggaattggtaagtaatggattgatggctttaggttttgtcgttatcggcatcattatttacctgtcgatgcgttttgaatggcgttttgccgtatctgccattatcgccaatatgcacgacatcgtgattattctcggctgctttgccttcttccaatgggaattttcgctgaccgtcttggcgggtatccttgccgtattgggctattctgtgaacgaatccgtcgtcgtcttcgaccgtatccgtgaaaacttccgcaagccggcgatgcgcggacatgccgtgccggaagtcatcgacaacgcgattaccgcaacgatgagccgcaccatcattacccacggttcgaccgaggcgatggttgtttctatgctggtgttcggcggtgcggccttgcacggcttttctatggcgttgaccattggcatcgtgttcggcatttattcttccgtattggttgccagcccgcttctgctaatgttcggtttgagccgcgacaatatcggtaaagaaccgaagaagaaagaagaaatcgtggtttga

SEQ ID NO: 54952 - DNA, 480 bp, Neisseria meningitidis
atggctaacttagtaaaaacctttctgctcggcgagttggtaaaaggcatgggcgtaacgctcaaaaacttttttgcccgcaaagacacaatttattttcccgaagagaaaacgccgcaatccgtgcgtttccgcggtctgcacgcgcaacgccgttatccgaacggcgaggaacgctgcatcgcgtgtaaattgtgtgaagccgtttgccccgcaatggcgatcaacatcgaatcggaagaacgcgaagacggcacgcgccgcaccaagcgttacgacatcgacctgaccaagtgcatcttctgcggtttctgcgaagaagcctgcccgaccgatgcgattgtggaaacccatatttttgaataccacggcgagaaaaaaggcgacttgcacatgaccaagccgattcttttggccattggcgacaaatacgaagctgaaatcgccaaacgcaaagccgctgacgcgccgtatcgttaa

SEQ ID NO: 54953 - DNA, 312 bp, Neisseria meningitidis; identical to SEQ ID NO: 42205

SEQ ID NO: 54954 - DNA, 831 bp, Neisseria meningitidis
atggcacattacgcaatcggcgacatacaaggctgtttcgacgaactgaccgcgctgctcggcaaaatcggtttcaaccacggcacggacaccctctggctgacgggcgacatcgtcaaccgcggcccgaaatccctcgaaacgctgcaattctgcatccggcacgaaaacagcgtgcaaatcgtcctcggcaaccacgacctgcacctgctcgctgtcggctgcggcgaaggcgcgcccaaacgcagcgacacaatcgaacccatactcaaacaccccgacggaaaaaaaatgctcgactggctgcgtgcgcaaccgctgttgatacgcgagggcagccgcgtgatggtacacgccggcatcctgccgcaatggcgcatcgccaaagccgaatcgctcgctagagaagccgaagccgaactgcgcggcaaaaaatacgtcaaattcttctccaaaatgtacggcaacaaaccggccgcgtgggacgaaggtttggaaggctatgcccgcctgcgcttcatcgtcaacgccttcacgcggatgcgcgccctgacctttaaaaacgaactggatttcgactacaaatccacagtgaaaaaaatgccgccttacctgcgcccgtggttcaaagcccccgaccggcaaaacctcgaccgcaccatcatcttcggacactggtcctcgctgggctacacgaatgccgacaacgtcatctcgctggacaccggcgcgctgtggggcggacagctgaccgccgtcaacctcgaaacggaagaaattacccaagtccaagccgccggcggcatagactggaaaagcttcgcaaaataa

SEQ ID NO: 54955 - DNA, 960 bp, Neisseria meningitidis
atgagcaccttcttccggcaaaccgcacaagccatgattgccaaacacatcgaccgtttcccgctattgaagttggaccaggtaattgattggcagccgatcgaacaatacctgaaccgtcaaagaacccgttaccttagagaccaccgcggccgtcccgcctatcccctgctgtccatgttcaaagccgtcctgctcggacaatggcacagcctctccgatcccgaactcgaacacagcctcatcacccgcatcgatttcaacctgttttgctgttttgacgaactgagcatccccgattacagcaccttatgccgctaccgcaactggctggcgcaagacgacaccctgtccgaattgctcaaactgattaaccgacaactgaccgaaaaaggtttaaaaatagagaaagcatccgccgccgtcattgacgccaccattattcagaccgctggcagcaaacagcgtcaggccatagaagttgacgaagaaggacaaatcagcggccaaaccacaccgagtaaggacagcgatgcccgttggataaagaaaaacggcctctacaaactcggttacaaacaacatacccgtaccgatgcggaaggctatatcgagaaactgcacatcacccccgccaatgcccatgagtgcaaacacctgtcgcctttgctggaaggactgcccaaaggtacgaccgtctatgccgacaaaggctacgacagtgcggaaaaccggcaacatctggaagaacatcagttgttagacggcattatgcgcaaagcctgccgcaaccggccgctgtcggaagtgcaaaccaaacgtaaccgatatttgtcgaagacccgttatgtggtcgaacagagcttcggtacgctgcaccgtaaattccgctatgcgcgggcagcctatttcggactgatttgcgcccgctgccgcctaaaaggcagcccggatgcctga

SEQ ID NO: 54956 - DNA, 1185 bp, Neisseria meningitidis
atgggcaaacatattcttttaggtgtaacgggcagtattgcggcgtataagtcttgcgagttggtgcgactgctgaaaaaacaggggcattcggttacggtggttatgagccgctcggcaactgaatttgtttctccgctgacttttcaggctttaagcggcaatcctgtcctgaccgacacgcacggcggcaacggttcaaacggtatggaacatatcaacctgacccggaatgcggatgtttttctgattgcgccggcaagtatgaataccgtggcaaaaatctgtaacggcgtggcagataacctactgaccagtctggcagccgcacggaaatgtccactcgccatcgctcccgcgatgaatgtggaaatgtggctcaaccctgccaaccaacggaatatcgcacaactggtttcagacggcattactgtctatatgccgggcttaggcgaacaggcttgcggagaaaatggtatgggaaggatgccggaacctgccgaattgctggatttgcttccggacttgtggacaccgaaaattttaaggggcaagaaaatcttgattaccgcaggtgcgacatttgaagccattgaccctgtcaggggcatcacaaatacctccagcggaaaaatgggggtagctttggcgcgggcgtgccgtgccgccggtgcggaagtcagcctgattcacggacagcttcaaaccgcgctgcctttcggcatatccgatacggttcaagccgtcagcgctgaagatatgcatcgcgcagtgcatcgtttgattgaaaagcaagatgcttttatttctgttgccgccgtctcagactataaggttaaaaacaagagtacgcaaaaattcaaaaaagataaaaatgccaaaccgttatccatcgaattggatgagaaccccgatattttggcttctattgcctcattgccaaacccgccgttctgcatcggttttgccgctgaaacggagaatgtaatggcatatgcacgagaaaaacgtattaagaaaaaaataccggtgatagttgccaatgatgtttcaatcgcgatgggcaaaccgaccaaccggattaccattatcggggacgacggggaactatcttttcccgaaacaagtaaagatgaagcggcgatgcagattgttgaaaggcttgccgtatatttgaacaaataa

SEQ ID NO: 54957 - DNA, 1839 bp, Neisseria meningitidis
atgttacccgcccgtttcaccattttatctgtgctcgcggcagccctgcttgccgggcaggcgtatgccgccggcgcggcggatgcgaagccgccgaaggaagtcggaaaggttttcagaaagcagcagcgttacagcgaggaagaaatcaaaaacgaacgcgcacggcttgcggcagtgggcgagcgggttaatcagatatttacgttgctgggaggggaaaccgccttgcaaaaggggcaggcgggaacggctctggcaacctatatgctgatgttggaacgcacaaaatcccccgaagtcgccgaacgcgccttggaaatggccgtgtcgctgaacgcgtttgaacaggcggaaatgatttatcagaaatggcggcagattgagcctataccgggtaaggcgcaaaaacgggcggggtggctgcggaacgtgctgagggaaagaggaaatcagcatctggacggactggaagaagtgctggctcaggcggacgaaggacagaaccgcagggtgtttttattgttggcacaagccgccgtgcaacaggacgggttggcgcaaaaagcatcgaaagcggttcgccgcgcggcgttgaaatatgaacatctgcccgaagcggcggttgccgatgtggtgttcagcgtacagggacgcgaaaaggaaaaggcaatcggagctttgcagcgtttggcgaagctcgatacggaaatattgccccccactttaatgacgttgcgtctgactgcacgcaaatatcccgaaatactcgacggctttttcgagcagacagacacccaaaacctttcggccgtctggcaggaaatggaaattatgaatctggtttccctgcacaggttggatgatgcctatgcgcgtttgaacgtgctgttggaacgcaatccgaatgcagacctgtatattcaggcagcgatattggcggcaaaccgaaaagaaggtgcttccgttatcgacggctacgccgaaaaggcatacggcagggggacgggggaacagcggggcagggcggcaatgacggcggcgatgatatatgccgacagaagggattacaccaaagtcaggcagtggctgaaaaaagtgtccgcgccggaatacctgttcgacaaaggtgtgctggcggctgcggcggctgtcgagttggacggcggcagggcggctttgcggcagatcggcagggtgcggaaacttcccgaacagcaggggcggtattttacggcagacaatttgtccaaaatacagatgttcgccctgtcgaagctgcccgataaacgggaggctttgagggggttggacaagattatcgaaaaaccgcctgccggcagtaatacagagttacaggcagaggcattggtacagcggtcagttgtttacgatcggcttggcaagcggaaaaaaatgatttcagatcttgaaagggcgtttaggcttgcacccgataacgctcagattatgaataatctgggctacagcctgctttccgattccaaacgtttggacgaaggcttcgccctgcttcagacggcataccaaatcaacccggacgataccgctgtcaacgacagcataggctgggcgtattacctgaaaggcgacgcggaaagcgcgctgccgtatctgcggtattcgtttgaaaacgaccccgagcccgaagttgccgcccatttgggcgaagtgttgtgggcattgggcgaacgcgatcaggcggttgacgtatggacgcaggcggcacaccttacgggagacaagaaaatatggcgggaaacgctcaaacgtcacggcatcgcattgccccaaccttcccgaaaaccccggaaataa

SEQ ID NO: 54958 - DNA, 657 bp, Neisseria meningitidis
atggattttgaaaaagcgcggttcaatatggtcgaacagcaaatccgtccttgggatgtattggattttgacgttttggacgctttggcggagattccgcgcgagctttttgtcgatgaggacttgcagggtttggcgtatgcggatatggcgctgccgcttgccaacgggcataagatgctcgagccgaaagttgtggcgcggctggcgcagggcttgaagctgacgaaaaacgatacggttttggaaatcggcacgggatcgggctatgcggccgcgctgttggcgaaactggctggtcgtgtggtttcggacgacatcgatgccgaacagcaaaagcgcgccaaagcggttttggacggcttgtctttggaaaacattgattatgtgcaaaacaacgggctgaccgaactttccgcaggcgcgccgtttgatgcggtttatgtcggcggcgcggtaaaccttgtgcctgaagtgttgaaagaacagttgaaagatggcggacgcatggcggttatcgtaggccgcaagcctgttcagcgcgcgcttttgattacgcgcaagggcgatgtgtttgaagagaaggtgctgttcgataccttggtggcgcatttggatgataaggatgccgatccgtttggcggtttcgatttttaa

SEQ ID NO: 54959 - DNA, 630 bp, Neisseria meningitidis; identical to SEQ ID NO: 38660

SEQ ID NO: 54960 - DNA, 201 bp, Neisseria meningitidis; identical to SEQ ID NO: 43357

SEQ ID NO: 54961 - DNA, 1911 bp, Neisseria meningitidis
atgactctggaaaccctgatcgccctgccgcgcaacatcaagaaaatctgtttcctcatacacgattttctgatgattttcattgccttttggttcacccaaagcctaaaggccgactactcggacgaatggttcgaccccgccaactggcagtctttcctattgaccgcgtttttgaccgcctgcctgttcttcagaatggggctttaccgcgccgtcacacgcttcatcagcttccgcatcctctccaccgcgctggcaggcagcctcgcctccgccgtattgtttttcctcaatacgctgatatttgaagaacggctgcggctcgccctgccgattgtctatttcttactgctgtttgtttccgtgaccggctcgcgtatggttttgcgcggactgttgtccgaacaccccaaaaaacagatggcccccgtcattatttacggcgcgggacggtcgggcagacaactgcttaaggccgtcaaacaaatgcgcgaatattccgccgccgcctttgtggacgacgaccccaaactgtggcacaccgtcatctacgaccttgccgtttaccagcccgatgccatcgccttcctcatcgaacgctacggcgtggaaaaaatcctgctcgccatccccggcgcgactcaggaacaacgcctccgaatcatcaacaaactggaagcctatccctgcgaagtgttgaccattcccggaatgaaagacctgatggacggaaaaatcagcatcggcacgctcaaaaaaatctctgtgtccgacctgctcgggcgtgattccgtcgcaccagacgaccgcctcatgaatgccgacatcgaaggcaaaaccgtcatggtaaccggcgcgggcggctccatcggttcggaactctgccgccagattatccgccgccgccccgaaaagctgctgctgttcgagttatccgaattcgccctgtacgccatcgaaaaagaattgcgcgaaacctgcatccaaaaacgcctcgataccgaaatcctgccctttctcggttcggtgcaaaaccgcacgctgctcgaacacgtcatgaccgccttttccgttgcgaccgtctatcacgccgccgcctacaaacacgtccccatggtcgagttcaacaccgtcgaaggcatacgcaacaacatcttcggcacactcgagtgcgcgcttgccgccacggcatcgggcgtaagaactttcgtcctcatctccaccgacaaagccgtccgccccaccaacaccatgggtgccggcaaacgcatggcggaactctgccttcaagcgctcgccgccgaacccggacaaaaaacccgcttcagcatggtgcgtttcggcaatgttttaggttcgtccggctccgttgtcccgctgtttgaaaaacagattgcagaaggcggcccgcttaccctgacccaccccgaaatcacacgttatttcatgaccatacccgaagccgcccaactcgtcatacaggcaggcgcgatgggtacgggcggcgacgtattcgtcctcgacatgggtgaatccgtcaaaatcatcgaccttgcccgccaaatgattaccctaagcggcctcaaacccaacacacccgaacaacccgacggcgacatcgaaatcctcattaccggactgcgtcccggagaaaaactctacgaagagctgctcatcggcgacaacgtccgcaaaaccggccatccgcgcattatgacggctgacgaggcgatgctgccgtggcacgagctctccgccctgctcgaccgcatccgtgcggcctgcgaccgttacgaccagcaggcaatccgcaccctgctcatcaacgccccgaccggctttgccccgagcgacggcatctgcgacctgctttgggtacgagaaacacacagaaaaaatgccgtctga

SEQ ID NO: 54962 - DNA, 396 bp, Neisseria meningitidis
atggataaaaacctgcttgaagccgtcaaatttgacgaaaaaggtttggtttgcgccatcgcccaagatgccgaaaccaaacgtgttttaatggtggcgtggatgaacgccgaagccctgcaaaaaaccgtcgaaaccggctttgcccactattacagccgttcgcgccaaaaacaatggatgaagggcgaagagtcgggacacacgcaaaaagtccgcgaactgcgcctcgactgcgacggcgacgccattgtgatgctcattgcccaaaacggcggcatcgcctgccacaccgggcgagaaagctgcttttacaaagtctggcgtggcagcgcgtgggaaaccgccgatgccgtcctgaaagacgaaaaagagatttacggcagcacgcactga

SEQ ID NO: 54963 - DNA, 1542 bp, Neisseria meningitidis
atgaagtttttagaccgtgaggcaagcattgccaagccgggtttcaaccgttggctcgtaccgcccgcagcattggcggtacaccttgccatcgggcagatttacgcctattccgtattcaacgcgccgctgaccaaacttatcggcataaccgaatcggcggccggagattggaagctgacgaccgtaggttggattttcagtatcgcactcgcgatgctgggcgcgtcggccgccctgttcggcacatggatggaacgggtagggccgcgcaaagccatatttgccgccgcctgctgtttcagcctgggcttcttcgtatccgcattcggcgtgagtacgcacaacctcttcctgctttatttgggcaacggcgtcatcggtggcgtaggcttaggcttaggctacatcgggccggtttccacactgatgaaatggtttcccgacaagccgggtatggcgaccggtttggcaattatgggtttcggcggcggcgcaatgctggcctcaccgctttccgtatcactgatgaacgccttttcaaacgccgcttcggtcggggttgttgaaacctttgccgtattgggactgctttacctcgcactgatgatgttcggcgcgtttaccatccgcgtacctgccgacggctggaaacctgaaggctatatcgcgccgaaaacgcaaaacaagctggtcagcagcaatcatgtcaacgtgtcccaagccatgaaaacgccgcagttttggctgttgttctgggtattgtgcctaaacgtaactgccggcatcggcgtattgggtcaggcatccgtgatgattcaggaactcttttccgaaacctccataggcaggcaggcagcagtcggcgcaggtgcggcggcaggcttcgtcagcctcctgagcctgtttaacatgggcggacgctttttgtggtcgagcgtttccgacaaaatcggacgcaaaaacacctacaccatcttcttcgtactcggttcgctgctgtatttcgccgttccctccatcggcgagggcggcagcaaagccctgttcatcatcggcttttgcgtgattatttccatgtacggcggcggatttgccgccattcccgcctacctgaaagacctgttcggcacctatcaggtcggcgcgattcacgggcgcatcctgctggcctggtcaaccgccgccgtcatcggcccggtactggtcaattacatacgccaaagccaaatcgacagcggcataccggcggcacaggcatacagcgtaaccatgtacatcatggcgggtctgctgattatcggtttgttgtgcaacctcgccgtcaaatccgtacacgaaaaacaccacgaaaaagacatcaaaaccgccgcacacagcggcaaccccgatgacgaaaccgccatatccgacgcttaccttgtgggcgaaaaagtttccggcggcggcatatcggtctggtggcgttgggcattggccgtcataccgctcgcctacggcgtggtgatggtctttgtcaaagcactcgaccttttctcctga

SEQ ID NO: 54964 - DNA, 1770 bp, Neisseria meningitidis
atgaccgtacagaccaagacaaaaggtttggcgtggcaagaaaaaccgctatccgacaacgaacgtctgaaaaccgaaagcaattttttacgcggcacgattttggacgatttgaaagacccgctcacgggcggcttcaaaggcgacaacttccaactcatccgcttccacggtatgtatgagcaggacgaccgcgacatccgcgccgaacgcgccgaggcaaaactcgagcctttgaaatttatgcttttgcgctgccgactgccgggcgggatcatcaaaccgtcccaatggatagaactggacaaatttgcccgggaaaacagtcattaccgctccatccggctgaccaaccggcaaaccttccaatttcacggcgtgccgaaagccaagttgcagacgatgcaccgcctcttgcacaaactgggtttggattccatcgccacggcggcggatatgaaccgcaacgtgctttgcacgtccaacccgatcgagtccgaactgcaccggcaggcttacgaatacgcgaaaaagatttccgaacacctgctgccgcgcacgcgcggttatctggatgtgtgggtggacggcaaaaaagttcaaagttccgacgacttccttcaagaagacgagccgattttgggcaaaacctatctgccgcgcaaattcaaaaccgcagtcgtcatcccgcccttaaatgatgtggactgctacggcaacgacttggattttgtcgccatttcagacggcggcggacagcttgccggttttaatgttttggcaggcggcgggctttcaatggaacacggcaacaccaaaacctatccgaacatttcactggaactgggtttcgtacctccggaacacgcgctgaaggccgccgaagcggtggtaaccacacagcgcgacttcggcaaccgcagcgaccgcaaaaacgcccgcacccgctacaccattcaaaatatgggcttggacaacttccgcgccgaagtcgaacgccgtatgggtatgccgttcgaacccatacgcccgttcaaatttaccgggcgcggcgaccgcatcggctgggtaaaaggcatagacggcaactggcatttgacccttttcatcgaaagcggccgtttggttgacgaaggcgggaaacagcttctgaccggcgtgttggaaatcgccaaaatccacaaaggcgatttccgcattaccgccaaccaaaacctcatcgtggcaaatgtcgccgaagcagacaaagcaaaaatcgaagaacttgcccgaacatacggattaatccgcaacgatgtcagcaaactgcgcgaaaatgcgatgtcgtgcgtttccttcccgacctgcccgctggcaatggcggaagccgaacgcgtgctgccggacttcatcgacgagctggataagattatggcgaaacacggcacgtcggacgactacatcgttacccgcattaccggctgccccaacggctgcggacgggcaatgttggcggaaatcgggctggtcggcaaagccgtcgaacgctacaacctccacatcggcggcgaccgcgaaggcgtacgcatcccccgcctctacaaagaaaacattaccctgccggaaatcctttccgaattagacgacctgatcggcaaatgggcggcaggacgcgataccgacgaaggtttcggcgatttcgccatacggacgggcatcgtcaaacccgtgttggatgcgcccgtcgatttttgggacgcatccaaagccgtcccgattgcgcgcgcctga

SEQ ID NO: 54965 - DNA, 225 bp, Neisseria meningitidis; identical to SEQ ID NO: 36979

SEQ ID NO: 54966 - DNA, 1035 bp, Neisseria meningitidis
  misc_feature 1012, 1013, 1014, 1015, 1016: 'n' is a, c, g or t
atgagtacacaaacaaattttgatttggtgttgttcggtgcgaccggcgatttggcgatgcgcaagctgttgccctgtctgtaccaggcgcatgttgccggtctgcttcatcccgaagggcgtattttgggggtcagccgcagcgagttggataccgaaggttttctggcgaaggtggaaaccagttccaaaatccatgtgaaagaaaatttttccgatgaggcttgggcatcgtttgtcgaacgtttcgcatatctcaaagtcgatgttacgcagccggacgattttgccgctttgggcgatttggtcaaagcgcgcaaagaaaccgacaatgtcgtcatctatctttccaccgcgccgaaattcttcgcgcaaacatgtgaaaaccttgccaaaatcggtttgaacgccgacaacgtgcgtgtggttttggaaaaaccgttgggtacggatttggcttcttcccagcaaatcaataccgatgtcgcgcgttatttcaaagaagggcaaatttaccgcatcgaccactaccttggcaaagaaagcctgcaaaacctgcttgcgctgcgttttgccaatgtaatgttcgagccgctgtggaacaataaatacatcgaaagcgtgcagttgaccatcgccgagcagttgggcgtggaagaacgcggcgagttttacgacattaccggcgcgttgcgcgatatggtgcaaaatcacttgatgcaaatgctgtgcatgactgcgatggaagcccccgccagcttggatgccgacgcggtgcgcgatgaaaaagtcaaagtcatcaagtcattgaagccgctgaccgtcgaatctgtcaatgaaaatgtcgtgcgcggacaatataccgccgccaaaggcatgaacggctatcttgaagaaatcaacgttccgcaagacagctttaccgaaacctacgtcgccattaaagccgaaatcgaaaacgaacgctggaaggcgttcccttctacctgcgtaccggcaagcgcatggcggnnnnncacacacttaattaattaa

SEQ ID NO: 54967 - DNA, 1077 bp, Neisseria meningitidis
atgaagccgtctatcttagaaaaactgcaacaactcggcgaccggttggaagaagttacccaccttttagggcaacccgaagccacggcagatatggacaactaccgcaagctcacgcgcgaacacgccgaactgacccccgtcgtcgaagtgttccaaaactatcggcttgcccaaagcgacttggcggatgccgaagaaatgttgtccgaccccgaaatgaaagattttgccgccgaagaaatcgaagcggcaaaagccaaaatcaacacgctcgataccgaactgcaaaaactgctgctgcccaaagatgccgacgacgacaaaaacatcttcatcgaaatacgcgccggaacgggcggcgacgaagccgcgctgtttgccggcgatttgctgcgtatgtacagccgctacgccgagcgcaaccgttggcaggttgaaatcgtgtccgccaacgaaagcgaattgggcggctataaagaagtcatcgcccgtattgtcggactcggggcgtacagccgtttgaaatttgaatcgggcggacaccgcgtgcagcgcgtccccgccaccgaaagccaaggccgcatccacacctccgcctgcaccgttgccgtcatgcccgaagcggacgaactggaagacatcgaactgaacccagccgacctgcgcatcgacaccttccgcgcatccggcgcgggcggtcagcacatcaacaaaaccgactccgccgtccgcatcacccacctgcccaccggcatggtggtcgaatgccaagacggccgcagccaacatgccaacaaagcgcaggcaatgaaagtcctcgccgcccgcctgaacgacgcgcaaaaacgcgaagcccaagccaaagaagccgccgagcgcaaatccctcatcggcagcggagaccgcagcgaacgcatccgcacctacaactatccccaaggcagggtaaccgaccaccgcatcaaccttaccctgcacaagctggattttgtgatggacggcgacttggcagaaatcaccaatgccctgattgccgagcatcaggcggagcttctggcggcaatgggcgattga

SEQ ID NO: 54968 - DNA, 1446 bp, Neisseria meningitidis
atgaaattgcctattcaaaaattcatgatgctgtttgcagcggcaatatcgttgctgcaaatccccattagtcatgcgaacggtttggatgcccgtttacgcgatgatatgcaggcaaaacactacgaaccgggtggtaaataccatctgtttggtaatgctcgcggcagtgttaaaaatcgggtttacgccgtccagacatttgatgcaactgcggtcggccccatactgcctattacacacgaacggacagggtttgaaggcattatcggttatgaaacccatttttcaggacatggacatgaagtacacagtccgttcgataatcatgattcaaaaagcacttctgatttcagcggcggtgtagacggtggttttactgtttaccaacttcatcggacagggtcggaaattcatccggaggatggatatgacgggccgcaaggcagcgattatccgccccccggaggagcaagggatatatacagctattatgtcaaaggaacttcaacaaaaacaaagactaatattgtccctcaagccccattttcagaccgttggctaaaagaaaatgccggtgccgcctctggttttttcagccgtgcggatgaagcaggaaaactgatatgggaaagcgaccccaataaaaattggtgggctaaccgtatggatgatattcgcggcatcgtccaaggtgcggttaatccttttttaatgggttttcagggattgggagttggggcaattacagacagtgcggtaaacccggtaacctatgcggcagcacggaaaactttacagggtattcacaatttaggaaatttaagtccggaagcacaacttgcggccgcaaccgcattacaagacagtgcttttgcggtaaaagacagtatcaactctgccagacaatgggctgatgcccatccgaacattacagctactgcccaaactgccctttccgtagcagaggccgcaactacggtttggggcggtaaaaaagtagaacttaacccgaccaaatgggattgggttaaaaataccggctataaaaaacctgctgcccgccatatgcagactgtagatggggagatggctgggggaaataagccaccgaaaccaagtacgcagcaacactctacacactctgataacaatataggcttacctgccccatatgttaaacctgatacatctatttctccgacaggaacaatttatgtagacagcaaaggaaatgcaataccaacaccaataggcggttatataacaggttcgcctgatgctcgttttatccaagtccgagatagtaatggaaacttgactggagccagaatagatgatgctcatcatgcaaatacccatcaagacccacgcgcacttacaggacacgcacatgtaccaggagttacaaatgatgacggaaccccatggttacccatcaaataa

SEQ ID NO: 54969 - DNA, 516 bp, Neisseria meningitidis
atgaaaatcaaacaaatcgtcaaaccgggcttggcagtattggcggcgggcgttctgtctgcctgcgcaaccaaaagcaacgtcaaagccgacggcacgaccgacaatccggttttcccgaaaccctattccgtaacgctcgacaacaagcgcggcacattcccgacttatgacgaactggatcagatgcgccccggcctgaccaaagacgacatctacaaaatcctgggccgcccgcattacgacgaaggtatgtacggcgtgcgcgaatgggattacctgttccacttccataccccgggcgtaggtatcgaccctgaaaacacttccggcgtagaagatgttactacctgccaatacaaagtgattttcgataaagacaaatttgcccgcagcttctactggaaccccgtcttcccgaaagatgccgcctgtccgccgcccgcacccaaagccgagccgcaagtcatcatccgcgaaatcgtgccggcaaaaccgaaacgtatccgccaataa

SEQ ID NO: 54970 - DNA, 2043 bp, Neisseria meningitidis
atgatgtcgcccgaaacccagaaacagctcaaaatcaccgatgtttccgccaagaagctcgacaaactcaacctccataccgcgtgggatttggtgttgcacctgccgctgcgttacgaggacgagacgcacattatgccgattaaggacgcgccgattggcgtgccgtgccaggtcgagggcgaggttatccatcaggaagtaacgttcaaaccgcgcaagcagttgattgtccaaatcgccgacggttccggcagcgtcctttttctgcgcttcatccacttttacgccagccatcagaaacagacggcggtcggcaaacgcatccgcgccgtgggcgaaatcaaacacggcttttacggcgacgagatgattcatcccaaaatccgcgatgccgagggcggcggtttggcggaaagcctcacgccggtttacccgaccgtaaacggtttgaaccagcccactttgcgccgtattattcagacggcgttggacgttacgccgctgcacgacacgctgcccgatgccctgctgtgccgtctgaagctgccacacctcgccgaaagcctgcgtcttttgcattcgccgccgccgagtttcacgattcatcagctttcagacggcacgctgcctgcatggcaacggctcaaattcgatgaacttttggcgcaacagctttcgatgcgcttggcgcgacagaagcgtatcggcggcacggcggcggcattgggcggcgacggcacattgacccaagccctgcgccaagccctgccgtttgccctgaccgatgcgcaagaaaaagttgtttccgaaatctgccgcgatatggcgcaaacctacccgatgcaccgcctgctgcagggcgatgtcggcagcggcaaaaccattgtcgccgccttgtccgcgctgaccgccatcgaatccggtgcgcaggtggctgtaatggcgcccactgaaatccttgccgaacaacattttattaaatttaaacaatggctcgaacctttgggcattgaagttgtccgcctttttggcagtttgcgtaaaaaagccaaagacgaagccaaagccaaactcgccgacggcagcgtcaaaatcgccatcggcacgcacgccctgttttcagacggcgtgacgtttcacaatttgggcctgaccatcgtggacgaacagcaccgtttcggcgttgcccaacgcctcgcccttaaaaacaaagggcgcgaagtccatcagttgatgatgtccgccacgcccatcccgcgcacgcttgcgatgagttttttcgccgatttggacgtgtccgtcatcgacaaactgccgcccgggcgcaccccgattaaaacgcgcctcgtcaacaacgtccgccgcgccgaagtcgaaggcttcgtcctcaatacttgccgaaaagggcggcaggcgtattgggtctgcccattgattgaagaaagcgaaaccctgcaactgcaaaccgccgccgaaaccctcgcccggcttcagacggcattgcccgagctgaatatcggactggtacacgggcgcatgaaggccgccgaaaaggccgaagtgatggcacggttttcttcgggggagctgaacgtcttggtcgccaccaccgttatcgaagtcggcgtagatgtgcccaatgccgccctgatggtcatcgaacacgccgagcgcatgggcttggcgcagctgcaccaattacgcggtcgggtcgggcgcggcgcggcagaaagcgtgtgcgtcctcctgtttgccgaacccttgggcgaactcgccaaagcgcggctgaaagtcatctacgaacacaccgacggctttgaaatcgcccgccaagacctcaacatccgcggccccggcgaatttctcggcgcgcgtcaaagcggcgtgcctatgctgcgtttcgccaagctcgaagaagacttacaccttttggaacaagcgcgcgaaatcgccccgatactgattgaacaaaaccccgaaatcgtcgaagcgcatttggcacgatggctttccggcagggaaggttatttgggcgtgtga

SEQ ID NO: 54971 - DNA, 774 bp, Neisseria meningitidis
atgtatcgccaaatcggaatgtgggatcaaaaatgggtcatcggcaactggaaaatgaacggccggctccaaaacaacaacgcactgatgcaccgcttccgcatcctccccaccgccgaacgcgtcctcatcggactcgccgccccgaccgtttacctgctgcaactgcacaacgccatgcaaatcgtcttaaacaaccgcatcctcacctgcgcccaagacgtgagccgcttccccgacaacggcgcgtacaccggcgaagtgtccgccgaaatgctcgccgacaccggcacagacatcgtcctcatcggacactccgaacgcagcctttatttcggcgaaaaaaacgaaatccaacgccgcaaaatggaaaacgtcctcaacgtcggactcatcccgttattgtgcgtcggcgaaagcctcgaagagcgcgaagccggcaaagaacacgaagtcatcgcccatcagctttccatcctccaaggactggacaccaaaaacatcgccgtcgcctacgaacccgtctgggcaatcggcaccggcaaagtcgccaccgtcgaacagattgccgatatgcacgcattcatctacaaagaaatcttgtctttgtgcggaagcgatgttaaaatccgcgtcctttacggcggaagtgtgaaagcggacaacgcggccgacatcttcgcagtaccttatgtggacggcgcactcgtcggcggcgcgtcattgtcgtacgactcctttaccgccatcatcagtgccgcacaaaatgcgtag

SEQ ID NO: 54972 - DNA, 687 bp, Neisseria meningitidis
atgaaaacgattaatcctgaaaccaccgtcatcgtcttcgacttggacgataccctgtattcggaatacgaatacaagctctccggtatccgttcggtcatcgataccgttgccgcactgtatcccgattggaattcagacaacctatggcgcaacatcgaccccgacggcaaagattggctggacaaattgtgccgccactgtggttttaatgaatcggaaaaacaggttcttttgtggcaataccggctgcaccgcccgacgctgactccgtatgctccgccggatttcctgtccgaactgaccgcgcccttcgccgcacgcgcgctgattaccgacggcagaagcctgacccaacgcctgaagctggaagccttgggtctgtcttccctgtttgacgacatcctcatctctgaagcctgctcttcggaaaagcccgacggcaaacgcttccgccatcttcaagacaaatatgccgacaaggcaggctgcttcatctatatcggcgacaacatttccaaagactttatcgcgccgaacactttgggctggataaccataggattgcttccctccggacagaacatccaccgccaccagcctgaaagttttaacacagaatatcatcccgacttttgggttaactcccttcaagatttagttcctataattgattcaaatacttaa

SEQ ID NO: 54973 - DNA, 858 bp, Neisseria meningitidis
atgaattacgccctagacgcattatggtggaagctcaccagccaacccgtccgcgacctcgcctcgctgctgactgcgccgcctttgtggcaaagcggttgcgaattgggcgtgcgcgaactattgggggaacgcggtttccgctatcttttggcattggatgccgatcccgcgccgctgacggaacacctcacccgacgcgccccgttcggacaccgcctcggcatttacgccgaagaactgctggcattttggtttgccaacgcgccacacgccgaactgctcgcgcacaacctcacggtttccggttcggacggcaatacgcaaggcgcggcggattttgtggtaaggcttaacggcaagccctaccatatcgagctgacctgcaaatattacggcggcggcacgggcaggctcgaagacatgcgcggactcgaccccaaagacacgctgttgggaaaagccgccaaactgaccgcccaactcggtctgccgcacacttcagacggcatccgaaccttgcggcaacacggtctgccgcttgacgtaaaacccgtttccatcgtgcgcggcatcggattttttccacacggtttccatgcttttgagccaccgcttaatccatacggttggcgcggcatctatattcaagattgggcggaatacgggtttaaacgccaagaagtccgctaccatctgctcgaccgtatggcctacctcgcgcctgcgcgtgtcgccgaaaccgaaacattgaacgcaaccgaaatccgccgtatcgaccaaggcttgattgccgttttggaatgtcggccggacggcttttggcacgaaatcgaacgcattatgaaggccgtctga

SEQ ID NO: 54974 - DNA, 321 bp, Neisseria meningitidis
atgatgggcaacaaattgaccccgcctgccaaactgcctgacgaacaggatttgcgggcggtattggcatacaatatgcggcttttccgcgtgaacaagggttggtcgcaagaagaattggcgcggcaatgcggtttggacaggacttatgtgtcggcagtcgagcgcaaacgctggaacatcgccctgtcgaatatcgaaaaaatggcggcggctttgggcgtggcggcgtatcagttgctgctgccgccgcaggaacggttgaagctgatgaccaattccgccgatacccgacaaatgccgtctgaaagcggtatttga

SEQ ID NO: 54975 - DNA, 876 bp, Neisseria meningitidis
atgaaaggcattattctcgcaggcggcagcggtatccgcctttacccgattacccgcggcgtatcaaagcaattactaccggtgtacaacaaaccgatgatttattaccccttgtcggtgttgatgttggccggaatccgcgatgtgctggtgattaccacccccgaagacaacgatgctttccgccgcttactgggtgatggcagcgatttcggtattcaaatttcctacgccatccaacccagccccgatggtttggcgcaagcctttttaattggtgaagaatttatcggcgatgattcggtgtgtttggtgttgggcgacaatattttctatggccagcatttcagccaatccctgaaagaagccgccgcttccgtggaaaccaaaggtgctaccgtattcggctatcaagtgaaagatcccgagcgtttcggtgtgattgagtttgatgagaatttcaaagccctgtcaatcgaagaaaaaccgaaacaacctaaatccgattgggcggtaaccggcctctatttctacgataatcgcgtagtcgagtttgccaaacaagtgaagccgtctgaacgcggcgaattggaaattaccaccttgaatcaaatgtatttggacgatggttcgctcaatgtccaattgctcggtcgcggtttcgcatggcttgataccggcacacacgccagcctgttggaagcagcctcgtttgtcgaaaccattgaaaacattcaaaacctacaagtcgcctgtttggaagaaatcgcatggcgtaatggctggttgagcagcgaagaaatcagaaacttggcaaagccaatgtgtaaaaatgaatatggccgctatttattgcgcttggttggcaaagattaa

SEQ ID NO: 54976 - DNA, 1209 bp, Neisseria meningitidis; identical to SEQ ID NO: 38616

SEQ ID NO: 54977 - DNA, 894 bp, Neisseria meningitidis
atgattattgtcatgagcaggcgtgccgccgaagcggacattgccggcgttgtcgcctttatccgcagcagaggtctgcgagaacacatttctcacggcgacgagcgtaccgtcatcggcgcaatcggcgacgatagggttttgagcgtcagggaggtgcagacgctgccggaggtcgagaaagccgtccgcattttggatacatggaaaaccgtcagtcgggaaaatcgggcggaagacagccgcgttgccgccaaaggcgtggctttcggcggcggggaaaccgtctgtatcgccgcagaaccgtcagtatggcgcaatgcggatgcagtgtttctggatccgtttttcacttcggcaaacttatacgacacttcaagtgcggatgaagggcggggacggtgcagacggttggcggaacagaccgcatcggcgcatgatgcagggaaacccgtattggtgcgcgtccgcaacgtccgccatgtcgaagcggctttgaatgcgggggcggacatcctgtatttgggcggcgggctgatgtccgatcttgccgtattgaatgaagccggaaacctgaacattcccttggtgctgtgtaaagacaagcaccattctgccgaagattggttgaatgccgcagaatatgtcgtctcgcgcggcaaccgccacctgattctgggcgagtcgggcgtattgaaccataccaaaggccatccctaccgtttggatgtcgaatccatcgtgaaagtccgccaaatcagccatctgcccgtgattgcgaatattacgggattatggaaccgcgatatgccgcaggaaatcctgtacggcttggcaaaggcggcaggcgcgtgcggaatcgtcggaacctgttttgaaaagtcgggcggatag

SEQ ID NO: 54978 - DNA, 558 bp, Neisseria meningitidis; identical to SEQ ID NO: 41264

SEQ ID NO: 54979 - DNA, 330 bp, Neisseria meningitidis; identical to SEQ ID NO: 37077

SEQ ID NO: 54980 - DNA, 1341 bp, Neisseria meningitidis
atgttgaatccatcccgaaaactggttgagctggtccgtattttggaagaaggcggctttattttcagcggcgatcccgtgcaggcgacggaggctttgcgccgcgtggacggcagtacggaggaaaaaatcatccgtcgggcggagatgattgacaggaaccgtatgctgcgggagacgttggaacgtgtgcgtgcggggtcgttctggttgtgggtggcggcggcgacgtttgcgttttttaccggtttttcaggcacttatcttctaatgggcaatcagggtctgaatttctttttggttttggcgggcgtgttgggcatgaatacgctgatgctggcagtatggttggcaatgttgttcctgcgcgtgaaagtggggcgttttttcagcagtccggcgacgtggtttcggggcaaagaccctgtcaatcaggcggtgttgcagctgtatgcggacgagtggcggcaaccttcggtacgttggaaaataggcgcaacgtcgcacagcctgtggctctgcacgctgctcggaatgctggtgtcggtattgttgctgcttttggtgcggcaatatacgttcaactgggaaagcacgctgttgggcgattcgtcttcggtacggctggtggaaatgttggcatggctgcctgcgaaactgggttttcccgtgcctgatgcgcgagcggtcatcgaaggtcgtctgaacggcaatattgccgatgcgcgggcttggtcggggctgctggtcggcagtatcgcctgctacggcatcctgccgcgcctgctggcttgggtagtgtgtaaaatccttttgaaaacaagcgagaacggcttggatttggaaaagccctattatcaggcggtcatccgccgctggcagaacaaaatcaccgatgcggatacgcgtcgggaaatcgtgtccgccgtttcgccgaaaatcgtcttgaacgatgcgccgaaatgggcggtcatgctggagaccgagtggcaggacggcgaatggttcgagggcaggctggcgcaggaatggctggataagggcgttgccaccaatcgggaacaggttgccgcgctggagacagagctgaagcagaaaccggcgcaactgcttatcggcgtgcgcgcccaaactgtgcccgaccgcggcgtgttgcggcagatcgtccgactttcggaagcggcgcagggcggcgcggtggtgcagcttttggcggaacaggggctttcagacgacctttcggaaaagctggaacattggcgtaacgcgctggccgaatgcggcgcggcgtggcttgagcctgacagggcggcgcaggaagggcgtttgaaagaccaataa

SEQ ID NO: 54981 - DNA, 279 bp, Neisseria meningitidis
atgcatacagaactcaacaacggaacactgcacatcagcggcgacgtaaccgtcaaaaccctgaccgccgccgcctttacccgcttcagacagcaatgtcgtctgaaagacacccgcgcggttgatttgagcggcgtcggacgcgccgattccgcctgcgtgtcgctgctgctcgaagtgctgcgcggttgcaaaggcagcgtcaggctgaccggcattcccgaatccgtgcgcgcgctgtccgaactgtacgaaatcaaagactggctgaaatcatga

SEQ ID NO: 54982 - DNA, 264 bp, Neisseria meningitidis; identical to SEQ ID NO: 39198

SEQ ID NO: 54983 - DNA, 729 bp, Neisseria meningitidis
atgtgccggactgccgcaaatcatcccttttcccgaaaaatatttgacttcaaactgcctatgaaccacgacatcactttcctcaccctgttcctactcggtttcttcggcggaacgcactgcatcggtatgtgcggcggattaagcagcgcgtttgcgctccaactccccccgcatatcaaccgattttggctgatcctgctgcttaacacaggacgggtaagcagctatacggcaatcggcctgatactcggattaatcggacaggtcggcgtttcactcgaccaaacccgcgtcctgcagaatattttatacacggccgccaacctcctgctgctctttttgggcttatacttgagcggtatttcttccttggcggcaaaaatcgagaaaatcggcaaaccgatatggcggaacctgaacccgatactcaaccggctgttacccataaaatccatacccgcctgccttgcggtcggaatattatggggctggctgccgtgcggactggtttacagcgcgtcgctttacgcgctgggaagcggtagtgcggcaacgggcgggttatatatgcttgcctttgcactgggtacgctgcccaatcttttggcaatcggcattttttccctgcaactgaaaaaaatcatgcaaaaccgatatatccgcctgtgtacgggattatccgtatcattatgggcattatggaaacttgccgtcctgtggctgtaa

SEQ ID NO: 54984 - DNA, 354 bp, Neisseria meningitidis; identical to SEQ ID NO: 36586

SEQ ID NO: 54985 - DNA, 192 bp, Neisseria meningitidis; identical to SEQ ID NO: 42043

SEQ ID NO: 54986 - DNA, 114 bp, Neisseria meningitidis; identical to SEQ ID NO: 50896

SEQ ID NO: 54987 - DNA, 969 bp, Neisseria meningitidis; identical to SEQ ID NO: 39511

SEQ ID NO: 54988 - DNA, 846 bp, Neisseria meningitidis
atgaacaaattttcccaatccggaaaaggtctgtccggttttttcttcggtttgatactggcgacggtcattattgccggtattttgttttatctgaaccagagcggtcaaaatgcgttcaaaatcccggttccgtcgaagcagcctgcagaaacggaaatcctgaaaccgaaaaaccagcctaaggaagacatccaacctgaaccggccgatcaaaacgccttgtccgaaccggatgctgcgacagaggcagagcagtcggatgcggaaaaagctgccgataaagccgacgaggttgaagaaaaggcgggcgagccggaacgggaagagccggacggacaggcagtgcgtaagaaagtgctgacggaagagcgtgaacaaaccgtcagggaaaaagcgcagaagaaagatgccgaaacggttaaaaaacaagcggtaaaaccgtctaaagaaacagagaaaaaagctccaaaagaagagaaaaaggcggaaaaggaaaaagttgcacccaaaccgaccccggaacaaatcctcaacagcggcagcatcgaaaaagcgcgcagtgccgccgccaaagaagtgcagaaaatgaaaacgtccgacaaggcggaagcaacgcattatctgcaaatgggcgcgtatgccgaccgccggagcgcggaagggcagcgtgccaaactggcaatcttgggcatatcttccaaggtggtcggttatcaggcgggacataaaacgctttaccgggtgcaaagcggcaatatgtctgccgatgcggtgaaaaaaatgcaggacgagttgaaaaaacatgaagtcgccagcctgatccgttctatcgaaagcaaataa

SEQ ID NO: 54989 - DNA, 405 bp, Neisseria meningitidis
gtgccgtccgggaagccgccacatcccgcgcaccaagccacgacgaataaaaaatgccgtctgaacgcttcagacggcatcccgggcaaacttgcccatcgcaccctgccccgatcttgcacaaacaagcacggtacagccgatgtacccgaccacacggtttttaaagccttctgcaaaataaaggcaaaccccaccgcaatccggcgttcccctaaaaacatcttgcccaacaccccccctttttttcaggtcaaaatccaccaccgaacccgccgacggcgaaacgcagtaagtagaaagttcaagcaccacggtttccgcgcagccgcaacgttcccattcccctgtatgaaaggcagcataaaagtaccgccttcaaaccgattttcagacggcatatag

SEQ ID NO: 54990 - DNA, 897 bp, Neisseria meningitidis
ttgaatccgacgaatgatttgaaagcgtggcaacagagggcgcaggcgcaaacagagctgctgctggaacgctttttgccgtctgaaaacgaaataccgcacacactgcacgaagccatgcgttatgcggttttggatgggggcaaacgtctgcggccgatgctggttctggcagcttcggaattaggcgaagccgtgcatgaagcagtagaacaggcaatggcggcaatcgaaatgatccatgcctattcgttggttcacgacgatatgccggcaatggacaacgacagcctgcgtcggggcaaaccgacctgccacatcaaatatggcgaagccaccgcgctactggtcggcgacgctttgcaaacccaagccttcgacgtgttaagccgtccgacagaactgcccgcagcacgccagttggcaatgttgtcggtgttggcgaaagcgggcggcagcgcgggcatggcgggcggtcaggcaatcgatttggcgaatgtcggcaaacaaatggttcaagccgatttggaacagatgcacagcctgaaaacgggtgcgctaatccgtgcggcggttttattgggggcgatgtcctgcccgaatctgtctgaagacagtctggcggtattggacgattatgcggcaaaactggggctggcgttccaagtcattgacgatgtgttggattgtgaagcggacacggcgactttgggcaagacggcgggcaaagatgcagacaacgacaagccgacttatgtgaaactgatgggcttggaagcggcgcgctcatacgcacacaaactggttgccgaagcggtcgcgctgctcgaacccttcggcgacaaagccctgcgcctgcggcagttggcagaatttgcagtcgcccgcaaatattaa

SEQ ID NO: 54991 - DNA, 717 bp, Neisseria meningitidis
ttggtcaaatgccgtctgaaaataatttcagacggcatttttatttggggagaaagtgaagtggcttcagtatttttagaaggagaagcagtcgaggtcggcaatattttctgtatcggcaggaactatgccgcacatattgaagagttaaaaaacgaaataccttccgaacctgtggtgtttatgaagccgtcaggcagcattttgaacagcggcggtacaatcttgctgcccgagtttagtagggatgtgcagtttgagtgcgaactcgtgctgctggtcggtaaggattcagacggcacgggcgagggtaaagatattttgggatgtgtcgcaggatatggtgtagggctggaccttacggcacgggatatccaatgccgtctgaaggaaaaagggctgccctggctgaaggcaaaagggttcaggcattccgcgtgcgtgtcggattttgcggcggcaggcagaatcggcaatcccgagaatgtgttgttttcattaaaacaaaacggcgtattgaaacagcgcggggataccggtttgatgatttacccgattcgggaaattttacacaaactggcggcagattacggtttggggaaaggggatttggtgtttaccggaacgccctccggcgtgggcgcaatcggtgcgggggacaatttggcattggagctggacggcttggtgcgcgcctctttcacggtagggtgttaa

SEQ ID NO: 54992 - DNA, 360 bp, Neisseria meningitidis; identical to SEQ ID NO: 52616

SEQ ID NO: 54993 - DNA, 765 bp, Neisseria meningitidis
atgccgaccgaagatattgaagagatatttatgagcgcaaacgtcagccgccttgttgttcaaaacctgcaaaaaagttttaaaaaacgccaagtcgttaaaagcttctccctcgaaatcgaaagcggcgaagtcatcggactgctcgggcccaacggtgcgggtaaaaccaccagcttctacatgatagtcggactcattgccgccgatgcgggcagcgtgatgctggacgggcaggaattgcgtcacctgcccatacacgaacgcgcccgcctgggtgtcggctacctaccgcaggaagcctctattttccgtaaaatgaccgtcgaacaaaacatccgcgccatcttggaaatcagaaccaaagataaaaatcaaatcgacagggaaatcgaaaaactgcttgccgacctgaatatcgagcgtttgcgcaataatcctgccccatctttgtcaggcggcgaacgccgacgcgtcgaaatcgcccgcgtactcgccatgaaaccgcattttattttgttggacgagccttttgccggcgtcgatcccatcgccgtcatcgacatccagaaaatcatcggatttctcaagtcgcgcggtatcggcgtattgattaccgaccacaacgtacgcgaaaccctcagcatctgcgatcgggcctacattatttcagacggcacggtgttggcatcgggaaaacctgatgatttggtcggaaacgaacaggttcgttctgtttatctgggtgagaacttcaaatattga

SEQ ID NO: 54994 - DNA, 606 bp, Neisseria meningitidis
atgctttgtccgaacaccgcaagaaacaaggaaaacattatgagcatcaagtccgacaaatggatacgccgaatgagcgaagaattcggcatgatcgaccctttcgagccgaaccaaatcaaagaagccgacggcaaacgcatcatctcctacggtacgtccagctacggctacgacatccgctgcgcaaacgaatttaaaatcttcaccaacatcaacagcaccatcgtcgatcccaaaaacttcgacccgaaaaacttcgttaccgttgaagacgactgctgcatcatcccgcccaattccttcgcactggcgcgcacggtcgaatatttccgcatcccgcgcaacgtcctgaccgtctgcttgggcaaatccacctacgcccgctgcggcatcatcgtcaacgttaccccgttcgagccggaatgggaaggctacgttaccctcgagttttccaacaccacccccctgcccgccaaaatctacgccggcgaaggcgtggcgcaagtcctcttcttcgagagcgacgaaatctgcaaaacctcatacaaagaccgcaacggcaaatatatggggcaaaccggcgttaccctgcctaaagcctga

SEQ ID NO: 54995 - DNA, 570 bp, Neisseria meningitidis
atggcggcaggcaaacataccaaacacagcaaccgggtacgcattatcggcgggcaatgccggggcaggaaattgagtttcacatccgccgacggactgcgtccgacacccgacagcgtgcgtgaaaagctgtttaactggctgggacaggatttgacgggtaaaacggttttggatctcttcggaggcagcggcgcactcggtatagaagccgcttcgcgcaacgccaaacgcgtgctgatttcggataacaaccgccaaaccgcgcagaccttgcagaaaaacagtcgcgaactgggtttggggcaggtgcaaatcgtctgttcagacggcatcgcatatttgaagaccgtatccgaacagtttgatgttgtctttctcgacccgccgtttgcatggcaggactggcaaatcctgtttgatgccttgaagccgtgcctgaacccccgggcattcgtctatctcgaggcgggtacgctgccgaatattcccgattggctgacggaatatagagaagggaaatcggggcagagtacatttgaattaagggttttccaagtggctgaataa

SEQ ID NO: 54996 - DNA, 501 bp, Neisseria meningitidis; identical to SEQ ID NO: 41327

SEQ ID NO: 54997 - DNA, 780 bp, Neisseria meningitidis
atgaaagaacacaaagcccgcaagcgtttcgggcagaattttttgcaggacacgcggattatcagcgatattgtcaacgccgtgcgcccgcaggcggatgatgtcgtgattgaaatcggtccgggtttggcggcgattaccgaacctttggcgaaaaagctgaaccgcctgcacgttgtcgaaatcgaccgcgacatcgtatgccgtctgaaaacgctgccgtttgcggacaagctcgtcattcatgaaggcgacgtgttgcagtttgatttcaacggcatcgcaggcaaaaagaaaatcgtcggcaacctgccgtacaacatttccacgccgcttttgttcaagctggcggaggtggcggacgatgtcgtcgatatgcactttatgctgcaaaaagaagtggtcgagcgtatggttgccgcgccgaaaagcaacgactacggccgcttgggcgtgatgttgcaatatttcttcgatatggaaatgctgattgacgtgccgcccgaatcgttcgaccccgcgccgaaagtcgattccgccgtcgtccgcataattccggtgaaacaccgcatcggcagggcggacgatttcgagtatttcgccaaactcgtgaaactcgccttccaccaacgccgcaaaaccatacgcaacaatctgaaagagcttgcaggcgacgatgatttgcaggcagtcgacatcaatccgcaagaccgtgccgaacatatcgcgccggagaaatatgtggcgttgagcaattatctagcgggcaaggccgtctga

SEQ ID NO: 54998 - DNA, 1518 bp, Neisseria meningitidis
atgtctcctaaaaaaatacccatttggcttaccggcctcatcctactgattgccctaccgcttaccctgccttttttatatgtcgctatgcgttcgtggcaggtcggcatcaaccgcgccgtcgaactgttgttccgcccgcgtatgtgggatttgctctccaacaccttgacgatgatggcgggcgttaccctgatttccattgttttgggcattgcctgcgcccttttgttccaacgttaccgcttcttcggcaaaaccttttttcagacggcaatcaccctgcctttgtgcatccccgcatttgtcagctgtttcacctggatcagcctgaccttccgtgtcgaaggcttttgggggacagtgatgattatgagcctgtcctcgttcccgctcgcctacctgcccgtcgaggcggcactcaaacgcatcagcctgtcttacgaagaagtcagcctgtccttgggcaaaagccgcctgcaaacctttttttccgccatcctcccccagctcaaacccgccatcggcagcagcgtgttactgattgccctgcatatgttggtcgaatttggcgcggtatccattttgaactaccccacttttaccaccgccattttccaagaatacgaaatgtcctacaacaacaataccgccgccctgctttccgctgttttaatggcggtgtgcggcatcgtcgtatttggagaaagcatatttcgcggcaaagccaagatttaccacagcggcaaaggcgttgcccgtccttatcccgtcaaaaccctcaaactgcccggtcagattggcgcgattgtttttttaagcagcttgttgactttgggcattattatcccctttggcgtattgatacattggatgatggtcggcacttccggcacattcgcgctcgtatccgtatttgatgcctttatccgttccttaagcgtatcggctttaggtgcgattttgactatattatgtgccttgccccttgtttgggcatcggttcgctatcgcaattttttaaccgtttggatagacaggctgccgtttttactgcacgccgtccccggtttggttatcgccctatccttggtttatttcagcatcaactacacccctgccgtttaccaaacctttatcgtcgtcatccttgcctatttcatgctttacctgccgatggcgcaaaccaccctgaggacttccttggaacaactccccaaagggatggaacaggtcggcgcaacattggggcgcggacacttctttattttcaggacgttggtactgccgtccatcctgcccggcattaccgccgcattcgcactcgtcttcctcaaactgatgaaagagctgaccgccaccctgctgctgaccaccgacgatgtccacacactctccaccgccgtttgggaatacacatcggacgcacaatacgccgccgccaccccttacgcgctgatgctggtattattttccggcatccccgtattcctgctgaagaaatacgccttcaaataa

SEQ ID NO: 54999 - DNA, 1504 bp, Neisseria meningitidis
atgagtcgtgaaatgttacagctggcagaagcactggcaagcgaaaaaaacgttgatgcggaagtcgtcttccaagcactggaattcgccctgtctaccgccgccaagaaaaaggcagaccgcgaacacatggatgtccgcgtacaaatcaaccgcgacaccggcgaataccaaaccttccgccgctggctgattgtcgccgatgaagactatacctatcccgatgtcgaaaaaaccatcgaggaaatccaagaggaaattcccggcaccgccatccaaatcggcgaatactacgaagagcagctgcccaacgaaggcttcggccgccaagccgcgcaaaccgccaaacaaatcatcctgcaacgcatccgcgatgccgagcgcgagcagaatctgaacgagtttctcgccgtcaaagaagacatcgtgtctggcacggtcaaacgcgtcgaacgccacggcatcatcgtcgaagtcgttgccggcaaactggacgcgctgattccgcgcgaccaaatgattccgcgcgaaaacttccgcagcggcgaccgcatccgcgccctcttcctgcgcgtcgaagaaatcggcaacaccggccgcaaacaagtcatcctgagccgtacttccggcgatttcctcgtcaaactgtacgccaatgaagtacctgaaattgcagacggcatgcttgaaatccgtgctgtcgcccgcgacccgggccagcgtgccaaagtcgccgtcaaagccaacgaccagcgcatcgatccgcaaggcacctgtatcggcgttcgcggttcgcgtgtcaatgccgtcagcaatgaattgtccggcgagcgcatcgacgttgtcctttggtcgcccgagcctgcccaattcgtcatgagcgcactctcacccgccgaagtcagccgcatcgtcatcgacgaagacaaacacgccgtcgatgtcatcgttgccgaagaccagctcgcgctcgccatcggacgcggcggtcaaaacgtgcgccttgcttccgacctgaccggctggcagctcaacatcatgacctctgcagaagcagacgagcgcaatgcggcagaagatgccgccatccgccgcctgtttatggattacttgaacgtggacgaagaaaccgccgacgtactggttcaggaaggttttgcaaccttggaagaagtcgcctatgttcctgccgccgaactgcttgccattgaaggatttgacgaagaaatcgtcgatatgctccgcaaccgcgcccgcgatgccatcctgaccatggcgattgccgccgaagaaaaactgggcgaagtgtccgacgatatgcgcaacctcgaaggcatagatgccgatatgctccgcagccttgccgaagcaggcattactacccgcgacgacttggcagaactgtccgtggacgaactgattgaaatcaccggtgtaaacgaagaaaccgcaaaagccgtcatcctgaccgctcgcgaacactggtttaccgaagacaaataaa

SEQ ID NO: 55000 - DNA, 627 bp, Neisseria meningitidis
atgaggaaaatccgcaccaaaatctgcggcatcaccacaccggaagacgcatcggccgccgtagcggcaggtgcagatgccgtcgggctggtctttttccaaggcagcagccgggccgtcgatattgcccgcgccaaaaaaatcaccgccgcactgccgccgtttgtcagcgttgtcgcccttttcgtcaacgaaagcgcgcaaaacatccgccgcatccttgccgaagtgccgatacacatcatccaattccacggcgacgaagacgacacattctgccgtcagttccaccgcccctatatcaaggccattcgtgttcagacgacatcagacatccgaaacgccgccgaccgcttccccgacgctcaggcactgcttttcgatgcctaccatccttcggaatacggcggcaccggacaccgcttcgactggacgctgctggcggaatattcgggcaaaccgtgggtacttgccggcgggctgacccctgaaaacgtcggcgaagccgtccgcatcaccggagcggaagcggtcgatgtatccggcggcgtggaagcgtctaaaggcaaaaaagacccagccaaagtcgccgcctttatcgcaaccgccaaccgcctatcccgttaa

SEQ ID NO: 55001 - DNA, 3891 bp, Neisseria meningitidis
atgacctaccccatccccaaaccccgtgaaaaatcccgttggctcaatctgtctcaaggctcgctacccttggctttggcgcgttatctgccgcataggcggctcaaagtcgtgctgacccaagatgcggaacaggcgctacgccttcagacggcgtggcggtttttccgtccgcacgatacggcggtgttcctgccggactgggaaacgctgccttacgagcgtttttcgccgcatcaggatttggtgtcggagcgtttgtcggcgttgtggcagattaaaagcggcgcggcggacgtgttgttcgtgccggttgccacggcgatgcagaagctgccgcccgtgccgtttctggcggggcgcacgttttggctgaaaacgggacagactttggatataggccgtctgaaaagcgatttggtggatgcaggttataaccatgtttcccacgttgtcgcggcaggcgagtttgccgtgcgcggcggcattgtggatttgttcccgatgggcagcgaaatgccgtaccgcatcgatttgttcgacgatgaaatcgacagcatcaaaacctttgacaccgagacgcagcgcaccatctcccccgtttccgaaatccgtctgctgccggcgcacgagttccccaccgacaacgaggcgcaaaaaatcttccgcagccgttttcgcgaggaagtcgatggcaatccgaacgatgccgctgtgtacaaagccgtcagcaacggtcatttcggcgcgggcgtggaatactacctgccgctgttttttgaaaacgagttggaaacgctgtttgactatatcggcgaagatgcgctgtttgtctctttaggcgatgttcatgccgaggcaaaccgtttttggagcgatgtcaaatcgcgttacgcgatggcgcagggcgacgaaacctatccgcctttgcttccacagtatttgtatctctctgccgatgtgttcgcaggccgtctgaaaaactacggacaggtgctgcccgatgtttccggcaaggaatacaccctgcccgaccttgccgtcaaccgccaagcagatgagccgttgcaggcattgaaggattttcagacggcgtttgacggacggattttgctgtgcgccgaaagtttgggacggcgcgaaactatgctcggtttcttgcagcaaaacggtttgaaagccaaacccgtgtccgactggcagggctttttatcggcacacgagccgctgatgattactgttgcgccgttggcatacgggttcaaactgggcgggctgcaatctccgagccaacagcaagctgctcccgcctccgaaggagaaggcgatgcgattaccgaccaaaccgaattttccgcatccgcaacaaaccctctccctagccctctcccgcaggagagggaacaaagtgccgccgccgtttcagacgacctgaaaaccaaaagcagcctgcatcccgtcgcaaataatctgtacggacaaacccgacagcaagctgccccctcccccgtgggggaagattggggagagagcaaaacagttgccgctcaaaccgaattttccgtatccgcaacaaaccctctccctagccctctcccacaggagagggaacaaagtaccgccgccatttcagacagtctgaaaaccaaaagcagcctgtaccccatcgaaaatagtctgcacgggcaaatccaacagcaacctgccccctcccccgtgggggagggttggggagagggcaaagcagttgccgctcaaagtgccatcgccgtcatcaccgaatccgatctctaccaatacgtcgcccgttcgcgcatccacaaccgccgcaagaaacacgccgccgtttcagacgacctgttgcgcgaccttgccgaaatcaacatcggcgaccccgtcgtgcacgaggaacacggcatcggccgatatatgggcttgataacaatgaacttgggcggcgaaaccaacgaaatgatgttgctcgaatatgcgggcgaagcgcagctttatgtgcctgtttcgcaactgcatttaatcagccgctactccggtcaggcgcatgaaaacattgccctgcacaagctcggcagtggcgcgtggaacaaggcgaagcgcaaagccgccgaaaaggcgcgcgataccgccgccgagttgcttaacctttacgcccgacgtgccgcccaatcgggacacaagtttgaaatcaacgagttggattatcaggcgtttgccgacggcttcggctacgaagaaaccgaagaccaggccgccgccatcgccgccgtgattaaagatttgacgcaggcgaagccgatggaccgcctcgtgtgcggcgatgtcggtttcggcaaaaccgaagtcgccctgcgcgccgcatttgtggcggtgatgggtggcaaacaggtcgccgtactcgccccgaccacgcttctggtcgagcagcacgcgcaaaactttgccgaccgtttcgccgatttccctgtgaaagtcgccagcctttcgcgtttcaacaacagcaaagccactaaagccgcgctggaaggcatggcggacggcacggtcgacatcgttatcggcacgcacaaactggtgcaggacgacatcaaattcaaaaacttaggtttagtgattatcgacgaagaacaccgcttcggtgtccgccaaaaagagcagctcaaacgcctgcgcgccaatgtggacatcctcaccatgaccgccacgccgattccgcgtactttaagtatggcgttggaaggactgcgcgacttctcgctgattaccaccgcgcccagccgccgcctcgccgtcaaaacctttgtcaaaccctttagcgaaggcagcgtgcgcgaagccgtgttgcgcgaactcaaacgcggaggacaggtatttttcctgcacaatgaagtagatacgattgaaaatatgcgcgagcggctggaaaccctgctgcccgaagcccgcatcggcgtggcgcacggacaactgcgcgagcgcgagctggaacaagtcatgcgcgactttttgcagcaacgatttaacgtgttgctctgctccaccatcatcgaaaccggcatcgacatccccaacgccaacaccatcatcatcaaccgcgccgacaaattcgggctggcgcaactgcaccagcttcgcgggcgcgttggccgcagccaccatcaagcctacgcctacctgctcacgcccgaatacatcaccaaagacgcagaaaaacgcctcgacgccatcgcggcggcagacgaactcggcgcaggtttcaccctcgccatgcaggatttggaaatccgcggcgcaggcgaaatcctcggcgaagggcagtccggtgaaatgatgcaggtcggcttcacgctctacaccgaaatgctcaaacaggccgtgcgcgacctcaaaaaaggccgccaacccgacctcgatgcaccgttgggcattaccaccgaaatcaaactgcacagccccgccctgctgcccgaaagctactgccccgacatccacgaacggctcgtcctctacaaacgcctcgccgtctgcgaaaccgtacagcaaatcaatgccatacacgaagaactcgtcgaccgcttcggactgcccgagcaacccgtcaaaacccttatcgaaagccaccacttacggcttatggcaaaagaattgggtatcaatgccattgatgcggccggcgaagcggtaacggtaacctttggcaaaaacaacaatattgatccaaccgaaatcatcctgctgattcagaacgacaaaaaataccgccttgccggcgccgataagctgcggtttaccgcagagatggaaaatatcgaggtcagaatcaacaccgtaaaaaacgttttaaaaaccttgcaaaacagatgcctgcccaaataa

SEQ ID NO: 55002 - DNA, 540 bp, Neisseria meningitidis
atgaatatcatcgatacccgcattcccgatgtcaaattgctcgaacccaaagtcttcggtgacgagcgtggtttttttatggaaaccttccgtgatgaatggttccgccaaaatgtagccgagcgcactttcgtgcaggaaaaccacagcaaatccacccaaggcgtattacgcggtttacattatcaaaccgaaaatacacaaggcaaactggtgcgcgtggtatcaggcgaagtctttgatgttgccgtggatatgcgtcgtgatagtcctactttcggccactgggtcggtgaggttttatcggcagacaacaaacgccaattatgggtgccggaagggtttgcccatggattttatgtgttgagcgatgaagcggaattcgtctacaaatgcaccgactattacaacccgaatgcggaacattccctaatttggaatgatgccacagtgggaatcgactggcctttattgggagaaccaagcctatcggccaaggatttggcaggcaagatgcttgctgaagcggccacattttaa

SEQ ID NO: 55003 - DNA, 246 bp, Neisseria meningitidis; identical to SEQ ID NO: 38257

SEQ ID NO: 55004 - DNA, 381 bp, Neisseria meningitidis; identical to SEQ ID NO: 42684

SEQ ID NO: 55005 - DNA, 720 bp, Neisseria meningitidis
atgacacagcaaatcaaatacaaacgcgtattactgaaactctccggcgaatccctgatgggttccgatccgttcggcatcaatcacgataccatcgttcaaactgtcggcgaaattgccgaagtcgttaaaatgggcgtgcaagtcggtattgttgtcggcggcggcaatattttccggggcgtatccgcccaagcaggcagcatggatcgcgccaccgccgactacatgggcatgatggcgaccgtgatgaacgcgttggcactcaaagacgcatttgaaactttaggcatcaaagcgcgcgtacaatccgcactgtctatgcagcaaatcgctgaaacttacgcccgtcctaaagccatccaatatttggaagaaggcaaagtcgtgatttttgccgccggtaccggtaacccgttcttcacgaccgacactgccgccgcattgcgcggtgcggaaatgaactgcgacgtgatgctcaaagccaccaacgttgacggcgtgtacaccgcagaccccaaaaaagactcatccgccacgcgctacgaaaccattacttttgacgaagccttgttgaaaaacctcaaagtgatggatgccaccgctttcgccctctgccgcgaacgcaagctcaatattgtagtattcggcattgctaaagaaggctcgctcaaacgtgtagtaaccggtgaaaacgaaggtacgctggttcactgctga

SEQ ID NO: 55006 - DNA, 183 bp, Neisseria meningitidis; identical to SEQ ID NO: 38466

SEQ ID NO: 55007 - DNA, 759 bp, Neisseria meningitidis
atgaaacagaaaaaaaccgctgccacagttattgctgcaatgttggcaggttttgcggcagccaaagcacccgaaatcgacccggctttggtggatacgctggtggcgcagatcatgcagcaggcagaccggcatgcggagcagtcccaaaaaccggacgggcaggcaatccgaaacgatgccgtccgtcggctgcaaactttggaagttttgaaaaacagggcattgaaggaaggtttggataaggataaggatgtccaaaaccgctttaaaatcgccgaagcgtctttttatgccgaggagtacgtccgttttctggaacgttcggaaacggtttccgaaagcgcactgcgtcagttttatgagcggcaaatccgcatgatcaaattgcagcaggtcagcttcgcaaccgaagaggaggcgcgtcaggcgcagcagctcctgctcaaagggctgtcttttgaagggctgatgaagcgttatccgaacgacgagcaggcttttgacggtttcattatggcgcagcagcttcccgagccgctggcttcgcagtttgccgcgatgaatcggggcgacgttacccgcgatccggtcaaattgggcgaacgctattatctgttcaaactcagcgaggtcgggaaaaaccccgacgcgcagcctttcgagttggtcagaaaccagttggaacaaggtttgagacaggaaaaagcccgcttgaaaatcgatgccattttggaagaaaacggtgtcaaaccgtaa

SEQ ID NO: 55008 - DNA, 1179 bp, Neisseria meningitidis
atgacaggcagaacaggcggcaacggcagtacccaagcgcaacccgaacgcgtcatgctggtgggcgtaatgttggacaaagatggtacgggcagtagtgccgcccgtctgaacggttttcagacggcattggcggaagctgtcgagctggtcaaagcggcgggcggcgattccgtgcgcgtggagactgccaaacgcgaccgtccgcacaccgcgctgtttgtcggcacgggcaaggcggcggagctgtcagaagcagttgccgcagacggcatcgatttggtcgtattcaaccacgaactcacgcccacgcaggaacgcaaccttgaaaaagaactgaaatgccgcgtattggacagggtagggctgattctggcgattttcgctcgccgcgcccgcacgcaggaaggcaggctgcaagtcgagttggcgcaattgagccatttggcgggacgcttgatacgcggttacggccatctgcagagccagcgcggcggtatcggcatgaaaggccccggcgaaaccaaactggaaaccgaccgccgattgatcgcccatcggatcaatgccttgaaaaaacagcttgccaacctcaaaaaacagcgcgccctgcgccgcaagtcccgcgaatcgggcacaatcaaaacgtttgcgctggtcggctataccaatgtcggcaaatccagcctgttcaaccggctgaccaagtcgggcatatatgcgaaagaccagcttttcgccacactcgacacgacggcgcggcggctgtacatcagtcccgaatgcagcattatcctgaccgataccgtcggattcgtcagcgatctgccgcacaaactgatttccgccttttccgccacgctggaagaaaccgcgcaagccgatgtgctgctgcacgtcgtcgatgccgccgctccgaacagcggacagcagattgaagacgtggaaaacgtactgcaagaaatccatgccggcgatattccgtgcatcaaggtgtacaacaaaaccgacctgctgccgtctgaagaacaaaacacgggcatatggcgcgacgctgcgggaaaaattgccgccgtccgcatttccgttgctgaaaataccggtatagacgcactgcgcgaagccattgccgagtcttgtgccgccgcaccaaacacagacgaaaccgaaatgccatga

SEQ ID NO: 55009 - DNA, 2277 bp, Neisseria meningitidis
atgacaacattacatttctcaggcttcccgcgtgtcggcgccttccgcgaattgaaattcgcacaagaaaaatactggcgcaaagaaatcagcgagcaagaattgctggctgttgctaaagacttgcgcgagaaaaactggaaacaccaggtcgctgccaacgccgatttcgttgccgtaggcgatttcactttctacgaccacatcctcgacctgcaagtcgccaccggcgcgattcccgcccgcttcggcttcgacagccaaaacctgtctttggaacaattcttccaactggcgcgcggtaacaaagaccaattcgctatcgaaatgaccaaatggttcgacaccaactaccactacttggtgcctgaattccacgccgataccgaattcaaagccaatgccaaacactatgttcaacaactgcaagaagcccaagccctcggtctgaaagccaaaccgaccgttgtaggtccgttgactttcctgtgggtgggtaaagaaaaaggcgccgtcgaattcgaccgtctgagcctgttgcctaaactgttgcctgtttacgttgaaatcctgactgctttggttgaagccggtgccgagtggattcaaatcgacgagcctgctttggctgtcgatttgcctaaagaatgggtggaagcctacaaagacgtttacgctactttgagcaaagtaagtgccaaaatcctgttgagcacttacttcggttctgttgccgaacacgccgcattgttgaaagccctgcctgttgacggtctgcacatcgacttggtacgcgcccccgagcaactggacgcgttcgccgactacgacaaagtcctgtctgccggcgtgattgacggccgcaacatttggcgcgccaacctgaacaaagttttggaaactgtcgagcctctgcaagccaaactgggtgaccgtttgtggatttccagctcttgctcgctgctgcacactccatttgacttgtcagttgaagaaaaactgaaagccaacaaacccgacctgtactcttggttggcattcaccctgcaaaaaacccaagaattgcgcgttctgaaagctgcattgaacgaaggccgtgattctgttgccgaagaactcgccgccagccaagctgctgccgactcccgtgccaacagcagcgaaatccatcgtgcagacgttgccaaacgcctggccgatttgcctgccaacgcagaccaacgcaaatctccatttgccgaccgtatcaaagcgcaacaagcatggttgaacctacctctgctaccgactaccaacatcggttctttcccgcaaaccaccgaaatccgccaggcacgctcagccttcaaaaaaggcgaactgtctgccgccgattacgaagccgcgatgaaaaaagaaatcgccttggtggttgaagagcaagaaaaactggacttggacgtactggtacacggcgaagccgagcgtaacgacatggttgaatacttcggcgaattgttgagcggttttgcattcactcaatacggctgggtacaaagctacggctcacgctgcgtgaaaccaccgattatctttggcgacgtaagccgtcctgaagccatgaccgtggcttggtctacttacgcacaaagcctgaccaaacgcccgatgaaaggtatgttgaccggccctgtaaccattctgcaatggtctttcgtccgcaacgacattcctcgctctaccgtgtgcaaacaaatcgcactggctctgaacgacgaagtattggatctggaaaaagccggcatcaaagtcatccaaattgacgaacctgccatccgcgaaggcttgccgctgaaacgcgccgattgggatgcctacctgaactgggcgggcgaatccttccgcctgtcctctgccggttgcgaagacagcacccaaatccacactcatatgtgttactccgagttcaacgatatcctgcctgcgattgctgcaatggatgcggacgtgatcaccatcgagacttcacgttccgacatggaactcttgaccgcgttcggcgaattccaatacccgaacgacatcggcccgggggtttacgacatccacagcccgcgcgtaccgacagaagccgaagtggagcacctgttgcgcaaagccatcgaggttgtaccggttgaacgtctgtgggttaacccggactgcggcctgaaaacacgcggctggaaagaaactctggaacaactccaagtaatgatgaacgtaacccgaaaactgcgtgccgaattggcgaaataa

SEQ ID NO: 55010 - DNA, 2256 bp, Neisseria meningitidis
atgggacagtacaagaagctgtggtacttgctgtttgccgttctggcggtatgctttaccattcttggctatatgggcagcgaggtttacaaaaaagccccgccttaccctgaacaagtcgtttctgcatccggcaaagtcctgatgacgaaagacgatattttggcaggtcagtctgcatggcagactaccggcggtatggaagtcggctctgtattgggtcacggtgcataccaagctccggactggactgccgactggctgcaccgtgagctggttgcatggttggatctgactgcgcaagaaacttacggcaaaaaatttgacgaagtttctcctgaagaacaagctgttctgaaaacccgtttggctgacgaataccacaaccaaagccgtattaaggaagatggttctgtcgttgtcagcgaaacccgcgtgaaagcgatcgaaagcatcctgccttactaccacggtgtgtacagcgacgatcctaagtttcaaaccactcgcgaacacttcgcaatgaaaaacaatacattgccaagccaagaagcgcgtgaaaaactgttcgacttcttcttctggacttcttggtctgcttcgaccaaccgtcctgacgagaacttcacctacaccaacaactggccgcatgagcctctgatcaacaacgtgccgactactgaaaactatatgtggtctttcaccagcgtggtattgttgctgatgggtatcggcttgctgatgtggggttactctttcttgaccaaacatgaagaggttgaagtacctactgaagatcctatctctaaagtacaactgactccttctcagaaagcgttgggcaaatatgtatttctgactgttgcactgtttgtcgtacaggtattgctgggcggtctgaccgcgcactacaccgtcgaaggccagggtttctacggcattgacgaggcgttgggctttgaaatgtccgactggttcccctacgccctgacccgtacttggcacatccaatccgccatcttctggattgcaaccggctttttgacggcaggtttgttcctcgcgccgattgtcaacggcggtaaagatcccaagttccaacgtgccggcgtaaacttcctctatatcgccctcttcatcgtggtcggcggttcttacgcgggcaacttcttcgcgttgacgcacatccttcccccggaatttaacttctggttcggacaccaaggttacgaatacctcgatttgggacgtttctggcaactcctgctgatggtcggcctgttgttgtggctgttcctgatgttgcgctgcacggtttccgccttcaaagaaaaaggcgtggacaaaaacctgctggcaatctttgtcgcttctatggtcggtgtgggcgtattctacgcaccgggtctgttctatggcgaaaaatccccgattgccgtaatggaatactggcgttggtgggtggttcacctgtgggtggaaggcttctttgaagtatttgccactgccgcctttgcctttgtcttctacaatatgggctttgtccgccgcagtaccgccactgcctctactctggccgctgccgccatctttatgttgggcggcgttccgggtacgctgcaccacctgtacttctccggctctacctccgcctctatggcaatcggcgcctgcttctccgctttggaagtcgtgccgctggtgttgctgggccgtgaagcatacgagcattggtcttaccaacacctgtccgactgggcgaaacgcctgcgttggccgctgatgtgcttcgtggcagtcgccttttggaatatgatcggtgccggtgtattcggtttcctgattaacccgccgatttccctgttctatatccaaggtttgaatacttctgctgttcatgcgcacgccgccttgttcggtgtgtacggtttcttggcattgggcttcgtattgctggttgcccgttatttgaaaccgaacgcgcagtttgacgacaaactgatgacttggggcttctggctgctcaacggcggcttggtcggtatgattgccatcagcctgctgcctgtcggcgcgattcaggcatacgcctccatcacgcacggtctgtggtatgcccgcagcgaagagttcctgcaaatggaaatcctcgataccttgcgttgggtacgtacggcagctgacttggtctttatcggcggtgcaatctgcgttgccatccaagctactaaaatcgtattcggccgcgataaataa

SEQ ID NO: 55011 - DNA, 1056 bp, Neisseria meningitidis
gtgtttgaaacgccgacatttgagcaaatccgcgagcgtatcctgcgcgataccaaaagcctgtggccggatgccgatatcagccccgacagcgaccattatgtgcacgccagccgtttggccagctgcgccgaagggcaatatgcgcatcaaagctggattgtgcggcagattttccctgataccgccgaccgcgagtatttggagcggcatgcctccatgcgcggcttgagccgccgcaatcctaccacggccagcggcacgctgaccgtaagcggtattgcgcaatccatgctttcagacgacctgcaagtgcgtatcggccagcgtttttaccgcactaccgcccgcgccgttatcggcagcggcggcacggcggaaataccggcaatcgccgacgagccgggcgcggccgccaatgtgcgcgacggcgaggcgcaactgatggccgcccccgccggtgtggccaccgaatgccgccttaccgtacaaggcggcaccgaccgagaaagcgatgcctcactgctggcgcgtctgttggaaatcatccgccgaccgcccgcaggcggcaaccgttacgactataaaaactgggcgttgagtgttgacggcgtaaccagcgcatatgtttatccgctgcgccgcggcttgggtacggtggatattgccattacctccgccgacggtgtgccatcggaagaaactgtgcgccgcgtacaggcttatatcgacgagatgcgcccggtaacggcaaaaaatgcgctggtactcaagccaaccgtaacggcggtgcctgttaccgtgcaagtcaagctcgacggcatcgacttggacgaggccaagcgccgcatacggacggccctaaaagaatatttcgacaccctgatccccggcgacggcctgactgtgtcgcaaatcgaggcggctatcagcaatgtggatggtgtgatcgaccgccgtctgactgcgccgacggccaaccgtgccgccgatacggttaaccgcatcgagtggtttaaagcgggcgcgattaatgtaacggagatgccgtcatga

SEQ ID NO: 55012 - DNA, 744 bp, Neisseria meningitidis
atgcctgatgccgtcaaaaaagtttacctgatacacggttggggggcgaaccgccacatgttcgacgatttgatgccgcgcctgcctgcaacgtggccggtgtccgccgtcgatttgcccggacacggcgacgcgcccttcgcgcaacccttcgatattgaggcagccgccgacgctgttgccgcacaaatcgatacgcccgccgacattctcggctggtcgctcggcggattggtcgcgctgtatctggcggcgcgccatcccgacaaagtccgttcgctctgcctgacggcgagtttcgcccgactgacggctgacgaagactatcccgaagggcttgccgcgcctgcattgggcaaaatggtcggcgcgttccgttcggattatgccaaacatatcaaacagtttctacaactccagcttctgcacacgcctgatgcggacggaatcataggcagaatcctgcccgatttggcgcgctgcggcacgccctccgccttacaggaagctttggacgcggcggaaagggcggatgcgcggcatttgttggacaagatagatgttccggtactgctggtgttcggtagcaaagacgcgattacgccgccgcgcatgggcgagtatctgcaccgccgtttgaaaggcagcaggctggttgtgatggaaaaggcggcacacgcgccgtttttgagccatgcggaagcgtttgccgcgctgtaccgcgactttgtcgaaggggtttga

SEQ ID NO: 55013 - DNA, 1332 bp, Neisseria meningitidis
atgctgttcaaccacaccgcttccgaacttctcgacctctgccgccgcacgctcgacttggcaaaagcagcgggcgcgaccgccgccgaagccgatttcagcgaatcattgggacaaagcgtcagcgtgcggctgggcgaaatcgaacaaatcgagttccagcaggacaagtcgctggacattaccgtttacgtcggcaaacgcaaaggccgcgccagcactgccgacttctccgaaaaagccctgcaagacaccgtcaaagccgccatcgacatcgcccgctacaccgccgaagacgattgcgcaggtttggcagacgcttcgcttatggcgcaacacatcggcgaccccgacctttaccacgaatgggatttggatacggaagccgccgtcgagttggcaaaacaatgcgaacaagccgccctgaacgaggatgagcgcatcgaaaactccgaaggggcggcggtgcaaaccggacattaccaatacgtttacggcaacacccacggttttgccgcacaccagcaaggcacacgccacagcatttcatgcagcgtcgttgccgccgacgaaaacggcatgcagcgcgactactggtacgattcctcctgccgccatcaagacatggacagcccgacgcaaatcggtcaaaccgccgccgaacgtaccttacgtcgtctgaacagccgcagcattccgaccggaagctaccccgtcctattcgatgcgaccgtttcgggaggtctgatcggacacctcgtcggcgcactgtccggcggctcgctctaccgccaaagcagcttcctgatcgacagcataggcaaacaggttctgcccgatttcctcagcctgcgcgaagagccgcatattccccgcgccttcggcagcacctatttcgattccgaaggcgtcgccacgcggccgcgtttcgttatccgcgacggcatcgtcgaaggctatttcctcagcagttacagcgcgcgcaaactcggtatgcagaccacgggcaacgccggcggcgcgcacaacctgtatttgaaccatacgcacgaaacgcaatccgacctgctgaaagaaatggggacgggattattggttaccgaactgatgggacagggcgcgaacaccattaccggtgactactcgcgcggcgcggcgggtttttgggtggaaaacggcgtgattgcctaccccgtccacgagattaccgtagccggacgcttgcaggatatgtaccgcgacattgtcggcgtggcggatgacgctttgcggcgttcgtccaacaaaatcggctcgattctgattgcggggatgacggttgccggaagctga

SEQ ID NO: 55014 - DNA, 234 bp, Neisseria meningitidis; identical to SEQ ID NO: 51696

SEQ ID NO: 55015 - DNA, 903 bp, Neisseria meningitidis
atggataccgcaaaaaaagacattttaggatcgggctggatgctggtggcggcggcctgctttaccattatgaacgtattgattaaagaggcatcggcaaaatttgccctcggcagcggcgaattggtcttttggcgcatgctgttttcaaccgttgcgctcggggctgccgccgtattgcgtcgggacaccttccgcacgccccattggaaaaaccacttaaaccgcagtatggtcgggacgggggcgatgctgctgctgttttacgcggtaacgcatctgcctttggccaccggcgttaccctgagttacacctcgtcgatttttttggcggtattttccttcctgattttgaaagaacggatttccgtttacacgcaggcggtgctgctccttggttttgccggcgtggtattgctgcttaatccctcgttccgcagcggtcaggaaacggcggcactcgccgggctggcgggcggcgcgatgtccggctgggcgtatttgaaagtgcgcgaactgtctttggcgggcgaaccctgctggcgcgtcgtgttttacctttccgtgacaggtgtggcgatgtcgtcggtttgggcgacgctgaccggctggcacaccctgtcctttccatcggcagtttatctgtcgtgcatcggcgtgtccgcgctgattgcccaactgtcgatgacgcgcgcctacaaagtcggcgacaaattcacggttgcctcgctttcctatatgaccgtcgttttttccgccctgtctgccgcattttttctgggcgaagagcttttctggcaggaaatacttggtatgtgcatcatcatcctcagcggtattttgagcagcatccgccccactgccttcaaacagcggctgcaatccctgttccgccaaagataa

SEQ ID NO: 55016 - DNA, 501 bp, Neisseria meningitidis
ttgggtatccatcccaattcggcagcactgttctaccgtaaaatccgcatggttatcaaccatcatttggccttggctgccgatgaggtttttgagggctctgtcgagccggacgaaagcgatttcggcggacggcgtaaaggcagacgtggtcgcggtgcggcaggaaaagtggttgtcttcggcattctgaaacgcaacggacgggtctataccgttgtggtggataatgccaagtctgaaacgttactccctgtcatcaaaaagaaaatcatgccggacagtattgtttataccgatagtctgagcagctgcgacaagttggacgtgagcggttttatccattaccgcatcaaccattccaaggaatttgcagaccgtcagaaccacattaacggcattgagaacttttggaatcaggcaaaacgcgtcttgcgaaaatatagtggattggcacgaacgtttccccgaattggaagcgcaactgggtgcgccgattga

SEQ ID NO: 55017 - DNA, 471 bp, Neisseria meningitidis; identical to SEQ ID NO: 42963

SEQ ID NO: 55018 - DNA, 354 bp, Neisseria meningitidis; identical to SEQ ID NO: 42785

SEQ ID NO: 55019 - DNA, 1563 bp, Neisseria meningitidis
gtgtttcaagtggggaaggcgatggatggacggcgttgggcggtatggggtgcttttgccctgctgccttcggcttttttggcggtaatggtcgttgcgcctttgtgggcggtggcggcgtatgacggtttggcgtggcgcgcggtgctgtcggatgcctatatgctcaaacgtttggcgtggacggtatttcaggcagcggcaacctgtgtgctggtgctgcctttgggcgtgcctgtcgcgtgggtgctggcgcggctggcgtttccggggcgggctttggtgctgcgcctgctgatgctgccttttgtgatgcccacgttggtggcgggcgtgggcgtgctggctctgtttggggcggacggcctgttgtggcgcggacggcaggatacgccgtatctgttgttgtacggcaatgtgtttttcaaccttcctgtgttggtcagggcggcgtatcaggggtttgtgcaagtgcctgcggcacggcttcagacggcacggacgttgggcgcgggggcgtggcggcggttttgggacattgaaatgcccgttttgcgcccgtggcttgccggcggcgtgtgccttgtcttcctgtattgtttttcggggttcgggctggcattgctgctgggcggcagccgttatgccacggtcgaagtggaaatttaccagttggtcatgttcgaactcgatatggcggttgcttcggtgctggtgtggctggtgttgggggtaacggcggcggcagggttgctgtatgcgtggttcggcaggtgcgcggtttcggataaggcggtttcccctgtgatgccgtcgccgccgcagtcggtcggggaatatgtgctgctggcgtttgcggcggcggtgttgtctgtgtgctgcctgtttcctttgttggcaattgttgtgaaagcgtggtcggccgacgaatcgtggcgtgtgttaatggaaagtgaaacgtggcaggcggtgtggaatactttgcgcttctcggcggcggcggtgtatgcggcggcggttttgggtgtggtgtatgcggcggcggcgcggcggtcggcgtggatgcgcgggctgatgtttttgccgtttatggtgtcgccggtttgtgtttcggcgggcgtgctgctgctttatccgcagtggacggcttcgttgccgctgctgctggcgatgtatgcgctgctggcgtatccgtttgtggcaaaagatgttttatcagcctgggatgcactgccgccggattacggcagggcggcggcgggtttgggtgcaaacggctttcagacggcataccgcatcacgttcccccttttgaaaccggcgttgcggcgcggtctgactttggcggcggcaacctgcgtgggcgaatttgcggcgacattgttcctgtcgcgtccggaatggcagacgctgacgactttgatttatgcctatttgggacgcgcgggtgcggacaattacgcgcgggcaatggtgttgacattgctgttgtcggcgttcgcgctgggcattttcctgctgttggacggcggcgaaggcggaaaacagacggaaacgttataa

SEQ ID NO: 55020 - DNA, 291 bp, Neisseria meningitidis
atggcgaaatactttaccgagacgggtatcggtgtccgtgagcattttgattttttcggcgagtttgtcgtttcgccggcagcacgttcgggtgatttggcacttgcttacggtttgaggctggaagcgggcgaagagggtttgagccttgccgagcttttcgataagcgttccgacagtcaggagccggtcgagtgcggccgtattgacatcggcggctttatgctgaccgcgaaggaggttgacggtggcggcaatatcgggtctatggggctgaaagtaccgcgttag

SEQ ID NO: 55021 - DNA, 312 bp, Neisseria meningitidis
atgaaaaaatccctgtttgccgctgctttgttgtctttggtcctggcagcctgcggcggtgaaaaagccgctgaagctcccgctaccgaagcacctgccgctgaagctcccgctactgaagcacctgccgctgaagctcccgctaccgaagcacctgccgctgaagctcccgctaccgaagcacctgccgccgaagctcccgctgctgaagctgccgctaccgaagcacctgccgctgaagctgccgctaccgaagcacctgccgctgaagctcctgctgccgaagctcctgctgccgaagctgcaaaataa

SEQ ID NO: 55022 - DNA, 975 bp, Neisseria meningitidis
atgccgtctgaaaaaaatatcggttttatggcaggaagcagccgtccgttgtgggttgcctttgcgctgttgctggtttcctgcatcctgtttatgacgctcaacgtcaaaggcgattgggattttgtactgcacctgcgcctgaccaaacttgccgcgctgctgatggtcgcctatgcggtcggcgtgtccacgcaactcttccaaacgctgaccaataatccgattctgaccccttcgattttgggtttcgattcgctgtatgtgtttttgcagaccttgctggtgtttacgttcggcggcgtgggctatgcttccctgccgttgacgggcaaattcggctttgaactggtcgttatgatgggcggctcgctgctgttgttctacacgctcatcaaacagggcggacgcgatttgccgcgtatgattttaatcggcgtgattttcgggattttgttccgcagcctgtcatcgctgctttcgcgcatgatagaccccgaagaatttacggcggcgcaggcgaatatgtttgccggattcaataccgtacacagcgagcttttgggcataggcgcgctgattctgctcgtcagcgcggcggtcgtttggcgcgaacgctaccgcttggacgtacaccttttggggcgcgaccaagccgtcaatttgggcatcagctacacgcgcaacaccttatggatactgctttggattgccgcgctggtggcgacggcgaccgccgtggtcggccccgtaagctttttcgggcttctcgccgcctcgcttgccaaccacttttccccatccgtgcgccattccgtccgcctgccgatgacggtttgtgtcggcggcatcctcttggtcggcggacagaccgtattcgaacacttcttgggcatgaaggcggtattaagcgtggtggtcgaatttgcgggcggactcgttttcctctatctcgttttaaaacacaaaaaatga

SEQ ID NO: 55023 - DNA, 600 bp, Neisseria meningitidis; identical to SEQ ID NO: 41561

SEQ ID NO: 55024 - DNA, 342 bp, Neisseria meningitidis
atgatggataaaaatcagttagaacaagaatttcataaagccatgttaaatatttatcaggaggctttgaatttgccgcaaccttacaaggcgacacgatttttacaaattgtaaatgaatttggtggtaaagaggcggcggataaattattaagtacgggggaaaagaagactcagaccggttttacagagctgattctgagtggtggcggagtccacgccttgaaatacagtatggaatatctggtgttacaaaagccgtggtgtgatttatttactgaagagcaattagctgtggcacgcaaacgattggagcgtgttggatttgtttttccgaagtaa

SEQ ID NO: 55025 - DNA, 300 bp, Neisseria meningitidis
atgaagaaaatgttcgtgctgttctgtatgctgttctcctgcgccttctcccttgcggcggtaaacatcaatgcggcttcgctgcaggagttggaggcgctgccaggcataggcccggcgaaggcgaaggccattgcggaataccgtgcgcaaaacggtgcgttcaagtctgtagacgatttgaccaaggtaaagggcatcggccctgcggtgctggcgaagctgaaggatcaggcttccgtcggtgcgcccgcaccaaaaggcccagccaaaccggtgctgcccgcggataaaaaatag

SEQ ID NO: 55026 - DNA, 2016 bp, Neisseria meningitidis
atgagtaaatcccgtagatctcccccacttctttcccgtccgtggttcgcttttttcagctccatgcgctttgcagtcgctttgctcagtctgctgggtattgcatcggttatcggtacggtgttgcagcaaaaccagccgcagacggattatttggtcaaattcggatcgttttgggcgcagatttttggttttctgggactgtatgacgtctatgcttcggcatggtttgtcgttatcatgatgtttttggtggtttctaccagtttgtgcctgattcgcaatgtgccgccgttctggcgcgaaatgaagtcttttcgggaaaaggttaaagaaaaatctctggcggcgatgcgccattcttcgctgttggatgtaaaaattgcgcccgaggttgccaaacgttatctggaagtacaaggttttcagggaaaaaccattaaccgtgaagacgggtcggttctgattgccgccaaaaaaggcacaatgaacaaatggggctatatctttgcccatgttgctttgattgtcatttgcctgggcgggttgatagacagtaacctgctgttgaaactgggtatgctgaccggtcggattgttccggacaatcaggcggtttatgccaaggatttcaagcccgaaagtattttgggtgcgtccaatctctcatttaggggcaacgtcaatatttccgaggggcagagtgcggatgtggttttcctgaatgccgacaacgggatattggttcaggacttgccttttgaagtcaaactgaaaaaatttcatatcgacttttacaataccggtatgccgcgcgattttgccagtgatattgaagtgacggacaaggcaaccggtgagaaactcgagcgcaccatccgcgtgaaccatcctttgaccttgcacggcatcacgatttatcaggcgagttttgccgacggcggttcggatttgacattcaaggcgtggaatttgggtgatgcttcgcgcgagcctgtcgtgttgaaggcaacatccatacaccagtttccgttggaaattggcaaacacaaatatcgtcttgagttcgatcagttcacttctatgaatgtggaggacatgagcgagggcgcggaacgggaaaaaagcctgaaatccacgctgaacgatgtccgcgccgttactcaggaaggtaaaaaatacaccaatatcggcccttccattgtttaccgtatccgtgatgcggcagggcaggcggtcgaatataaaaactatatgctgccggttttgcaggaacaggattatttttggattaccggcacgcgcagcggcttgcagcagcaataccgctggctgcgtatccccttggacaagcagttgaaagcggacacctttatggcgttgcgcgagtttctgaaagacgggaaggggcgcaaacgtctggttgccgacgcaaccaaagacgcacctgccgaaatccgcgaacaattcatgctggctgcggaaaacacgctgaacatctttgcacaaaaaggctatttgggattggacgaatttattacgtccaatatcccgaaagagcagcaggataagatgcagggctatttctacgaaatgctttacggcgtgatgaacgctgctttggatgaaaccatacgccggtacggcttgcccgaatggcagcaggatgaagcgcggaaccgtttcctgctgcacagtatggatgcgtacacgggtttgaccgaatatcccgcgcctatgctgctgcaacttgatgggttttccgaggtgcgttcgtcgggtttgcagatgacccgttccccgggtgcgcttttggtctatctcggctcggtgctgttggtattgggtacggtattgatgttttatgtgcgcgaaaaacgggcgtgggtattgttttcagacggcaaaatccgttttgccatgtcttcggcccgcagtgaacgggatttgcagaaggaatttccaaaacacgtcgagagtctgcaacggctcggcaaggacttgaatcatgactga

SEQ ID NO: 55027 - DNA, 1146 bp, Neisseria meningitidis
atgaccgaaactcaatccctagagcttgccaaagagctgatttcccgaccatccgttacccctgacgacagggattgccaaaaactccttgccgaacgcctgcacaaaatcggttttgcggctgaagaactccatttcggcgacaccaaaaacatctggttgcgacgcggcacgaaagctcccgtcgtctgttttgcagggcataccgacgttgtaccgacaggtcctgtcgaaaaatgggattcgcccccgttcgaaccggccgagcgcgacggaagattatacgggcgcggcgcggcagacatgaaaaccagcatcgcctgcttcgttaccgcctgtgaacgcttcgttgccgaacatcccgaccaccaaggcagcattgcgcttctgattacttccgacgaagagggcgacgcgttggacggcacgaccaaagtcgtcgatgtattgaaagcgcgcgacgagcttatcgactactgcatcgtcggcgagccgaccgccgtggacaaattgggcgatatgattaaaaacggccggcgtggctcgctgtcgggcaacctgaccgtcaaaggcaagcaaggtcatattgcctatccgcatttggcaatcaatcccgtccatacttttgccccggccttgttagagctgacgcaggaagtctgggatgaaggcaacaaatacttcccgccgaccagctttcaaatttccaatatcaacggcggcacaggcgcgaccaacgtcattccgggcgagctgagcgtcaaattcaatttccgcttctccaccgagtccaccgaagcagggctgaaacaacgcgtccacgccattttggacaaacacggcgtgcaatacgatttgcagtggtcgtgttcggggcagcccttcctgacccacgcgggcaaactgaccgacgtggcacgcgccgccattgccgaaatctgcggcgtagagaccgaattgtccaccaccggcggcacttcggacggacgcttcatcaaagccattgcaaaagaactcatcgaattaggcccgtccaatgcgaccatccaccaaatcaacgaaaacgtgcggctaaacgacattccgaagctgtctgcggtgtatgaggggatattggcgcggttgttggctggaaatgccgtctga

SEQ ID NO: 55028 - DNA, 750 bp, Neisseria meningitidis; identical to SEQ ID NO: 37238

SEQ ID NO: 55029 - DNA, 1251 bp, Neisseria meningitidis
atgccgtctgaaagcccttcagacggcatcgcccggctgcgcggcacaaaggcggaaaaaccgtttgccccgtattttcaaacgcgttacacttgccgccgctgttttcagccatttgattacccgcaaccgccgtcattgcgccggcggtttgcctgtcagcgtcattgcgccgctgtaaatacgaaagaacacattatgaccgtatcccccgtcgccttgcgccgtaagaccgagtgcaagcctcatcccaccgcgcgctattggaaaaaatgcgatgtcgaggcacttttcggactgccgtttttagaacttgtccatcaggcggcagaagtccaccgccaaaatttcaacccgcgcgaaatccagctttccacgctgttgtccatcaaaaccggcggttgtcccgaagattgcgcctactgtccgcaatcggcgcaccacaataccaatctgggcaaagagcagatgatggatgtggatgaaatcgtcgaaaaagccaaaatcgccaaatcgcgcggcgcaagccggttttgtatgggcgcggcgtggcgcggccctaaacccaaagacgtggagacggtttccgcaatcatcaaagccgtcaagggcttgggtatggaaacctgcggcacgttcggtatgctcgaagaaggtatggcggaagacttgaaagaggcgggcttggattattacaaccacaacctcgacaccgaccccgaccgctacaacgacatcatccacacccgccaacacgaagaccgaatggacaccttgggcaaagtccgcaacgccggtttgaaagtctgctgcggcggcatcgtcgggatgaacgaaacccgcgccgaacgtgccgggctgattgccagtctcgccaatctcgacccgcagcccgaaagcgtgccgattaaccggttggtcaaagtggaaggcacgccgcttgacgatgccgaagatttggactggacggaatttgtccgcaccatcgccgtggcgcggattacgatgccgcaaagctacgtccggctgtcggcagggcgcagcaatatgccggaagcgatgcaggcgatgtgctttatggcgggcgcgaattcgattttttacggcgacaagctgttgaccacaggcaatccggacgaagacggcgacagaatcctgatggaaaagcttaacctgtatcccttacagtttgagctggaaggcgaggtcgccgaagtggaaaaagcctctgggattaaagtggattattga

SEQ ID NO: 55030 - DNA, 291 bp, Neisseria meningitidis
atggcactgacacttgccgacgtagacaaaatcgcccgactctcccgactgcacctgactgcggaagaaaaagaaaaatcgcttcaagaattaaacgacattttcactatggtcgaacagatgcaaaccatcaacacagacggcatcgaaccgatggcgcacccgcacgaggccgccctgcgcctgcgcgaagacgaagtaaccgaaaccgaccgcgccgccgaatatcaggcgggtgctccggaagtacgcaaccgtctgtacatcgtaccgcaagttatcgaagaataa

SEQ ID NO: 55031 - DNA, 234 bp, Neisseria meningitidis; identical to SEQ ID NO: 50280

SEQ ID NO: 55032 - DNA, 2487 bp, Neisseria meningitidis
ttggacagaaaccgttcaggccaataccacatctacgaccccctcgccctagacctagacggcgacggcatagaaacagtcgccgccaaaggcttttcaggcagcctcttcgaccataacggcaacggcatccacaccgccactggctgggtttctgccgatgacggtttactcgtccgcgatttgaacggcaacggcatcatcgacaacggcgcggaactcttcggcgacaacaccaaactggcagacggttcttttgccaaacacggctacgcagctttggccgaattggattcaaacggcgacaacatcatcaacgcggcagacgccgcattccaatccctgcgtgtatggcaggatctcaaccaggacggcatttcccaaaccaacgaactccgcacccttgaagaattgggtattcaatctttggatctcgcctataaagatgtaaataaaaatctcggtaacggtaacactttggctcagcaaggcagctacaccaaaacaaacggtacaaccgcaaaaatgggggatttacttttagcagccgacaacctgcacagccgcttcaaagacaaagtggaactcactgccgaacaggcaaaagccgccaatcttgcgggcattggtcgtctgcgcgatttgcgcgaagctgccgcattgtccggcgatttggccaatatgctgaaagcttattctgccgccgaaactaaagaagcacagttggcattgttagataatttgattcacaaatgggcggaaaccgattcgaactggggcaaaaaatcgccaatgcgactttcaaccgattggacgcaaacggctaatgaaggtattgcactgacaccatcccaagtagcacaactaaaaaagaacgctttagtttccctttctgataaagctaaagcaactattgacgccgcccgcgaccgcattgccgtgcttgatgcctacacggggcaggattccaacacactctattacatgagcgaggaagatgcgcttaatatcgtcaaagtaaccaacgatacatacgaccatctcgccaaaaacatctaccaaaacctgttattccaaacccgtttgcagccatatttgaatcaaatcagtttcaaaatggaaaatgatacgttcactttggattttagtggtcttgttcaagcatttaaccatgtcaaagaaactaatccgcaaaaagcttttgtggatttggccgagatgcttgcatatggcgaacttcgttcttggtatgaaggccgaagactaatggccgattatgtggaggaggcaaaaaaagcaggtaaatttgaagattaccagaaagtgttgggtcaggagaccgttgcattattagctaaaacatcgggtacgcaagcagatgatatcctgcaaaatgtaggctttggtcataataaaaatgtttctttatatggtaatgacggcaacgacactctgatcggcggtgcaggcaatgattacttggagggcggcagcggttcggatacttatgtcttcggcaaaggcttcggtcaggatacggtctataattacgactacgctaccggacgcaaagacatcatccgctttaccgacggtattacagccgatatgctgacttttacccgagagggcaaccatcttcttatcaaggcaaaagacggcagtggacaagtgactgttcagtcctatttccagaacgatggctcaggtgcttaccgtatcgatgagattcatttcgataacggcaaagtactggatgttgccactgtcaaaaaactggtacagcaatccaccgacggttcggacagattgtatgcctaccaatccggaagtaccttaaatggcggattgggcgatgactatctgtacggtgccgacgggaatgacctgctgaatggtgatgcaggcaacgacagtatctacagtggcaatggcaatgatacgctcaatggaggagaaggcaacgacgccctgtacggctataatggtaacgatgcactgaatggtggcgaaggcaatgatcatttgaacggcgaagacggtaacgacactctgatcggcggtgccggtaatgattacttggagggcggcagcggttcggatacttatgtcttcggcgaaggcttcggtcaggatacggtctataattaccatgtggataaaaactctgacactatgcactttaaaggatttaaagcagcagatgttcattttatccgttccggaagtgatttggtgcttagcgcttctgaacaagacaacgtacgtatttccggattcttctatggtgaaaaccatcgtgtagatacatttgtctttgatgatgcagctatcagtaatccagattttgccaagtatattaatgctggcaataatttggtacagtctatgtctgtgttcggttctaatactgctgcgacaggaggaaatgtggatgccaatatacaatccgtacagcagccgttattggtaacgccatctgcataa

SEQ ID NO: 55033 - DNA, 360 bp, Neisseria meningitidis; identical to SEQ ID NO: 38354

SEQ ID NO: 55034 - DNA, 846 bp, Neisseria meningitidis
atgaatattgcggacggacggcaggcgtttcccgcacctgcaaaactgaatctcgatttgaggattaccggcaggagggaagacggttatcacaatatcgaaagcatattctgcctgatagatttgcaggataccgtatatttgaaaccgagggacgacggcaaaatcatcctgcacaatccggttgatggaatgccgcaggaagtagatttgagctaccgtgccgcatcgttgctgcaaaaatatgcgcgcaaccccgccggcgtggaaatatggctggacaaaaaaatcccgacaggggcgggtttgggcggcggaagctcggatgcggcaaccgttttgctggtgttgaaccgttggtggcagtgcggtctgacgcagcggcagctcattgattcgggcgcggctctgggggcggacgtaccgttttttattttcggcaaaaatgcgtttgcgcggggtataggcgacaggctggacgaaatggatattccgaaacagtggtatgtcatcgtcaaaccgcccgtccacgtttccactgcaaaaattttcacacacgaaagcttgacacgaaattccgcctcaagcataatgccgactttccaaaatctgcaaccgtttagaaatgatatgcaggcagttgtatttaaagaataccctgaagtttggaaagcctattccgagttgtcccgatatggatttgccttaatgacaggttctggtgcgtgtgtattcacggcgtgtcaagataggaatagcgcatacaatatataccgacaagtttcagatttgtacgaggcatatttggcagagggtctttcaaaacatccttggttgtccgtataa

SEQ ID NO: 55035 - DNA, 852 bp, Neisseria meningitidis
atgaatactataagtagcattatgagtttagaaaattttcaattaataaaaacacaattaggtgttcccagttatgaaaatgatagagttgcaatctatcaaggagattgtatccagttaatggataagatttcaaaaggatcattccaaatgacaatcacatctccaccatacaatattggtaaagaatatgagtctattttagatttggaacattatcttgagtggtgtgaaagatggatgcaatcaatacatcacttaactgaagatagcggatgtttttggttaaatttaggatacttacatgttgaaaaaaagggactagcagttcctattccttatcttttatgggataaaactaactttttccttttacaagaggtggtttggaattatgcagctggagttgcatgccgtaatcgattttccccaagaaatgaaaagttattatggtatgtgaaaaatcctgctaaatatacattcaatttagatgctgtacgcgatcccaacgttaaatatccaaatcagaaaaaaaatgggaaattaaaatgtaatcctctaggaaaaaacccaacggatgtttggcaaatagcaaaagtcacttctggaagaaataggtcatcgagagaaagaactgctcatcctgcccaatttccattggaattaatagaaagaataatccgagcaagtagcaatcaaaatgatgtaatcttagatccatttatcggctcaggaacaaccgccttagccggactaaaaaacaaccgttttgtcataggatttgaaattaacgatgagtatatagatattataaaagaacgcttcaaagagtatgatcttcaaaatacttga

SEQ ID NO: 55036 - DNA, 324 bp, Neisseria meningitidis
atggatattgtgcaacttgggcccgcggaattgaaagcgtggatggacgaagggcggatgttttgtttgttggacgtgcgtacggatgaagaaacggcggtttgttcgctgccaaatgcgctgcatatcccgatgaatctgattccgctgcggcagaacgagctgccggatgatgtgccgcttgtggtgtattgccatcacggtatccgcagtctgcatacggcgatgtatttggcggacgcgggttttgaaaacctgtacaaccttcagggcggcatcgatgcatgggcggccgagattgacggcaacatgatgcgttattga

SEQ ID NO: 55037 - DNA, 510 bp, Neisseria meningitidis
atgacaatgattttaagcattttaagcctgttttttatcatcagactgttatttttagccgtctctattaaacatgaaaaagccttgattgccaaaggggcgaaacaatacggaaaaaccaattccacgctgcttgcggcagttcatacgctttattatttggcgtgttttgtttgggtatggctttctgacactgcttttaatggcatatccttgattggtacgctgacggtgatggcttcatttgtgatattgtcattgattattaagcagttgggggagatttggacggttaaaatctatattttaccaaatcatcaaattaatcgttcgtggttgtttaaaacattccgccaccccaattattttttaaacatcatacccgaactgattggcatcgccttattatgtcaagcgtggtatgttttattgattggtctgcccatttatttgctggtcttatttaagcgtatccgacaagaagaacaggcgatggcaacacttttttaa

SEQ ID NO: 55038 - DNA, 708 bp, Neisseria meningitidis
atgaatgcagccatcgaacacgtccaagccgtcgccttcgatttggacggcacactgtgcgattccgtccccgaccttgccgccgccgcagaagcgatgttggaacaactcggtatgaaaccgctgcccgccaaagtggtcgaaagctatgtgggcgacggcatcggcaaactggttcaccgcgtcctcaccaacgaccgcgaccgcgaagccgattccgaactgtgggaaaaaggtttcgtatcctatatgaaatactaccgcgaccatttgagcgtcttcacccgcccctatcccgaaaccgaagccgggctggcattgctcaaatctttgggcatcccgctggcagtcattaccaacaaaaacgaaatccttgccgtcgaactgttgaaacagctcggacttgccgactacttcagcctgatactcggcggcgacagcctgcccgagaaaaaacccagccccctgccgctgcggcacgccgccgaagttttgggtatcgatgttgcaaacatggttatggtcggcgactcgcgcaacgacatcatcgccgccaaagccgccggctgcctgagcgtcggcgttaccttcggttacggcgatatgacgctgctctcgcaagacgatgcgacccgccccgactggattatcggctcgctgcccgaaatttacgaaaacctgcaacctcagaaaaacaaagaagagtag

SEQ ID NO: 55039 - DNA, 780 bp, Neisseria meningitidis; identical to SEQ ID NO: 43297

SEQ ID NO: 55040 - DNA, 1260 bp, Neisseria meningitidis
atgagtatggcacttgcccaaaaacttgccgccgacagcattgcggcggttgccgaaggacgcaaccttcaggacgtgttggcgcaaatccgcaccgcgcatcccgaccttatggcgcaggaaaacggcgcgttgcaggacatcgcctacggctgccagcgttatttgggcagtttgaaacatatgctcgcgcagatgctgaaaaagccgattggcaatccgcagctcgaaagcctgcttttggcggcgttgtaccagctgcattacacgcgcaacgcgccccacgccgtggtcaatgaggcggtggaaagcatcgcgaaaatcggacgcgggcagtaccgttcgtttgccaacgcggttttgcgccgctttttgcgcgaacgcgacaagcttgtggcttcctgtaaaaaagacgatgtagcgaaacacaacctgccgctgtggtgggtggcttacttgaaaaaccattatccgaaacactggcacaacatcgccgccgcgctgcaatcccatccgccgatgactttgcgcgtcaaccgccgacacggcaatgccgaaagctatttggaaaaactggtggcggaaggtatcgcggctaaggcgttggacgaatatgcggttacgttggaagaagccgtgccggtgaaccgcctgcctggtttttcagacggcattgtttcggtacaggacttcggcgcgcagcaggcggcgtatttgttaaacccgaaagacggcgaacggattttggacgcgtgcgccgcgccgggcggcaagacggggcatatcttggaactggcggattgccgtgttaccgccttggacattgatgcaggccgtctgaaacgggtggaagacaatatcgcgcgtctgggctttcagacggcatcgacggcgtgtgccgatgcacaggacctgtcggcatggtatgatgggaaaccgtttgatgccgtccttgccgacgtgccgtgtaccgcctcgggcgtggcgcggcgcaatcccgacgtgaaatggctacgccgtccgaccgacgcgctcaaaaccgcccgccagcaggaagccctgctagatgcattgtggcaggtgctgaaaagcgggggaaggatgttgatcgctacctgttccgtgttcgtcgaggaaaacgacggacaattgcaaaaattcctcaaccgccatgccgatgcagaactgatcgaatcgcgggtgcttttaccgaacaaacaccaagatggcttttattacgcgcttattcaaaagcattaa

SEQ ID NO: 55041 - DNA, 540 bp, Neisseria meningitidis
atgaaacggcgcaaactgtccctgcgcccatccgacaagagggcaccgcgaggcggtgcaaaaggagaatacgatatgtacaaacatctggttgttgccgttgacggcagtgaaacgtccatcaatgccctgaaacatgccgccgagcttgccggggtcaacggtgcgcgtctgactttggtacacgttgccaatcctgccgaatatatggcgctcgcccccgaatttttgcaacacgaaagctacgaagccgccgccgtcgcgcaaggcaacgaagttttggatgccgccgagcgcaccgcccgggaactgggtgtggaaaataccgtcaaacacctgctggttgccaataagggtgcgcgtgaaatggcgcaggatttggttgattatgccgatgaaaacggtgccgacctgctggtgttgggtacgcacggacgtaccggactgatgcaccttttaatgggcagttttgccgaaacggtaatgcgccaaagccacctgccgcttttgattatccgcagcaaagccgaagaggcgtag

SEQ ID NO: 55042 - DNA, 186 bp, Neisseria meningitidis; identical to SEQ ID NO: 38793

SEQ ID NO: 55043 - DNA, 237 bp, Neisseria meningitidis; identical to SEQ ID NO: 37424

SEQ ID NO: 55044 - DNA, 1434 bp, Neisseria meningitidis
atggacacacaaacttacaactacaaagtggtgcgccagttcgccatcatgactgtagtttgggggattgtgggtatgttggtcggcgttatcgtcgccgcccagctttttgctcctgccctcgacttgtctaatatcggaccttggttccacttcggccgcctgcgtccgctgcacaccaatgcggttattttcgcatttggcggttgcggcctgatcggcacatcatactacgttgtccaacgtacttgtaatacccgtcttttcggcggttggctgccggcatttaccttttggggctggcaggcggtaatcgttgccgccgtcgtcagcttccctatgggttggacccaaggtaaggaatatgccgaactggaatggccgatcgatattctgattactttggtttgggtggcttacgccatcgtattcttcggtacgattgccaaacgtaagattaaacatatttacgttgccaactggttctacggcggctttattttggcggtcgcacttttacacatcgtcaacaatatcagcatcccggcagggttgatgaagtcataccccgtctattccggtgcgattgatgctatggttcaatggtggtacgggcataacgctgtgggcttcttcctgactgccggcttcttgggtatgatgtactatttcgtacccaaacaagcagcccgccccgtttactcctaccgcctgtccgtcgttcacttctgggcgttgatttttacctatatgtgggcgggtccgcaccatcttcactacactgcgctgcctgactggacgcaatctttgggtatggttctgtctttgattctgttcgcaccctcttggggcggtatgattaacggcatcatgaccttgtccggcgcgtgggacaaactgcgtacagacccgattcttaaattcctgattgtatccttgtccttctacggtatgtctacctttgaaggcccgatgatgtcgattaaaacggtcaatgcattgagccactatacggactggaccgtcgcgcacgttcatgcgggtgcgttgggctgggtaggctttgtaaccatcggttccgtctattacatgattccccgtctgttcggcaaagaacagatgcacagcaccaagctggtagaagcacatttttggattgcgaccatcggcgtggttctgtatatcgctgccatgtggattgccggtgtgatgcagggtttgatgtggagttctttgaacgatgacggtacgctgacctactcgtttgtcgaatccgtaaaacgcaccatgccttactacgtgatccgttttgcaggtggtttattgtatctgagtggtatgtgcattatggcgtacaacgtgtaccgcacagccatcggtggtaaagcagtcgatgccgaaatccctgcggtttcccaaacacagcaccactaa

SEQ ID NO: 55045 - DNA, 1020 bp, Neisseria meningitidis
atgagcgatacccccgctacccccgctacccgcgatttcggcctgatcgacgggcgtgccgtaaccggctatgtgctgtccaatcggcgtggtacgcgtgtctgcgtgctggacttgggcgggattgtgcaggaattttccgttttggcagacggcgtgcgcgaaaacctcgtggtgtcgttcgacgatgcggcttcctatgcggacaatccgtttcagattaacaagcagatagggcgcgtggccggacgcatccgcggtgcggcgttcgacatcaacggcaggacttaccgcgtggaggccaacgaaggcaggaacgcgctgcacggcggttcgcacgggctggccgttacccgtttcaacgcggtggcggcagacggccgttcggtggtgctgcgcagccgcctgcaacagtcggccgacggttatcccaacgatttggatttggatatttcctaccgcttggacgaggacgaccggcttaccgttacctatcgcgccaccgcgctcggcgacacggtgttcgacccgacgctgcacatttactggcggctggacgcgggcctgcacgatgcggttctgcatattccgcagggcggacatattccggccgatgccgaaaaactgcccgtctcaacggtttcagacggcctcgaagtatttgatttcagccggcccaagccgctggatgccgccgttgccgccctgcgccgcgaaacgggtcgggccggttttgacgacgcttaccgcgtgccgtccgatataggccgtcccgccgctgtgttgcaagccggacgccgctgtcgtatcagcatatacagcgaccgcaacggcttggtcatctttaccgccgccccgcaggatttcgcgcggcacgatgcgggcgtttacgacgcgctggcgaccgaggcgcagacgctgcccgacagcctgcattggcccgagttcggcaatattcgtctgaacaagggtgataccagggaggcgacgattgcttacggcatcgaatccctttcttag

SEQ ID NO: 55046 - DNA, 1116 bp, Neisseria meningitidis
atgaaagtaggtttcgtcggctggcgcggtatggtcggttcggttttgatgcagcgtatgaaagaagaaaacgacttcgcccacattcctgaagcgtttttctttaccacttccaacgtcggcggcgcagcccctgatttcggtcaggcagccaaaacattgttggatgccaacgatgttgccgaattggcaaaaatggacatcatcgttacctgtcagggcggcgattacaccaaatccgtgttccaagccctgcgcgacagcggctggaacggctactgggttgacgcggcatcctcgctgcgcatgaaagacgacgcgattatcgtcctcgaccccgtcaaccgcaacgtcatcgacaacggtttgaaaaacggcgtgaaaaactacatcggcggcaactgcaccgtctccctgatgttgatggctttgggcggcctgttccaaaacgatttggtcgaatgggcgaccagtatgacctatcaggccgcttccggcgcgggcgcgaaaaatatgcgcgaactcatcagcggtatgggcgcagttcacgcccaagtggcggacgaacttgccgatcctgccggctcgattctcgacatcgaccgcaaagtatccgatttcctgcgcagcgaagactatccgaaagccaacttcggcgtaccgctcgccggcagcctgattccgtggattgacgtggatttgggcaacggccagtccaaagaagaatggaaaggcggcgtggaaaccaacaaaatcctcggccgcagcgacaatccaaccgtgattgacggcctgtgcgtccgcgtcggcgcgatgcgctgccacagccaagccatcactctgaagttgaaaaaagacctgcctgtttccgaaatcgaaacgattttggcaggcgcgaacgactgggtgaaagtcatccccaacgaaaaagaagccagcatccacgagctgactcctgccaaagttaccggcacgctgtccgtccctgtcggacgcatccgcaaactgggcatgggcggcgaatacatcagcgcgttcaccgtcggcgaccagctcttgtggggcgcggccgaaccgctgcgccgcgtattgcgtatcgtgttgggcagcctgtga

SEQ ID NO: 55047 - DNA, 2751 bp, Neisseria meningitidis
atgctgacaaacattgccaagaaaatcttcggcagccgcaacgaccgcttgctgaaacaataccgtaaatccgttgccagaatcaacgcgctcgaagaacagatgcaagccctaagcgatgctgatctgcaagccaaaactgccgaattcaaacaacgcctcgccgacggtcagactttggacggcattttgcccgaagccttcgccgtctgccgcgaagcgtcccgccgcaccctcggtatgcgccacttcgacgtgcagcttatcggcggtatggtgctgcacgacggcaaaatcgccgaaatgcgtaccggcgaaggcaaaaccctggtcgccaccctcgccgtctatctcaacgcgctggccggcaaaggcgtacacgtcgttaccgtcaacgactacctcgcctcacgcgatgcgggcattatggagccgctctacaatttcctcggccttaccgtgggcgtgattatttcagatatgcagccgttcgaccgtcaaaacgcctatgccgccgatatcacctacggcaccaataatgaattcggcttcgactacctgcgcgacaatatggttaccgaccaatacgacaaagtgcagcgcgaattgaattttgccgttgtcgatgaagtggattccatcttgattgacgaagcgcgcactccgctgattatctccggtcaggcggatgacaacatccagttgtaccaaatcatgaacaccgttccgccccacctcgtccgtcaagagacagaagaaggcgaaggcgactattgggtcgacgaaaaggcacatcaggtcatcctgagcgaagcaggtcacgaacacgccgagcaaatcctgacccaaatgggattgctggcagaaaacgactccctctattccgccgccaatatcgccctgatgcaccaccttatggcggcattgcgcgcgcattccctcttccacaaagaccaacattacgtcatccaagacggcgaaatcgtcatcgtggacgaattcaccggccggctgatgtccggccgccgctggtcggagggtctgcatcaagccgtcgaagccaaagaaggcgtggaaatcaaacgcgaaaaccaaacccttgcctccatcaccttccaaaactatttccgcctgtacaccaagctctccggcatgaccggcacagccgataccgaagctttcgaattccaaagcatctacaacctcgaaaccgtcatcatcccgaccaaccgccctgtacagcgcaaagacttcaacgaccagattttccgttccgccgaagaaaaattcgaagccgtcgtcaaagacatcgaagaatgccacaaacgtgggcagcccgtcctcgtcggcaccaccagcatcgaaaactccgaactggtctcccaccttctgcaaaaagccggactgccgcacaacgtcctcaacgccaaagaacacgaacgcgaagccctgattgtcgcccaagccggcaaagtcggcgcgattaccgttgccaccaatatggcgggacgcggtacggacatcgttttaggcggcaacctgaagcaccaaaccgatgccatccgtgccgacgaaaccttgagcgacgaagagaaacaggcacaaatcgccgcactcgaaaacggctggcaggcagaacacgataaagtaatggaagcaggcggcctgcacatcatcggtacggaacgccacgaaagccgccgtatcgacaaccaattgcgcggacgttccggccgtcagggcgaccccggatccagccgtttctacctttcgtttgaagacccgctgctgcgcttattcgcactcgaccgcgccgccgccatcctcaaccgtctcgcccccgaacgcggcgttgccatcgaacacaacctgctgacgcgccaaatcgaaggggcgcaacgcaaagtcgaaggcagaaacttcgatatgcgcaaacaggttttggaatacgacgacgttgccaacgaacagcgcaaagtcatttacagccagcgcaacgaaattctgaccagcaaagacatcagcgacctgatgcaggaaatccgttctgatgtcgtcagcgacctcgtggatacctatatgcctcccgacagcatggaagaacaatgggacatcccgactttggagaaccgtctggctgccgaattcagactgcacgaagacatccaatcctggctgaaggcggacaatgcgattgacggtcaagacatcaaagaacgcctgatcgaacgcatcgaaaacgaatatgccgccaaaaccgaactggtcggtaagcaggcaatggccgatttcgagcgcaacgtgatgttgcaggtcatcgacaaccaatggcgcgaacacctcgccgctatggactacctgcgacaaggcatacacctgcgcagctatgcccaaaaaaatccgaagcaggaatataaacgtgaagcctttaccatgttccaagacctgtggaacggcatcaaattccatattgcctccctgcttacctcggttcaaatcgaacaaaaccctgtcgcggtggttgaagagcaacccatcggcaacatccagtccatccattccgaatcgcccgatatggaagaacttttgggtcagtcgcaaaccgatctggttaccgaagcctttaatcccgatgggacagatttcagccccgaagccttggaagcgcgggggcaaatcgtccaccgcaacgacccctgcccctgcggcagcggtttgaaatacaaacaatgccacggcaaactggcttaa

SEQ ID NO: 55048 - DNA, 1776 bp, Neisseria meningitidis
gtggctaaaacatatttattgactgcattgataatgtctatgacaatctctggatgtcaagtcatccatgccaatcaaggtaaggttaatactcattctgctgtcatcacaggtgcagacgctcacacgcctgaacatgcaacgggactgatcgaacaaaagcaggtgattgcaagtgattttatggtagcgtcagccaatccattagcaacacaagctggctatgatatcttaaagcaaggcggtagcgctgcagatgcgatggtggcggtgcagacgacactaagcttggtagagccacagtcgtcaggcttgggcggtggtgcatttgtgttgtattgggataataccgccaaaacattgaccacatttgatgggcgtgagacggcaccgatgcgtgcgacgccggaattatttttggataaagatggtcaaccattgaaatttatggaagcggtggtcggtggtcgctcggtgggtacgcctgctatccctaaactgatggagacaatacatcagcgatacggtgtattgccttggggaaaattatttgatacaccgatccgcttggcaaaacaaggctttgaggtgtcgccaaggcttgccatctcggttgagcaaaatcagcagcatttggcacgctatccaaaaacagccgcttattttttgccgaatggtgtgccgctacaagcaggcagcttgctgaaaaatttagaatttgctgacagtgttcaggcgttagcagctcaaggtgcaaaagctctgcatactggtaaatatgcccaaaatatcgtttcagttgtccaaaatgctaaggataaccccggtcaattatccttacaagatttatctgattatcaagtggtggaacgcccgcctgtttgtgtgacttatcgtatttatgaagtatgcggtatgggtgcaccaagctcaggtgggattgctgtgggtcaaattttggggattttaaatgaattttcacccaatcaggtggggtatgatgctgaaggtttacgtctcttgggcgacgcttctaggcttgcgtttgcggatcgtgatgtatatttgggcgaccctgattttgtaccagtacccattcgccagttgatttctaaagactacctaaaacatcgcagccagctgcttgagcagtcggataaggcattgcctagcgtatctgcaggcgattttattcatgagtgggtgtcctcacaagcgattgagttaccttctaccagtcatatatcaattgtggataaggcgggcaatgtgctatcaatgacgacttccattgaaaatgcgtttggctcaactttgatggcaaatggctacctgctgaataatgagctgacagactttagttttgagccaataaagcagggcaaacaggtcgccaatcgtgtcgagcccagcaagagaccacgctcctcaatggcaccaaccatcgtatttaaagcaggcaagccttatatggcaatcggctccccaggtggtagccgtatcattggctatgtcgctaagacgattgtggcacatagcgactggaatatggatatccaagatgccatcagtgcacccaatttattaaatcgctttggtagctatgaactagaaacgggtacaaccgccctccagtggcaacaagcattaaatgatttgggctataagactgacgtgcgtgagctaaattcaggtgttcaagccattattatcgagccaagcaggctggttggtggtgccgatccacgccgagaaggtcgagtgatgggtgattag

SEQ ID NO: 55049 - DNA, 168 bp, Neisseria meningitidis; identical to SEQ ID NO: 37435

SEQ ID NO: 55050 - DNA, 216 bp, Neisseria meningitidis
atgatggaaacccttatcctcgacatcggcggcatgagctgcggcggctgcgtcaaaagcgttacccggatattggaaggcgtaaaaggcgtggcaagcgtcgaagtcagtcttgaaaacaaaagtgcgaccgtcggatacgaccccgcgcaaaccgatgcaggggcgttgattgaagccgttgaagacggcggctatgatgcggcgttgaaataa

SEQ ID NO: 55051 - DNA, 408 bp, Neisseria meningitidis
atgactgtatggtttgttgccgctgttgccgtcttaatcatcgaattattgacgggaacggtttatcttttggttgtcagcgcggctttggcgggttcgggcattgcttacgggctgaccggcagcacgcctgccgccgtcttgaccgccgctctgctttccgcgctgggtatttggttcgtacacgccaagaccgccgtgggaaaagttgaaacggattcatatcaggatttggatgccgggcaatatgccgaaatcctccggcacgcaggcggcaaccgttacgaagttttttatcgcggtacgcactggcaggcgcaaaatacggggcaggatgtgtttgaaccgggaacgcgcgccctcattgtccgcaaggaaggcaaccttcttattatcacacacccttaa

SEQ ID NO: 55052 - DNA, 807 bp, Neisseria meningitidis; identical to SEQ ID NO: 50350

SEQ ID NO: 55053 - DNA, 1254 bp, Neisseria meningitidis
atgcagacttacctcgtcggcggcgccgtccgcgattatcttttgggcttgcccgtcaaagaccgcgattgggtggtcgtcggcgcagacgcacaaaccatgctggcgcaaggcttccagccagtcggcaaagactttcccgtgtttctccatcccgaaacacacgaagaatacgccctcgcccgcaccgagcgcaaaaccgccaaaggttacgccggcttcagtttccacaccgacaaagacgttacgctggagcaggatttgatgcgccgcgacctgaccatcaacgcgatggcgcaagatgcggacggcaagattatcgaccctttcggcggacaacgggatttggcggcaggcattttgcgccacgtttccccggccttcgccgaagaccccgtccgcatcctgcgtactgcccgctttgccgcgcgttacaagtttgaaatcgccgaagaaaccataaagctgatgcggcagatggtggaaaacggcgaagcggacgcattggttgccgaacgcgtctggcaggagtttgcgaaaggtttgatggaaaaaaatccgcgcaaaatgattgaagtgttgcgcgaatgcggcgcgctcaaagtcttgctgcccgaagtcaatgccctcttcggcgtgccgcaacgcgccgactaccatcccgaaatcgacagcggcatccataccctgatgacgctgcaacgcgccgccgatatgggtttgagcctgcccgaacgctatgccgccctgctgcacgacttgggcaaagccaaaacaccgtccgacatcctgccgcgccaccacggacacgacctcgccggtgtcgaacccgtgcgcgaagtcaatcagcggctgcgtgcgccgaaacattgcgccgagcttgccgaattggtttgccgttggcacattattttccaccaagtcggacagcttaaaagccaaaccattctgaacgtattgaaaaaaaccgatgccttccgccgtcccgaacgctttcagacggcattgaacgtctgcattgccgacacgcaaggccgtctgaaccgcgaacacacgccctacccgcaacgcgcacactggctcgccctgctcgaagccgccaatcaggcggattcgggcaaaatcgccgccgaatgctgggcgcagggaaaagcgcaccttatcgccgaacaaatcgaccgggcgcggctggcgcaaatcgccccgctgcaaaaagcgtttcgagcggcgcaagacaaaacagaaaaacattaa

SEQ ID NO: 55054 - DNA, 357 bp, Neisseria meningitidis
atggataaaatctttttgcacggcatcaaggcggatacgcttatcggcgtgtacggctgggaacgcgaacggttgcagaccctgattgtcgatttggacatcggcgttcccgagaaagcgggttcggacgacgatattgccaatacggtacattatgccgaggtatgcgaaacactgcgccgacatctgaaagaacaggatttcctgcttttggaagcgttggcggaatatattgccgatttggttttgggatatttcggcgcggtgtgggtacgcgtgaaaatcgtcaagccgggtattttggaaggcgtgcgcgaggttggcgtggaaatcgagcgcggcaagcgtgaagattga

SEQ ID NO: 55055 - DNA, 273 bp, Neisseria meningitidis; identical to SEQ ID NO: 36489

SEQ ID NO: 55056 - DNA, 521 bp, Neisseria meningitidis
gtgaaagatagtttaatggacgcctttgatttttttatgcaaggcaattttaaaaaaattgcaactgaacaaggtttagaccgtaaatattttatattccactatatcgtatgtaatttatctgccatttcttctttttgtttaatgaaggttatccatagttatactatcctttgtttattaataatgataattggcattgcatttggatttatcttgagaaatagggttctatctatagtaaaaaataaacaaaattttttatctgatatgtttcccttggaaatgcctttcttttctagagtatacaaaatacctatcttggccagattcttgaataggggaatgaaatggctttatctccaaaattttttctgtttagttatgatttgtttctcgatatctcttatccttaatgaagaaagggggtggatgccttattttgcctgctattggtttggactttgttatccagtaagcacttattacgttttttatccagagattataaacatatctaa

SEQ ID NO: 55057 - DNA, 315 bp, Neisseria meningitidis; identical to SEQ ID NO: 37950

SEQ ID NO: 55058 - DNA, 333 bp, Neisseria meningitidis
atgagcagcgaattgattatacacaccagcgatgccgcttttgaaaaagacgttttaaattcagatacccccgtcctgctggacttttgggctccgtggtgcggcccctgcaaaatgattgccccgattttggacgacatcgccgccgaatttgaaggccgtctgaaagtggtcaaaatcaacatcgacgacaacgaagccaccccgtcccgtttcggcgtgcgcggcattccgaccctgatggtgttcaaaaacggcgaagtcgtggctaccaaagtcggcgcattggcaaaaggtcagctgaccgcctttgtcgaagcctccatcgcctga

SEQ ID NO: 55059 - DNA, 405 bp, Neisseria meningitidis; identical to SEQ ID NO: 43748

SEQ ID NO: 55060 - DNA, 1035 bp, Neisseria meningitidis
atgagtacttcattgagttaccgcgatgcaggtgtcgatatcgacgcaggcgaccaactggtcgaaaacatcaaaccgtttgccaaacgcacgatgcgcccggaagtattgggggatttgggcggttttggcgcattggtcgaaatcggcaagaaatataaaaatcccgtattggtcagcggtacggacggtgtgggtaccaagctcaagcttgcctttgattgggataaacacgatatggtgggcatcgaccttgttgcaatgagtgtcaacgatattttggttcaaggagcagaacctctgtttttcttggattatttcgcctgcggcaaattggatgttccgcgcgcaaccgatgtcatcaaaggcattgcacaaggttgcgaagaatccggctgcgccctgattggcggggaaactgccgaaatgccgggcatgtatcccgtcggagaatacgatttggcgggttttgccgtcggcgtagtggaaaaagagaatgtcattaccggccgcagtatcggcgcgggcgatgtggtattgggtttggcttccaacggcgcacattcaaacggctattcccttatccgtaaaatcatcgaacgcgacaatcccgatttggatgccgagtttgataatggcaaaaccttgcgggaggctgttattgcgccgacccgtctgtatgtgaaaccgattcttgccgctttggaaaaatttaccattaaaggtatggcacacattaccggcggcggcattaccgaaaacgtgccgcgcgtgttgcctgaaaacacggttgcacaaatcgatgctaaatcgtgggaattgcccaagctcttccaatggcttcaaaaggcgggcaatgtggaaacccaagaaatgtaccgaacctttaactgcggcatcggcatggtcgttattgttgctgccgaagatgccgatgcggttcagggtctcttgggtgaacaaggtgaaacagtttaccgtttaggtttgatccgtgagcgtcagggagacgagcatcaaacccaggttgcctga

SEQ ID NO: 55061 - DNA, 426 bp, Neisseria meningitidis
atggcgattgaacgtaccatctccatcatcaaacccgatgccgtcggcaaaaacgttatcggcaaaatatacagccactttgaggagaacggtctgaaaatcgttgccgccaaaatgaagcagcttaccctcaaagaggcgcaagaattttatgcggttcataaagaccgccccttctacgccggattggttgaatttatgaccggcggtccggttatgattcaggtattagagggtgaaaacgccgttctgaaaaaccgcgaactgatgggtgcaactaatccttccgaagccgccgaaggcacgatacgcgcggactttgccacttcggtcagcatcaatgccgtacacggctcggacactccggaaaatgccgctttggaaattgcctactttttcagccaaaccgaaatctgcccccgttga

SEQ ID NO: 55062 - DNA, 840 bp, Neisseria meningitidis; identical to SEQ ID NO: 44765

SEQ ID NO: 55063 - DNA, 279 bp, Neisseria meningitidis
atgtactaccaagtcggaaataaatgtcttgagaagcaccaggctgaaaacctttatttcagcttggtagtaccaagaatcaaagaaaacggacagattgtcaggccggaatataacggcagcctgtggaagatgtcggacggtcagccgctaaggcttttattggcggaatgcagtccgaaagacaacctgcaaagcggtcttgaaacaggctggatagtattcggcgtgatggcgtccgtttactttgtttccctgctgaaaaaggttttgaaatga

SEQ ID NO: 55064 - DNA, 1782 bp, Neisseria meningitidis
atgccttatttcgccctgtttgacgatgccgtaagcggccgcgcaaaacgctatcaaaatcatgtggaaagccgttttttccgtcccgaagaactcgatgctttggacggcgcgctgcaatcgggctggcaaaaagggctgcatgccgtgttgtttgcagactacggattcggtttgccgctgacgggggtcgagtccgaacgcggcggcaaccttgccctgcactggtttgccgactgcgccgacaccgatgccgcaagctggcttgcccgacactcagacggcctccccgccggcatttccacgccgcaatcctccgtatccgaagccgattacctcgaccatatccgccaaatccacgaagccatccgacgcggcgacacctatcaaatcaactacactacccgcctgcacctgcaagcctacggcaatcccgtcaaactttaccaacgcctgcgccagcccgtcccctatgccgttttgtcccacctgcccgatgcacaagggcaatccgcgtggacgctgtgtttctcgcccgaactcttcctcaaaatcggttcggacggcaccatcagcaccgaaccgatgaaaggcaccgcgccgattttgggcgacgggcaagacgaacgccgcgccgccgagttgcaagcagacccgaaaaaccgcgccgaaaacgtgatgattgtcgatttgctgcgcaacgacctcggcaagatcgcccaaaccggcaaagtatgcgtgcccgagccgtttaaagtgtcgcgtttcggcagcgtttggcagatgaccagcaccatccgggcgcaagccctgccgcacacctcgttcgccgacatcctccgcgccgccttcccctgcggcagcatcaccggtgcgcccaaaaaaatgagtatgcagattatcgaatcgctcgaagccgaaccgcgcggactttatacgggcagcatcggctacctgaaaccttgcgcgggcggcttggggtttgaaggcgcgttcaacgtcgtcatccgcaccttatcgctcacgccgctttcagacggcatttatcaaggcgtgtacggtgtcggttccggcatcgtcatcgacagcgaccccgccgccgaatatcgcgaatgcggctggaaagcccgtttcctcaacgaattgcgccccgacttcggcatttttgaaaccctgcgcgcggaaaacggacgctgcaccctgctcgaccgccacctatgccgtctgaaaacctccgcccaagccctcaacctgcccctgcccgacggctgcgaaaatcaaatcaaacaatacattgccgacttgcccgatggcgcgttccgcgtcaaagccctgctcgcttcagacggcatcagcctgtcccgcgccgttttaaaccgtctgaccgacaaacaacgcgtcatcatttcgccgaccatcctgcccgcacaaaactacctgcgccgcttcaaaaccacctgccgcaccgtcttcgaccaagcgtggcaaaccgccgaaacacaaggcgcgttcgacagcctgtttttcaattcagacggcatcctgctcgaaggcggcagaagcaacgtgttcgtcaaacatcgcggacaatggcttacgccctctttagatttggacattttaaacggcataatgcgccaagccgtattggacgaaccgcaaaaatatttgcaaacaaatcaagtaatcgaaacacacatcacacaaaaaacactgcaagaagccgaagaaatccgcctctccaacgccttgcgcggcgtatttgccgccgcccttgcctga

SEQ ID NO: 55065 - DNA, 1932 bp, Neisseria meningitidis
atgttttggagctttttgatgttgaacattaccttgccggacggctcagtccgacaatacgaatcccccgttaccgtggctcaaattgctgcgtctatcggtgccggtttggcgaaggcggcggtggcaggcagggtaaacggcaaattggtcgatgcgtgcgacccgattgttgaagattctgctgttcaaatcattactccgaaagatcaggaaggcatcgaaatcatccgccattcctgcgcccatcttgtcgggcatgccgtcaagcaactctatcctaatgcaaaaatggttatcggccccgtcattgaagagggcttttattacgacattgccacggaaaaaccgtttacaccggaagatgttgccgccattgaagcgcgtatgaaagaattgattgcccaagactatgatgtggtcaaaatcatgactccgcgtgcggaggcgattaaaatttttcaagagcgcggcgaagaatacaaactgcgcctgattgacgatatgcccgaagtggaagcgatggggatgtatcatcatcaggaatatgtcgatatgtgccgcggcccgcacgttccgaatacccgtttcctgaaaaacttcaaactgaccaagttggcgggcgcatactggcgcggcgacagcaataatgaaatgctgcaacgcatatacggtacggcttgggcgacaaaagacgaattaaaagcctatattcaacgtatcgaagaagccgaaaagcgcgaccaccgcaaacttggcaagcaattggatctgttccatctgcaagacgaagcgccgggcatggtgttttggcatcctaaaggctgggctttgtggcaagtgattgaacagcatatgcgtaaagagctgaacgccgccggttataaagaggtcaaaacgcctcaaattatggataaaaccttttgggaaaaatccggccattgggacaactacaaagacaatatgttcgtgaccagttcagaaaaacgcgaatacgcggtgaaaccgatgaactgtccgggtcatgtgcaaatttttaataacggtttgcgctcatatcgcgatttgccgatgcgtttggccgagttcggttcttgccaccgcaatgaaccaagcggtgcattgcatggtctgatgcgggtccgtggatttgtgcaggatgatgcgcatattttctgtaccgaagaccaaatcgtcagcgaggcccgtgcgttcaatgaattgttggttcgcatctacaaacagttcggtttccatgatgtatccgtcaagctttctcttcgccctgaaaaacgcgcaggttcagatgacgtgtgggataaggcagagcagggtttgcgcgaggcattgactgcctgcggcgtggaatggggcgaattgccgggcgagggtgcgttttacgggcctaaaatcgaatatcatgtcagagatgccttgggtcgttcttggcaatgcggtacattacaactggatttcgtattgccggagcgtttgaatgccgaatatgtaactgaaaacaacgaccgtgcgcgtcctgttatgttgcatcgcgccattttgggttctttggagcggtttatcggcattctgattgagaaccatgcaggctcattcccgttatggttggcgccggttcaaatggtgattatgaatatcaccgaaaatcaagcggattactgccgtgaagtggctgccaaattgcaggcggcaggattccgcgccgagttggatttgcgtaacgaaaaaatcggttacaaaatccgcgacaacagccaataccgtttcccttatcaaatcgttgtcggcgataaggagaagcaggaaaacaaagtggcggtacgccgcaaagcagaagatttgggttctttggatttggatgatttcattgcgcaattgcagcaagaaatcactgatgccctcgtcaatcattaa

SEQ ID NO: 55066 - DNA, 267 bp, Neisseria meningitidis; identical to SEQ ID NO: 43047

SEQ ID NO: 55067 - DNA, 387 bp, Neisseria meningitidis; identical to SEQ ID NO: 44892

SEQ ID NO: 55068 - DNA, 1236 bp, Neisseria meningitidis; identical to SEQ ID NO: 39525

SEQ ID NO: 55069 - DNA, 1875 bp, Neisseria meningitidis
ttgcacccgatattcggacgcaacgccgtttgttcagacggcatttcccaaacccactgtccgacattcaaaacaactctaatgaaaaatatccgaaatttctccatcattgcccacatcgaccacggcaaatcgacgcttgccgaccgcttcatccaatattgcggcggtttggatttgcgcgaaatgagtacgcaggtactcgattccatggacatcgaaaaagagcgcggcattaccatcaaagcgcaaaccgccgcgctcaactataaagcgcgcgacgggcaggtgtatcagcttaatttgattgacacgccgggacacgtcgacttctcttacgaagtttcccgttcgctgtcggcttgcgaaggcgcgcttctggtcgttgacgcgtcgcagggcgtggaagcgcaaaccgtagcgaactgttacaccgcgattgatttgggcgtggaggttgtgcctgttttaaacaaaatcgacctgcccgccgccgaccccgagcgtgtggaacaggaaatcgaagacatcatcggcatcgatgccgtcggtgcagtacagtgttccgccaaaagcggtatcggcgtggaagatgttttggaagaaattgttgccaaaatccctgcgccgaccggcgacgaaaacgcgccgctgcaagcggttatcgtcgattcgtggtttgacaactatgtcggcgtggtcatgctgattcgagtgaaaaacggcaccatcaaactgaaagacaaagtgcgctttatgagcaccaaggcggaaacgcaggtcgagcagctgggcgtattcacaccaaaatcagttcaaaaacaagaactcaaagccggcgaagtgggctttttgattaccggcgtaaaagaattgggtcaggcgaaagtcggcgatacggttacactggttgccaaccctgccactgagccgctgcccggcttccaagaagtacaaagccaagtattcgccggactttatcccgtggaaagccacgactacgaagccttgcgcgacgctttggaaaaattgcagcttaacgacgcttcgttgaaattcgagcctgaagtttcccaggcattgggcttcggcttccgttgcggcttcttgggtctgttgcacttggaaatcgtgcaggaacgcttggagcgcgagttcgatatggatttgattaccaccgcgccgacggtggtttatgaagtcgtgttgaaaaacggtgagaaaatcgaagttgaaaacccgtccaaactgcccgacatcggcagcatcgaaaccatactcgagccgattattaccgcgaccatccttgtgccgcaggaatacgtcggcaacgtcatgactttgtgtaaccaaaagcgcggcgttcaggtcaatatgcagtacatgggccgccaagtgatgctgacttacgatttgcccatgaacgaagtcgtcatggacttcttcgacaaactcaaatccacttcgcgcggttatgcttcgttggactaccatttcaaagagttccaaccgtctgatttgattaagctggatattatggtcaacggcgaaaaagtcgatgccttaagcctgattgtgcaccgtcaaagcgcggttcaccgaggccgcgagctggcatcgaaaatgcgcgagctgattccgcgccaaatgttcgacattgccgtccaagccgccatcggcagccagattatcgcccgcgaaaacgtcaaagcactgcgtaaaaacgtcttagcgaaatgttacggcggcgatattacgcgtaagaaaaaactgcttgaaaaacaaaaggcaggtaaacgccgtatgaaacaagtgggcaatgtggaaattccgcaaagcgcgttcttggcgattttgcaggtgagcgacaaataa

SEQ ID NO: 55070 - DNA, 1215 bp, Neisseria meningitidis
atggataaatttcccaagtctgcaaagctcgatcacgtctgttacgacatacgcgggccggttcacaaaaaagcccttcagttggaagaggagggcaataaaatccttaaactcaatatcggcaaccctgcgccgttcggctttgaagcccctgatgaaatcttggtcgatgtcatccgcaacctgccgacttcgcaaggctattgcgattctaaagggctgtattccgcccgcaaagccattgttcactactatcagaccaaaggtttgcgcgatattacggtaaacgatgtctatatcggcaacggcgtgtccgagctgattacgatgtctatgcaggcattgctcaacgacggcgacgaaatcctgattcccgcgcccgactaccctttgtggacggcggcggcaacgcttgcgggcggtacggtacgccattatctgtgcgacgaagaaaacggctggttccccaaccttgccgatatggaagccaaaatcacgcccaaaaccaaagccatcgtcgtcatcaatcccaataatccgacaggcgcggtgtacagcagggaaatcctgttggaaatcgccgaactggcgcgcaagcacggtttgattattttcgccgacgagatttacgataaaatcctttatgacggcgcggttcaccaccacatcgccgcgcttgcccccgaccttttgacggtaacgttcaacggtttgtccaaagcctaccgcgtcgccggcttccgccaaggctggatggtgctcaacgggccgaaacatcatgcaaaaggttacatcgagggtttggatatgctctcgtctatgcgcctgtgtgccaatacgccgatgcagcacgcgattcagacggcattgggcggctatcagagcatcaacgaattcattttgcccggcggacggcttttggaacagcgtaacagggcgtgggaattggtcaatcagatacccggcgtatcctgcgtcaaaccgatgggcgcgatgtatatgttcccaaaaatcgataccgaaatgtaccgtatccacgatgacatgaaattcgtttacgatttgctggtgcgcgaaaaagtcttgctggtacagggaacggggtttaattggattaaacctgaccatttccgcattgtcacgctgccttacgtccatcagattgaagaggcgatgggcaggttggcaagattcctgcaaacctaccgccaataa

SEQ ID NO: 55071 - DNA, 1080 bp, Neisseria meningitidis
atgaaaacactgaccgtacacaccccgtcccacagctaccccatctttatcggcaacggactgctgccgcaggcaggaagcctgctcaaaccgcatttgggcaaacgcgccgccatcatcgccaacgaaaccgtcgccccgctctacctcggcacgcttcagacggcattggatgcggcaggcgtatcccatttcagcatcatcctgcccgacggcgaggcgcacaaaaactggcagacgctcaacctcatctttgacgggctgatgcaaaaccgcgccgaacgcaaaaccacattaatcgcactgggcggcggcgtgatcggcgacatggtcggctttgccgctgccacctaccagcgcggcgcaccgttcgttcaaataccgaccacactgttgagtcaagtcgactcatcggtgggcggcaaaaccgccatcaaccacccgctcggcaaaaatatgatcggcgcattctaccagccgcaggcggtgcttgccgacttggacacgctgcacaccctgcccgtccgcgaattgtccgccggtatggcggaagtcatcaaatacggcgcgctcggcgacatcggttttttcgaatggctcgaacaaaacatatccggactgatgacgctcgatcgggaaaaacttgcccaagccgtgtaccgctgctgccaaatgaaggcagacatcgtcgcccaagacgaaaccgaacagggcatacgcgcatggctcaacctcggacacaccttcggacacgccattgaaaccgagatgggttacggcacttggctgcatggagaagccatcgccgccggctgcgtgttggcggcgcgtttgtccgaacaactgggcaaaacctccgccgcagataccgcgcggctcgccgccctgctcgaagccgctggactgccgtccgcaccgcccgtgtttgcctttgaaaaatggctcgaacatatgagccacgataaaaaagtcagcggcggcatcatgcgctttatcggtctgaaccggctgggcgaagccaacatcaccgaaattaccgacacggacatcctccgccgcaccctgcaaccgtatctctga

SEQ ID NO: 55072 - DNA, 1500 bp, Neisseria meningitidis
gtgttcaaaaaataccaatacctcgctttggcagcactgtgtgccgcctcgctggcaggctgcgacaaagccggcagctttttcggtgcggacaaaaaagaagcatccttcgtagaacgcatcgaacacaccaaagacgacggcagcgtcagtatgctgctgcccgactttgtccaactggttcaaagcgaaggcccggcagtcgtcaatattcaggcagcccccgccccgcgcacccaaaacggcagcggcaatgccgaaaccgattccgacccgcttgccgacagcgacccgttctacgaatttttcaaacgcctcgtcccgaatatgcccgaaatcccccaagaagaagcagatgacggcggattgaacttcggttcgggcttcatcatcagcaaagacggctatattctgaccaatacgcacgtcgttaccggcatgggcagtatcaaagtcctgctcaacgacaagcgcgaatataccgccaaactcatcggttcggatgtccaatccgatgtcgcccttctgaaaatcgacgcaacggaagagctgcccgtcgtcaaaatcggcaatcccaaagatttgaaaccgggcgaatgggtcgccgccatcggcgcgcccttcggcttcgacaacagcgtgaccgccggcatcgtgtccgccaaaggcagaagcctgcccaacgaaagctacacacccttcatccaaaccgacgttgccatcaatccgggcaactccggcggcccgctgttcaacctgaaaggacaggtcgtcggcatcaactcgcaaatatacagccgcagcggcggattcatgggcatttccttcgccatcccgattgacgttgccatgaatgtcgccgaacagctgaaaaacaccggcaaagtccaacgcggacaactgggcgtgattattcaagaagtatcctacggtttggcacaatcgttcggtttggacaaagccggcggcgcactgattgccaaaatcctgcccggcagccccgcagaacgtgccggcctgcaggcgggcgacatcgtcctcagcctcgacggcggagaaatacgttcttccggcgaccttcccgttatggtcggcgccattacgccgggaaaagaagtcagcctcggcgtatggcgcaaaggtaaggaaatcaccgttgccgtcaaactgggcaatgcttccgaacaaaccggttcctcgtccgagccggacaaagccccttatgccgaacaccaatccggtacgttctcggtcgaatccgcaggcattacccttcagacacataccgacagcagcggcggacggcttgtcgtcgtgcgggtttcgggggcggcagaacgcgcaggcttgaggcgcggcgacgaaatccttgccgtcgggcaagtccccgtcaatgacgaagacggtttccgcaaagctatggacaaggcaggcaaaaacgtccccctgctggtcatgcgccgtggcaacacgctgttcatcgcattaaacctgcaataa

SEQ ID NO: 55073 - DNA, 1272 bp, Neisseria meningitidis
atgcaacagattaaatttattgacttattttccgggatgagcggtatcaggaaaggatttgaacaagcctgtcggaaacagtcggttgcttgcgaatgtgtttttacctcagaaatcaaaccggcagctttggaagtattgaagcaaaactaccctgatgaagtgccgtatggagatataacgaaaattgaaacgggagatattcccgattttgacatcttgttggcaggcttcccttgccaggctttttctttcgccggaaaaagattgggctttgaagatacgcggggaacgcttttctttgatgtggcaaggattttaaaggcaaaaaaaccaaaaggttttattttggaaaatgtggaaggattggtgacgcacgatagaaaagatccgacacaaaaaataggacgcaccctgaccgttattttggaaaccttggaaacattgggctactatgtttcttggaaagttttaaatgcaaaagatttcggcattccccaaaacaggaagcgcatttatctgacaggcagtttgaaatccaaacccgacttatcttttgaaacaaccctaagtccgaaattaaaaaatattttggaatcgggactgcctaccgaaagcagtcctttcatcaaaaaattgctaaagaaatttcccccgtccgaactgtacggaaaatcagtaaaggacaaacggggagggaaaaacaatatccacagttgggatattgaattaaaaggcacagtaaccgaagaagagaagcaattattaaatatgcttctaaaagaacggaggaagaaaaaatgggcttcagaaatcggcatcgattggatggatgggatgcctttgacaaaagcgcaaatttcaactttctataaacaccccaatcttcaaaatattttggacagcctgacagataaaggctatttggttttggagcatccgaaacaaaaaattggcgggcgaagaatcaaagatgaatccctgcccaaaggctacaatattgtttcaggaaaaaaatcatttgaaatcaataaaatattagacccaaatgatgttgcgccaaccttagttgcaatggatatggagcaccttttcgtcgttgacaacggcggtttgcgcacacttaccggaaaagaaggtttacgcttattcggctatccggacgattattcgtttgatattcctaaaaaagacaaatacgatttattgggcaataccgttgccgttcctgtgattaaggcggtatctgaaaggcttctgcatactttataa

SEQ ID NO: 55074 - DNA, 378 bp, Neisseria meningitidis; identical to SEQ ID NO: 36713

SEQ ID NO: 55075 - DNA, 1881 bp, Neisseria meningitidis; identical to SEQ ID NO: 47271

SEQ ID NO: 55076 - DNA, 1377 bp, Neisseria meningitidis
atgaaacacatccacattatcggtatcggcggcacgtttatgggcgggattgccgccattgccaaagaagccgggtttgaagtcagcggttgcgacgcgaagatgtatccgccgatgagcacccagctcgaagccttgggtataggcgtacacgaaggcttcgacgcggcgcagttggaggaatttaaagccgacgtttacgtcatcggcaatgtcgccaagcgcgggatggatgtggttgaggcgattttgaaccgcgggctgccttatatttccggtccgcaatggctggctgaaaacgtgctgcaccatcattgggtactcggtgtggcggggacgcacggcaaaacgaccaccgcgtccatgctcgcatgggttttggaatatgccggactcgcgccgggcttccttatcggcggcgtaccggaaaactttagcgtttccgcccgcctgccgcaaacgccgcgtcaagacccgaacagccaatctccgtttttcgttatcgaagccgacgaatacgacaccgcctttttcgacaaacgctccaaattcgtacattaccgcccgcgtaccgtcgtgttgaacaatctggaattcgaccacgccgacatctttgccgacttgggcgcgatacagacccagttccaccacctcgtgcgcaccgtgccgtctgaaggcttaatcatctgtaacggacagcagcaaagcttgcaggatactttagacaaaggctgctggacgccggtggagaaattcggcacggaacacggctggcaggccggcgaagccaatgccgacggctcgttcgacgtgttactagacggcaaaacggccggacgcgtcaaatgggatttgatgggcaggcacaaccgcatgaatgcgctcgccgtcattgccgccgcgcgtcatgtcggtgtcggcattcagacggcctgcgaagccttgagcacgtttaaaaacgtcaaacgccgcatggaaatcaaaggcacggtaaacggcatcactgtttacgacgacttcgcccaccatccgaccgccatcgaaaccaccatagaaggtctgcgtcagcgcgtcggaaacgcccgcatcctcgccgtcctcgagccgcgttccaacacgatgaagctgggcacgatgaagtccgccctgcccgaaagcctcaaagaagccgaccaagtgttctgctacgccggcggtgtggactggaacgtcgccgaagccctcgcacctttgggcggcaggctgcacgtcggcaaggatttcgatgccttcgttgccgaaattgtgaaaaacgcccgaaccggcgaccatattttggtgatgagcaacggcggtttcggcggaatacacaccaaactgctggacgctttgagatag

SEQ ID NO: 55077 - DNA, 1065 bp, Neisseria meningitidis
atggcttggagtatgtttgccacaacccaagccgatagagcggtaaggtctgcaactgcacctaaagaaatgtggttccataagaagataatagatgaaaaaacaggtaaagtatcctttgataccagacaaatttggtcattgaatgatttaagcaaggaagaactggcaagcattcaagacacaaatggcaaagttattactgtgtctaatcctggtattttcaataatcgagaagattcattaagcaacgcagcaaaacaaaatcgtaatagtacaaacggtagtggtgttattgcagttatgaatcctccaacagggaaatataaatctgattctaataacaaaataaaagattctttatggctcagttcaagtcttgtttctgaactgatgtatgtcggttacgaccaattaaataataaagtgttccaaggctatttacccaaaaccaattcagaaaaactgaatcaagatatttatcgagaggttcaaaaaatgggtaatggctggtcggttgataccagtaaccacagtcgtgggggaattacagcaagcgtttccttaaaagattgggtaaacaataaagagcaaaatggcattgccccaatcagaaaagcacgtttctatggtacagccacaaatgtgaagaatgattacgccgatgttttacagaaaaacggctatacctatacgggtgcagacggtaaaacttataacagcggagcctactcaatcgtgcatgataaagattttgtggggaacaaatggatacctttcttgctaggaaataatgagacaacaaaaggagcttgtaagggattttgctattcgcatagcagttattttgcggaagtgcctgaacagtatcaaagggataggaatggtgaatatatccttgataagaacaacaacaaaatagaaacagaagattggaaagactataaggggaaatggggtgttcctaaaatgggtgatgacggcaaatatatcaatcatgctattccgaaattagtgtatccgaataaactcaatggtgagcaatatgaagaaaacccgttctaa

SEQ ID NO: 55078 - DNA, 645 bp, Neisseria meningitidis
atgactttaggtctggttggacgcaaagttggtatgacccgcgtgttcgacgaacagggtgtttctgttccggtaaccgttttggatatgtcagccaaccgcgtcacacaagtaaaatccaaagatactgacggctatactgccgttcaagttacctttggtcagaaaaaagccaatcgtgtcaacaaagccgaagccggacactttgcaaaagcaggtgttgaagccggtcgcggtttgattgagtttgctttgactgaagaaaaattagctgaattgaaagccggtgacgaaatcaccgtttctatgtttgaagttggtcaactggtcgatgtaaccggtacctctaaaggtaaaggtttctccggtacgatcaaacgtcataacttcggcgcccagcgtacttcccacggtaactcccgttctcaccgtgttccaggctctatcggtatggcgcaagacccgggtcgcgtgttccccggtaaacgcatggccggccaatacggcaacaccaaagcaactgttcaaaaattggaagttgtccgtgttgacgcagaacgccaactgctgttggttaagggtgctgttccaggtgcggtcaacagcgatgttgtagttcgtcccagcgtgaaagtaggtgcgtaa

SEQ ID NO: 55079 - DNA, 387 bp, Neisseria meningitidis
gtggttgtcttcggcattctgaaacgcaacggacgggtctataccgttgtggtggataatgccaagtctgaaacgttactccctgtcatcaagaagaaaatcatgccggacagtattgtttataccgatagtctgagcagctgcgacaagttggacgtgagcggttttatccattaccgcatcaaccattccaaggaatttgcagaccgtcagaaccacattaacggcattgagaatttttggaatcaggcaaaacgcgtcttgcgaaaatacaacggaatcgatcgtaaatctttcccgctgtgcttgaaagaatgcgaatttcgatttaacttcggcacaccgtctcaacagcttaaaatcctgcgggattggtgtggaatttag

SEQ ID NO: 55080 - DNA, 696 bp, Neisseria meningitidis; identical to SEQ ID NO: 42672

SEQ ID NO: 55081 - DNA, 417 bp, Neisseria meningitidis; identical to SEQ ID NO: 51640

SEQ ID NO: 55082 - DNA, 1866 bp, Neisseria meningitidis
atgatagaaaaactgactttcggactgtttaaaaaagaagacgcgcgcagctttatgcgcctgatggcatacgtccgcccctacaaaatccgcatcattgccgccctgattgccattttcggcgttgccgccaccgaaagctaccttgccgccttcatcgcccccctgattaaccacggcttttccgcacctgccgcgccgcccgagctgtctgccgccgccggcatcatttccaccctgcaaaactggcgcgaacagtttacctatatggtttgggggacggaaaacaaaatctggaccgtcccgctcttcctcatcatcctcgtcgtcatccgtggcatctgccgctttaccagcacctatctgatgacttgggtctccgtgatgaccatcagcaaaatccgcaaagatatgtttgccaaaatgctgaccctttcctcccgctaccatcaggaaacgccgtccggcaccgtactgatgaatatgctcaacctgaccgaacagtcggtcagcaacgccagcgacatcttcaccgtcctcacgcgcgacacgatgatcgttaccggcctgaccatcgtcctgctttacctcaactggcagctcagcctcatcgtcgtcctgatgttccccctgctctccctgctctcgcgctactaccgcgaccgtctgaaacacgtcatttccgactcgcaaaaaagcataggcacgatgaacaacgtgattgccgaaacccatcagggacaccgcgtcgtcaagctgttcaacgggcaggcgcaggcggcaaaccggttcgacgcggtcaaccgcaccatcgtccgcctcagcaaaaaaatcacgcaggcaacggcggcacattccccgttcagcgaactgatcgcctcgatcgccctcgccgtcgtcatcttcatcgccctgtggcaaagccaaaacggctacaccaccatcggcgaatttatggcattcatcgtcgcgatgctgcaaatgtacgcccccatcaaaagccttgccaacatcagcatccctatgcagacgatgttcctcgccgccgacggtgtatgtgcatttctcgacaccccgcccgaacaggacaaaggcacgctcgcgccgcagcgtgtcgaagggcgcatcagcttccgcaacgtcgatgtcgaataccgttcagacggcatcaaagccctcgacggcttcaacctcgacatcagacaaggcgaacgcgtcgccctggtcggacgttccggcagcggcaaatccaccgtcgtcaacctgctgccccgctttgtcgaaccgtctgccggcaacatctgcatagacagtatcgacatcgccgacatcaaactcgactgcctgcgcgcccaatttgccctcgtctcccaagacgtattcctgtttgacgacaccctgtttgaaaacgtccgatatagccgtcccgacgcaggcgaagccgaagtcctgttcgccctccaaaccgccaacctgcaaagcctgattgacagctccccgctcggactgcaccagcccatcggatcgaacggcagcaacttatccggcggacagcggcaacgcgtcgccattgcccgcgccattttgaaagacgcgccgatattattattggacgaagccaccagcgcattagacaacgaatccgaacgcctcgtccaacaagcgctcgaacgcctgatggaaaaccgcaccggcatcatcgtcgcccaccgcctgaccaccatcgaaggggccgaccgcatcatcgtgatggacgacggcaaaatcatcgaacaaggcacacacgaacaactgatgtcccaaaacggctactacacaatgttacgcaatatctcaaacaaagatgccgccgtccggacggcataa

SEQ ID NO: 55083 - DNA, 1338 bp, Neisseria meningitidis
atgacgcttgaaaacaaaaaaatcctcgtcgccggactcggcggtacgggtatttccatgattgcctatctgcgcaaaaacggcgcggaggtggccgcttatgatgcggagttgaagcccgagcgcgtgtcgcaaatcggtaagatgtttgacgggctggtgttttacacaggccgtctgaaagatgcgctggacaacggtttcgatattttggcactcagccccggcatcagcgagcgtcagccggatattgaggcgttcaagcaaaacggcggacgcgtgttgggcgacatcgaattgctggcggacattgtgaaccgccggggcgacaaggtaattgcgattaccggcagcaacggcaaaaccacggtaacgagcctggtcggctatctctgtatcaagtgcgggctggataccgttatcgcgggcaatatcggcacgccggttttggaggcggaatggcagcgcgaaggcaaaaaggcggacgtgtgggtgttggagctttccagcttccaactggaaaacaccgaaagcctgcgcccgacggcggcgacggtactgaatatttccgaagaccatctcgaccgctacgacgacttgctcgactacgcgcataccaaagccaagattttccgtggcgacggtgtgcaggttttgaatgcggacgatgcgttctgccgtgccatgaaacgtgccgggcgcgaggtaaaatggttttcgttggaacacgaagccgatttttggttggaacgtgagacaggccgcctgaaacaaggcaatgaagatttgattgccacgcaagatattccgttgcaaggcttgcacaacgccaccaacgtgatggctgccgttgccttgtgcgaagctgtcggtttgccgcgcgaagcattgctcgaacacgtcaaaacctttcaaggcctgccgcaccgcgtggaaaaaatcggcgagaaaaatggcgtggtgtttatcgatgacagcaaaggcacgaacgtcggtgcgaccgccgccgcgattgccggtttgcaaaatccgctcttcgtgattttaggcggcatgggcaaagggcaggacttcacgcctctgcgcgacgcgcttgccggcaaggcaaaaggcgtgttcctgatcggcgttgatgcgccgcaaatccgccgcgatttggacggctgcggtctgaatatgaccgactgcgccactttggaagaagccgttcagacggcatatgcccaagccgaagcgtgcgatatcgtgctgctcagcccggcttgtgcgagttttgatatgtttaaaggctacgcgcaccgttcggaagtgtttatcgaagcgtttaaggctttgtga

SEQ ID NO: 55084 - DNA, 324 bp, Neisseria meningitidis; identical to SEQ ID NO: 38702

SEQ ID NO: 55085 - DNA, 435 bp, Neisseria meningitidis; identical to SEQ ID NO: 40706

SEQ ID NO: 55086 - DNA, 699 bp, Neisseria meningitidis
ttgccgcttctgtctgtcagccgtttcgggctgcacaccacatctgttcaaaggaaaaccatgtttcaaaattttgatttgggcgtgtttctgcttgccgtcctgcccgtgctgctcgccattaccgtcagggaggtggcgcgcggctatacggcgcgctactggggagacaacactgccgaacaatacggcaggctgacactgaaccccctgccccatatcgatttggtcggcacaatcatcgtaccgctgcttactttgatgtttacgcccttcctgttcggctgggcgcgtccgattcctatcgattcgcgcaacttccgcaacccgcgccttgcctggcgttgcgttgccgcgtccggcccgctgtcgaatctggcgatggctgttctgtggggcgtggttttggtgctgactccgtatgtcggtggggcgtatcagatgccgttggctcaaatggcaaactacggtattctgatcaatgcgattctgttcgcgctcaacatcatccccatcctgccttgggacggcggcattttcatcgacaccttcctgtcggcgaaatattcgcaagcgttccgcaaaatcgaaccttatgggacgtggattatcctgctgcttatgctgaccggggttttgggtgcgtttattgcaccgattgtgcggctggtgattgcgtttgtgcagatgttcgtctga

SEQ ID NO: 55087 - DNA, 693 bp, Neisseria meningitidis
atgggacaaaagattaaccctacaggctttcgcctggcggtaactaaagactgggcttcaaaatggtttgctaaaagcaccgacttttctactgttttgaagcaggatatcgatgttcgcaattatttgcgtcaaaaattggccaatgcttcggttggtcgagtggttattgaacgccctgcaaaatctgcacgcattaccattcactccgctcgtccgggtgtggttatcggtaaaaaaggtgaggatatcgaggttttgaaacgtgacttgcaagtcttgatgggtgtacctgttcatgtaaatattgaagagattcgccgtcctgagttggatgctcaaattattgctgacggtattgcccagcagttggaaaagcgcgttcaattccgtcgtgctatgaaacgagcaatgcaaaatgcaatgcgttctggtgctaaaggcattaagattatgacttcaggccgtctgaatggtgcggatattgcccgtagtgaatggtatcgtgaaggtcgcgtgccactgcatactttacgtgcaaatgtagattatgcaaccagcgaagcgcacaccacatatggtgtattgggtctgaaagtttgggtttatacggaaggcaatattaaatcttccaaacctgaacatgagagtaaacaaagaaaggcaggtagacgtaatgctgcagccaactag

SEQ ID NO: 55088 - DNA, 390 bp, Neisseria meningitidis; identical to SEQ ID NO: 37209

SEQ ID NO: 55089 - DNA, 5589 bp, Neisseria meningitidis
atgaataaaggtttacatcgcattatctttagtaaaaagcacagcaccatggttgcagtagccgaaactgccaacagccagggcaaaggtaaacaggcaggcagttcggtttctgtttcactgaaaacttcaggcgacctttgcggcaaactcaaaaccacccttaaaactttggtctgctctttggtttccctgagtatggtattgcctgcccatgcccaaattaccaccgacaaatcagcacctaaaaaccagcaggtcgttatccttaaaaccaacactggtgcccccttggtgaatatccaaactccgaatggacgcggattgagccacaaccgctatacgcagtttgatgttgacaacaaaggggcagtgttaaacaacgaccgtaacaataatccgtttgtggtcaaaggcagtgcgcaattgattttgaacgaggtacgcggtacggctagcaaactcaacggtatcgttaccgtaggcggtcaaaaggccgacgtgattattgccaaccccaacggcattaccgttaatggcggcggctttaaaaatgtcggtcggggcatcttaactaccggtgcgccccaaatcggcaaagacggtgcactgacaggatttgatgtgcgtcaaggcacattgaccgtaggagcagcaggttggaatgataaaggcgaagccgactacaccggggtacttgctcgtgcagttgctttgcaggggaaattacagggtaaaaacctggcggtttctaccggtcctcagaaagtagattacgccagcggcgaaatcagtgcaggtacggcagcgggtacgaaaccgactattgcccttgatactgccgcactgggcggtatgtacgccgacagcatcacactgattgccaatgaaaaaggcgtaggcgtcaaaaatgccggcacactcgaagcggccaagcaattgattgtgacttcgtcaggccgcattgaaaacagcggccgcatcgccaccactgccgacggcaccgaagcttcaccgacttatctctccatcgaaaccaccgaaaaaggagcggcaggcacatttatctccaatgatggtcggatcgagagcaaaggcttattggttattgataccggggaggacatcggtttgcgtaacggagcggtcgttcaaaacaacggcaaccgccctgctgctacggtattaaatgccggccgtaatttggttatcgaaagcaaagcaaatgtgaacaatgctaaaggttcgaccaatctgtcgaccggcggccgtaccgtcatcaaggaggccagtattcagactggcactaccgtatacagttccagcaaaggcaacgccgaattaggcaataacacacgcattaccggggcagatgttaccgtattatccaacggcaccatcagcagttccgccgtaatagatgccaaagacaccgcacacatcgaagcaggcaaaccgctttctttggaagcttcaacagttacctccgatatccgcttaaacggaggcagtatcaagggcggcaagcagcttgctttactggcagacgataacattactgccaaaactaccaatctgaatactcccggcaatctgtatgttcatacaggtaaagatctgaatttgaatgttgataaagatttgtctgccgccagcatccatttgaaatcggataacgctgcccatattaccggcaccagtaaaaccctcactgcctcaaaagacatgggtgtggaggcaggctcgctgaatgttaccaataccaatctgcgtaccaactcgggtaatctgcacattcaggcagccaaaggcaatattcagcttcgcaataccaagctgaacgcagccaaggctctcgaaaccaccgcattgcagggcaatatcgtttcagacggccttcatgctgtttctgcagacggtcatgtatccttattggccaacggtaatgccgactttaccggtcacaataccctgacagccaaggccgatgtcaatgcaggatcggttggtaaaggccgtctgaaagcagacaataccaatatcacttcatcttcaggagatattacgttggttgccggcaacggtattcagcttggtgacggaaaacaacgcaattcaatcaacggaaaacacatcagcatcaaaaacaacggtggtaatgccgacttaaaaaaccttaacgtccatgccaaaagcggggcattgaacattcattccgaccgggcattgagcatagaaaataccaagctggagtctacccataatacgcatcttaatgcacaacacgagcgggtaacgctcaaccaagtagatgcctacgcacaccgtcatctaagcattaccggcagccagatttggcaaaacgacaaactgccttctgccaacaagctggtggctaacggtgtattggcactcaatgcgcgctattcccaaattgccgacaacaccacgctgagagcgggtgcaatcaaccttactgccggtaccgccctagtcaagcgcggcaacatcaattggagtaccgtttcgaccaaaactttggaagataatgccgaattaaaaccattggccggacggctgaatattgaagcaggtagcggcacattaaccatcgaacctgccaaccgcatcagtgcgcataccgacctgagcatcaaaacaggcggaaaattgctgttgtctgtaaaaggaggaaatgcaggtgcgcctagtgctcaagtttcctcattggaagcaaaaggcaatatccgtctggttacaggagaaacagatttaagaggttctaaaattacagccggtaaaaacttggttgtcgccaccaccaaaggcaagttgaatatcgaagccgtaaacaactcattcagcaattattttcctacacaaaaagcggctgaactcaaccaaaaatccaaagaattggaacagcagattgcgcagttgaaaaaaagctcgcctaaaagcaagctgattccaaccctgcaagaagaacgcgaccgtctcgctttctatattcaagccatcaacaaggaagttaaaggtaaaaaacccaaaggcaaagaatatctgcaagccaagctttctgcacaaaatattgacttgatttccgcacaaggcatcgaaatcagcggttccgatattaccgcttccaaaaaactgaaccttcacgccgcaggcgtattgccaaaggcagcagattcagaggcggctgctattctgattgacggcataaccgaccaatatgaaattggcaagcccacctacaagagtcactacgacaaagctgctctgaacaagccttcacgtttgaccggacgtacgggggtaagtattcatgcagctgcggcactcgatgatgcacgtattattatcggtgcatccgaaatcaaagctccctcaggcagcatagacatcaaagcccatagtgatattgtactggaggctggacaaaacgatgcctataccttcttaaaaaccaaaggtaaaagcggcaaaatcatcagaaaaaccaagtttaccagcacccgcgaccacctgattatgccagcccccgtcgagctgaccgccaacggtatcacgcttcaggcaggcggcaacatcgaagctaataccacccgcttcaatgcccctgcaggtaaagttaccctggttgcgggtgaagagctgcaactgctggcagaagaaggcatccacaagcacgagttggatgtccaaaaaagccgccgctttatcggcatcaaggtaggtaagagcaattacagtaaaaacgaactgaacgaaaccaaattgcctgtccgcgtcgtcgcccaaactgcagccacccgttcaggctgggataccgtgctcgaaggtaccgaattcaaaaccacgctggccggtgccgacattcaggcaggtgtaggcgaaaaagcccgtgtcgatgcgaaaattatcctcaaaggcattgtgaaccgtatccagtcggaagaaaaattagaaaccaactcaaccgtatggcagaaacaggccggacgcggcagcactatcgaaacgctaaaactgcccagcttcgaaagccctactccgcccaaattgtccgcacccggcggctatatcgtcgacattccgaaaggcaatctgaaaaccgaaatcgaaaagctgtccaaacagcccgagtatgcctatctgaaacagctccaagtagcgaaaaacatcaactggaatcaggtgcagcttgcttacgacagatgggactacaaacaggagggcttaaccgaagcaggtgcggcgattatcgcactggccgttaccgtggtcacctcaggcgcaggaaccggagccgtattgggattaaacggtgcggccgccgccgcaaccgatgcagcattcgcctctttggccagccaggcttccgtatcgttcatcaacaacaaaggcgatgtcggcaaaaccctgaaagagctgggcagaagcagcacggtgaaaaatctggtggttgccgccgctaccgcaggcgtagccgacaaaatcggcgcttcggcactgaacaatgtcagcgataagcagtggatcaacaacctgaccgtcaacctggccaatgcgggcagtgccgcactgattaataccgctgtcaacggcggcagcctgaaagacaatctggaagcgaatatccttgcggctttggtgaatactgcgcatggagaagcagccagtaaaatcaaacagttggatcagcactacatagtccacaagattgcccatgccatagcgggctgtgcggcagcggcggcgaataagggcaagtgtcaggatggcgcgatcggtgcggtcgtgggggagattgtcggggaggctttggttaagaataccgatttcagcggtatgactgcttctgaaattgaaaaagctaaagcgaatattactgcgtatgcaaaactggtagccggagcgactgtaggtgttacaggaggcaatgttgatgtggcggcaaatgcttccgaaacagctgttaaaaataatgcattagatattatttgggatatcggcaacctcgtatgggacggcggtaaatggatttacgccaaatctattggcgataagcagatggctcgagaagcggcgattgattttggtgtggatgccgccgcagctgccgttccctttgttccggcaggtgcgactaaaatcagccgaggcggggcttatgttctgaaggcgggagacgaagcagttgatacggctaaagccatacaggaaattcagaagcagaccggaatcaagcttacttatgataaggttaataaggtttggacaacaccggcggggttagattatgggttagatgctaagcatggtaataggattaaacatgttttagcccatacaattccaaatccaaacaaacctgttcattctgtttttaatgtgtcccgtaaagaagttttgcctttggttgatgaagcttggagaatgaaaggaaatcctttgccaaatgattcatccgtatatcttgtagatatgaagaaacctattggaacaaaaggagaaacaaaagtgcggattgttgtgcaaaaaggaacaaataaaatcatttctgcatatcctcagaaataa

SEQ ID NO: 55090 - DNA, 1722 bp, Neisseria meningitidis
atgccgtctgaagccatctgttcaaagaaaactatgctcaataaagaccaatttgcggacaaccattttatccgcaccttcatcgaagaagacctcaaaagcggcaaacacgaaaccatccaaacccgttttccgccggagcccaacggctacctgcacatcggacacgccaaatccatctgcctgaacttcggtttggcgtatatttacgacggcttgtgcaacctgcgttttgacgataccaaccccgaaaaagaaaacgacgaatacgtcaacgccatcaaagaagacgttgagtggctcggtttccattgggcgggcgagccgcgtttcgcttccaactatttcgaccagctttatgactacgccgtcggtttggttaaagacggcaaagcgtatgtcgatgatttgacgccagaagaaatgcgcgaataccgcggtacgctgaccgaagcaggcaaaaacagcccttatcgcgaccgcagtatcgaagaaaacctcgacctgttcacgcgcatgaaaaacggtgagttccccgacggcagcaaaaccctgcgcctgaaaatcgacatggcatccggcaacatcaatatgcgcgatccggtcatctaccgcatccgccgcgcccatcaccacaacaccggcgacaaatggtgcatctatccgatgtacgactacacgcattgtatttccgatgccatcgaaggcatcacgcattccttgtgtacgctcgaatttgaagcccatcgtccgctgtatgactgggtgttggacaacatccccgcgccgcacgccacacgtccgcgccaatacgagttttcacgcttggagcttttgtacaccattacctccaaacggaaattgaatcagttggttgtggaaaaacacgtttccggctgggacgatccgcgtatgccgaccatttccggtatgcgccgacgcggctacacgcccgaagggctgcgcctgtttgccaaacgcgccggtatttccaaatctgaaaacatcgtcgatatgagcgtgttggaaggcgcgattcgcgaagagttggaaaattccgccccacgcctgatggcggtgttgaacccgctcaaagtaaccctgaccaactttgaaaccggcagaacccaaagccgccgtgccgcgttccatccgaaccacgaagaaatgggcgatcgcgaagtacctgtttcacaaaccatttacatcgaagccgacgactttgccgaaaatccgcccaaaggcttcaaacgcctgattcccggcggcgaagtacgcttgcgccacggctatgtcatcaagtgcgatgaagtcgtcaaagacgaagcaggcaatgtggttgaactcaaatgcagcatcgaccacgacaccttgggcaaaaatccagaaggccgtaaagttaaaggcgtgattcattgggtttccgccgaacacgccgccgaaatcaaagtccgtctgtacgaccgcctctttaccgtcgagcgtcccgatgccgtgcgcggcgaagacggcgaatacctgccgttcaccgatttcctcaatccggaatccgtcaaggaaatcaccgcctacgccgaacctgccgccaaagatttgccggcagaaagccgttggcagttcgagcgtatcggctacttcgtaaccgaccgtaaagaccacggcaaagacacgccggtgtttaaccgcacggtcacgctgaaagattcttggcagcctaagtaa

SEQ ID NO: 55091 - DNA, 864 bp, Neisseria meningitidis; identical to SEQ ID NO: 44990

SEQ ID NO: 55092 - DNA, 2652 bp, Neisseria meningitidis
atggaactgaaatttgaagaactgccctatcagcttgatgcggtaaatgccgttgcgaatctttttgcagggcagccgaaccacgcccggacatttgatttgaccagtcaggggacggggcggtttgtcggcaacggcttggatttggattgggaaacgctgggtcggaatctgaatgcggtgcaaaagcaaaacggacagcctgaaacggaaatcggcacacacgggctgaatttttctctggaaatggaaacgggtacgggcaaaacctatgtctatctgcgcacgatttacgaattgaaccgccgttgcggctggaagaaatttgtgattgtcgtgccgagtgtgccgatacgcgaaggcgtgttgaaaagcctggaaattacgaaggcgcattttgacggagtgttcggcaggcccgtgatgcgttatgcggaatattcaagcacgcggctgtcggatttacgcgcttttgcggtaaacgaccatatcgaaattttggtaatcaatatccagtcgtttgaaaaagacggaaacgtgatcaataaggtaaacgaaagcggggaagcaccgattaagtttattcaggaaacgtgtcctatcgtcattatcgacgagccgcagaatatggaaacggaaggccgtctgaatgccttggaatcgctcaatccgctctttaccctgcgctattcggcaacgcataaaaaaccgtatcacaaggtgtacagcctgaatcccgtgcaggcatacaatttgaagctggtcaagcaaatcgaagttttgccggtattggcggaaaacgatgtgaacggcgcatttgcggagctgctggaagtgaaacaggcggccagaggccgtctgaaagccgatttgaatattcattatcaggataaaaaggaaaccaagaagaaaaaggtatccgtcaaatcgggagacgatttgtttgaaaaatcgggcggcaacgaagcctaccgccacggtttcattatcgacggcatggatttcgagaatcaggaattggcgttctccagcggtaaaaccattacgcgcggcggagacggcgatgtggtgcgcgatgaaattatgaaaaaccaaatccgcgaaacggtaagggagcatttggcgaaggagaaacggctgaatccgtcggggattaaggtgttgtcgctgttcttcattgaccgcgtggagaattaccgcacagaagacggaacggcaggcaagtttgccctttggtttgaagaaatttatcgggagctttcaggcaataccgatacggcaggcgtacacgacggctatttctctcaagacaagaaaggccgtctgaaaaacaccgacggcacgacgcaggcggacaacgatacctaccgcctcattatgcgcgacaaggaaaccctgctttccttcggcagcccgctgcgctttatcttttcccattccgcgctgaaagaaggctgggacaaccccaacgttttccaaatctgcatgctcaacgaaacccgctcgccgttgaaaaagcggcaggaaatcgggcgcgggctgcgtatcgccgtcaatcaggaaggacggcgcgtgcgcgatgaaaacgtgaacatactgaccgttgtgccgaacgaaagctacgaattgtttgccgcaaatctgcaaaaggaatacgaagacgaatgcggtatcaaatttgccgccgaaaacatcaaaaacggcaataagaagaaaaaacagctattccgcaaagattttccgctcgatcctgagtttcaggcaatttgggagaggttgaaatacaaaacgcgctaccgtgtgcgcttcgatacggaagaattgattaaacaggcttcggcggcagtagcaggcctgcccgaaatccagaagccgaaaatccgcatccgtaaggcgcaattgaaacaatctcaaacctacggtatcgaaacagtcgaaattgccagccgcagccgcgatatggaaaccacatgggagattcccgacatactcggcgagatccaaaaaaagacggggctgacgcggcgcacggtgtacgaaatcatcatacagtcaggccgtctgaaagatgtgccgggcaacccgcaacgcttcatcgaccttaccgccgaagtggtaaaccgcagcctgcacgcgttgatggcggcaggaatcgagtatgagcgaaccggcgaagtgtacgaccaaaagctgttggaagatatggcgcgcgaaggcatcgagttttatgaaaacaactttacgtttgcagtcggtaatccgcaaaaaaccatttgcgaaaactatatccctctggattccggcacggaacaagcctttgcccaaaattgcgaggattatgatgcgaaaaatgaaggcggcgtggcgttttacttcaaactgcccagctggttcaaaatcccaaccccgctgggcaactacaatcccgattgggcggtggtgaaacaggttcaggacaaagtgtatttcgttgcagaaaccaaaaataccggcaaaagcattcaggcgggggtagatgcgggcaagctgcgcgaaaacgaacggctgaaaatcgaatgcggtgaacggcattttgaagcactgggcggtttggcatactgtgttgtggaaaaagtgggggacttaaagttagaaaaagaggagcaggcttaa

SEQ ID NO: 55093 - DNA, 258 bp, Neisseria meningitidis
atgcagaccgttaccatgtacacaggtccgttttgtccctactgcgcgatggcgaaaaggctgctgcacacggcaggtgtcggacatatcgacgaaatccgtgtcgatgcaagccccgaagcctttgccgaaatgcagcagctttcgggacagcgcagcgtgccgcagattttcatcggcgaaacgcacgtcggcggatttaccgacctctaccgcctccagcaggaaggcgggctggacggactgctgaacccttaa

SEQ ID NO: 55094 - DNA, 828 bp, Neisseria meningitidis; identical to SEQ ID NO: 48305

SEQ ID NO: 55095 - DNA, 678 bp, Neisseria meningitidis
atgagcatcaagcaatggccggaaggcgaaagacccagggaaaagctgttggaacgcggggcggcggcgttgagtgatgccgaacttttggcaatcctgctgcgcgtcggcacgctcggaatgagtgcggtcgatttggcgcgttatttgctgcaggagttcggcagtttggggaggctgatgagcgcggaggtcggcaaactgtcggcatacaaagggatggggacggcaagtttcacacagtttgccgtggtcagggaaatcgggcggcggatattggcggaagaattgcaggagagcatcgtcctgtccgatccggatacggtggccgattatttacgctttcatttggggcaggaaaaagtcgaagtcagcgtcgcgctgctgctgaaccgccaaaaccaactgattgcggtcagagagctgtcgcgcggtacggttgcggaaaacacgatttacatccgcgaaatcgtcaaactggcattggacgaatatgccgacagcctgattattgcgcacaaccatccgggcggctcgcccgaaccttcgcaggaagacatcatgttcacaaggcggctggcacaggcaatgtcgctggtcgatgtgtcgctgctcgaccattttatcgttacctcgcaaagcgtctgttcgttcagacagctcgggttgatgccctga

SEQ ID NO: 55096 - DNA, 1110 bp, Neisseria meningitidis
atgttttccgaaacagatatttctatgatgcaaaacgccctcaaacttgccgctttggggcgtttttccacttcgcccaatccgcgcgtcggctgcgttatcgcacaaggcagccaaattgtcggacagggcttccacgtcaaagcgggcgaaccgcacgccgaagtccacgccctgcgtcaggcgggcgaaatggcacaaggcgcgaccgcctttgttaccctcgaaccgtgcagccattacggacgcacaccgccctgcgccgaagctctgctccgttccggcgtaacacgcgtcgttgccgccatgcgcgaccccaacccgctggttgcaggcaaagggcttgccctgctcgaagcagcaggcatcaagacggaatgcggtttactcgaacatcaggcaagggaactcaaccgaggcttcctgtcgcgcatcgaacgccgccgccccttcgtccgcctcaaatgcgccgtttcgctggacggcaaaaccgccctttcagacggcagcagcttttggattaccggcgaagacgcgcgtgccgacgtacaggttttgcgtgccgaaagctgcgcggtgctgaccggcatcggcacggtgttggcggacaatccccggctcaacgtccgcgcttttccaactttgcgccaacccgcacgcatcgtgttagacagccgcctgcgcctgcccttggacagccaccttctgaccgacggacaatctccaacctacatcgccaccttggaacgcgatgaagacaaactccgcccctatcgcaaacacgcccacgtccgcatcctgatgccgtctgaaacggcaggcggcaaaatcgatttgaacagcctgatgcgcctgcttgccgacgaaggcataggggaactcatagtcgaagcaggctccgaactcacatctgcatttttggcagaagatttggcagacgaaatcgtgctgtaccgttcgcccaaaatcctcggcagcggcaaagacctgttttccctgcccgaaaaccgcgccgccctttccgcaccgcccttgtggatgcccgtttccaccgaaatcctcggacacgacatcaaaaccgtgttccggaaaaacgataacgccttttaa

SEQ ID NO: 55097 - DNA, 684 bp, Neisseria meningitidis
atgccgtctgaaaaatgttcagacggcatttcttataacctttcgtttgcagcacataaccaatcagtctttcctattccgttccgaaatgcgtaccatgcgcccgtacccaatatttgcgaacaaggaaagaaaatggcacgtttaaccgtacacaccctcgaaaccgcccccgaagccgccaaagcgcgcgtcgaggcggtacttcaaaacaacggctttatccccaaccttatcggcgtattggcaaacgcccccgaagccttggcgttttaccaagaagtcggcaagctcaacgccgccaacagcctgaccgccggcgaagtcgaagtcatccagatcatcgccgcccgtaccaaccaatgcggtttttgcgtggcagggcacaccaaactcgcaaccctgaaaaaactcctgtccgaacaatccgtcaaagccgcgcgcgctttggcagcaggcgaatttgacgatgccaaactcggcgcgctcgccgccttcacccaagccgtaatggcgaaaaaaggcgcggtatccgatgacgaactcaaagcatttttcgatgcgggctacaaccagcagcaggcagtcgaagtcgtgatgggcgtagccttggcaaccctgtgcaactacgtcaacaacctcggacaaaccgaaatcaaccccgaattgcaggcttacgcctga

SEQ ID NO: 55098 - DNA, 357 bp, Neisseria meningitidis; identical to SEQ ID NO: 43712

SEQ ID NO: 55099 - DNA, 1221 bp, Neisseria meningitidis
atgacctttttacaacgtttgcaaggtttggcagacaataaaatctgtgcgtttgcatggttcgtcgtccgccgctttgatgaagaacgcgtaccgcaggcggcggcaagcatgacgtttacgacgctgctggcactcgtccccgtgctgaccgtgatggtggcggtcgcttcgattttccccgtgttcgaccgctggtcggattcgttcgtctccttcgtcaaccaaaccattgtgccgcagggcgcggacatggtgttcgactatatcaatgcgttccgcgagcaggcgaaccggctgacggcaatcggcagcatgatgctggtcgttacctcgctgatgctgattcggacgatagacaatacgttcaaccgcatctggcgggtcaattcccagcgtccgtggatgatgcagtttctcgtctattgggctttactgacgttcgggccgctgtctttgggcgtgggcatttcctttatggtcggctcggtacaggatgccgcgcttgcctcaggtgcgccgcagtggtcgggcgcgttgcgaacggcggcgacgctgaccttcatgacgcttttgctgtgggggctgtaccgcttcgtgccaaaccgcttcgttcccgcgcggcaggcgtttgtcggggctttggcaacagcgttttgtctggaaaccgcgcgctccctcttcacttggtatatgggcaatttcgacggctaccgctcgatttacggcgcgtttgccgccgtgccgttttttctgttgtggctgaacctgttgtggacgctggtcttgggcggcgcggtgctgacttcttcactctcctactggcagggagaagcgttccgcaggggcttcgactcgcgcggacggtttgacgacgtgttgaaaatcctgctgcttctggatgcggcgcaaaaagaaggcaaagccttgcctgttcaggagttcagacggcatatcaatatgggctacgacgagttgggcgagcttttggaaaagctggcgcggcacggctacatctattccggcagacagggttgggtgttgaaaacgggggcggattcgattgagttgaacgaactcttcaagctcttcgtttaccgtccgttgcctgtggaaagggatcatgtgaaccaagctgtcgatgcggtaatgacaccgtgtttgcagactttgaacatgacgctggcagagtttgacgctcaggcgaaaaaacggcagtag

SEQ ID NO: 55100 - DNA, 594 bp, Neisseria meningitidis
atgcgcaaacagaacgctttgacgggaatcccgacttctgacggacagagggggttcgcgctgtttatcgtgctgatggtaatgatcgtcgtggcttttttggttgtaactgccgcgcagtcttacaataccgagcagcggatcagtgccaacgaatcagacaggaaattggctttgtctttagccgaggcggctttgcgggaaggcgaacttcaggttttggatttggaatatgatacggacagtaaggttacatttagcgaaaactgtggaaaaggtctgtgtaccgcagtgaatgtgcggacaaataatgataatgaagaggcttttgacaatatcgtggtgcaaggcaagcccaccgttgaggcggtgaagcgttcttgcactgcaaaatctacaggcctgtgcattgacaataaagggatggaatataagaaaggcacgcaaagtgtcagcaaaatgccacgttatattatcgaatatttgggcgtgaagaacggagaaaatgtttatcgggttactgccaaggcttggggtaagaatgccaataccgtggtcgtccttcaatcttatgtaagcaataatgatgagtaa

SEQ ID NO: 55101 - DNA, 1104 bp, Neisseria meningitidis
atgtcttcttttatttttcccgataacggggccgaatggcgcaacgaaagtctgcaaaagccgcccaaaggttggcattatgtccgcgaaagcggtgcaaacggcattttgaaggctgcctatcaaaatattgcaactgtctggcagggcgatttccacaatgccaaacaggtgctttccgcaatgaagaagagggttcgcaaacctgccgccgtccgttccgatgcggatatcgccgcccttttccatgcccaccgtatgaagcaggcgcagcagagccgtattctgaatatgcttgccgttgaaatccgccccggttttgtgttggacaacaaacgcgcgcccgatatacgcgccgccctgctcgacgtgtacggagaggcggacggcaaaccgtttttcctgccgctcaatctgctgctggggtttatgggtgcgcacgagtggcataagaaaggggttgccgttccgcagctgggcggcagcatacacgttcctttcggcgtattctcgccgttgcgcggcgaatacctcgacctgctcgcccatgcgccgtcaacgggttttcagacggcattagatatcgggacgggctcgggcgtgcttgccgccattttggcgaaacagggcattccttccgtcatcggcacggataccaatccgaaagccgtcgcctgcgcccgtgccaatattgcccgtttgggctttgaaaaacaggttgaaatccgcgaaaccgatctgtttcccgaagggtttgtcgatctgatcgtctgcaatccgccctggcttcccgccaagccgacttccgccgtcgaatccgcgttatacgaccccgaatctgcgatgctggctgcgtttttgcgggatgcgccgaaacatctgaatcccgacggagaaatccgcctgattatttccgaccttgcagagcatttggggctgcgccctgccgattttttggaaaaggcatttatccgggcgggtttgcgtgttgccgatatgataaaaaccaagccgaagcacaaaaaagccgcgaatccgagcgatccgcttgcttttgcgcgaacccgggaaaccactttcctataccgtttgaaaaaggcataa

SEQ ID NO: 55102 - DNA, 213 bp, Neisseria meningitidis
atggagttagaaacggtcgtgccgccggaggaaggggagggcgaaggagaaggcggggatggggaaatacccgaatatcttgaacttcatagcgaacgggaagatgatatttccgcaccttcgcaagccgaaccgccgccccgcaatatcaaaccgctggttttcgggctgctgatagcctttttgggctatctgctcggtaagattttttga

SEQ ID NO: 55103 - DNA, 654 bp, Neisseria meningitidis
atgttttccgtaccgcgttcctttttgccgggcgttttcgtacttgccgcgcttgccgcctgcaaacctcaagacaacagtgcggcgcaagccgcttcttcaagtgcatccgcgtcggctgcggaaaatgcggcaaagccgcaaacgcgcggtacggatatgcgtaaggaagacatcggcggcgatttcacgctgaccgacggcgaaggcaagcctttcaacctgagcgatttgaaaggcaaggtcgtgattctgtctttcggctttacgcactgtcccgatgtctgcccgacagagcttttgacgtacagcgacacgttgaagcagttgggcgggcaggctaaggacgtgaaagtggtgttcgtcagcatcgatccggaacgcgacacgcctgaaatcatcggcaagtatgccaaacagttcaatccggactttatcggtctgacggcaacgggcggccaaaacctgccggtcatcaagcagcaataccgcgtggtttctgccaaagtcaatcaaaaagacgacagcgaaaactatttggtcgaccactcttccggtgcgtatctcatcgacaaaaacggtgaggttgccattttctcgccttacggaagcgagccggaaacgattgctgccgatgtaaggactctgctctga

SEQ ID NO: 55104 - DNA, 966 bp, Neisseria meningitidis; identical to SEQ ID NO: 43159

SEQ ID NO: 55105 - DNA, 1218 bp, Neisseria meningitidis
atgaaaacggtagtctggattgtcgtcctgtttgccgccgccgtcggactggcgctggcttcgggcatttacaccggcgacgtgtatatcgtactcggacagaccatgctcagaatcaacctgcacgcttttgtgttaggttcgctgattgccgtcgtggtgtggtatttcctgtttaaattcattatcggcgtattcaatatccccgaaaagatgcagcgtttcggttcggcgcgtaaaggccgcaaggccgcgcttgccttgaacaaggcgggtttggcgtattttgaagggcgttttgaaaaggcggaacttgaagcctcgcgcgtgttgggcaacaaagaagccggagacaaccgtactttggcattgatgctgggcgcgcacgccgccgggcagatggaaaacatcgagctgcgcgaccgctaccttgccgaaatcgccaaactgccggaaaaacagcagctttcccgttatcttctgctggcggaatcggcgttgaaccggcgcgattacgaagcggcggaagccaatcttcatgcggcggcgaagatgaatgccaaccttacgcgcctcgtgcgtctgcaacttcgttacgctttcgacaggggcgacgcgttgcaggttctggcaaaaaccgaaaaactttccaaggcgggcgcgttgggcaaatcggaaatggaacggtatcaaaattgggcataccgccgccagctggcggatgctgccgatgccgccgctttgaaaacctgcctgaagcggattcccgacagcctcaaaaacggggaattgagcgtatcggttgcggaaaagtacgaacgtttggggctgtatgccgatgcggtcaaatgggtcaaacagcattatccgcaaagccgccgacccgaacttttggaagcctttgtcgaaagcgtgcgctttttgggcgaacgcgatcagcagaaagccatcgattttgccgatgcttggctgaaagaacagcccgataacgcgcttctgctgatgtatctcggtcggctcgcctacggccgcaaactttggggcaaggcaaaaggctaccttgaagcgagcattgcattaaagccgagtatttccgcgcgtttggttttggcaaaggtttttgacgaaaccggagaaccgcagaaggcggaggcgcagcgcaacttggttttggcaagcgttgccgaggaaaaccgaccttccgccgaaacctgttga

SEQ ID NO: 55106 - DNA, 2010 bp, Neisseria meningitidis
ttggctcagcaaggcagctacaccaaaacaaacggtacaaccgcaaaaatgggggatttacttttagcagccgacaacctgcacagccgcttcaaagacaaagtggaactcactgccgaacaggcaaaagccgccaatcttgcgggcattggtcgtctgcgcgatttgcgcgaagctgccgcattgtccggcgatttggccaatatgctgaaagcttattctgccgccgaaactaaagaagcacagttggcattgttagataatttgattcacaaatgggcggaaaccgattcgaactggggcaaaaaatcgccaatgcgactttcaaccgattggacgcaaacggctaatgaaggtattgcactgacaccatcccaagtagcacaactaaaaaagaacgctttagtttccctttctgataaagctaaagcaactattgacgccgcccgcgaccgcattgccgtgcttgatgcctacacggggcaggattccaacacactctattacatgagcgaggaagatgcgcttaatatcgtcaaagtaaccaacgatacatacgaccatctcgccaaaaacatctaccaaaacctgttattccaaacccgtttgcagccatatttgaatcaaatcagtttcaaaatggaaaatgatacgttcactttggattttagtggtcttgttcaagcatttaaccatgtcaaagaaactaatccgcaaaaagcttttgtggatttggccgagatgcttgcatatggcgaacttcgttcttggtatgaaggccgaagactaatggccgattatgtggaggaggcaaaaaaagcaggtaaatttgaagattaccagaaagtgttgggtcaggagaccgttgcattattagctaaaacatcgggtacgcaagcagatgatatcctgcaaaatgtaggctttggtcataataaaaatgtttctttatatggtaatgacggcaacgacactctgatcggcggtgcaggcaatgattacttggagggcggcagcggttcggatacttatgtcttcggcaaaggcttcggtcaggatacggtctataattacgactacgctaccggacgcaaagacatcatccgctttaccgacggtattacagccgatatgctgacttttacccgagagggcaaccatcttcttatcaaggcaaaagacggcagtggacaagtgactgttcagtcctatttccagaacgatggctcaggtgcttaccgtatcgatgagattcatttcgataacggcaaagtactggatgttgccactgtcaaaaaactggtacagcaatccaccgacggttcggacagattgtatgcctaccaatccggaagtaccttaaatggcggattgggcgatgactatctgtacggtgccgacgggaatgacctgctgaatggtgatgcaggcaacgacagtatctacagtggcaatggcaatgatacgctcaatggaggagaaggcaacgacgccctgtacggctataatggtaacgatgcactgaatggtggcgaaggcaatgatcatttgaacggcgaagacggtaacgacactctgatcggcggtgccggtaatgattacttggagggcggcagcggttcggatacttatgtcttcggcgaaggcttcggtcaggatacggtctataattaccatgtggataaaaactctgacactatgcactttaaaggatttaaagcagcagatgttcattttatccgttccggaagtgatttggtgcttagcgcttctgaacaagacaacgtacgtatttccggattcttctatggtgaaaaccatcgtgtagatacatttgtctttgatgatgcagctatcagtaatccagattttgccaagtatattaatgctggcaataatttggtacagtctatgtctgtgttcggttctaatactgctgcgacaggaggaaatgtggatgccaatatacaatccgtacagcagccgttattggtaacgccatctgcataa

SEQ ID NO: 55107 - DNA, 687 bp, Neisseria meningitidis; identical to SEQ ID NO: 39157

SEQ ID NO: 55108 - DNA, 615 bp, Neisseria meningitidis; identical to SEQ ID NO: 36682

SEQ ID NO: 55109 - DNA, 741 bp, Neisseria meningitidis
atggaaacgacactgctcaaacccgccctgtggcagataccgcatatcggatccggcagcgaaaccgcccttgcggaaaaaacggaaaccctcaaacaacgcctgcaccggattgccggcagccaccgggatgcacggtttgccagcagccttgctgcggaagatatggtaattaccgaccttatcgccggagaaaacctcaatatcggtatttttactttggatacggggctgctgcacgcggaaactttaaacctgttggataggattgaacgtgtttatccgcatatgcaaatcaagcgtttccaaccgatacgggaagatgccctgcattatgtggaaagcaaaggcaggtttgccttttacgacagcgttgaagcgcgccgcgaatgctgccgcatccgaaaaatcgaaccgctcaaccgcgccattgcaggcgcggacgcctggcttaccgggcaacgccgcgaacaatccgccacacgcacggaactgccgtttgccgaatacgatgccggacggggcatcggcaaatacaacccgattttcgactggtcggaacacgacgtgtgggcatacatcctcgccaacaatgtgccttacaacgatttgtaccggcaaggatttcccagcataggctgcgacccctgcacccgccccgtcaaggcgggcgaagacatccgcgcagggcggtggtggtgggaaggcagaaacagcaaagaatgcgggctgcacaaataa

SEQ ID NO: 55110 - DNA, 633 bp, Neisseria meningitidis
atggagaatacaaaccgtgtgccggagcaggcacgttatgatgccgaacgcaggcaggcagacgaagcattggcgggcgtgtttccggcagtcagtatcttcggcagcgcgcgcacgccgcagaatcatgcggattatgcgttcgcctgccgtctggcgcggcggctgtcggattcgggcattgccgtcatttcgggcggcgggccggggattatggaggcggcaaacaagggcgcgtttgcagggaagtcggtttcggtggggctgaacatcgttttgccgcacgagcagaaaccgaatccgtatcaggacatcgccttgcggttttcccgttttgccgaacgcaaggcggtgtttttccgctattcccaagcatatgtcgtgatgccgggcggcttcgggacgctggacgaattgtttgaaatcctgaccttggtgcagacgggcaaagtgccgccgcgtccgattgttttggtcggaaaggcgttttggtcgggcttggcggagtggataaacgcgcagcttttggcgcgcggtctgatttccgaaggggcagcctctttgttcgccatatcggacgatgaagacgaaatcgttgcgtatctgtcggaacacgggcttcagacggcatag

SEQ ID NO: 55111 - DNA, 966 bp, Neisseria meningitidis
atgagctacacgcaactgacccaaggcgaacgataccacatccaatacctgtcccgccactgcaccgtcaccgaaatcgccaaacagcttaaccgccacaaaagcaccatcagccgcgaaatcagacggcaccgcacccaagggcagcaatacagcgccgaaaaagcccagcggcaaagccggactatcaaacagcgtaagcgacaaccctataagctcgattcgcagctgattcagcacatcgacacccttatccgccgcaaactcagtcccgaacaagtatgcgcctacctgcgcaaacaccaccggatcacgctccaccacagcaccatttaccgctaccttcgccaagacaaaagcaacggcagcacgttgtggcaacatctcagaatatgcagcaaaccctaccgcaaacgctacggcagcacatggaccagaggcaaagtacccaaccgtgtcgtcatagaaaaccgacccgctatcgtcgaccagaaatcccgtatcggcgattgggaagccgacaccattgtcggcaaaggacagaaaagcgcattattgaccttggtcgaacgcgttacccgctacaccatcatctgcaaattggatagcctcaaagccgaagacactgcccgggcagctgttaggacattaaaggcacataaagacagggtgcacaccatcaccatggataacggcaaagagttctaccaacacaccaaaataaccaaagcattgaaagcggagacttatttttgtcgcccttaccattcttgggagaaagggctgaatgagaacaccaacggactcatccggcaatacttccccaaacaaaccgatttccgtaacatcagtgatcgggagatacgcagggttcaagatgagttgaaccaccgaccaagaaaaacacttggctacgaaacgccaagtgttttattcttgaatctgttccaaccactaatacactag

SEQ ID NO: 55112 - DNA, 1995 bp, Neisseria meningitidis
atgaaacgacattttatgcctaaaattttacaacaaacaaccttacatcgcttttttcgcgcaaacacgcaccatccgatcagcccgtccgttttgcagcaggctggcgatttgataagatggttatgtttttcagacggcatttcagatttccgtccatgccgtctgaagccgcaaaacccgattggaggaactgttatgaataccgtatcgaattacctgtccgcattgcgcgaagccatgaaggcgcaaggcttggatgcactcgtcatcccttccgccgacccccacctgtccgaatacctgcccgcacactggcaggcgcgccgcgaattgtcgggctttaccggctcggtcggcacatttgtcgttaccgccgacgaagcgggcgtgtgggtggacagccgctattgggaacaagccgccaaacagctttccggcagcggcattgagctgcaaaaaagcgggcaagtgccgccgtataacgaatggctcgcggcaaacctgcccgaaaacgccgccgtcggcatcccttccgatatggtctcgctcaccggcaaacgcactttggcgcaatccctgaccgccaaaaacatccgcatcgaacacccaaacgatctgcttgaccaagtgtggacaagccgtcccgccctccccgccgaaaccgtgttcatccacgaccccgcctacgtctccgaaaccgccgccgaaaaactcgcccgcgtgcgcgccgtcatggcggaaaaaggcgcggattaccacttggtttcctcgcttgacgacatcgcctggctgaccaacctgcgcggcagcgacgtgcctttcaatcccattttcgtctccttcctgctgattggcaaagacaacgccgtcctgtttaccgaacaatgccgtctgaacgccgaagccgccgccgcgctgcaaaccgccggcatcgcggtcgagccttacgcccaagttgccggcaaactcgcgcaaatcggcggcgtgctgctcatcgaaccgaacaaaaccgccgtcagcacccttgtgcgcctgcccaaaagcgtgcgccttatcgagggaatcaacccatccacgctgttcaaatcctgcaaatccgaagccgacatcgcccgcatccgcgaagcgatggaacacgacggcgcggcgttgtgcggtttcttcgccgagtttgaagacatcatcggcaacggcggcagcctgaccgaaatcgacgtggacaccatgctttatcgccaccgcagcgtgcgcccaggcttcatttcattgagtttcgacaccatcgcaggcttcaacgccaacggcgcactgccgcattacagcgcaacgcccgaaagccacagcaccatcagcggcaacgggcttttgctcatcgactccggcgcgcaatacaaaggcggcacgaccgacatcacccgcgtcgtccctgtcggcacacccaccgccgaacaaaaacgcgacaacaccctcgttctcaaagcccatatcgcgcttgccgaagccgtgttcccagaaaacatcccctcgccgctgattgatgcgatttgccgcaaacccctgtggcaggcgcaatgcgactacggccacggcaccggacacggcgtaggctatttcctcaacgtccacgaaggcccgcagcgcatcgccttcgccgcccccgccacgcccgaaaccgccatgaaaaaaggcatggttacctccatcgaacccggactctaccgcccgggaaaatggggcatccgcattgaaaaccttgccgccaaccaagccgtcgccgcccctcaagaaaccgaattcggcagcttcctctgttttgaaaccctgaccctctgccccatcgacacccgcctgatggacaccgccctcatgaccgacggcgaaatcgactgggtcaaccgctaccacgccgaagtccgccgccgcctcgagccgctgaccgaaggcgcggcaaaagcgtggctgatcaaacgcaccgaaccgctggcgcgttaa

SEQ ID NO: 55113 - DNA, 666 bp, Neisseria meningitidis; identical to SEQ ID NO: 47215

SEQ ID NO: 55114 - DNA, 1011 bp, Neisseria meningitidis
atgcacatcggcggctattttatcgacaaccccatcgcacttgcgccgatggcgggcattaccgacaaaccgttccgccgactttgccgagattttggcgcaggttgggcggtgtgcgaaatgctgaccagcgacccgacgctcagaaatactagaaaaaccttgcaccgcagcgattttgtcgatgaaggcggcatcgttgccgtgcagattgccggcagcgatccgcagcagatggcggatgcggcgcgttacaacgtcagcctcggggcgcagcttatcgacatcaatatgggctgtcccgccaaaaaagtgtgcaacgtccaagccggcagcgcgctgatgcagaacgagccgctggttgccgccattttggaagccgtcgtccgtgcggcaggcgtacccgttaccctcaaaacccgtttgggctggcacgaagaccatcaaaacctgcccgtcatcgccaaaatcgccgaagattgcggcatcgccgcccttgccgtccacggacgcacgcgcacgcaaatgtacaaaggcgaggcgcgttacgaactcatcgccgaaaccaaatgccgtctgaacatcccggtctgggtcaacggcgacatcacttcgccgcaaaaagccgccgccgtcctcaaacaaaccgccgccgacggcatcatgatagggcgcggcgcgcaaggcagaccgtggttcttccgcgatttgaaacattacgccgaacacggtgttttaccgcctgccttgagtttggcagaatgcgccgccgctattttgaaccacatccgcgccatacacgcgttttacggcgatagtgcaggcgtacgcatcgcacgcaaacacataggttggtacatcggcgaaatgcccgacggcgaacaggcgcggcgtgaaatcaaccgcttggacagtgcggcggcgcaatacgacatgcttgcaggttatcttgaaagacttgccggaaaaaccgaccgttgggcgtgcggctaccgcacaaatgccttctga

SEQ ID NO: 55115 - DNA, 1495 bp, Neisseria meningitidis
atgttgtcaggactccccatccccaaagacatcgcgcgcccgcccgaaacgatattggtcaacatcacgccgcaggaaacgcgcgtagcggtgttggaggaaaacaatatctgcgagctgcacatcgagcgcaacagcgaacacagcctggtcggcaatatctatctgggcgtggtgcgccgcgtgctgcccgggatgcagagcgcgtttatcgacatcggcttggaacgcgcggcgtttttacacatcgtcgatgtcctcgaacaacgccgcaaccccgaagaaacccagcgcatcgaacatatgctgtttgaagggcagtctgttttggtgcaggtcatcaaagacccgatcaacaccaaaggcgcgcggctttccacccaaatctcgctggcggggcgtttcctcgtccatcttccgcaagaagaccacatcggcgtgtcccaacgcatcgaagacgatgccgaacgcagcagcctgcgcgaacgcctcgacaagctcctgccggaaaatgcctgccggggctacatcatccgcaccaacgccgaaaacgccaccgacgaacagctccagtccgacatcgactacctgaccaaagtgtgggaacacatccaagaacaggcgaaaatccggccgccggaaaccctgctttatcaggatttgcccttgagtttgcgcgtattgcgcgatatggtcggctgcgacacgcaaaaaatcctcgtcgattccaccgtaaaccacgggcgcatgacgcgttttgccgaacaatacgtccacggtgcattgggcaggatagaattgttcaaaggcgaacgcccgctgtttgaaacccacaacgtcgaacaggaaatcagccgcgccctgcaaccgcgcgtcaacctcaacttcggcagctacctgattatcgaatccaccgaagccatgaccacgatagacgtgaacaccggcggcttcgtcggcgcacgcaacttcgacgaaaccatcttccgcaccaacctcgaagcctgccacaccatcgcccgcgaattgaggctacgcaacctcggcggcatcatcatcatcgacttcatcgatatggcgcaggaaagccaccgcgaagccgtgttgcaggagcttgccaaagccctcgccttcgaccgtacccgcgttaccctgcacggttttaccagcctggggctggtcgagctgacgcgcaaacgctcgcgcgaaaacttaaaccaagtcctctgcgaaccctgcccttcctgccaaggcagaggccgtctgaaaacgccgcaaaccgtgtgctacgaaatccagcgcgaaatcgtccgcgaagcgcgccgttacgatgccgaaagtttccgcatcctcgccgcccccaacgtcatcgatttgtttttggacgaagaatcgcaatccttggcaatgctgatagatttcatcggcaaaccgatttctctggcggtcgaaaccgcttacacgcaggaacaatacgatattgtgctgatgtaaa

SEQ ID NO: 55116 - DNA, 1239 bp, Neisseria meningitidis
atggctttttatgcttttaaggcgatgcgtgcggccgcgttggctgccgccgttgcattggtactgtcgtcttgcggtaaaggcggagacgcggcgcagggcgggcagcctgcgggtcgggaagcaccggctcccgtcgtcggtgtcgtaaccgtccatccgcaaaccgttgcgttgaccgtcgagttgccgggacgtttggaatcgctgcgtaccgccgatgtccgcgcccaagtcggcggcatcatccaaaaacgcctgttccaagaaggcagttatgtccgtgccggacagccgctgtatcagatcgacagttccacttatgaagcaggtctggaaagtgcgcgcgcgcaactggcaacggctcaggcaacgcttgccaaagcggatgcggatttggcgcgatacaagcctttggttgccgccgaagccgtcagccggcaggaatacgatgctgcggtaacggcgaaacgttctgccgaggcaggtgtcaaagcagcacaggcggcaatcaaatctgccggcattaatctgaaccgttcgcgcattaccgcgccgatttccggctttatcggtcagtccaaagtttccgaaggtacgctgttgaatgcgggcgatacgaccgtgctggcaaccatccgccaaaccaatccgatgtatgtgaacgttacccagtctgcatccgaagtgatgaaattgcgccgtcagatagccgaaggcaaactgctggcggcggatggtgtgattgcggtcggcatcaaatttgacgacggcacagtttaccctgaaaaaggccgcctgctgtttgccgatccgaccgtcaacgaatcgaccggtcagattaccctgcgcgccgccgtaccgaacgatcagaatatcctgatgcccggcctgtatgtgcgcgtgctgatggaccaagtggcggtggataacgcatttgttgtgccgcagcaggcggtaacgcgcggtgcgaaagataccgtgatgattgtgaatgcccaaggcggtatggaaccccgcgaggtaacggttgcgcaacagcagggtacgaattggattgttacgtcgggtctgaaggacggggacaaggtggttgtggaaggcatcagtatcgccagtataacgggtgcgaaaaaggtaacgcccaaagaatgggcgccgtctgaaaaccaagccgccgcgcctcaatccggcgttcagacggcatctgaagccaaaactgcttctgaagcggaataa

SEQ ID NO: 55117 - DNA, 1296 bp, Neisseria meningitidis
atggcacaaaaaatccaatccgtcaaaggcatgaacgaccttctgcctgtcgagcaaaaagatttcaaactgacggctgcgttttggcaggcgtttgaggatacggtaaaccgctggacgcgcgcttacggctatcagcaaatccgtacgccgattgtcgagcaaaccggtttgtttgtccgctccatcggcgaagaaaccgatgtggtcggcaaggaaatgtacaccttttccgattcaaacgattctttgagtttgagcctgcgtccggaaggtacggcttcttgtctgcgtgcggtggtcgaacacaaccttctgtacaacagcccgcaaaagctgtggtatatggggccgatgttccgccgcgagcgtccgcaaaaaggccgttatcgtcaattccatcaggtcggtatcgaggctttgggttttgaagggccggatatcgatgcggaaatcatcgcgatgtctgccgacttgtgggaaaaattgggtatccgcgaatacctgactttggaaatcaacagcttaggcaaccgtgaggagcgagcggcacaccgtgcggcgttggttgaatatttgacacgctatgaagataaattggacgaagacagcaaacgccgtctgaaaaccaatcctttgcgtgttttagatacgaaaaaccctgatttgcaggaaatctgcaacgccgcgccgcgtttggtggattatttgggcgaggcttcgcaaaaccactatgcacgcttcaaggcgatgttggacggtttgggtatccaatatattgaaaatccgcgcttggttcgcggtttggattattacaatcagacggtttttgagtggacgaccgacaaactcggcgcgcaggcaactgtgtgcggcggcggccgttacgatggtttgattgaggaacttggcggcaaacctgcgccgtccatcggctttgcgatgggcatcgaacggctgctgcttttggtgagcgaatacggctcgctggaagtgaacgctgcgcctgatgtctatgcaatgcaccaaggcgaaagggcggacttgcaggtgatgaaatacgcgcaagccttgcgcgcgcaaggtttcaatgtaatgcagcattccggctatcaaagcctgaaagcacaaatgaaaaaagccgacaacagcggcgcgcgctttgccctgattgtggcgcaagacgaactggcgaacggtacggttacgctcaaagacatgaacggcgcacacggtcagcaaactgtcgccgccgctgatttgacaaacactttacaacaatggaagaacgcataa

SEQ ID NO: 55118 - DNA, 813 bp, Neisseria meningitidis
ttgacggcagacgctacacgcttcatcatatggagctcccgtaacgacaacctgcaacggcaaatgccgtctgaaagaaaagacatgatcaaattcaaaaacgtacacaaacatttcaaagacctgcacgtcatcaacggcgtgaacttggaaatcaaaaaaggcgaagtggtcgtcgtctgcggaccttcgggcagcggcaaatccacactcatccgcaccgtcaaccagcttgaaagcatcgaaagcggcgagatttgggtggacggtgtcaacgttgccgacccaaaaaccgatttgaacaaaatccgcgaagaagtcggctttgtgtttcaaagtttcaacctctacccgcacctgaccgtgttggaaaacattaccctcgcaccgatgaaggttaaaggtcaaaatgcggaacaggcagagaaaaaagcgatggaacttttggaacgcgtcggactggcacacaaaaaagacgccttcccttcccaactttccggcggccagcagcaacgcgtggcgattgcacgcggtttggcgatggaaccgcgcgtaatgttgtttgacgaaccgacctccgcactcgaccccgaaatggtcggcgaagtgttgaaagtgatgaaagacttggcggaaagcggtatgacgatgatgtgcgtaacccacgaaatgggttttgcccgcgaagttgccgaccgagtgctttttgtcgataaagggcaaatcctcgaagacgaaacgcccgaagcgttttttaccaacccgaaacacgaacgcgccaaacaattcctgcaacaggtcatgacccactga

SEQ ID NO: 55119 - DNA, 204 bp, Neisseria meningitidis; identical to SEQ ID NO: 37144

SEQ ID NO: 55120 - DNA, 501 bp, Neisseria meningitidis
atgaatgcaatgccccaaaccgccgcacaaaacgaaaccctgcacacttgtagcattattgtcgatgatgcgcaggatttttcccccatgcttctcgatgcagggcgggacgacacacttatcagcgaatcgatgattccgcaaatccgcaccgttgccgccctgatagccgccgaacggcacgacttcagccgcagcagccccgccgagtttaccgatgccgccgatttttttgccgcacggattctcgtattgggcgtgcgacgcttccatctggacgtatcgctgcttcagattttgaaaaccgccaacagccgcgcccgccgctttgccgaaaaacaccgcctgtttttcacacccgcacaagccgaattgagcctgaacaaacacaaaaaccgccgcctgctgaccgtagaaaccgaacacgaagtcgaaaacaaaggcaacccagtcgccaacagcctcgcatttgtccgcaaactgcacaccctgcccctgtaa

SEQ ID NO: 55121 - DNA, 333 bp, Neisseria meningitidis
atgcagattttatcttttcagccggacattgcggaacgtatgctggaaggtacggaaagcgagtcggtcaacgaaaacgcacaattcgtccgtacggacaacggctattggattgcgtggcatgaaggcgtagcggcactgcttgcgcccgatacgccgccgggcattccctgtttttgggtggaaggcgcggaaagccttgaagagttgtgcgtcatggtggaacgcggcgagtttgacgaagtggaagagtttgacggcgatgacgacgaatggctcgaaacggcacagggttgcgggcaccacggcgacgcttgcgcctgcggacattaa

SEQ ID NO: 55122 - DNA, 1104 bp, Neisseria meningitidis
atggcagagatctgtttgataaccggcacgcccggttcagggaaaacattaaaaatggtttccatgatggcgaatgatgaaatgtttaagcctgatgaaaacggcatacgccgtaaagtatttacgaacataaaaggcttgaaaataccgcacacctacatagaaacggacgcaaaaaagctgccgaaatcgacagatgagcagctatcggcgcatgatatgtacgaatggataaagaagcccgaaaatatcgggtctattgtcattgtagatgaagctcaagacgtatggccggcacgctcggcaggttcaaaaatccctgaaaatgtccaatggctgaatacgcacagacatcagggcattgatatatttgttttgactcaaggtcctaagcttctagatcaaaatcttagaacgcttgtacggaaacattaccacatcgcttcaaacaagatgggtatgcgtacgcttttagaatggaaaatatgcgcggacgatcccgtaaaaatggcatcaagcgcattctccagtatctatacactggataaaaaagtttatgacttgtacgaatcagcggaagttcataccgtaaataaggtcaagcggtcaaagtggttttacactctgccagtaatagtattgctgattcccgtgtttgtcggcctgtcctataaaatgttgagcagttacggaaaaaaacaggaagaacccgcagcacaagaatcggcggcaacagaacagcaggcagtacttccggataaaacagaaggcgagccggtaaataacggcaaccttaccgcagatatgtttgttccgacattgtccgaaaaacccgaaagcaagccgatttataacggtgtaaggcaggtaagaacctttgaatatatagcaggctgtatagaaggcggaagaaccggatgcgcctgctattcgcatcaagggacggcattgaaagaagtgacggagttgatgtgcaaggactatgtaaaaaacggcttgccgtttaacccatacaaagaagaaagccaagggcaggaagttcagcaaagcgcgcagcaacattcggacagggcgcaagttgccacattgggcggaaaaccgtag

SEQ ID NO: 55123 - DNA, 1332 bp, Neisseria meningitidis
atgccgtctgaaaatacacctgataaagtaaacataatgattcgtcctgattttcaagaatatctgccttcttattattttagttcggttaatcctcatactgtttatccgaaacttcaatgccgtctgaaaaccgatacctgtatcatcggcggcggattgagtggtttgtgcactgcattgcccttggcggagcagggacatgaaacggttgtgttggaagccgcgcgtatcggtttcggcgcgtcgggacggagtggcgggcaggttatcagcgattacgcctgcggtatgggggaaattgaaaaacaggtcggcttggagcaggcgcaatggttttggcaacagtctttgcaggcggtcgaactggtggacgaacgcgtccgcaaacatgccattgattgcgattggcagcgcggttatgccacggttgccgtccgtccgcagcattgggaagagttgcagcagtggcatgaacacgcccaacggcattacggtgcgagtcattatcaactttgggataaagccgagttgaaacagcagcttgacagcgatatgtaccaaggggcacaattcgaccccttatccggacacctgcatccgctcaattacactttgggcatcgctcgtgccgctgccgaagccggtgcgcagattttcgagcaatccccgatgacgtgcatcgaaccgcatcaaaacggttggctggtttacacgcccgaaggcagcgtcgagtgcaaaaatgtggtctatgctgtcaatacctatgccggtttgaatccgatattcaagcctttggagcgtaaggcgattgccgttagcacctttattattgccaccgaacccttgggggcgcgcgcaaaagggcttatccgcaacaatatggctgtatgcgacaaccgccatattttggattattaccgcctcagcgcggacggcagactgcttttcggcggtaaggataacgagtttatcgacaatcctgcgcgtatgaccgagcttgtccgccaagatatgcttaaagtttttccgcagcttgccgatgtcaaaatcgaatattcgtggggcggggagtgcgatattaccgccaaccttgtcccgcatttcggacgtttggccccgaatgttttttatacgcaaggttattccggacacgggatggcgataacaggcattgcaggtctggcggttgccgaagcaattttaggggacgaatgccgtctgaagccgtttgagcagttgcgccagccgaatatcatcctccaaccgtttttgagaaagctcggttctttcctcggctcgaaatattatcagtggaaagacagccgttaa

SEQ ID NO: 55124 - DNA, 204 bp, Neisseria meningitidis
atgaaaaagtctttgattgctttatgtgttgcccattgtgcaaagttgaaaaacgattttggcgtaccaccgttacctgaaatcaaaatcacgccaagccctgttcgggtaggctctttgaaacaacatccgagcctgcgcttgggtaaatcaggcgtggcagccgcgaaacgtgcggcgcgcaaacgcaagaatcgtcattaa

SEQ ID NO: 55125 - DNA, 276 bp, Neisseria meningitidis; identical to SEQ ID NO: 38139

SEQ ID NO: 55126 - DNA, 474 bp, Neisseria meningitidis
atgtcccgcaataccgaagagctgcaaggcatctcgcttttgggtaatcaaaaaacccaatatccgatcggctacgcgcctgaaattctcgaagcattcgacaacaaacatcccgacaacgactatttcgtcaaattcgtctgcccagagttcaccagcctctgccccatgaccgggcagcccgacttcgccaccatctacatccgctatattccgcacatcaaaatggtggaaagcaaatccctgaaactctacctcttcagcttccgcaaccacggcgattttcatgaagactgtgtcaacatcatcatgaaagacctcattgccctgatggatccgaaatacatcgaagtattcggcgagttcacaccgcgcggcggcatcgccattcatccgtttgccaactacggcaaagcaggcaccgagtttgaagcattggcgcgtaaacgcttgttcgaacacgacagccaataa

SEQ ID NO: 55127 - DNA, 5484 bp, Neisseria meningitidis
atgaaaaccaaacgttttaaaattaacgccatatccttatccatctttcttgcctatgcccttacgccatactcagaagcggcattggtcagagacgatgtcgattatcaaatattccgtgactttgcagaaaacaaaggcaaattttttgtcggcgcaaccgatttatcagtgaaaaacaaacaaggtcaaaacatcggcaacgcattatccaacgtaccgatgattgattttagcgttgcagatgtcaacaaacgcatagcaacggtagtcgatccccaatatgctgtcagcgtcaaacacgccaaagcagaagtccatactttttattacggtcaatacaacggtcataatgatgtagccgacaaagaaaatgaataccgcgttgtcgaacaaaataactatgaaccccataaagcttggggtgcgagcaacttaggtcgcctcgaagattataatatggcgcgttttaacaagtttgtaactgaagttgcgccgattgcaccaactgatgccggcggcggattggatacctacaaagataaaaaccgtttttcctcttttgtcagagttggcgcaggcaggcaattagtttatgaaaaaggggcttatcatcaagaaggaaatgaaaaaggctacgatttgcgcgatctttcacaagcctatcgttatgccattgcaggtacaccttataaagatattaatattgaccaaacaatgaataccgaaggtttgattggctttggtaatcacaatacacactattcagcagaagaacttaaacaagcactctcgcaagatgcgttaacaaattacggcgtgttgggcgatagcggctctccgttatttgcttttgacaaacaaaaaaatcaatgggtctttttgggaacttatgattattgggcaggttacggaaaaaaatcttggcaagaatggaatatctataaaaaagaatttgcagataaaatcaaacaacgcgataacgccggcaccatcaaaggtaatagagaacatcattggaacattacttttggcacaaacagcaagattggttctacagcggtaaggcttgccaacaatgaaagggatgcaaacaacggacagaatgttacctttgaagacaacggcactttggtattggatcaaaacatcaaccaaggcgcgggcggtctgtttttcaaaggcgattacacagtcaaaggtgcaaataatgacatcacttggctaggtgcggggattgatgttgccgacggcaaaaaagtcgtttggcaagtcaaaaatccgaatggcgacagattggcaaaaatcggcaaaggcacattagaaataaacggcacaggcgttaaccaagggcaattaaaagtcggcgacggtacggttattctgaatcaacaagccgatgccgacaaaaaagtccaggctttctcccaagtcggcattgtcagcggacgcggtacattggtattaaatagttcaaatcagattaatcccgataacttatatttcggtttccgtggcggtcgtttggatgccaatggcaatgacttgacttttgaacacatccgcaacgtggatgaaggcgcgcgcattgtcaaccacaacacagaccgcgcctccacaatcacattaaccggcaaatcattaattaccgctcctcaaaatctttctgtttatgaaatccgaaatgattacgatgatgacgattattatggctattacagctatagaaaacccattccgcaaggcaaagatctttattacaaaaactatcgttattacgccctaaaatccggcggcagcgtgaacgcaccgatgcccgaaaacggacaaacggaaaataacgactgggtctttatgggatataagcaagaagaagcccagaaaaacgcgatgaaccacaaaaacaatcagcgtattagcggttttagcggtttctttggcgaagaaaacggaaaaggacataacggcgcattaaaccttaatttcaacggcaaaagcgcgcaaaaccgtttcttgttaacaggcggcacgaatttaaacggaaaaataagcgtaactcaaggcaatgtcttgttatcaggtcgtccaacaccacacgcaagagattttgtgaacaaatcttcagcccgaaaagacgcacatttctccaaaaacaatgaagtcgtatttgaagacgactggataaaccgcacattcaaagccacagaaattgcggttaatcaatccgcatcattctcttccggcagaaatgtatccaacattaccgccaacatcaccgcaacagacaacgccaaagtaaatttgggttacaaaaacggcgatgaagtttgcgtgcgctcggactataccggttacgttacctgcaacacagacaacttatccgataaggctttaaacagctttggagcgacacagattaacggcaatgtgaatttgagtcagaatgcggcattggtcttaggcaaggctgcattatgggggcaaattcaagggcaaggaaacagcagcgtcagcctaaaccaacatagcaaatggcatttgaccggcgacagccaagtacacaatctgtcattggcggatagccatattcatttgaacaacgcttccgacgcgcaaagtgcaaataaataccacacgctcaaaatcaatcatttatccggtaacgggcattttcattatctgacgcacctggcgaaaaatcttggggataaggtgcttgtgaaggaatccgcatccggtcattatcagctccatgttcaagataaaacaggcgaacccaatcaggaagggctgaatctctttgatgcatcatccgtacaagaccgttcgcacctttctgtttccttggcgaataaccatgtagatttaggcgcattgcgttatacaatcaaaacagaaaacggtattacccgattgtacaatccttatgccgagaaccgccgccgagtcaaaccggccccgtctcctgccacaaacacggcttctcaagcacaaaaggcaacacaaacggacggtgcacaaattgccaagcctcaaaatatcgtcgtcgcaccacctagcccgcaggcaaatcaagccgaagaagcaaaacgccaacaagcaaaagcggagcaagtgaagcgtcagcaagcagaagcagagcgtaaatcggcagagttagcaaaacaaaaagcagaagccgaacgcgaagcaagagagctggcgacccgccaaaaagcagaacaagaacgcagcagcgccgaacttgcacgtcgacatgaaaaagaacgcgaagcggcagagttgtcggcaaaacaaaaagtcgaagccgaacgtgaggctcaagcattggcggtacgccgaaaagccgaagccgaagaggcaaaacgccaagctgcagagcttgcacgccggcatgaaaaagaacgcgaagcggcagagttgtcggcaaaacaaagggtcggggaagaggaacgccgtcaaacagcccaatcccagccgcaacgccgcaaacgccgtgccgcaccgcaggattatatggcagcttcccaagaccgtcctaaacgccgcggacaccgttcggtacagcaaaacaatgtggaaattgcccaagcccaagcagaacttgtgcgccgacagcaggaagaacgcaaagcggcagagttgttggcaaaacaaagggcagaagccgaacgtgaggctcaagcattggctgcgcgccgaaaagcagaagccgaagaggcaaaacgccaagctgccgaacttgcacatcgccaggaagcagaacgcaaagcggcagaattgtcggcaaaccaaaaagccgcagctgaagcccaagcattggcggcacgccaacaaaaagcccttgcgcgtcaacaggaagaagcacgaaaagctgcagagttagccgtcaaacaaaaagcggaaaccgaacgcaaaaccgccgaacttgccaagcaaagggcagcagccgaagcagcaaaacgccagcaagaagctcgccagaccgccgaacttgcacgtcgtcaagaagcggaacgccaagcagcagagttgtcggcaaaacaaaaagccgaaacagatcgagaagcggcagaatcggcgaaacgaaaagctgaggaagaagagcaccgtcaagcagcccaatcccagccgcaacgccgaaaacgccgtgccgcacctcaggattatatggcagcttcccaaaatcgtccgaaacgtcgcggacgcagatctactctgccggcaccgccctcgccatcatttgattcgtcagcttacgcagcacccagggccttgcataatccggactggtatgaaaatgactatgaagaaatccccttggatgcgttggaagatgaaaatgtatctgaatcagttgacacatcagacaaacagcctcaagacaatacggaacttcatgaaaaatatgaaaatgattatgaagaaatccccttggatgcgttggaagatgaagatgtatccgaatcggttgacacatcagacaaacagcctcaagacaatacggaacttcatgaaaaagttgagacagtgagtttgcaaccaagagccgcgcagccgcgagcccaagccgccactcagccgcaagcccaagccgccgcgcaagccgatgcagtcagcaccaataccaactcggctttatctgacgcaatggcaagcacgcaatctatcttgttggatacaggtgcttcattaacacggcacattgcacaaaaatcacgcgctgatgccgaaaaaaacagcgtttggatgtcgaacatcggttatggccgtgattatgcttccgcacaatatcgccggtttagttcgaaacgcacgcaaacacaaatcggcattgaccgcagcttgtccgaaaatatgcagataggcggcgtattgacttactctgacagtcagcatacttttgatcaggcgagcggcaaaaatacttttgtgcaagccaacctttatggtaagtattatttaaatgatgcttggtatgtggccggcgatattggtgcaggcagcttgagaagccggttacaaacacagcaaaaagcaaactttaaccgaacaagtatccaaaccggccttactttgggcaatacgctgaaaatcaatcaattcgagattgtccccagtgcgggaatccgttacagccgcctgtcatctgcagattacaagttgggtaacgacagtgttaaagtaagttctatgtcagtgaaaacactgacggccggactggattttgcttatcggtttaaagtcggcaaccttaccgtaaaacccttgttatctgcagcttactttgccaattatggcaaaggcggcgtgaatgtgggcggtaattccttcgcctataaagcagataatcaacagaaatattcagcaggtgccgcgttactgtaccgtaatgttacattaaacgtaaatggcagtattacaaaaggcaaacaattggaaaaacaaaaatccggacaaattaaaatacagattcgtttctaa

SEQ ID NO: 55128 - DNA, 516 bp, Neisseria meningitidis
atgaaatcaaaactccccttaatcctaatcaacttttccctgatttcaagcccattgggtgcgaatgcggccaaaatctacacctgcacaatcaacggagaaaccgtttacaccaccaagccgtccaaaagctgccactcaaccgatttgcccccaatcggcaactacagcagcgaacgctatatcccgccccaaacgcccgaaccggtatcatcaccgtcaaacggcggacaggttgtcaaatataaagccccggtcaaaacagtatccaagccggcaaaatccaatacgccgccgccgcaacaagcaccctcaaacaacagcagacgctccattctcgaagcagaattgagcaacgaacgcaaagccctgactgaagcccaaaaaatgttatcacaagcacgtctggcaaagggcggcaacatcaaccatcaagaaataaatgcattacaaagcaatgtattggacaggcagcaaaatattcaagccctgcaaagggaactggggcgtatgtaa

SEQ ID NO: 55129 - DNA, 1380 bp, Neisseria meningitidis
atgctgctcgacctcaaccgcttttccttttccgtcttcctgaaagaagtccgcctgctgaccgctcttgccctgcccatgctgttggcgcaggtcgcgcaggtgggcatcggttttgtcgataccgtgatggcgggcggtgcgggcaaggaagacttggcggcggtggctttgggcagcagcgcgtttgccacggtttatattacctttatgggcattatggcggcgctgaacccgatgattgcccagctttacggcgcgggtaaaaccgacgaagtgggcgaaacgggacggcaggggattgggttcgggctgtttttgggcgtgttcggcatggtcttgatgtgggcggcgattacgccgttccgcaactggctgaccttgagcgattatgtggaaggcacaatggcgcagtatatgctgttcaccagcttggcgatgccggcggcaatggtacaccgcgcactgcacgcctacgcctccagcctgaaccgcccgcgcctgattatgttggtcagctttgcggcgtttgtgttgaacgtgccgctgaactatattttcgtttacggcaaattcggtatgcccgctttgggcggcgcaggctgcggactggcgacgatggcggtgttttggttcagcgcgctggcattgtggatttatatcgccaaggaaaatttcttccgcccattcggactgacggcgaaattcggcaaaccggattgggcggtgttcaaacagatttggaaaatcggcgcacccatcgggctgtcttattttttggaagccagcgcgttttcgtttatcgtgtttttgattgcgcctttcggcgaggattatgtggcggcgcagcaggtcggcatcagtttgtcggggattctctatatgattccgcaaagcgtcggctcggcggggacggtgcgcatcggcttttcgcttgggcggcgcgaattttcgcgggcgcgttatatttcgggcgtgtcactggtgttaggatggatgctcgccgtgattaccgtgctttccttggtattattccgttcgccgctggtaagtatgtacaacaatgatccggcggttttaagcatcgccgccaccgtcttactgttcgccggcttgttccaaccggcagacttcacccaatgtatcgcctcctacgccttgcgcggctacaaagttacaaaggtgccgatgttcatccacgccgccgccttttggggctgcggtctgctgccgggctacctgctcgcctaccgtttcgatatgggcatttacggcttctggacggcattgattgcctcgctcaccatcgccgccatcgccttggtgtggtgcttggaattgtgcagtagggagatggtcagatcgcataaggctgtctga

SEQ ID NO: 55130 - DNA, 1053 bp, Neisseria meningitidis
atgtggaaagaaattttactgaattacggtattttcctgctcgaactgcttaccgtgttcggcgcaattgcgctgattgtgttggctatcgtacagagtaagaaacagtcggaaagcggcagtgtcgtactgacggatttttcggaaaattataaaaaacagcggcaatcgtttgaagcattctttttaagcggggaagaggcaaaacatcaggaaaaagaggaaaagaaaaaggaaaaggcggaagccaaagcagagaaaaagcgtttgaaggagggtggggagaaatcttccgaaacgcaaaaatcccgcctttttgtgttggattttgacggcgatttgtatgcacacgccgtagaatccttgcgtcatgagattacggcggtgcttttgattgccaagcctgaagatgaggttctgcttagattggaaagtccgggcggcgtggttcacggttacggtttggcggcttcacagcttaggcgtttgcgcgaacgcaatattccgctgaccgtcgccgtcgataaggtggcagcgagcggtggttatatgatggcgtgtgtggcggataaaattgtttccgctccgtttgcgattgtcggttcggtgggtgtggtggcggaagtaccgaatatccaccgcctgttgaaaaaacatgatattgatgtggatgtgatgacggcgggcgaatttaagcgcacggttacttttatgggtgaaaatacggaaaagggcaaacagaaattccgacaggaactggaggaaacgcatcagttgttcaagcagtttgtcagcgagaaccgccctcaattggatattgaggaagtggcaacgggcgagcattggttcggtcggcaggcgttggcgttgaacttgattgacgagatttcgaccagtgatgatttgttgttgaaagcgtttgaaaacaaacaggttatcgaagtgaaatatcaggagaagcaaagcctgatccagcgcattggtttgcaggcggaagcttctgttgaaaagttgtttgccaaacttgtcaaccggcgggcggatgtgatgtag

SEQ ID NO: 55131 - DNA, 975 bp, Neisseria meningitidis
gtgcagccggggctttgggcttcagacggcatattttcggaatggcggcattcttgccggcggcgcggcagccgtatggggaagggaggggatattgtggtcggtaacggcaaaaaatatgccgcaccattgctggtgctgggttgcgtggtgttcggtctgggcagtctgattgtcagatccgtccccgtcggttcgtatgcaatcgcattttggcggttgctgatttcggtgttcgtattttggtttttagcacggtttttcgggcaaaaattcccaaaaaacaggaaaaccgtccgatatgccctgacggcgggcgtgtttctcgctttcgatttggcgttgtggcacgaaagcatacacgcggtcgggccgggtatttccaccctgctcaacagcctgcaaatctttttcttgtcggcaatcggtgttttctttttcggcgagcgtttgagcgggctgaaaaaggcaggcttaatatcggcagttgccggcgtggcgatgattgccggtgcggaattcggctacaacggtaatgcggtttggggattcgccagcggtttggtatcgggactgatgctcgccctgtcgatggtgtttgtccgcaaaacccatgaaatcgagccggtggcgcttttcccttcaatgatgattttgagtttgggcggcgcggtatcgctggttgttccggcattgctgatggatggcggcgcgctttatccgacgacttggaaagatgcgggtttggtgcttgtgtacggcgtggtaatgcagtgttttgcgtgggcgatggttgcctatgccattccgctgctttcgctgtcgctgacggggctgctgcttttgtccgaaccggtcgctgccttgttcatcgattatttcggattgggcaaaccgattgaaggcgtgcagtgggcaggggtggcgctgacgctttcggcaatttacctcggttcgctgaaacagcagtcttaa

SEQ ID NO: 55132 - DNA, 240 bp, Neisseria meningitidis; identical to SEQ ID NO: 39921

SEQ ID NO: 55133 - DNA, 792 bp, Neisseria meningitidis
atgaatttatttttcgataccaaattgggaaagcaacaaaataaagcaacccataaaatccgtgtaatgagtgaggcttggctggaaaaaaacggctactgcccctgttgcggaagcaaaccgatgcagagatttgccaataacaaacctgttgcagacctcttttgctcaaattgccacgagcaatatgaattaaagagtaaaaatcaaaaaaccataggtaacagtgtgcctgacggtgcatatcgcactatgttggagcgcatccggtcagataccaaccccaactttttctttcttgcatataaaaaagcggattactctatacggcaattggtgcttgtacccaaacatttcatcacgccggacatgattattcccagaaataaaggcattaaaaaccggccgaaccacattatgtgttccatcaatctcgcccctttgcctgaaagcggaaaaatattcttaatagacgattctcgcattatcgaacccgaaaccgttctgaaaaaatggcaatccaatctgtttttacgcaaccaaaatgcggagcgcaaaggctggcttttggctgttatgaaatgtatcgaccaactccccgaagaattcacattgtcgcaaatgtatgaatttgaaaacaaactatccatccaatttccccaaaacaagcatattaaagacaaaatccgccaacagttgcaaattttgcgcgaccaaaatacgatcgaattcattggtcgcggactttacaaaaaaatcgacaaattgcccccgacttccaaggcgttttaa

SEQ ID NO: 55134 - DNA, 987 bp, Neisseria meningitidis
ttgcccgatgcggcaaaccggcatcgtccggcaatacggttgtttaaaaataggaaaatcaggatggaaaaccaaaggccgctcctaggcttcgcgttggcacttttggcggcgatgacgtggggaacgctgccgattgccgtgcggcaggtattgaagtttgtcgatgcgccgacgctggtgtgggtgcgttttaccgtggcggcggcggtattgtttgttttgctggcactgggcgggcggctgccgaagcggcgggatttttcttggtgctcattcaggctgctgctgctcggcgtggcgggcatttcggcaaactttgtgctgattgcccaagggctgcattatatttcgccgaccacgacgcaggttttgtggcagatttcgccgtttacgatgattgttgtcggtgtgttggtgtttaaagaccggatgactgccgctcagaaaatcggcttggttttgctgcttgccggtttgcttatgttttttaacgataaattcggcgagttgtcgggtttgggcgcgtatgcgaagggcgtgttgctgtgtgcggcaggcagtatggcatgggtgtgttatgccgtggcgcaaaagctgctgtcggcgcaattcgggccgcaacagattctgctgttgatttatgcggcaagtgccgccgtgttcctgccgtttgccgaaccggcacacatcggaagtttggacggtacgttggcgtgggtttgttttgcgtattgctgcttgaatacgttaatcggttacggctcgttcggcgaggcgttgaaacattgggaggcttccaaagtcagcgcggtaacaaccttgctccccgtgtttaccgtaatattttctttgctcgggcattatgtgatgcctgatacttttgccgcgccggatatgaacggtttgggttatgttggcgcactggtcgtggtcgggggtgcggttacggcggcggtgggggacaggctgttcaaacgccgctag

SEQ ID NO: 55135 - DNA, 1773 bp, Neisseria meningitidis; identical to SEQ ID NO: 50521

SEQ ID NO: 55136 - DNA, 465 bp, Neisseria meningitidis
atgaaagaactagataaaatcgatttccgcattcttaagatccttcaacagaatgcccgcatcccgatgacggagcttgccgagaaggtaggcttgtccaccacgcccgttacagagagggtgcgccgtttggagcgggaacattatatttccggctatcacgcccacctcaatccccatctgttgggcaaaccactattggtttttgtcgagctgaagctgcaatccaaatcgggcaatattttcgaagatttcaaaaaagaagtgctgaaaattccgcaaattatggaatgccacttggtgtcgggcgaatacgactatctgattaaagtacgtttgcccgatatgtctgcctatcgggatatgctaggcaatatcctattgcaactgcctgccgcttcggagagtaggagttatgttgtgatggaggaggtcaaagaaaatccggttttggatttggattga

SEQ ID NO: 55137 - DNA, 1377 bp, Neisseria meningitidis
atgcacgacaaaacctggtccggacgtttcaacgaacccgtttccgaactcgtcaaacaatacaccgcctccatcggtttcgaccgacgccttgccgaatgggacatccaaggctcgcttgcccacgcgcaaatgctgaaagaaaccggcgtgttggacgaaggcgatttggcggacatccgtcggggcatggcggaaatcctcgaagaaatccgcagcggcaaaatcgaatggtcgtccgatttggaagatgtccacatgaacatcgaacgccgcctgaccgacaaaatcggcgacgcgggcaaacgcctgcacaccggccgcagccgcaacgaccaagtcgccaccgacatccgcctgtggctgcgtgaccagattaccgttatccaaagcctgattcaaaaccttcagacggcattgctggatttggcggaacaaaacgccgaaaccgttatgcccggctttacccacctgcaagtcgcccagcccgtcagcttcggacaccatatgctcgcctacgtcgaaatgctcggccgcgataacgaacggatggcggactgccgccgccgcgtcaaccgtatgccgctcggcgcagccgcccttgccgggacgacctacccgattcagcgcgaaattaccgccgagctattgggctttgaacaaatctgccaaaactcgctcgatgccgtatccgaccgcgattttgccgtcgagttcaccgccgccgcctcgctggttatggttcacctgagccgcctgtctgaagaattgattttgtggatgagtccgcgtttcggctttatcgacatcgccgaccgtttctgcacaggttcgtccatcatgccgcagaagaaaaaccccgacgtgcccgaactcgtgcgcggcaaatccggccgagtcatcggacaccttatcggcttgattaccctgatgaaatcgcagcccttggcgtacaacaaagacaatcaggaagacaaagaacctttgtttgacaccgccgacacgcttatcgacacgctgcggatttacgccgatatgatgcgcggcgtaaccgtcaaacccgacaatatgcgcgccgccgtgatgcagggttttgccaccgccaccgacttggcggattatctggttaaaaaaggtatgcccttccgcgatgcccacgaagtcgtcgcccaagccgtgcgccacgccgatgaagctggcgtcgatttgagcgaactgccgctcgaagtcttacaaggtttcagcgatttgattgccgacgacgtttacggcgtgctgacacccgaaggcagcttaaacgcgcgcaaccacttgggcggcaccgcgcctgaacaagtccgtttccaagtcaaacgctggcgggaaatgttggcttaa

SEQ ID NO: 55138 - DNA, 342 bp, Neisseria meningitidis; identical to SEQ ID NO: 37417

SEQ ID NO: 55139 - DNA, 717 bp, Neisseria meningitidis; identical to SEQ ID NO: 39172

SEQ ID NO: 55140 - DNA, 2472 bp, Neisseria meningitidis
atgaaaaaaacctgtttccactgcggtctggatgttcccgaacacctccacctgactgtccgttacgaaaacgaagaccgcgaaacctgctgcgccggctgtcaggcggtcgcacaaagcattattgacgcgggcttgggcagttattacaaacaacgcaccgccgacgcgcaaaaaaccgagctgccgccccaagaaatcctcgaccaaatccgcctgtacgacctgcccgaagtccagtccgactttgtggaaacccacggcggcacgcgcgaggcggttttaatgctcggcggcatcacctgcgccgcctgcgtctggctgatcgaacagcagcttttgcgtacagacggcatcgtccgcatcgacctcaattacagcacgcaccgctgccgcgtcgtctgggacgacggcaaaatccgcctttccgacattctgttgaaaatcaggcagataggctacaccgccgcaccctatgacgcgcaaaaaatcgaagccgccaaccaaaaagaacgcaaacaatacatcgtccgcctcgccgttgccgggctggggatgatgcagacgatgatgttcgcgctgccgacctacctttacggcggcgacatcgaacccgatttcctgcaaatcctccattggggcggctttttaatggtgctgcccgtcgtattctattgcgccgtcccgttttatcaaggcgcgctgcgcgacttgaaaaaccgccgcgtcggcatggatacgccgattaccgtcgccatcatcatgacctttatcgccggcgtttacagccttgcgacaaatgcggggcaggggatgtatttcgaatccatcgcgatgctgctgtttttcctgctgggcggacgctttatggaacacattgcccgccgtaaggcaggcgatgccgccgagaggctggtgaagctgattcctgcgttttgccatcatatgcccgattaccccgatacgcaggaaacctgcgaggcagctgtcgtcaaattgaaagcgggcgatatcgtgctggtcaaaccgggcgaaaccatccccgttgacggcacggtgctggaaggaagcagtgccgtcaacgaatctatgctgaccggcgagagcctgcccgtcgccaaaatgccgtctgaaaaagtaaccgccggcacactcaacacgcaaagccccctgattatacgcaccgaccgcaccggcggtggcacgcgactgtcgcacatcgtccgcctgctcgaccgcgccttagcgcaaaaaccgcgcactgccgagttggcggaacaatacgcctcgtctttcatattcggcgaactcctgcttgccgtccccgtcttcatcggctggacgctgtacgccgacgcgcacaccgcattgtggattaccgtcgccctgctggtcattacctgcccctgcgccttatcgcttgccacgccgaccgcgctggcagcttctaccggtacgctggcgcgcgaaggtattttaatcggcggaaagcaggcaatcgaaaccctcgcccaaaccaccgacatcatcttcgacaaaaccggcacgctgacccaaggcaaacccgccgtccgccgtatctcattgttgagaggcacagacgaagcctttgttctcgcggtggcgcaggctttagaacaacagtccgaacatccccttgcccgcgccatcctcaactgccgcatttcagacggcagcgtccccgacatcgctattaaacaacgcctcaaccgcatcggcgaaggcgtgggcgcgcaactgaccgtcaacggcgaaacacaggtttgggcattgggcagggcatcctatgtcgccgaaatttcaggtaaagaaccgcaaacagaaggcggcggcagcgcggtttacctcggcagtcaaagcggtttccaagccgtgttctacctgaccgaccccttgaaagacagcgcggcggaggcggtgcggcagttggcaggcaaaaacctgaccctgcacatcctcagcggcgaccgcgaaaccgccgttgccgaaaccgcacgcgccctgggtgtcgcgcactaccgcgcccaagccatgcccgaggacaaactggaatacgtcaaagccttgcaaaaagaagggaaaaaagtgctgatgataggcgacggcatcaacgacgcgcccgttttggcgcaggcagacgtatccgccgccgcagcgggcgggacggatattgcgagggacggcgcggacattgtgttattgaacgaagatttgcgtaccgtcgcccacctgctcgatcaggcgcggcgcacccgccatattatccggcaaaacctgatatgggcgggcgcgtacaatatcattgccgtaccgcttgccgttttgggctatgtccaaccgtggatagccgcactgggtatgagcttcagttcgctggcggttttgggcaacgccctgcgccttcacaaacgggggaaaatgcagtctgaaaaaatgccgtccgaacaatga

SEQ ID NO: 55141 - DNA, 747 bp, Neisseria meningitidis; identical to SEQ ID NO: 47877

SEQ ID NO: 55142 - DNA, 366 bp, Neisseria meningitidis; identical to SEQ ID NO: 46768

SEQ ID NO: 55143 - DNA, 588 bp, Neisseria meningitidis; identical to SEQ ID NO: 43205

SEQ ID NO: 55144 - DNA, 261 bp, Neisseria meningitidis; identical to SEQ ID NO: 49896

SEQ ID NO: 55145 - DNA, 1086 bp, Neisseria meningitidis; identical to SEQ ID NO: 43799

SEQ ID NO: 55146 - DNA, 1056 bp, Neisseria meningitidis
atgattacacttgccgtagatgccatgggcggcgaccaaggacttgccgttaccgtacccggcgcaaccgcattcctccaagcacaccccgatgtccgcctgattatgaccggcgacgaaacgcaactgcgccaagccctgaccgcggcaggcgcaccgatggaacgcatcgacatctgccataccacccaagttgtcggcatggatgaatcccctcagtccgccctaaagaacaaaaaagactcctccatgcgcgttgccatcaaccaagttaaagaaggcaaagcccaagccgccgtatccgcaggcaacacgggcgcactcatggcaaccgcacgtttcgtcctcaagaccatacccggtatcgaacgccccgccatcgccaaattcctcccgtccgacaccgaccatgttaccctcgccctcgaccttggcgcgaacgtcgactgcacgcccgaacagctcgcccaatttgccgttatcggcagcgaactcgtccacgcactccatcctcaaaaaggacagccgcgcgtcgggctggtcaacgtcggcacggaagacatcaaaggtacggacaccgtcaaacaaacctacaaactgctgcaaaacagcaaactcaactttatcggcaacatcgaaagcaacggcatcctgtacggcgaagcagatgtcgtcgtcgccgacggctttgtcggcaacgtcatgctcaaaaccatcgaaggcgcggtcaaattcatgagcggagccatccgccgcgaattccaaagcaacctgttcaacaaacttgccgccgttgccgccctacccgccctcaaagggctgaaaaacaaactcgatccgcgcaaattcaacggggccatcctgctcgggctgcgcggcatcgtcatcaaaagccacggcggcacagacgaaaccggtttccgctacgcactcgaagaagcctaccacgaagccaagtccgccggcctttccaaaatcgaacaaggcgttgccgaacaactcgccgcactcgaaactgccaaagccgtccaaaacgaaaatgtcggcggtctgtaa

SEQ ID NO: 55147 - DNA, 2586 bp, Neisseria meningitidis
atgttagaagcctatcgtaaagccgccgccgagcgcgccgcccttggtattcccgcccttcctctgactgctcagcaaaccgccgatttggttgagctgctgaaaagcccgcccgcaggcgaaggcgagttcttggtcgaactgcttgcccaccgtgttccgcccggtgtggacgatgccgccaaagtcaaagcctcattcctggctgccgttgccgaaggcagcgcgtccagcccgctgatctcccccgaatatgcgaccgaactcttaggtacgatgctcggcggttacaatatccacgccttaatcgaactcttggacgacgacaaactcgcgcccattgccgccaaaggcttgaaacatacgcttctgatgttcgattccttccacgacgttcaggaaaaagccgaaaaaggcaacaaatacgcgcaagaagttttgcaatcttgggcagatgccgaatggtttacctcacgcgccaaagttcccgaaaaaatcaccgttaccgttttcaaagttgacggcgaaaccaatacagacgacctctcccccgcgcccgacgcgtggagtcgtcccgatattccgctgcacgcgctggcaatgctgaaaaacccgcgcgacggcatcacgcccggcaaaccgggcgaagtcggtccgattaaattgttggaagaactcaaagccaaaggccatccggttgcttacgtcggcgacgtggtcggtactggttcttcacgcaaatccgcgaccaactccgtcatttggcataccggcgaagacattccgttcgtgccgaacaaacgcttcggcggcgtatgtttgggcggcaaaatcgcgccgattttcttcaatacccaagaagattccggcgcgctgccgattgaagtcgatgtatctgctctaaaaatgggcgatgtcgtcgatatcctgccttatgaaggcaaaatcgtgaaaaacggcgagactgttgccgagtttgaattgaaatcacaagtattgctggacgaagtgcaagccggcggccgtatcaacctgattatcggccgaggtctgaccgccaaagcgcgcgaagccctgaaactgcctgcctctactgcattccgcctgccgcaagcgcctgccgaaagcaaagccggtttcaccttggcgcaaaaaatggtcggccgcgcctgcggtctgcccgaaggacaaggcgtgcgcccgggtacttactgcgaaccgcgtatgacgacggtcggctcgcaagacacgaccggcccgatgacccgcgacgagttgaaagacttggcttgtttgggcttctccgccgatatggtgatgcagtctttctgccacaccgccgcctatccgaaacctgtcgatgtaaaaacccataaagaactgcccgcctttatttccacccgtggcggcgtgtcactgcgtccgggcgacggcgtcatccactcgtggctcaaccgcctgctgctgcccgataccgtcggcaccggcggcgacagccatacccgtttccccatcggtatttccttccccgccggctccggcttggttgcctttgccgccgcaacgggcgtaatgccgctcgatatgcccgagtctgtattggtacgcttcagcggcaagctgcaaccgggcgtaaccctgcgcgatttggtgaacgccatcccgctgtacgcaattaaacaaggtttgctgaccgttgccaaagccggtaagaaaaacatcttctctggccgcatcctcgaaatcgaaggcctgcccgatttgaaagtggaacaagcctttgaattgaccgacgcatccgccgaacgctccgccgccggctgtaccgtgaagctcaataaagagccgattatcgagtacatgaaatccaacgtcgtgttgatgaaaaacatgattgccaacggctatcaagacccgcgcactttggaacgccgcatcaaagctatggaaaaatggctggcaaatcccgagttgctcgaagcggataaagatgccgaatacgccgccgtgattgaaatcaacatggacgacatcaaagagccgattatcgcctgcccgaacgacccggacgacgtgtgcttcatgtccgaacgctccggcaccaaaatcgacgaagtattcatcggttcgtgtatgaccaacatcggccacttccgcgccgcctccaaacttttggaaggcaaggcagacacccccgtccgcctgtggattgcgccgccgaccaaaatggacgcgaaacaattgtccgacgaaggacactacggcgtactcggacgtgccggcgcgcgtatggaaatgccgggttgctccttatgtatgggtaatcaggcgcaagtacgcgaaggtgcgaccgttatgtccacctccacccgcaacttcccgaaccgtttgggtaaaaacacctttgtttacctcggttcggcggaattggcagcgatttgctccaaactgggtaaaatcccgaccgttgaagaatatcaagccaatatcggcatcatcaacgaacagggcgataaaatctaccgctatatgaacttcaacgaaatcgacagctacaacgaagtagccgagaccgtgaacgtttaa

SEQ ID NO: 55148 - DNA, 987 bp, Neisseria meningitidis
gtgagtggagcagaaagttaccggcatatcacggtcttgctgaatgaggcggtggatgcgcttgccgtgcgcgaagacggtgtctatgtggacggtacgttcggcaggggagggcattcccggctgattttgtcgcgtttgggcgatgcggggcggttgattgttttcgacaaagatccgcaggcgattgctgtggcagaagagctggcgcgttcggacaaacgggtcggtgtcgtgcatggcggttttgcttcgtttcagacggcattggacggtttgggtatcggcaaggtggacggtgcgctgtttgatttggggatttcgtccccgcaaatcgatgacggcagccgcggtttcagcttccgtttcgatgcccctttggatatgcgtatggatacgacgcgcggtatgtctgccgcagagtggatagcggttgcgtcggaacaggatttgcacgaggtaatcaagaattatggtgaagagcggtttagccgccagattgcgcgcgccattgttgcgcaacgggcggaaagtccaatcgatacaacccgcaagctggcgcagatcgtggcacaaaacgtccgtactcgcgagcgggggcaggatcctgcgacgcgcaccttccaggcaatccgcatctttattaaccgcgagcttgaagaagtaggggcagtattgccgcaggtcatgtgtcgtctgaaagagggcggacgtttggcggtcattgctttccattcgttggaagaccgcattgtgaagcagtttgtcaaaaaatattcgcaacacgcgcccctgccgcgctgggcggcggtcagggaagcggatttgcccgagccgcccctgaaaatcgcgggcagggcattaaagccgggtgaggcggaaattgccgccaatccgagggcgagaagtgcggttttgcgtgtggcggagcggactgccggtccgataccggaacaatcacagagaaaaacgtctgaatggcaatga

SEQ ID NO: 55149 - DNA, 1701 bp, Neisseria meningitidis
atgtccgtcaaaatccaaacccgatccgtcaataccgacgttttcaatcatttgctcaccgccggcgccgatcctttaatcgcccggctttgtgcctcgcgcggtgtgcaaagtcctgccgaattggacgacaaactcgcttccctcctgccttatcaaacgctgacgaattgcgaagccgccgcccgccgtttggcggatgcggttgagcgtcaggaaaaaatcttgattgtcgccgactacgatgccgacggcgcgaccgcgtgtgccgtcggtttggacggtttggcggcgatgggggcaaaagtagatttcctcgtgcccaaccgctttgaacacggctacggtttaacgcccgagctggccgaaatcgccgccgcgcaaggcgtggatttgctgattacggtcgataacggcattgccagcatcgcaggcgtggcgcgtgcgcaggaattgggtttggatgtgattgtaaccgaccaccatctgcctgccgagaccgtgccagactgcatcatcgtcaatccgaaccaaaaaggctgcggtttccaaagcaaaagcttggcgggcgtgggcgtgattttttatgtactgatggctttgcgtgccgaactgcgccgccgcaattatttttcagacggcctaaaagagccgaatctgggcgaccttttggatttggtcgcactcggtaccgttgccgacgtcgtctccctcgatcacaacaaccgtatcctcgtgtcgcaaggtttgaaacggatgcgttcgggcaaaatgcgccccggtatccgcgccttgtttgaagtggcgcggcgcgactggcgcaaagcgcagccgtttgatatgggctttgcgttggggccgcgcatcaatgccgccggacggttggacgatatgtcggtcggcattgcctgtctgttggcgcgagatgatgtggaagcgcaggaactggcggctcagttaaacaacctcaatatcgagcgtcgcgaaatcgagcagtctatgctgcaagacgcgctgaatgcttttcctgaaaccctgccttcaggtcagacgactttggtggcgtatcgcgacgacttccatcaaggtgtggtcggcattgtcgccagccgcctcaaagaccgtttttatcgtccgaccatcgtgtttgcgcctgccgacaacggcgaagtacgcggttcgggacgttccattcccaatttgcacctgcgcgatgctttggacttggtgtccaaacgccatcccgatttgattttgaaattcggcggacacgcgatggcggcgggtttgagcatacttgaacacaacattcccgcgtttcagacgtcctttgaagaagccgtgcgcgaaatggtgtgcgaagacgatttgtcgcaaaccttcatcaccgacggcagcctgcccgcctgcgacatcacgttggaacaggcgcaaaaccttgcccgtcacgtttgggggcagggcttcgcgccgccgagctttaccgacgagttccacgtcgtccgccagcaacctttgggcgcggagggcaaacacaaaaaagtctggctgcaaaaagacggctgcgaatttgaagccatgttttggcgttgcagcgaagacatccccgaatacatccgcacggtttaccgccccgttgccaacgaatggcgcaacaatctcgaattgcagctgtatatcgattactgggaagcggtgtag

SEQ ID NO: 55150 - DNA, 249 bp, Neisseria meningitidis
atgcaccccatcgaaacccccgataagaccttccacgacggcgacggcgtgtccgaattgggcaccatcctgcccgcgtggtggctcaaccaagtgcaatccgagctgctggccgtgctgactgcggccggtatccagccggataagtcgcagcctaatcaattactggcagcactaaataggctggctgtagttatcaccggcgaccaaaccatcaccggccaaaaaacctttaccgcccaaacctaa

SEQ ID NO: 55151 - DNA, 948 bp, Neisseria meningitidis
atggaatttttcattatcttgttggtagccgtcgccgttttcggtttcaaatcctttgttgtcatcccacaacaggaagtccacgttgtcgaaaggcttggacgtttccatcgcgccttgacggccggtttgaatattttgattccctttatcgaccgcgtcgcctaccgtcattcgctgaaagaaatccctttagacgtacccagccaggtctgcatcacgcgcgacaacacccagctgacggttgacggcatcatctatttccaagtaaccgatcccaaactcgcctcatacggttcgagcaactacattatggcgattacccagcttgcccaaacgacgctgcgttccgttatcgggcgtatggagttggacaaaacgtttgaagaacgcgacgaaatcaacagcaccgtcgtttccgccctcgatgaagccgccggagcttggggtgtgaaagttctccgttacgaaatcaaggatttggttccgccgcaagaaatccttcgctcaatgcaggcgcaaattactgccgaacgcgaaaaacgcgcccgtatcgccgaatccgaaggccgtaaaatcgaacaaatcaaccttgccagtggtcagcgcgaagccgaaatccaacaatccgaaggcgaggcccaggccgcggtcaatgcgtcaaatgccgagaaaatcgcccgcatcaaccgcgccaaaggcgaagcggaatccctgcgccttgttgccgaagccaatgccgaagccatccgtcaaattgccgccgcccttcaaacccaaggcggcgcggatgcggtcaatctgaagattgcggaacaatacgtcgctgcgttcaacaatcttgccaaagaaagcaatacgctgattatgcccgccaatgttgccgacatcggcagcctgatttctgccggtatgaaaattatcgacagcagcaaaaccgccaaataa

SEQ ID NO: 55152 - DNA, 432 bp, Neisseria meningitidis
atgggcagcaacgcatggctgttttgggcattggcatcggcaggcttcgcctcattgaccgccgttttcgccaaaatgggcttgcagggcatcgattcggatttcgccaccttcatccgcaccttggtcatcctcgccgctttgttattgtttttaacctacaccggcaaatggcagggcgtgaacggctttacggggcacaactggacattccttatcctatccggccttgctaccggcgcatcttggcttgcctacttcaaagccctgcaactgggtaacgcctcgcaagtcgcccccgtcgataaattcagcctggttctggtcgccctgatggcagtagtcttcctcaacgaacgccccagcacgcaggaatggataggcttggggctggtaacggcgggcgtgttggtgctggcgttgaaacgttaa

SEQ ID NO: 55153 - DNA, 450 bp, Neisseria meningitidis
atgagccttatcggcgaaattttgcctttgtcccatattgttttggatatggaggtgggcagtaaaaaaaggctgtttgaggaagcgggcctgcttttggaacgcgaatcctcattgtcccatgctgatgttttcgaatgtctttttgcccgtgaaaaactcggttcgaccggtttggggcagggcgttgccatcccgcacggccgtcatgccggcgtgaagcaggcgacgggcgcgttcatccgcacgcgcgaacccgtcggatttgacgcaccggacggcaaaccggtttccctggtttttatcttgctggttccggaaaatgcgacgggcgagcatttggaagtattgtccaaactggccggcaagttttcccaaaaaagcatcagagaatcgctgatgaccgtttcttctgcggaagaagcccgcgccattctgaccgaagaataa

SEQ ID NO: 55154 - DNA, 753 bp, Neisseria meningitidis
gtgcctgtcggcgaagcccgcattcctccaaatccaaaagcggtaaaaggaacaaccgttaccctgtcgcaggaacaacgcctagccaacggagagctgataccgaaaggctctgtggtaacgtggtcggacaatgcggtgaaggttgtgcggcctgatgggaaaaagcggagatttaatagtcgggattgggaacagaaggcattgccgaaaccgcaactaccgaaagattacagagatgacatcaacataggtggaaataatcctagatttaatcagcaacggcatgaaaaaatcgaatcccacaacccaaacagaatagaggagatacgccaacgtaatgccgtttcttctgcagaaaggcaggctgatgcattaaaaaggatgcaaacgtctggccgcacccgcctgcctgggcagccacaaaaaggaaaacccggcgctgctagagaaatgtcctcttcagacaatccgaatcaaacagccgaggcttttgcacgtcgatatttaggcaggaaacctacactaatggaacgagtcgaaggtgaaaaattatacggaggtaaatgtgtgggctgttggaaagcgcaaatgccggacggaacctttgtggtgtataggccagcaggtaatgcttctataaccaagggaactactgcgtctgttgatattaataacccaacattaaataacttaaatattaatttaaaaggcaagccaacagagttaaaatttaaattccctgctagataa

SEQ ID NO: 55155 - DNA, 513 bp, Neisseria meningitidis
atgaagatgtttgaacaagaagacgaatgggtcagcaaaacccaaatgaaaaagcagatgaacggtttgcaggatttgggtatggagctgaccaagctctcaagcgacacgttgaaaaaaatcggcttggacgaagatttgtacgaagccgtcgttacctataaaaaaatcacatccaacggcgcgctcaagcggcaggcgcaatttatcggcagactgatgcgcgataccgatcccgcgcccatcgaggcatttcttgccaagctgcgcggcgacgatgcggtgcacaatgcctttttgcaacgcgtggaacaggcgcgcgtacggctgttggcagacgacggcgcgttgacgcagtttatgtcggattttccgcatgcggacgcgggcaagctgaggacgctcgtccgcaacaccaaaaaagagcaggagcaaaacaaaccgccgaaaaacttccgcgcgctgtttcaagaattgaaaaccgtgatggaaaacggggacgcggaaatttag

SEQ ID NO: 55156 - DNA, 198 bp, Neisseria meningitidis; identical to SEQ ID NO: 36305

SEQ ID NO: 55157 - DNA, 1146 bp, Neisseria meningitidis
atgcaaaataattcatacggctatgccgtgtcggtgcgcgtgggcggtaaagagcaccgccactgggagcgctacgacatcgacagcgactttttaatccctgccgacagcttcgattttgtcatcggcaggttggggccggaggcggccatacccgatttaagcggagagagctgcgaggtagtgatagacgggcaaatcgtgatgacgggcatcatcggcagccagcgccacggcaaaagcaagggcagccgcgagttgagcttgagcgggcgtgatttggccggttttttggtggattgctccgcgccgcagctcaatgtaaagggcatgacggtattggatgcagccaaaaagctggccgcgccgtggccgcagattaaagcggtggtgcttaaggccgaaaacaaccccgctttggacaaaatcgacatcgagccgggcgaaactgtatggcaggcattaacccatattgccaactcggtcgggctgcatccgtggctggagccggacggcacgttggtggtgggcggtgcggattacagcagcccgccggtggcgacattgtgttggagccgcaccgacagccgctgcaatatcgagcgcatggacattgagtgggataccgacaaccgcttttccgaggttacttttttggcgcaatcgcacggccgcagcggcgacagcgccaaacacgatttaaagtgggtgtacaaagacccgacgatgacgctgcaccgccctaaaacggtggtggtgtccgatgccgacaatttggccgcattgcaaaagcaggctaaaaagcagctggccgactggcggctggagggatttacactcacgataaccgtgggcggccataaaacccgcgacggcgtattgtggcaacctggccagcgtgtgcatgtgatcgacgacgagcacggtatcgatgcggtgttttttctgatggggcggcggtttatgctatcccgcatggatggcacgcaaaccgagctgcggctcaaagaggacggtatttggacacccgacgcttaccccaaaaaggccgaggcggcgcgcaagcgcaaaggcaaacgcaaaggcgtgagccataagggcaaaaaaggcggcaaaaaacaagcagaaacggcggtgtttgaatga

SEQ ID NO: 55158 - DNA, 327 bp, Neisseria meningitidis; identical to SEQ ID NO: 42598

SEQ ID NO: 55159 - DNA, 642 bp, Neisseria meningitidis
atgtcaatacctattaatttcaataacttaaagtatttgcttaatgatatgagaaacaaaaatagaataattgaagcatttccttttaattataatcaaaggcaatacgccgttattttgactaggtataaacctgatgaacctagaccagatgattatgcacaagcaaaattagagttttttaatttgaatagtgaaaattcaatatttgcgtatgctgatttttatgaagttcattttaaaagtgctactgattttattaatttttttaaaattaatgttcaggctggtgctgcgaaaatcagagaaatttttcagagttttagtaatctttttgcagatttcattccaacacaaactaaaaaagatttagacataatttataaaaagattgtagctactcgtttagaacctaattctcctaacactatttattgctatgatgtccgtagaaatgggaaagataaggctggcaagcctaatcgcaggagcgtggaaaatagtgaaaaagcaaaaattttgcgcccagagctatacgaaaaatttaaagccgatagtaattacagttttttcttttcagataatccaagcgatgaaaaaacagatgcagaaataattagagaagttaccaatcgtcaataa

SEQ ID NO: 55160 - DNA, 1755 bp, Neisseria meningitidis
gtgaaaccgctgcgaagactgacaaacctccttgccgcctgcgccgtagcggcggccgcactcatacagcccgccctcgcagcggacttggcgcaagacccgttcattaccgataacacccaacggcagcactacgaacccggcggcaaataccacctcttcggcgacccgcgcggcagcgtttccgaccgcaccggtcaaatcaacgtcatccaagactatacccaccagatgggcaacctgctcatccaacaggcggcaatccaaggcaatcttggttacaccgtccgcttttccggacacggatacgaagaacacgcccccttcgacaaccacgccgccgacagcgcaagcaaagaacaaggcaacgttgacgacggctttaccgtataccggctcaactgggaaggacacgaacatcatcccgccgatgcctacgacggcccgaagggcggcaattaccccaaacctacgggcgcacgcgacgaatacacctatcacgtcaacggcacagcccgcagcatcaaactcaatccgaccgacacccgcagcatccggcaacgcatatccgacaactacaacaacctcggcagcaatttctccgaccgcgccgatgaagccaacaaaaaaatattcgagcacaatgccaagctcgaccgctggggcaacagcatggagtttgtcaacggcatcgccgccggagcactcaacccctttatcagcgcgggcgaagccttaggcataggcgacatactgtacggaacgcgctatgccatagacaaagccgcaatgcgcaacatcgcccccttacccgccgagggcaaattcgccgtcatcggcggcttgggcagcgtggcgggctttgaaaagaatacgcgcgaagccgttgaccggtggatacaggaaaaccccaatgccgccgaaaccgtcgaagccctggtcaacgtcctgccgtttgccaaagtcaaaaacctgacaaaggcggcaaaaccggggaaggctgcggttagtggggatttttctaaatcctacacctgctccttccacggcagcaccttggtcaaaacggcagacggctacaaagccattgcccatattcaagccggagaccgcgtcctttccaaggacgaggcaagcggagaaacgggatacaaacccgttaccacccgatacggtaatccgtaccaggaaaccgtttacattgaagtttcagacggcatcggcaacagccaaaccctgatttccaaccgcatccatccgttttacagtcaaggaaaatggatacaggcaggtcgtctgaaaaaaggcgacaccctgctttccgaaagcggcgcaaaacagacggttcaaaacattaccctcaaacagcagccgctcaaagcctacaacctgaccgttgccgactggcatacttacttcgtcaagggagataaggcggaaacggaaggggtgcgggttcataattcttgtccgccatataagagaccaaataacgcaacgacaaaagcacaacgagaaagtgtacaaggaaaaccctgcgttgaatgcggtaaattagccgaaaaaatgattgccgaccataaaaaaccattagttgtcgagtattatgaaacagggacaattgacaaatctaagatgagagcaattgaatcagtacaaccgcaatgtccgacttgttctgcaaaacaaggagggagattaagccaatattcaaaagaacagaaaaggaaactgagtaatgggaataaaaaatga

SEQ ID NO: 55161 - DNA, 441 bp, Neisseria meningitidis
gtgaacatccgccgcgccgtttatgccgattgcgcggcactcgccgcactcgatgccgtctgcaacccgtccgcgtggacgcaacaccaatttgagtccgcattggtttcgccgtccgaacaggttttccttgcggaaaaagacggcaggttggccgcctttatcgtttggcagaacctgcccgacgaatccgaactgcacctgattgccaccgcgcccgaatgccgccgccggggtgttgcgtccgccctgctcgaatattggtacgcacacctgcccgaaggcacgcaacgcctgctgctcgaagtccgcgcaggcaacaccgccgcacaggcactgtacgcggcgcacggcttcagcattgcgggcaggcggaaaaactattaccgtacagccgacggtaaaaccgaagatgccgtcttgatggagaaaatatgttaa

SEQ ID NO: 55162 - DNA, 1044 bp, Neisseria meningitidis
atgcagattaccgacttactcgccttcggcgctaaaaacaaagcatccgaccttcacctgagttcgggcatatcccctatgattcgggttcacggcgatatgcggcgcatcaaccttcccgaaatgagcgcggaagaggtcggtaatatggtaacttcggtgatgaacgaccaccagcggaaaatctaccagcaaaacttggaagttgacttctcgttcgaactgcccaacgtcgcccgattccgcgtcaacgccttcaacatcggccgcggtcccgccgccgtattccgcaccattcccagcaccgtcttatcgctggaagaattgaaagccccgagcattttccaaaaaatcgcagaatcgccgcgcggcatggtattggttaccggccctaccggttcgggcaaatcgaccacgcttgccgcaatgatcaactacatcaacgaaacccagccggcacacatcctgaccatcgaagacccgatcgaattcgtccatcaaagcaaaaaatccctgattaaccagcgcgagctgcaccagcacaccctcagcttcgccaacgcgctgcgttccgcattgcgcgaagaccccgacgttatccttgtcggcgagatgcgcgacccagaaaccattggcttggcactgaccgccgccgaaaccggacacttggttttcggcacgctgcacacgaccggcgcagcaaaaaccgtcgaccgtattgtggacgtattcccggcgggagaaaaagaaatggtgcgctctatgctgtccgaatcgctgaccgccgtcatctcccaaaacctgctgaaaacgcacgacggcaacggccgtgtcgcctcgcacgaaatcctgattgccaaccccgccgtccgcaacctcatccgcgaaaacaaaatcacgcagattaactccgtcctgcaaaccgggcaggcgagcggtatgcagacaatggaccaatcgctgcaatcgctggtgcgccaagggctgatcgcaccggaagtcgcacgcagacgcgcgcaaaacagcgaaagtatgagtttctga

SEQ ID NO: 55163 - DNA, 918 bp, Neisseria meningitidis; identical to SEQ ID NO: 50851

SEQ ID NO: 55164 - DNA, 1935 bp, Neisseria meningitidis
atgagcttgatcgaatgtaaaaacatcaaccgctatttcggcagcggcgagaaccgcgtccatattttgaaagacatcagcctgtcgatagagaagggcgattttgtcgccatcatcgggcagtccggttcgggcaagtccacgctgatgaacatactcggctgtttggataccgccggttccggttcgtaccgaatcgacggcatcgaaactgccaaaatgcagcctgacgagctggcggcattgcgccgcgaacgcttcggtttcatcttccaacgctacaacctcttaagctcgctgaccgcaagggataacgtcgcgctgccagccgtctatatgggcgcgggcggcaaagagcgttccgcgcgggcggacaaactcttgcaggatttgggtttggcaagcaaagagggcaacaagcccggcgaactctcgggcggacagcagcagcgcgtctccatcgcccgcgccctgatgaacggcggagaaatcatcttcgccgacgagccgaccggcgcgctcgataccgccagcggcaaaaacgtgatggaaatcatccataagctgcacgaagccgggcataccgtcattatggtcacgcacgaccccggcatcgccgccaatgccaaccgcgtcatcgaaattcgggacggcgaaatcatttccgacacctcgaaaaatccagaaatccccgcaagcaatgtcgggaggattcaggaaaaagcctcgtggtcgttttattacgaccagtttgtcgaagccttcagaatgtcggtgcaagcagtattggcgcacaaaatgcgttcgcttctgacgatgctcggcatcatcatcggtatcgcttcggttgtctccgtcgtcgcattgggcaatggttcgcagaaaaaaatccttgaagacatcagttcgatagggacgaacaccatcagcatcttcccggggcgcggcttcggcgacaggcgcagcggcaggattaaaaccctgaccatagacgacgcaaaaatcatcgccaaacaaagctacgttgcttccgccacgcccatgacttcgagcggcggcacgctgacttaccgcaataccgacctgaccgcttctttgtacggcgtgggcgaacaatatttcgacgtgcgcggactgaagctggaaacggggcggctgtttgacgaaaacgatgtgaaagaagacgcgcaggtcgtcgtcatcgaccaaaatgtcaaagacaaactctttgcggactcggatccgttgggtaaaaccattttgttcaggaaacgccccttgaccgtcatcggcgtgatgaaaaaagacgaaaacgctttcggcaattccgacgtgctgatgctttggtcgccctatacgacggtgatgcaccaaatcacaggcgagagccacaccaactccatcaccgtcaaaatcaaagacaatgccaatacccaggttgccgaaaaagggctgaccgatctgctcaaagcgcggcacggcacggaagatttcttcatgaacaacagcgacagcatcaggcagatagtcgaaagcaccaccggtacgatgaagctgctgatttcctccatcgccctgatttcattggtagtcggcggcatcggcgtgatgaacatcatgctggtgtccgttaccgagcgcaccaaagaaatcggcatacggatggcaatcggcgcgcggcgcggcaatattttgcagcagtttttgattgaggcggtgttaatctgcgtcatcggcggtttggtcggcgtgggtttgtccgccgccgtcagcctcgtgttcaatcattttgtaaccgacttcccgatggacatttcggcggcatccgttatcggggcggtcgcctgctcgaccggaatcggcatcgcgttcggctttatgcctgccaataaagcagccaaactcaatccgatagacgcattggcgcaggattga

SEQ ID NO: 55165 - DNA, 246 bp, Neisseria meningitidis; identical to SEQ ID NO: 37539

SEQ ID NO: 55166 - DNA, 1854 bp, Neisseria meningitidis
atgaaccgttatcctttatggaaatatctgctgattgtgttcacgattgcggttgccgcagtgtattcgctgcccaacctattcggcgaaacacccgccgtgcaggtatcgaccaaccgacaagccatcatcatcaacgaacagactcaatccaaagtggatgccgcgctgcaaaacgcgggtattcagaccgacgggatgtttgttgtggacaattcactgaaagtgcgtttcaaagacaccgaaacgcagcttaaagcgcgcgacgtcatcgaaaacactttgggcgaaggctatattaccgcgctcaacctgttggcggacagccccgaatggatggcgaaaatcaaagccaatccgatgtttttgggtttggacttgcgcggcggcgtgcatttcaccatgcaggtcgatatgaaagcggcgatgcagaaaacgtttgaacgttattcgggcgacatccgccgcgaactgcgccgcgaaaaaatccgcagcggcacggtgcgtcaggctggaaacagcctgaccgtccctttgcaggatgcaggtgatgtgcaaaaggctctgccgcagttgcgcaagctgtttcctgaagcaacgctgaattcagacggcagcaatatcgtcttgacgctttcggaagaggcggtcaataaagtgcgttccgatgcggtcaaacagaacatcactaccctgcacaaccgtgtgaacgagttgggcgtggccgaacccgtcatccagcagtccggtgccgaccgtatcgtcgtgcagcttccgggcgttcaggatactgccaaggcaaaagacatcatcggccgtaccgcgactttggaattgcgtatggtggaggacgatcctgccaagttgcgcgaggcattggaaggcaacgtgccgagcggttatgagctgctttcaagcggcggagatcgtcccgaaattctgctgatcagcaaacaggtcgagctgacgggcgacaacatcaacgatgcgcaaccgagtttcgaccaaatgggcgcacctgccgtcagtctgagcttggacagcgcgggtggcagcattttcggcgaactgactgccgcaaatgtcggcaaacgcatggcgatggttttgatcgaccaaggaaaatccgaggttgtaaccgcgccggttatccgtactgccattacaggcggacgcgtggaaatttccggaagcatgacgacagccgaagccaatgatacgtctttgctgttgcgtgccggttctcttgccgcaccgatgcagattgtcgaagaacgtaccatcggtccgtctttgggtaaggagaacatcgaaaaaggcttccattcgactttatggggttttgccatcgttgctgcattcatggtgatttactatcgtctgatgggtttcttttctaccattgcattgagtgccaacatactgttcctaatcggtattttgtctgctatgcaggcaacgttgacgttaccgggtatggccgcgctggcgttgactttgggtatggcaatcgactccaacgtcttgattaacgaacgtatccgcgaagaattgcgtgccggcgtgccgccgcagcaggcaatcaatctcggtttccaacacgcatgggcgaccattgtcgattccaacctgacttcgctgattgccggtatcgcgcttttggtattcggttccggcccggtacgcggttttgcggtcgtacactgtttgggtattctgacttcgatgtattcgtccgtcgtcgtattccgtgcgttggtcaatctgtggtacggacgcagacgcaaattgcagaatatttccattggttcggtgtggaagccgaaagccgaaatagcaggaggcaaggagtaa

SEQ ID NO: 55167 - DNA, 321 bp, Neisseria meningitidis
ttgggcgaaaaaattaaagacggcaaaaaaaccgtactttcctgcgaagaagaacaaaaaatctgcaatactttcacgaacaaacaggcagtggaagatttcagtgtggtaatcggctacgatgaaatcaaagcgaagaatcacagcttgtcggcggggcagtatttcgaggtaaagattgattatgtggatatttccgccgacgaatttgcgcaaaaaatggcgggattttcagcggatttggataaacttttcgccgaatctgccgaattggaaaaagagattaaggatagattggcgatgttgaaattcaattcataa

SEQ ID NO: 55168 - DNA, 1794 bp, Neisseria meningitidis
atgcaattagatatagaccgcttggttgcttatttcggcggcgtgaacgcgcttgccgaagcgttgaaacagcacgatcccgaaaatgccgcgacgaccgccgccatctataaatggcgcacgcgcgggtcgctgcctttggcgcaactgcaaaagctgaccgcgcttgccgaatcgcaaggcaggccgctggatttgaatgcttttttacaaaaaaacgaatctctggagagaacagaaatgacacaggccaaccgcgttatcattttcgacaccaccctgcgcgacggcgaacaatcgcccggcgccgctatgaccaaagaggaaaaaatccgcgtcgcccgccagctggaaaaattgggtgtggacatcatcgaagcgggttttgccgctgccagcccgggcgatttcgaggcggtcaatgcgattgcgaaaaccattaccaaatcaacggtctgttcattgtcccgtgccatcgagcgggacatccgtcaggcgggtgaggccgttgcgcccgcgccgaaaaaacgcatccacaccttcatcgccaccagccccatccatatggagtacaaattgaagatgaagccgaagcaggtgattgaggcggcggtcaaagcggtgaaaatcgctcgtgaatacaccgacgatgtggaattttcctgcgaagacgcgttgcgttcggaaatcgatttccttgccgaaatctgcggcgcggtaattgaagcgggcgcgaccaccatcaatattcccgataccgtcggctattccatcccgtacaaaaccgaagaatttttccgcgaactgattgtcaaaacgcccaacggcggcaaagtcgtttggtcggcacactgccacaacgatttgggcttggcggttgccaattcgcttgccgcattaaaaggcggtgcgcgtcaggtggaatgtactgtcaacggcttgggcgaacgtgcaggcaatgcttcggttgaagaaatcgtgatggcgttgaaagtgcgccacgacttgttcggcttggaaaccggcatcgataccacgcaaatcgtgccttcgtccaaactggtgtccaccattacgggctatcccgtgcagcccaacaaagccattgtcggtgccaatgccttttcgcatgaatcgggcatccatcaggacggggtgctgaaacaccgcgaaacttacgagattatgtccgccgaatcggtcggctgggcaacaaaccgtttgagcttgggcaaattgtccggccgcaacgccttcaaaaccaagctggcggatttgggcatcgagttggaaagcgaagaggcactgaacgccgcgtttgcccgcttcaaagaactcgccgacaaaaaacgcgaaatcttcgatgaagacctgcacgcactggtatccgacgaaatgggcagcatgaatgccgagagctacaaattcatctcccaaaaaatcagcaccgaaaccggcgaagagccgcgcgccgacatcgtgttcagcatcaaaggcgaagaaaaacgcgcttccgcaaccggttccggtccggttgatgcaattttcaaagcgattgaaagcgtggcgcaaagcggcgcgactttgcagatttattccgtcaacgccgtcacgcaaggtacggaaagccaaggcgaaaccagcgtccgtctggcacgcggcaaccgcgtcgtcaacggtcagggcgcggataccgacgttttggttgccactgccaaagcctacctttccgctttgagcaaactggaatttagtgccgccaaaccgaaagcgcaaggcagcggtacgatttga

SEQ ID NO: 55169 - DNA, 267 bp, Neisseria meningitidis; identical to SEQ ID NO: 42299

SEQ ID NO: 55170 - DNA, 579 bp, Neisseria meningitidis
atgaatattttattattagacggcggcaaagcgttcggacattctcacggcgggttaaaccgcacgcttcacaaaaaagcgaaagaagttttgaccgcgctcggacacaatgttcaagaaaccgtgattgatgccggctatgatgttgaggcagaaatcgaaaaattcgtttggatggatgctgtgatttggcagatgccgggctggtggatgcacgagccttggacagtgaaaaaatacatagacgaagtattaaccgctggacacggcaaactctaccaaagcgacggcagacaccgcgtcaatccgactgagggctacggcacaggcggcttgttgcaaggcaaaaaacatatgctttcactgacttggaatgcgccgattgaggcgtttacccgcgaaggcgatttctttgaaggcaaaggcgttgatgttttgtatatgcacttccacaaagccaacgagtttttgggtatgacccgcctgccgacattcttatgtaacgatgtggttaaaaatccacaagtggaaaaatacttggcagattatcaggcacacttggaaaaagtgttcggctaa

SEQ ID NO: 55171 - DNA, 147 bp, Neisseria meningitidis; identical to SEQ ID NO: 42194

SEQ ID NO: 55172 - DNA, 324 bp, Neisseria meningitidis; identical to SEQ ID NO: 38645

SEQ ID NO: 55173 - DNA, 1008 bp, Neisseria meningitidis
atgagcaccttcttccagcaaaccgcccaagccatgattgccaaacacatcgaccgtttcccgctattgaagttggatcaggtaattgattggcagccgatcgaacagtacctgaatcgtcaaaaaacccgttacctcagagaccaccgcggccgtcctgcctatcccctgttgtccatgttcaaagccgtcctgctcggacaatggcacagcctctccgatcccgaactcgaacacagcctcatcacccgcatcgatttcaacctgttttgccgttttgacgaactaagcatccccgattacagcaccttatgccgttaccgcaaccggctggcgcaagacgacaccctgtccgaattgctcaaactgattaaccgacaactgaccgaaaaaggcttaaaagtagagaaagcatccgccgccgtcattgacgccaccattattcagaccgccggcagcaaacagcgtcaggccatagaagttgacgaagaaggacaaatcagcggccaaaccacaccgagtaaggacagcgatgcccgttggatcaagaaaaacggcctctacaaactcggttacaaacaacatacccgtaccgatgcggaaggctatatcgagaaactgcacatcacccccgccaatgcccatgagtgcaaacacctgccgccgttgttagaagggatagctgaaggtacgaccgtctatgccgacaaaggctatgacagtgcggaaaaccggcaacatctggaagaacatcagttgcaggacggcattatgcgcaaagcctgccgcaaccgtccgctgacggaaacgcaaaccaaacgcaaccggtatttgtcgaagacccgttatgtggtcgaacaaagcttcggtacgctgcaccgtaaattccgctatgcgcgggcagcctatttcgggctgattaaagtgagtgcgcaaagccatctgaaggcgatgtgtttgaacctgttgaaagccgccaacaggctaagtgcgcccgctgccgcctaa

SEQ ID NO: 55174 - DNA, 963 bp, Neisseria meningitidis
atgcagtatgcaaaaatttccggcacgggcagctatcttcctgccaaccgcgtcagcaatgacgaccttgcccaaaaggtagatacctctgacgagtggattaccgcgcgcacgggcatcaagttccgccatattgcagccgaaaatgagaaaaccagcgatcttgccgccgaagcagcccgccgcgcgctggatgcagccggattagacagcggcgaaatcgatttgattatcgtggcgacggcaacgccggatatgcagtttccttctaccgccaccatcgtgcagcaaaaattgggcatcaccaacggctgtcccgcgtttgacgtacaggcggtgtgcgccggctttatgtacgcgctgaccacggcaaacgcctacattaaaagtggcatggcgaaaaacgcgctggtcatcggcgcggaaaccttcagccgcatcgtcgattggaacgaccgcacaacctgcgtattgttcggcgacggcgcgggcgcggtggttttaagcgcgtcggacacgccgggcatcatccacagcaaactcaaggccgacggcaattatctgaaactcttaaacgtccccgggcaaatcgcctgcggcaaagtttccggttcgccgtacatttcgatggacggtcccggcgtgttcaagtttgccgtcaaaatgctgtccaaaatcgccgatgacgttatcgaagaagccggttataccgccgctcaaatcgactggatcgtgccgcatcaggcaaaccgccgcattatcgaatcgaccgcgaaacatttaggtttgagtatggacaaagtcgtcctgaccgtccaagaccacggcaacacatccgccgcatcgattccgctggctttggatacgggcatccgcagcggacaaatcaaacgcggtcaaaacctgctgctcgaaggcatcggcggcggtttcgcgtggggcgcggtgctgttgcaatattga

SEQ ID NO: 55175 - DNA, 726 bp, Neisseria meningitidis
atggaaacacaaaacaaacctaccgttaccgacattgaccgccctatactcgtcccgcccggtggacataaaaaagtcttgctgcattcctgctgcgccccgtgcagcggcgaagtgatggaagccatgctggccagcggcatcgactacaccatttatttttacaatcccaatatccatccgcacaaagagtatatgctccgaaaagaggaaaacgtgcgctttgcggaaaagttcggcattcctttcatcgataaagacgacgactacgaaaacgaccgcaaagaatggtttgccaaagccaaaggcatggagtttgagccggaacgcggcatccgctgcaccatgtgtttcgatatgcgttttgaaaaggcggcgcaatacgcgcatgaacacgggttccccgtctttaccagttcgctgggcatttcacgctggaaaaatatggcgcaaatcaacgactgcggacaccgcgccgccgcgccttacgatgatgtggtgtattgggatttcaactggcgcaaaggcggcggcagcgcgcgcatgattgaaatcagcaaacgtgaaaacttctaccagcaggaatattgcggttgtgcctattccctgagggattccaatgcccaccgcaaatcacagggcagaatccccatcaaactcggcgtgctgtattacggcgacgaatcgacacaatacgaacctgcccccatccgggtggacaaataa

SEQ ID NO: 55176 - DNA, 309 bp, Neisseria meningitidis
atgaaaactgttccaaccatcctgattagcatccttttggcaaccgcccttcctgcatccgcacacggtatacataagagcaagcccctgactatggacgagctgccgccgatttgccaacaatatttcaaacgcgccgaaacctgttacaacaaagccggcaacaaggcaaattttgcacgcaacaacactaaattcctattccaagccctgcctgctgccgatttgggacagcgtaagcaaatgtgccaaatcgctatggattcgtttgcagaaaaaacccgcatcagcaatagcaatgccgtctga

SEQ ID NO: 55177 - DNA, 474 bp, Neisseria meningitidis; identical to SEQ ID NO: 36318

SEQ ID NO: 55178 - DNA, 1251 bp, Neisseria meningitidis
ttgcctgaaatgccgtttgaaggctcaagcggtttcggacggcatattccatcaggctgtcaaacagggaaaaacaagatgaaacgtgatttgagcaaaatgacctgcatcgaagacttgcgccgcgttgccaagcgcaaaatgccgcgtatgttttacgattacatcgattcgggttcgtggacggaaacgacttatcgggaaaatacttcggatttcaaagacatccgcttccgtcaaaaagtattggtcaatatggagggacgcagccttgagactaaaatgatcgggcaggatgtgaaaatgccggtggcgattgcgccgacgggttttaccggcatggcacacgcagacggcgaaattttggcggcgcgggcggcggagaagttcggtattccgtttacgttgtccaccatgtccatctgctcgattgaagacgttgccgagaacaccagcgcgccgttttggtttcagctttatgtgatgcgcgaccgcgagtttatggaaaacctgattaagcgcgcgaaggatgccaaatgttcggcattggtattgaccgccgatttgcaggttttgggtcaacgccacaaagacatcaaaaacggcctgtccgcgccgccgaaaccgaccatcgccaatttaatcaatctggcgaccaaaccggaatggtgcatgaaaatgctgaacacggaacgccgcacgttccgcaatatcgtcggacacgcgaagaacgtcggcgatttgtcttcgctgtcttcatggacttccgaacaattcgacccgcgcctgagctgggacgatgtggcgcgcattaaagatttgtggggcggcaagctgattatcaaaggcattatggaacccgaagacgcggaaaaagcagcgaaaagcggcgcggacgcattgattgtttccaaccacggcggccgacagctcgacgataccgtgtctgccatcaaagccttgcccgacatcgtcagcgcagtgggcagcgacatcgaagtttggatggacagcggcatccgcagcggtcaggatattttgaaggcgtgggctttgggcgcgaaaggtacaatgataggtcgggcgttcctgtatggcttgggcgcgtatggcgaagaaggcgtaacccgtgcgctggaaattctatataaagaaatggatatatctatggcgtttacgggacaccgcgatattcaagatgtcgatgcctcgattttaaggggtaaagattggggtagggaaacggtttag

SEQ ID NO: 55179 - DNA, 2220 bp, Neisseria meningitidis
atgtgtaaaccgaattatggcggcattgtcttgttgcccttacttttggcatcttgcatcggcggcaatttcggcgtgcagcctgttgtcgaatcaacgccgaccgcgtaccccgtcactttcaagtctaaggacgttcccacttcgccccctgccgggccttcggtagaaaccacgccggtcaaccggcccgccgtcggtgcggcaatgcggctgttgaggcggaatactgcttttcatcgtgaagatggcacggcaattcccgatagcaaacaagcagaagaaaagctgtcgtttaaagaaggtgatgttctgtttttatacggttcaaaagaaaataaacttcaacaacttaaaagcgaaattcataaacgtgatcctaatgtaaaaattaggacatcagaaaatgaaaatgaaaaatatagttataaatttgtagatgcaggttatgtgtttgctaaagacggaaaagatgaaattgagaaaacatcggatgaaaagcagttttctaatcgtttaggctatgacggttttgtatattatctcggagaacatccttcccaatctttaccgagcgcgggaacggtgaaatattccggcaactggcaatatatgaccgatgccatacgtcatcggagaggtaagggggtttccagtgtggatttgggttataccacatattatggtaatgaaattggggcagcttcttatgaggctagggatgccgatggccgggaaaaacatcctgccgaatatacggttaatttcgacaaaaaaaacctggaaggtaagttgattaaaaatcagtatgtgcaaaagagagatgatcctaaaaatccactgaccatttacaacattactgcaacattggacggaaaccgctttaccggcagtgccgaggtcaatcctgatttagcgaaaaaccatgccggtaaggagcatttgtttttccataccaatgccgatcggcggcttgagggcggttttttcggcgataacggagaagagcttgccggacggtttatcagcaacgacaacagcgtattcggcgtattcgcaggcaaacaaaaaacagaggcagcaaacgcagcagatacaaaacctgccctgccgtctggaaaacacaccaaaatcttggattctctaaaaatttccgttgacgaggcgactgatagcaatgcccgtaagtttgccatttcccctatgcccgattttggtcatcccgacaaacttcttgtcgaagggcgtgaaattcctttggtaaacgaagaacaaatcatcaagcttgccgacggcaggaaaatgaccgtcagtgcttgttgcgattttctgacctatgtgaaactcggacggataaaaaccgaacgcccggcaagtaaaccaaaggcggaagataaaggggagtatgaagagggtgcaggcgttggtaccgtcgaagaagacgaaatcggcgatgaagaaagcactggagacgaagtcgtagaagatgaagacgaagaagaacctgaagaagaagctgaagaagaagctgaagaggaagaaaccaaagaaaaatcgccgacagaagaaggcaacggcggttcaggcagcatcctgcctgccccggaagcctctaaaggcagggacatcgaccttttcctgaaaggtatccgcacggcggaaacggatattccgcaaagtggaacggcgcattataccggcacttgggaagcgcgtatcggcaaacccattcaatgggacaatcatgcggataaagcggcaaaagcagagtttaccgttgatttcgacaagaaatcgatttttggaacgctgaaggagcaaaacggcgtagaacctgctttccatattgaaaacggcaagattgagggcaacggtttccacgcgacagcacacactcgggataccggcatcaatctttcgggaactggttcgactaatcctcaacgtttcaaagccagtaatcttcgtgtagaaggaggattttacggcccgcaggcggaggaattgggcggtattattttcaataatgatgggaaatctcttggtataactgaaggtactgaaaataaagttgatgttgatgctgaagttgatgctgaagttgatgctgaagttgatgctgaagttgatgttgatgttgaacagttaaaacctgaagctaaaccccaattcggcgtggtattcggtgcgaagaaagataataaagaggtggaaaaatga

SEQ ID NO: 55180 - DNA, 1200 bp, Neisseria meningitidis
atgccccctgccgaagtcccttcagacggcattgtcaagaattttattaaaaacaggattcccatcatgagcacccccgccctcctcgtcctcgctgacggcagcgtatttcacggcacatcaatcggttacgaaggttcgacttccggcgaagtcgtgttcaatacttcgatgaccggctatcaggaaatcctgaccgacccgtcctactgcaaacaaatcgttaccctcacctacccacacatcggcaacaccggcaccaacgccgaagatgaagaaagccgcagcgtttatgccgccggcctgattatccgcgacctgccgctcttgcacagcaacttccgcgcctccgaaagcctgcacgactatttggtacgcaacaaaaccgtcgccatcgccgacatcgatacccgccgcctgaccacgctgttgcgcgaaaaaggcgcgcaaggcggcgcgattctgaccggtgcggatgccacaatcgaaaaagcgcaagaactcatcgccgcgttcggcagtatggtcggcaaagacttggcaaaagaagtttcctgcacggaaacttacgaatggacggaaggcgaatgggaattgggcaagggtttcgttacccctgacgaacagccttaccacgtcgtcgcctacgatttcggcgtgaaaaccaacatcctgcgtatgctcgcctcgcgcggctgccgcctgaccgtcgtccccgcccaaacgagcgcacaagacgtgttggcactcaatcccgacggcgtgttcctgtccaacggccccggcgaccccgagccttgcacctacgccatcgaagccgtgcaaaaactgatggaaagcggcaaaccgatttttggcatctgcttgggacaccagctcatcagcctcgctatcggcgcgaaaaccctgaaaatgcgcttcagccaccacggtgcgaaccaccctgtgcaagatttggacagcggcaaagtcgtcatcaccagccaaaaccacggttttgccgttgatgccgacaccctgcccgctaacgcacgcattacccacaaatccttgtttgacaacactttgcaaggcatcgagctgaccgacaaacctgtgttctgcttccaaggccaccccgaagccagccccggtccgcaagatgtcggctatttgtttgacaaattcattggcaatatgaaagcggcaaaacgggcataa

SEQ ID NO: 55181 - DNA, 435 bp, Neisseria meningitidis
atgaactttgctttatccgtcatcacatttaccctcgcctctttcctgcccgtcccgcctgccggagccgccgtctttacttggaaggacggcggcggcaacagctattcggatgtaccgaaacagcttcatcccgaccaaagccaaatcttaaacctgcggacgcgccaaaacaaaccggcggtcaaacccgcccaagccgacgcagggaagcgcacagacggcgcggcacaggaaaacaatcccgacactgccgagaaaaaccggcagcttgaggaagaaaagaaaagaattgccgaaaccgaacggcagaacaaagaagaaaactgccggatttcaaaaatgaacctgaaggcggtgggaaattcaaatgcaaaaaacaaggatgatttgattcggaaatacaataacgccgtaaacaaatactgccgttga

SEQ ID NO: 55182 - DNA, 723 bp, Neisseria meningitidis
atgagtgaggatacggatatgttgcgttctattttggcggcttccctattggcggtatcttttccggcagcggctgaagcattgaattacaatattgtcgaattttccgaatcggcgggtgtcgaggtggctcaggatacaatgtccgcacgtttccaagtggcggcggaaggacgggacaaaaatgccgtcaatgccgagtttgttaaaaaattcaacagttttaacagaaaattgaaaaacggcagctttaaaaccgaattggtatcgcgcagtgcgatgccgcgctatcaatataccaacggcagacgcattcaaacaggctgggaggagcgtgcggaatttaaggtcgaaggtagggattttgatgcgttgaaccgttttattgctgatgttcagacggatgcttcgcttgaatataccgatttcagcgtgtcgcgtgaacgccgaaacgaggtcatcgatcaggtcagcaaggatgctattttgcgttttaagacgcgtgccgaaaaactggcgggcattttgggtgcgtccggttataaaatcgtcaaattaaatttgggacacatcggcagccatatcgcgggagggggagctgctcaggcaaaaatgcttcgtgccatgccgatggcggcaagcgtcaatatggagggtgcggattctgccgcgcagggtgtggaggaaatcagcatcagcgtcaatgggacggttcagttctaa

SEQ ID NO: 55183 - DNA, 966 bp, Neisseria meningitidis; identical to SEQ ID NO: 45729

SEQ ID NO: 55184 - DNA, 915 bp, Neisseria meningitidis; identical to SEQ ID NO: 51855

SEQ ID NO: 55185 - DNA, 783 bp, Neisseria meningitidis; identical to SEQ ID NO: 51887

SEQ ID NO: 55186 - DNA, 1068 bp, Neisseria meningitidis
atgtttgacgggatttcggttaaaatgacggcatttccatctgaagcagaaagccctgtcatgtatccacttgcccgccgcatcctgtttgcactcgatgccgagaaagcccaccacttcacgctcgacgcgctctacacggtttataaattgggtctgattcccgtaaccggcaaccgtaccaaacctgtaaaattgatgggtatggatttgcccaaccctgtcggacttgccgctggactcgacaaaaacggcgaatacatcgacgcattgggcgcgctcggctttggtttcatcgaaatcggcacggtaacgcccaaaccgcagcccggcaacccgcagccgcgcctcttccgcgttcccgaacaccaaggcatcatcaaccgcatgggtttcaacaaccacggtatcgacaccatgatacgcaacatcgaaaaaagtaaattcagtggcgtattgggcatcaacatcggtaaaaacgcggttacacccatcgaaaacgctgccgatgattatttaatctgccttgaaaaagcctacgcacacgcaagttacattaccgtcaacatttcctcgcccaacaccaaaaacctccgcgcgctgcaaggtggcgacgagttgagcgcattgcttgaggctttgaaaaacaaacaggcacagcttgcctctgtatacgggaaatacgttccgctcgccgtcaaaatcgcccccgatttggatgaagcacaaatcgaagacatcgcccacgttgtcaaatccgtcgaaatggacggcatcatcgctaccaataccaccatcgacaaatcaagtctcggcagccatccgctcgcaggcgagcagggcggtttgagcgggcggcccgttcatgaaaaaagtaatcgggtgttgaagctgttggcagaccacatagacggcaagctgccgattatcggcgtaggcggcattatggaaggcagggacgcggcagataaaatccgcttgggcgcaactgccgtccaggtgtacagcggattgatatacaaaggtccggcattggtcaaagaatgtttgaaggctttggcgcgatga

SEQ ID NO: 55187 - DNA, 2121 bp, Neisseria meningitidis
atgaacaatccattggtgaatcaggctgctatggtgctgcctgtgtttttgttgagtgcttgtttgggcggaggcggcagtttcgatcttgattctgtcgataccgaagccccgcgtcccgcgccaaaatatcaagatgtttcttccgaaaaaccgcaagcccaaaaagaccaaggcggatacggttttgcaatgcgcttcaagcggcggaatcggcatcctatggtgactccgaaagaaaccgaggttaaactggacccaaatgattgggaggtgacgggattaccgagcaaccccaaaaacttacctgagcgacagaaatcggttattgacaaagtggtaaccaacggcgacgacaatatttatttctctccctatctcacaccatcaaactatcaaaacggcagcgctggcaacggtgcaaaccaaccaaaaaatgaagtagaaaattataaagatttcaaatatgtttattccggctggttttacaaacacgctaaaccaatcatagatgcgtctcaaaaaaaatttcaacaaggcgacgacggttatatcttttatcacggcaaagaaccttcccgacaacttcccgcttctggaaaagttacctacaaaggcgtatggcattttgtaaccgatacgaaacagggacaaaaatttaacgatattcttgaaacctcaaaagggcaaggcgacagatacagcggattttcgggagatgaaggcgaaacaacttccaatagaactgatcccaatcttaatagtaatcacgagggttatggttttacctcaaatttagaagtggatttcgacgataagaaattgacgggcaaactgatacgcaatgataaagttacaaacgctactactggcaacaaacataccacgcaatattacagccttgaggctcaagtaacaggcaaccgcttcaacggtaaggcgatagcgaccgacaaacccgacactggaaaaaccaaactacatccctttgtttccgactcgtcttctttgagcggcggctttttcggcccgcagggtgaggaattgggtttccgctttttgagcgacgatcaaaaagttgccgttgtcggcagcgcgaaaacccaagacaaaccgggaaatggcgcagcggcttcaggcggcgcaggtgcggcagcatcgggcggtgcggcagatatgccgtctgaaaacagtaagctgaccacggttttggatgcggtcgagctgacgcacggcggcacagcaatcaaaaatctcgacaacttcagcaatgccgcccaactggttgtcgacggcattatgattccgctcctgcccaaggattccgaaagcgggaacaatcaagccaatcaaggtacaaacggcggaacagcctttacctataaaacaacctacacgccgaaaagcgatgaaaaagacgcccaagcaggtacggcggcgaatggcgatcaagccgcttcaaatacggcaggtgataccaatggcaaaacaaaaacctatgaagtcgaagtctgctgttccaacctcaattatctgaaatacgggttgctgacgcgcaaaactgccggcaatacgggggaaggcggcaacggcagcccaaccgccgcccaaacgggcgcgcagagtatgttccttcaaggcgagcgcactgatgaaaacaagattccaaccgaccaaaacgtcgtttatcgggggtcttggtacgggcatattgccaacggcacaagctggagcggcaatgcttctgataaagagggcggcaacaaggcggactttactgtgaattttgccgataaaaaactcaacggaacgttgacggctggggagcgtacatctcccacatttaccattaccgccacgattcagggcaacggtttttccggtacggcgaaaactgctgacttaggttttgatctcgatcaaagcaataccaccggcacacctaaggcatatatcacagatgccaaggtgcagggcggtttttacgggcccaaagccgaagagttgggcggatggtttgcctatccgggcgataaacaaacgaaaaatgcaacaaatgcatccggcaatagcagtgcaactgtcgtattcggtgcgaaacgccaacagcctgtgcaataa

SEQ ID NO: 55188 - DNA, 2391 bp, Neisseria meningitidis
atgactgaacaaaaacacgaagaatacggcgccgacagcattcaggtgctcgaaggcttggaagcggtacgcaaacgccccggcatgtacatcggcgacacgcaggacggcagcggtctgcaccatatggtgtttgaagtattggacaacgccattgacgaagcactcgccggacattgcgacaaaatcacggtaacgatacacgccgaccattccgtcagcgtcgccgacaacgggcgcggtatgcccaccggcatccacccgaaagaaggacgctccgccgccgaagtcatcatgaccgtattgcacgcgggcggtaaattcgacaacaacagctacaaaatctccggcggcctgcacggcgtgggcgtgtccgtcgtcaacgcgctgtccgactgggtaacgctgaccatctaccgcgacggcaaagaacacttcgtccgcttcgtgcgcggcgaaaccgaagagccgctgaacgttgtcggcgattccgataaaaaaggcacgaccgtgcgcttcctcgccagtacggaaaccttcggcaacgtcgaatacagcttcgacatccttgccaaacgcatccgcgaactttccttcctgaacaacggcgtggacatcgaattgaccgacgagcgcgacggcaaacacgaaagcttcgccctttccggcggcgtggctggattcgtgcaatacatgaaccgcaaaaaaacgcccttgcacgaaaaaatcttctacgcgttcggcgagaaagacggcatgagcgtcgaatgcgcgatgcaatggaacgacagctatcaggaaagcgtgcagtgcttcaccaacaacatccctcagcgcgacggcggtacgcacctgaccgcgttgcgccaagtgatgacgcgcaccatcaacagctacatcgaaaccaacgaagtcgccaaaaaagccaaagtggaaaccgccggcgacgatatgcgcgaaggtttgacctgcgtgttgtccgtcaaactgcccgaccccaaattttcgtcccaaaccaaagacaaactggtttccggcgaaatcggtcccgtcgtcaacgaagtcatcagccaagccctgaccgacttcctcgaagaaaaccctgccgaagccaaaatcatcaccggcaaaatcgtcgatgccgcccgcgcgcgcgaagccgcccgcaaagcccgcgaaatcacccgccgcaaaggcgtgatggacggtttgggcctgccgggcaaactcgccgactgccaagaaaaagaccccgcattgtcagaactttatctggtcgagggcgattctgcaggcggttccgccatgcaggggcgcgaccgcaaattccaagcgattttgccgcttaagggcaagattttgaacgtcgaaaaagcgcgctttgaaaaaatgctcgccagtcaggaagtagccgctttgattaccgcgttgggcgcgggcatcggcaaagaagaattcaatgccgagaagctgcgctaccaccgcatcatcatcatgaccgatgccgacgtggacggcgcgcacatccgcaccctgctcctgaccttcttctaccgccaaatgcccgaactggtcgagcgcggctacatctatatcgcccagccgcctttgtataaagcgaaatacggcaaacaggaacgttacctcaaagacgaactggaaaaagaccaatggctgctcggtcttgccttggaaaaagccaaaatcgtttcagacggccgcaccatcgaaggcgcagaacttgccgacaccgccaaacaattcctgttggcaaaaaccgtcatcgaacaggaaagccgcttcgtagacgaactcgtcctgcgcgccatgctacacgcgtcgcccattgatttgacgtcgtctgaaaacgccgataaagccgttgccgaactttccggtctgcttgacgaaaaagaagtcgccctcgaacgcatcgaaggtcatgaaggacaccggttcatcaaaatcacgcgcaagctgcacggcaacgtcatggtcagctacatcgaacccaagttcctcaacagcaaagcctaccaaaccctcacccaaaccgccgccgcgctcaaaggcatggtcggcgagggtgccaagctttacaaaggcgaaaacgggtacgacgcggacagctttgaaaccgctttggacatcttgatgagcgttgcccaaaaaggtatgtccatccaacgatacaaaggcttgggcgagatgaaccccgagcagctgtgggaaaccacgatggatcccgccgtgcgccgtctgttgaaagtgcgcatcgaagacgccattgccgccgacgaagtattcgttaccctgatgggcgacgaggtcgaaccgcgccgcgcctttatcgaaaacaacgcgctgattgcccaaaatatcgacgcataa

SEQ ID NO: 55189 - DNA, 681 bp, Neisseria meningitidis
atgattttccaaacagtctggttttcagatatggtactgtcggtttcgtggattgtccttatcctgatactggcagcttccgcgccgtccgcattccgctcgcttgcccgctaccgttccgcccttcccctgtgtaccgtaattttttccgcagcatggtgtctgaacgcctctgccggcggcggacagcttgcccagatgaactaccatctgctcgccgtcaatctggttgcactgatggtgggcacttccgccgccttttggcttgccgcgctgctgatgctgccctactgcctgctgtttgccggttctgccggcgcatatccgccgaacgctttggtgctgattctgcccgcgcttgccgtcaaccgcctgtcgcgtatgctggtcaaccgcctgccgcccaatattttcatctttattttcgtcaacggctttctcgcttccgccgccggcattctgttgaccgggctggtgctgaccggtattttggatgctgcaaacgcttttccgtccgaaatattgtggacgaccgccctgcccgtctttattctgctggcgtgggcggaagccttcctcagcggcatttcaactgccatatttgttgcactgaagccccattggatcaacactttcgacgacaaccgctatctgaagtccgaccgcggcatatggcggtag

SEQ ID NO: 55190 - DNA, 114 bp, Neisseria meningitidis; identical to SEQ ID NO: 43789

SEQ ID NO: 55191 - DNA, 546 bp, Neisseria meningitidis
atgggcaaaactgtaactttaaccgccggacacagtaacaccgacccgggcgcggtcaacggaagcgaccgtgaggcggacttggcgcaggatatgcgcaacatcgtggcttcaatcctgcgtaacgattacggcctgaccgtacgcaccgacggcgaaggcaaaggcaatatgcccttgcgcgatgcggtcaagctgattcgcggctcggatgtggcgattgagtttcacaccaacgctgccgtcagcaaagcggcgacaggcatcgaagccttgagtaccgttaaaaacaaacgctggtgtcaggtgttgagcaaagctgttgccaagaaaaccggctggaaactgcgcggcgaagacggctttaaacccgacaatgcgggccagcattcgcgcctggcttatgcacaagccggcggcattgtgtttgagccgttttttatcagcaacgacactgatttagccttgtttaagactactaaatggggcatctgccgcgcgattgcggacgcgattgcgatggaattgggggcggcaagagtatga

SEQ ID NO: 55192 - DNA, 381 bp, Neisseria meningitidis
atgaccgcgcccgatttgattgaggttaaccgcgccatgcgccgccgtatgcaggccgagattgccgccttgcgggcggtgcagacggctgctgccgagtctggtgggctgacggccaacgccgtgtataccgaggcttaccaaacggcagaatccctgcgcgcggcggcaggcagtctgaatgcgttggttgcggcggccatcaaccaaaagccgccgctgattgtgcgccaagccccaatcgacggtacgatacaccaaatcgcccacgagttttacggcgatatagcccgcgcagcagagctggtgcgactcaatccccatatccaccaccccgcgtttatcaagcgcggcactttggtcaacagctatgcaaaataa

SEQ ID NO: 55193 - DNA, 3204 bp, Neisseria meningitidis
atggctaaattttttatcgaccgccctatttttgcgtgggttatttcgattttcattattgcggcgggtattttcggcatcaaaagcctgcctgtttcgcaatatccgtctgtcgccgccccgaccattactttgcacgccacttatccgggtgcgtccgcgcaggtaatggaagacagcgtgctttccgtgatcgagcggaatatgaacggcgtggaaggtttggattatctgtccacttccgccgattcgagcggcagcggcagcgtgagcctgacctttacgcccgataccgacgagaatctggcgcaggtggaagtgcagaacaagctttccgaagtattgagcacgctgccggcaaccgtccagcaatacggcgtaaccgtatccaaggcgcgttccaatttcctgatgattgtgatgctttcgtcggatgtgcagtcaaccgaagagatgaacgactacgcgcagcgtaatatcgttcccgagttgcagcgtatcgaaggcgtggggcaggtacgcctgttcggcgcgcaacgcgcgatgcggatttgggttgatcctaagaaactgcaaaactacaatttgtcgtttgccgatatcggcagtgcgctgtccgcccagaacgtccagatttcagcgggttctatcggttcgcttcccgccgttcgcggacagacggttacggctaccgtaacggcgcaagggcagttgggtacggcagaagaattcggcaacgtcatcctccgcgccaataccgacggttctaatgtttacctgaaggatgtggcaagggtcggactgggtatggaagactattcttcctcaacccgtctgaacggtgtaaataccaccggtatggcggtgatgctgtccaacagcggcaatgcgatggcgacggcaaaggcggttaaagaacgcatggcgacgttggaaaaatactttcctcagggtatgagctggaaaaccccttacgatacttccaaattcgtcgaaatttcgattgaaaaagtgattcacactttaatcgaagcgatggtgctggtgtttgtcgtaatgtatctcttcctgcaaaacatccgttatacgctgattccgaccatcgtcgtaccgatttcgctgttgggcggtttcgccttcatctcttatatgggcatgtcgattaacgtactgaccatgtttgcgatggttttggtcatcggcatcgtggtcgatgacgcgattgtggtggttgaaaacgtcgagcgcattatggcgggtgaaggcttgccgcccaaagaagcgaccaaaaaagcgatgggtcagatttcgggcgcggtcatcggtattaccgccgttctgatttccgtgttcgtaccgttggcgatgttcagcggggcgacgggcaatatttacaaacagtttgccctgacgatggcgtcatcaatcgcattctccgctttccttgcgctgacccttacccctgctttgtgtgccacaatgttgaagacaatcccgaaagggcatcacgaagagaaaaaaggtttcttcggctggtttaacaagaaattcaatagttggacgcacggttacgaaggccgggttgccaaagtgctgcgtaagactttccgcatgatggttgtctatatcggtttggcggttgtgggcgtgttcctgtttatgcgcctgccgacttcattcctgccgaccgaagaccaaggcttcgtcatggtcagcgtgcaactgcctgcaggagcgacccaagagcgcaccaatgcgactttggcgcaagttacccaactggcgaaaagcattcctgaaatagaaaacatcattaccgtttccggcttcagcttttcgggcagcggtcagaatatggcgatgggttttgccatattgaaagattggaacgagcgtaccgcgcccggcagcgatgccgttgcgattgccggcaagctgacgggtatgatgatggggacgcttaaagacggttttggcatcgccgtcgtcccgcctccgattctggagttgggcaatggttcgggcctgagcatcaacctgcaagaccgcaataataccggccataccgcattgctggcgaagcgcaacgagttgattcagaaaatgcgtgccagcggtttgtttgaccccagcaccgtccgtgctggcggtttggaagactcgccgcagttgaaaatcgacatcaaccgtgccgccgcggcggcgcaaggcatttcgtttgccgacatccgcaccgcattggcaagcgcgctgagttcgtcttatgtcagcgacttcccgaaccaaggccgtctgcaacgcgtgatggtgcaggcggatgcttcggcacgtatgcagcctgccgatattttgaacctgaccgtgccgaacaaatccggcgtcgccgtaccgctttccaccattgctactgtttcttgggaaaacggtacggaacagagcgtacgcttcaacggttatccttcgatgaagctgtccgcttcgcctgcaaccggcgtttccaccgggcaggctatggcggcggttcaaaaaatggttgacgaattgggcggcggttacagcttcgaatggggcggacagtcgcgcgaagaggcaaaaggcggctcgcaaaccctgattttgtacggtttggcggttgcagccgtatttttggtacttgccgcgctttatgaaagctggtcgattccgctggcggtcatccttgtgattccgttgggtttgatcggtgcggctgcgggcgtaaccgggcgcaacctgtttgaaggactgttgggcagcgttccctcgttcgccaacgacatctactttcaagtcggtttcgttaccgtgatgggtttgagtgcgaaaaatgcgattttgattatcgaatttgccaaagaccttcaagcgcaagggaaaagcgcggttgaagccgctttggaagcagcccgcctgcgtttccgtccgattatcatgacctcgtttgcctttattttgggcgtggttcccctgtatattgccggtggtgcaagttctgccagccagcgcgccatcggtacaaccgtattctgggggatgctcatcggcacgctcttgtccgtgttccttgttccgcttttctatgtggtggtgcgcaaattcttcaaagaaactgcacacgaacacgaaatggcagtaaaacacgctgccgaagcgggcatcaccggttcggacgacagccaacattaa

SEQ ID NO: 55194 - DNA, 1137 bp, Neisseria meningitidis
atgaaaaacatatctctttctccgcccgccatgctcggcattcttggcggcggacaattaggcagaatgtttactgttgctgccaaaaccatgggctacaaagtcaccgttctcgaccccgatccggacgcgccggcagcagaatttgccgactgtcatttatgcgcgccgtttaacgaccaagctgctttggacgaattggcaaaatgcgcggcggtgaccactgaatttgaaaacgtcaatgccgatgcgatgcgttttctcgccaaacacaccaatgtttcccccagcggcgactgcgtggcgattgcacaaaaccgcattcaggaaaaggcatggatacgcaaagcaggattgcaaaccgcgccgtatcaagtggtttgtaaggctgaagacattactgaagcaagtgcgcaattcttgcccggcatcctgaaaacggccactttgggctacgacggcaaaggtcaaatccgcgtcaaaacggtggatgaactcaaagctgcgtttgccgaacacggcggcgtggattgcgttttggaaaaaatggtggatttgcgcagtgaaatttccgtaatcgtatgccgtttgaacaatgacaacgtgcaaactttcgaccctgccgaaaacatccacgaaaacggcatcttggcttattccatcgtccccgcgcgactgagtgccgacgtgcagcaacaggcgcggcagatggcgcaacgcttggcggacgaattggattatgtcggcgtattggcggtagaaatgtttgttgtcgacgacacacatgaattggtcgtcaacgaaatcgcgccgcgtccgcacaactccggccaccataccgtcgatgcctgcgcggcagaccaattccagcaacaggtccgcctaatgtgcaacctgccacctgccgataccaagttgctttcttcatgctgtatggcgaatattttgggcgacgtttggcaggaagacggcggcaaaccggattggtttcccctgcaaagccggccggacacgcgcctgcacctttacggcaaaaaaaccgcgcacaaagggcggaaaatgggacactttaccgttttaaccaccgattcggacaccgcatttcaagaagcaaaaaaactgcatcagtccctataa

SEQ ID NO: 55195 - DNA, 1008 bp, Neisseria meningitidis
atgagcaccttcttccagcaaaccgcccaagccatgattgccaaacacatcgaccgtttcccgctattgaagttggatcaggtaattgattggcagccgatcgaacagtacctgaatcgtcaaaaaacccgttacctcagagaccaccgcggccgtcctgcctatcccctgttgtccatgttcaaagccgtcctgctcggacaatggcacagcctctccgatcccgaactcgaacacagcctcatcacccgcatcgatttcaacctgttttgccgttttgacgaactaagcatccccgattacagcaccttatgccgttaccgcaaccggctggcgcaagacgacaccctgtccgaattgctcaaactgattaaccgacaactgaccgaaaaaggcttaaaagtagagaaagcatccgccgccgtcattgacgccaccattattcagaccgccgacagcaaacagcgccaggctatagaagtcgatgaagaaggacaaatcaacggccaaaccacaccgagtaaggacagcgatgcccgttggataaagaaaaacggcctctacaaactcggttacaaacaacatacccgtaccgatgcggaaggctatatcgagaaactgcacatcacccccgccaatgcccatgagtgcaaacacctgtcgcctttgctggaaggactgcccaaaggtacgaccgtctatgccgacaaaggctacgacagtgcggaaaaccggcaacatctggaagaacatcagttgttagacggcattatgcgcaaagcctgccgcaaccggccgctgtcggaagtgcaaaccaaacgtaaccgatatttgtcgaagacccgttatgtggtcgaacagagcttcggtacgctgcaccgtaaattccgctacgcccgggcagcctatttcggactgattaaagtgagtgcgcaaagccatctgaaggcgatgtgtttgaacctgttgaaagccgccaacaggctaagtgcgcccgctgccgcctaa

SEQ ID NO: 55196 - DNA, 720 bp, Neisseria meningitidis; identical to SEQ ID NO: 50970

SEQ ID NO: 55197 - DNA, 510 bp, Neisseria meningitidis
atgagtaactttgaaaaaaaatatattttagaattaaatgatgctttaagccatttaaatcataactctacctcatttgatttattgaaagttttgatttcatggttatcaaacgatattgtcattgataaatttaaaattttaggttatgaccttagtaaatatatcgaaatgaatcccgatgactatccggttgaaaaatctatattgaatagagaggaaattatttatctcaaaaacaatatttatcgtaaaatatcatcaggaaattttaaatttcaatactttgtacaatatattagagatattttagaatatttatttattgaacatattgaaagagtctgtccttactgcgaatggggtgaaatgcaaaaattagaagaacaaaatacgcatgaaacggtgtatctctgtactcaatgtggatgtgctttttataacgataattcacaatttttattaaaaacccctttaaccattccaatgaaacgtgatgaatttaaataa

SEQ ID NO: 55198 - DNA, 621 bp, Neisseria meningitidis
atgacaaagttatacgcagaaatcgccaagatggagacgcaggacgacgacacggtcaaggtttggggttacgcttcaagcgaggaaatcgattcggacggcgaagtcatcgcggcggcagctatgaaggcggcgattcccgattatatgaagtttggcgcggggcgcgagatgcacggctcaaacgctgcgggaacggcaattgaaatcaacgttgaagacgacggcataacctttttcggtgctcatatcatcgaccccgttgtcgtgtcgaaagtcaaaacaggcgtttacaaaggcttttccatcggcggcagcgttaccgcccgcgatgatttgaacaagtcgcaaatcacgggcttgaagctgacggaaatcagccttgtcgagcgccctgccaatcccgatgcggtgtctacctgctttaaggcggacaaaggtgcggaagcggtaaacaacgatacagaacataatgctacatattttagccatttcccttccaaacaaaaaagcaccgacggcggccgatgccccttcccttacaggttcccctattttttcactgcggtcgttgccggtttggcgggggctttgggtgcgggcgcaccgacggaagcctga

SEQ ID NO: 55199 - DNA, 486 bp, Neisseria meningitidis; identical to SEQ ID NO: 39660

SEQ ID NO: 55200 - DNA, 1422 bp, Neisseria meningitidis
atgcgccacctacccctgttttcactaatgcttttccccgcatcggtttacgccgcagatttggacggcgcaaacctaaacctgctgtggagcctgccctttgccctgattttgctgtctatcgcattgggtcccttgtttttttcgcatacctggcatcaccattacggcaaaatcaccgccttttggacattgctcttcctcatcccgttcagtttggtttttggcgcgtccgccggtatccataccgtcgcacacgcactcgttgaagaatacatccccttcatcctgctgctgcttgccctgtacaccatttcaggcggcattttggtttggggcgacttgaacggcacacccaagctcaacaccgccctgcttgccgtcggtacggcacttgcctctatcatgggaacgaccggcgcagcaatgctgatgattcgtccgctgctgaaagccaaccaaaaccgtacccgccgcgtgcacatcgtcatcttcttcattttcctggttgcaaacatcggcggcggtctgacccctttgggcgaccccccactcttcctcggcttcctcaaaggcgtagatttcatgtggacggtcaaacatatgttcgcccccgtcctgatcagcaccgctgtcctgttgaccgccttctatttcatcgacaaccgtttcttcaaacaggaaagcattgcacaagatacgccggcacaacaggaaaaacccgaaaaaatcgccatcttcggcaaatggaacttcctcctgctttcgggcgtggtcggcgcggttctaatgtccggcctttggaaacccgaacacccgggatttgaaatcctcggcagccgttacgccctgcaaaacctcgtccgcgatgtcatcctgattgcattgaccgccgtatctatggcaatcacgcccaaacaagtccgcgcaggcaacgaattcaactttgaacccatcgccgaagtgggcaaactcttcctcggcatcttcatcaccatctttcccgtcctgagcattctgaaagcaggcgaggcaggcgcgctgggcggggtggtatcgctggttcacgatacggcaggtcatccgattaatgtgatgtatttttggatgagcggcatattgtcggcattcttggataacgcgcccacttatctcgtttttttcaatatggcgggcggcgatgcccaagccttgatgacgggtaccctgtttcattcgctgctggcggtttctatgggttcggtattcatgggcgcactgacctacatcggcaacgcaccgaacttcatggtcaaggccattgccgaacagcgcggcgtaccgatgccgactttcttcggctatatgatgtggtcggtcgccttcctgacacccgtcttcatcgtacatacccttatctttttcgttttcaaactgctgtaa

SEQ ID NO: 55201 - DNA, 921 bp, Neisseria meningitidis
atgcctaatccgctttacagacagcatatcatctccatttcggatttgtcgcgcgaacagttggaatgcctgcttcagacggcattgaagctgaaggcgcatccgcgcggcgatttgttggaaggcaaacttatcggttcgtgcttctttgaaccgtccacgcgcacgaggctgtcgtttgaaacggcggtgcagcggctgggcggcaaggtcatcggcttttcggacggcgcgaataccagtgccaaaaaaggcgagacgcttgccgataccgcccgcatcatttccggctacaccgacgcaatcatccaacgccaccccaaagacggcgcggcgcgcgtggcagcggagttttcgcgcgtccccgtcatcaacgccggcgacggcaccaaccagcaccccagccagaccttgttggatctggtaacgatttatgaaacgcaggggcgtttggacaagctcaaaatcgccatggcgggcgacttgaaatacgggcgcaccgtgcattcgctttgtcaggcgttgaaacgctggggctgcgaatttgcctttgtttcgccgcccagcctcgcgatgcccgactacattaccgaagagttggacgaagccggctgccgataccgtatcctcggcagtttggaagaggcggcggaatgggcggacatcctgtatatgacccgcgtccagcgcgaacgtttcgatgaacaggaatttgccaaaatccaaggcaaattcaacctcgaagcgtctatgctcgcccacgccaaaccgaacctgcgcgtgctgcaccctttgccgcgcgtggacgaaatccatcccgatgtcgatgccacgccgcatgcctattatttcgagcaggcaaccaacggcgtttatgcgcgtatggcgatattgtcgctggtgttgaacgaagaagtgtga

SEQ ID NO: 55202 - DNA, 801 bp, Neisseria meningitidis
atgaacgcgttcaacctcatcatcatcggcgacgaaatcttacacggcagccgccaagacaagcatttcgtctttttcaaatccctgctcgaatccaaagggctgaagctcaatcaggtgcaatatctgcccgacgaacccgatttgctggtcaggcaactgcgccgcagcttttcagacggtataccgacgtttgttaccggcggcatcggtgctacgcccgacgaccacacgcgccaagcggccgccgccgctttggagttgcccgtcgtccgccatcctgaagccgccaagtttatcgaaggcgtaaccctgaaacgcggcgagccgctcgattcgcccgaacacgcccaacgcctgaaaatggcagatttccccgaaggcgcggaattggtgcccaatccgtttaacaacatcgccggattttctatccgcgagcattattttttccccggcttccccgtgatggcgcacccgatggcggaatgggttttggatacttattacgtcggccgcttcaaccaaaccaaacgcggcagccgcagcgtgtatgtgtttgagcagcccgaatcgcgcattacgccgcttatggagcatatcgagcaaacttatcccggtgtgcgttcgtacagcctgcccagcgtcggttggacgcattcagacggcacgcaggtcaaaccgcacattgagttcggcatcaaagccgaaggagaagccgtcaaccttttggacgcggcgtgggcggaagtgttgcacagcttggacggattgggagcagagctgaaaaatcgggtaaactga

SEQ ID NO: 55203 - DNA, 774 bp, Neisseria meningitidis
  misc_feature 8, 9, 10, 11, 12: 'n' is a, c, g or t
gtgtgtgnnnnntctcttctcttctcttctcttctcttctcttctcttctctccgcagcgcaggcggcaagtgaagacggcagccgcagcccgtattatgtgcaggcggatttagcttatgccgccgaacgcattacccacgattatccgaaagcaaccggtgcaaacaacacaagcacagtaagcgattatttcagaaacatccgtgcgcattccatccacccccgggtgtcggtcggctacgacttcggcggctggagaatagcggcagattatgccagttacagaaaatggaaagaaagtaattcttctactaatgcagaaaatagagatagtatacaaaactacgtaaagattgaaacaaaacatcaaggaaacggcagcttccacgccgtttcttctctcggcttatccgccatttacgatttcaaactcaacgataaattcaaaccctatatcggcgcgcgcgtcgcctacggacacgttagacatcaggttcattcggtggaaagcaaaaacacgattattacctctaaaccaacgggcaacactccagcgggaggtcctgtcccaacaggttttgtccccaaatctgcctatcacgaaagccacagcatcagcagcttgggtcttggcgttatcgccggtgtcggtttcgacatcacgcccaagctgaccttggacaccggataccgctaccacaactggggacgcttggaaaacacccgcttcaaaacccacgaagtctcattgggcgtgcgctaccacttctga

SEQ ID NO: 55204 - DNA, 477 bp, Neisseria meningitidis
atgaacaccatcgcccccaacctcgacggcaaacacctccgcatcggcatcgtacaggcacgtttcaccaacgaaatcggcagcgaaatgctcaaagtctgctgccgcaccctccaagaattgggcgtggcagacgaaaacattaccgtcgccaccgtacccggcgcacttgaaatccccatcgcactgatgaaccttgcctcttccgaaaagtttgacgcactgattgccatcggtgtcgtcatccgtggcgaaacctaccatttcgagctggtttccaacgaatccggagcaggggttagccgcgtcgcactcgactacaacatcccgattgccaatgccgtcctaaccaccgaaaacgacgcgcaggcaatcgaacggattgaagaaaaagcctcggatgccgccaaagtcgccgtcgaatgcgccaacctcgtcaacctgctgctcgaagaacagtttgaagacgaagaataa

SEQ ID NO: 55205 - DNA, 312 bp, Neisseria meningitidis; identical to SEQ ID NO: 40776

SEQ ID NO: 55206 - DNA, 1635 bp, Neisseria meningitidis
atggcagcaaaagacgtacagttcggcaatgaagtccgccaaaaaatggtaaacggcgtgaacattttggcaaacgccgtgcgcgtaaccctgggtcccaaaggccgcaacgtagtggttgaccgcgctttcggcggcccgcacatcaccaaagacggcgtaaccgtcgccaaagaaatcgaactgaaagacaagtttgaaaatatgggcgcgcaaatggtgaaagaagttgcgtccaaaaccaacgacgtggcgggcgacggtacgactaccgccaccgtactggcacaatccatcgttgccgaaggcatgaaatatgttaccgcaggtatgaatccgaccgacctgaaacgcggtatcgacaaagccgtcgccgctttggttgacgagctgaaaaacatcgccaaaccttgcgatacttccaaagaaatcgcccaagtcggctcgatttccgccaactctgacgaacaagtcggcgcgattatcgccgaagcgatggaaaaagtcggcaaagaaggcgtgattaccgttgaagacggcaaatctttggaaaacgagctggacgtggttgaaggtatgcagttcgaccgcggctacctgtccccttacttcatcaacgatgctgaaaaacaaatcgctgctttggacaatccgtttgtattgctgtttgacaaaaaaatcagcaacatccgcgacctgctgcctgttttggaacaagtggcgaaagccagccgtccgctgttgattatcgctgaagacgtagaaggcgaagccttggcgactttggtggtgaacaacatccgaggcatcctgaaaaccgttgccgtcaaagctccgggcttcggcgaccgccgcaaagcgatgctgcaagacatcgctatcctgaccggcggcgtggtgatttccgaagaagtcggcctgtctctggaaaaagcgactttggaagacttgggtcaagccaaacgcatcgaaatcggtaaagaaaacaccaccatcatcgacggctttggcgacgcagcccaaatcgaagcgcgtgttgccgaaatccgccaacaaatcgaaaccgcaaccagcgattacgacaaagaaaaactgcaagagcgcgtggctaaattggcaggcggcgtggcagtgatcaaagtcggcgccgctaccgaagtcgaaatgaaagagaaaaaagaccgcgtggaagacgcgctgcacgctacccgcgcagccgttgaagaaggcgtggtcgcaggcggcggcgtagccctgttgcgcgcccgtgccgctttggaaaacctgcacaccggcaatgccgaccaagacgcaggcgtacaaatcgtcttgcgcgccgttgagtctccgctgcgccaaatcgttgccaacgcaggcggcgaacctagcgtggttgtgaacaaagtgttggaaggcaaaggcaactacggttacaacgctggcagcggcgaatacggcgacatgatcgaaatgggcgtactcgaccccgccaaagtaacccgttccgcgctgcaacacgccgcgtctatcgccggcctgatgctgaccacagactgcatgattgctgaaatccctgaagacaaaccggctatgcctgatatgggcggcatgggtggtatgggcggcatgatgtaa

SEQ ID NO: 55207 - DNA, 1458 bp, Neisseria meningitidis
atgccgtctgaagccgttttcctgcaatttcgacagacgagaaaaatcatgaaatacatcagcacgcgcggcgaaaccgcacacaaaccgttcagcgaagttttattgatggggcttgcacccgacggcggcctgatgctgccggaacattatccgcaaatcgggcgggaagccttggacaaatggcgcggtttggcttatcccgaattggcgtttgaaatcatgcgcttgttcgttacggatattccggaggacgatttgcgcgatattctgaaccgtacttacacggaagcggcgttcggtactaaggaaatcacccccgtccgcacgctttcagacggcatcaaaatccaagccttgtccaacggcccgacgctggcgttcaaagatatggcgatgcagtttttgggcaatgcgtttgaatatgttttaaacaaagaaggtaaaaaactcaatatcttgggcgcgaccagcggcgatacgggttcggctgcggaatatgccttgcgcggcaaaaaaggcgtgaacgtatttatgttgtcacccgacggtaagatgagcgcgttccaacgcgcgcaaatgtacagcctgcaagacggaaatatccacaatatcgccgtgaaggggatgtttgacgattgtcaggacattgtgaaggcagtgcaaaacgatgccgcgttcaaggaaaaataccatatcggtacagtcaactcgattaactggggacgcatcgtcgcgcaagtggtttattactttgcgggctatttcaaggcgacgcaaagcaatgacgagcaggtcagcttctgcgtgccgagcggcaacttcggcaacgtttgcgcgggacacatcgccaaacagatgggtttgcctatccgccgcctgattgtcgcgaccaatgaaaacgatgtgttggacgagtttttcaaaaccggtgcataccgcccgcgcaacagcgcgcatacttatgttacctccagcccgtcgatggacatttccaaagcgtccaacttcgagcgtttcgtgttcgacctgatggatcgcgatcctcaggaaatcaatacgctgtgggcggaagtagcggcgggcaaaggctttgacctgcggtttgctttagaaaaagtcggtggcaaatacggttttacctccggcaaatccacccaccccgaccgcctcgccaccatcagacaggtttatgagcaagaccaagaactcatcgacccgcacactgccgacggcgtaaaagtcgcccgcgaagtgcgcgaagaaggggaaacggttgtgtgtttggaaaccgcgttggcagcgaaattcgatgcgaccatacgcgaagccgtcggcgatgccgccattccgcgccccgccgcgctggaaggtttggaaacattgccgcagcgcgtgcaaaccgtgccgaacagtgcggatgcggtaaaaggcatcatcgaacaaacccttgcctga

SEQ ID NO: 55208 - DNA, 1800 bp, Neisseria meningitidis
ttggaggttggtgcaaaacctgcttttttcgcgttacaatctgcacccgatttacttttgaatttgcctgtttggaaaaatacttttatgaaagccagccaattctttatctctactttaaaagaagcccctgccgaagccgcgcttgccagccacaagctgatgattcgcgccggtctgattaaagccaacgcgtccggcctttatacttggatgccgatggggctgcgcgtgttacgcaaagtcgaaaacgtcgtgcgcgaggaaatggcgcgtgcgggcagcgtggagttgctgatgccggtggtgcagcctgccgagctgtggcaggaatccggccgctgggagttttacggtaaagagttgctgcgcctgaaagaccgccacgaccgcgatttctgcatgggtccgacctgtgaagaagtcatcgccgacatcgtgcgcaaagaaatcaacagctacaaacagctgccgaaaaacttttaccacatccaaaccaaattccgcgacgaagtgcgcccgcgtttcggcgtgatgcgcgcgcgcgagttcgtcatgaaagacgcttattccttccatgccgactacgcctcgcttcagacgacctatgatgccatgtatgacgcttactgccgcatcttcacccgtctgggcttggcattccgccccgtcgccgcagacaccggcagcatcggcggtacgggttcgcacgagtttcaagtgttggcggaaagcggcgaagatgtgattgcgtacagcgacacttccgattacgccgccaatatcgagttggcaccgaccttgccgcttaaaggcgaacgcaccgctgctcaggccgagttgaccaaagtacatacaccaaacgtcaaaaccattgagtctttggttgaattcctgaatattccggttgaacaaaccctcaaatccatcgtggttgaaggcgaaaacgaaggcgaaatcgtcttattactgttgcgcggcgaccatgagttcaacgacatcaaggcagaaaaactcgcaggcgtgagatcgccattgacgatggcaagtcctgccgcgattgtcgaacagttcggcgcaaacggcggctcgctgggtccggtcagctttgcaggtaaagtttatgccgattttgctactgaaaaaggagcggactgggtcatcggtgcgaacgaagacggctaccactacaccagcttcaacttcgggcgcgatgccgccgagcctgaattcgtcgatttgcgtaatgtggtcgaaggcgacgaaagccccgacgggcaaggccgtctgaaactcgcgcgcggcattgaagtcggacacgtcttccagttgcgcgacaaatacacccaagccatgaacgtaagcttccttgacaacaacggcaaatcgcaaattatggaaatgggctgctacggcatcggcatcacccgcgtcgttgccgccgccatcgagcagaataacgacgaaaaaggcatcatctggaccaaagcaatggcgccgtttgaagtcgttatcgtgccgatgaactacaaaaaatcagacaccgtacgcgaagccgccgacaaaatctatgccgaattgctggcggcaggcgcggatgtgctgctggatgaccgcgacgaacgcgcaggcgtattgctgaacgattccgagctgttgggtattccgcaccgcatcgtcatcggcgaccgcgctttgaaagaaggcaatgtcgaatacgccgaacgccgcaacaacgaagcgcaggcagttgcaatcggagaaattgttgcgcgtgtaacagctttattaaatgggtaa

SEQ ID NO: 55209 - DNA, 852 bp, Neisseria meningitidis
atgaacactttgaaatttaccaaaatgcacggtttgggcaacgattttatggtgattgacgcggtcagtcaggattttacccccgaggacgcgccgattgcggcatgggcggaccgcttccggggcgtgggcttcgaccagcttttggtggtcgggcgttcggaaaccgaaggcgtggatttccgttaccgtattttcaatgccgacggtagcgaggtcgagcaatgcggcaacggagcgcgttgttttgcccgttttgttgcagacaagggtttgaccgataagaaagaaatttgtgttgaaacggcaaatggcgttatttttccgaaattgtccgataacggcatggttacggtcaatatgggcaaaccgaggtttatgccgtctgaaataccgtttgtccccgaatcgggcgagggggatgatgcctgtatttacggggtgcatctcgaatccggcattcagcctgtcagctgcgtcaatatgggcaacccccatgcggtgattgtggtcgatgacgtagaatgcgcgccggtgcgcgaaaccggttcgcttatcgaaccgcacaggcagtttcccgaacgcgtcaacgtcggctttatgcagattgtcagccgaaccgcgattcgtttgcgcgtgttcgagcgcggcgtgggcgaaacccaagcgtgcggtacgggcgcgtgtgcggctgtggtggcgggtatccgtctggggttgttggatgaagggaaaacggtagaggtgattttgccgggcgggactttatatatcgaatgggcctgcggcggcgatgtgatgatgaccggccctgcggaagcggtgtttgaaggcgagttggcgtattcatga

SEQ ID NO: 55210 - DNA, 633 bp, Neisseria meningitidis; identical to SEQ ID NO: 54940

SEQ ID NO: 55211 - DNA, 822 bp, Neisseria meningitidis
atggctgttttaattaccggtgcttcggcaggattcggcgaagcgatgtgccgcgcgtttgtcggggcgggataccgcgttatcggtgcggcgcgccgtgcggacaggcttcaggccttggcggatgaattgggtgctttgttttaccctttggaaatggacgtgtcgcgacgcgagtcggtggaaaacgccttaaacggcatccccgatgaattttccgacatcgactgcctcatcaacaatgccgggctggctttgggtctggacacggcggacaaggcggattttgaagattgggaaacgatgattcaaaccaatgttttgggtttgacgttcctgacgcgcaaaattttgccgcaaatggtggaacgcggcggcggctatgtgatgaatttgggttcgattgcaggcaattatgcttatgccggcagcaacgtttacggggcgaccaaggcgtttgtgcggcagttcagcctgaatttgcgcgcggagttggcggataagaacatccgcgttaccaatatcgagccgggtttgtgcggcaatacggagttttccaatgtgcgcttcaaaggcgatgacgagagggcggcgggcgtgtatgagggtgtggaatttatccgccccgaagatattgcggaaaccgcattgtggctgtaccagcggccggcgcatatgaatgtgaacacgattgaaattatgcccgtggcgcagacttttgcaggaatgaaagtgataaaaaaagccgtgcccgaagtgcgggaagactttgaaaaacagagtatgtcgctgttttcccgcatcaggtcctggttcaaatga

SEQ ID NO: 55212 - DNA, 696 bp, Neisseria meningitidis; identical to SEQ ID NO: 41477

SEQ ID NO: 55213 - DNA, 1431 bp, Neisseria meningitidis
atgacctgggaaaccgtaatcggcttggaaatccacgtccaattgaacaccaaatccaaaatcttcagcggcgcatcgaccgcattcggcgcagaacccaacgcgcacgccggcgtagtggaatgtgctttgccgggcgtactgccggtaatgaaccgagaagtcgttgaaaaagccatcaaattaggcttggctttggatgcgaaaatcaaccggaaaaacgtgttcgaccgtaaaaactacttctatcccgacttaccaaaaggctatcaaatcagccagttggacttaccgattgtcgaacacggcaaattggaaatcgtagtcggcgacgatgtgaaaaccatcaacgtaacccgcgcccatatggaagaagacgcgggcaagtccgtacatgaaggcttgaacggcgcgaccggtatcgatttgaaccgcgccggcacgcctttattggaagtcgtatccgaacccgaaatgcgctccgccgccgaagccgttgcctacgccaaagccttgcacagcttggtaacctggctgaacatttgcgacggcaatatggcggaaggttcgttccgcgtcgatgccaacgtatccgttcgcccgaaaggtcaagcggaattcggcacgcgccgcgagattaaaaacctcaattccttccgtttcttggagcaggcgattaattacgaagcagaagcgcaaatcgagattttggaagacggcggcaaagtacagcaggcaacgatgctgtttgatcccgaaaaaggcgaaacccgcgtaatgcgcctgaaagaagacgcgcaagactaccgctacttccccgaccccgatttgctgcccgtcatcatttcagatgcccaaatgcaaaaagccaaagcagaaatgcccgagctgccgaaagaaatggcagcgcgtttcgtggcggactacggcgtgtccgaatacgacgcgcgcctgctcaccgcaagccgcgcacaggccgcctattttgaagaagccgccaaagagagcggacaaggcaagccgactgccaactggatgaacggcgaactcgccgccgcactgaacaaagaaggcatggaacttgccgacagcccgattaccgctccgcgcctcgccgcgctggtaggcaaaatcgccgacggcacattaagcagcaaattagcgaaaaaagcctttgaagccatgtgggcagaacccgaagccactattgccgaaatcatcgaaaaacacggtttgcagcaaatgaccgataccggcgcgattgaagccatggtggacgaagtgctggcaaacaacgccaaagccgtggaacagttcaaatccggcaacgaaaaagccctgaatgcgattgtgggacaagtgatgaaggccagcaaaggcaaagccaaccccgcgcaggttcaagagctgattaaagccaaacttgcctga

SEQ ID NO: 55214 - DNA, 711 bp, Neisseria meningitidis
atgacctcatgtgaacctgttaatgaacaaaccagtttcaacaatcccgagccaatgacaggatttgaacatacggttacatttgattttcagggcaccaaaatggttatcccctatggctatcttgcacggtatacgcaagacaatgccacaaaatggctttctgacacgcccgggcaggatgcttactccattaatttgatagagattagcgtctattacaaaaaaaccgaccaaggttgggttcttgagccatacaaccagcaaaacaaagcacactttatccaatttctacgcgatggtttggatagcgtggacgatattgttatccgaaaagatgcgtgtagtttaagtacgactatgggagaaagattgcttacttacggggttaaaaaaatgccatctgcctatcctgaatatgaagcttatgaagataaaagacatattcctgaaaatccatattttcataaactttactatattaaaaaaggagaaaatccggcgattattactcatcggaataatcgaataaaccaaactgaagaagataattatagcactagcgtaggttcctgtattaacggtttcccggtacggtattacccgtttattcgggaaaagcagcagctcacacagcaggagttggtaggttatcaccaacaagtagagcaattggtacagagttttgtaaacaattcaagtaaaaaataa

SEQ ID NO: 55215 - DNA, 648 bp, Neisseria meningitidis
atgaaaacaaaattttacaatcatcaaggcgaacatttaatcctgtattttgcaggttggggaacgccgcccgatgctgtaaatcatttgattttgccggaaaatcacgatttattgatttgctatgattatcaagatttaaatttggattttgatttttccgcctatcggcacatccgtttggtggcgtggtcaatgggcgtttgggcggcagagagggcattgcaaggaataagattaaaatccgcaacggcagtgaatggcacaggtttgccttgcgatgataatttcggtatccctttcaccgtttttaaaggcacattggagaacctcacgggaaatactcgtttaaaatttgaacgcagaatgtgtggcgataaagcatcttttgaagattaccaacaattttccgcccgtccgtttgacgaaattcatcaagaacttaccgcactttttgcgatgatcgggcaagataggcgcgcagatttgattcgctggacaaatgccttggtcggatcgggcgataaaatttttatgcctgccaatcagtaccgatattggacagcgcgttgcaccgttcgggaaattgacggcggacattacctgttttcaagattcacccattggtcggcactatggaatcactga

SEQ ID NO: 55216 - DNA, 1011 bp, Neisseria meningitidis
atgtccatcaaaatcctgattatttctcccagttggataggcgactgcgtgatgacccagcccttgttccgccgtttgaaggaacttcaccccggttgcacgattgatgtgttcgcaccgaagtggtcgatggcggtgttcgagcgtatgccggaagtgaatgaaattcttgagaattcgttcggacatggtgcgttggagttgaaacgccgttggcgggtcggtagggatttggggcggcgcggatacgatcaggttatcgtgttgcccggttctttgaaatcggcaatcatcgcgctggcgacaggtatcggtaaaaggacgggttatgtcggtgaaagccgttattttctgttgaacgatatacgcaggctggataaggaacgtctgcctttgatggtggacagatatacggctctcgcgcatccgagtcaggaagattttgacgggcattcgggattccccgagttttccattgatgaacggcggcgggaaatttctgtcgaaactttcggtttgaatcttggaaagcctgttttggcattttgcccgggtgcggaattcgggccggcaaagcgttggccgacaaggcattttgccgagttgggcaaacattatctggcggcgggttggcaggtttggttgttcggttcgcaaaaagatgatgaaattgccgaggaaatcaaccgcctttcagacggcatatgtgtgaatttatgcggaaagaccgatttgtcgcaggcaatggatttgctgtcgttggcggacacggtcgtgtgcaacgacagcgggctgatgcacttggcggcggcattgggcaggaaggtggtggcggtttacggttcttccagcccgacgcatacgccgcctttgagcgacagggcgaaaatcgtcagcctgcacttggaatgttcgccctgttttaagcgggaatgtccgctggggcataccgactgcctcaacaggctgtatcccgagaagattgtgcaggcggttgaagaggcggtatga

SEQ ID NO: 55217 - DNA, 552 bp, Neisseria meningitidis
atgccgtctgaacgccgaccgtttcaaacggcatttttatcgaacaggaaaaccgtcggtaaacttgcagagcgtgtgcaatcccgatatgatggtttgcataaatttaaacatatatgttccgcagctatggcactgattaaagagccgttggacaaagcgaaacaaaggaacgaagaacttgaagcggcagaagaagcggcggcgcaggaggcattgggtcgggagcaggaagtcgaccgcgtatccgaatgggaagaacgctacaagctgtcgcgcagcgagttcgagcaattctggaaaggattgcctcaaaccgtacagaataagctgcaagcctcacagaaaacatggaaaagcgggatggataaaatctgtgccaacaatgcgaaagctgaaggtgaaacgccaaacggcataaaattcagcgaactggcatgcaaaacggcggaaaccgaagcacgcttggaagagctgcacaaccgtaaaaaagcccttatcgacgaaatggtcagggaagcggacaagaaagaactgccaaagcggctctga

SEQ ID NO: 55218 - DNA, 450 bp, Neisseria meningitidis
atggacgtacaactccccatcgaagccaaagacatccaaaaactcatcccccaccgctatccgtttctccagctcgaccgcatcaccgccttcgagccgatgaaaaccctgaccgcgattaaaaacgtcaccataaacgaaccccagttccaaggccattttcccgacctgcccgtgatgcccggcgtactcatcatcgaagcgatggcgcaggcgtgcggcacgttggcgattttgagcgaaggcgggcgcaaagaaaacgaattcttcttcttcgccggcatagacgaagcccgtttcaaacgccaagtcatccccggcgaccaactcgtctttgaagtcgagctgctgaccagtcggcgcggcatcggcaaattcaacgccgtcgccaaagtggacgggcaagttgccgtcgaagccatcatcatgtgtgccaaacgcgtagtttga

SEQ ID NO: 55219 - DNA, 360 bp, Neisseria meningitidis; identical to SEQ ID NO: 45472

SEQ ID NO: 55220 - DNA, 336 bp, Neisseria meningitidis
atgtttaaagattggaaagaacataccgcattggttaaaaaatcgttcggcgagctgggtaaggcgcatcctaaaatgctgcaggcctacggcgcattggaacaggccgccgccgccgaagcacttgatgccaaaacgcgcgaactgattgccatcgccgttgccattaccactcgttgcgagagctgcatcagcgttcacgccgccgctgccgccaaagccggtgcgaccgacagcgaaatcgcaggcgcattggcaaccgccatcgccctgaatgccggtgccgcttacacttacgccctgcgtgcattggaagcggttgaaacgcaaaaataa

SEQ ID NO: 55221 - DNA, 1098 bp, Neisseria meningitidis
atgaaccagacatttaccttgcccgatacgcgcccgtatccccaaaatccgattaagaaccacctgctgctcaatgcctaccagttggcgcacaattcttcccaggcttcgcgcaaactctcgtccggccaacttcaaaccgaaatcagggggatgcttgagcaaaaccactatatcaacctttccctcgcgttgacgatgtcgcccgatgccggaacttatgccgcgctgctttccagtgtgaacgcggtactcgattgcgagaaagaaggcgaagtgcagtggttcgccctgccggtcgtgctggtgtccggctgcaagaaagaacgggcaatcgagatgaagctgccgacggaggcattgtttgcctgcctgcaaaactatccgcacctgcgcgttttgacgcaagagacacaatggctgccttatcttgtgcattcttccgatttgagtgcggtcgcgccggatgagtggtggcgtgccaaacaaaataccgaagcggcggcgcaacacttacgccgtttcgccccgcgtcctttgctgttgcccgaaggacagtccgtccacgtcgtttacgcgctgggtttcggcagcggtaaggttcagacggcattgggtcagaaccttcttcaggcaggcctgcccctgatgcaggtatggcaggaaaatcttgcatcggaaggcgttacgctgtttgccaacccgctttccccggattctccggtacgcgcgctttcagagggcagccacacgcgccaacgtatggcgatggatgtttttgcggcaaacgcgatacgcgccgtccgtatgcagagcccgcgcgtcggcgtggtcgctgcggcaaaggtaggtggacagattctattcggatttaatgcgaccgacggcgcgtttgaagtcgtgccgcaggtgttttcgtggcagctttcctttaccgacaatatcgccgttgttcagcaaaattttttggatttaatggcagaatgccgtgtagaacacgtttacctgttgcacaatcccttgggcgaacaggaaagcatcccgagctatgcggaagcattgaaacgggaagggcacaatccgtttttcagcgcatag

SEQ ID NO: 55222 - DNA, 288 bp, Neisseria meningitidis; identical to SEQ ID NO: 36618

SEQ ID NO: 55223 - DNA, 969 bp, Neisseria meningitidis
atgaacgagaaaaccatcattcttgccaatccgcgcggcttctgcgccggcgtggatcgggcaatcagtattgtcgaacgtgctttggaagaattcggcgcgccgatttatgtgcgccacgaagtcgttcacaacaaattcgtcgtggacaacctgcgtgaaaaaggtgcggtgtttattgaagacttggcggaagtgccgccgggcgcgacactggtttattcggcacacggcgtatcgaaggcggtgcggcaagaagcggcggagcgcggtttccgcgtatttgatgcgacttgcccgctggtgacgaaagtgcataaggaagtcgcccgactggatgcccaagactgtgaaatcatcatgatcgggcataaggggcacgtcgaggttgaaggaacgatggggcagcttgcgccgggcaaaatgcttttggtcgaaacggtcggagatgtggcaaaactcgaagtcagaaaccccgacaaactcgcctatgtcagccaaaccacgctctcggtcgatgaaaccaaagacatcatcgccgcgctgaacgcgcgtttccccaatatccgcaatccgcacaaggaagatatctgctatgcgacgaccaaccggcaaaccgccgccaaagagttggcagaacagtgcgacatcgtgattgtggtcggttcgcccaattcgtccaacagcaaccgcctgcgcgaagtggcggcaggcatcggaaccgatgcgtatatggtggacaatgcaggctacctgcaacgcgcgtggtttgagggcaagaacaaagtcggcgtaacggcaggcgcgtccgcgcccgaagtgttggtgcaggaagtattggcaaccatacgcgggtgggggcatgaaaccgtacgcgaaggggagggcgcggaagaaagcatcgtgttcgtcctgcccaaagagttgcgccgcgagggcgaaaccaaacccgatttgtgcaaacgttga

SEQ ID NO: 55224 - DNA, 840 bp, Neisseria meningitidis
gtgaaacgaatttttctgtttttggctaccaatatcgctgttttggtcgtaatcaacattgttttggcggttttgggcatcaacagccggggcggcacgggcagcctgttggcgtattccgccgtcgtcggcttcactggttcgattatttcgctgctgatgtccaaattcatcgccaaacaatcggtcggcgcggaagttatcgacacgccgcgcaccgaagaagaagcctggcttttgaacactgtcgaagcccaagcgcggcaatggaacctgaaaacgcccgaagtcgccatctaccactcccccgaacccaatgcctttgccacgggcgcatcgagaaacagctccctgatcgccgtcagcaccggtttgctcgaccatatgacgcgcgacgaagtggaagccgtattggcgcacgaaatggcacacgtcggcaacggcgatatggttacgctgacgctgattcaaggcgtggtcaataccttcgtcgtgttcctgtcgcgcattattgccaacctgattgcccgaaacaacgacggcagccagtcgcagggaacttatttcctggtcagcatggtattccaaatcctattcggcttccttgccagcttaattgtcatgtggttcagccgacaacgcgaataccgcgccgacgcgggcgcggcaaaactggtcggcgcaccgaaaatgatttccgccctgcaaaggcttaaaggcaacccggtcgatttgcccgaagaaatgaacgcaatgggcatcgccggagatacgcgcgactccctgctcagcacccacccttcgctggacaaccgaatcgcccgcctcaaatcgctctga

SEQ ID NO: 55225 - DNA, 1011 bp, Neisseria meningitidis
atgaaccacaccgttaccctgcccgaccaaaccacctttgccgccaacgacggcgaaaccgttttggccgctgccgcccgacaaaacctcaacctgccccattcctgcaaaagcggtgtctgcggacaatgcaaagccgaactggtcagcggcgatattcaaatggacggacactcggaacaggctttatccgaagcagaaaaagcgcaaggcaagattttgatgtgccgcaccaccgcgcaaagcgatatcagcatcaacatccccggctacaaagccgatgccctacccgtccgcaccctgcccgcacgcatcgaaagtattattttcaaacacgatgtcgccctcctgaaacttgccctgcccaaagccccgccgtttgccttctacgccgggcaatacattgatttactgctgccgggcaacgtcagccgcagctactccatcgccaatccgcccgaccaagaaggcattttggaactacacatccgcaggcgcaaaaacggtgtctgctcggaaatgattttcggcagcgaacccaaagtcaaagaaaaaggcatcgtccgcgttaaaggtccgctcggttcgtttaccctgcaggaagatagcggcaaacccgtcatcctgctggcaaccggcacaggctacgcccccatccgcagcatcctgctcgaccttatccgccaaaacagcagccgcgccgtccatttctactggggcgcgcgtcatcaagatgatttgtatgccctcgaagaagcacaagggttggcatgccgtctgaaaaacgcctgcttcacccccgtattgtcccgccccggagagggctggcagggaagaaaagggcacgtacaagacatcgcggcacaagaccaccccgacctgtcggaatacgaagtatttgcctgcggctctccggccatgaccgaacaagcaaaaaatctgtttgtgcaacagcataagctgccggaaaacttgtttttctccgacgcattcacgccgtccgcatcataa

SEQ ID NO: 55226 - DNA, 783 bp, Neisseria meningitidis
atgaccgacatcctcaataaaatccttgccaccaaagcacaggaagttgccgcccaaaaagccgccgtcaacgccgaacacatccgcgcacttgccgaaaacgcaccgcccgtccgcagcttcatcgattcgatacgcggcaaacaccgtctaaacctgcccgctgtcattgccgaaatcaaaaaggcaagcccgagcaaaggcctgatccgtccggacttccgaccggccgagattgcacgcgcctatgaaaacgccggagcggcgtgtttgtccgtactgaccgacgaaccctatttccaaggttcgcccgaatacctcaaacaagcgcgcgaagccgtatcgctgcccgtgctgcgcaaagacttcatcatcgacgaataccaggtttatcaggcgcgcgcatggggggcggatgccgtcctgctgattgccgcagcactggaacaggaacaattggaacgctttgaagcggtggcgcacgaattgggcatgaccgtcctgctcgagctgcacgatgaaaccgaattggaaaaatgccgcaatctgaccacgccgttgtggggcgtaaacaaccgcaacctgcggacttttgaagtctccctcgaccaaaccctgtcgctgctgcccgcgctggaaggcaaaaccgtcgttaccgaaagcggcattacaggtaaggcggatgtggaatttatgcgggcgcgcggcgtgcacaccttcctgatcggcgaaacgttcatgcgtgccgacgatattgaagcagaagtgggcaaactcttctaa

SEQ ID NO: 55227 - DNA, 384 bp, Neisseria meningitidis
atgactttcgcctattggtgtattctgattgcctacctattgccgcttttttgtgcggcgtatgccaaaaaagcgggcggattccggtttaaagacaaccacaatccgcgcgattttctggcgcgcacgcaaggcacagccgcccgtgcccacgccgcgcagcaaaacggttttgaagcctttgcaccgtttgctgccgccgttttgacggcacatgcaaccggcaatgccggacaagcaaccgtcaacacgcttgccggcctgttcatcctgttccgcctcgcctttatctggtgctacatcgccgacaaagcagcattgcgctcgctgatgtgggcgggcggatttgtctgcaccgtcgggctgtttgtcgcggctgcttga

SEQ ID NO: 55228 - DNA, 1296 bp, Neisseria meningitidis
atgttagatatccaattgctccgcagcaacaccgccgctgtggcggaacgcttggcggcacgcggttacaagtttgatgccgcgcgtttcaatgcgctggaagagcagcgaaaagccgtccaggtgaaaaccgaagagctgcaagcctcgcgcaacagcatttccaaacaaatcggcgcactgaaaggtcagggcaaacatgaagaggcgcaggcggccatggatcaagtcgcccaaatcaaaaccgatttggaacaggcagccgccgatttggaagccgtgcaaaaggaactggacgcatggctgttgagcattccgaacctgccgcatgaggacgtgcctttcggtaaggatgaaaccgaaaacgtcgaagtccgcaaagtcggcacgccacgcgaatttgactttgaaatcaaagaccatgtcgatttgggcgaacctttgggtttggatttcgaaggtggcgcgaaactttccggcgcacgatttaccgtgatgcgcggacaaatcgcccgcctgcaccgcgcgctggcgcaattcatgctcgatacgcacacgctgaaacacggctacaccgagcattacacaccctatatcgtggacgacaccaccttgcaaggcacgggtcagctgccgaagtttgcagaagatttgttccacgttacccgtggcggcgacgagagcaaaaccacgcaatatctgattccgacagctgaagttaccctgaccaataccgttgccggcagcattatcccgtccgaacaactgccgctgaagctgaccgcgcattcgccctgtttccgcagcgaggcgggttcgtacggcaaagacacgcgcggtctgattcgccagcaccagttcgacaaagtggaaatggttcaaatcgttcatcccgaaaaatcatacgaaacgctggaagaaatggtcggccatgccgaaaacatcctgaaggctttggaactgccctaccgcgtgattaccctgtgtaccggcgacatgggcttcggcgcaaccaaaacgtatgacttggaagtttgggtaccggcgcaaaacacctaccgcgaaatctcaagctgctccaactgcgaagatttccaagcccgccgcatgaaggcgcgtttcaaagacgaaaacggcaaaaaccgcttggtacatactttgaacggctccggcttggctgtcggcagaacgctggtcgccgtattggaaaaccatcaaaacgccgacggcagcatcaacatccctgccgcactgcaaccgtatatgggcggcgttgccaagttggaagtgaaataa

SEQ ID NO: 55229 - DNA, 540 bp, Neisseria meningitidis
atggattttttggaaatttttattatgtctgcatttagaaaaatattattaataatatcttgcctattgattgctagctgcagttttgttgaaactattttttatatggctattagcccagaacctgttgtggtagactttcctcttggtaaaaaaacaaaaagatctattgaactcaaacagaaaattggtaaaccttatgcaatatcgttaggaactaattttatacattatgatccaaaacagggggagaggtggattgatgataagttaaactatccatataatatatcggttaaaatatttaaagtggaagaagatggtaaaaaacttattatagatgagttgcttacagagagaagtagaaaattaggaggcggagtatttggagctgggggaaaatacagtatgtatatttatgatttttatttgccggaaggggaatatttatttgagatttctgataatagtgaatatattccactttacgatgaaataaataattctataagaatagtagttaatgcacgaattcagtaa

SEQ ID NO: 55230 - DNA, 1812 bp, Neisseria meningitidis
atgaaacaaatccgcaacatcgccatcatcgcccacgtcgaccacggcaaaaccacattggtcgaccaactgctgcgccaatccggcacattccgagccaaccagcaggttgacgagcgcgtgatggacagcaacgacctcgaaaaagaacgcggcatcaccatcctcgccaaaaacaccgccatcgattacgaaggctaccacatcaatatcgtcgatacgccgggacacgccgacttcggcggcgaagtagagcgcgttttggggatggtggactgcgtcgtcttgttggtggacgcgcaggaaggcccgatgccgcaaacccgtttcgtgaccaaaaaagccttggctttggggctgaaaccgattgtcgtcatcaacaaaatcgacaagccgtccgctcgtccgagctgggtcatcgaccaaactttcgagctgttcgacaacttgggcgcgaccgacgagcagttggatttcccgattgtttacgcttcagggttgagcggtttcgccaaattggaagaaaccgacgagagcaacgacatgcgtccgctgttcgatactatcttaaaatatacgcctgcaccgagcggcagcgcggacgaaacgctgcaactgcaaatttcccaactcgactacgacaactacaccggccgcctcggtatcggtcgtatcttgaacggacgcatcaaacccggccaaaccgttgccgtcatgaaccacgatcagcaaatcgcccaaggccgcatcaaccagcttttgggtttcaaaggtttggaacgcgtgccgcttgaagaagccgaagccggcgacatcgtgattatttccggtatcgaagacatcggcatcggcgtaaccatcactgataaagataaccccaaaggcctgccgatgttgagcgtggacgaaccgacgctgaccatggactttatggttaacaccagcccgttggcgggcacggaaggcaaattcgtaaccagccgccaaatccgcgaccgcctgcaaaaagaattgctgaccaacgtcgccctgcgcgtggaagataccgccgatgccgacgtgttccgcgtatccgggcgcggcgagctgcacctgaccattttgctggaaaacatgcgccgcgaaggctacgaactcgccgtcggcaaaccgcgcgtcgtgtaccgcgacatcgacggtcaaaaatgcgaaccgtatgaaaacctgaccgtggacgtacccgacgacaaccaaggcgcggtaatggaagaactcggccgccgccgtggcgaactgactaatatggaaagcgacggcaacggacgcacccgcctcgaataccatattccagcgcgcggcttgatcggcttccaaggcgaatttatgaccctgacgcgcggggtcgggctgatgagccacgtgttcgacgattacgcgcccgtcaaacccgatatgcctggccgccacaacggcgtgctggtgtcccaagagcagggcgaggcagtcgcttacgccttgtggaatctggaagaccgcggccgtatgttcgtatcgcccaacgacaaaatctacgaaggtatgattatcggcatccacagtcgcgacaacgatttggtggtcaacccgctcaaaggcaaaaaacttaccaacatccgtgccagcggtaccgacgaagccgttcgcctgaccacgccgattaagctgacgctggaaggtgcggtcgagtttatcgacgatgatgagctggtagaaatcacgccgcaatccatccgtctgcgcaagcgttacttgagcgaattggaacgccgccgccatttcaaaaagctagattga

SEQ ID NO: 55231 - DNA, 618 bp, Neisseria meningitidis
atggtcattgcagccattatggcgatgatagccctccccaatatgagccaatggattgcatcccgccgcattgccagtcatgcggagcggattgccaaccttttgcgtttctccaggggagaagccgtccggctcaatcttcctgtctatatctgtcctgttcaagttaaaaaaggcggtgcgcccaacaataaatgtgacttcggcaagaaggggcagggaatgttggcttttggcgataagaatggcaataagacatatgacggcgatacggcggatgttctccttcgcagtgtggtattgaatgatgatatcaatgataagcggattaattatgcctttaaccatatcgctttcggtcaaacgcagccgaccgctgaccgtgtagtttggacattcaatcaaaacgggacgttcggttatacgaacgaccagcatcttacaagccaatccagcttttcttattccgacggttatatccaaatcgtgctgacagatgcgagagcagtttcagatgccgataagaaattccgttcggcggtggttttgattaacagcagcggcagggttgaggtttgtcctagaaacgataggcgtaccgtatgccaatataaatga

SEQ ID NO: 55232 - DNA, 234 bp, Neisseria meningitidis; identical to SEQ ID NO: 40157

SEQ ID NO: 55233 - DNA, 618 bp, Neisseria meningitidis
atgaccttcccgccactcaaatccccgctcaaattctacgccgtcgtccccaccgccgattgggtggggcgcatggtcaaagcaggtgccgacacggtgcaactgcgctgcaaggccctgcacggcgatgaattgaaacgcgaaatcgcccgctgtgtcgccgcctgtcagggcagccgtacgcagcttttcatcaacgaccactggcacgaagcgatagaagcaggcgcgtacggcgtgcatctcggacaagaagacatggacaccgccgaccttgccgccatagccgccgccggtttgcgcttgggtttgagtacgcactccgttgccgaactcgaccgcgccctgtccgtacaccctagctacgtcgccagcggcgcgattttcccgaccacgaccaagcaaatgcccaccgccccgcaaggcttggacaaactgtgcgagtatgtgaaacaggcaggcggcacgcccgtcgtcgctatcggcggcatcgatttgaacaatgcccaagccgtactcgccaccggcgtttcctcactcgccgtcgtccgcgccgtgaccgaagcggcaaatcccgaagcggtggttaaagcgtttcaggctttgtgggatggataa

SEQ ID NO: 55234 - DNA, 4086 bp, Neisseria meningitidis
  misc_feature 4067, 4068, 4069, 4070, 4071: 'n' is a, c, g or t
atgaataaaggtttacatcgcattatctttagtaaaaagcacagcaccatggttgcagtagccgaaactgccaacagccagggcaaaggtaaacaggcaggcagttcggtttctgtttcactgaaaacttcaggcgacctttgcggcaaactcaaaaccacccttaaaactttggtctgctctttggtttccctgagtatggtattgcctgcccatgcccaaattaccaccgacaaatcagcacctaaaaaccagcaggtcgttatccttaaaaccaacactggtgcccccttggtgaatatccaaactccgaatggacgcggattgagccacaaccgctatacgcagtttgatgttgacaacaaaggggcagtgttaaacaacgaccgtaacaataatccgtttgtggtcaaaggcagtgcgcaattgattttgaacgaggtacgcggtacggctagcaaactcaacggtatcgttaccgtaggcggtcaaaaggccgacgtgattattgccaaccccaacggcattaccgttaatggcggcggctttaaaaatgtcggtcggggcatcttaactaccggtgcgccccaaatcggcaaagacggtgcactgacaggatttgatgtgcgtcaaggcacattgaccgtaggagcagcaggttggaatgataaaggcgaagccgactacaccggggtacttgctcgtgcagttgctttgcaggggaaattacagggtaaaaacctggcggtttctaccggtcctcagaaagtagattacgccagcggcgaaatcagtgcaggtacggcagcgggtacgaaaccgactattgcccttgatactgccgcactgggcggtatgtacgccgacagcatcacactgattgccaatgaaaaaggcgtaggcgtcaaaaatgccggcacactcgaagcggccaagcaattgattgtgacttcgtcaggccgcattgaaaacagcggccgcatcgccaccactgccgacggcaccgaagcttcaccgacttatctctccatcgaaaccaccgaaaaaggagcggcaggcacatttatctccaatgatggtcggatcgagagcaaaggcttattggttattgataccggggaggacatcggtttgcgtaacggagcggtcgttcaaaacaacggcaaccgccctgctgctacggtattaaatgccggccgtaatttggttatcgaaagcaaagcaaatgtgaacaatgctaaaggttcgaccaatctgtcgaccggcggccgtaccgtcatcaaggaggccagtattcagactggcactaccgtatacagttccagcaaaggcaacgccgaattaggcaataacacacgcattaccggggcagatgttaccgtattatccaacggcaccatcagcagttccgccgtaatagatgccaaagacaccgcacacatcgaagcaggcaaaccgctttctttggaagcttcaacagttacctccgatatccgcttaaacggaggcagtatcaagggcggcaagcagcttgctttactggcagacgataacattactgccaaaactaccaatctgaatactcccggcaatctgtatgttcatacaggtaaagatctgaatttgaatgttgataaagatttgtctgccgccagcatccatttgaaatcggataacgctgcccatattaccggcaccagtaaaaccctcactgcctcaaaagacatgggtgtggaggcaggctcgctgaatgttaccaataccaatctgcgtaccaactcgggtaatctgcacattcaggcagccaaaggcaatattcagcttcgcaataccaagctgaacgcagccaaggctctcgaaaccaccgcattgcagggcaatatcgtttcagacggccttcatgctgtttctgcagacggtcatgtatccttattggccaacggtaatgccgactttaccggtcacaataccctgacagccaaggccgatgtcaatgcaggatcggttggtaaaggccgtctgaaagcagacaataccaatatcacttcatcttcaggagatattacgttggttgccggcaacggtattcagcttggtgacggaaaacaacgcaattcaatcaacggaaaacacatcagcatcaaaaacaacggtggtaatgccgacttaaaaaaccttaacgtccatgccaaaagcggggcattgaacattcattccgaccgggcattgagcatagaaaataccaagctggagtctacccataatacgcatcttaatgcacaacacgagcgggtaacgctcaaccaagtagatgcctacgcacaccgtcatctaagcattaccggcagccagatttggcaaaacgacaaactgccttctgccaacaagctggtggctaacggtgtattggcactcaatgcgcgctattcccaaattgccgacaacaccacgctgagagcgggtgcaatcaaccttactgccggtaccgccctagtcaagcgcggcaacatcaattggagtaccgtttcgaccaaaactttggaagataatgccgaattaaaaccattggccggacggctgaatattgaagcaggtagcggcacattaaccatcgaacctgccaaccgcatcagtgcgcataccgacctgagcatcaaaacaggcggaaaattgctgttgtctgtaaaaggaggaaatgcaggtgcgcctagtgctcaagtttcctcattggaagcaaaaggcaatatccgtctggttacaggagaaacagatttaagaggttctaaaattacagccggtaaaaacttggttgtcgccaccaccaaaggcaagttgaatatcgaagccgtaaacaactcattcagcaattattttcctacacaaaaagcggctgaactcaaccaaaaatccaaagaattggaacagcagattgcgcagttgaaaaaaagctcgcctaaaagcaagctgattccaaccctgcaagaagaacgcgaccgtctcgctttctatattcaagccatcaacaaggaagttaaaggtaaaaaacccaaaggcaaagaatatctgcaagccaagctttctgcacaaaatattgacttgatttccgcacaaggcatcgaaatcagcggttccgatattaccgcttccaaaaaactgaaccttcacgccgcaggcgtattgccaaaggcagcagattcagaggcggctgctattctgattgacggcataaccgaccaatatgaaattggcaagcccacctacaagagtcactacgacaaagctgctctgaacaagccttcacgtttgaccggacgtacgggggtaagtattcatgcagctgcggcactcgatgatgcacgtattattatcggtgcatccgaaatcaaagctccctcaggcagcatagacatcaaagcccatagtgatattgtactggaggctggacaaaacgatgcctataccttcttaaaaaccaaaggtaaaagcggcaaaatcatcagaaaaaccaagtttaccagcacccgcgaccacctgattatgccagcccccgtcgagctgaccgccaacggtatcacgcttcaggcaggcggcaacatcgaagctaataccacccgcttcaatgcccctgcaggtaaagttaccctggttgcgggtgaagagctgcaactgctggcagaagaaggcatccacaagcacgagttggatgtccaaaaaagccgccgctttatcggcatcaaggtaggtaagagcaattacagtaaaaacgaactgaacgaaaccaaattgcctgtccgcgtcgtcgcccaaactgcagccacccgttcaggctgggataccgtgctcgaaggtaccgaattcaaaaccacgctggccggtgccgacattcaggcaggtgtaggcgaaaaagcccgtgtcgatgcgaaaattatcctcaaaggcattgtgaaccgtatccagtcggaagaaaaattagaaaccaactcaaccgtatggcagaaacaggccggacgcggcagcactatcgaaacgctaaaactgcccagcttcgaaagccctactccgcccannnnncacacacttaattaa

SEQ ID NO: 55235 - DNA, 888 bp, Neisseria meningitidis
atgtacacaggacgtttcgcccccagcccgaccgggctgctccacatcggctcgctgctgaccgccgccgcttcctatgccgatgcacgctcaaacggcggcaaatggctggtccgcatggaagacctcgatccaccgcgcgaaatgccgggggcggcaagccatatcctgcacacgcttgaggcattcggattcgagtgggacggagaagtcgcctatcagagccgccgttacgccctgtatgaagaaaccctatgccgcctgaaaaccgccggactggtctatccctgccattgcagccgcaaagactggcaggccggggcaaggcggggcgcagacgggttcgtctataacggacgctgccgccaccccggtcaacgccctgcaccgcaaggcaaacagccggcgtggcgcatccgcgtccccgaccgcgttatcggtttttcagacggcatcgtcggcggttacgcccaaaacctcgccggcgacatcggcgatttcgtcctgcttcgtgcagacggttactgggcataccaactcgccgtcgttgccgacgatgccgaacagagcgttacccacatcgtccgcgggcaagacctgctcgtttctacgccgcgccaaatctatttgcagcagtgtttgggcgttccaacacctcaatatgcccacctgccgctgctgaccaacgcgcaagggcagaaatggtcgaaacagacgctcgcccccgcattggatttaaaccgccgcgaacaactcctccgccaagtgttccgttacctcaagctgcccgaagcaccggaaaccgaccgccctgccgaactgctcgactgggcggtggcacactgggatatgggcaaagtgccgaaacacgccattaccgccccctaa

SEQ ID NO: 55236 - DNA, 1677 bp, Neisseria meningitidis
atgagcttcaaaaccgatgccgaaatcgcccaatcctccaccatgcgtccgattggtgaaattgccgccaagctgggtttgaacgtggacaatatcgaaccctacggccattacaaagccaaaatcaatcctgccgaggcattcaagcttccgcaaaaacaaggccgtctgattttggttaccgccattaatccgactcctgccggtgagggtaaaaccactgtaaccatcggtttggcggacgcgttgcgccatatcggcaaagactctgtgattgctttgcgcgagccttctttgggtccggtgttcggcgtgaaaggcggcgcggcaggcggcggctatgcccaagttttgccgatggaagacattaatctgcactttaccggcgactttcacgccatcggcgcggcgaataacctgctcgccgctatgctcgacaaccatatctaccaaggcaacgggttgaatatcgatccgaaacgcgtgctgtggcggcgcgtggtcgatatgaacgaccgccagttgcgtcatatcatcgacggtatgggcaaacctgttgacggcgtgatgcgccccgacggcttcgacattaccgttgcctccgaagtgatggcggtattctgccttgccaaagacatcagcgatttgaaagagcgtttgggcaacattctcgttgcctacgccaaagacggcggccccgtttacgccaaagatttgaaagcccacggcgcgatggcggctttgctcaaagatgcgattaagcccaacttagtgcaaaccatcgaaggcacgcccgccttcgtacacggcggcccgttcgccaacatcgcccacggctgcaactccgtaaccgccacccgtctggcgaaacaccttgccgattacgccgtaaccgaagcaggcttcggcgcggacttgggcgcggaaaaattctgcgacatcaaatgccgccttgccggtttgaaacctgatgcggctgttgtcgtggccactgtccgcgctttgaaatataacggcggcgtggaacgcgccaacctcggcgaagaaaatttagacgctttggaaaaaggtctgcccaacctgttgaaacacatttccaacctgaaaaacgtattcggactgcccgtcgtcgtcgccatcaaccgcttcgtgtccgactccgatgccgagttggcgatgattgaaaaagcctgcgcggaacacggcgttgaagtttccctgactgaagtatggggcaaaggtggcgcgggtggtgcagacttggcgcacaaagtcgtcaacgccatcgaaaaccaaccgaataacttcaagtttgcctacgatgttgagttgagcattaaagacaaaatccgtgcgattgcccaaaaagtgtacggtgcggaagatgtcgatttcagcgcggaagcgtctgccgaaatcgcctcgctggaaaaactggatttggacaaaatgccgatctgcatggcgaaaacccaatactctttgagcgacaacgccaaactgttgggctgccccgaaggcttccgcattaccgtgcgcggtattaccgtttcttccggcgcgggcttcatcgtcgccctgtgcggcaatatgatgaagatgccgggtctgccgaaagtgccggccgccgagaaaatcgatgtggacgaacacggcgtgattcacggcttgttctga

SEQ ID NO: 55237 - DNA, 1677 bp, Neisseria meningitidis
atgtcccaacaatacgtctattctatgctgcgcgtaagcaaggttgtgccgccgcagaaaaccatcattaaagatatttccctttctttcttccccggcgcgaaaatcggtttgctcggtttgaacggcgcgggcaagtccaccgtgctgcggattatggcgggtgtggataaggaatttgagggcgaagccgtgccgatgggcggcatcaaaatcggctatctgccgcaagagccggagcttgatcctgaaaaaaccgtgcgcgaggaagtggaaagcggtttgggcgaggtagctgcggcgcagaaacgtttggaagaagtgtatgccgagtacgccaatcctgatgcggattttgacgcgctggcggaagagcagggtcgcttggaagcgattattgcggcgggttcgtccacgggcggcggtgcagagcatgaattggaaatcgctgccgacgcgctgcgcctacctgattgggatgccaaaatcggccatctgtccggcggtgaaaaacgccgtgtggctttgtgcaaactcttgttgagcaaacccgatatgcttttgctggacgagccgaccaaccacttggatgcggaatcagtggaatggctggagcaattcttggtgcgcttccccggcacggtggttgcggtaacgcacgaccgctacttcttggacaacgccgccgaatggattttggaactcgaccgcggacacggtattccgtggaaaggcaattactcgtcttggctggagcagaaagaaaaacgcttggaaaacgaggcaaaatccgaagctgcgcgtgtgaaagcgatgaagcaggaattggaatgggttcgccaaaatgccaaaggccgccaagccaagtctaaagcgcgtttggcgcgttttgaagaaatgagcaactacgaataccaaaaacgcaatgaaacgcaggaaatctttattcccgttgccgagcgtttgggtaacgaagtgattgaatttgtgaatgtttccaaatcgtttggcgataaagtgctgattgatgatttgagcttcaaagtacctgctggcgcgattgtcggcatcatcggcccgaacggcgcgggtaaatcgacgctgttcaaaatgatttcgggcaaagagcagcctgattccggcgaagtgaaaatcggccaaaccgtgaaaatgagcttgattgaccaaagccgcgaaggtttgcaaaacgacaaaaccgtgttcgacaacatcgccgaaggccgcgacattttgcaggttggtcagtttgaaattcccgcccgccaatatttgggtcgtttcaactttaaaggcagcgaccaaagcaaaatcgcaggtcaattgtcaggcggcgaacgcggacgtttgcacttggcgaaaaccttgttgagcggcggcaatgtattgctgctggatgaaccgtctaatgacctcgacgtggaaaccctgcgcgcgctggaagatgcattgctggaatttgccggcagcgtgatggtgatttcgcacgaccgttggttcctcgaccgtattgctacgcatatcttggcttgcgaaggcgactccaaatgggtgttcttcgacggcaactatcaggaatacgaagccgacaagaaacgccgactcggcgaagaaggcgcgaaaccgaaacgcatcaaatacaaaccggtaacgcgttaa

SEQ ID NO: 55238 - DNA, 1233 bp, Neisseria meningitidis
atgggcttgaaacattttctggaaaaaatcgaaccgcacttcctgccgggcggcaaacatgaaaaatggtatgccctctacgaagcggcggcgacgattttctacacatccggtgcggtaacgcgcaaagcggcacacgtccgcgacgcgctcgactccaagcgcatgatgattttggtgtggctggctttgttccccgccatgttttacggcatgtacaacgttggcgcacaggcattcggtgccttaacgcccgatttgctgcaacaaagcatcgccaacgactggcattacacccttgccgacgctttgggcatcaatatgtcgtctgaagcgggtgtgtcgggcaaaatgctgttcggcgcgatttactttctgccgatttacgcgaccgtatttgtcgtgggcggtttttgggaagtcttgttcgccaccgtgcgcaaacacgaaatcaacgaaggtttcttcgtgacttcgattctgtttgccttaatcgttccgcccacgctgccgctgtggcaggctgccttgggtattaccttcggcgtggtggttgcaaaagaagtattcggcggtacgggtaaaaactttatgaaccctgcgctggcaggccgcgccttcctgttcttcgcctacccagccaacttgagcggcgatgcggtttggacggcggttgacggctattccggtgcaaccgcgctggcgcaatgggcggcacacggtgcagacggcctgaaaaacgccgtaaccggtcaaaccatcacttggatggacgcgtttatcggcaaactgcccggctccatcggcgaagtctccactttggcgctcttaatcggcggcgcgtttatcgtgtttgcccgcatcgcttcttggcgcattattgccggcgtgatgatcggtatgattgccatgtcttcgctgttcaacttcatcggttcggacaccaacgctatgtttgctatgccttggtactggcatctggtcgtcggcggcttcgccatcggtatgctgtttatggcgaccgaccctgtttccgcctcctttaccaatgtcggcaaatggtggtacggcgcgctgatcggcgtgatgtgcgtattgatccgtgtggtcaaccccgcttaccccgaaggcatgatgttggcgattctgtttgccaacctgtttgccccgattttcgactatttcgtcgcacaagcgaacatcaaacgcagaaaggcgcgcagcaatggctaa

SEQ ID NO: 55239 - DNA, 297 bp, Neisseria meningitidis; identical to SEQ ID NO: 38749

SEQ ID NO: 55240 - DNA, 1161 bp, Neisseria meningitidis
atgaaacgccaagccttagctgcaatgattgcttccttattcgcattagccgcctgcggcggcgaacctgccgcgcaagcccctgccgcttccgcagaagccgcaagttccgccgcacaagctgccgccgaaacgcctgcaggcgaactgcccgtcatcgatgcagttaccacccacgctcctgaagtacctcccgcaatcgaccgcgactaccctgccaaagtccgcgtgaaaatggaaaccgtcgaaaaaaccatgaccatggaagacggtgtggaataccgctactggacatttgacggcgatgttccgggccgcatgatccgcgtacgcgaaggcgatacggttgaagtggaattctccaacaatccttcttctaccgttccgcacaacgtcgacttccacgcggctaccggtcagggcggcggcgcggctgcaacctttaccgctccgggccgtacttccacattcagcttcaaagccctgcaacctggcctgtacatctaccactgcgccgtcgcgccggtcggtatgcacatcgccaacggtatgtacggtctgattttggtcgagcctaaagaaggtctgccgaaagtggataaagagttctacatcgtccaaggcgacttctacaccaaaggcaaaaaaggcgcgcaaggtctgcaaccgttcgatatggacaaagccgttgccgaacagcctgaatacgtcgtattcaacggtcacgtaggtgctatcgccggcgacaacgccctgaaagccaaagcaggcgaaactgtacgtatgtacgttggtaacggtggtcctaacttggtgtcttccttccacgtaatcggtgaaatcttcgacaaagtttatgtggaaggcggcaaactgattaacgaaaacgtacaaagcaccatcgttcctgccggcggctctgccatcgtcgaattcaaagtcgacatcccgggcagctacactttggttgaccactctatcttccgcgcattcaacaaaggcgcactgggtcaattgaaagtagagggtgcagaaaaccctgaaatcatgactcaaaaattgagtgataccgcttacgccggtaacggtgcagctcctgctgcttccgctcccgcagcttctgctcctgcagcctctgctcctgcaaaaagcgattactaa

SEQ ID NO: 55241 - DNA, 1215 bp, Neisseria meningitidis
atgaccgtcaaaacccccgtttacctcgactacgccgccaccacccccgttgacaaacgcgttgccgaaaaaatgattccctatctgaccgaaaccttcggcaaccccgcctccaacagccacgcattcggctgggaagcagaagaggccgtcgaaaaagcccgcgccgacatcgctgccctgattaatgccgaccccaaagaaatcgtcttcaccagcggcgcgaccgagtccgacaacctcgccatcaaaggcgcggcaaacttctacaaaaccaaaggcaaacacctcattaccgtcaaaaccgaacataaagccgttttagatacaatgcgcgaactcgaacgccaaggttttgaagtaacctacctcggcgttcaagaaaacggtttgattgatttggaagaactcaaagccgccatccgcgacgataccatcctgatttccgtaatgtgggtaaacaacgaaatcggcgtggtgcaagacattcccgccatcggcgaaatctgccgcgaacgtaaaatcgtcttccacgtcgatgccgcccaagcctgcggcaaagtgcctgtcgatgtcgaagccgccaaaatcgacctgctctcgatgtccgcgcacaaagtgtacggccccaaaggcatcggcgcgctgtacgtccgccgcaaaccccgcgtccgcctcgaagcccaaatgcacggcggcggccacgaacgcggcttccgcagcggcacattaccgacccaccaaatcgtcggtatgggcgaagccttccgcatcgccaaagaagaactcgaacaagatatggcgcactaccgcaaactgcgcgatatcttcctcaaaggcatcgaaggcatcgaagaagtctacatcaacggcgacctcggacaccgcgccccgaacaacctgaacgtcagcttcaacttcgtcgaaggcgaaagcctgattatggcggtgaaagaactcgccgtatccagcggctccgcctgcacctccgcctcgctcgaacccagctacgtcctgcgcgcgctcggccgcaacgacgaactggcgcactcatccctgcgtatcaccttcggtcgcatgaccaccgaagaagaagtgcaattcgccgccgaactgattaaatccaaaatcggcaaactgcgcgaactgtcgccgctgtgggaaatgttcaaagacgggattgatttgaactcgattgagtgggcggcgcattaa

SEQ ID NO: 55242 - DNA, 300 bp, Neisseria meningitidis
atgaccgcatccatgtacatccttttggtcttggcactcatctttgccaacgcccccttcctcaccaccagactgttcggcgtggccgcgctcaagcgcaaacatttcggacaccacatgatcgagctggcggcaggtttcgcactgaccgccattcttgcctatattctcgaatcccgtgcaggatcggtacacgatcagggttgggagttttatgccacagtcgtctgcctgtacctgatttttgcgtttccatgttttgtgtggcggtatttttggcacacgcgcaacagggaatag

SEQ ID NO: 55243 - DNA, 192 bp, Neisseria meningitidis; identical to SEQ ID NO: 37158

SEQ ID NO: 55244 - DNA, 345 bp, Neisseria meningitidis; identical to SEQ ID NO: 40340

SEQ ID NO: 55245 - DNA, 447 bp, Neisseria meningitidis; identical to SEQ ID NO: 45533

SEQ ID NO: 55246 - DNA, 1266 bp, Neisseria meningitidis
atgaacacactccaacgccgcaagacgcatcaagtccgcatcgatcatattaccgtcggttcagaagcacccgtcgttatccaatctatgaccaacaccgacactgccgatgcaaaagccaccgcattgcagattaaggaattgagcgatgccggatccgaaatggtgcgtattaccgtcaacagccccgaagccgcgtccaaagttgccgaaatccgccgccgcttggacgatatgggctatgccacaccgcttatcggcgatttccacttcaacggcgaacgcctgttggcggaatttcccgaatgcggcaaagcattgtccaaataccgcatcaatcccggcaatgtcggcaaaggcgtaaaaggcgatgaaaaatttgcctttatgattcggactgctgctgaaaacgataaagccgtccgcatcggcgtaaactggggttctttggatcaaagcctcgccaaacgtatgatggatgccaacctcgctttttccgcgccgaaaccgcccgaagaagtgacgaaggaagcactgattgtctccgctttggaatctgccgaaaaagccgttctattgggactgcccgaagacaaaatcatcctgtcgtgcaaagtcagcgcggttcaggatttgattcaggtttaccgcgaactgggcagccgttgcgcctatccgctgcatttgggtttgaccgaagccggtatgggcagcaaaggcattgtcgcatcaacggcggcattatccgtcttgcttcaagaaggaatcggcgacaccatccgcatttcactgactccggaacctggcagcccgcgtactcaggaggtcgtcgtcgggcaagagattttacagactatgggattgcgttcgtttacgccgatggttaccgcctgccccggctgcgggcgtaccaccagtaccgtatttcaagagctggcacaagatgttcaaaattacctgcgccaaaaaatgtctatatggcgtaccctttatcccggggttgaatccctgaacgttgccgtaatgggctgcgttgtcaatgggcccggagaaagcaaattggccgacatcggcatcagcctgcccggtacgggggaaacacccgtcgcgccggtttatgtggacggggagcgcaaagtcacactgaaaggtgataatattgcaactgaattcctagctattgtagaggaatatgtcaaaaccaactatggtgaaaacggctccaaacgcaaccagaacaaaatcatccctatacagtccctataa

SEQ ID NO: 55247 - DNA, 1410 bp, Neisseria meningitidis
atgacctccacattcccccgccgcctcgcccgcaaaatccgccaaacccgccgcctgtcgcgcaaaagcatcgcctttctgttccttttggcaggttcggcactcgtcgccctgaccgcgctgttttttgcccatcttgccgattttgcgctggaactgaacgccaaactggttcaacaatacccgtggttcgcgtgggtcgcgcttcctttgggtttgccgcttattgcgtggctcacacgcaaattcgcccccttcaccgccggcagcggcatcccgcaggtcatcgcctcactgtcgctgccctacggcgcacagaaaacgcggctgatccgcctcgggcagacgctgctgaagattccgctgacctttttgggtatgctgttcggcgcgtccatcggacgcgaaggtccgtccgtgcaggtcggcgcggcagtgatgggcgcgtggggcgcgtggtgcaagaaacacggcttggcattcaaagggatgcaggaaaacgatttgatggcggcgggcgcggcgggcggtttggcagccgcgttcaacgcgccgctggcgggcgtgattttcgccattgaggaactcgggcgcggcatcatgttgcgctgggagaggcaaattcttttgggcgtgctcgcctccggtttcatacaggtcgccattcagggcaacaacccgtatttttccggcttcaacggcggcgtattggaacatatctttctgtgggtcgcactgtccggcctggtttgcggcgcggcgggcgggctgttcggacgtttgctctatcgcggtgcggcggcatttgcaccacgcaagatacgcggcttcatccgcaaccgtccgctgctgctggcggcactgatggggctgctgctcgccctgctcggcacgttctaccaaggcaaaacctacggcaccggctaccacgaagccgcccaagccctgcacggcatctatgaagcccccttcggactcgccgccgccaaatggctcgccaccgtattcagctattgggcaggcgttccgggcggcattttcactccctcgctgaccataggcgcggttttgggcgagcatatcgccgccatcgccgacatatcgcagggtgcaaacatcatcgtcctcatctgcatggcggcatttctggcgggcgcgacacaatccccgattacttccgccgtcgtcgtcatggaaatgacgggcggacaaagcctgctgttttggatgctaattgcctgcattttcgcctcgcaggtttcgcgccagttttcgccgcgtccgttctaccacgcatcgggaatgcgcttccgccagcgcgtgcttcaggaaaccaccgcccaaaccggcaatgcgcccgcaagaccgcaaacagcaaacagcaaaacgggaatgccgtctgaaaattaa

SEQ ID NO: 55248 - DNA, 435 bp, Neisseria meningitidis
atgcccgcctgtttctgcccccactgcaaaacccgtctctgggtcaaagaaacccaactcaatgtcgcccaaggcttcgtcgtctgccaaaaatgcgaaggactgtttaaagccaaagaccatctggcaagcacgaaagaacccatattcaacgatttgcccgaggctgtttcggatgtcaaactcgttcaccgtatcggcacgcgcgccatcggcaagaaacagatttcccgtgacgaaatcgccggcatcctcaacggcggcacaacccagcccgatattccgcccgcaaccgccgccacccctgctgccgcaccgcaggttaccgtaccgcccgccgcgcccgcccgtcaggatgggttcaactggacgattgcaaccctgtttgcccttatcgtcctcattatgcagctttcctacctcgtcatcctatga

SEQ ID NO: 55249 - DNA, 213 bp, Neisseria meningitidis; identical to SEQ ID NO: 36410

SEQ ID NO: 55250 - DNA, 639 bp, Neisseria meningitidis
atgaaaaaaatcaatgttgcccccgaaaatccccaataccgcatcgtcgaaatctttgaaagcctgcaaggcgaaggctggaacacgggcatgcccgccgttttcgttcgcttgggcaaatgcaacctcgcctgcggctggtgtgataccgattatttgacattcggcatgatgagcctgtccgacatcttaggccgtctgaaagcctatgccgcccgcaacatcatcatcaccggcggcgaaccgaccatccagccgcatctcgatatgctgctggacatgctcaaggcggaaggttatttcctctgtatcgaaaccaacggactcaatcccgcgccgccgcaaatcgactatgtcgccaccagccccaaagcctgctacgccgccaaatatgaaaatagctgtatcgaaacagccgacgaagtgcggattgttgccgatggtgatgtccttgcgttctgcgaaaacatggaacgtaaaatccgcgcgcatcattactacctttcgccctgcgaacaagacggtgcgatgaacatctacgacaccatccgccaaatcggtattttaaacagtcgccccgacgcgccggtgcattggcagttgagcgtgcagacgcacaaatgggcgggaatagagtag

SEQ ID NO: 55251 - DNA, 999 bp, Neisseria meningitidis; identical to SEQ ID NO: 42406

SEQ ID NO: 55252 - DNA, 582 bp, Neisseria meningitidis
atgaaacacaccgtatccgcatcggtcatcctgcttttgaccgcttgcgcgcaattacctcaaaataacgaaaacctgtggcagccgtccgaacacatcagcagttttgcagcagaagggcggttggcagtgaaagcggaagggaaaggttcgtatgcaaatttcgattggacataccaaccgcccgtggaaaccatcaatatcaatacccctttgggcagtacgctcgggcagttgtgtcaagacagggacggcgcattggcagtggacggcaaaggaaatgtctatcaggcggaaagtgcggaagaattaagcaggcagctggtcggtttcaaactgccaatccaatatctgcatatctgggcagatggcaggcgtgtggcgggcgcgccttaccgcatcctgccggacggcatattggaacaatacggttggactgtcggcagaaccgccgacagtggggggcaagtccgaacgttgcaactgaataacggaaatttgaacatcaggctggttttcaccgaaatcggtatgccgtctgaaaccgaaaccccggaacgctgtgcggcgcgcacgagataa

SEQ ID NO: 55253 - DNA, 342 bp, Neisseria meningitidis
atgcccaaaatcaccgtacttccacacacgacattatgccccgagggtgcagtcatcgataacgcacccgaaggtaaaaccgtccttgacgtgctgctcgaccatgatatcgaagtcgatcacgcctgcgaaaaatcctgcgcctgcacaacctgccacgtgattatccgcaaaggtttcgacagtctggaagagccgaccgaattggaagaagacctgctcgatcaggcttggggtttggaagccgattcgcgcctgagttgtcaggcggttgtcgccggcgaagatttgattgtggaaatccccaaatacaccatcaaccacgcgcgcgaagaacactga

SEQ ID NO: 55254 - DNA, 2607 bp, Neisseria meningitidis
atggctgccaaccaacgttaccgcaaaccgctacccggtacggatttggaatactacgacgcgcgtgcggcgtgtgaggacatcaaacccggctcttacgacaagctgccttatacaagccgtatcttggctgagaacttggtcaaccgcgcagacaaagtcgacctgccgacgctgcaaagctggctgggccagttgatagaagggaagcaggaaatcgactttccgtggtatcccgcgcgggtggtgtgccacgatattctggggcagaccgcgctggtggatttggcgggcttgcgcgatgcgattgccgaaaaaggcggcgatcctgccaaagtgaatccggtggtgcaaacccagcttatcgtcgaccactctctggcggtggagtgcggcggttacgatcctgatgccttccgcaaaaaccgcgaaatcgaagaccggcgcaacgaagaccgtttccacttcatcaactggacaaaaaccgcatttgaaaatgtggacgtgattccggcgggcaacggcattatgcaccaaatcaatctggaaaaaatgtcgcccgtcgtccaagtcaaaaacggcgtggctttccccgatacctgcgtcggcacggattcgcacacgccacacgtcgatgcgctgggcgtgatttccgtaggcgtgggcggtttggaagccgaaaccgtaatgttaggccgtgcatccatgatgcgtctgcctgatattgtcggcgttgagttgactggcaaacgtcaacctggcattactgccaccgacatcgtgttggcactgaccgaattcttgcgtaaagagcgcgtggttggcgcatttgtcgaattcttcggcgagggcgcaagaagcctgtctatcggcgaccgagccactatttccaacatgacccctgagttcggcgcgactgccgcgatgttcgctattgatgagcaaaccattgattatttgaaactgacaggccgcgacgacgcgcaagtgaaattggtggaaacctacgccaaaaccgcaggcttgtgggcagatgccttgaaaaccgccgtttatcctcgcgtattgaaatttgatttaagcagcgtaacgcgcaacatggcaggcccaagtaacccgcatgcccgttttgcgactgccgatttggccggcaaaggcttggctaaaccttatgaagagccttcagacggccaaatgcctgacggtgcagtgattattgccgcgattacttcctgtaccaatacttccaatccgcgcaacgttgtcgccgccgcgctgttggcacgcaatgccaaccgcctcggcttgcaacgtaaaccttgggtgaaatcttcgtttgccccgggttcaaaagtagccgaaatctatttgaaagaagcaggcctactgcctgaaatggaaaaactcggcttcggtatcgttgccttcgcatgtaccacctgtaacggcatgagcggtgcgctggatccgaaaatccaaaaagaaatcatcgaccgcgatttgtacgccaccgccgtattatcaggcaaccgcaacttcgacggccgtatccacccgtatgcgaaacaggctttcctcgcttcgcctccgttggtcgttgcctacgcgctggcaggcagtatccgtttcgatattgaaaacgacgtactcggcgttgcagacggcaaggaaatccgcctgaaagacatttggcctgccgatgaagaaatcgatgccgtcgttgccgaatatgtgaaaccgcagcagttccgcgatgtgtatgtaccgatgttcgacaccggcacagcgcaaaaagcacccagtccgctgtacgattggcgtccgatgtccacctacatccgccgtccgccttactgggaaggcgcgctggcaggggaacgcacattaagaggtatgcgtccgctggcgattttgcccgacaacatcaccaccgaccacctctcgccgtccaatgcgattttggccgtcagtgccgcaggcgagtatttggcgaaaatgggtttgcctgaagaagacttcaactcttacgcaacccaccgcggcgaccacttgaccgcccaacgcgctaccttcgccaatccgaaactgtttaacgaaatggtgaaaaacgaagacggcagcgtgcgccaaggctcgttcgctcgcgtcgaacccgaaggcgaaaccatgcgcatgtgggaagccatcgaaacctatatgaaccgcaaacagccgctcatcatcattgccggtgcggactacggtcaaggctcaagccgcgactgggctgcaaaaggcgtacgcctcgccggcgtggaagcgattgttgccgaaggcttcgagcgtatccaccgcaccaacttgatcggtatgggcgtgttgccgttgcagttcaaaccgggtaccaaccgccataccctgcaactggacggtacggaaacctacgacgtggtcggcgaacgtacaccgcgctgcgacctgaccctcgtgattcaccgtaaaaacggcgaaaccgttgaagttcccgttacctgccgcctcgataccgcagaggaagtgctggtgtacgaagccggcggcgtgctgcaacggtttgcacaagactttttagaaggtgtggtagcataa

SEQ ID NO: 55255 - DNA, 1071 bp, Neisseria meningitidis
atgaacctgatttcacgttacatcatccgtcaaatggcggttatggcggtttacgcgctccttgccttcctcgctttgtacagcttttttgaaatcctgtacgaaaccggcaacctcggcaaaggcagttacggcatatgggaaatgctgggctacaccgccctcaaaatgcccgcccgcgcctacgaactgatgcccctcgccgtccttatcggcggactgctctctctcagccagcttgccgccggcagcgaactgaccgtcatcaaagccagcggcatgagcaccaaaaagctgctgttgattctgtcgcagttcggttttatttttgctattgccaccgtcgcgctcggcgaatgggttgcgcccacactgagccaaaaagccgaaaacatcaaagccgcggccatcaacggcaaaatcagcaccggcaataccggcctttggctgaaagaaaaaaacagcattatcaatgtgcgcgaaatgttgcccgaccataccctgctgggcattaaaatctgggcccgcaacgataaaaacgaactggcagaggcagtggaagccgattccgccgttttgaacagcgacggcagttggcagttgaaaaacatccgccgcagcacgcttggcgaagacaaagtcgaggtctctattgcggctgaagaaaactggccgatttccgtcaaacgcaacctgatggacgtattgctcgtcaaacccgaccaaatgtccgtcggcgaactgaccacctacatccgccacctccaaaacaacagccaaaacacccgaatctacgccatcgcatggtggcgcaaattggtttaccccgccgcagcctgggtgatggcgctcgtcgcctttgcctttaccccgcaaaccacccgccacggcaatatgggcttaaaactcttcggcggcatctgtctcggattgctgttccaccttgccggacggctcttcgggtttaccagccaactctacggcatcccgcccttcctcgccggcgcactacctaccatagccttcgccttgctcgccgtttggctgatacgcaaacaggaaaaacactaa

SEQ ID NO: 55256 - DNA, 759 bp, Neisseria meningitidis
atgaaaaaagtcagcgtattgattgttgctagaaatgaagcaaaccacattcgggaatgtattgaaagttgccgtttcgataaagaagttatcgttatcgatgaccacagcaccgacaatactgccgaaattgccgagggtttgggcgcaaaagtcttccaacggcatttgaacggggatttcggagcgcaaaaaacatttgccatcgaacaggcaggcggagaatgggttttcctgattgatgcagacgaacgctgcacgccggaactatctgatgaaatctcaaaaattgtccaaaccggcgattatgccgcctattttgtcgaacgccgcaaccttttccccaaccatcccgccacacacggcgcgatgcgtcccgacagcgtatgccgtttgatgccgaagaaaggcagttcggtgcaaggcaaagtacacgaaaccgtacagaccccctaccctaaacgccgtctgaaacattttatgtaccattatacgtacgacaactgggaacaatatttcaacaaattcaacaaatatacttccatttcagccgagaaataccgagagcagggaaagcccgtgcgtttcgttagggacattatcctccgcccaatttgggggtttttcaaaatttatatcctgaacaaagggtttctcgatggaaaaatgggttggattatgtccgtcaaccacagctattacacaatgattaaatatgtcaaactatattatctgtacaaatccggcggaaaattttaa

SEQ ID NO: 55257 - DNA, 1647 bp, Neisseria meningitidis
atgaaacaatccgcccgaataaaaaatatggatcagacattaaaaaatacattgggcatttgcgcgcttttagccttttgttttggcgcggccatcgcatcaggttatcacttggaatatgaatacggctaccgttattctgccgtgggtgctttggcttcggttgtatttttattattattggcacgcggtttcccgcgcgtttcttcagttgttttactgatttacgtcggcacaaccgccctatatttgccggtcggctggctgtatggtgcgccgtcttatcagatagtcggttcgatattggaaagcaatcctgccgaggcgcgtgaatttgtcggcaatcttcccgggtcgctttattttgtgcaggcattatttttcatttttggcttgacagtttggagatattgtgtatcggggggggtatttgctgacgtaaaaaactataaacgccgcagcaaaatatggctgactatattattgactttgattttgtcctgcgcggtgatggataaaatcgccagcgataaagatttgcgagaacctgatgccggcctgttgttgaatattttcgacctgtattacgatttggcttccgcgccggcacaatatgccgccaagcgcgcccacattttggaagcagcaaaaaaagcgtcaacatggcatatccgtcatgttgcgcccaagtataaaaattatgttgtggttatcggtgagagcgcgcgttcggattatatgaatgtttacggtttcccattgcccgatacgccttttttgagtcagaccaaagggctgttgataaacggttaccaatcgaccgcccacgcgacgaatctttcgctgccgcagactttggggctgccgggagaaccgaacaataacatcgtcagcttggcgaagcaggcgggttttcggacggcgtggctgtctaatcaaggaatgttggggcattttgccaacgaaatttccacctatgccctacgcagcgattatccgtggtttacccaaaggggtgattatggcaaaagcgcggggttgagcgaccgccttttgttgccggcgttcaaacgggttttgataggaaatgcaggcacgaagcctcggctgattgtgatgcacctgatgggttcgcacagtgatttttgcacacgtttggataaggatgcgcggcggtttcagtatcaaactgaaaaaatatcctgctatgtttccaccatcgcgcaaaccgataaatttttagaagatacagttaagatattgaatgaaaataaagaaagctggtctttggtttacttttccgaccacggtttgatgcatgtcggtaaaggcggcgagcgaacgttgacacatggtgcgtggaagcgtcaaagctacggcgtgccgctggttaaaatttcgtccgatgacacgcggcgcgaaatgattaaagtgaggcgcagcgcgtttaattttttacgcggattcggcagttggacgggtatcgaaaccgacgagttgcccgatgacggctatgatttttgggggaatgttcccgatgtgccgggcgaaggcaataaccttgcctttatcgacggactgcccgacgaccccgcgccgtggtatgcgggaaaaggcaaatcgactaaaaatacgtctaaaaaatga

SEQ ID NO: 55258 - DNA, 492 bp, Neisseria meningitidis
atgaaataccgtcgtttttaccgcaatggcggcacttacttttttacggttgtagccaataaacggcagaagattttgaccgatgatgcggtgcgtttggctttacggcaggcggtaatggcggtgcgcgaacggtatccgtttgaaattttggcatgggtgttgatgcccgaccatctgcataccatatggcggctgccggacaatgattctgcttattcggaacgctggcggcagatcaagcggcacagcaaatatttaatcggcggcaatctcaggctttggcaaaaacgcttttgggaacatactatccgcgatgaggccgattttgcctgccattttgattatctgcatttcaatccggtcaaacatggctatgtaggacaaatttccgattggcggttttctacgtttcaccgttatgtcaaacagggtatttatccgcataattggggtggcggcaatgcggacttttctattgaatacgattaa

SEQ ID NO: 55259 - DNA, 621 bp, Neisseria meningitidis; identical to SEQ ID NO: 52500

SEQ ID NO: 55260 - DNA, 129 bp, Neisseria meningitidis
atgaacgaacaagaacttgacctcgacaatctcgacaacctgcttgacgattttgacggcgttaccgtcgaaggcggcgtcgattcggaaaacgacgaaggctgcgaaggcggcgcgtgcaaaatctga

SEQ ID NO: 55261 - DNA, 1224 bp, Neisseria meningitidis
atgtcgggcaatgcctcctctccttcatcttccgccgccatcgggctgatttggttcggcgcggcggtctcgattgccgaaatcagcacgggtacgctgcttgcgcctttgggctggcaacgcggtctggcggctctacttttgggtcatgccgtcggcggcgcgctgttttttgcggcggcgtatatcggcgcactgaccggacgcagctcgatggaaagcgtgcgcctgtcgttcggcaaacgcggttcagtgctgttttccgtggcgaatatgctgcaactggccggctggacggcggtgatgatttacgccggcgcaacggtcagctccgctttgggcaaagtgttgtgggacggcgaatcttttgtctggtgggcattggcaaacggcgcgctgattgtgctgtggctggttttcggcgcacgcaaaacaggcgggctgaaaaccgtttcgatgctgctgatgctgttggcggttctgtggctgagtgccgaagtcttttccacggcaggcagcaccgccgcacaggtttcagacggcatgagcttcggaacggcagtcgaattgtccgccgtcatgccgctttcctggctgccgcttgccgccgactacacgcgccacgcgcgccgcccgtttgcggcaaccctgacggcaacgctcgcctacacgctgaccggctgctggatgtatgccttgggtttggcagcggcgttgttcaccggagaaaccgacgtggcaaaaatcctgctgggcgcaggtttgggtgcggcaggcattttggcggtcgtcctctccaccgttaccacaacgtttctcgatgcgtactccgccggcgcgagtgcaaacaatatttccgcgcgttttgcggaaacacccgtcgctgtcggcgttaccctgatcggcacggtgcttgccgtcatgctgcccgttaccgaatatgaaaacttcctgctgcttatcggctcggtatttgcgccgatggcggcggttttgattgccgactttttcgtcttgaaacggcgtgaggagattgaaggctttgactttgccggactggttctgtggctggcgggcttcatcctctaccgcttcctgctctcgtccggctgggaaagcagcatcggtctgaccgcccccgtaatgtctgccgttgccattgccaccgtactggtgcgccttttctttaaaaaaacccaatctttacaaaggaacccgtcatga

SEQ ID NO: 55262 - DNA, 993 bp, Neisseria meningitidis
gtgtatgcttgccttcccttaaaaacaaacacgcaacgcattattatgaatatcctcagtaaaatcagcagctttatcggaaaaacattttccctctgggccgcgctctttgccgccgccgcttttttcgcgcccgacaccttcaaatgggcggggccttatattccttggctgttgggcattattatgttcggtatgggtttgacgctcaaaccttccgacttcgatattttgttcaaacatcccaaagccgtcatcatcggcgtaatcgcacaattcgccattatgccggcaaccgcctggctgctgtccaaactgttgaacctgcctgccgaaatcgcggtcggcgtgattttggtcggctgctgcccgggcggtacggcttccaatgtgatgacctatctggcgcgcggcaatgtggctttgtcggttgccgttacgtctgtttccaccctgatttccccattgctgactcccgccatcttcctgatgcttgccggcgaaatgctggaaatccaagcggccggtatgttgatgtccatcgtcaaaatggttttgctccccattgttttgggtttgattgtccataaggttttgggcagtaaaaccgaaaagctgaccgatgcgctgccgctggtttccgttgccgccatcgtgctgattatcggcgcggttgttggggcaagcaaaggcaagattatggaaagcggcctgctgatttttgcggttgtcgtactccacaacggcatcggctacctgctcggcttctttgccgccaaatggaccggcctgccttatgatgcacaaaaaacgctggccatcgaagtcggtatgcaaaactcgggcctggccgccgcgcttgccgccgcacactttgccgctgcgccggtcgttgccgttccgggcgcattgttcagcgtgtggcacaatatctccggctcgctgctggcaacttattgggcggccaaagccggtaaacataaaaaaccctaa

SEQ ID NO: 55263 - DNA, 747 bp, Neisseria meningitidis
atgatgtccgaacaccgagtcaaccacgaacccgtctttctgttggcttcctcgccatggcgcgaaagcagcctgcgggtcgaagccttcagccgccgttacgggcgtgtggcacttttggcaagaagcgcgcgcaagcggcagagcgaattgcgcggcgtgttggtgccgtttgtgccggtgagtgtgtcttggtatggttcgcaagagttgaagaccctacatcgcgccgaatggataggcgggtggccgcagccgcagggtagggctttgttcagcggtctgtatgtgaacgaactggtgttgaaactgaccgcgcgcgaagatccgatgcccgaactgtacgacgcgttggcaaaagtgatggaggcggtgtgccgtgaagccaaccatattgccgatttgcgccgcttcgagtggaagctgctcaatgccttgggcgttgcccccgatttgcacgccgacggcacgggcggcgatattttggcggacaaaacctaccggctgatgcccgaagaggcggtcatgcccgtatgcgaggacgcagacgcgctttcgcacgaagccggcgcaattgtcgaagggcaaagcctgatcgatttgcgcgaaggcagtttccgcaccgccgaaagcctgcaacaggcattgaaaattacacggctttttatccgccacctgttgcccgaagggctgaaatcgcggcaggtgttggaacagataaggcagtttgaccgcaataccgcgtag

SEQ ID NO: 55264 - DNA, 1116 bp, Neisseria meningitidis
atgcttaaatttaccttacacaaaaaagacggatacgcccgacgcggcacgctggagttgaaccacggcaaaatcgaaacgccggtatttatgcctgtcggtacttacggttcggttaaggcgatgaacccgcaaaacctgcacgacatcaaggcgcaaattattttgggcaacacttatcatttgtggctgcgtccgggcttggaggtcgtcgaacagtttggagggcttcacggctttatcggctgggacaaaccgattttgaccgactcgggcggttttcaggttttttctttgtcggatatgcgcaagctgacggaagaaggctgtacgtttaaaagcccgattaacggcgacaagctgtttttatcgcctgaaatttctatgaaaatccaaacggttttgaactcggacatcgcgatgcagttggacgaatgcacgccgggcgaggcgacgcgcgaacaggcgcgaaaatcgttgcaaatgagcctgcgctgggcggaacggagcaaaaaagcctttgaagatttgaaaaacccgaacgcactgttcggcatcgtgcaaggcgcgatgtatgaagatttgcgcgaagagtcgctgaaaggcttggaagagctcgatttccccggcttggccatcggcggcttgtccgttggcgaacctaagcccgaaatgtaccgcatgttgcgcgccgtcggccctatcctgccggaacacaaacctcattatttaatgggcgtcggtacgcctgaagacttagtgtacggcgtggcacacggcgtggatatgttcgactgcgtcatgcctactcgcaatgcgcgtaacggctggctgtttacccgttttggcgatttgaagatcaaaaacgccaaacacaagctcgacaagcgtccgatagacgaaagctgcacctgctacgcctgccaaaacttcagccgcgcctacctgcaccatctgcaccgcgccggcgaaatcttgggcgcacagctcaacaccatccacaacctgcatttctaccaagtcattatggcggaaatgcgcgatgccatagaacaaggcaaatttgccgactggcaggcgcgattccacgaaaaccgtgctcgcggcacagactga

SEQ ID NO: 55265 - DNA, 336 bp, Neisseria meningitidis; identical to SEQ ID NO: 45775

SEQ ID NO: 55266 - DNA, 1284 bp, Neisseria meningitidis
atgtccaaatcaatcaaactcaacgtaccgggtcaggcaggtttggagctgccggtattggaagccagcatcgggcacgatgtggttgacattcgggggctgacaaaaaatacaggtttgttttccttcgaccccggatttgtttcaaccgcaagctgtgagtctaaaattacttacatcgacggcgatcaaggcttgctttattatcgcggataccccatcgagcagctggccgaaaaatccgattatttggaagtctgctacctgttgatttacggcgaactgccgactcccgagcaaaaggcagaatttgacaataccgtccgccgccacacgatggtgcatgaacagctgacttggttcttccgggggttccgccgcgacgcgcatccgatggcgatgatggtcggcgtggtcggcgcgctgtctgcgttctaccaagacagcttggacattagcaatcccgaacaccgcaaaatcgcgatttaccgcctgatttccaaaatcccgaccattgcggcaatgtgctaccgctattcaaacggtctgccgttcaattatccgaagaataatctttcttattccgaaaacttccttcatatgatgttcgccacgccgtgtgaagactacaaacccaatcccgttttggcacgcgcgctcgaccgcatctttattttgcatgccgaccacgagcaaaacgcctcaacttcaaccgtccgtctggcagggtcttcgggtgcgaacccgtttgcctgtattgctgccggtatcgcctgcctgtggggtgcttcgcacggcggtgcgaacgaagccgtgttgaaaatgttggacgaaatcggcgatgtgtctaatgttgccgcatacatggaaggtgtgaaacaacgcaaataccgtctgatgggcttcggtcaccgcgtgtaccgcaatatggatccgcgtgccagcattatgcgcgaaacctgctatgaagttttgaaggaattgggcttggaagacagtccgaaattcaaactggcgatggaattggaacagattgcgctgaaagacccgttctttatcgaacgcaaactgtatccaaacgtcgatttctattccggcatcgtcctgtccgcgctgggcatcccgaccgaaatgtttaccgtcatcttcgccctgtcgcgcagcgtgggctggatttcgcactggcacgagatgattagcgatccttcgctgaaaatcggccgcccgcgccagctttataccggttcggaacgccgcgattatgtgccgccaggcgagaggtaa

SEQ ID NO: 55267 - DNA, 1098 bp, Neisseria meningitidis; identical to SEQ ID NO: 36189

SEQ ID NO: 55268 - DNA, 1224 bp, Neisseria meningitidis
gtgggacgcagaaaactttggtttgccctggcagcagcaggcgttatcggcggtttggtcggcattgtgctgacggaactgatgcacttcatacagcatacggcatacggttatggcgcggacggtgcgtacatctcgttccgcgaaggtgtggcccgtgcttcggaagggcggcgtttaggcgtattgattctgtgcggtatgttggcaggcggcggctggtggttgctcaaacgtttcggtaagccgcaaatcgaaatcaaagccgccttgaagcagccgttgcaggggctgccgtttctgacgacggttttccatgttctgctgcaaatcataacggtcggactcggttcaccgctcggacgggaagtcgccccgcgtgaaatgactgccgcgttcgcttttgccggcggcaggcggttgggtttggatgaagacgaaatgcggctgctgattgcttgcgcttcgggtgcgggtttggcggccgtgtataacgtgccgctcgcctccacactttttatcctcgaagccatgctgggcgtgtggacgcagcaagccgtcgccgccgcattgctgacttccgtcatcgccaccgccgtcgcgcgcatcggcttaggcgacgtgcagcaatatcatccggctaaccttaccgtcagcacctcattactttggttttccgccgtcatcggcccgatactgggcgcaaccgccgtctttttccagcgcacagcccaaaagtttccctttatcaagcgcgacaatattagaatcattctcttggcagtctgcatgtttgcgctcatcggcgtgatttccgtttggtttcccgaagttttgggcaacggcaaagcaggcaaccaactgacttttagtggtttgaccggttggcaatacgctttggaacttgccgccgtcaaatggccggtcgtcttgatggcgctggcggcaggcgcatacggcggactgattacgccgtcgatgatgcttggcagcaccgtttcttttgctgccgccgccgcgtggaacagtgttttccccgcaatgccgtctgaaagcgcggcagtcgtcggagcggcggtgtttctcggcgtatcgctcaaaatgccgctgaccgccattgtgttcgtattagaactgacctacgcgccgctgtccctgctgctgcctttgtgcatcggcatggcgggggcattgggaacatcgggaaaaatgggcttcaaatga

SEQ ID NO: 55269 - DNA, 282 bp, Neisseria meningitidis
atgccgtctgaagcccgatacggcaaactccggcaaaaacagaaacctgaatctcatcattcccacagtcgggaatccggttttttgggtttccgttgtttttccgtttcaatgaacttccaagccgccgttcccgataaatacccgcaatctaaaatcccgtcattcccacgcagatgggaatctaggtttatccgcacagaaactgatatgccgtcattcccgcgaaagcgggaatccagaccgttcggcttcagttttttggtttcgggcaacttctga

SEQ ID NO: 55270 - DNA, 141 bp, Neisseria meningitidis
atgagcaccttctttcaacaaaccgcccaagccatgattgccaaacacatcgaccgcttcccactattgaagttggaccaggtgattgattggcagccgatcgaacagtacctgaatcgtcaaagaacccatttaccttag

SEQ ID NO: 55271 - DNA, 1554 bp, Neisseria meningitidis
atgaaccggacttatgccaatttctacgaaatgctcgccgccgcctgccgcaaaaacggcaacggcacggcagtgttcgacggcaaggaaaaaaccgcctaccgcgcgctcaagcaggaggccgaagccgtcgcggcgtatctgcaaaatatcggcgtgaagttcggcgacacggtcgcgctggcggtttccaattccacagaatttattaccgcctatttcgccgtctccgccatcggcgcggtcgccgtaccgatgaacacatttttgaaaaacagcgaatacgcgtatatcctgaacgactgcaaggcgcgcttcctgttcgcctcggcgggcctgtcaaaagagttggcgggcttgaaggcgcaaacgcccgtcgaaaaaatcatttggacggacaaaagccgtccggccggcgaaatggcggaaggcgatgccttttttgaagacgtgcgccgcttccccgaaaaacccgacttgggccgccaaccccggataaatgatttggcacacatcatctacacctccggcacgacggggcatcccaaaggcgcgctaatcagttacgccaacctgttcgccaacctgaacggcatcgaacgcatctttaaaatctccaagcgcgaccgctttatcgttttcctgccgatgttccacagcttcacgctgacggctatggtgctgctgccgatttatatggcgtgttcgattattttggtcaaatccgttttcccgttttccaacgttttgaaacaggccctgctcaaacgcgcgaccgtgtttttgggcatacccgcgatttacaccgcaatgagcaaggcgaaaatcccttggtatttcagatggttcaaccgcattcgcctgtttatcagcggcggtgcgcctttggcggaacaaaccatcctcgatttcaaagccaagttcccccgcgccaaattgctggaaggctacggactgagcgaagcctctcccgtcgtcgccgtcaatacgcccgagaggcaaaaagcccgcagcgtcggcatccccctgcccggtttggaagccaaagccgtcgatgaagaattggtcgaagtgccgcgcggcgaagtgggcgaactgatcgtcaggggcggttcggtgatgcggggctacctcaatatgcctgccgccaccgatgaaaccatcgtcaacggctggttgaaaacgggcgatttcgttaccatagacgaagacggctttatctttatcgtcgaccgcaaaaaagatttgattatttccaaaggtcaaaacgtctatccgcgcgaaatcgaagaagaaatctacaaactcgatgccgtcgaagccgccgccgtcatcggcgtgaaagaccgttatgccgacgaggaaatcgtcgccttcgtccaattgaaggaaggtatggatttgggcgagaacgaaatccgccgccacctgcgtaccgtgctggcaaatttcaaaatccccaaacaaatccactttaaagacgggctgccgcgcaacgctacgggcaaggtattgaaacgggtgttgaaggagcagtttgacggaaacaaatga

SEQ ID NO: 55272 - DNA, 1746 bp, Neisseria meningitidis
atgttgattaagagtgaatataagccccggatgctgcccaaagaagagcaggtcaaaaagccgatgaccagtaacggacggatcagcttcgtcctgatggcaatagcggtcttgtttgccggtctgattgcccgcggactgtatctgcagacggtaacgtataactttttgaaagaacagggcgacaaccggattgtgcggactcaaacattgccggctacacgcggtacggtttcggaccggaacggtgcggttttggcgttgagtgcgccgacggagtccctgtttgccgtgcctaaagagatgaaggaaatgccgtctgccgcacaattggaacgcctgtccgagcttgtcgatgtgccggttgatgttttgaggaacaagctcgaacagaaaggcaagtcgtttatctggattaagcggcagctcgatcccaaggttgccgaagaggtcaaagccttgggtttggaaaactttgtatttgaaaaagaattaaaacgccattacccgatgggcaacctgtttgcacacgtcatcggatttaccgatattgacggcaaaggtcaggaaggtttggaactttcgcttgaagacagcctgcatggcgaagacggcgcggaagtcgttttgcgggaccggcagggcaatattgtggacagcttggactccccgcgcaataaagccccgaaaaacggcaaagacatcatcctttccctcgatcagaggattcagaccttggcctatgaagagttgaacaaggcggtcgaataccatcaggcaaaagccggaacggtggtggttttggatgcccgcacgggggaaatcctcgccttggccaatacgcccgcctacgatcccaacaggcccggccgggcagacagcgaacagcggcgcaaccgtgccgtaaccgatatgatcgaacccggttcggcaatcaaaccgtttgtgattgcgaaagcattggatgcgggcaaaaccgatttgaacgaacggctgaatacgcagccttataaaatcggaccgtctcccgtgcgcgatacccatgtttacccctctttggatgtgcgcggcatcatgcagaaatcgtccaacgtcggcacaagcaaactgtctgcgcgtttcggtgccgaagaaatgtatgacttctatcatgagttgggcatcggtgtgcgtatgcactcgggctttccgggcgaaactgcaggtttgttgagaaattggcgcaggtggcggcccatcgaacaggcgacgatgtctttcggttacggcctgcaattgagcctgctgcaattggcgcgcgcctataccgcactgacgcacgacggcgttttgctgccggtcagctttgaaaaacaggcggttgcgccgcaaggcaaacgcatattcaaagaatcgaccgcgcgcgaggtacgcaatctgatggtttccgtgaccgagccgggcggcaccggtacggcgggtgcggtggacggtttcgatgtcggcgcgaaaaccggcacggcgcgcaagttcgtcaacgggcgttatgccgacaacaaacacatcgctacctttatcggttttgcccccgccaaaaacccccgtgtgattgtggcggtaaccattgacgaaccgactgcccacggttattacggcggcgtagtggcagggccgcccttcaaaaaaattatgggcggcagcctgaacatcttgggcatttccccgaccaagccactgaccgccgcagccgtcaaaacaccgtcttaa

SEQ ID NO: 55273 - DNA, 962 bp, Neisseria meningitidis
atgaaaattttgcttgtccgcttgtctagtatgggcgatttaattcacactttgcccgcaatcgaagatttggcgcgacaatgtcctgatgtagaactgcattggctatgtgaggctggatttgcagatattgcgcgcctgcatccgtttgtaaaaaaaatccatgtgatgaaatggcggcaatggcgcaaacatctctttcgggctgaaacttggcgggaaatgggtcatctgaaacagactttgcggcaggaagtatttgatttcgtattggacagtcaaggtctgattaaaagcgcgtgtttcgctaaaatggcgaaatcccctatttatggtttggataaaaacagtgcgcgcgagggatgggctgctttggcgtatgtaaaaacatacgctgtaccgaagggaaaaaatgccgtttggcgcaaccgtgaactgtttgcccaagtatttgggtatgtaatgccggaaacgcaggtatttggcttgactgttcctgaagcaggccgtctgaaaaatttagcgcagccgtattatgcggctttgcatgcgaccagtcgggacagtaagttatggcctgtggaaaactggcggtcgttgctgcaaaagttgaatgaagaacagcaatgcaatatttacctgccttggggaaatgaagatgaaaaaacgcgtgccaaacaaattgcagacggactgccgtttgctattgtgtgcgacaaaataaatttattgcaggcagcgtatctgctgaaatacgcggtcggaattgtcggcgtggataccggtttgctgcatttggcaaatgccttggaaaaacctgtggtcggcatttataccgataccgatccgattaaaacaggcgttcaggtttcgccaattgcaaaaaatttgggcaatatcgggcagattccgaccgcagatttggtttatcaagcgctgatggattgtgttgcagcagacaa

SEQ ID NO: 55274 - DNA, 1143 bp, Neisseria meningitidis
atgaatactttatatacacttttcgccacctgcccgcgcggcttggagaccgttttatctcaagaactcgaaagcctcggctgtaccgatgtacaagtgtttgacggcggcgtttcctgccggggcggattggaacaggtttacgccgccaacctgcattcgcgtactgccagccgtatcctgctgcgcctgaccaaagggacataccgcaatgagcgcgacatctacaaactcgccaaaaatatcaactggtttaattggtttactttacagcagacgttcaaagtcaaagtcgaggcaaagcgtgccaacgttaagagcatccaatttgttggtttgaccgtcaaagatgccgtctgcgacgctttccgcgacatttacgacgcacgtccgagcgtggacaaagccgcgcccgatgttcgcatccacgcctttttggacgaacgcaatgtcgaaatcttcatcgacacttcgggcgaagccctgttcaaacgcggctaccgtctcgataccggcgaagccccgctgcgcgaaaaccttgccgccggattgctgctctcggcaggctacgacggcacgcagccgtttcaagacccgttttgcggcagcggcacgattgctatcgaagccgcttggattgccgcccgccgcgcgccgggcatgatgcgccgcttcggttttgaaaaactgcaaaatttcgataaaacgctgtgggcggatttgcgccgccgcgccgaagcgcaggtcaaccccgcttttgcaccgatttcgggcagcgacaacgaccgccgcatcattcagacggcattggccaacgcacgcagtgccggggtggacgacatcgtttccttcagcgttgccgacgcgcaatccgtccgtccgaacggcgtgggcggcattatggtgtccaatccgccctacggcgtgcgccttgaggaagtccgcgccttgcaggcgctttatccgcagttggggacgtggttgaagaaatattacgcaggctggttggcggcaatgtttaccggagatcgggaaatgcccaaattcatgcgcctgtcgccaaaacgcaaaattccgctttataacggcaacctcgattgccgcctgttcctgattgatatggtgcagggatcgaaccgttga

SEQ ID NO: 55275 - DNA, 2580 bp, Neisseria meningitidis
atgcgatacgacaaattaaccgccaaattccaacaagcccttgcagaagctcagagtttggcgttggctgcggacggcagctatctggaagcgggctttgtgttaaaagccctgcttgacgaccaaaacagcggagccgccgcgctcttggctcatgcgggcgtgaacgtgccgcaggtgaaacagcgtttgcagcagcatttaaacagcctgccgaaagtatccggacagggcggcgacattatgcccagccgcgaattgcaggcggtgttgaacctgatggacaaagcagcaaccaaacgcggcgatgcctatatcgccagcgaacttttcctgctcgccttggtgcagcagaacgatgcaaccggcaaaattttgaaagaagccggcgcgaccgaacaaaacattaatgccgcaatcgatgcggtacgaggaggacaaaacgtgaacgatgccaatgccgaagaccaacgcgatgcgctgaaaaaatatacgctcgatttgacccaacgcgcccgcgacggtaagctcgaccccgttatcggtcgtgacgacgaaatccgccgtgcaattcaggtattgcaacgccgcaccaaaaacaaccccgtgctgattggcgaaccgggcgtgggtaaaactgccattgtcgaaggcttggcgcaacgcatcgtcaacggcgaagtacccgaatccctgcgcaacaaacgccttttggttctggacttggcggcattgattgccggcgcgaaataccgtggcgaatttgaagaacgcttgaaaggcgtgttgaacgatttggcgaaagacgacggcaacactctgattttcattgatgaaatccatactttggtcggcgcgggcaaaaccgacggcgcgatggacgcgggcaatatgctgaaaccggccttggcgcggggcgaactgcactgtatcggcgcgaccaccttggacgaataccgccaatacatcgaaaaagacgcggcactcgaacgccgcttccaaaaagtattggtcggcgagcccagcgtggaagacaccatcgccatcttgcgcggtttgcaggagcgttatgaaatccaccacggtatcgatattaccgaccctgctatcgttgccgcagcggagttgagcgaccgctacatcaccgaccgcttcctgcccgacaaagcgattgatttgattgatgaagccgccagccgtgtcaagatggaaaaagaaaccaagccggaagcaatggacaaaatcgaccgccgtctgattcagcttcggatggaaaaggcacacgttgaaaaagaaaaagacgatgccagcaaaaaacgtttggaactgatagacgaggaaatcaacggtctgcaaaaagaatacgccgatttagacgaaatctggaaagccgaaaaagcaatttcagacggtgctgctaatattaagaaacaaattgacgaagtcaaaattaaaatcgaacaggcaaaacggcaaggcgatttggcactggcttcaaaattgatgtatgaagatttggagcatttggaaaaacagcgtgcagccgccgaacgggcagatacggacagcacaaaaccggcaaacaaactcttgcgtaataatgtcggcgcggaggaaatcgcagaagttgtttcccgtatgaccggtattcccgtgtccaaaatgatggaaggcgaacgcgacaaactgctgaagatggaagaagtattgcaccgccgcgtggtcggtcaagatgaagccgtgcgtgccgtgtccgacgctatccgccgcagccgttccggtcttgccgatccgaacaaaccttacggcagcttcctgttcttaggcccgaccggcgtgggtaagaccgaattgtgtaaggcattggcaggcttcctgtttgacagtgaagatcatctgattcgtatcgatatgtccgaatatatggaaaaacacgccgttgcccgcttaatcggcgcgcctccgggctatgtcggctacgaagaaggcggctacctgactgagcaagtccgccgcaaaccgtacagcgtgattcttttggacgaagtggaaaaagcccatcccgacgtgttcaatatcctgctgcaagttttggatgacggtcgtttgaccgacggacaaggcaggacggtagattttaaaaacaccgtgattgtgatgacttccaacattggcagccagcacatccaacaaatgggcacgcaggactacgaagccgtgaaagaagttgtgatggaggatgtgaaagagcatttccgtcctgaaatgatcaaccgcatcgacgaagtggtcgtgttccacggactggatcaggataatatccgcaacattgcgaaaatccagctcaaaggcttggaaaaacgtttggaaaaacaaaacctccgcctgactgtttccgatgccgctctggacatcatcgccaaagccggtttcgacccgatttacggcgcacgtccgctcaaacgcgccatccagtcggaaatcgaaaacccgctggcaaaagccctgcttgccggaaactatgcgcccgaaagcgaaatcagggtagaagccgacggcgacagactgaaatttgcctga

SEQ ID NO: 55276 - DNA, 300 bp, Neisseria meningitidis
atgaaaatatttgaaaatatagaagatgttaaagccatccgtaaaaagaccgggctgaaccagatagacttctggggcaaggtcggcgttacccagtctggaggctcgcgctacgaaaccggccgcaaaatgcccaaacccgtacgcgaactgctccgcctcgtccatatcgaatgcatcgatttggcgaaagtcaacaaaaaagatatggaaatcgccgccctgttgaaaaaacaccatcccgacctgtatgccgaattgtccaaacagaccaagtccgaaagaaaaaaacaaagttaa

SEQ ID NO: 55277 - DNA, 891 bp, Neisseria meningitidis
atgaatcctaaatcccctttatttttacgactgtccgaccgtttggatgtgtacctgcgcctgatgcgggcggacaagcccattgggacgctgcttttgctgtggccgacctactgggcgttgtggctggcttcagacggtattcccgatttggcggtattggcggcgtttacaatcggcacgtttttaatgcgcagtgccggctgcgtcatcaacgattttgccgaccgcgattttgacggggctgtcgagcgcactaaaaaccgtccgttcgcacagggcagggtcaagaaaaaagaagcgctgctgctgacggcatttttgtgcctgcttgccgcattgtgcctgattccgctgaatcatctgacatggctgatgagtctgcccgcgctgtttcttgcgctgacttacccatttaccaaacgcttttttccgattccccaactctatctcgggcttgccttttccttcggtatcccgatggcgtttgccgccgttgccggaaacgtgccgcctcaagcgtggatactctttgccgccaatgtgttatggactctggcgtatgacacggtttatgcaatggcggacaaagaagacgatttgaaaatcggcatcaaaacctccgccgtcacgttcgggcgttacgacatcgccgccgttatgctgtgtcacggaggctttaccctgctgatggcagtattgggtgcggttatcggtgcggcatgggcatattggacggcaatccccatcgtcctgctgctgcaataccgccaatatgccgccatcaaaagccgcgtccggcaaatctgttttgaaacgtttttggcaaacaacagaattggttgggtgtggtttaccgccatttttgcccatacgtttttcgcgaaataa

SEQ ID NO: 55278 - DNA, 270 bp, Neisseria meningitidis; identical to SEQ ID NO: 37545

SEQ ID NO: 55279 - DNA, 2286 bp, Neisseria meningitidis
atgaataccaaactgacaaaaatcatttccggtctctttgtcgcaaccgccgcctttcagacagcatcggcaggaaacattacagacatcaaagtttcctccctgcccaacaaacagaaaatcgtcaaagtcagctttgacaaagagattgtcaacccgaccggcttcgtaacctcctcaccggcccgcatcgccttggactttgaacaaaccggcatttccatggatcaacaggtactcgaatatgccgatcccctgttgagcaaaatcagtgccgcacaaaacagcagccgtgcgcgtctggttctgaatctgaacaaaccgggccaatacaataccgaagtacgcgggaacaaagtttggatattcattaacgaatcggacgataccgtgtccgcccccgcacgccccgccgtaaaagccgcgcctgccgcaccggcaaaacaacaggctaccgcaccgtctaccaagtccgcagtatccgtatccaaaccctttaccccggcaaaacaacaggctgccgcaccgtttaccgagtccgtagtatccgtatccgcaccgttcagcccggcaaaacaacaggcggcggcatcagcaaaacaacagacggcagcaccagcaaaacaacaggcggcagcaccagcaaaacaaaccaatatcgatttccgcaaagacggcaaaaatgccggcattatcgaattggctgcattgggctttgccgggcagcccgacatcagccaacagcacgaccacatcatcgttacgctgaaaaaccataccctgccgaccacgctccaacgcagtttggatgtggcagactttaaaacaccggttcaaaaggttacgctgaaacgcctcaataacgacacccagctgattatcacaacagccggcaactgggaactcgtcaacaaatccgccgcgcccggatactttaccttccaagtcctgccgaaaaaacaaaacctcgagtcaggcggcgtgaacaatgcgcccaaaaccttcacaggccggaaaatctcccttgacttccaagatgtcgaaatccgcaccatcctgcagattttggcaaaagaatccgggatgaacattgttgccagcgactccgtcaacggcaaaatgaccctctccctcaaagacgtaccttgggatcaggctttggatttggttatgcaggcacgcaacctcgatatgcgccagcaagggaacatcgtcaacatcgcgccccgcgacgagctgcttgccaaagacaaagccttcttacaggcggaaaaagacattgccgatctgggcgcgctgtattcacaaaacttccaattgaaatacaaaaatgtggaagaattccgcagcatcctgcgtttggacaatgccgacacgaccggaaaccgcaatacgcttgtcagcggcaggggcagcgtgctgatcgatcccgccaccaataccctgattgttaccgatacccgcagcgtcatcgaaaaattccgcaaactgattgacgaattggacgtacccgcgcaacaagtgatgattgaggcgcgtatcgtcgaagcggcagacggcttctcgcgcgatttgggcgttaaattcggcgcgacaggcaagaaaaagctgaaaaatgatacaagcgcattcggctggggggtaaactccggcttcggcggcgacgataaatgggaggccgaaaccaaaatcaacctgccgattaccgctgccgcaaacagcatttcgctggtgcgcgcgatttcctccggtgccttgaatttggaattgtccgcatccgaatcgctttcaaaaaccaaaacgcttgccaatccgcgcgtgctgacccaaaaccgcaaagaggccaaaatcgaatctggttacgaaattcctttcaccgtaacctcaatcgcgaacggcggcagcagcacgaacacggaactcaaaaaagccgtcttggggctgaccgttacgccgaacatcacgcccgacggccaaatcattatgaccgtcaaaatcaacaaggactcgcctgcgcaatgtgcctccggtaatcagacgattctgtgtatttcgaccaaaaacctgaatacgcaggctatggttgaaaacggcggcacattgattgtcggcggtatttatgaagaagacaacggtaatacgctgaccaaagtccccctgttgggcgacatccccgttatcggcaacctctttaaaacacgcgggaaaaaaaccgaccgccgcgaactgctgattttcattaccccgaggattatgggtacggccggcaacagcctgcgctattga

SEQ ID NO: 55280 - DNA, 744 bp, Neisseria meningitidis
atgctcatcatccgcaacctgatttactggctgatactctgttccaccctgattttcctctttccctttatgctgctcgcctcgcctttccgggacggggcgcacaagatggcgcgggtctgggtcaaaatcctcaacctctcgctcaaacacatcgtcgggctcaaataccgcatcatcggcgcggaaaacatccccgaccgccccgccgtcatctgcgccaaacaccaaagcggctgggaaacgcttgcccttcaggacatttttccgccgcaggtttacgttgccaaacgcgagctgttcaaaatcccctttttcggctggggtttaaaactggtcaaaaccataggcatagaccgcaacaaccgccgcgaagccaacgaacagctcataaaacaggggttggcgcgcaaaaacgaaggctattggattaccattttccccgaaggcacgcgccttgcgcccggaaaacgcggcaaatacaaactcggcggcgcgcgcatggcgaaaatgtttgagatggacatcgtccccgtcgccctcaacagcggcgaattttggccgaaaaactcctttctgaaatatccgggggaaatcaccgtcgtcatctgtccgaccatcccgcacgcaagcggcagcgaagccgaattgatggaaaaatgcgaacacctcatcgaaacgcagcagccgctcatttccggcgcaggcccgtttgccgccaaaatgccgtctgaaaccgtatga

SEQ ID NO: 55281 - DNA, 999 bp, Neisseria meningitidis
atgaagattgcgatttacggtacgaaaagctatgaccgcgaacattttacccgcgccaaccggcatttcggcttcgagctggagttttttgattttatgctggatgcgaaaacggcgaaaatggcggaaggcgcggaagcggtctgtatttttgtaaacgacgacggcagccggcccgtgttggaaaaattggcgcaaattggcgtgaaaactgtggcgttgcgttgtgccggcttcaataatgtggatttaaaggcggctgaagagttgggcttgaaagtcgtgcgcgtgcctgcctattcgcccgaatcggttgcggaacatacggtcggtctgatgctgacgttgaaccgccgtatccacaaagcctatcagcgtacccgcgatgcgaatttttcgctggaaggtctgaccggtttcaatatgtacggcaaaacggcgggcgttatcggcacggggaaaatcggtattgcaaccatgcggattttaaagggtttcggcatgaacctgctggcttacgatccgttttgcaaccccgaagcggaaaaaatcggcggcaggtatgtggagttgaacgagctgtatgcccggtcggacatcatcacgctgcattgcccctccacgccggaaaaccactatatgctgaacgaagcggcgttcgacaaaatgaaagacggcgtgatgattatcaacaccagccgtggcggtctgattgacagttctgccgcgattgaggcgttgaaacgccggaaaatcggcgcattgggtatggacgtgtacgagaacgaacgcgaattgttttttgaagacaaatccaacgatgtgattaccgacgacgtgttccgccgcctgtcgtcttgtcataatgtgctgtttaccggccatcaggcatttttgacggaagaggcgttgggtaatatttcggaagttacgctgtccaatatccgcgaggtcggacagaccggcgattgcggcaatgcggttcgtgccgacggttga

SEQ ID NO: 55282 - DNA, 1497 bp, Neisseria meningitidis
gtgcgcaaattttcttttcttccttctgtgctcatgaaagaaacagcttttaaaactgggatgtgtttaggttccaataatttgagcaggctacaaaaagccgcgcaacagatactgatcgtgcgtggctacctcacttcccaagctattatccaaccacagaatatggattcgggaattctgaaattacgggtatcagcaggcgaaataggggatatccgctatgaagaaaaacgggatgggaagtctgccgaaggcagtattagtgcattcaataacaaatttcccttatataggaacaaaattctcaatcttcgcgatgtagagcagggcttggaaaacctgcgtcgtttgtcgagtgttaaaacagatattcagattataccgtccgaagaagaaggcaaaagcgatttacagatcaaatggcagcagaataaacccatacggttcagtatcggtatagatgatgcgggcggcaaaacgaccggcaaatatcaaggaaatgtcgctttatcgttcgataaccctttgggcttaagcgatttgttttatgtttcatatggacgcggtttggcgcacaaaacggacttgactgatgccaccggtacggaaactgcaagcggatccagaagttacagcgtgcattattcggtgcccgtaaaaaaatggctgttttcttttaatcacaatggacatcgttaccacgaagcaaccgaaggctattccgtcaattacgattacaacggcaaacaatatcagagcagcttggccgccgagcgcatgctttggcgtaacagacttcataaaacttcagtcggaatgaaattatggacacgccaaacctataaatacatcgacgatgccgaaatcgaagtgcaacgccgccgctctgcaggctgggaagccgaattgcgccaccgtgcttacctcaaccgttggcagcttgacggcaagttgtcttacaaacgcgggaccggtatgcgccaaagtatgcccgcacctgaagaaaacggcggcggtactattccaggcacatcccgtatgaaaatcataaccgccggattggatgcagcggccccgtttatgttgggcaaacagcagtttttctacgcaaccgccattcaagctcaatggaacaaaacgccgttggttgcccaagataaattgtcaatcggcagccgctacaccgttcgcggatttgatggggagcagagtcttttcggagagcgaggtttctactggcagaatactttaacttggtattttcatccgaaccatcagttctatctcggtgcggactatggccgcgtatctggcgaaagtgcacaatatgtatcgggcaagcagctgatgggtgcagtggtcggcttcagaggagggcataaagtaggcggtatgtttgcttatgatctgtttgccggcaagccgcttcataaacccaaaggctttcagacgaccaacaccgtttacggcttcaacttgaattacagtttctaa

SEQ ID NO: 55283 - DNA, 2229 bp, Neisseria meningitidis
atgcgttctgctgttttatttatatatttctttctacttaatatattccttttccagccagccgttatccacatccaatctaactatattttatttatgtctatcgtatccgcaccgctccccgccctttccgccctcatcatcctcgcccattaccacggcattgccgccaatcctgccgatatacagcatgaattttgtacttccgcacagagcgatttaaatgaaacgcaatggctgttagccgccaaatctttgggattgaaggcaaaggtagtccgccagcctattaaacgtttggctatggcgactttacccgcattggtatggtgtgatgacggcaaccattttattttggccaaaacagacggtgagggtgagcatgcccaatttttgatacaggatttggttacgaataagtctgcggtattgtcttttgccgaattttctaacagatattcgggcaaactgatattggttgcttcccgcgcttcggtattgggcagtttggcaaagtttgactttacctggtttattccggcggtaatcaaataccgccggttgttttttgaagtattggtggtgtcggtggtgttgcagctgtttgcgctgattacgcctctgtttttccaagtggtgatggacaaggtgctggtacatcggggattctctactttggatgtggtgtcggtggctttgttggtggtgtcgctgtttgagattgtgttgggcggtttgcggacgtatctgtttgcacatacgacttcacgtattgatgtggaattgggcgcgcgtttgttccggcatctgctttccctgcctttatcctatttcgagcacagacgagtgggtgatacggtggctcgggtgcgggaattggagcagattcgcaatttcctgaccggtcaggcgctgacttcggtgttggatttggcgttttcgtttatctttctggcggtgatgtggtattacagctccactctgacttgggtggtattggcttcgttgcctgcctatgcgttttggtcggcatttatcagtccgatactgcggacgcgtctgaacgataagttcgcgcgcaatgcagacaaccagtcgtttttagtagaaagcatcactgcggtgggtacggtaaaggcgatggcggtggagccgcagatgacgcagcgttgggacaatcagttggcggcttatgtggcttcgggatttcgggtaacgaagttggcggtggtcggccagcagggggtgcagctgattcagaagctggtgacggtggcgacgttgtggattggcgcacggctggtaattgagggcaagctgacggtggggcagctgattgcgtttaatatgctctcgggacaggtggcggcgcctgttatccgtttggcgcagttgtggcaggatttccagcaggtggggatttcggtggcgcgtttgggggatattctgaatgcgccgaccgagaatgcgtcttcgcatttggctttgcccgatatccggggggagattacgttcgaacatgtcgatttccgctataaggcggacggcaggctgattttgcaggatttgaacctgcggattcgggcgggggaagtgctggggattgtgggacgttcggggtcgggcaaatccacactcaccaaattggtgcagcgtctgtatgtaccggagcagggacgggtgttggtggacggcaacgatttggctttggccgctcctgcctggctgcggcggcaggtcggcgtggtcttgcaggagaatgtgctgctcaaccgcagcatacgcgacaatatcgcgctgacggatacgggtatgccgctggaacgcattatcgaagcagccaaactggcgggcgcacacgagtttattatggagctgccggaaggctacggcaccgtggtgggcgaacaaggggccggcttgtcgggcggacagcggcagcgtattgcgattgcccgcgcgttaatcaccaatccgcgcattctgatttttgatgaagccaccagcgcgctggattatgaaagtgaacgagcgattatgcagaacatgcaggccatttgcgccaaccggacggtgctgattatcgcccaccgtctgtccaccgttaaaacggcacaccggatcattgccatggataaaggcaggattgtggaagcgggaacacagcaggaattgctggcgaagccgaacggatattaccgctatctgtatgatttacagaacgggtag

SEQ ID NO: 55284 - DNA, 591 bp, Neisseria meningitidis; identical to SEQ ID NO: 37807

SEQ ID NO: 55285 - DNA, 339 bp, Neisseria meningitidis; identical to SEQ ID NO: 36369

SEQ ID NO: 55286 - DNA, 1464 bp, Neisseria meningitidis
atgcgtatcgtagaaaaagcctatactttcgacgatgttttgttggttcccgcacattcgaccgtgctgccgcgagacgttaaacttcaaaccaagctcacccgcgaaatcacactcaacctccccctgctttccgctgcgatggacactgttaccgaggcgcgcctcgccatttcgatggcacaggaaggcggcatcggcatcatccataaaaacatgccgcccgaaatgcaggcgcgcgccgtttccaaagtgaaacgccacgaaagcggcgtggtcaaagaccctgtaaccgttgcaccgacgacgctcatccgcgaagtcttggaaatgcgtgcgcagcgcaaacgcaaaatgtccggcctgcccgtcgttgaaaacggcaaagtcgtcggcatcgtaaccaaccgcgacctgcgttttgaaaaccgcgtcgatttgcccgtttccgccattatgaccccgcgcgaacgtttggttaccgtccccgaaggcacaagcatagacgaagcgcgcgaactgatgcacacgcacaaagtcgagcgcgttttggttctgaacgaaaaagacgaactcaaaggtctgattaccgttaaagatattttaaaaaccaccgagtttcccaacgccaacaaagactccgaaggccgtctgcgcgtcggtgcggcagtcggcaccggcggcgataccgaagagcgcgtcaaagccttggtcgaagccggcgtggacgtgattgtcgtcgatactgcccacgggcacagccaaggcgtgattgaccgcgtgaaatgggtgaaagaaacctatccgcacatccaagtcatcggcggcaacatcgccactgccaaagccgcattggatttggtcgccgccggtgcggatgccgtcaaagtcggtatcggcccgggatcgatttgcaccacccgtatcgtggcaggcgtgggcgtgccgcaactgaccgccatccacaacgttgccgaagccctcaaaggcacaggcgttcccctgattgccgacggcggcatccgcttctccggcgacatcgccaaagccctcgccgcaggcgcgtacagcgtcatgctcggcggtatgtttgccggcacggaagaagcgccgggcgaaatcgaactctatcaaggccgctcgtacaaatcctatcgcggtatgggttcattgggcgcgatgagccaaggttctgccgaccgctacttccaagacaaaaccgacagcaccgacaaatacgtccccgaaggcatcgaaggccgcgttccttacaaaggcccgattgtgaacatcatccaccagctgaccggcggtctgcgttccagtatgggttacttgggttgcgccaatattgccgaaatgcacgaaaaagccgaatttgtggaaatcacttccgcaggtatgagcgaatcgcacgttcacgacgttcaaatcactaaagaagcaccgaactaccaccgctga

SEQ ID NO: 55287 - DNA, 1170 bp, Neisseria meningitidis
atgccgcaaattaaaatccccgccgtttactaccgcggcggtacatctaaaggcattttcttcaaacgcaccgacctgcccgaagcggcgcaacaagcaggcgaggcacgcgacaaaatcctgttgcgcgtactcggcagcccggatccctacggcaagcagatagacggtttgggcaacgccagttcgtccaccagcaaagccgtgattttggacaagtccgaacgcgccgatcacgatgtcgattaccttttcgggcaagtttccatcgacaaaccttttgtcgattggagcggcaactgcggcaacctcaccgctgccgtgggcgcattctccatcgaacagggcttggtcgataaaggcaagattccttcagacggcatctgcacggtcaaaatctggcagaaaaacatcggcaaaaccattattgcccatgtaccgatgcaaaacggcgcagttttggaaacaggcgattttgagctcgacggcgtaacgttcccggcagccgaagtacaaatcgaatttcttgatccagccgacggcgaaggcagtatgttcccaaccggcaatttggtcgatgaaattgatgtgccgaatataggccgtttgaaagccacgctcatcaacgcgggcattccgaccgttttcttgaatgccgccgacttgggctacacaggcaaagagttgcaagacgacatcaacaacgatgccgcggctttggaaaaattcgagaaaatccgcgcttacggtgcgctgaaaatgggtctgatcagcgacgtatccgaagctgccgctcgcgcgcacacgccgaaagtcgccttcgtcgcgcccgccgccgattacaccgcctccagtggcaaaaccgtgaacgccgccgacatcgatttgctggtacgcgccctgagcatgggcaaactgcaccacgcgatgatgggtaccgcctctgttgccattgcgaccgccgccgccgtacccggtacgctggtcaaccttgccgcaggcggcggaacgcgtaaagaagtgcgcttcgggcatccttccggcacattgcgcgtcggtgcagccgccgaatgtcaggacggacaatggacggccaccaaagcggtcatgagccgtagcgcacgcgtgatgatggaaggttgggtcagggtgcctgaggattgtttttaa

SEQ ID NO: 55288 - DNA, 852 bp, Neisseria meningitidis
atgcacatcctgttgaccgccctgctcaaatgcctctccctgctgccactttcctgtctgcacacgctgggaaaccggctcggacatctggcgttttaccttttaaaggaagaccgcgcgcgcatcgtcgccaatatgcgtcaggcaggcatgaatcccgaccccaaaacagtcaaagccgtttttgcggaaacggcaaaaggcggtttggaacttgcccccgcgtttttcagaaaaccggaagacatagaaacaatgttcaaagcggtacacggctgggaacatgtgcagcaggctttggacaaacacgaagggctgctattcatcacgccgcacatcggcagctacgatttgggcggacgctacatcagccagcagcttccgttcccgctgaccgccatgtacaaaccgccgaaaatcaaagcgatagacaaaatcatgcaggcgggcagggttcgcggcaaaggaaaaaccgcgcctaccagcatacaaggggtcaaacaaatcatcaaagccctgcgttcgggcgaagcaaccatcgtcctgcccgaccacgtcccctcccctcaagaaggcggggaaggcgtatgggtggatttcttcggcaaacctgcctataccatgacgctggcggcaaaattggcacacgtcaaaggcgtgaaaaccctgtttttctgctgcgaacgcctgcctggcggacaaggtttcgatttgcacatccgccccgtccaaggggaattgaacggcgacaaagcccatgatgccgccgtgttcaaccgcaatgccgaatattggatacgccgttttccgacgcagtatctgtttatgtacaaccgctacaaaatgccgtaa

SEQ ID NO: 55289 - DNA, 864 bp, Neisseria meningitidis; identical to SEQ ID NO: 39125

SEQ ID NO: 55290 - DNA, 2088 bp, Neisseria meningitidis
atggattatttatcaagactgtcctttggatttaacaaaaagctacctgtcattctgcaaacagaagttgctgaatgtggtttagcatgcctgacatccatcttgtcctattatggctttcacactgatttaagaacgttacgccaaaaatacaccctgtcattaaagggcgcaaatcttgcagacatcatgagatttggcaatgaaatgaatttaacgccacgagctttgcgtttagagttagatgagctgtcaaatttacaactaccctgcattctccattggaacttaaaccattttgttgtactttgttccatttccaaagacagtatcgtcattatggaccctgctgtcggtatgcgaaaaatcaaaatggacgaagtttcacaaaaattcacagggattgccctagaattattccccaatacccattttgaagagaaaaaagaaacaaagaaaatcaaaatattatctctattaagggggatttcaggcttaaaacgctctttaattcaaatgcttatattagctatttctttggaagtctttgcattggttagtccattctttatgcaatgggtaatagaccatgtcattgtaactgctgataaaaatttattactgacccttactttgggatttggtttactggctatcctgcaacagttaattagcctgttacaagcatgggtaggtatgcacctatctacaactcttaatttacaatggaaagccaatatatttaaaaggttacttgacttacctaatgactatttcagtaaacgacatttaggagatgtgatttcaagatttggttcaatagatcatatccaagaaacactaacttctactttttttgttttagttttaaatagcttaatggctgtttttactttcgtgttaatgacaatttacagcactcaattatcgctgattgttcttttaacacttgttttgtacatactaattcgttggcttgcatattacccattaagaaatgcaacagaagaaaatattgttcatgaagccaaacaaaactcatatttcatggaaaccattcgtggtatccaatcagttaaattatttgataaacattatcaaagacatggcacttggatgagcctatttgtgaatacagtcaataccaagctgacaacagataaactctctgctttatttgaattttcaaataaactgttgtttagcatggaaaatattatcataatttatcttggtgcaagcgcaattttagatggttcatttacagtcggtgttctgatggcttttttggcttataaagggcaatttgaaagcagaacagcttctctcgttgaccaatacatccaaatcaaaatgttagggcttcatgctgaacgtttggctgacattactttaaatgaaacagaaactgaaattattaagtataatcatatacctaaattagataatgaacaactggttcttaaagttgaaaacgtctcattcagatatgctgataatgagccatatctttttgaaaacattaatttggaatttaaagataatgaagcagttgttttaacaggacaatctggtcgggggaagtccactttgttaaacattttaacaggtagcctaaaacctgaaactggtacagttagtattaatgggcatgatatatatcaagtttctccatcctttattaggggattgagcgggattgttcgccaagatgatgtcctttttgcaggttctattggggaaaatatttcattttttgatgaaagcccaaatatggagctcattgaacaatgtgcaaaaatggcacaaatacatgacgatatacttaaaatgccaatgggctatgagaccttgattggcgatatgggaaatatcttatcaggtggacaaaagcagagagttatcttggctcgtgcattgtataaacgacccaaaattctatttttagacgaagcaagtagccatttagatgtagaaaatgaacaaaaaattaaccataacctaaaaagtcttggtattatgaaaataatggttgcacaccgccaagaaacaattcaatcggcagataaaattctgaatttaggttga

SEQ ID NO: 55291 - DNA, 729 bp, Neisseria meningitidis
atgtctcaaattactatgcgtcagatgattgaagccggtgtccacttcggccaccaaacccgtttctggaacccgaaaatggcacaatacattttcggtgcgcgcaacaaaatccatatcgtcaacctggaaaaaaccctgccgatgttccaagacgcgcaagaagccatacgtcgtttggttgccaacaaaggtacagtattgttcgtaggtaccaaacgccaagcccgcgacatcatccgcgaagaagcgacccgcgccggtatgcctttcgttgattaccgctggttgggcggtatgctgaccaactacaaaaccgttaagcaatccatcaaacgcctggaagaaaaaaccgcagccttggaaaatgctgccgaaagcggtttcagcaaaaaagaaattctggaaatgcaacgcgatgttgaaaaactggaacgttctttgggcggtatcaaaaacatgaaaggcctgcccgacgcgattttcgttatcgataccggctaccaaaaaggtactctggtcgaggctgaaaaactgggcatccccgttatcgccgtagtcgataccaacaacagccctgacggcgtgaaatacgtcatccccggcaacgacgactccgccaaagccatccgcctgtactgccgcggcatcgctgacgcagttttggaaggcaaaaaccaagcgctgcaagaaaccgtagccgctgcccaagaagccgctgccgagtaa

SEQ ID NO: 55292 - DNA, 195 bp, Neisseria meningitidis; identical to SEQ ID NO: 42321

SEQ ID NO: 55293 - DNA, 1176 bp, Neisseria meningitidis
atgcagaatatttttgaccctttggttattcgtggaaaatcccttacccccatcgtgcaaggcggtatgggggtcggtgtttccgcatcgggtttatccagcgcggtggcacgtgaaaacggtatcggaacgattgccagtgtggatttgcgccaccttcacgaagacctactcgccgaatcccaaatcaatccgagtgaagagaaatatacgtctttgaactgtaccgcattggacagggaaatccaaaaagccaaaagtgcttcagagggaaaagggctgattgcggtcaacgtgatgaaggcggtcaaagactacgccgcatatgtccgccaggcttgcgaatcaggggcggatgcggttgtaatgggtgccggtctgcctttagacctgccggaaatgaccgagggctatcataaatatgtcgcgctgctgccgattctgtccgaatcgcgcggtattaatatcgttttgaaacgttggatgaaaaaaggcatattgcccgatgcgattgtagtcgaacatcctgcccacgcggccggacatttgggtgcatcaaccgttgaaggcgtaaacgatgccaagttcgacttcaaacgcgtgattgaggaaacgtttgaagttttcaaaagtttagggctggaaagcgaaaaaatcccgcttattcttgcgggaggcatggcaaattttgaaaaagtcaaaaccgccctaaagaactggggagcatccgccgttcaaatcggtacggcttttgccgttaccgaagaaggagatgcacaccttaacttcaaaaaaacgctcgccggtgcggaaactgaaaaagtagtcgaatttatgtctgttgccggtttgccggcgcgcggtgtccgcaccaaattcctagacagctacatcaagcgtgaaagcaaacttcagacaaacgccaaagccgacccgcgccgctgtacccaaggtttaaactgcctgactagctgcggcctgcgcgacgggctttccaaagcagggcaattctgtattgatatccagcttgctgccgcatttcgtggagaagtagataaaggcctgttcttcagaggtaaagacccgctgcccttcggtaatgccatccgcaccgtccgcgagacgatacaatatctgctgacggggagcgaacctgttgcaacagtaggacgctga

SEQ ID NO: 55294 - DNA, 651 bp, Neisseria meningitidis
atgccgtctgaaaacacaaaaggaacaaccatgaccacacatcatgtcgaattgaggaaggtaaccaaacggttcggggcgcaaaaagccgttaaccaagtcgatttggttttgaaggcaggagaaagcgtcgggcttgccggacacaacggcgcgggcaagtccaccattatgaagctgatactcgggctgattaccccgaccgaaggcgaagtgatgcttttgggcgaacgtaccggcagcaaagcgggggcgcggcttcgcagccaaatcggctacctgcccgaaactgttgcgttgcacccttcgctgaccggcatcgaaacgctggatttttatgccaaacttaaaaaacagccgctcacgcagaatcgggggctgctcgagcgcgtcggcatttcacaggcggcacaccgccgcgtcggcacttattctaaagggatgcgccaacgccttgccttggcacaagccctgctgggcgagcccaaagtcctgctgtttgacgaaccgacaaccggcctcgaccctgcatcaaggcaaatgttttacgaagtcgtgcgcgaactcaacgggcgcggcgcgaccgtattgctcagtacccacgcccttgccgagttggacgggcacgccgaccgcattatcgtggattaa

SEQ ID NO: 55295 - DNA, 747 bp, Neisseria meningitidis
atgagcacacaagatttaagcggcaaaatcgctttggtaaccggcgcatcgcgcggtatcggtgcagcaattgccgacacactggcggcagccggtgccaaagtcatcggtacggcgaccagtgagagcggtgcggcggcgattagcgagcggttggcgcaatggggcggcgaaggccgcgtattaaattccgccgaacccgaaaccgtcgaaaacctgattgccgacatcgaaaaaacgttcggcaaactcgatattctggtcaacaacgccggcatcacccgcgacaacctcctgatgcgcatgaaagaagaagagtgggacgacatcatgcaggtcaacctcaaatccgtgttccgcgcttctaaagccgtcttgcgcggcatgatgaagcagcgcgccggccgtatcatcaacatcacatccgtcgtcggcgtgatgggcaatgccggtcaaaccaactatgccgcggcaaaagcaggcttaatcggtttctccaaatccatggcgcgcgaagtcggcagccggggcattaccgtcaactgcgtcgcccccggctttatcgataccgatatgacccgcgccctgccggaagaaacccgccaagcctttaccgcccaaaccgccttgggcagattcggcgacgcgcaagacattgccgatgcggttttgttcctcgcttccgatcaggcgaaatacattaccggccagacgctgcacgtcaacggcggcatgctgatgccctga

SEQ ID NO: 55296 - DNA, 3210 bp, Neisseria meningitidis
atgttttatctgtatcaatccaaccgtcttgaaacgctggcggcactgtttgcccgcattcaaaaagtcaaaccgctgaaatcggttttacagcccgaacagattattgtgcagagtcaggggatgcgccgctacctcaatacctgcctcgcccgcgatttgggcgtggcggcgaatttgtcgttcagcctgcccgccggtctgacgtggaagctgatgaaaaaactgattcccggtattccggaactcagcccgtttgcgcctgaagtgatgcgctggcggctgttggatttgttccgcagcgaggcatttcggaatacggcagaatttgaagatgtgaggaatgtgctgcaagactatctgggcagcggcgaatcggcggattatcagcttgctggccagcttgcagacatatttgaccaatacctcgtgtatcgtccgcagtggatagacgcgtggcagcagggcaggatactcagtttgggcgacgatgaaatctggcagtccaaactgtggcgttatcttgatgacggcaggcagagcgcgccgcaccgtgttgcgttgtgggaaaagctgttggaatctttgagcagtgataagctgcccgagcgttatttcgtgttcggcatttccacgatggcgccgatgtatttgcagcttttgcacaagctgtccgaacattgcgatgtgttcgtgtttgcactcaatccgagtgggatgtattggggcaacgtcatcgaagcggcgcaaatcctcaaaggcggcggcgatcccgatttaactcaggcagggcatccgctgctcgcctcactgggcaagcaggggcgcgactttttcgactttttgaacgaaatggaaatagaaggagaaacgccggtgtttgaagaaggcagccgcgatacgcttttgcacgccctgcaaaccgatatccaaaacttggatatgccgtctgaaaaagcgggaaatattaatacggacgacggatcgatacgcatcgtctccgcacacagccctttgcgcgaattgcagatactcaaagacaaactgttgaaaattctgcatgaacatcccgattggcagccgcatgatatagccgtattaaccccgaacatcgaatcctatacgccttttatcgaagccgtgttcggacaggcgcagcccggtgcgcaggcattgccgtattccgtttcagacgtgaaaatcagccgccgacaaccgtttttttatacattggaatgcctgtccgacttgttggaaagccgatttgaagtcgataaagtgcttgtgcttttagaaaccgcacccgtgttgcgccgtttcggactgactgaggacgatttgccgcttttgcacgacatggttgccgatttgaacgtccgctggggtttggacggagaaatgcgcggcggcacggatcagctgtttacctggaagcaggcggtagaacgcatgatattgggctggatgctgcccgaaggcggcaatccgatgtggcaggatgtcagcgcgtggtatgccgacgtgaaccaaaccgccctgttcggacgttttgccgccctcctcgaaaccctgtcggatattgtacggatatggcagcaacctgcgacggtcggcgaatgggtggcgcgttgccgggatttgcttgaaacattgttccaaaccgaagccgatgaccaaaaggcagtccaaaacctcgaaaacgaatgggtcaaatggcaggcggaaaccgaattggcgcaattttccggacagttgccgccgcacaccgtcatccgccacatccgccgctttctcgacagcgaaagcgaggcaggctttttacgcggcggcatcaccttttgcagtatggtgccgatgcggagcctgccctttaaagtcatctgtctgttgggtttgaacgacggagattttccccgcaataccaaagccgccgtattcgacctgattgccaaacatcccgccaaaggcgaccgcgcccgccgcgatgacgaccgctacctgttcctcgaagccctcatcagcgcgcgtgaaatcctctacctgtcctacatcgggcgcgacatccgcaaagacgaagagcttgccccgtcttccctgttgggcgaactcatcgataccgttgccgctatggcgggcatcggtagtcgccaacttgcacaaaactggatagaacagcatccgctgcaagccttttcacgccgatatttccaagaaggcggacgttcagacggcatattcggcacgcgtaccgactacgccaccgcgctcggacaaacgcccgaaccgccgcaaccctttttcgaccaacccgtagaaaacgccgaacctgttgccgaaatcggacaggacgaatttatccgtttctggcgcaaccccgtcaaagtatggcttcagcagcagcttgcgtggagcgaaccccatatcggcgaagcctgggagcctgccgaacccttcgagccgcaacacgccgatcaaatcgccgaaatctatattgaggcgcgccgcgaaggacaagatttttcccaaaccgccgcccgcatcagggcggaaagcctgctgccgtcgggagagttgggcagactttggcagcaggacttccaaaccgctgccaaacaaatcgacacggcggttttaaacagtcccaaacttcctccgctgccctacgccataccgtcggacgggcaaatcctgaaaggcagcttgggcaatctgtaccgctgcggacaagtgttttacgcctacggcaaacccaacgcgccgcaacgtatcgcttttttgttggaacacctgatattttgcgccgttatgccgtctgaagccgaaatgcggcaaacctttatcgtccaatccggagaaaccgaaatattggcggaaatcgcgcaagacagggcattgcagctattgtcggaatggatggcgtttttcaatatcgggcaaaaccgcccgctgccgttttttgccaaaacctcgcttgccgccgccgaagcgtttgcccaaaaacaagattgggaagccgccctgaaaaaagcccaaaccgcctattacggcagcaaagtcagcaaagggcagaaagactataccgaagtcgccctcgtgttcggcaacgcaagccaaaacccgctcgaacagcccctgtttgaaaacctcgtccgtctgcttgccgacacgtttgccgcagcggaaaaaaaggaagaggccggagcagcctga

SEQ ID NO: 55297 - DNA, 495 bp, Neisseria meningitidis
ttggctgaaggtcaaaaatcagccgtcaccgagtattacctgaatcacggcatatggccaaaaaacaatacttctgccggcgtggcatcctccgccaccgacatcaaaggcaaatatgttaaaagcgttgaagtcaaaaacggcgtcgttaccgccgaaatgaaatcaagcggcgtaaacaaagaaatccaaggcaaaaaactctccctgtgggccaagcgtcaagacggttcggtaaaatggttctgcggacagccggttacgcgcaccgccgccgacagcgacgacgtcgccgccgccaacggcaagaccgccgacaacatcaacaccaagcacctgccgtcaacctgctgcgacgcttcatctgccgtttgcatagaaacaccacgcgccgacttcaaacacttccaaaaaatcagccgtcacagagtattacctgaatcacggcatatggcccggcgacaacagttctgccggcgtggcaacctcctctaa

SEQ ID NO: 55298 - DNA, 600 bp, Neisseria meningitidis; identical to SEQ ID NO: 48838

SEQ ID NO: 55299 - DNA, 495 bp, Neisseria meningitidis
atggaaaatagatttgcaaaaatcgttaaggatatttttagttttacccaatttgtttccgaagcggaaaataaaattcctaaccaatcctctcgttattacgattgctggtgggaattggaaatcttgaatgcttccgcattggaagattgggaaatatcgggaaagcctgaaaaatgggagaaatggacagaaaaatatcagaccgaagcgttacagtcagtcaagcatctatttgccgaagaagttcctgaaaataatatagtttgcgatatttctcattttttgcattttgccgattgggcagaagccgacattcccaatcaatcacgtttatatgccgaatattggtgggaaatggaaatgttcaaaatgtcggttttagaagattgggaacgctcgggaaaaccgttagattggaaaaaatggcaaaggcaatatcgatctgaagcatttgaattagttaaaaaattgaaccgaagcaaacaagagtaa

SEQ ID NO: 55300 - DNA, 1194 bp, Neisseria meningitidis
atgttcttcaagcacatcgaagccgcccccgccgatccgattctcggtttgggcgaagcattcaaagccgaaacccgccccgaaaaagtcaacctcggcatcggcgtttataaagacgcatccggcgcgacacccctcgtcaaagccgtcaaagaagccgaaaaacgcctgttggaaagcgaaaccaccaaaaactacctcaccatcgacggtgttgccgactacaacgagcaaacccaaatcctgctgtttggcaaagaccacgaaatcatcgccagccgccgcgccaaaacagcgcaaagccttggcggtacaggcgcattgcgtattgcgaccgagtttgccaaacgtcagttgaacgcgcaaaccatctggatttccaatccgacttggccaaaccacaacgccatcgccaaagcggtcggtatccaagacaaaccttatcgttactatgatgccgccaaacacggtttggattgggacggtatgattgaagacttgagccaagcgcaaaaaggcgacatcgtcctgctgcacggctgctgccacaaccctaccggcatcgaccctacgcccgaacaatgggaaactctggcaaaactttctgccgaaaaaggctggctgccgctgtttgactttgcctaccaaggcttcggcaacggtttggaagaagatgcctacggcttgcgcgtgttcttgaaacacaatacagaattgctgattgccagctcttattccaaaaacttcggtatgtacaacgagcgcgtcggcgcgttcactttggtggccgaagatgaagaaacagcagcccgcgcccacagccaagtcaaaaccatcatccgtaccttgtattccaacccggcttcacacggtgcgaacaccattgcgctggtgttgaaaaatgatgatttgaaagcacaatggattgccgaactcgatgaaatgcgcggccgcatcaaagccatgcgccaaaaatttgtcgagttgctcaaagccaaaggtgcaagccaaaactttgatttcattatcgaacaaaacggtatgttctctttcagcggattgactcccgaacaagtcgaccgtttgaaaaacgagtttgccatttatgccgtccgctccggccgcatcaacgttgccggcattaccgacgacaacatcgattatctgtgcgaaagcatcgtgaaagtcttgtaa

SEQ ID NO: 55301 - DNA, 843 bp, Neisseria meningitidis
atggataaagaacgaattttaacccccgcagtcgtgttttccgtcgcactgctgcatttggcaatggtggcattgctctggcaggcgcacaagctgcccgtgatagagtcaggaaatgttatcgaatttgtcgatttgggtgattttggcggaggggacggtgcacccgaaggcgcaggtgcgcctgctgcgcctgagccgcaacctgagcctgagccgcccaaacctgtcgagccgcccaagccggttttgaagccggtggttacgaaaaaggcggatgcggatattcagcagcctaaggaagagccgaaacctgaagaaaagccgaaacccgaagaaaaaccgaaaccagagcctaagccggaagcgaagcctgtcccgaaaccggcggaaaaaccggtcgagaggccgtctgaaaaacctgccgaacatcccagcaatgcttctgccaaagcagacagcgagcagggtaatggggaagataagggaaccggtaccaaaggagacggaacggggcgcggagaaggcagcggtaaaggtagcggcggtgtcaaaggcgaacacggggaaggagccggcagcagcaaaggcaatcctttacgcgccaatggcagcattccgcgcccggcttatcccacgctttctatggagaatgacgagcagggtacggttgttttgagcgttttggtttctccgggcggtcatgtcgagtccgttaaaatcgtgaaaagcagtggtttttctcggttggacaatgcggcacgcaaggcggcgcaaaacgggcattttcaagccaatgcctggacggagtttaaagtccccgtcaagtttgaattgaattag

SEQ ID NO: 55302 - DNA, 606 bp, Neisseria meningitidis; identical to SEQ ID NO: 37272

SEQ ID NO: 55303 - DNA, 231 bp, Neisseria meningitidis
gtgcgtaccgcacacaccctacacgttgattttgaagttccgtgtaattcacaggtagggtgtgtggcgcagccacgcacgcggtgttgggtatgcaggctacggcttgctgctgcagaaactcctgaagaaaaagccaaagacgccgctgaagaggctaaagaagaagcaaaagacgcagcggaagatgccaaagaagctgctgaagacgctaaagaagaagctaaataa

SEQ ID NO: 55304 - DNA, 1521 bp, Neisseria meningitidis
atgttttttatttcaatccgctatatatttgtcagaaaactatggcgcgcaaacggtcagccctttaaaataacgcctttacgcatcgaaaatccaccggaacgcaacattatgatgaaaaatcgagtgaccaacatccattttgtcggtatcggcggcgtcggcatgagcggcatcgccgaagtcttgcacaatttgggttttaaagtttccggttcggatcaggcgcgtaatgccgctaccgagcatttgggcagcctgggcattcaagtttatcccggccataccgcagaacacgttaacggtgcggatgtcgtcgttacctctaccgccgtcaaaaaagaaaatcccgaagttgtcgctgcgttggagcagcaaattcccgttattccgcgcgccctgatgttggcggagttgatgcgcttccgtgacggcatcgccattgccggcacgcacggcaaaaccacgaccaccagcctgaccgcctccatcctcggcgcggcaggacttgacccgactttcgttatcggcggcaaactcaacgccgcaggcaccaacgcccgcttgggcaaaggcgaatacatcgttgccgaagccgacgagtcggatgcatcctttctgcacctgacaccgattatgtccgtcgttaccaatatcgacgaagaccatatggatacctacgggcacagcgtcgaaaaactgcatcaggcgtttatcgatttcatccaccgtatgcccttctacggcaaagcctttttgtgtattgacagcgaacacgtccgcgcgattttgcccaaagtgagcaaaccttatgctacttacggtttggacgataccgccgacatctacgccaccgacatcgaaaacgtcggcgcgcaaatgaaattcaccgtccatgttcaaatgaaaggacatgagcaggggtcgtttgaagtcgtgctgaatatgcccggcagacacaacgtgctgaacgcattggcagccatcggcgtggcgctggaagtcggcgcatcggttgaagcgatccaaaaaggcttgctcggctttgaaggtgtcggccgccgcttccaaaaatacggcgacatcaagttgccaaacggcgggaccgcgctcttggtggacgactacggacaccaccccgtcgaaatggcggcgacccttgccgccgcacgcggcgcgtatccggaaaaacgtttggtactcgccttccagccgcaccgctatacccgcacgcgcgatttgtttgaagactttaccaaagtcctcaataccgttgacgcgctggtgctgaccgaagtttatgccgccggtgaagagccgattgccgccgccgattcccgcgctcttgcccgcgccatccgcgtgttgggcaaactcgagccgatttactgcgaaaacgttgccgatctgcccgaaatgctgttgaacgttttgcaggacggcgacatcgtgttgaatatgggtgcgggaagcatcaaccgcgtccccgccgcgctgctggaattgtcgaaacagatttga

SEQ ID NO: 55305 - DNA, 465 bp, Neisseria meningitidis
atgtttaccatcgttttataccagccggaaatcccgccgaacacgggcaacatcatccgcctgtgcgccaataccggcgcggatttgcaccttgtcaaaccgctcggcttcccattggattccgccaaaatgaaacgcgccgggctcgactaccacgaattcgccagcctgacggtgcacgaaaacttcgacgactgcctcaaggcactcgcaggcaggcgcattttcgccctgaccaccaaaggcacggcgcgccccgatgaaaccgcgtttcaaaaaggcgacgttttactgttcgggccggaaacgcgcggactgcctgccgacatcctcgacagcctgcccgccgcgcaaaaaatccgcctgcccatgcagcccggcagtcggagtatgaacctttccaataccgttgccgtgattctctttgaagcgtggcggcaacacggttacgcaggcggcgtttga

SEQ ID NO: 55306 - DNA, 855 bp, Neisseria meningitidis
atggcagaaattactgcaaaaatggttgccgatctgcgcgccgctaccggcctgggcatgatggaatgcaaaaaagccttggttgaagccgaaggcaacttcgacaaagccgaagaaatcctgcgtatcaaatccggtgcgaaagccggtaaactggccggccgtaccgctgccgaaggcgtattggcttatgcaatcaacggcaatgtcggcgcattggttgaagtaaactgcgaaaccgacttcgttgctaaagacgcgggcttcgtagaatttgccaacttcgttgcgaaaactgctgccgagaaaaaaccggcttctgttgaagaactgagcgaactggttgaagcagaacgcaaagccatcatcgccaaattgggcgagaacatgtctgtccgtcgcttccaagtgatcgacactgccaaccaactggttgcctacatccacggcgcattggcgaccgaaggcgtattggttgagtacaaaggctctgaagacgtagcacgcaaaatcggtatgcacattgttgccgccaaaccacaatgcgtaagcgaagccgaagtagatgctgaaaccgttgaaaaagaacgccacatctacaccgaacaagccatcgcttccggcaaacctgccgacatcgccgctaaaatggttgaaggccgtatccgcaaattcttggctgaaatcactctgaacggccaagcattcgtgatgaaccctgatcaaactgttgcccaattcgccaaagaaaacggcactgaagtggtcagcttcgtacgctacaaagtaggcgatggcatcgaaaaagccgttgtcgactacgcagccgaagtagccgcagccgccaaagtgtaa

SEQ ID NO: 55307 - DNA, 1290 bp, Neisseria meningitidis; identical to SEQ ID NO: 38999

SEQ ID NO: 55308 - DNA, 324 bp, Neisseria meningitidis; identical to SEQ ID NO: 37673

SEQ ID NO: 55309 - DNA, 1035 bp, Neisseria meningitidis
atgccgaattgtttcaaatttcataccgttatcgaacggcattggcaaaaaccttatccggttttgtcttttctgcttaagccgctctccgggctgtttgccaaaattgcggcaaaacggcggacggattttttatcgggaaaacggcaaagcgaaaagctgcccgtgcctgtggtcgtggtcggcaacatccacgcgggcgggacggggaaaacgccgattgccgccgcgctggtgtcgggtttgcaggaaaaaggtgtcaaggtcggcatcatcagccgaggctacgggcgcaagagcaaggcggttcatgtattgaatgccgcgagccgtgcggaagatgcgggcgacgagcctttgctgctgttcagcaaaaccggtgcgccgacggcggtgggcagcagccgtgcagaggcaggcagggcgttgctggcggcgcatcccgacatcggactgattgtggcggacgacggtttgcagcattacgccctgcggcgagatgtggaaatcgcggtgtttccggcggcggatacggggcgcacggatttggatttgctgcccaacggcaatttgcgcgaacctttgtcgcggctggattcggtggatacggtcgtcgtcagcggcggcaaggcggatgcgctgtttaggccgtctgaaaatatgtttcacagccgtatcgaagcgggacgaatttaccgtttgaacaatccgtccgaaatactggacacaggccgtctgaaaaatcaaaccgtcgtcgccgtggcaggtattgccaagccggcgcgttttttcgattcgttgcggaatatgggcattaccgtgaagcgaaccgtcgcgctgcccgaccacgccgacatttcggcggcagatttgcccgatgcggacgcggtcattattacggagaaagatgcggtcaaattttcagacggcatttgcaccgataatgtttgggtgttgcccgtttgtgcgataatcgaacctgatttggcggcgtttgtgttggagcggttggaagatgtaccgaaggccgtctga

SEQ ID NO: 55310 - DNA, 957 bp, Neisseria meningitidis
atgaaagaatttgacttcatcaaacggtatttgcaaacaggcacggataatgatgtcgtattgggcataggcgacgatgcggcgattgtccgcccgcgtgaaggcttcgatttgtgtttcagtgcggatatgcttttgaaggacaggcatttttttgcaaatgtcaaacctgaagacttggcttggaaggttttggccgtcaatgtttcggatatggcggcgatgggtgcgataccgcgttgggtgttgctgagcgcggcgttgcccgaattggatgaggtatggctgaaacggttttgcggcagctttttcggtttggcaaaaaagtttggcgtaacgttaatcggcggcgatacgaccaagggcgatatggcgttcaatgtaaccattatcggcgaattgccgaagggtagggcgttgcggcgtgatgcggcggttgcgggcgacgatatttgggtgtcggggcgtgtcggtatggcggcggcggctttgaactgccgtctgaaacggtgtgtgttgccggatgatgtgtttgctgaatgcgaacaaaagctgctccgccccgagccaagggttgggctggggcttgcgctgttgccgtttgcccgggcggcgcaggatgtttcagacggcctcgcgcaagatttggggcatatcctgaccgcttccggcgtgggggcggaaatttgggccgattcgctgccgtctttatccgtattgaaagatattttgccccgagcgcaatggctgtcttatactttggcgggcggcgacgattacgagctggtgtttaccgcgccggaaagttgccgcagccgcgtgcttgatgcggcagaacggtgcggcgtgccggtaacgcgcatcggcaaaatcaacggaggatgccgtctgaaggttttagatgccgacggcagggaattggaactacattctttaggattcgatcattttggctga

SEQ ID NO: 55311 - DNA, 996 bp, Neisseria meningitidis; identical to SEQ ID NO: 48353

SEQ ID NO: 55312 - DNA, 3216 bp, Neisseria meningitidis
atgcccaaacgtaccgacctaaaatccatccttatcatcggcgccggccctatcgttatcggtcaggcctgcgaatttgactattcgggcgcacaggcctgcaaagccttgcgtgaagaaggctataaagtcattttggtgaattccaaccccgccacgattatgaccgaccccgaaatggcggatgttacctacatcgagccgattatgtggcagacggtggaaaaaattattgccaaagagcggcccgatgcgattctgccaacgatgggcggtcagaccgcgctgaactgtgcgctggatttggcgcgcaacggcgtgctggcgaaatacaatgttgaattaatcggcgcgacggaagacgccatcgacaaagcagaagaccgcggccgctttaaagaggcgatggaaaaaatcggtttgtcttgcccgaaatcttttgtctgccacacgatgaacgaagctttggcggcgcaagaacaggtcggcttccctaccctgattcgtccttctttcaccatgggcggttcgggcggcggcattgcctacaataaagacgagtttttggcgatttgcgaacgcggtttcgatgcgtcgcccacgcacgagctgctgattgagcagtccgtcctcggctggaaagagtacgagatggaggtggtgcgcgataagaacgataactgcatcatcatttgctcgattgaaaacttcgacccgatgggcgtgcatacgggcgactcgattacggttgcgccggcgcaaacattgacagacaaagaataccaaatcatgcgtaatgcttcgttggcagtattgcgcgaaatcggcgtggacacgggtggctcaaacgtgcagtttgcggtgaaccctgaaaacggcgagatgattgtgattgagatgaacccgcgcgtgagccgttcatccgcgctggcttccaaagcgacgggcttcccgattgcgaaggtggcggcgaaactggcggtcggctttacgctggacgagttgcgcaacgacatcaccggcggcaaaacccccgcgtcattcgagccgtccatcgactatgtggtaaccaaaatcccgcgttttgcgtttgaaaaattccctgccgcagacgaccgcctgaccacgcagatgaaatcggtgggcgaagtgatggcgatgggacgcacgattcaggaaagtttccaaaaagccctgcgcggcttggaaacaggcttgtgcggcttcaatccgagaagctccgacaaagcggaaatccgccgcgaactggcaaaccccggccccgagcgcatgctgtttgtggcagacgcgttccgcgcgggcttcacgccggaagaaatccacgaaatctgcgccatcgacccttggttcttggcgcaaatcgaagacttggtgaaagaagaaaaatcggtttcagacggcattttgagtgatttggatttcgccgccctacgccgtctgaaacgcaaaggcttctccgacaaacgcatcgcgcagcttttgggcgtaaaagaaaaagaagtgcgcgaacaccgctacgcgctgaagctgcatccggtttacaaacgcgttgacacctgcgccgccgagttcgccaccgaaaccgcctatctttactccacttacgaagaagaatgcgaatcccgtccttccgaccgtaaaaaagtgatgattctcggcggcggcccgaaccgcatcggtcagggcatcgagtttgactactgctgcgttcacgccgcgctcgccctgcgcgaatccggttttgaaacgattatggtcaactgcaacccagaaaccgtgtccaccgacttcgacaccagcgaccgcctctatttcgagccgctgacattggaagacgtgttggaaatcgtccgcaccgaaaacccgtggggcgtgattgtgcattacggcggtcaaaccccgctcaaactcgccaacgcgctggttgaaaacggcgtaaacatcatcggcacgtccgccgacagcatcgacgccgccgaagaccgcgaacgcttccaaaaagtgttgaacgacttaggtctgcgccaaccgcccaaccgcatcgcccacaacgaagaagaagcactcgtcaaagccgaagaaatcggctatccgctggtcgtgcgcccgtcttatgttttgggcggacgcgcgatgcagattgtccactctgccgaagccttgcaaaaatacatgcgcgaagccgtgcaggtttccgaagacagccccgtgttgctcgatttcttcctcaacaacgcgattgaagtggatgtggactgcgtttcagacggcaaagacgtggttatcggcggcatcatgcagcacgtcgaacaggcgggcatccactccggcgactccggctgctcgctgccgccctactccttaagcgaagaaatccaagacgaaatccgccgccaaactaaagcgatggcgtacgcgctgggcgtggtcggactgatgaacgtgcagtttgccgtacaagacggcgtggtgttcgtattggaagtgaacccgcgcgccagccgcaccgtgcccttcgtctccaaagccaccggcgtgccgctcgccaaagtcggcgcgcgctgcatggcaggcatttccctgaaagaacaaggcgtggaaaaagaagttgtccccgatttctatgccgttaaagaagccgtgttcccattcatcaaattcccgggcgtggatacgattttgggaccggaaatgcgctccaccggcgaagtcatgggcgtgggcgcaagctttggcgaagcctactacaaagcccaactcggcgcgggcgaacgcctcaacccgaccggcaaaatcttcctctccgtgcgcgaagaagacaaagaacgcgtcattaaaaccgccaaaaacttccaagccttaggctacggcatctgcgccacgcgcggcacggcgcaatacctgaccgaacacgggctgattgtacaaaccatcaataaagtccccgaaggccgcccgcacatcggcgacgcgctgaaaaacggcgaaatcgcactggtcgtgaataccgtttccagcgatccgcaatccgtgtccgacagccacatcatccgccaaagcgcattgcagcaacgtgtgccgcaatacaccactactgcgggcggcgaagcgatgagcgaaggcgcgaaaagccgcgaccacttgggcgtgtacagcgttcaagaactgcacgggcgtttgaaaaaccgcagctga

SEQ ID NO: 55313 - DNA, 264 bp, Neisseria meningitidis
atgaacctgaaagactttctatacattagacgagttttagaggaatatatgcgttatctacataatcctgatcattatcccgatatagaagcaattcaaaattttttaggtgatgcttcttcgggaggcggatttgaatgtttaagcacagctatttataacaaagtatataaagttgatttgccggcgaagattgagaaaatgattgatgatggtttatttgaacaccctctatatcccagttactataagaaaaatgaataa

SEQ ID NO: 55314 - DNA, 561 bp, Neisseria meningitidis; identical to SEQ ID NO: 36282

SEQ ID NO: 55315 - DNA, 1680 bp, Neisseria meningitidis
atggaaattattaacgatgcagaacttatccgttccatgcagcgtcagcagcacatagatgctgaattgttaactgatgcaaatgtccgtttcgagcaaccattggagaagaacaattatgtcctgagtgaagatgaaacaccgtgtactcgggtaaattacattagtttagatgataagacggtgcgcaaattttcttttcttccttctgtgctcatgaaagaaacagcttttaaaactgggatgtgtttaggttccaataatttgagcaggctacaaaaagccgcgcaacagatactgatcgtgcgtggctacctcacttcccaagctattatccaaccacagaatatggattcgggaattctgaaattacgggtatcagcaggcgaaataggggatatccgctatgaagaaaaacgggatgggaagtctgccgaaggcagtattagtgcattcaataacaaatttcccttatataggaacaaaattctcaatcttcgcgatgtagagcagggcttggaaaacctgcgtcgtttgtcgagtgttaaaacagatattcagattataccgtccgaagaagaaggcaaaagcgatttacagatcaaatggcagcagaataaacccatacggttcagtatcggtatagatgatgcgggcggcaaaacgaccggcaaatatcaaggaaatgtcgctttatcgttcgataaccctttgggcttaagcgatttgttttatgtttcatatggacgcggtttggcgcacaaaacggacttgactgatgccaccggtacggaaactgcaagcggatccagaagttacagcgtgcattattcggtgcccgtaaaaaaatggctgttttcttttaatcacaatggacatcgttaccacgaagcaaccgaaggctattccgtcaattacgattacaacggcaaacaatatcagagcagcttggccgccgagcgcatgctttggcgtaacagacttcataaaacttcagtcggaatgaaattatggacacgccaaacctataaatacatcgacgatgccgaaatcgaagtgcaacgccgccgctctgcaggctgggaagccgaattgcgccaccgtgcttacctcaaccgttggcagcttgacggcaagttgtcttacaaacgcgggaccggtatgcgccaaagtatgcccgcacctgaagaaaacggcggcggtactattccaggcacatcccgtatgaaaatcataaccgccggattggatgcagcggccccgtttatgttgggcaaacagcagtttttctacgcaaccgccattcaagctcaatggaacaaaacgccgttggttgcccaagataaattgtcaatcggcagccgctacaccgttcgcggatttgatggggagcagagtcttttcggagagcgaggtttctactggcagaatactttaacttggtattttcatccgaaccatcagttctatctcggtgcggactatggccgcgtatctggcgaaagtgcacaatatgtatcgggcaagcagctgatgggtgcagtggtcggcttcagaggagggcataaagtaggcggtatgtttgcttatgatctgtttgccggcaagccgcttcataaacccaaaggctttcagacgaccaacaccgtttacggcttcaacttgaattacagtttctaa

SEQ ID NO: 55316 - DNA, 393 bp, Neisseria meningitidis; identical to SEQ ID NO: 43472

SEQ ID NO: 55317 - DNA, 1113 bp, Neisseria meningitidis; identical to SEQ ID NO: 37030

SEQ ID NO: 55318 - DNA, 1035 bp, Neisseria meningitidis
ttggaagacgaagattttattcgcgcagcgtccatgctcgccgaagaagttttcggtttcggtatctacaaagagtccaaaggctcgggcggccgtttttatgagcgctgttggttgatgggttcggaagacgtcctatacggtcgcgtccattttggcggacaaaacaataccattcttttcgaactgaccggcaccggttgcggcgtcgcaaaagaaggctgggaatcacgacttttcgcattcctgactaatgcaatccgcccaaaaatcacacgcgttgacatcgcaaaagactttttcaacggcgaatacagcccgaaccaagcccgtgaagaccgaaataaaggtatgtttacctgtcatcacgtcaaaccaaaaggcgaatgtttggggtcagattgggaagaagacgatgaagccaaaatgaccaaaggcaagacctatggtatcggctcccgtgaatcgtccaaatatgtccgcgtctatgaaaaaggcaagcagttgggcgataaaacaagcacatggacgcgatttgaaattgaattcaaagcaaaagatatcgttatccctttcgaagttttgcagaatccgggcgaatatttcggcggcgcatatccgatttgcgaacgattcgtccaaaaggcaacgcgcatacacgcggttaaggaagataaggtcatttcagccgaccgctaccttgaatgggtaaaaaaacagttcggacgtgcggcaaacggtctgaaattcatttttcccgaattggacaaagccaaactgtttgaactgattgagccgagtcatcacaagctgcccaagtctttggctcccgaagcctacgactgcgcctttttgaaagctcaagccattcatgaacagcccgcattcaaaccgtacaatgacccttactatatgtacgaatattacgagaatcttgaaaaacagcttgaacagcaaaaacacgtcaacaatgaagaaagctataacaacttcatttacgacaaattcgcaagactaccgatttcatgggcttaa

SEQ ID NO: 55319 - DNA, 1638 bp, Neisseria meningitidis
atggattttaaaagactcacggcgtttttcgccatcgcactggtgattatgatcggatgggaaaagatgttccccactccgaagcccgtccccgcgccccaacagacggcacaacaacaggccgtaaccgcttccgccgaagccgcgctcgcgcccgcaacgccgattaccgtaacgaccgacacggttcaagccgtcattgatgaaaaaagcggcgacctgcgccggctgaccctgctcaaatacaaagcaaccggcgacgaaaataaaccgttcatcctgtttggcgacggcaaagaatacacctacgtcgcccaatccgaacttttggacgcgcagggcaacaacattctaaaaggcatcggctttagcgcaccgaaaaaacagtacagcttggaaggcgacaaagttgaagtccgcctgagcgcacctgaaacacgcggtctgaaaatcgacaaagtttatactttcaccaaaggcagctatctggtcaacgtccgcttcgacatcgccaacggcagcggtcaaaccgccaacctgagcgcggactaccgcatcgtccgcgaccacagcgaacccgagggtcaaggctactttacccactcttacgtcggccctgttgtttatacccctgaaggcaacttccaaaaagtcagcttctccgacttggacgacgatgccaaatccggcaaatccgaggccgaatacatccgcaaaaccccgaccggctggctcggcatgattgaacaccacttcatgtccacctggatcctccaacccaaaggcggacaaagcgtttgcgccgctggcgactgccgtatcgacatcaaacgccgcaacgacaagctgtacagcaccagcgtcagcgtgcctttagccgctatccaaaacggtgcgaaatccgaagcctccatcaacctctacgccggcccacagaccacatccgttatcgcaaacatcgccgacaacctgcaactggccaaagactacggcaaagtacactggttcgcctcccccctcttttggcttttgaaccaactgcacaacatcatcggcaactggggctgggcgattatcgttttaaccatcatcgtcaaagccgtactgtatccattgaccaacgcctcttaccgttcgatggcgaaaatgcgtgccgccgcgcccaaactgcaagccatcaaagagaaatacggcgacgaccgtatggcgcagcaacaagccatgatgcagctttacacagacgagaaaatcaacccgctgggcggctgcctgcctatgctgttgcaaatccccgtcttcatcggattgtattgggcattgttcgcctccgtagaattgcgccaggcaccttggctgggttggattaccgacctcagccgcgccgacccctactacatcctgcccatcattatggcggcaacgatgttcgcccaaacctatctgaacccgccgccgaccgacccgatgcaggcgaaaatgatgaaaatcatgcctttggttttctccgtcatgttcttcttcttccctgccggtctggtattgtactgggtggtcaacaacctcctgaccatcgcccagcaatggcacatcaaccgcagcatcgaaaaacaacgcgcccaaggcgaagtcgtttcctaa

SEQ ID NO: 55320 - DNA, 1869 bp, Neisseria meningitidis
atgcaagctgtccgatacaggcctgaaattgacggattgcgggccgttgccgtgctatccgtcattattttccacctgaataaccgctggctgcccggagggtttttgggggtggacattttctttgtcatctcgggattcctcattaccggcatcattctttctgaaatacagaacggttctttttctttccgggatttttatacccgcaggattaagcggatttaccctgcctttattgcggccgtgtcgctggcttcggtgattgcctctcaaatcttcctttacgaagatttcaaccaaatgcggaaaaccgtggagttttctgcggttttcttgtccaatatttatctggggtttcagcaggggtatttcgatttgagtgccgacgagaaccccgtactgcatatctggtctttggcagtagaggaacagtattacctcctgtatcctcttttgctgatattttgctgcaaaaaaacaaaatcgctacgggtgctgcgtaacatcagcatcatcctatttctgattttgactgccacatcgtttttgccaagcgggttttataccgatattctcaaccaacccaatacttattacctttcgacactgaggtttcccgagctgttggcaggttcgctgctggcggtttacgggcaaacgcaaaacggcagacggcaaacagcaaatggaaaacggcagttgctttcatcactctgcttcggcgcattgcttgcctgcctgttcgtgattgacaaacacaatccgtttatcccgggaatgaccctgctccttccctgcctgctgacggcgctgcttatccggagtatgcaatacgggacacttccgacccgcatcctgtcggcaagccccatcgtatttgtcggcaaaatctcttattccctatacctgtaccattggatttttattgctttcgcccattacattacaggcgacaaacagctcggactgcctgccgtatcggcggttgccgcgttgacggccggattttccctgttgagttattatttgattgaacagccgcttagaaaacggaagatgaccttcaaaaaggcatttttctgcctctatctcgccccgtccctgatacttgtcggttacaacctgtacgcaagggggatattgaaacaggaacacctccgcccgttgcccggcgcgccccttgctgcggaaaatcattttccggaaaccgtcctgaccctcggcgactcgcacgccggacacctgcgggggtttctggattatgtcggcagccgggaagggtggaaagccaaaatcctgtccctcgattcggagtgtttggtttgggtagatgagaagctggcagacaacccgttatgtcgaaaataccgggatgaagttgaaaaagccgaagccgttttcattgcccaattctatgatttgaggatgggcggccagcccgtgccgagatttgaagcgcaatccttcctaatacccgggttccaagcccgattcagggaaaccgtcaaaaggatagccgccgtcaaacccgtctatgtttttgcaaacaacacatcaatcagccgttcgcccctgagggaggaaaaattgaaaagatttgccgcaaaccaatatctccgccccattcaggctatgggcgacatcggcaagagcaatcaggcggtctttgatttgattaaagatattcccaatgtgcattgggtggacgcacaaaaatacctgcccaaaaacacggtcgaaatatacggccgctatctttacggcgaccaagaccacctgacctatttcggttcttattatatggggcgggaatttcacaaacacgaacgcctgcttaaatcttctcgcgacggcgcattgcagtag

SEQ ID NO: 55321 - DNA, 1221 bp, Neisseria meningitidis
atggctgtcaacctgactgaaaaaaccgccgaacaactgcccgacatcgacggcattgccctctacaccgcccaagcaggcgtgaagaagcccgggcataccgacctgacactgattgccgtagccgccggcagcaccgtcggtgcagtcttcacgaccaaccgtttctgtgccgcgcccgtccacatcgccaaatcgcaccttttcgacgaagacggcgtgcgcgccctcatcatcaacacgggcaacgccaacgcgggtacgggcgcacagggcagaatcgatgctttggcagtgtgtgccgccgccgcccggcaaatcggctgcaaaccgaaccaagtgctgcccttctccaccggcgtgattctcgaaccgctgcccgcagacaaaatcatcgccgcgctgcccaaaatgcagcctgccttctggaacgaagcggcacgcgccatcatgaccaccgacaccgtgcccaaagccgcctcgcgcgaaggcaaggtcggcgacaaacacaccgtccgcgccacgggcatcgccaaaggctcgggcatgattcatcccaatatggcgaccatgctcagtttcatcgccaccgatgccaaagtttcccaacccgtcctccaactgatgacgcaggaaatcgccgacgaaaccttcaacaccatcaccgttgacggcgacaccagcaccaacgacagcttcgtcatcatcgccaccggcaaaaacagccaaagcgaaatcgacaacatcgccgacccgcgttacgcccaactcaaagaattgttgtgcagcctcgcgctcgaactcgcccaagccatcgtccgcgacggcgaaggtgcgaccaagttcatcaccgtccgcgtcgaaaacgccaaaacccgcgacgaagcccgccaagccgcctacgccgtggcacgttcgccgctggtcaaaaccgcctttttcgcctccgaccccaacctcggcaggctgctcgccgccatcggttatgccggcgttgccgacctcgataccgacctcgtagaaatgtatctcgacgatattttggttgccgaacacggtggacgcgccgcaagctacaccgaagcacaagggcaggcggtgatgtcgaaggccgaaatcaccgtccgcatcaagctgcatcgcggacaagccgccgccaccgtctatacctgcgacctgtcgcacggatacgtttccatcaacgccgactaccgttcctga

SEQ ID NO: 55322 - DNA, 609 bp, Neisseria meningitidis; identical to SEQ ID NO: 39049

SEQ ID NO: 55323 - DNA, 222 bp, Neisseria meningitidis; identical to SEQ ID NO: 50201

SEQ ID NO: 55324 - DNA, 1242 bp, Neisseria meningitidis; identical to SEQ ID NO: 37141

SEQ ID NO: 55325 - DNA, 927 bp, Neisseria meningitidis
atgtcagaaatgaaaaaaaccaaagtccacctgatttcaggttttctgggaacaggcaaaaccaccgcgctcaaaagcctgatggcgcaaaaagacccgaacgaaaaatgggtcatcatcgtcaacgagttcggcgaaatcggcattgacggcgcggtattgagcgacaacggcatccctgtggcagaaatcgccggcggctgtttgtgttgcaccgccggcccgcaaatgggcgtaaccgtgcagaaaatgctgcgcgacgccaagcccgaccgcctgatgattgaagcaagcggactggctcacgcagccagcgtcatcgacgaactcaaagccaaaccgctggacagccttttggaaatcggcgccgtctttaccgtcgtcaatccgcgccagttcatcaaccccgattacgcgcaacaggcgttgtataaagaccaaatcggcatctgcgacgtattggtcgccagcaaaaccgatttatgcaccaccgaacagcttgccgaatttcacgacaaagcggcaaaactgttcccgcccaaggctaaagtggtcgaagttcaaaacgcacaactcgatatccaatggcttgacatccccgtcatcgaaaaatcacgctaccgcctcaaagccctgccggacaacacgatgggcttccagtcgcaaggtttcacattccccgccggacgcgatttcgacggtgaaaaattgaccaacttcttcaatgatttgcccaatatgaccgaaggactcgtccgtgccaaaggcgtgttccaagtattgggaacgtgggtgtggctcaactgggtggacgggcaatggggtgcgaaccaagtgtcttggcggcgcgactcgcgttttgaattgattgccaaatcgtttgatgcggatttaatcgaacaaaagctcaaagacgcattggaatag

SEQ ID NO: 55326 - DNA, 864 bp, Neisseria meningitidis; identical to SEQ ID NO: 53312

SEQ ID NO: 55327 - DNA, 669 bp, Neisseria meningitidis; identical to SEQ ID NO: 51481

SEQ ID NO: 55328 - DNA, 126 bp, Neisseria meningitidis; identical to SEQ ID NO: 42246

SEQ ID NO: 55329 - DNA, 606 bp, Neisseria meningitidis
atgaagaaaatcggactgttcggcggcactttcgacccgatacacaacgggcatctccacatcgcccgcgcctttgccgacgaaatcggcttggacacggttgttttcctgccgacaggcggcccgtatcacaaagacgccgcctccgcttccgccgccgaccgccttgccatggtcgaattggcgacggcagaagatgcgcgttttgccgtcagcgactgcgacatcgtccgccggggcgagacttacactttcgacaccgtccaaattttccgccagcagttcccctcggcgcaactctggtggctgatgggcagcgacagcctgatgaagctgcacacatggaaaaaatggcagatgctcgtgcgcgaaaccaatatcgccgtcgccatgcggcagggcgacagcctgcaccaaaccccgcgcgaactgcacgcgtggctgggcaatgcgcttcaggacggcagcgtccgcatcttgtccgccccgatgcataatgtgtcgtcaacggaaatccgccgcaaccttgccggccaaggcgtttcagacggcatcccgcctgccgccgcacgctacatccgcgaacacggtttgtatgaaaaataa

SEQ ID NO: 55330 - DNA, 1197 bp, Neisseria meningitidis
atggcgaaaatcattacgccgctgtcggcaaatcaggttaaaaatgcgaagccgcgcgataagctgtataagttgtcagacgggggcgggctggctttgtgggtctacccgacgggcgggcggagttggaagctgtcgtttgtgcaggatggaaggcagcagacaatttcgctggggcggtatcctgatttttcgctggccgatgcgcgggaatggcgggaggaggtgcgccgaaaacgggcgcacggggaaaatgtcgtcaataagaaggtgcgggcggattttgcttttgagaaggtgacgcgtgattggtttgtgcgttggtcgaaggggcggtctgaaaagtatgccggacaggttatgcggaattttgaacggtgggtttttccggctatcggcaatcttgatattcgccaggtcaggacggcggatgtggtcggctgcctccgtgtgatggaggcgcgcggtatcgttgatacgttgcgcaaaacgaaaaacagtctgaagatggtgtttgcgtttgcggtcggttcgggaatgatggaaatcaaccctgtcgcgcaaatcggttcgggtgtgtttgaacgggcgaaaacggggaatatggcagcgttgagtccgtctgaattgccgcgcctgattgattttttggagcagcgcaatgaatttgcggtttatgcgggcagggtgcgtatccatcctgtaacgcggctttgtatctattggctgctgttgacaatgacgcggattcaggaggcggcgttgatggagtggtcggagttggacggggaggtttggcgtatccccgccgaacggaaaaaggagcggcgggggcatgatgtgccgctgtcgcgggcgatgcagtgggtgttggatcaggcgcgggcgttgaatgtgaacgggcggtttgtgtttgaaagtgtgaattttcaagggcatatcaataaggaaagtccgcgcgtggcgatgcagcgggcggggctggatacgacggcgcacggtttgcgctcgcttgcgcgtacttatttgcgcgaggttctgaaggtggataatgatgtggcggaaaagctgcttgcccattcgttggggacgaggacgcaaacggcttacaaccgctcggagctttgggaggagcgtaaggatgcgctggaacggtgggggaatgatgttttgaggcttgccaaaaacggaaaatga

SEQ ID NO: 55331 - DNA, 813 bp, Neisseria meningitidis
atggaaaatatcggcaggcagcgacccatcggcgtttttgactcgggaatcggcggtttgaccaatgtgcgcgcgctgatggagcggctgccgatggagaacatcatttatttcggcgatacggcgcgcgtgccttacgggacgaaatctaaggcgaccatcgaaaatttctcgatgcagattgttgattttttattggaacacgatgtcaaggcgatggttatcgcgtgcaacacgattgcggcggtggcggggcagaaaatccgtcaaaagacgggcaatatgccggttttggacgtgatttccgccggcgcgaaagccgcgctggcaacgacgcgcaacaacaaaatcggcattatcgccaccaatacgacagtcaacagcaacgcctatgcgcgcgccatccataggaacaaccccgacacgcttgtccgcacgcaggccgcgccgctgctcgtccctttggtggaagagggctggttggaacacgaagttacccgcctgaccgtatgcgaatacctcaaaccattgcttgcagacggcatcgatacgctggtgttgggctgcacgcactttcccttgctcaagcccttaatcggcagggaggcgggcaatgtcgcgttggttgattctgcaattacaacggccgaagaaaccgcacgcgtccttgctcaggaaggattgctcaataccgacaacaacaatcccgactaccgtttttacgtcagcgatattcctttgaaattcagaaccatcggcgagcgttttctgggcaggacgatggagcagattgaaatggtgtctttgggttaa

SEQ ID NO: 55332 - DNA, 273 bp, Neisseria meningitidis; identical to SEQ ID NO: 47339

SEQ ID NO: 55333 - DNA, 339 bp, Neisseria meningitidis; identical to SEQ ID NO: 42934

SEQ ID NO: 55334 - DNA, 441 bp, Neisseria meningitidis
gtgcgcgcctttcagacggcattgaggccgtcccgcatcctgaacatcctgactgtatcgcttcacgccgcctcccttgccgtctgcctgacttggttttacggctggatgatgtggttcggtttggcggctttggtggcaagttacgcatactcgctcaggataacgaatctgaaacaccgccatgccataaccgccattaccatagaccgcgacggacaggcggaaatcgtatccggcaaagacaaaacagcggcaacacttgcgggcagcagtatggttacgccttatgccttattcttacaatgggacacaggcggcacaaccgtcagccaatgcatcatacccgacatgacggacaaagaatcctaccggcggctgaaagtctggatactttggcggcagccgaaaaaaaccgccgaaaccgatacaccaagctga

SEQ ID NO: 55335 - DNA, 207 bp, Neisseria meningitidis; identical to SEQ ID NO: 45170

SEQ ID NO: 55336 - DNA, 852 bp, Neisseria meningitidis
atgattacccatccccaattcgaccccgtccttatcagtatcggcccgcttgccgtccgctggtatgccctaagctacatcctcggatttattctttttacctttctcggcagaaggcgcatcgcgcaaggcttgtccgtttttaccaaagaatcgctcgacgacttcctgacatggggcattttgggcgtaattttgggcgggcgtttgggttacgtcctgttttacaagttttccgactacctcgcccatccgcttgatattttcaaggtatgggaaggcggaatgtcgttccacggcggctttttgggtgtagttattgccatatggttgttcggtcgcaaacacggcatcggcttcctcaaactgatggacacggtcgcaccgctcgttccactgggtctcgcttcgggacgtatcggcaacttcatcaacggcgaactttggggacgcgttaccgacatcaacgcattttgggcaatgggcttcccgcaggcgcgttacgaagacctcgaagccgccgcgcacaatccgctttgggcagaatggctgcaacaatacggtatgctgccgcgtcatccctcgcagctttatcagtttgcacttgaaggcatctgcctgttcgccgtcgtttggctgttctctaaaaaacagcggccgaccggacaagtcgcctcactcttcctcggcggctacggcatattccgcttcattgccgaatttgcacgccaacccgacgactatctcgggctgctgaccttggggctgtcgatggggcaatggttgagcgtcccgatgattgttttgggtatcgtcggctttgtccggttcggcatgaaaaaacagcactga

SEQ ID NO: 55337 - DNA, 1566 bp, Neisseria meningitidis
atgacccaagacaaaatcctcatcctcgacttcggttctcaagttacccagctgattgcccgccgcgtgcgcgaagcccacgtttactgcgaactgcattccttcgatatgcctttggacgaaatcaaagccttcaaccccaaaggcatcatcctctctggcggccccaattccgtttacgaatccgactatcaagccgataccggtatttttgatttgggcattccggttttgggcatctgttacggcatgcagtttatggcgcaccacttgggcggcgaagtgcagcccggcaaccagcgcgaattcggttatgcgcaagttaaaaccatagacagcgagctgacacgcggcattcaagatggtgagccaaacacactcgacgtatggatgagccacggcgacaaagtgtccaaactgcccgacggtttcgccgtcatcggcaacaccccgtcctgcccgattgccatgatggaaaacgccgaaaaacaattctacggcatccagttccaccccgaagttacccacaccaaacaaggccgcgccctgttgaaccgctttgtcttggatatttgcggcgcacaaccgggctggacgatgccgaactacatcgaagaagccgttgccaaaatccgcgaacaggtcggcagcgacgaagtgattttaggtttgtcaggcggcgtagactcttccgtagccgccgcgctgattcaccgcgccatcggcgaccaactgacctgcgtgttcgtcgatcacggtttgttgcgcctgaacgaaggcaaaatggtgatggatatgttcgcccgcaacttgggtgtgaaagtgatacacgtcgatgccgaaaggcagtttatggcgaaactcgccggcgtgaccgatcctgagaaaaaacgcaaaatcatcggcgcggaatttatcgaagtatttgatgccgaagagaaaaaactcaccaacgccaaatggctggcgcaaggtacgatttaccctgacgtaatcgaatctgcaggcgcgaaaaccaaaaaagcccacgccatcaaatcccaccacaatgtcggcggcctgcctgaaaacatgaagctcaagctgcttgagccgttgcgcgacttgtttaaagacgaagtgcgcgaactgggcgttgctttgggtctgccgcgcgaaatggtgtaccgccatccgttccccggccccggtttgggcgtgcgcatcttgggcgaagtgaaaaaagaatacgccgacttattgcgtcaagcagacgatattttcatccaagaattacgcaacaccaccgacgaaaacggcacatcttggtacgacctgaccagccaggcatttgccgtattcctgcctgtgaaatccgtcggcgtaatgggcgacggacgcacttacgactacgtcgtcgcactgcgcgcagtcatcaccagcgacttcatgaccgcacactgggcagaactgccttactcactgctcggacgcgtgtccaaccgcatcatcaacgaagtcaaaggcatcaaccgcgtggtgtacgatgtcagcggcaaaccgcctgccaccatcgagtgggaataa

SEQ ID NO: 55338 - DNA, 1008 bp, Neisseria meningitidis; identical to SEQ ID NO: 55195

SEQ ID NO: 55339 - DNA, 2364 bp, Neisseria meningitidis
atgcaattctcctactcatggctgaaaacccaagccgataccgaactttcctccgataagctggaacatctgttaacgatgtccggcttggaagtggaagaggctgaaactgccgcgcctgcgtttgcgggcgtggtgattgccgaagtgaaatccgttgaaaaacatccggatgcagaccgtttgaacgttacccgagttgatgcgggtacgggcgggttggtgcagattgtgtgcggtgcgccgaatgtgaaagcgggcatcaaagtgccgtgttcgctgccgggtgccgttttgccgggtaatttcaaaatcaagccgaccaaaatgcgcggtgtgccatcaaacggtatgctgtgttcgaccaatgaactaggtttgcctgatgatggtgtagacggcctgcacattctgcctgaagatgcgcccgtcggtaccaatatccgcgaatacttggatttggacgatacgctgtttacgttgaaaattacgcctaaccgcgccgactgcttgagcatcaaaggcattgcgcgcgaagtgtccgcattgacggggtgcgcgttcaggcagcccgaaatccataccgcgccgatcacgggcagtcgaaaacagcccgtgcagattaacgcgcctgccgattgcggccgttttatcagccgcgttattgaaaatgtcaatgcgaaagcggctactcccgattggatgaaacaacgtttggagcgcagcggcatccgcagtatttccgcgctggtggacatcggcaattatgtgatgctggaaatcggtcagccgatgcacgtttttgatgccgacaaactttccggcagcctgcacatccgccgcgcgcgcgaaggggaaacgctggaatgcctgaacgagaaaaccgtttccctgtctgaaaacacgctggtcgtggcggacgaaaaaggcgtgttgagtttggcgggcttaatgggcggcgcggcgagcgcggtttcagacggcacgcaaaatatcgtgctggaagcggcttggtttgcgcccgaaatcatcgccggcaaatcgcgccaatacggtttcggttcggattcgtcgttccgcttcgagcgcggcgtggattaccgtttgcaggcggatgccatggaacgtgctaccgaattggtgttgcagatttgcggcggtgcggcaggcgagatggttgaagcacaaggtaaattgcccgaagccaagcaggtcggactgcgtttggaccgtctgaaaaccgtgttgggcgtggacattcctgccgaacaggtggaaaccattttgcaacacttgggcctgcagcccgagaaaacggcggaaggcttccgcgttaccgcgccgagcttccgttttgacatcgaaattgaggccgatttgattgaagaaatcggacgcgtttacggctatgaaaacatccccgacgattacacgtcaggccgtctgaaaatgctggaactgcccgaaacacgccgcccgcgttttgccgtttacaacgaaatggcggcgcacggctaccgcgaagtggtcagctatgccttcgttgacgagcagtgggaacaagattttgccgccaacgccgaccccatccgcctgcaaaacccgctggcggcgcaatatgccgtgatgcgttccacactcatcggcggcttggtggaaattttgcaaaacaacctgaaccgcaaacaaaaccgcgtgcgcgtgtttgaaatcgcccgcgtgttcggcaaaggttcagacggccggtttgtccaaaacgaacgcatcggcggtctgtggtacggcgcggcaatgcccgaacaatggggtgggaaaacgcgcaatgcggatttttacgacattaaggcagatgtggaaaatctgttgaaaaacaaagcagtcgagttcgttaaaaccggacatcccgccctgcatcccggacgtgccgccaatatcgtttcagacggcaaagtcatcggctttgtcggcgaactgcatccgaaatggctgcaaaaatacgacctgccgcaagcgccgctggtatttgaaatcgatatggcggccgtgttggaatgcgggaaaacgcgctatcgggccgtatcgaaattccagccggtgcgccgcgatttggcgtttgtgatgccggaagctatgagccatgatgatttgctgcttgtcttgaaaggcgcggcaaacaagttggtacaggaaatcagcgtgtttgacgtgtatcgcggcacgggactgcccgaagggatgaagagcgtggcggtcaaagtgattttgcaggatatggaaaacacgctgacggatgaggcggtcgagccgcttatcggaaaactgattggcgcggcaacggcggcaggggcgcggcttcgcagttaa

SEQ ID NO: 55340 - DNA, 1389 bp, Neisseria meningitidis
atgaatgcagtcgtagttgccgtaatcgttatgctggtgctgtcgctgtcgcgcgtgcacgtggtattgagcctgacggtcggcgcgtttgtcggcggcgcggtggcgggtatgccgctgcaaaacattgccgatgcggcgggacaggtcagtcaggcggggattatccccgtgttcaacaaaggtttggaaggcggtgcgaagattgcgctttcttatgcgatgctcggcgcgtttgcaatggcgattacccattccggcctgccgcaacagcttgccggcgcggtcgtccgcaagctgaaccggggcggtatgcccgacagcgtgcgttcgggcgagggcgcggtcaaatggctgctgctttccatcatccttgtgatgggcattatgagtcagaacatcatccccatccacatcgcctttatcccgatgattgttccgccgctgcttttggtgttcaaccgcctgaaaatcgaccgccgcctgattgcgtgcgtcatcactttcgggctggttacgacttatatgttcctgccttacggcttcggcgcgatttttttgaatgaaatcctgttgggcaacatccattccgccgcgccgcagcttgatgtgaaaaacatcaacgtaatggcggcaatggcgattcccgcgttgggaatgctggccggactcctgctggtgtttgtccattaccgcaaaccgcgcctgtaccaaagcaacaatgccgatacggcgggcaacgccgatgcggcaaaccgtccgcagccgtccgcctaccgcagcctggccgccgccgccgccattgccgtatgctttgccatccagttgatgtatgaagactcgctggtgttgggcgcgatgctcggtttcgccgtatttatgatgttgggcgtcatcaaccgcgacaaggcaaacgacgtattcggcgaaggcatcaagatgatggcgatggtcggcttcattatgattgccgcgcagggttttgccgccgtgatgaatgcgaccgggcatattcagccgctggtggaaagcagtatggcgatattcggcaacagcaaaggtatggcggcgttggcgatgctggtggtggggcttttggtaacgatgggcatcggttcgtccttttccactttgccgattattgccgcgatttatgtgcctttgtgtgtcggtttgggtttttcgccgcttgccaccgtcgccattgtcggcacggcgggggcgttgggcgatgccggttcgcctgcgtccgattccacgctgggcccgacgatggggctgaacgccgacgggcagcacgaccacatccgcgattccgttatcccgaccttcatccactacaacatcccgctgctgattgccggctggattgccgcgatggtgctgtaa

SEQ ID NO: 55341 - DNA, 591 bp, Neisseria meningitidis
atgggtttggaactgcctttgattttgggtacgagttcggttttccgccgcgaacagatggaaaggctcggcattgcctttcaggcggcgtcccccgattttgacgaaacgccgatgttgggggaatccgcccctcagacggcattgcgccttgccgagggtaaggcgcggtcgttgaccgggcgtttcccaaaggcgttgattgtcggtgcggaccaggtggcgtggtgcgacggcaggcagtggggcaagccgatgaaccttgctaatgcgcaaaagatgttgatgcatttgagcggcagggagattgagttttacagcgcggtcgttctgctaaatacggttacgggcaggatgcagcggcatatcgataagacggtggtcgtgatgaggcagttggacgagttgcacatcctccgctatttggagcgcgagcctgatgcggtttattgttcgtgtgcgctgaagagtgaggatttgggtgtattgttgattgaaaggattgagagtaccgatccgaatgctttaatcggtttgccggttttccgtctggtcgattttttgaaaaatgagggcgtggatgttttgtaa

SEQ ID NO: 55342 - DNA, 318 bp, Neisseria meningitidis; identical to SEQ ID NO: 43381

SEQ ID NO: 55343 - DNA, 957 bp, Neisseria meningitidis
atgaacaccgccgccatctaccgccagtaccaaacctatgtccgctccgataaatccggctgggcgttggacggctgttccgacagcgcgctcattgcgcaggcaaaacagcccggtttgcatctggaaatgtgcatcaaccgcttcgactcgggcatcaccttgtcgcggatgcgcggcggcggaacgggcgcgtttcccaccgaaatccacaatttcagccacaactgcgccttgttcgtcatggtgtcggggcagaaccggttacaaatgggcggcagggaataccgcccgtctgccggcgaaatctggctggtacgcggcgagttggcggacgtatccgaaaccctgctgcccgacaacagcggcatgtgcgcgctgcatttggatttttcgctggaaaaactgcgccgctggcacgacgaaggcttgctggacgaacgcctgttttcgccgcaaacaataggccgattcgccctgcaacggctggcgcaaaacgcagcggcactgacggcggcggcctgcccactgctgcaacgcccgttcgaatcggacggcttcggcctgcttgccgacgaagccgccgcgctggaactctccgcccgattattgcgcttcaccttccgccgccacgacaacggttaccgccgccggcgcatagacgaagccgccgacatcctgcaacacgaattcgcccgtccgctgaccatcgccgaaatcgcccgccgcgtcggactgaacgaatgctacctgaaacgctatttcaaagcgcaaaccggtgaaaccgtcgccggatgcctgcgccgcctgcggctggaacacgcgctcgccctcatcgaatccggcagcaccgtccaagccgccatgcacttttgcggctaccgccacgcgggacggttcaacgaagcgttcagacggcattacggatttttgccttcggatgtgaagaagtgctga

SEQ ID NO: 55344 - DNA, 426 bp, Neisseria meningitidis; identical to SEQ ID NO: 42184

SEQ ID NO: 55345 - DNA, 1470 bp, Neisseria meningitidis
ttgaaagcggttattccgcataccggaggacacgaaatgaacgaatattaccaattaatcaagcatcccgatatttccctttccccgatttcagacggcatcggggtcggcaatccggcaacgggcgaaattttggcgtatgtccgcaatacgggttcggacaaactgaaaaacctgattcaaaaggcggcggcagcgcaaaaattatgggcggcgaaaactgctttggaacgcgccgacatattgtggcgttggtattttttagttaaagaaaacaaagaagcactggcgcgcctgatgacgatggagcagggcaaaagcctgaccgagtcgcgcggcgaaattgattatgcggcttcgtttgtgcgctggtttgccgaagaggcgcggcggattgacggcgatgtgttaacgagtgtaaaagcgtcgcaaaaactggttgtgttgaaacagcctgtcggcgttaccgccgcgattacgccgtggaacttcccatctgcaatgattgcgcgcaaggctgcgcctgctttggcggtgggttgcgcgatgatcatcaaacccgcatcgctcacgcctttgagtgcgtatgccttggcttcgttggcttacgaagcgggcataccgcaggatttgttgcccgtcgtcagcggccgcgcatcggaaatcggccgtgaatttgccacgaacccgattatccgcaaaatcagcttcaccggttcgaccgaagtcggcgcgaaaatttttgccgacagcgcggcggacattaaaaaactcagtttggaactgggcggcaacgcgccgtttatcgtgtttgacgatgccgatttggacaaagccgtcgaaggtgcgctcgccagcaagttccgcaacagcggtcagacctgcgtctgcaccaaccgcgtttacgcccaatccggcatttacgacgaattttgtcgcaaattgagtgaaaaagtagccgagctcaaattgggcaacggcttggaggatggcgtcaaccaagggccgctgattgaggaaaaagcggtagaaaaagtcgagcagcacattgctgacgcgctcgctaaaggcgcggtctgtctgaccggcggcaaacgcagcgcattgggcggaacgttttttgagccgaccgtcttaagcggcgtaacggcgcaaatggcggtggctcgcgaagaaaccttcgggcctttgtgtccggtattccgttttgaaaccgaagccgaagtcattgaggctgcgaacaatacggaatacggtttggctgcttacctttttaccgccgacaccgcacgccagtggcgcgtcggcgaagcattggaatacggtatggtcggcatcaatacgggcttaatcagtaatgaagcggcaccgttcggcggcgtgaaacgcagcggtttgggacgtgaaggcagcaaatacggtgcggacgaatatctggaattgaaatatctgtgtatggatgtcgggtga

SEQ ID NO: 55346 - DNA, 258 bp, Neisseria meningitidis
atgaaagagtttcccgatttggaaaaacgcctgatcatgctggaagtcgccgttcaagacttggaagaaaggtcgcttaccgattccttcgtacttgcctggctgctccagcggattacccgtcaagagccgacttcgattgagcaggttcgcagtttccttcaagcgcaggcaaaaacgtttgagcctgattccgttcagcgggaacaccttgaatctttgcttgaaatcgttgaatccgcccaagggctcgcttga

SEQ ID NO: 55347 - DNA, 750 bp, Neisseria meningitidis
atggtattgcgcagggattttctgacttggtgtaatgaaacattgcagacagcgttgtttaaagattacgcccctaacggtttgcaggttgaagggagggaatatatcgggaaaatcgttacgtcggtaacggcaagcagggcagcgattgattttgctgtggagcagaaggcagatttgcttttggtacatcacggtatgttctggaaaaacgagttgccgaccgttactggttggaaaaaagaacggattgccgcactgttacggcacgacatcaatatggcaggctaccatctgcccctggatgcacatcccacactgggcaacaatgcccaactcgccgacagattgggttttgcgacagaaaaacggttcggcgaacaaaacctgctcaactcgggcagcctgaaacaagccaagacactcggcgcattggcggcgcatattgaaacagttttgcaacgtaagcctgtcgtcatcggcaaacccgaacgcgaaatccgacgggttgcatggtgtagcggcggggcgcaggggttttttcagacggcaatagacgaaggtgtcgatctgtatttgacgggggaaatctctgaagctcaataccaccttgccaatgaaacgggtacggctttcatttcggcagggcatcacgcgacggaacgttacggcgtacgcgcgctggcagaatcggcggcagaggttttcgggttggaagtgtgccattttgacgaaaacaatccggcttga

SEQ ID NO: 55348 - DNA, 3018 bp, Neisseria meningitidis
ttgatcgttattttgttgcttgcgcttgccggcttgttttttgtccgcgcacaatccgaacgcgagtggatgcgcgaggtttctgcgtggcaggaaaagaaaggggaaaaacaggcggagctgcctgaaatcaaagacggtatgcccgattttcccgaacttgccctgatgcttttccatgccgtcaaaacggcagtgtattggctgtttgtcggtgtcgtccgtttctgccgaaactatctggcgcacgaatccgaaccggacaggcccgttccgcctgcttctgcaaaccgtgcggatgttccgaccgcatccgacggatattcagacagtggaaacgggacggaagaagcggaaacggaagaagcagaagctgcggaggaagaggctgccgatacggaagacattgcaactgccgtaatcgacaaccgccgcatcccattcgaccggagtattgctgaagggttgatgccgtctgaaagcgaaatttcgcccgtccgtccggtttttaaggaaatcactttggaagaagcaacgcgtgctttaaacagcgcggctttaagggaaacgaaaaaacgctatatcgatgcatttgagaaaaacgaaacagcggtccccaaagtccgcgtgtccgataccccgatggaagggctacagattatcggtttggacgaccctgtgcttcaacgcacgtattcccgtatgttcgatgcggacaaagaagcgttttccgagtctgcggattacggatttgagccgtattttgagaagcagcatccgtctgccttttctgcagtcaaagccgaaaatgcacggaatgcgccgttccgccgtcatgcagggcaggcggaggcaaaatccccggatgtttcccaaggacagtccgtttcagacggcacagccgtccgcgatgcctgccgccgcgtttccgtcaatttgaaagaaccgaacaaggcaacggtttctgcggaggcgcggatttcgcgcctgattccggaaagtcggacggttgtcgggaaacgggatgtcgaaatgccgtctgaaaccgaaaatgttttcacggaaaccgtttcgtctgtgggatacggcggtccggtttatgatgaagctgccgatatctatattgaagaacctgctgcgcccgatgcttgggtggtcgaaccacccgaagtgccgaaagttcccatgcccgcaatcgatattccgccgccgcctcccgtatcggaaatctacaaccgtacctatgagccgccgacaggattcgagcaggcgcaacgcagccgcattgctgaaaccgaccatcttgccgatgatgttttgaatggaggttggcaggaggaaaccgccgctattgcagatgacggcagtgaaggtgcggcagagcggtcaaacgggcaatatctgtcggaaaccgaagcgttcgggcatgacagtcaggcggtttgtccgtttgaaaatgtgccgtctgaacgcccgtcctgccgggtatcggatacggaagcggatgaaggggcgttcccatctgaagaaaccggtgcggtatccgaacacctgccgacaaccgacctgcttctgccgccgctgttcaatcccgaggcgacgcaaaccgaagaagaactgttggaaaacagcatcaccatcgaagaaaaattggcggagttcaaagtcaaggtcaaggttgtcgattcttattccggccccgtgattacgcgttatgaaatcgaacccgatgtcggcgtgcgcggcaattccgttctaaatctggaaaaagacttggcgcgttcgctcggcgtggcttccatccgcgttgtcgaaaccatcctcggcaaaacctgtatgggtttggaacttccgaacccgaaacgccaaatgatacgcctgagcgaaatcttcaattcgcccgagtttgccgaatccaaatccaagctgacgctcgcgctcggtcaggacatcaccggacagcccgtcgtaaccgacttgggcaaagcaccgcatttgctggttgccggcacgaccggttcgggcaaatcggtgggtgtcaacgcgatgattctgtctatgcttttcaaagccgcgccggaagacgtgcgtatgattatgatcgatccgaaaatgctggaattgagcatttacgaaggcatcccgcacctgctcgcccctgtcgttaccgatatgaagctggcggcaaacgcgctgaactggtgtgttaacgaaatggaaaaacgctaccgcctgatgagctttatgggcgtgcgcaatcttgcgggtttcaatcaaaaaatcgccgaagccgcagcaaggggggagaaaatcggcaacccgttcagcctcacgcccgacgatcccgaacctttggaaaaactgccgtttatcgtggtggtggtcgatgagtttgccgatttgatgatgacggcaggcaagaaaatcgaggaactgattgcccgcctcgcccaaaaagcccgcgcggcaggcatccatcttatccttgccacacaacgccccagcgtcgatgtcatcacgggtctgattaaggcgaacatcccgacgcgtatcgcgttccaagtgtccagcaaaatcgacagccgcacgattctcgaccaaatgggcgcggaaaacctgctcggtcagggcgatatgctgttcctgccgccgggtactgcctatccgcagcgcgttcacggcgcgtttgcctcggatgaagaggtgcaccgcgtggtcgaatatctgaagcagtttggcgaaccggactatgttgacgatattttgagcggcggcggcagcgaagagctgcccggcatcgggcgcagcggcgacggcgaaaccgatccgatgtatgatgaagccgtatccgttgtcctgaaaacgcgcaaagccagtatttcgggcgtacagcgcaccttgcgcatcggctacaaccgcgccgcgcgtctgattgaccagatggaggcggaaggcattgtgtccgcaccggaacacaacggcaaccgtacgattctcgtccccttggacaatgcttga

SEQ ID NO: 55349 - DNA, 1116 bp, Neisseria meningitidis; identical to SEQ ID NO: 36703

SEQ ID NO: 55350 - DNA, 1131 bp, Neisseria meningitidis
atgtttaccgatgaaaatatgaccgcaaaggaagaactgttcgcatggctgcgccatatgaacaaaaacaaaggttccgacctgtttgtgacgacccatttcccgcccgcaatgaagctggacggcaaaatcacccgcatcacggacgaaccgctgacggcggaaaaatgtatggaaatcgccttttcgattatgagtgcgaagcaggcggaagaattttcatcgaccaacgagtgcaacttcgccatcagcctgccggacaccagccgcttccgcgtcaatgcgatgatacagcgcggcgcgacggcgttggtattccgtgcgattaccagcaagattcccaagtttgaaagcctgaacctgccgccggtcttgaaggatgtcgcgctgaaaaaacgcgggctggttatttttgtcggcggcaccggctcgggcaaatcgacttcgcttgcctcgcttatcgattaccgcaatgaaaattcgttcggacatatcatcaccatcgaagacccgatcgagtttgtccacgaacacaaaaactgcatcatcacccagcgcgaggtcggcgtggatacggaaaactggatggcggcgttgaaaaacacgctgcgtcaggcgccggatgtcatccttatcggcgaaatccgcgaccgcgaaacgatggactacgccattgcctttgccgaaacggggcatttgtgtatggcgacgctgcacgccaacagcaccaatcaggcactcgaccgcatcatcaactttttccccgaggagcggcgcgaacaattgctgacggatttgtcgctcaaccttcaggcgtttatttcgcaacgcctcgttccgcgagacggcggcaagggcagggtggcggcagtcgaggtgctgctcaattcgcccctgatttcggagttgattcacaacggcaacatccatgaaatcaaagaagtgatgaaaaaatccactaccctgggtatgcagaccttcgatcaacacctttaccaattgtatgaaaaaggcgatatttccctgcaagaagcattgaaaaatgccgattccgcacacgatttgcgtttggcggtacagttgcgcagccgccgcgcgcaaagttccagccccgatttggaactgctctga

SEQ ID NO: 55351 - DNA, 603 bp, Neisseria meningitidis
atgactgatatgcttcagacggcattttatattatgttatttccgagaattatcgctgcatcagcgcaacgtaagttaagcgtttatttaaaaaaaggcggtttggtcgcttatccgaccgaatcttgttatggcttggggtgtcttccgacattagccaaagcactcggtaagttggcgcatttgaaaaaaagaccgcaacacaagggtatgattgtcatcgggaatcaatttgaacaattgcagcctttacttcaaatgccgtctgaaaatcttcaggatatgcttagaaaagaatggcccgcccctaaaacgttcctattatccgccaaatcctgtgtcttacctgagttgcgcgggaaacagcgcagcaagttggcggtcagggttcccgcccatgtaggtgcgcgccgcttgtgtcaggctttgcaaacgcctttggtttcgacttcgtgcaaccgcgcaggcaaacgcgcgtgtcggacggagagggaagtcagaaggcaattcggacgcgatgtgtggattgttggtgggagaatcggcaggcagaaatcgccgagtcagattattgacggggaaacaggtaaacgtttgcgttga

SEQ ID NO: 55352 - DNA, 1548 bp, Neisseria meningitidis
atgcagcttaatcctgctgaaattagcgatttgattaaagccaagatcgaaaatctgtctgtaaatgccgaagtgcgtacccgtggtacggtgatttcggtaactgacggtatcgttcgcatccatggtttgtcagatgcaatgcaaggtgagatgctcgaattcccgggtaacactttcggcttggcgatgaacctggagcgcgactccgtcggcgccgtagtgttgggcgagtacgaacatattaaagaaggcgacacggttacctgtaccggtcgtatcttggaagtgccggtcggacgcgaactggtcggacgcgtcgttgatgcattgggtcggcctatcgacggcaaaggcccgattaatacaactttgaccgcccctatcgaaaaaatcgcaccgggcgtgattgcgcgcaaatcggttgaccagccgatgcaaaccggtctgaaggcgattgactctatggttcctgtcggtcgcggtcagcgtgagttgattattggcgaccgtcagacaggtaaaacggccgtagcattggatgccatcgtcaaccaaaaaggtacgggcgttatctgtatttatgtcgctatcggtcaaaaagcatcttctattgccaacgtggtccgcaaattggaagagcatggcgcgatggaacacacgattgtggttgctgcaactgcatctgaagcggcggcattgcaatatatcgcaccttactccggttgtacgatgggtgaattcttccgcgaccgcggcgaagatgccttgattgtttatgacgatttgtccaaacaggctgtggcttaccgtcaaatttccctgcttttgcgccgtccgcccggccgcgaagcctatcccggcgatgtgttctacctgcactcccgtctgttggaacgtgcagcacgtgtcaatgaacacgaagtggagaaattgaccaacggcgaagtaaaaggcaaaaccggttctctgactgctttgccgattatcgaaacccaagcgggcgacgtatctgctttcgttccgactaacgtcatttcgattaccgacggtcagattttcttggaaaccgacctcttcaacgccggtatccgtcctgcaatcaatgccggtatttccgtatcccgcgtaggcggtgctgcacaaaccaaagtgattaaaaagctgggtggcggtatccgtttggcgttggcacaatatcgtgaattggcggcgttctcgcaatttgcatccgatttggatgaagctacgcgcaaacaattggagcatggcgaagtcgtaaccgaactgatgaaacagaaacagttcagtacgttgaatacggctgaaatggctttgaccctttgggcaatcaacaacggttcgtattctgatgttccggttgccaaagctctggcttttgaatctgaatttttgagctttgtccgtacccaacatccggaagttttggaagccgtcaatgcttcaggtgcaatgtccgacgagagcgagaaaacgcttgaagcagccatgaaatccttcaaatcttcttacgcctatcaggcataa

SEQ ID NO: 55353 - DNA, 231 bp, Neisseria meningitidis
atgaacatcgttaaaaaatacgctgtaaaagcagtcttggcagccggtatcttcacaccggccattgttatggcagatacctttgatgcatccgcgattggtacgcaagtagcgaatgtaatcatgggtttcgtgtcaatggtttccgccgtgggtatggcggccattaccgtgattcttgcaatccaaggcttcaaaatggcttggagcatgattaaatctgtcagataa

SEQ ID NO: 55354 - DNA, 573 bp, Neisseria meningitidis; identical to SEQ ID NO: 48968

SEQ ID NO: 55355 - DNA, 471 bp, Neisseria meningitidis; identical to SEQ ID NO: 43747

SEQ ID NO: 55356 - DNA, 1569 bp, Neisseria meningitidis
atgaaacaccgtactttcttttccctttgcgccaagttcggctgcctgcttgcgctgggtgcttgttcgcccaaaatcgtcgataccggagccgcgaccgtgccgcacactttatccactttgaaaaccgcagacaaccgccccgccagtgtttacttgaaaaaagacaaaccgacgctgattaaattttgggcgagctggtgtcctttgtgtctgtccgaattgggacagaccgaaaaatgggcgcaagatgcaaaattcagctccgccaacctgattaccgtcgcgtctccgggctttttgcacgagaaaaaagacggcgacttccaaaaatggtatgccggtttgaattatcccaagctgcccgtcgtaaccgacaacggcggcacgatcgcccaaagcctgaatatcagcgtttacccctcgtgggcgttaatcggtaaagacggcgacgtgcagcgcatcgtcaaaggcagcatcaacgaagcgcaggcgttggcgttaatccgcgacccgaatgccgatttgggcagcttgaaacattcgttctacaaacccgacactcagaaaaaggattcaaaaatcatgaacacgcgcaccatctacctcgccggcggctgcttctggggcttggaagcctatttccaacgcatcgacggcgtggttgacgcggtatccggctacgccaacggcaacacgaaaaatccgagctatgaagacgtgtcctaccgccatacgggccacgccgaaaccgtcaaagtgacctacgatgccgacaaactcagcctagacgacatcctgcaatatttcttccgcgtcgttgatccgaccagcctcaacaaacagggcaacgacaccggtacgcaataccgcagcggcgtgtactacaccgaccccgccgaaaaagccgtcatcgccgccgccctcaaacgcgagcagcaaaaataccaactgcccctcgttgttgaaaacgagccgctgaaaaacttctacgatgccgaggaataccatcaggactacctgattaaaaaccccaacggctactgccacatcgatatccgcaaagccgacgaaccgctgccgggcaaaaccaagaccgccccgcaaggcaaaggcttcgatgcggcaacgtataaaaaaccgagtgacgccgaactcaaacgcaccctgaccgaagagcaataccaagttacccaaaacagcgcgaccgaatatgccttcagccacgaatacgaccatttgttcaaacccggcatttatgtggacgttgtcagcggcgaacctttgttcagctccgccgacaaatatgattccggctgcggctggccgagcttcacgcgcccgattgatgcaaaatccgttaccgaacacgatgatttcagcttcaatatgcgccgcaccgaagtgcgcagccacgccgccgattcgcatttgggacacgtcttccccgacggcccgcgcgacaaaggcggactgcgctactgcatcaacggcgcgagcttgaaattcatcccgctggaacaaatggacgcggcaggctacggcgcgttgaagagtaaagtgaaataa

SEQ ID NO: 55357 - DNA, 903 bp, Neisseria meningitidis
atggacagcctgatgacattgatttcggttttgataccgatgtttgccggattttttatccgtgtgcccaagccttacctgcccgctttggataaggtgctatcggttttggtgtatgccgtgctgctgctgatcggcgtatcgttgtcgcgcgtggaggatttgggttcgcggttggacgatatggcgttgacggttctgtggctgtttgtttgtacggtcgggacgaacctgcttgctttggcagtgttgggaaagttattcccgtggcggataaaggggaaagggaagggcgtttcggtcggtgtgtcgggcagtgtggggcagctcggatgcgtgctgctcggatttgcatccggcaaactgatgcgcgatatttggatgccgtctgaaagcgcgggcatgtattgtctgatgctgctggtgttcctcatcggcgtacagctcaaaagcagcggcctatcgttgcggcaggttttggtcaaccgcaggggtattcggttgtcggtctggtttatgctttcatctctttcgggcgggctgctgtttgccgcatcggcagacggtgtgtcgtggacgaaaggtttggcgatggcttccggcttcggttggtattccctctcgggtttggtcatgaccgaggcttacggcgcggtatggggcagcatcatgctgctgaacgatttggcacgagagctgtttgcactggcatttatcccgctgctgatgaagcgttttccggatgcggcggtgggggttggcggtgcgaccagtatggattttacattgcccgtgattcagggtgcgggcggtttggaagtcgtgccggtagcggtcagcttcggcgtggtggtcaatattgccgccccgtttctgatggtggtgttttccacgctgggctga

SEQ ID NO: 55358 - DNA, 1092 bp, Neisseria meningitidis
atgagtttgaaatgcggcatcgtcggtttgcccaacgtcggcaaatccaccctctttaacgcgctgacccagtcgggtatcgaagcggcaaactatcctttctgtaccatcgaacccaacgtcggcatcgtcgaagtccccgatccgcgtatggtcgaattggcaaaaatcgtcaatccgcaaaaaatgcagcctgccatcgtcgaatttgtcgatattgccggtttggttgcaggcgcgagcaaaggcgagggcttgggcaaccagttcctcgccaacatccgcgagactgacgcgattgttaacgtcgtacgctgctttgacgacgacaacatcgtccacgtttccggcaaagtcgatccgattgccgacatcgaaaccatcggtacagagttggcgcttgccgacttggcaagtgtggaaaaagccatcgtccgcgaagaaaaacgcgcccgttccggtgacaaagacgcgcaaaagctggtcgatttgtgcaaaaaactgctgccgcatctggacgaaggcaaacccgtgcgttccttcggtttggacgcggaagaacgcgcgatgctcaaaccgctgttcctgctgaccgccaaaccggcgatgtatgtgggcaacgtcgccgaagacggttttgaaaacaatccgcacctcgaccgcctgaaagaattggcggcaaaagaaaacgcccccgtcgtcgccgtttgcgccgcaatggaaagcgaaatcgccgaattggaagacgacgaaaaagccgagttcctcgccgaaatgggcttggaagaaccgggcctgaaccgcctgatccgtgccggctacgaccttttggggctgcaaacctactttaccgccggcgtgaaagaagtccgcgcttggacgatacacaaaggcgacaccgccccgcaagccgccggcgtgattcacaccgactttgagcgcggcttcatccgcgcccaagtcatttcttacgacgactttgtctcgctcggcggcgaagccaaagccaaagaagccggcaaaatgcgtgtggaaggtaaggaatacgtcgtgcaggatggggatgtgatgcactttttgtttaacgtgtaa

SEQ ID NO: 55359 - DNA, 2889 bp, Neisseria meningitidis
atgagtaacacaaccgtagaacaatttgccgccgagctgaaacgccccgtcgaagacctgttgaaacagttgaaagaagccggcgtcagcaaaaacagcggcagcgattccctgacgctggacgacaaacagcttctgaacgcctacctgaccaagaaaaacggcagcaacggcggcaccatcagcatccgccgcaccaaaaccgaagtcagcaccgttgacggcgtaaaagtcgaaacacgcaaacgcggacgcactgtcaacattccttctgccgaagaattggcagcacaggtaaaagccgcccaaacccaagccgcacctgtccggccggagcagacggcagaagacgcggcaaaagcccgagccgaagctgccgcacgtgcagaagcccgtgccaaggcagaagcggaagcggcaaaactgaaagcggcaaaagcaggcaacaaagccaaacctgccgcgcagaaacccaccgaagcaaaagccgaaaccgcacccgttgcggcggaaaccaaacccgccgaagaaagcaaagcggaaaaagcccaagccgacaaaatgccgtctaaaaaacccgccgagcccaaagaaaaagccgccaagccgaaacacgagcgaaacggcaaaggcaaagatgccaaaaaaccggcgaaacctgccgcacctgccgtgccgcaacccgtggtcagcgcggaagaacaggcgcaacgcgatgaagaagcacgccgtgccgccgcacttcgcgcccaccaggaagccctgttgaaagagaaacaggaacgccaggcacgccgcgaagccatgaaacaacaggcagaacaacaggcaaaagccgcacaggaagccaaaaacggcagacagcgtcccgccaaacctgccgagaaaccgcaggcagccgcgccggccgtcgaaaacaaacctgtcaatccggcaaaagcgaaaaaagaagaccgccgcaaccgcgatgacgaaggtcaaggccgcaacgccaaaggcaaaggcggaaaaggcggacgcgaccgcaacaatgcacgcaatggcgacgacgagcgcgtacgcggcggcaaaaaaggcaaaaaactcaaactcgagccgaaccaacacgccttccaagcaccgaccgaacctgtcgtacacgaagttttggtgcctgaaaccattaccgttgccgacttggcacacaaaatggcagtcaaaggcgtggaagtggtcaaagccctgatgaagatgggcatgatggttaccatcaaccaatccatcgaccaagacaccgccctgattgtcgtcgaagaactcggacacatcggcaaacccgccgcagcggacgatcccgaagccttcttggacgagggcgcagaagcagtggaagccgaagcattgccgcgtccgcccgttgttaccgtcatgggacacgtcgaccacggcaaaacctcgctgctggactacatccgccgtaccaaagtggtacagggcgaagcaggcggcattacccaacacatcggtgcataccacgttgaaaccccacgcggcgtgattaccttcttggatactccgggtcacgaagcgtttaccgccatgcgtgcgcgcggtgcgaaagcaaccgatatcgtgattcttgtggtcgccgccgacgacggtgtgatgccgcaaaccatcgaagcgattgcccacgccaaagcggcaggcgtaccgatggtggttgccgtcaacaaaatcgataaagaagccgccaacccagagcgtatccgccaagagctgaccgcacacgaagtcgtgcctgacgaatggggcggcgatgtacagtttatcgacgtttccgctaaaaaaggcctgaacatcgatgcattgctcgaggcagtcttgctcgaagccgaagttttggaactgaccgcacctgtcgatgcgcccgccaaaggcatcatcgtcgaggcgcgcttggacaaaggccgcggcgcggttgccacattgctggttcaaagcggcacgctgaaaaaaggcgatatgctgctggccggtacggcattcggcaaaatccgcgcgatggtcgatgaaaacggcaaatccattaccgaagccggtccgtccatccccgtcgaaatcctcggcttgtccgacgtaccgaatgcgggtgaagacgcgatggtattggcggacgagaaaaaagcgcgcgaaatcgccctcttccgccaaggcaaataccgcgacgtgcgccttgccaaacagcaggcggcgaagctggaaaatatgttcaacaatatgggcgaaacccaggcccaatctttgtcggtcatcatcaaggcagacgttcagggctcttacgaggctttggcgggcagtctgaaaaaactgtccacagacgaagtgaaagtgaacgtgttgcacagcggcgtgggcggcattaccgaatcggatgtcaaccttgccatcgcgtccggggcgttcattatcggctttaacgtgcgtgcagatgcctcttcgcgcaaacttgccgaaaatgaaaatgtggaaatccgctactacaacatcatctatgatgccatcgacgacgtgaaagccgccatgagcggtatgctttccccggaagagaaagaacaggttaccggtacggtcgaaatccgtcaggtcatctccgtttccaaagtcggcaacattgcaggctgtatggttaccgatggtgtggtcaaacgcgattcccatgtccgcctcatccgcaacaacgtggtcatccacacgggcgaactggcttcgttgaaacgctataaagacgacgtaaaagaagtccgcatgggctttgagtgcggtctgatgctcaaaggctacaacgaaatcatggaaggcgaccaactggaatgcttcgacatcgtcgaagttgcccgcagcctgtaa

SEQ ID NO: 55360 - DNA, 384 bp, Neisseria meningitidis; identical to SEQ ID NO: 50847

SEQ ID NO: 55361 - DNA, 171 bp, Neisseria meningitidis
atggcgcaatatatgtgcggcccctgcggctggatttacgatgaagaacacggcgacccagaacacggcatcgcccccgggacaaagtttgaagacatccccgacgactggaaatgccccgaatgcggcgtgggcaaagaagatttctacctgttggatttcgtgatatag

SEQ ID NO: 55362 - DNA, 291 bp, Neisseria meningitidis; identical to SEQ ID NO: 54579

SEQ ID NO: 55363 - DNA, 387 bp, Neisseria meningitidis
ttggctgaaggtcaaaaatcagccgtcacagagtattacctgaatcacggcgaatggcccggcaacaacagtgatgccggcgtggcatcctcaaccgacatcaaaggcaaatatgttcaaagcgttgaagtcaaaaacggcgtcgttaccgccacaatggcttcaagcaacgtaaacaacgaaatcaaaggcaaaaaactctccctgtgggccaagcgtcaagacggttcggtaaaatggttctgcggacagccggttaagcgcgccgacaccgacgaagtcaccgccgacagcggcaacgacaaaatcgacaccaaactaaagaaaccgttttacccgataagtttccgtaccgacaaggctggattcccgcctgcgcgggaatga

SEQ ID NO: 55364 - DNA, 1266 bp, Neisseria meningitidis
atgtctgaagcccttgcaaaagaaaccctcaatccgtttgaaatcgcgcgcaaacaggtcaaaaccgcctgcgaccggctgaaaaccgatccggccgtttatgaaatcctgaagagtccgacccgcgtgttggaagtcaatttccccgtcaaactcgacgacgacacggtcaaaaccttcacgggctaccgttcgcaacacaacaacgccgtcggcccctataaaggcggcgtgcgcttccatcccggagtgaatctggacgaagtcaaagccctgtcgatttggatgaccatcaaatgctgcgtagcgggcattccttacggcggcggcaaaggcggcgttaccttggatccgcgcgattattccgaggcggaactggaacgcatcgcccgcgcttattccgaagccatttctccgctgatcggcgaaaaaatcgatattcccgcccccgatgtgaacaccaacggcaaaatcatgtcttggatggttgatgcctatgaaaacgtggtgaaacattctgcaccgggcgtatttaccggtaaaccggttgagttcggcggctctttggcgcgtaccgaggctaccggttacggcgtgaacctcgccgccgtccaagccttggaaaaactgggcaaggacgtgaaaggcgcgacttacgccatccaaggcttcggtaatgtcggttaccacacaggttattacgcgcatcaatccggcgcgaaagttgttgcggtttctactgttgacgttgccatttacaacgaaaacggtttggatatggaagccctgttcaaagagttccaagaaaaaggcttcatcaccaacgaagccggttacggcaaggaaattaccaacgccgaacttttggctttggatgtggacgtactcgccccttgcgcgctggaaaatcaactgacttctgaaaacgccggtaaagtccgcgcgaaaatcgtggtcgaaggcgcgaacggcccgactacgcccgaagccgacgttatcctgcgtcaaaacggcgtattggtcgtgcctgatattctggcgaactgcggcggcgtggtcgtttcctatttcgagtgggtgcaaaacctgcaaggctattattgggagtttgacgaagttcaagagaaagaaaccgtcgtcctgcgccgagcgttccgcgatatttggaacttggctcaagaatacgatgtcgatttgcgaaccgcgtcttatatgatgagtatccgccgtgttgaaaaagcgatgaaactgcgcggttggtattga

SEQ ID NO: 55365 - DNA, 1395 bp, Neisseria meningitidis
atgaccccttccgcactgaaaaaaaccgtcctgctgctcggcactgcctttgccgccgcatccgcacaagcctccggctaccacttcggcacacagtcggtcaacgcgcaaagcacggcgaatgccgccgccgcagaagccgccgacgcatcgaccatcttctacaaccccgccggcctgaccaaactcgacagcagccagatttccgtcaacgccaatatcgtatttccaagcatccgttatgaagcggattccgccaccgactttaccggcattcccgtccaaggttcgaaaagcggcaaaatcaccaaaaccacggttgcgccccacatctacggcgcatacaaagtcaacgacaatctgaccgtaggcttgggcgtgtacgtccccttcggctctgccaccgaatacgaaaaagattccgtattgcgccacaacatcaacaaactcggtctgaccagcatcgccgtcgaacccgtcgccgcgtggaaactcaacgaacgccattccttcggcgcaggcatcatcgcccaacatacttctgccgagctgcgcaaatatgccgactgggggatcccaaaaaaagcgcaaatgctgcaagcaacaccttctaatcctactgccgctgctcaaatcaaagccgacggacacgccgatgtcaaaggcagcgattggggcttcggctaccaactggcgtggatgtgggacatcaacgaccgcgcacgcgtgggcgtgaactaccgttccaaagtctcacacacgctcaaaggcgatgccgaatgggcggcagacgacgcaatggcgaaacaactgtggaatagcaatatgctcgcaccgctcggctacacggcgaatgaaaaagcccgcgttaaaatcgttacgcctgagtctttgtccgtacacggtatgtacaaagtgtccgataaagccgacctgttcggcgacgtaacttggacgcgccacagccgcttcgataaggcggaactggtttttgaaaaagaaaaaaccatcgtcaacggcaaatccgaccgcaccaccatcacccccaactggcgcaacacctacaaagtcggcttcggcggttcttatcaaatcagcgaaccgctgcaactgcgcgccggcatcgcttttgacaaatcgcccgtccgcaacgccgactaccgcatgaacagcctgcccgacggcaaccgcatctggttctccgccggcatgaaataccatatcggcaaaaaccacgtcgtcgatgccgcctacacccacatccacatcaacgacaccagctaccgcacggcgaaggcaagcggcaacgatgtggacagcaaaggcgcgtcttccgcacgtttcaaaaaccacgccgacatcatcggcctgcaatacacctacaaattcaaataa

SEQ ID NO: 55366 - DNA, 1203 bp, Neisseria meningitidis
atgaagaattaccacgcacccgacgagaagggcgttttcggcgaacacggtgggctttatgtttccgagaccctgattcccgccttgcaagagctggcggatgcctataaggcagcgaaaaacgacccgtcgttttgggaagaattccaccgcgatttgaaacactacgtcggcaggcccagccccgtttaccatgccgcgcgattgtccgagcatttgggtggcgcgcaaatttggttgaagcgcgaagacttgaaccacaccggcgcgcacaaagtcaacaacaccatcggtcaggcactgttggcaaaacgtatgggtaaaaaacgcgtcatcgccgaaaccggcgcgggtcagcacggcgtggcgagtgccactgttgccgcccgcttcggcatgacttgcgacgtgtacatgggtgcggacgacatccaacgccaaatgcccaacgtgttccgtatgaaattattgggcgcgaatgtcgtcggcgttgacagcggcagccgtactttgaaagacgcgatgaacgaagccatgcgcgaatgggtcgcccgcgtggatgacacattctacatcatcggtaccgccgccggtcccgcgccgtatcccgaaatggtgcgcgactttcaatgcgtgatcggcaatgaagccaaagaacaaatgttggaagccatcggcagacagcccgacgttgccgttgcctgcgtgggcggcggatcgaacgccattggtttgttccacccgtatatcggcgaagaaaacgtgcgcctcgtcggcgtggaggctggcggtttgggcgtgaacacccccgatcacgccgcgccgattacttcgggctcaccgattggcgtattgcacggtttccgcagctatctgatgcaggacgaaaacggtcaagtcttgggtacacactctgtttccgcaggcttggattaccccggcatcggcccggaacacagccatctgcacgacatcaagcgcgtcgaatacaccgttgccaaagacgacgaagcactcgaagcctttgacttgctctgccgcttcgagggcatcatccccgcgctcgaatccagccacgccgttgcttgggcggtgaaaaatgcgccgaaaatgggtaaagaccaagtgattctggtcaacctctcaggtcgtggcgacaaagacatcaataccgtcgcgaagctcaaagggattaaactgtaa

SEQ ID NO: 55367 - DNA, 1623 bp, Neisseria meningitidis
atgaaaacaaaagaattcctcaaatcccttgccgaactggccgccagtttgcgccaagtcatcgaagcggaagtggacggctttgatgcgtcgcccaaggctattgctgcacgccgtgccaaggtgtttgacccggtaggcggttacgagtatttcgtcaacacctactttccgcattatatccgctcccctgaaaaatccgaactgcatgcgtttttattcagccgtctgccggagattatccgctcccccaaaggggaaaatgaggcggtgggtgcgccgcgtggcgagggtaagtcgacgcaggttactcagttgtttacgctgtggtgtattgtgacaggccaaaaacattatgccgttattgtgatggacagcatagatcaggcatacccgatgctcgaagccatcaaggcggaattggaatttaatccgcgcttgaaaaccgactttccggaagtatgcgggcagggccgcgtatggcaggccggtacgattgtgacggccaatgacgttaaagtccaagtggccggtagcggtaaaaagctgcgcggtttgcgtcacggcccttaccgtcctgacctgaccatattggacgatattgagaatgacgagcaagtccgcaaccccgaacagcgcgacaagctcaatgcgtggctgactaagactgtattgcctttgggcggtgtcggccagaaatacgatgtgatatatatcggcacgattttgcattacgacagcgtacttaaccgcactttgaataacccgttttggcacggtattaagtttaaggcgatgaaacgctggcccgaccgcatggatttgtgggacagatgggaggaacttttccgaaacgacggcgagactgtggccgaggcgttttatctcgccaataaagacgagatggagcgcggtgcgcaaacaagctgggcggctcgcggcgtactcgcgctgatgaaaatccgtgcgcgtgacggtcatgcgacatttgacagcgaatatcaaaacgacccggtcagcggcgaagatgcgccgtttgccaagtcgatgaagttttggaacgacctgccgtccgatttggtgtatttcggtgcgctcgacccgtcgctgggtaaagcgggggcgagccgtgacccgtcggcgattatcattggcggttatcaacgtgaaaccggcaaactgtatgtcgtggaagctcagattaaaaaacgtctccctgatttgattattgaggacgttatcagattgcaccgtcaatatcgttgcaaactgtggtttgttgagacggttcagtttcaggaatttttgaaagatgagctggtcaagcgcagcgcggcgcgtggaatacctgtcccggcgcgggcggtcaagccggtatcggacaagctcttgcggattgagactttacagcctcacatggcgaacggtttgattctgttgaatgagagccaacagacgctgatacagcagttccgccattttccaaaggctgatcatgatgatggtcctgatgcagtgcatatgctctggtcgggggcggtggccaattgtgtgccgatagaatggcaaagccctaccgataacgattttgatgacgagataaaaagtaaatggagccgataa

SEQ ID NO: 55368 - DNA, 1329 bp, Neisseria meningitidis
atgaaaaaagtatttatccgcaccttcggctgccagatgaacgaatacgacagcgacaaaatgctcgccgtcctcgccgaagaacacggcggcatcgaacaggttacccaagccgacgaagccgacatcatcttgttcaacacctgctccgtgcgcgaaaaagcgcaagaaaaagtcttctccgatttggggcgcgtgcgtccgctcaaagaaaaaaaccccggcctcatcatcggcgttgccggctgcgtcgcctcgcaagaaggcgaaaacatcatcaaacgcgcgccttatgtggacgtagttttcggcccgcaaacgctgcaccgcctgccaaaaatgattgtggacaaagaaaccagcgggctgtcgcaagtcgatatttccttccccgaaatcgaaaaattcgaccacctgccgcccgcccgcgtcgaaggcggcgcggcatttgtatcgattatggaaggctgttccaaatactgctccttctgcgtcgtcccctacacgcgcggcgaagaattctcccgcccgctcaacgacgtattgacagaaatcgccaaccttgcccagcaaggcgtgaaagaaatcaacctcttgggacaaaacgtcaacgcctatcgcggcgaaatggacgacggcgaaatctgcgacttcgccaccctgctgcgcatcgtccacgaaatccccggcatcgaacgtatgcgcttcaccaccagccacccgcgcgagtttaccgactcgattatcgagtgctaccgcgacctgccgaagctggtttcccacctgcacctgccgattcaaagcggttccgaccgcgtattgagcgcgatgaaacgcggctacaccgctttggaatacaaatccatcatccgcaaactgcgtgccatccgtcctgatttatgcctgagcagcgatttcatcgtcggcttccccggcgagaccgaacgcgagttcgagcaaaccttgaaactggtgaaagacatcgccttcgacttgagcttcgtctttatttacagtccgcgccccggcacgcctgccgccaacttgcacgacgacacgccgcatgaagaaaaagtgcgccgcctcgaagctttgaacgaagtcatcgaagccgaaaccgcgcgcatcaaccaaaccatgatcggcacggttcaacgctgcctggttgaaggtatctccaaaaaagaccccgaccaactgcaagcccgtaccgccaacaaccgcgtcgtcaacttcaccggcacgcccgacatgatcaaccaaatgatcgatttggaaatcaccgaggcctacaccttctccctgcgcggcaaaattgtcgaagcctaa

SEQ ID NO: 55369 - DNA, 612 bp, Neisseria meningitidis
atgcgccgcaccgccctcctgctgctcgcactcaccgccggcacgtcccttgctgccggcttcaaccaaaaagacacgccgatcaacacccgctaccgcgaaacgcccgaagaagccgccgcccgcgaatttaaagaacataccgccaaactgccgccgctgcccgatacgcactcggacggctggtttgacatttatgtggatgaaaattacggcaaacagccgaaaatcctgctcgacagcctgcaaattatgcccgcgcccgacggcagcatccgctacattctcaatatccgctccgacaaaggctacgacaacctgactgccgaaggcatattctgcgcccgcttctccatcaggttcggcaacggcaaaccttcctcctataaagtgttcggctacggcgacacggtcaaccgccgctggatacagccccgaaacgccgaatggaaaccgataggcggtacattaagccgcaacgacgcactgcgcaccgtcctgtatcaggcattctgcgagggcggtgtacccgccgacacgaaaggtttggtacaacgcctgaaagaacgtgccggacgctatgccccgtcgatgaagccgcacgacaaataa

SEQ ID NO: 55370 - DNA, 1032 bp, Neisseria meningitidis
atgctgcaaaccgacaacctgactgccgctcaaccgcaacgcattgttgccgcccaaaccgcctccgcacaggaagaactgctcgaacgcgccctccgccccaaaacgctggacgactatatcgggcagcataaagccaaagaacagctcgccattttcatccaagccgccaaaaagcgcggcgaagcactcgaccacgtcttgcttttcggtccgcccgggctgggtaaaaccacactggcgcacatcatcgccaaagaattgggcgtaaatttgcgccaaaccagcggccccgtcctcgaacgcgccggcgacctcgccgcccttttgaccaaccttgatccgcacgacgtattgtttatcgacgaaatccaccgcctcagccctgttgtcgaagaaatcctctaccccgcgcttgaagactaccggctcgacattatgataggcgaagggcccgccgcccgttccgttaaaatcgacctgccgcccttcacgctcatcggcgcgaccacccgcgccggtatgctgaccaatccgttgcgcgaccgcttcggcatcgtctcccgccttgagttttacgaaaaccgagaccttaccaccatcgtcagccgttcggcacaactgttgcagctcgatatgtccgaagaaggcgcggaagaaatcgccaaacgcagccgcggtacgccgcgcatcgccaaccgcctgttgcgacgcgtgcgcgatttcgccgacgtgaaaaacaacggcacaatcgacggcggcatcgccgatgccgctttaagtatgctggacgtggacgcgcaggggctggacgtgatggacaggaaatttctcgaagccgttttgcacaaattcggcggcggcccggtcggtttggacaatgttgccgccgccatcggcgaatctacagacaccatcgaagacgttatcgaaccctaccttatccaacaaggcttcctgcaacgcaccccgcgcggcaggatggcgaccgaacgcgcctacctgcatttcgggctgcccgtcgaaaaataa

SEQ ID NO: 55371 - DNA, 285 bp, Neisseria meningitidis; identical to SEQ ID NO: 54791

SEQ ID NO: 55372 - DNA, 729 bp, Neisseria meningitidis
atggcaggccatagcaagtgggcgaatatccagcataaaaaagcccgtcaggatgccaaacgcggcaaaatcttcacccgtttaatcaaagaaatcaccgttgcggcgcgtatgggcggcggcgaccccggtgccaacccgcgcctgcgcctggctttggaaaaagcagccgaaaacaatatgcccaaagacaatgtgcaacgcgccatcgataaaggtacgggcaacttggaaggcgtggaatacatcgagttgcgctacgaaggctacggcatcggcggcgcggctttgatggtggactgcctgaccgacaacaaaacccgcaccgttgcggacgtacgccacgcgtttaccaaaaacggcggcaacttgggtaccgacggctgcgtggcgttcaacttcgtgcatcagggctatttggtattcgaacccggcgttgacgaagacgcgctgatggaagcggctttggaagccggtgcggaagacgtggttaccaacgacgacggttccatcgaagtcattaccgcgccaaacgattgggcgggcgtaaaatccgctttggaggcggcaggttacaaatccgttgacggcgacgttacgatgcgcgcccaaaacgaaaccgaactctccggcgacgatgccgtcaaaatgcaaaaactgattgacgcgctggaagacttggacgacgtgcaagacgtttacacttccgccgtattgaatctggactga

SEQ ID NO: 55373 - DNA, 816 bp, Neisseria meningitidis; identical to SEQ ID NO: 44574

SEQ ID NO: 55374 - DNA, 489 bp, Neisseria meningitidis
ttgacacagccggccgaattttctgactaccaacgcgtttatttggatgaaacaggatttgaccgccacctgttccgtccctatgcccgcagcctgaaagggcaaatagtgaaagcgcagataagtggaaaaagataccgacgcttatctctggtgtccgcacaagtcggcaaccggctgattgctccgatggtttatcaaaatacgatgaccggagtcttttttgaagcgtggtttcagcaatgcctactgcccgcattgactcaaaaatcggtgattattttagataatgcgcgatttcaccgtatgggtgtcttacgggaaatggcggaaaaattgggacataaggtattgcctcttgcaccttattcacctgagctcaacccgattgagaaagtgtgggcgaatattaagcggtatctgcgaaccgttttgtctgattacgcccgatttgacgatgcactactgtcctattttgattttaattga

SEQ ID NO: 55375 - DNA, 885 bp, Neisseria meningitidis
atgacttctattattttagaactccaaagcctagctgccaatccaaatagtgatgtagaagagttagtgagtaaaacattaatggttgcaagaaaattaaaaattaatgaattaactgaatggtgtaataatgaattacaaggttattcatcaaaaaatttaccaaaatatagaatattttatggagagttaaaagcttttaacccttatcgtggcgatgttccatttatgcttcccgatgaattgagagaacgagtaacaagagttgaatatacctcatcaattagcgaaataagaaacttactaaaaacaaaaaataataattttatacgaattctatctagtaaagaaaaacagtttttaatgaatttacaagatactccatttccacttgaacctaaaataattatttatccaattaacttaatgaatattcaatcaaaagtaagacaactaattttagcttgggcattacgactggaagaggaaggcattttaggagacggtatccaatttacaaaatcaaaacaggagaaagcaatgtcaaaccaattcaatattcagaatatgcaagggtttattggggatatttttggcggtaatgttcagcaaaatattcaagacggtattcatattgaaaaagaaaatttcaataaactggctaactttttagcaaaaaacgggattccatctgccgaattagaagatttacgaaatgcactgatagaagatggtcagcccacagataaaaaattcggctcaaaagtaagtgcatggattggcaatattattacaaaggcttctaccggtgcaattgatgtttcagtaggtactattgcaggaatattaactaatgcgatttcaaaatattatggcttaatgtaa

SEQ ID NO: 55376 - DNA, 1218 bp, Neisseria meningitidis
atggcgttaatcgtacacaaatacggcggcacatccgtaggctcgcccgaacgcattaaaaacgtggccaaacgtgtcgccaaagcccgcgccgaaggacacgacattgtcgtcgtcgtatccgccatgagcggtgaaaccaaccgcctggtcgcgttggcgcacgaaatgcaggagcatcccgatccgcgcgaattggacgtggttttgtccaccggcgaacaagtaaccatcggccttttggcgatggcattgaaagacatcggcgtggatgccaaaagctacacaggctggcaggtcgccctcaaaaccgataccgcccacaccaaagcccgcatcgaaagcattgatgacgaaaaaatgcgtgccgaccttaccgccggcaaagtcgtcatcgttgccggcttccaaggcatcagcagtgaaggcgatatttccacgctcggacgcggcggttccgacacttccgccgttgcgcttgccgcagccctcaaagcggacgaatgccaaatctataccgacgtagacggcgtttacacaaccgacccccgcgtcgtacccgaagcgcgccgcatggatacggttacatttgaagaaatgatcgaactggcaagcctcggttcgaaagttttgcaaatccgttcagtagaatttgccggaaaatacaaagtgcgcctgcgcgtactgagcagcctgcaagatggcggcaacggcaccctgattacctttgaagaggacgacaacatggaaagagcagccgtaaccggtatcgcattcgacaaaaaccaagcccgcatcaacgtgcgcggtgtgcccgataagcccggcgtcgcctatcagattttaggcgcggttgccgatgccaacatcgaagtcgatatgattatccaaaatgtcggcagcgaaggcacaaccgatttttcctttaccgtaccgcgcggcgattacaagcagactttggaaatcctgtcggaacgccaagacagtatcggcgcggcttctattgatggcgacgacaccgtatgcaaagtctccgcagtcggtttgggtatgcgttcgcacgtcggtgtagccgccaaaatcttccgcacgctcgccgaagagggtatcaacatccaaatgatttccacctccgaaatcaaagtttccgtattgattgatgaaaaatacatggaactggcaaccagggtattgcataaagcctttaatttgggctga

SEQ ID NO: 55377 - DNA, 1968 bp, Neisseria meningitidis
gtggggaacacctttaaatcaatccttgtctgggtcgccttgggtatcggcctgatggctgcgttcaacgctttagacggtaaaaaagaagacaacgggcaaatcgaatattctcagttcatccaacaggtcaacaacggcgaagtatccggcgtcaacatcgaaggatccgtcgtcagcggctacctgattaagggcgagcgcaccgacaaaagcaccttcttcaccaacgcgcctttggacgacaacctgattaaaacactgctcgacaaaaacgtccgtgtaaaagtaacgccggaagaaaaaccgagcgcgctggctgccctgttttacagcctgctgcccgtcctgctgctgattggcgcgtggttctactttatgcgtatgcagacgggcggcggcggaaaaggcggcgcattctcattcggcaaaagccgcgcccgcctactggacaaagatgccaacaaagttacctttgccgatgtcgccggctgcgacgaagccaaagaagaagtgcaggaaatcgtcgattacctcaaagcgccgaaccgctatcaaagcctgggcgggcgcgtgccgcgcggcatcctgctggcgggcagcccgggtacgggtaagacgcttttggcgaaagcgattgcaggcgaagccggcgtgccgttcttcagcatttcaggttccgactttgtcgaaatgttcgtcggtgtcggtgcaagccgcgtccgcgatatgttcgagcaggcgaagaaaaacgccccctgcatcatctttattgatgaaatcgacgcagtcggccgccaacgcggcgcaggtttgggcggcggcaatgatgagcgcgagcaaacattaaaccaattgttggtggaaatggacggttttgagagcaatcagactgtgattgtgattgcggcaaccaaccgccccgacgtactcgatcctgcgctgcaacgccccggccgtttcgaccgccaagtggttgtccccctgccggacatccgggggcgcgaacagattttgaacgtccattctaaaaaagtgcctttggacgaatctgtggatttattgtccctcgcgcgcggcacgccgggtttttccggcgcggatttggcgaacttggtcaacgaagccgccctgtttgccggccgccgcaataaagtcaaagtcgatcagagcgattttgaagacgccaaagacaaaatctatatgggtccggaacgccgcagtatggtgatgcacgaagacgaaaaacgtgcgacggcgtatcacgaatccggacacgcgattgttgccgaaagcctgccctttaccgaccccgtccacaaagtaaccattatgccgcgcggacgtgcgctgggtctgacttggcagcttccggagcgcgaccgcatcagtatgtataaagatcagatgttgagccagctctccatcctgttcggcggacggattgccgaagacatcttcgtcggacgcatctccaccggcgcatcaaacgactttgaacgcgcaacccaaatggcgcgcgaaatggtaacgcgctacggcatgagcgacaaaatgggcgtgatggtttatgcggaaaacgaaggcgaagtcttcttaggacgcagcgtaacccgttcgcaaaacatttccgagaaaacccagcaggacatcgatgcggaaatccgccggattttggacgagcagtatcagattgcctacaaaatcctcgatgaaaaccgcgacaagatggaaacgatgtgcaaagccctgatggaatgggaaaccatcgaccgcgatcaggtactggaaatcatggcgggcaaacaacccagcccgcccaaagattacagccacaacctgcgcgagaatgcggacgcggcggaagataacgcgccgcacgctccgactcgggaagaaaccgaagcacctgccccggcagacaccgcttcgacagagtccgagcagcagcctgaaaacaaggcttaa

SEQ ID NO: 55378 - DNA, 762 bp, Neisseria meningitidis; identical to SEQ ID NO: 51423

SEQ ID NO: 55379 - DNA, 423 bp, Neisseria meningitidis; identical to SEQ ID NO: 40586

SEQ ID NO: 55380 - DNA, 159 bp, Neisseria meningitidis; identical to SEQ ID NO: 43473

SEQ ID NO: 55381 - DNA, 738 bp, Neisseria meningitidis
atgttaagcgcgcgctacctccacctgcacgaagctttgggtttaggcccgatgtggctgaaacaggccgccgccgtcctgccgcccaaaaacacacccgcaaccccggcacaggcacgtccccaaaccgtccgcgccgccctgatccgcccttcccaaccccataacggtcaggcgcggctcgaaacgatgaaagcgttggaaaccgccgccgtacctacgcgcaaacccgcgcctgaaaccgaaacgcctctgcccggcctttcagacggcatcgcccccgttcccgccgcttcgggcatcaccaagcttgccgtcgtcagcctttgcccaccgatcgaggatgcgatttacgggcaactgttccacggcaaagcaggtgttctgcttgacaacatactcaaagccgtaggactggatgccgcttatgtccacaaaacctgttgggtgaaaaccgccgctgtcggcaacccgatgccgtctgaagcggcaatcgaaaccgcgacggtttccgtcatgcaggaactcgacggctgccgcgcccccgccgtcctattcctcggacaggcgtttgtcaacccggaacggcaggcgatgattgaaactttgtgcggcagccgtcccttcttcatcatcgaccatcccgcccggcttttacgccaacccgaactcaaagcccgcgcctggcaggtgttgaaacagttgaaacgcgccttgcggcaaggcggcggcagttga

SEQ ID NO: 55382 - DNA, 1545 bp, Neisseria meningitidis
atgatgaccgaaatgcaacaacgcgcccaactgcaccgccaaatttggaaaattgccgacgaagtacgcggcgcggtggatggctgggactttaaacaatacgttctcggcacacttttctaccgctttatcagcgaaaacttcaccgactatatgcaggcaggcgacagcagtattgattacgccgctatgccggacagcatcatcacgcccgaaatcaaagacgatgccgtcaaagttaaaggctatttcatctaccccagccagcttttttgcaatattgccgccgaagcccatcaaaacgaagagctcaacaccaagctgaaagaaatctttaccgcgattgaaagctccgcctccggctatccgtccgaacaagacattaaaggcctgtttgacgacttcgataccaccagcagccggctcggcagcacagttgccgacaagaacaaacgccttgccgccgtcctcaaaggcgtggcggaacttgatttcggcagttttgaagaccaccacatcgaccttttcggcgatgcctacgaatacctgatttccaactacgccgccaacgcaggcaaatccggcggcgaatttttcaccccgcaaagcgtatccaagctgattgcgcggctggcggtgcacgggcaggagaaagtaaacaaaatctacgacccagcttgcggctcgggcagcctgctcttgcaggcgaaaaaacagtttgacgagcacatcatcgaagaaggcttcttcgggcaggaaatcaaccacaccacctacaacctcgcccgcatgaatatgtttctgcacaacgtcaattacaacaaattccacatcgaattgggcgacacactgactaatcccaagctcaaagacagcaaaccctttgatgccatcgtttccaatccgccttattccatcaactggataggcagcgacgaccccaccttaatcaacgacgaccgctttgcccccgcaggcgtactcgcaccgaaatccaaagccgattttgccttcatcctgcacgcactgaactacctttccggcagaggccgcgccgccatcgtctctttccccggtattttctatcgcggcggcgcagagcagaaaatccgccaatatctggtggagggcaactacgtggaaaccgtgattgcccttgcgcccaatctcttttacggcaccggcatcgccgtcaatatcctggttttgtccaaacacaaagacaataccgacatccaatttatcgacgcaggcagcttctttaaaaaagaaaccaacaacaacgtcttaaccgaagaacacattgccgacatcgtcaaactcttcgccgacaaagccgatgtgccgcatatcgcccaaaacgctgcccagcaaaccgtcaaagacaacggctacaacctcgccgtcagcagctatgttgaacccgaagacacacgcgaaattatcgacatcaaacagcttaacgccgaaatcggcgaaaccgtcgccaaaatcgaacggctgcggcgcgaaattgacgaagtgattgcagagattgaggcctag

SEQ ID NO: 55383 - DNA, 924 bp, Neisseria meningitidis
atgctgcaaagaactttggcgaaatccatcagcgttaccggagtcgggctgcattcgggcgaacgcgtcgcgctgaccctgcaccccgcgcctgaaaacagcgggatttccttccgccgtaccgatttggacggcgagatgggcgaacaaatcaaactgaccccttatttgatcaacgatacccgcctttcctccaccatcgttaccgacaaaggcgtgcgcgtcggcacgatcgaacacattatgtccgcgctgtccgcctacggtatcgacaacgcactgattgagctgaacgcgcccgaaatcccgattatggacggctccagcctgccgtttatttaccttttgcaagatgcgggcgtggtcgatcaaaaggcgcaaaagcgttttttgaaaatcctcaagcctgtcgaaatcaaagaagcgggcaaatgggtgcgctttacgccgtatgacggctttaaggtaacgctgaccatcgaattcgaccatccggttttcaaccgcagctcgcccacttttgaaattgatttcgccggcaaatcctacatcgacgaaatcgcgcgcgcgcgcactttcggctttatgcacgaagtggaaatgatgcgcgcccacaatctgggtttgggcggcaatttgaacaacgccatcgtgattgacgacacggatgtcctgaatcctgaaggcttgcgctatcccgatgagtttgtgcgccacaaaatccttgatgccatcggtgatttgtatatcgtcggacatccgattgtcggcgcgtttgaaggctacaaatcgggacacgccatcaacaacgcactcttgcgcgcggttttggcagacgaaacggcttacgaccgggtggaatttgccgacagcgatgatttgcccgacgcatttcacgagctgaacatcagaacttgtggataa

SEQ ID NO: 55384 - DNA, 726 bp, Neisseria meningitidis
atgagtgagggaatgatgtctcctgttttgtatttgattcctacgcctttgggtacgcccgatacgccgtgcctgttgccgcatgaacaacaggcgattgtcgggctgacggattttgtcgtggaagcggaaaaaacggcgcgcgcgcatttgaaacatttgggcgtgacaatgcctatccgcgaactgaatttgcaaacgctgaacgaacacacggatttgaagactttgctggaattgctgaaacctttgcaagaagggcgcagtatgggcattgtcagcgaggcgggttgcccggctgttgccgatccgggtgcgaatctggtggctttggcgcataaacacggttttgaagtgcgtccgctggtcgggccttccagcctgctgctggctttgatggcttcgggtgcgaacgggcagagttttgcgtttaagggttatctgccgtctgaaaaaaacgagcggattcagagtttgaaggctttggagcaacgttcgcgccagcagaatgaaacgcagctgtttatcgaaacgccgtatcgcaacgatgtgttgttggcggatgcggtggaaaacctgcattctgaaacgcgtttgtgtacggctacggatttgacgttgccgactcaggaaatcatcagccagacggttgtgcagtggcgaaaaagaaaagaaatgcccaatctgaaaaaacgcccgacgatttttgtgatgtatgcaggttga

SEQ ID NO: 55385 - DNA, 2037 bp, Neisseria meningitidis
atgactgacaacgcactgctccatttgggcgaagaaccccgttttgatcaaatcaaaaccgaagacatcaaacccgccctgcaaaccgccattgccgaagcgcgcgaacaaatcgccgccatcaaagcccaaacgcacaccggctgggcaaacactgtcgaacccctgaccggcatcaccgaacgcgtcggcaggatttggggcgtggtgtcgcacctcaactccgtcgccgacacgcccgaactgcgcgccgtctataacgaactgatgcccgaaatcaccgtcttcttcaccgaaatcggacaagacatcgagctgtacaaccgcttcaaaaccatcaaaaactcccccgagttcgacaccctctcccccgcgcaaaaaaccaaactcaaccacgatctgcgcgatttcgtcctcagcggcgcggaactgccgcccgaacagcaggcagaactggcaaaactgcaaaccgaaggcgcgcaactttccgccaaattctcccaaaacgtcctagacgcgaccgacgcgttcggcatttactttgacgatgccgcaccgcttgccggcattcccgaagacgcgctcgccatgtttgccgccgccgcgcaaagcgaaagcaaaacaggctacaaaatcggcttgcagattccacactacctcgccgtcatccaatacgccgacaaccgcgaactgcgcgaacaaatctaccgcgcctacgttacccgcgccagcgaactttcagacgacggcaaattcgacaacaccgccaacatcgaccgcacgctcgcaaacgccctgcaaaccgccaaactgctcggcttcaaaaactacgccgaattgtcgctggcaaccaaaatggcggacacgcccgaacaagttttaaacttcctgcacgacctcgcccgccgcgccaaactctacgccgaaaaagacctcgccgaagtcaaagccttcgcccgcgaaagcctgaacctcgccgatttgcaaccgtgggacttgggctacgccagcgaaaaactgcgcgaagccaaatacgcgttcagcgaaaccgaagtcaaaaaatacttccccgtcggcaaagtattaaacggactgttcgcccaaatcaaaaaactctacggcatcggatttaccgaaaaaaccgtccccgtctggcacaaagacgtgcgctattttgaattgcaacaaaacggcgaaaccataggcggcgtttatatggatttgtacgcacgcgaaggcaaacgcggcggcgcgtggatgaacgactacaaaggtcgccgccgtttttcagacggcacgctgcaactgcccaccgcctacctcgtctgcaacttcgccccgcccgtcggcggcagagaagcgcgtttgagccacgacgaaatcctcatcctcttccacgaaaccggacacgggctgcaccacctgcttacccaagtggacgaactgggcgtgtccggtatcaacggcgtagaatgggacgcggtcgaactgcccagccagtttatggaaaatttcgtttgggaatacaatgtattggcgcaaatgtccacccacgaagaaaccggcgagcccctgccgaaagaactcttcgacaaaatgctcgccgccaaaaacttccaacgcggaatgttcctcgtccgccagatggagttcgccctcttcgatatgatgatttacagcgaagacgacgaaggccgtctgaaaaactggcaacaggttttagacagcgtgcgcaaagaagtcgccgtcatccaaccgcccgaatacaaccgcttcgccttgagcttcggccacatcttcgcaggcggctattccgcaggctattacagctacgcgtgggcggaagtattgagcgcggacgcatacgccgcctttgaagaaagcgacgatgtcgccgccacaggcaaacgcttttggcaggaaatcctcgccgtcggcggatcgcgcagcgcggcagaatccttcaaagccttccgcggccgcgaaccgagcatagacgcactcttgcgccacagcggtttcgacaacgcggcctga

SEQ ID NO: 55386 - DNA, 447 bp, Neisseria meningitidis; identical to SEQ ID NO: 40197

SEQ ID NO: 55387 - DNA, 402 bp, Neisseria meningitidis
atgcagcaacatattgaaaaatggcaacacttgagccgggaagaacagaaaatccttgctgaagtatggggtctcgtgcaaaacgatgatcaggaggttcactatgaaatgctcaaattgaacgcacccgacgaagccagtggcgaattttggttcagaatggcagaaacactcagcaccctgccgcccaaccgttccctcgaccttagaatgaacggcggcaggctggcgaccgccgtatccatcctttccgtcatgattgaagacaatcccgacataccgcagctttgggcgcaaaaaattaccgcgctcaattatagtggattaaatttaaaccagtacggcgttgcctcgccttgtcgtactatctgtactgtctgcggcttcgtcgccttgtcctga

SEQ ID NO: 55388 - DNA, 1002 bp, Neisseria meningitidis
atgctcgccgaagaagttttcggtttcggtctctacaaagagtccaaaggctcgggcggtcgtttttatgagcgctgttggttgatgggttcggaagacgtcctatacggtcgcgtccattttggcggacaaaacaataccattcttttcgaactgaccggcaccggttgcggcgtcgcaaaagaaggctgggaatcacgacttttcgcattcctgactaatgcaatccgcccaaaaatcacacgcgttgacatcgcaaaagactttttcaacggcgaatacagcccgaaccaagcccgtgaagaccgaaataaaggtatgtttacctgtcatcacgtcaaaccaaaaggcgaatgtttggggtcagattgggaagaagacgatgaagccaaaatgaccaaaggcaagacctatggtatcggctcccgtgaatcgtccaaatatgtccgcgtctatgaaaaaggcaagcagttgggcgataaaacaagcacatggacgcgatttgaaattgaattcaaagcaaaagatatcgttatccctttcgaagttttgcagaatccgggcgaatatttcggcggcgcatatccgatttgcgaacgattcgtccaaaaggcaacgcgcatacacgcggttaaggaagataaggtcatttcagccgaccgctaccttgaatgggtaaaaaaacagtttggacgtgcggcaaacggtctgaaattcatttttcccgaattggacaaagccaaactgtttgaactgattgagccgagtcatcacaagctgcccaagtctttggctcccgaagcctacgactgcgcctttttgaaagctcaagccattcatgaacagcccgcattcaaaccgtacaaagacccttactatatgtacgaatattacgagaatcttgaaaaacagcttgaacagcaaaaacacgtcaacaatgaagaaagctataacaacttcatttacgacaaattcgcaagactaccgatttcatgggcttaa

SEQ ID NO: 55389 - DNA, 1743 bp, Neisseria meningitidis
atgaaattttttcctgctccatgtttgttggttatcctggctgtcataccccttaaaaccttagctgccgatgaaaacgatgcagaacttatccgttccatgcagcgtcagcagcacatagatgctgaattgttaactgatgcaaatgtccgtttcgagcaaccattggagaagaacaattatgtcctgagtgaagatgaaacaccgtgtactcgggtaaattacattagtttagatgataagacggtgcgcaaattttcttttcttccttctgtgctcatgaaagaaacagcttttaaaactgggatgtgtttaggttccaataatttgagcaggctacaaaaagccgcgcaacagatactgatcgtgcgtggctacctcacttcccaagctattatccaaccacagaatatggattcgggaattctgaaattacgggtatcagcaggcgaaataggggatatccgctatgaagaaaaacgggatgggaagtctgccgaaggcagtattagtgcattcaataacaaatttcccttatataggaacaaaattctcaatcttcgcgatgtagagcagggcttggaaaacctgcgtcgtttgtcgagtgttaaaacagatattcagattataccgtccgaagaagaaggcaaaagcgatttacagatcaaatggcagcagaataaacccatacggttcagtatcggtatagatgatgcgggcggcaaaacgaccggcaaatatcaaggaaatgtcgctttatcgttcgataaccctttgggcttaagcgatttgttttatgtttcatatggacgcggtttggcgcacaaaacggacttgactgatgccaccggtacggaaactgcaagcggatccagaagttacagcgtgcattattcggtgcccgtaaaaaaatggctgttttcttttaatcacaatggacatcgttaccacgaagcaaccgaaggctattccgtcaattacgattacaacggcaaacaatatcagagcagcttggccgccgagcgcatgctttggcgtaacagacttcataaaacttcagtcggaatgaaattatggacacgccaaacctataaatacatcgacgatgccgaaatcgaagtgcaacgccgccgctctgcaggctgggaagccgaattgcgccaccgtgcttacctcaaccgttggcagcttgacggcaagttgtcttacaaacgcgggaccggtatgcgccaaagtatgcccgcacctgaagaaaacggcggcggtactattccaggcacatcccgtatgaaaatcataaccgccggattggatgcagcggccccgtttatgttgggcaaacagcagtttttctacgcaaccgccattcaagctcaatggaacaaaacgccgttggttgcccaagataaattgtcaatcggcagccgctacaccgttcgcggatttgatggggagcagagtcttttcggagagcgaggtttctactggcagaatactttaacttggtattttcatccgaaccatcagttctatctcggtgcggactatggccgcgtatctggcgaaagtgcacaatatgtatcgggcaagcagctgatgggtgcagtggtcggcttcagaggagggcataaagtaggcggtatgtttgcttatgatctgtttgccggcaagccgcttcataaacccaaaggctttcagacgaccaacaccgtttacggcttcaacttgaattacagtttctaa

SEQ ID NO: 55390 - DNA, 1260 bp, Neisseria meningitidis
atgctgcccgtgcgctttacaagagtttcagacggcatcaaacgtttaactcccgccagcaatcaaacagctttttatcacccattcgaaaatccgttttgccggtactcgtctttttattggagtattgccattatgaccgcaaccactgcgtcttcagccaaaccttatctcaaaatccaaggtttggtgaaaaagtttggtgacaattacgctgtcgataacatcgacttggacatttatcaacacgaaatcttcgcccttttgggcagttccggcagcggaaaatctacactgctgcgtatgctggcgggtatggaaagtcccaatcagggaaaaattatccttgatggtcaggatattaccaaacttgcaccctatgatcgccccatcaatatgatgttccaaagttacgcgctttttccgcatatgaccgtagaacaaaacattgccttcggtctgaaacaggacaaaatgcctaaaggcgaaatcgccgcgcgcgtcgaagaaatgctccgcctggttcagatgaccaaatttgctaaacgcaaaccgcaccaattgtccggcggtcagcagcagcgcattgctttggcacgcagtctggcaaaacgtccgaaaattctactgctggatgagcccctcggtgcattggacaaaaaactgcgccaacaaacccagcttgagttggtcaatacgctggaacaagtcggcgtaacctgtattatggttacgcacgaccaagaagaggcgatgacgatggcgacccgcatcgccattatgtctgacggtcagttgcagcaagtcggcacacccagcgacgtgtacgactatcccaacagccgcttcactgccgagtttatcggcgaaaccaacatctttgacggtgtggtgattgaagatcatgccgactatgccgttatcgaatgcgaaggtttggaaaaccacgtccgcatcgatcacggtttgggtggtccgagcgagcaggacctttgggttagtattcgaccagaggatattgatttatataaagaaaaacccgaatatttgggcgactacaactgggcgaaaggcacggtaaaagaaatcgcctatttgggcagctttgccatataccatatcaaactcgccaacgggcgcgtcgtcaaaagccaagttcctgcaccttactggtatgtacgcaacattacaccgccaacttgggacgaaaccgtgtatatcagctggccggaaaaccagcctacgccactgttccgttga

SEQ ID NO: 55391 - DNA, 762 bp, Neisseria meningitidis; identical to SEQ ID NO: 41169

SEQ ID NO: 55392 - DNA, 264 bp, Neisseria meningitidis; identical to SEQ ID NO: 37542

SEQ ID NO: 55393 - DNA, 4392 bp, Neisseria meningitidis
atgaaaacaaccgacaaacggacaaccgaaacacaccgcaaagccccgaaaaccggccgcatccgcttctcgcctgcttacttagccatatgcctgtcgttcggcattcttccccaagcttgggcgggacacacttatttcggcatcaactaccaatactatcgcgactttgccgaaaataaaggcaagtttgcagtcggggcgaaagatattgaggtttacaacaaaaaaggggagttggtcggcaaatcaatgacaaaagccccgatgattgatttttctgtggtgtcgcgtaacggcgtggcggcattggtgggcgatcaatatattgtgagcgtggcacataacggcggttataacaatgttgattttggtgcggagggaagcaatcccgatcagcaccgtttttcttaccaaattgtgaaaagaaataattataaagcagggactaaaggccatccttatggcggcgattatcatatgccgcgtttgcataaatttgtcacagatgcagaacctgttgagatgaccagttatatggatgggtggaaatataccgatcaaaataattatcctgaccgtgttcgaatcggagcaggcagacaatattggcggtctgatgaagatgaacccaataaccgcgaaagttcatatcatattgcaagtgcgtattcttggctcgttggtggcaatacctttgcacaaaatggatcaggtggtggcacagtcaacttaggtagtgaaaaaattaaacatagcccatatggttttttaccaacaggaggctcatttggcgacagtggctcaccaatgtttatctatgatgcccaaaagcaaaagtggttaattaatggggtattgcaaacaggcaacccctatataggaaaaagcaatggcttccagctagtgcgtaaaaattggttttatgacgaaatttttaccggagatacccattcagtattctacgaaccacatcaaaatgggaaatacacttttcacgacaataataatggcacaggaaaaatcaatgccaaacatgaacacaattctctgcctaatagattaaaaacacgaaccgttcaattgtttaatgtttctttatccgagacagcaagagaacctgtttatcatgctgcaggtggtgtcaacagttatcgacccagactgaataatggagaaaatatttcctttattgacgaagggaaaggcgaattgatacttaccagtaacatcaaccaaggtgctggaggattatatttccaaggagattttacggtctcgcctgaaaacaacgaaacgtggcaaggtgcgggcgttcatatcagtgaagacagtaccgttacttggaaagtaaacggcgtggcaaacgaccgcctgtccaaaatcggcaaaggcacgctgcacgttcaagccaaaggggaaaaccaaggctcgatcagcgtgggcgacggtacagtcattttggatcagcaggcagacgataaaggcaaaaaacaagcctttagtgaaatcggcttggtcagcggcaggggtacggtgcaactgaatgccgataatcagttcaaccccgacaaactctatttcggctttcgcggcggacgtttggatttaaacaggcattcgctttcgttccaccgtattcaaaataccgatgaaggggcgatgattgtcaatcataatgccacaacaacatccaccgttaccattacagggaatgaaagtattacacaaccgagtggtaagaatatcaatagacttaattacagcaaagaaattgcctacaacggttggtttggcgagaaagatgcgaccaaaacgaatgggcggctcaaccttgtttaccagcccgccgcagaagaccgcaccctgctgctttccggcggaacaaatttaaacggtaacatcacgcaaacaaacggcaaactgtttttcagcggcagaccaacaccgcacgcctacaatcatttaaacaaccattggtcgcaaaaagagggcattccgcacggagaaatcgtgtgggacaacgactggattaaccgcacgtttaaagcggaaaatttccatattcagggcgggcaggcggtgatttcccgcaatgttgccaaagtggaaggcgattggcatttgagcaatcacgcccaagcagttttcggtgtcgcaccgcatcaaagccacacaatctgtacacgttcggactggacgggtctgacaaattgtgtcgaaaacaccattaccgacgataaagtgattgcttcattgaccaataccgacatcagcggcaatgtcgatcttgccgatcacgctcatttaaatctcacagggcttgccacgctcaacggcaatctgaccgcaggcggagacacgcactatgaggttacgcacaacgccacccaaagaggcaaccttagcctcgtgggcaatgcccaagcaacatttaatcaagccacattaaacggaaacacatcggcttcgggcaatgcttcatttaatctaagcaacaacgccgtacaaaacggcagtctgacgctttccggcaacgctaaggcaaacgtaagccattccgcactcaacggcaatgtctccctagccgataaggcagtattccattttgaaaacagccgccttaccggacaaatcagcggcggcaaggatacggcattacacttaaaagacagcgaatggacgctgccgtcaggcacggaattaggcaatttaaaccttgacaacgccaccattacactcaattccgcctatcgccacgatgctgcaggcgcgcaaaccggcagtgtgtcagacacgccgcgccgccgttcgcgccgttcgcgccgttccctattatccgttacaccgccaacttcggcagaatcccgtttcaacacgctgacggtaaacggcaaattgaacggtcagggaacattccgctttatgtcggaactcttcggctaccgcagcgacaaattgaagctggcggaaagttccgaaggcacttacaccttggcggtcaacaataccggcaacgaacctgcaagcctcgaacaattgacggtagtggaaggaaaagacaacaaaccgctgtccgaaaaccttaatttcaccctgcaaaacgaacacgtcgatgccggcgcgtggcgttaccaactcatccgcaaagacggcgagttccgcctgcataatccggtcaaagaacaagagctttccgacaaactcggcaaggcagaagccaaaaaacaggcgggaaaagacaacgcgcaaagccttgacgcgctgattgcggccgggcgcgatgccgtcgaaaagacagaaagcgttgccgaaccggcccggcaggcaggcggggaaaatgtcggcattatgcaggcggaggaagagaaaaaacgggtgcaggcggataaagacagcgccttggcgaaacagcgcgaagcggaaacccggccggctaccaccgccttcccccgcgcccgccgcgcccgccgggatttgccgcaaccgcaaccccaaccgcaaccccaaccgcagccccaaccgcagcgcgacctgatcagccgttatgccaatagcggtttgagtgaattttccgccacgctcaacagcgttttcgccgtacaagacgaattagaccgcgtatttgccgaagaccgccgcaacgccgtttggacaagcggcatccgggacaccaaacactaccgttcgcaagatttccgcgcctaccgccaacaaaccgacctgcgccaaatcggtatgcagaaaaacctcggcagcgggcgcgtcggcatcctgttttcgcacaaccggaccgaaaacaccttcgacgacggcatcggcaactcggcacggcttgcccacggcgccgttttcgggcaatacggcatcgacaggttctacatcggcatcagcgcgggcgcgggttttagcagcggcagcctttcagacggcatcggaggcaaaatccgccgccgcgtgctgcattacggcattcaggcacgataccgcgccggtttcggcggattcggcatcgaaccgcacatcggcgcaacgcgctatttcgtccaaaaagcggattaccgctacgaaaacgtcaatatcgccacccccggtctttcgttcaaccgctaccgcgcgggcattaaggcagattattcattcaaaccggcacaacacatttccatcacgccttatttgagcctgtcctataccgatgccgcttcgggcaaagtccgaacacgcgtcaataccgccgtattggctcaggatttcggcaaaacccgcagtgcggaatggggcgtaaacgccgaaatcaaaggtttcatgctgtccctccacgctgccgccgccaaaggcccgcaactggaagcgcaacacagcgcgggcatcaaattaggctaccgctggtaa

SEQ ID NO: 55394 - DNA, 1338 bp, Neisseria meningitidis
atgagtaaccatacttcttggtcgtccaaaatcggtttcgtccttgctgcggcaggttcggccatcggtttgggcgcgatttggaaattcccttatacggcaggcaccaacggcggcgcggtgtttttcctgctgtttttgatatttactatcttggtcgccctgcccgtccagcttgccgagttttatatcgggcgcacgggcggtaaaaatgccgtcgattccttcagggctctgcgtccgggcacgcaatggctttgggtcgggcgcatgggcgttgccgcctgctttattttgctgtcgttttacagcgtggtcggcggatgggtattgaattatgtcgtccacagttttacaggggcaatccatgcaggagcggactttgaagccctgttcggcacaacgatttccaatccggcaggttcgctgtcctatcaggcactgtttatgctgattacggtttgggtggtcaaaggcgggatttcagacggcattgaaaaggcaaaccgttatctgatgccggggctgtttatcctctttattgcgctggcaatccgttcgctgacgctgccgggtgcaatggagggcgtgtctttcctgctcaaaccgaattggtcgtactttaaagccgatacgatgattacggctttgggacaggcgttttttgccctgagcatcggcgtttccgccatgattacctacgcttcatatttgggaaaagatcaggatatgttccgttccggccatacgattatgtggatgaacctcttggtttcgctgcttgccggcctggtgatttttccggcggtgttcgccttcggttttgaaccgagccaggggccgggattgatttttatcgtattgcccgcagtgtttatgaagatgccgttcggtacggttttgtttgcggtattcatgcttctggtcgttttcgccacgctgacttccgcattttcgatgttggaaacggtcattgcctcaaccatccgccaagacgagcgcaaacgcaaaaagcacacttggcttatcggcacggctattttcattgtcggcatcccgtccgcgctgtctttcggcgtatggggtgagtttaaggttttcggcaaaaccatttttgatttgtgggactatgttatttccgccgtcattatgccgattggtgctttgagtgtttccatctttaccgcctggattcaggacaagcagtctgtgttaaaagatgccggatcgggcagcaccgtaccacgggcagtgctgctgctgtggctgaataccttgcgctaccttgccccgattgccattattattgttttcatcaattctttgggcatcctttaa

SEQ ID NO: 55395 - DNA, 537 bp, Neisseria meningitidis
atgcaggcaatttctcccgaattacaggcgcgcgccgccaaaatcaaactgttgatcctggatgtggacggcgttttgaccgacgggcgcatctttatccgcgataacggcgaagaaatcaaatcgtttcacacactggacggacacggtctgaaaatgcttcaggcaagcggcgtgcagactgcgattatcacaggtcgggacgcgccctccgtcggcatccgcgtcaaacagttgggcataaattactacttcaaaggcatttcggacaaacgcgccgcgtatgaagagctgcgcgctcaggtcggcgtggaagaagccgagtgtgcctttgtcggcgacgacgtggtcgatttgccggtgatggtgcgttgcggattgccggttgccgtccccgacgcgcattggtttacgctgcaacacgccgcctatattgccaaacgccccggcggtgcgggcgcggtgcgcgaagtgtgcgacctgattatgcaggcgcaagggactttgggcgcggctttgaacgagtacatcaaatga

SEQ ID NO: 55396 - DNA, 1194 bp, Neisseria meningitidis; identical to SEQ ID NO: 41712

SEQ ID NO: 55397 - DNA, 492 bp, Neisseria meningitidis; identical to SEQ ID NO: 45366

SEQ ID NO: 55398 - DNA, 951 bp, Neisseria meningitidis; identical to SEQ ID NO: 42789

SEQ ID NO: 55399 - DNA, 810 bp, Neisseria meningitidis
atgattcaagacacccgaccccttatccgcgtcgttgccggcatcctgctcaaccgagacggcgactacctgctcagttcccgccccgaaggcaagccctatgccggatattgggaatttgccggcggcaaggtcgaagcgggcgaaaccgacttccaagccttgcaacgcgagtttgaagaagaactcggcatccgcatccttgccgccacgccttggttaaccaaaatccattcctacgaacacgcccgcgtctgcctgaaattcctatgggtcaaccccggccaatggacgggcgaaccgcaatcccgcgaagggcaggaatggtcttggcagaaggcgggtgattttaccgttgcccccatgctgcccgccaacggcgcgcttttgcgttcgctgtccgtcccgcgccgtttgtacggcagcctgaaaacgggtttgcacggggagaacagtatgggcgcgtaccgcgtcctgcctttgggttcggcagagggaagcggtgcgaacgttttgatggaggcggcgcaatggcaggacagacccgaacacgccgacagcgtgtggatgatggtgcagacccgcgaacaatggcggcaggcgcaggaaaagggcgcggatgttgtcgtgtggcgcgtgtgcaatgatgttcaggcacaagaggcggcagaagccctgcggcagggcgtatccgtgccgctcgtacttgcagcaaacggacagacggttgcacgttatggaaaactatggctcggattgggggcgcacgtggtggtaagggatgaaacaatagggaagaatcatgaataa

SEQ ID NO: 55400 - DNA, 1356 bp, Neisseria meningitidis
atgaaagcacccgaactcttattaccggcaggcggcctcgaacgcatgcgctccgcctacgactacggcgcagatgccgtttacgccggcagcccgcgttattccctgcgcgcccgcaacaacgaatttgccaaactcgacgtcctcgagcaaggcattaaagaagcgcacgagcgcaacaaaaaattcttcctgaccgtcaatacgctgccgcacaactccaaactcaaaaccttcgtttccgacatggagcccttgattgccatgaaacccgacgcgctgattatggcggatccgggtttgattatgaccgtgcgcgaaaaatggccggaaatgccgattcacctgtccgtacaggcgaacaccaccaactactggggcgtgaaattctggcaaaacatcggcgttgaacgcatcatcctgtcacgtgaattgagcatggaagaaatcgccgaaatccgccaagaatgtccggatatcgaactcgaagtcttcattcacggcgcattgtgcatcgcctactccggccgttgcctactctccggctacttcaaccaccgcgaccccaaccaaggcacctgcaccaactcctgccgttgggactacaaagtccacaacgctacggaaagcgatgcgggcgatgcccagcttctgcaaggtttcaactttgaaaaagcccaagaagaagccaaccaaaactttgaaggcatcaacggtcaaaaacgccatccctacgccgacaaagtcttcctgattgaagagtccaaccgccccggcgaaatgatgccgattatggaagacgaacacggcacctacatcatgaattccaaagaccttcgcggcattgaagtggttgagaaactcgccaaaatcggcgtggacagcctcaaagtcgaagggcgtaccaagtcgctctactacgtcgcccgcgtcgcccagtcctaccgcaaagcgattgatgacgccgttgcaggccgtccgtttgattacagcctattgagcgaactcgaaggcctcgccaaccgcggctacaccagcggcttcctcgaacgccaccaaactcaggattaccaaaactacctgaccggtcattccatcgccaaacaaagccaatatgtcggccacgttaccgaaatcgatgaaaacggctgggcgaccatcgaagtcaaaaaccgctttgccatcggcgattcactcgaaatcatccacccgaacggcaaccaaaccatcaaattggaacaaatggcccgaaaaggccagcctgtcgatgtcgcacccggcaacggcattcaggtcaaaatccccgatatgcagggcaaagaaaaagccctcatcgcacgcgtgttgaacccctga

SEQ ID NO: 55401 - DNA, 933 bp, Neisseria meningitidis
atgaagcagaaccgcacctttaccttccccgattttcgcaccgtttacagctatgcgcctttatatcggctgcaacatttaaaatacacattgcgaaaatttttcggaaaaaaagaaatttacgccttcgagcagtttgtcaacgcatcccctatccgtcaggggctgttcctccactgcccgcaaaatgcctatccgctgctgcgcgaatttgttgacaggcgttttaactgcaaacgccgtttagatgcgatgacggcagattttctcatggcggaaaaactgttcggcacagacatcctgcaccaaatggaagactaccgcttccatttggtcttggcgcacctttcagacggcatcagcttgtggctcaaccgcaacgacaactgcgtcgaagaaggcgcgtggtctttatctttgcgcgacgaagcaggcaaccggctgtatatggcgaccttcgcctttgtcggcacacacctgctgacagcctccgtacaagggccggcgggtgaagaagccaaagacaccgtccgccgcataaccaaacaactccacggcttgcgtccccaacaactgatggtaaccgccctgcaatatttcgccgccgtactcggcttggacggcgcaatgggcattgcacaaaaacatcaggtcaaactgcgctggaaacttaaaaagcgtgtcaaaatgaattacgacgcattctggcaggaatacggcgcaagtttggaacgggacggctactggcatctcccccaaacccccgcccgcaaagaccttaccgacatcgaaagcaaaaaacgctcgatgtaccgcaagcgttatgaaatgctggacaatatggttgcagagatgaaggacggtctgaaaacagaagcacgcggcatttcagacggcatccaaacggaaaaaccgctccgccggacagcctga

SEQ ID NO: 55402 - DNA, 237 bp, Neisseria meningitidis; identical to SEQ ID NO: 37642

SEQ ID NO: 55403 - DNA, 1779 bp, Neisseria meningitidis
atgacggttttgaagccttcgcactggcgggtgttggcggagcttgccgacggtttgccgcaacacgtctcgcaactggcgcgtatggcggatatgaagccgcagcagctcaacggtttttggcagcagatgccggcgcacatacgcgggctgttgcgccaacacgacggctattggcggctggtgcgcccattggcggttttcgatgccgaaggtttgcgcgagctgggggaaaggtcgggttttcagacggcattgaagcacgagtgcgcgtccagcaacgacgagatactggaattggcgcggattgcgccggacaaggcgcacaaaaccatatgtgtgacccacctgcaaagtaagggcagggggcggcaggggcggaagtggtcgcaccgtttgggcgagtgtctgatgttcagttttggctgggtgtttgaccggccgcaatatgagctgggttcgctgtcgcctgttgcggcagtggcgtgtcggcgcgccttgtcgcgtttaggtttggatgtgcagattaagtggcccaatgatttggttgtcggacgcgacaaattgggcggcattctgattgaaacggtcaggacgggcggcaaaacggttgccgtggtcggtatcggcatcaattttgtcctgcccaaggaagtagaaaatgccgcttccgtgcaatcgctgtttcagacggcatcgcggcggggcaatgccgatgccgccgtgctgctggaaacgctgttggtggaactggacgcggtgttgttgcaatatgcgcgggacggatttgcgccttttgtggcggaatatcaggctgccaaccgcgaccacggcaaggcggtattgctgttgcgcgacggcgaaaccgtgttcgaaggcacggtcagcggtgtggacgagaagggtatattgcatctggataccggagacggcaggcaaaccgtagtcagcggagaaatcagtttgcgtcccgacgacaggccggtctctgttccgaagaagcgggaaccggaacgttttttgctgttggacggcggcaacagtcggctcaagtgggcatgggtggaaaacggcacgttcgcaaccgtcggtagcgcgccgtaccgcgatttgtcgcctttgggcgcggagtgggcggaaaaggcggatggaaatgtccgcatcgtcggttgcgctgtgtgcggagaattcaaaaaggcacaagtgcaggaacagctcgcccgaaaaatcgagtggctgccgtcttccgcacaggctttgggcatacgcaaccactaccgccaccccgaagaacacggttccgaccgctggttcaacgccttgggcagccgccgcttcagccgcaacgcctgcgtcgtcgtcagttgcggcacggcggtaacggttgacgcgctcaccgatgacggacattatctcgggggaaccatcatgcccggtttccacctgatgaaagaatcgctcgccgtccgaaccgccaacctcaaccggcacgccggtaagcgttatcctttcccgaccacaacgggcaatgccgtcgccagcggcatgatggatgcggtttgcggctcggttatgatgatgcacgggcgtttgaaagaaaaaaccggggcgggcaagcctgtcgatgtcatcattaccggcggcggcgcggcaaaagttgccgaagccctgccgcctgcatttttggcggaaaataccgtgcgcgtggcggacaacctcgtcattcacgggctgctgaacctgattgccgccgaaggcggggaatcggaacatacttaa

SEQ ID NO: 55404 - DNA, 723 bp, Neisseria meningitidis; identical to SEQ ID NO: 36729

SEQ ID NO: 55405 - DNA, 369 bp, Neisseria meningitidis
atgcgtcattacgagatcgtgtttatcgttcatcctgatcaaagcgagcaagtgcctgctatggttgaacgttacaaaaccatgattgccgaagcaaacggtaagattcaccgtttggaagattggggtcgccgccaactggcttacccgattaacaaaatccataaagcccattacgttttgatgaacatcgaaaccactcccgaagtggttgaagagttggaaaccgcattccgtttcaatgatgcggtattgcgccatctaaccatcaaaaccaaacacgccgttaccgaagcatcccctatgttgggtggtgaaaaggctaagaacctgctgagcggtgcgtctgaagaagcggctgcccaataa

SEQ ID NO: 55406 - DNA, 513 bp, Neisseria meningitidis; identical to SEQ ID NO: 40766

SEQ ID NO: 55407 - DNA, 1161 bp, Neisseria meningitidis
ttgaaaaccaatatgccgacaatgggggcggagatgaatacacggaatatgcgctatattcttttgacaggactgttgccgacggtatccgcttttggagagaccgcgctgcaatgcgccgctttgacggacaatgttacgcgtttggcgtgttacgacaggatttttgcggcacagcttccgtcttcggcagggcaggaagggcaggagtcgaaagccgtactcaatctgacggaaaccgtccgcagcagcctggataagggcgaggcggtcattgttgttgaaaaaggcggggatgcgcttcctgccgacagtgcgggcgaaaccgccgacatctatacgcctttgagcctgatgtacgacttggacaaaaacgatttgcgcgggctgttgggcgtacgcgaacacaatccgatgtaccttatgccgctctggtacaacaattcgcccaactatgccccgggttcgccgacgcgcggtacgactgtacaggaaaaattcggacagcagaaacgtgcggaaaccaaattgcaggtttcgttcaaaagcaaaattgccgaagatttgtttaaaacccgcgcggatctgtggttcggctacacccaaagatccgattggcagatttacaaccaaggcaggaaatccgcgccgttccgcaatacggattacaaacctgaaattttcctgacccagcctgtgaaggcggatttgccgttcggcggcaggctgcgtatgctcggtgcgggttttgtccaccagtccaacggacagagccgtcccgaatcgcgttcgtggaacaggatttacgccatggcaggcatggaatggggcaaattgacggtgattccgcgcgtgtgggtgcgtgcgttcgatcagagcggcgataaaaacgacaatcccgatattgccgactatatggggtatggcgacgtgaagctgcagtaccgcctgaacgacaggcagaatgtgtattccgtattgcgctacaaccccaaaacgggctacggcgcgattgaagccgcctacacgtttccgattaagggcaaactcaaaggcgtggtacgcggattccacggttacggcgagagcctgatcgactacaaccacaagcagaacggtatcggtatcgggttgatgtttaacgacttggacggcatctga

SEQ ID NO: 55408 - DNA, 534 bp, Neisseria meningitidis
atgtcacgtgtcgcaaaaaacccagtgactgttcccgctggtgtagaagtaaaatttggaacagaggcattagttattaagggtaagaacggtgaattgtcttttcctttgcattctgatgtagccattgaatttaatgatggcaaattgacttttgttgcgaataacagcagtaaacaagcaaatgcaatgtctggtactgctcgcgcattagtcagcaatatggttaaaggtgtttcagaaggttttgagaaaagattgcaattgataggtgtgggttatcgtgctcaagcacaaggtaaaatcttgaatctgtctttgggtttttctcatccgatcgtatatgaaatgcctgaaggtgtctccgttcaaactcctagccaaacagagattgttttaaccggctcggataaacaagttgttggtcaagttgctgctgagattcgtacgttccgtgctcctgagccttataaaggtaaaggtgttcgctatgtaggcgaagtagtggtaatgaaagaagccaagaaaaaataa

SEQ ID NO: 55409 - DNA, 1479 bp, Neisseria meningitidis
atgtttaaacgcagcgtaatcgcaatggcttgtatttttgccctttcagcctgcgggggcggcggtggcggatcgcccgatgtcaagtcggcggacacgctgtcaaaacctgccgcccctgttgtttctgaaaaagagacagaggcaaaggaagatgcgccacaggcaggttctcaaggacagggcgcgccatccgcacaaggcggtcaagatatggcggcggtttcggaagaaaatacaggcaatggcggtgcggcagcaacggacaaacccaaaaatgaagacgagggggcgcaaaatgatatgccgcaaaatgccgccgatacagatagtttgacaccgaatcacaccccggcttcgaatatgccggccggaaatatggaaaaccaagcaccggatgccggggaatcggagcagccggcaaaccaaccggatatggcaaatacggcggacggaatgcagggtgacgatccgtcggcaggcggggaaaatgccggcaatacggctgcccaaggtacaaatcaagccgaaaacaatcaaaccgccggttctcaaaatcctgcctcttcaaccaatcctagcgccacgaatagcggtggtgattttggaaggacgaacgtgggcaattctgttgtgattgacgggccgtcgcaaaatataacgttgacccactgtaaaggcgattcttgtagtggcaataatttcttggatgaagaagtacagctaaaatcagaatttgaaaaattaagtgatgcagacaaaataagtaattacaagaaagatgggaagaatgacgggaagaatgataaatttgtcggtttggttgccgatagtgtgcagatgaagggaatcaatcaatatattatcttttataaacctaaacccacttcatttgcgcgatttaggcgttctgcacggtcgaggcggtcgcttccggccgagatgccgctgattcccgtcaatcaggcggatacgctgattgtcgatggggaagcggtcagcctgacggggcattccggcaatatcttcgcgcccgaagggaattaccggtatctgacttacggggcggaaaaattgcccggcggatcgtatgccctccgtgttcaaggcgaaccttcaaaaggcgaaatgctcgcgggcacggcagtgtacaacggcgaagtgctgcattttcatacggaaaacggccgtccgtccccgtccagaggcaggtttgccgcaaaagtcgatttcggcagcaaatctgtggacggcattatcgacagcggcgatggtttgcatatgggtacgcaaaaattcaaagccgccatcgatggaaacggctttaaggggacttggacggaaaatggcggcggggatgtttccggaaagttttacggcccggccggcgaggaagtggcgggaaaatacagctatcgcccaacagatgcggaaaagggcggattcggcgtgtttgccggcaaaaaagagcaggattga

SEQ ID NO: 55410 - DNA, 651 bp, Neisseria meningitidis; identical to SEQ ID NO: 41065

SEQ ID NO: 55411 - DNA, 723 bp, Neisseria meningitidis
atgcccgaaacaggttttcgggcatttttacggcaaatgccgtctgaaaccaccaaacagcggttcagatggcatccctttcaaaagcgcaccattatgaaaaacatcgtcatcctgatttccggacgcggcagcaatatgcaggcaatcgtcaatgccgccattcccaacgtccgtattgccgccgtgttgagcaacagcgaaacggctgccggtttgcaatgggcggccggtcagggtattccgaccgacagcctgaatcataaaaactttgaatcacgacttgccttcgataccgccatgatggaaaaaatcgacgcatatcaacccgacttggtggttttggcaggttttatgcggattctgacccctgagttttgcgcccattacgaaggcaggctgatgaacattcacccgtccgtcctgccctcgtttaccggacttcatacgcacgaacgcgctttggaggcgggctgccgcgttgccggctgcaccatccatttcgttactgccgaactggattgcggcccgattgtatcgcaagggattgtgccgatactcgacggcgatacggcagacgatgttgccgcccgggttttggctgtcgaacacaaactctatccgaaagccgttgccgattttgccgccggccgcctgattatcgagggaaaccgcgtcagaaattcggaaaacgccgatgccgcccgtttcctgacggcgtaa

SEQ ID NO: 55412 - DNA, 906 bp, Neisseria meningitidis
atggacattctggacaaactggtcgatttcgcccaattgacgggcagtgtggatgtgcagtgccttttgggcggacaatggtcggtacggcatgaaaccttgcaacgcgaaggactggtacacattgttacatcgggcagcggctatctctgcatcgacggcgaaacttccccgcgtccggtcagtacaggggatattgtatttttcccgcgcggcttgggtcatgtgttgagccacgacggaaaatgcggagaaagtttacaaccggatatgcggcagcacggtgcgtttacggtcaaacagtgcggcaacggacaggatatgagcctgttttgcgcccgtttccgctacgacacccacgccgatttgatgaacgggctgcctgaaaccgtttttctgaacattgcccatccgagtttacagtatgtggtttcaatgctgcaactggaaagcaaaaaacctttgacggggacggtttccatggtcaacgcattgtcgtccgtcctgctggtgcttatcctgcgcgcctatctcgaacaggataaggatgtcgaactctcgggcgtattgaaaggttggcaggacaaacgtttgggacatttaatccaaaaggtgatagacaaaccggaagacgaatggaatgtcgacaaaatggtggcggctgccaatatgtcgcgcgcgcaactgatgcgccgtttcaaaagccgggtcggactcagcccgcacgcctttgtgaaccatatccgcctgcaaaaaggcgcgttgctgctgaaaaaaaacccggattcggttttgtcggtcgcactgtcggtaggctttcagtcggaaacgcacttcggcaaggcgttcaaacggcaatatcacgtttcgccgggtcaataccggaaagaaggcgggcaaaaataa

SEQ ID NO: 55413 - DNA, 1179 bp, Neisseria meningitidis
atggcaaaaatgatgaaatgggcggctgttgcggcggtcgcggcggcagcggtttggggcggatggtcttatctgaagcccgagccgcaggctgcttatattacggaaacggtcaggcgcggcgacatcagccggacggtttctgcaacaggggagatttcgccgtccaacctggtatcggtcggcgcgcaggcatcggggcagattaagaaactttatgtcaaactcgggcaacaggttaaaaagggcgatttgattgcggaaatcaattcgacctcgcagaccaatacgctcaatacggaaaaatccaaattggaaacgtatcaggcgaagctggtgtcggcacagattgcattgggcagcgcggagaagaaatataagcgtcaggcggcgttatggaaggaaaacgcgacttccaaagaggatttggaaagcgcgcaggatgcgtttgccgccgccaaagccaatgttgccgagctgaaggctctaatcagacagagcaaaatttccatcaataccgccgagtcggaattgggctacacgcgcattaccgcaacgatggacggcacggtggtagcgattctcgtggaagaggggcagactgtgaacgcggcgcagtctacgccgacgattgtccaattggcgaatctggatatgatgttgaacaaaatgcagattgccgagggcgatattaccaaggtgaaggcggggcaggatatttcgtttacgattttgtccgaaccggatacgccgattaaggcgaagctcgacagcgtcgaccccgggctgaccacgatgtcgtcgggcggctacaacagcagtacggatacggcttccaatgcggtctactattatgcccgttcgtttgtgccgaatccggacggcaaactcgccacggggatgacgacgcagaatacggttgaaatcgacggcgtgaaaaatgtgctgattattccgtcgctgaccgtgaaaaatcgcggcggcaaggcgtttgtgcgcgtgttgggtgcggacggcaaggcggcggaacgcgaaatccggaccggtatgagagacagtatgaataccgaagtaaaaagcgggttgaaagagggggacaaagtggtcatctccgaaataaccgccgccgagcaacaggaaagcagcgaacgcgccctaggcggcccgccgcgccgataa

SEQ ID NO: 55414 - DNA, 378 bp, Neisseria meningitidis; identical to SEQ ID NO: 37228

SEQ ID NO: 55415 - DNA, 387 bp, Neisseria meningitidis
atgaacgaacaagaactgcaagacctgcaaaaaatggtcggggtcgccgtcaacgccctcgaagacatcaaagccaaagacatttccgttctcgaaacgcaagataaaacttcgctgtttgccagaatgattatcgccagcggcgacagtacgcgccaagtcaaagcactggccaacaacgttgccgtcgatttgaaagaagccggttttgaaatcctcagtaccgaaggcgacagcggcgaatggacgttggttgatgcaggagacctcgttgtccacgttatgctccctgccgtgcgcgacttctacgacatcgacaccctttggggcggcgagaaaccgagtttccacgccggaatgcagaagccgtggcacgcggcagactga

SEQ ID NO: 55416 - DNA, 1059 bp, Neisseria meningitidis
atgcgccctttgaacgtgcagatcaggttgggcaaccttaggcacaattatcggattttaaaggaaatgcacggaggcaagctgttggcggtagtgaaggccgacgcatacggacacggtgcggtcagatgtgctttcgcgctggcagacttggcagacggctttgccgtggcgacaatcgatgaaggaatcaggctgcgggagagcggcattacccatccgattgtccttttggaaggcgtatttgaagcatcagagtacgaagcggtcgaacaatactcgctctggccggcagtcggaaaccaatggcaacttgaggctttgctttcccgccattggaaaaaacctgtcaaggtctggttgaaaatggattcgggaatgcaccgtaccggttttttccctcatgattacgcttcggcatatgcggcattgaagcagtcggaatatgtggacagtattgtcaaattctcgcatttctcctgtgcggacgaacccgaaagcggtataacggaaatacagatggaagcattcgatttgggtactgaagggctggaaggcgaagaaagccttgccaactccgccgctattttgaatgttcccgaagcacgcagggactgggggcgcgcgggcttggcgttgtacggcatttccccgttcggaggcagcgatgacaggctgaaacccgtgatgaggctttccacccgtattttcggcgaacgcgttttacagccgcactcccctatcggttatggcgcaacattttataccagcaaatctacgcgggtcggcctgattgcctgcggttatgcggacggttatccgcgccgtgccccaagcaattcccccgtcgccgtcgacggtaaattgacccgggtcatcggcagggtctctatggatatgatgaccatcgagctggacgcttcacaagaaggtttgggacacgaggtcgaactgtggggcgatacggtcaacatcaataccgttgccgaagcggccggaaccatcccttacgaattgatgtgcaatatcaaacgtgcaaaattcacttatatcgagtaa

SEQ ID NO: 55417 - DNA, 504 bp, Neisseria meningitidis
atgtcagacgaattcaaccaattcatcaaccgcgtcctctcccacgagggcggttacgtcaatcatcccaaagaccccggcggcgaaaccaattggggcatcactaagcgtaccgcaatggcaaacggctttaacggttccatgcgtgccatgacccgcgaacaggctatcggcatttaccgaaaggcgttttgggagcgttaccgcgccgaccaaatgccggaagcggtcgcgttccaattttttgatgcctgcgtcaaccacggttacggcaatgccgcccgtatgctgcaacgcgccgcaggcgtggcggacgatggaatcatcggcgaaatcagcctcaaagccatcaattccctccccgaaaacgaccttttattgcggttcaacgccgagcgtctggtcttttataccaagctcggtacattcacctctttcggcaagggctgggtacgccgtgtggcgcaaaacctgattcacgcgtctgcagataacactgattaa

SEQ ID NO: 55418 - DNA, 498 bp, Neisseria meningitidis
atgaatagcctccccattgccgacctcctcgtctccgccgtcatcgccgcctgcatcgtcatttccacgatgcgcggcgtgattacggaggcaggctcaatggcggcatgggtggtttccttctttttcgccaaactctttgccgcacccttcgccgacatcgcctttgcatcgttccaaccccgcctgtttgcattggctctgtcgttcatttccctattcgtcattgcctgtctgatccagaaaatactccgctcgctgctgaccggggcagtttcggcggtcggtttgggctttgccaaccgcattttgggcggcgtattcggtgcattgaaaggcattttgattattaccctgctggtcatgctcgcttcaaaaaccgacctgcccgataccgaagaatggcggcaatcttacacactgccgtttttcgtatcgctttccgaagccgtgttgaaccatagcggcggcacggcggaaactccggaagacgattga

SEQ ID NO: 55419 - DNA, 1008 bp, Neisseria meningitidis
atgtattcgaataatgctataactaataatagaaacaatattactctaggtgcgtatagggatgctattatttccatattttctgatgaaaatgtggttagggcgattggtacgattaactcaatgtacgaagaatatttgaccctttcgcacaagatagatcaacgagcatttttaagggagggtgagcgtctgtctgctaaggcaagagaattccaacgcacagcagaagaggcacaaaaaagcttaaaagaaggaattggaagagctgctagtaaatttcgtggtaattcaaaggaggcatttgttgcaagaaaagtacaaagtgatttgcaaaaagcattgaatgctagcaactataacaagcagcaatatgcaagacgtgcggcaacagcgttagagaatgcttcaaaatcaaaagttatggcagcgaatttgggtaagtttacttatggggcaactgttgccatgggaactttgagtatgggaagtgcttggtggaaagccttggatgaagaaggaaattggagtgatgttggtctctcatcagcttcttttttgggtgggctaatgggcttccaatggggtgcggctttgggtgttggggcttttggtttacttactggtggcgcaggttggctagtagttggaactataattggaggtggctcaggagcttggtggggatcattaggagctgaaaaagcttggagatggtttgaagatttcttaaatcttaaccgcagcgacaaattccacgtaaccgacccccttgccctagatctagatggcgacagtatagaaaccgttgccaccaaaggccttgcaggtgcattgttcgaccaccgcagccaaggtatccgcaccgccacgggctggattgctgcatatgacggttttcctgtgcgcaaattaaacagtaacgggggcattattagcacgacagataccatattccaatctttgcatacatggcttgatcatcaaccaaatgatacatgccattga

SEQ ID NO: 55420 - DNA, 651 bp, Neisseria meningitidis
atgatccgtttcgaacaagtttccaaaacctatcccggcggttttgaagccctgaaaaacgtcagcttccaaatcaacaaaggcgaaatgatatttatcgcgggacactccggttcgggcaaatccaccgtcctcaagctgatttcgggcatcaccaagccgagcaggggcaaaatcctgtttaacgggcaggacctcggcacattgtccgacaaccaaatcggctttatgcgccaacacatcggcatcgtgttccaagaccacaaaatcctctacgaccgcaacgtcctgcaaaacgtcatcctgccgcttcggattatcggctatccgccgcgcaaagccgaagagcgtgcccgcatcgccatcgaaaaagtcggcctgaaaggacgagaattggacgatcccgtaaccctctccggcggtgaacaacaacgcctgtgcatcgcccgcgccgtcgttcaccagcccggcctgctgattgccgacgaaccctccgccaacctcgaccgcgcctacgcgctcgatattatggaattgttcaaaaccttccacgaagcgggaacaaccgtcatcgtcgccgcacatgacgaaaccctgatggcggactacggacaccgcatcctgcgcctctcgaaaggacgactcgcatga

SEQ ID NO: 55421 - DNA, 837 bp, Neisseria meningitidis
atgcaaatcatacataccattcgagaactgcgcgcgtggcgtaaaaatgcgggaaaggtggcatttgtgccgaccatgggcaatctgcatgaagggcatcttgagcttgtgcgtgaggcgaaaaaacgcgcggacagtgtcgtggtcagcattttcgtcaaccgcctgcaattcggtcagggcgaggatttcgacaaatatccgcgtactttgcaacaggatgcggacaagctggaagccgagggtgttgccgttgttttcgcgcccgatgaaaaagaactctatccgaacgtggagcaacggtataacgtcgaaccgcccaacctgcaaaatgagttgtgcggcaagtttcgtccgggacatttccgcggggtggcgacggtggtgtccaagctgttcaatattgtcgcgccggatgttgcctgtttcggcaaaaaagactatcagcagcttgccgtgattaaaggtttgaccgaggatttgaattttgatgttgaaatagtgcctgtcgatacggggcgcgcggaagacggtttggcactctccagccgcaaccagtatttgagtgcggcggaacgcgacgaagcaccgcgcctgtaccgcgaattaaaggctgttgccgaatccttggcgcagggcagtttggattatgcaggtttggagcggcaggctgccgaccatttgaccgctgcgggctgggtggtcgattatgtcgaaatccgccgcgccgatacgctcgaagtggcgcgggcgggagataagaaactggtggtcttggccgccgcccgtctggggacgacgcgcctgattgacaatttggaaataaaactcccttaa

SEQ ID NO: 55422 - DNA, 171 bp, Neisseria meningitidis; identical to SEQ ID NO: 39149

SEQ ID NO: 55423 - DNA, 624 bp, Neisseria meningitidis
atgggaaagaagtgcggcagaaagaacgcaactcgtcgcagggttaaggcaatgccatccgttgaactgctgttggagattgtcggactgccacgcggcaccttctattaccaattggccgtccaatcggcagaagacaaatatgccgatttgaaacggcatatccatgatatttatcgacgacataagggaagatacggctaccggaggattgcagcagccatccttcatgcaggaacaccggtcaatcacaagaaagtcagccgtctgatggcgaagacggggctgaaggcagtgatacggcggcgcaaataccgctcgttcaaaggagaagtcggcaaaattgcgccgaatatcctgcgacgctgtttccatgcagaaaagccgaatgagaaatgggtaacggacgttaccgagttcaatgtaggcggagaaaagatatacctttctccgattatggatttgtttaacggggaaatcgtcagttaccgtattcaaatccgcccgactttcgatttggccggcgagatactgaaaggtgcgccggagaaaccgggatcgtctgaaaagccgatactgcattcggatcaaggttggcaatatcagatgtttttttatagttga

SEQ ID NO: 55424 - DNA, 1929 bp, Neisseria meningitidis
atggcaaaagtaatcggtatcgacttaggtacaaccaactcttgtttggccatttccgaaaacggtcaaaccaaagtgatcgaaaacgcagaaggcgcacgcaccacgccgtccgttatcgcttatttggacggcggcgaaatcctcgtcggtgcgcctgccaaacgccaagccgtaaccaacgctaaaaacaccatttacgccgccaaacgcctgatcggccacaaatttgaagacaaagaagtccaacgcgacatcgaatctatgcctttcgaaatcatcaaagccaacaacggcgacgcatgggtaaaagcacaaggcaaagagctgtctcctcctcaaatttccgcagaagtcctgcgtaaaatgaaagaagccgccgaagcttacttgggcgaaaaagtaaccgaagccgtgattaccgtccctgcctacttcaacgacagccaacgtcaagccaccaaagacgcaggccgtatcgccggtttggacgtgaaacgcatcatcaacgagccgaccgcagccgctttggcattcggtatggacaaaggcgacaacaaagaccgcaaagtagccgtatatgacttgggcggcggtactttcgatatttccatcatcgaaatcgccaacctcgacggcgacaaacaattcgaagtattggcaaccaacggcgataccttcttgggcggtgaagacttcgaccaacgcctcatcgaccacatcatcgccgagttcaaaaaagaacaaggcattgatttgaaacaagacgtgatggctctacaacgcctgaaagaagctgccgaaaaagccaaaatcgaattgtccagcggccagcaaaccgaaattaacctgccgtacatcaccatggacgcaaccggcccgaaacacttggcgatgaaaattacccgcgccaaattcgaaagcctggttgaagacctgattacccgctctatcgaaccttgcaaaattgcattgaaagatgccggcttgagcaccggcgacatcgacgacgtaatcttggtcggcgggcagtcccgtatgccgaaagtacaagaagccgtgagagacttcttcggcaaagaaccgcgcaaagacgtgaaccctgacgaagccgttgccgtaggcgcagcgatccaaggcgaagtattgagcggcggccgcagcgacgtattgctactggacgtaactcctctgtctttgggtatcgaaaccatgggcggcgtgatgaccaaactgattcagaagaacaccaccatcccgaccaaagcgtcgcaagtgttctctaccgccgaagacaaccaaagcgcagtaaccatccacgtactgcaaggcgaacgcgaacgcgcttctgccaacaaatctttgggtcagttcaacttgggcgacatcgcacctgcaccgcgcggtatgccgcaaatcgaagtaaccttcgacatcgacgccaacggcatcctgcacgtttccgccaaagacaaaggcaccggtaaagcagccaacatcaccatccaaggttcttcaggtttgagcgaagaagaaatcgaacgcatggtgaaagatgccgaagccaatgccgaggaagataaaaaactgactgaattggtcgcttcccgcaaccaagccgaagccctgattcactctgtgaaaaaatctttggccgactacggcgacaaactcgacgcagccgagaaagaaaaaatcgaagccgcgctgaaagaagccgaagaagcagttaaaggcgacgacaaagccgctatcgatgccaaaaccgaagcactgggcacagccagccaaaaactgggggaaatggtttacgctcaagcacaagctgaagcccaagcaggcgaaagcgaacaagccaatgcttctgcaaagaaagacgatgatgtcgtagatgccgactttgaagaagtaaaagacgacaaaaaataa

SEQ ID NO: 55425 - DNA, 561 bp, Neisseria meningitidis
gtgggaatccaggacgaaaaatctccagaaaccgttttacccgataagtttccgcaccgacaggtctggattcccgcctgcgcgggaatgacgatgcaggtatttctgacgattcccggctatgatgttgaggcagaaatcgaaaaattcgtttggatggatgctgtgatttggcagatgccgggctggtggatgcacgagccttggacagtgaaaaaatacatagacggagtattaaccgctggacacggcaaactctaccaaagcgacggcagacacagcgtcaatccgactgagggctacggcacaggcggcttgttgcaaggcaaaaaacatatgctttcactgacttggaatgcgccgattgaggcgtttacccgcgaaggcgatttctttgaaggcaaaggcgttgatgttttgtatatgcacttccacaaagccaacgagtttttgggtatgacccgcctgccgacattcttatgtaacgatgtggttaaaaatccgcaagtggaaaaatacttggcagattatcaggcacacttggaaaaagtgttcggctaa

SEQ ID NO: 55426 - DNA, 333 bp, Neisseria meningitidis
atgtcattacccccttgcccgcaatgcgcctccgaatacacctacgaagacggcggacaatacatctgccccgaatgcgcccacgaatggaataaaaccgaatccgccgcagccgaagccgccgaagaagtgcgcgatgccaacggcgcggtgctgcaaaacggcgacaccatcatcctcatcaaagacctcaaggtaaaaggcagctcgatgacgatcaaacaaggtacgaaagtcaaaggcatacgcctgcaggaaggcgatcacaacatcgcctgcaaaatcgacggcagcgcgatgaatttaaaatctgaattcgtcaaaaaagcctga

SEQ ID NO: 55427 - DNA, 1383 bp, Neisseria meningitidis
atggcaaatattgcccgcgacatcttcaaagcctacgacatccgaggcattgtcggcaaaaccctgaccgacgatgccgcctatctcatcggcagggccatcgccgccaaagccgccgaaaaaggcatgacccgcatcgcgctcggacgcgacggacgcttgagcggtcccgaactgatggagcacatccaacgcggctttaccgacagcggcatcgacgtcctcaacgtcggtatggtcgccacgcccatgctctattttgccgccatcaacgaatgcggcggcagcggcgtgatgattaccggcagccacaatccgcccgattacaatggtttcaaaatgatgctcggcggcgacacgctcgcaggcgaagccattcaagaacttttagccattattgaaaaagacggttttgttgccgccgacaaacaaggcaacgtaaccgaaaaagacatctccggcgaataccacaaccacatcgtcggccacatcaaactcaaacgcccgatgaacatcgctatcgacgcgggcaacggcgtgggcggcgcgtttgccggcaaactctataaaggcttgggcaacgaagtaaccgagcttttctgcgacgtggacggcaatttccccaaccaccatcccgacccatccaaacccaaaaacctgcaagatttgattgccgcgctgaaaaacggcgatgccgaaatcggcttggcgtttgacggcgatgccgaccgcttgggcgtagttaccaaagacggcaacatcatctatccagaccgccaactgatgcttttcgcgcaagacgtgttgagccgcaatcctaaagccaaagtaattttcgacgtcaaatccacccgtctgcttgcgccttggattaaagaacacggcggcgaacctgtgatggaaaaaaccggccacagctttatcaaatcctccatgaaaaaaaccggcgcgccggttgccggcgaaatgagcggacacatcttcttcaaagaacgctggttcggcttcgacgacggtctgtacgccggcgcacgcctcttggaaatcctgtctgcctccgataatccgtccgaagtgttaaacaacctgccgcaaagcatttccacgcccgaactcaacatcgccctgcccgaaggcagcaacggccatcaggttatcgacgaactcgccgccaaagccgaatttgaaggcgcaaccgaaatcatcaccatcgacggtctgcgcgttgaatttcccgacggcttcggtctgatgcgtgcttccaataccacgccgattctggtgttgcgttttgaggcggatacgcaagaagccatcgagcggattcaaaaccaattcaaagccgtcatcgaaagcaatccgaatctaatctggcctctgtaa

SEQ ID NO: 55428 - DNA, 234 bp, Neisseria meningitidis
atggcacgagtttgcaaagtgaccggtaagcgcccgatgtctggcaacaacgtatcacacgccaacaacaaaaccaaacgtcgttttttgcctaacttgcaatcacgtcgtttttgggtagaaagtgaaaaccgctgggttcgcctgcgcgtttctaacgccgctctgcgtaccatcgacaaagtaggcattgatgtcgtattggctgatttgcgtgctcgcggtgaagcttaa

SEQ ID NO: 55429 - DNA, 213 bp, Neisseria meningitidis
gtgtgcttcagcccgctgcatcaaaaatttttggagaaccggcgggagtcggcggttttggtttcggcggggacggtggaaatgggtaacattgacggaatcgacggaagcggtgggctgaagcccacccttgtatattggaatcactgtatcatagcaacaaaccgcccggccgccacccgcgcccacccaaggcacacaaccgttgcgtag

SEQ ID NO: 55430 - DNA, 240 bp, Neisseria meningitidis; identical to SEQ ID NO: 39582

SEQ ID NO: 55431 - DNA, 567 bp, Neisseria meningitidis; identical to SEQ ID NO: 37899

SEQ ID NO: 55432 - DNA, 1542 bp, Neisseria meningitidis
atgaaaatcggtatcccacgcgagtcattatccggcgaaacccgtgtcgcctgcacgcccgccaccgttgccctgttgggcaaactgggctttgaaaccgttgtcgaaagcggtgcaggtttggcggcaagtttggacgatgccgcttaccaaacagcaggcgcaaccgttgccgacaaagcggcggtttgggcctgccctttgatttataaggtcaacgcgccgtccgaacaggaactgccgcttttgaacgaaggtcaaaccatcgtcagcttcctgtggccgcgccaaaacgaggctttggtcgaagccttgcgcgccaagaaagtgaacgcgctggcgatggatatggtgccccgcatttcgcgcgcgcaggctttggacgctttgtcttcaatggcaaacatcagcggctaccgcgccgtgattgaagccgccaacgccttcggccgtttcttcaccggtcaaattaccgccgccggcaaagtgccgcccgcgcaggttttggtgattggtgcaggtgtggcgggtttggcggcgatcggtacggcaaactcgctcggcgcagtggtacgcgcgttcgatacccgcttggaagtggcggaacaaatcgaatcgatgggcggcaagttcctgaaactcgacttcccgcaagaatcgggcggcagcggcgacggctacgccaaagtgatgagcgacgaatttatcgccgccgagatgaagctctttgccgagcaggcaaaagaagtggacatcatcatcactaccgccgccattccgggcaaacccgcgcccaagctgattaccaaagaaatggtggaaagcatgaaatccggctccgtcatcgtcgatttggcggcggcgacgggcggcaactgcgaactcaccaaaccgggcgaattgttcgtaaccgacaacggcgtgaaaatcatcggctacaccgacatggcaaaccgccttgccggacagtcttcccagctttacgccaccaacttggtgaacctgaccaagctgttaagcccgaacaaagacggcgaaatcacgctggacttcgaagacgtgattatccgcaacatgaccgttacccgcgacggcgaaatcaccttcccgcctccgccgattcaagtttccgcccagccgcagcaaacgtcgtctgaaaaagccgcgcctgccgccaagccggagccgaaacccgttcccctgtggaagaaactcgcgcccgccgtcatcgccgccgtgttggtgctgtgggtcggcgcggtcgcgcccgcagcatttttgaaccacttcatcgtgttcgtcctcgcctgcgtcatcggctactacgtcgtctggaacgtcagccactcgctgcataccccgctgatgtccgtgaccaacgccatctccggcatcatcgtcgtcggcgcgctgctgcaaatcagccaaggcaacggcttcgttaccctgcttgccttcatcgccatcctgattgccagcatcaacatcttcggcggctttgcggtaacacggcgtatgctgaatatgtttaagaaagggtaa

SEQ ID NO: 55433 - DNA, 357 bp, Neisseria meningitidis
atgttgtccgcttactttcccgtctttgtctttatcctcgtcggcctcgcggccggcgtactgtttatcctgctcggcacgattttaggcccgaaacgccactatgccgaaaaagacgcgccttacgaatgcggtttcgaagcctttgaaaatgcgaggatgaagtttgacgtgcgctattacctcgtcgccatcctcttcatcctgtttgatttggaggtcgcgttcatgttgccgtgggcagttgtgttcaaagatttgggcgcgtacggcttctggtctatgttggtgtttatcgtcgttctgacggtaggctttgtttacgaatggaaaaaaggtgcgctggaatgggaatag

SEQ ID NO: 55434 - DNA, 255 bp, Neisseria meningitidis
gtggattggatgggcagtctgttcctgccgggtggcgcactgttgttcctgagcgtggtttcgaccactttgtccgcatgtttgggaatgcctttgctgctggtttctcccgccggcgtgttggacggggcggcggaagccttggcgattgcggcgttcctgatgctggtcgcgcgtccgccggcagtgttcggcggtttgtggaaattcaattacagcctggcggattcgcatttgaagtgcaactttccctaa

SEQ ID NO: 55435 - DNA, 771 bp, Neisseria meningitidis
atgaaaatcaccacttggaacgtcaattcgctcaatgtgcggctgccgcaggtgcaaaacctgcttgccgacaatccgcccgatattttggttttgcaggaactcaaactcgatcaggacaaatttccggccgccgctttgcaaatgatgggctggcactgtgtttggagcgggcagaaaacctacaacggcgtggcaatcgtcagccgcaacgcgccggaagacgtgcatatcgggctgcccgcgctgccggacgatccgcaacggcgcgtgattgcggcaaccgtcggcggtgtgcgcgtcatcaatgtctattgcgtcaacggcgaagccctcgacagcccgaaattcaaatataaagaacaatggtttgccgcgttaaccgaatttgtccgcgatgaaatgacccgctacggcaaactggtgctactgggcgatttcaatatcgcgcctgccgatgcggactgttacgaccctgaaaaatggcacgaaaaaatccactgttcgtccgtcgaacggcagtggttcaaaaacctgctggatttgggactgaccgacagcctgcgccaagtccatcccgaaggcgcgttctatacctggttcgactatcgcggcgcgatgttccaacgcaaactgggcctgcgtatcgaccatattttggtgtcgcctgcgatggcggcggcgttgaaggatgtccgcgttgatttggagacgcgcgcgctggagcgtccgagcgaccacgcgccggtgacggcagaattcgattggtaa

SEQ ID NO: 55436 - DNA, 471 bp, Neisseria meningitidis
atgtacgatgtcaatacccacgatgtccgccgctttttcgcccgcgtgtggcagcagcggctcaatccgctgcaactgagcgcactggaacagaaagccctccgcattgtcgaagcccatcccgaataccaccgctatctcgaacgcatcgaagaccatctggacaccgactggctgcccgaaaacggcgaaagcaaccccttcctgcatatgtcgctgcatctgtccgtccaagaacaggcgggcatagaccagccgcacggcatacgcgcaatccacgacaccctgtgcgccaaacgcggctggctggaagccgaacacgaaatgatggaggcactggcggaaacactgtggacggcgcaacgctacggcaccggtttggatgtcaatttctacatgacccgactgcgcaaactcatcggcttgggtgcagaagatcaagccaggttgaacccacatgaaatcgcctga

SEQ ID NO: 55437 - DNA, 2463 bp, Neisseria meningitidis
atgacacaaaaagaaaagcattttgaggaatatgccgccttggcaacccttcctttgcgggatgtcgtcgtttacccgcatatggttctgccgctgtttgtcggcaggccgaaatccatcgccgcactggaaaacgccattacccgcgaggaaccggttttcctattggcacaaaccgatgcggcgctagaagaaccggttgccgccgacctgtatcagaccggtaccgtcgcacaagtcttacaggtattgaaactgccggacggcacggtaaaagtattggtcgaaggtctgtatcgcggacgtgttctgaccatcgaagacacgggcggtctgttcgtttcccatatagaggcggtcgtggaagaagacacgggcggcaataccgacctcgaagccgtgcgccgcaccctgttggcgcagtttgaacaatacgccaaactcaataaaaaaatccccgccgaaattatcggcagcatcaacggcattgccgaaaacagccggctaaccgatacggtcgcagcgcatttgcagttgaaactggcgcaacgccaacagattttggaaattcccgaaatcggcaaacggatggaattcctgctggcacagctggaatccgaactcgacattatgcaggccgaaaaacgcatacgcggacgcgtcaaacgccaaatggaaaaatcccagcgcgaatattatctgaacgaacagattaaagcgatacacaaagaattgggcgaagaagacgaaaacggcgaactggatgccttggaagcaggcatcaaaaaggcggggatgagcaaagaagcggaagaaaaatgcctgtccgaactgaaaaagctcaaaatgatgccgccgatgtctgccgaatccaccgtcgtacgcaactacatcgacaccctgctcgaactgccgtggaagaaaaaatcccgcgtcagcaaagacatcgccaaagccggattggtgctggataccgaccactacggcctggaaaaagtcaaagaacggattttggaatacctcgccgtccaaaaacgtatggacaaactcaaaggcccgattctgtgcctggtcggccctccaggcgtgggcaaaacctctttgggcgaatccatcgccaaagcaacggggcggaaatatgtccgcatggctttgggcggcgtgcgcgacgaaagcgaaatccggggacaccgccgcacctatatcggctccatgcccggtaagattttgcagaatatggcaaaagccggcgtaaaaaacccattgttcctgctcgacgaaatcgacaaattgggtagcgacttccggggcgatcccgccagcgcgttgctcgaagtgcttgatcccgagcaaaacaacaagttcgccgatcattatgccgaagtggattacgatttgagcgatgtgatgtttattgcgacttcaaacagcctgaatatcccgaccccgctgctcgaccgtatggaaatcatccgtctgtccggctacaccgaagacgaaaaaatcaatatcgcgatgcagtacctcgtgccgaagcaaatgaagcgcaacggcgtgaaagaaggcgaattgctcgtcgaagaaagcgcggtgcgcgatattatccgttactacacccgcgaggcgggcgtgcgttcgctcgaccgcgagattgccaaaatctgccgcaaggtggtgatgcagattaccttggacgaagataagaagaggttgtctgaaaccaagaaaaccagcaaagccaaacctaaagcggttaaagtaaatgagaaaaatctgcacgactatttgggtgtgcgccgcttcgattacggcgttgccgaaagcgaaaaccgtatcggacaagtaaccggtctggcgtggacagaagtcggcggcgaattgctgaccgtcgaagccgcagcattgccgggtaagggcgtgattcagtgcaccggccagttgggcgatgtgatgaaggaatccgtgtctgcagcgtggtcggttgtccgctcccgcgcggaatcagtgggcttggcttctgatttttacgagaaaaaagacatccatgtccatgttcccgaaggtgcaacgccgaaggacggtccgagtgcgggcattgccatgactttggcgatggtgtctgcattttccaaaatcccggtacgcgccgatgtagcgatgacgggcgaaattaccctgcgcggcgaagtcctgccgattggcggtctgaaggaaaaactgttggctgcgcttcgcggcggcatcaaacacgttttaattccaaaagacaacttcaaagacttggaagaaatccctgaaaacgtgaaaaccggcctgaccatccatccggtcaaatggatagacgaggtattggctctgggtttggaaagccagcctgagccttgggcagaaccttctggtgcggaagcggtggcggaatccgcttcaaaaccaaaaccccgcagcagggcaaccaaacattga

SEQ ID NO: 55438 - DNA, 435 bp, Neisseria meningitidis; identical to SEQ ID NO: 36184

SEQ ID NO: 55439 - DNA, 966 bp, Neisseria meningitidis
atgagctacacgcaactgacccaaggcgaacgataccacatccaatacctgtcccgccactgcaccgtcaccgaaatcgccaaacagcttaaccgccacaaaagcaccatcagccgcgaaatcagacggcaccgcacccaagggcagcaatacagcgccgaaaaagcccagcggcaaagccggactatcaaacagcgtaagcgacaaccctataagctcgattcgcagctgattcagcacatcgacacccttatccgccgcaaactcagtcccgaacaagtatgcgcctacctgcgcaaacaccaccggatcacgctccaccacagcaccatttaccgctaccttcgccaagacaaaagcaacggcagcacgttgtggcaacatctcagaatatgcagcaaaccctaccgcaaacgctacggcagcacatggaccagaggcaaagtacccaaccgtgtcggcatagaaaaccgacccgctatcgtcgaccagaaatcccgtatcggcgattgggaagccgacaccattgtcggcaaaggacagaaaagcgcattattgaccttggtcgaacgcgttacccgctacaccatcatctgcaaattggatagcctcaaagccgaagacactgcccgggcagctgttagggcattaaaggcacataaagacagggtgcacaccattaccatggataacggcaaagagttctaccaacacaccaaaataaccaaagcattgaaagcggagacttatttttgtcgcccttaccattcttgggagaaagggctgaatgagaacaccaacggactcatccggcaatacttccccaaacaaaccgatttccgtaacatcagtgatcgggagatacgcagggttcaagatgagttgaaccaccgaccaagaaaaacacttggctacgaaacgccaagtgttttattcttgaatctgttccaaccactaatacactag

SEQ ID NO: 55440 - DNA, 435 bp, Neisseria meningitidis
atgcgccgggcgttgattgcgaaaattaagattgctcaaaaggagctgggcttggacgacggtacctatcgcgcggtgttggagcgtgtgacgggcaagcggtcgtgtgcggatatggatgtttccgaacttgagtctgttgtcgctgatatgcggtcgcacggatttaagcctaaagcaaaaggtaacccacacggcaaaccgcatctgcgtcggacatcatcagcggcaatgttggacaaagtcgaagccctgctgaccgtcggcggcaaacattggaactatgcacacgcaatggcgcggcggatgtttggtaaggataaggtcgaatatttagacgatacgcagctacataaactggttgctgcgttgcagattgcggaaaacaggaaaacggaaaaagcgggtggggatgatggcgttcgaaaaagttga

SEQ ID NO: 55441 - DNA, 1125 bp, Neisseria meningitidis; identical to SEQ ID NO: 43410

SEQ ID NO: 55442 - DNA, 1035 bp, Neisseria meningitidis
atgcaaaccctgaccattatccgtcccgacgatatgcacctgcacctgcgcgacggcgacgcgctcaaagccgttgtgccttataccgccagacagatggggcgcgccgtgattatgcccaatctcaaaccgcctgtcgtcagcgttgccgacgcgcttgcctacaaagcgcgcattatggcggcgttgcccgaaggcagcgcgtttgagccgttgatgacgctttatttgactgataacgccacgtccgaacttgtacgcgaagccaaagctgccggcatcgttgccttcaaactctaccccgccggcgcgaccaccaattccgattccggcgtaaccgacctgttcaaacttatccccgttttggaagaaatggcgaaacagggcatcctgttccttgttcacggcgaagtaactgaccccgaaatcgacatcttcgaccgtgaagccgcctttatcgggcgcgtgatgaaacccgttttggcgcaagtaccaaatcttaaagtcgtgttcgaacacatcaccaccgccgaagccgcccgcctcgttttggaagcaggcgacaacgttgccgccactgttaccccgcaacacctcttgctcaaccgcaacgacctcttggtcggcggcgtgcgcccccatcatttctgcctgcccgtactcaaacgcgaaacccaccgtcaggcattggttgccgccgttaccggcgagaaggcgcacaaattcttcctcggcacagattccgcgccgcacgccaaatccgctaaagaaaacgcctgcggttgcgccggtatgttcagcgcgatgaccgccatcgagctttacgccgaagtgtttgaaaaagcaggcgcgttggacaaactcgaagcctttacctcgaaaaacggcgcaaggttttacggcattccggaaaacgccggcacgatcaccctcgtcaaacaaagccaaaccgtccccgcaagtgttccctacggcgacggcgaacttgtcccgatgcgcgcgggcggcgaaatcggctggacggtacagtattga

SEQ ID NO: 55443 - DNA, 483 bp, Neisseria meningitidis; identical to SEQ ID NO: 40363

SEQ ID NO: 55444 - DNA, 288 bp, Neisseria meningitidis
atggatgatttgattgcagcttttttgggctatttatcaggtaaatacaatgaagggaaaataagcaggttaggaatatctctaacggcaggaagcattttctttgcagtattctttactcaagaactgataatttttattattgatggaaataaggaaaatctttggaattttattactgggataatgaaagatttatttttattttcatgttctgtttgtttattattctatttcttattatttattgcagaaactattaggaaaacaatcaataaaattaaataa

SEQ ID NO: 55445 - DNA, 1179 bp, Neisseria meningitidis
atggcatttttaaaactgaccgaacaaaacgtgcagggcaaaaccgtcctcatccgcgccgatatgaacgtgccgttcaaagacggcaaaatcagcgacgacacccgtatccgcgcctcgattgcgtccgttaaatactgcgtggacaacggcgcgtccgtcatcgtgatgacccacttgggccgcccgaccgaaggcgagtttcaccccgaagacgacgttgcgcccgttgccgcgcatttgggcggcctgttgggcaaaaacgtgaaagtattgaacgactggcgcgaaaacaaaccggctttgaacgcgggcgatgtcgtgatgctgcaaaacgtgcgtatcaacaaaggcgagaagaaaaacgatttggaactgggcaaagcctacgcttctttgtgcgacgtgttcgtcaatgacgcgttcggcaccgcgcaccgcgcccaagcctcgaccgaagccgtcgcccaagccgctcccgttgcctgcgccggcgtattgatggcgggcgaactcgacgctttgggcaaagccttgaaacagcccgcgcgcccgatggttgccatcgttgccggcagcaaagtgtccaccaagctgaccatcctcgaatcgctggcggacaaagtcgaccaactcatcgtcggcggcggtatcgccaacaccttcctgttggcggaaggtaaagccatcggcaaatctttggcggaacacgatttggtggaagaatccaaaaaaatcatggagaaaatggcggccaaaggcggttctgtgccgctgccgaccgatgtcgtcgttgccaaagcctttgctgccgatgccgaagcggtcgtgaaagacattgccgacgttgccgaagatgagatgattttggacatcggcccgaaatccgccgccgcgcttgcggagttgctcaaagccgccggcacggtcgtatggaacgggccggtcggcgtgtttgagtttgaccagttcgcaggcggtacgaaagcccttgccgaagccattgcccaaagcaaagcattctcgattgcaggcggtggcgacacgctggcggcgattgctaaattcggcgttaccgaccaaatcggctatatttctaccggcggaggcgcgttccttgagttcttggaaggcaaagagctgcctgccgtagctgctttggaaaaacgcggcgcgtaa

SEQ ID NO: 55446 - DNA, 396 bp, Neisseria meningitidis; identical to SEQ ID NO: 38739

SEQ ID NO: 55447 - DNA, 1062 bp, Neisseria meningitidis
atgtccaaaaatgcacaaaaaaccctacttgccgtgtgcagtttcgaggtgcagccaaaagacgggcgaatccaactgctgccatatggcgaatttcgcgcagtagacggtcgtccgactgatgtccctgcgtggtatctgaccgaagaaaacggtcatgatgtcgcgttgttggccaacagctcgcgcaatcagttggttgtcgattatgaacaccagacgctctacaaagagaaaaacggacaacctgcacctgccgccggttggatgcgttggctggagttcacgcctaaaggcatgtttgccgaagtggagtggacggacaaggcggctgcggcaattgccgcaaaagagtatcgctacatctctgctgtgttttcctatgacacaaagggatatgtaagcaaaatttttcacgccgcgctgacaaatttccccgcgttggacggtatggacgaagtgctggcggcagcgtcggcgcaaattttaaaaccggaaacggagcaaaaccctatgaaagagttgttacagcaactgttcggcctgcctgatgcgggcgaagaagaactgaaggcggcattgtccgcgctcgtggaagccaagccggaaggtgcggctttgtccgccgatgtattcgcgcagctggcggaaaaagacagccgcattgcggctttgtcggcgcaaaacggcacgcccgacctgacgcgatacgcgccggtgtcgctggtgcgcgacctgcaaaaccaagttgccgccctgaccgccgagcgcgaagccgacaaaggcggcgaactgattaccgccgcactgtctgctggcaagctgctgcccgcacaaaaagaatgggcggaaggcgtgctgaaacagccgggtggctttgcctttttgagcggctttatcgaaaacgcccagccggtcgctgcactggcaggctcgcaaacgggcggcaaagcacccgacgaacgcgtcgccgcactgactgcggaagaggcagccgcagcaaaaatgctgggcatgtccggcgaagaatttgtaaaaatcaaagaaagcgaaggtaagtaa

SEQ ID NO: 55448 - DNA, 525 bp, Neisseria meningitidis
atgaaaaaagcacttgccgcactgattgccctcgctctcccggccgccgcactggcggaaggcgcatccggcttttacgtccaagccgatgccgcacacgcaaaagcctcaagctctttaggttctgccaaaggcttcagcccgcgcatctccgcaggctaccgcatcaacgacctccgcttcgccgtcgattacacgcgctacaaaaactataaagccccatccaccgatttcaaactttacagcatcggcgcgtccgccatttacgacttcgacacccaatcgcccgtcaaaccgtatctcggcgcgcgcttgagcctcaaccgcgcctccgtcgacttgggcggcagcgacagcttcagccaaacctccaccggcctcggcgtattggcgggcgtaagctatgccgttaccccgaatgtcgatttggatgccggctaccgctacaactacatcggcaaagtcaacactgtcaaaaacgtccgttccggcgaactgtccgtcggcgtgcgcgtcaaattctga

SEQ ID NO: 55449 - DNA, 402 bp, Neisseria meningitidis
atgaaattaaaaagcttagatttcccaactggctatttctattttgataatgcagcaataaactctgataaagtagaagttatagcagttggttatagaaatacggataaaaccataaaaatttttattgaagatgttattcattttagggttgttgatgaatcgtattttatagatacttttatggatttaatttcggaagatgcagatagagctttgcttcatgaaaatggtggtcaatctttttttgaacttcttgatgagtgttatgcggaatggatactgaaagaaagttattttcctttgaatagagaattctttaaatactatatttttatgtttgagcaaacattcatagaaataattggttctagtgcaacgtattcaattattgagggctag

SEQ ID NO: 55450 - DNA, 939 bp, Neisseria meningitidis
atgtccatccatactctgaaacgcctgccctcatcgctgctgctcggtctctgcctttccctgccgtcagcccacctttttgccgacaacgacattttagggcaatttttagaacagaacatgcttacctcctccgatccgatagaaatattcgccgaaagcacgatacaccccaccaacacccaagccattacaggcggtctgattctctcctcacagtctgccctggtcgtcaacaacaaaaccggacagatactgtatcagaaaaacgccgacaggattatgcccatcgcctccatttccaaactgatgagcgcgatggtcgttttggatgcaaacttggacatgaacgaaaccgttaccattacgcccgacgaaatcgaccgcatcaaagggaccggcagccgtcttgccataggtacggcacttacacgcaaagaactgctgcacctgagcctgatgagcagcgaaaaccgcgccacccatgcattgggcagaacctaccccggcggcatgggcgcatttgtcgccgccatgaaccgcaaagcccaaagcctcggtatgtacggcagccgcttttacgaaccgaccggactcaacttccaaaacgtttctaccgccaaagacttgagccttatggtcaacgccgccgcccaatatccgcaaatccgcaccaactcgacttccaactacgcctcggtacagaccaaaaacgggcagcagaactacaaaaactccaatgccctggtcagagaaggcatgtggaacatcgaattgcagaaaaccggctacatacgcgaagcaggcaggtctatggttgtcaaagccaacattcaaaatcaacccgttaccatcgtattgctgaactcgcccacatccgccacacgcgtcaacgacgcccgcaaaatcgaatcgtggatgctgcagcaacgctcctga

SEQ ID NO: 55451 - DNA, 669 bp, Neisseria meningitidis
atgagtttgagtaaattggcgaaaaaaacggcacaaactgctaaaaatatcggcgaaaccctgcgcacggcctttcggggaaaaatcacgctggtggtgtcgtccgagccgatacagcgcgtgcagttgagcggcttggccgacgaaaccctgcaagaccttgaacatttgcaggaatacggctttgccagccatccgcccgacggcagcgaagcggtagtgataccgctgggcggcaatacttcgcacggtgtgattgtgtgcagccagcacggcagctaccgcatcaaaaaccttaagcccggcgagacggcgatttttaatcatgagggtgcaaaaatcgtgattaagcaaggcaaaatcattgaggccgattgcgacgtgtaccgggttaactgcaaacaatacgaggttaatgcggccacggatgccaaatttaacgctccgttggtggagaccagtgcagtgttgacggcgcaaggccaaatcaacggcaacggcggcatggccgtcgagggcggcgacggagccacctttagcggcgatgttaaccaaacgggcggcagctttaacaccgacggcgacgtggtggccggcaatatatcgttgcgccagcacccgcataccgacagcatcggcggcaaaaccttaccggcggaaccggcatag

SEQ ID NO: 55452 - DNA, 531 bp, Neisseria meningitidis
atgaacgcaatccgaactttccaaaaccgcacgcccgaaatccacgaaagctgtatgatagacgaagcgtgcgtcgtcatcggcgaagtgtcgcttgccgaagacgtttctgtgtggccgtgcgccgtgttgcgcggcgatgtgaacagcatcaccgtcggcgcgcgcagcaatatacaggacggcagcgtcctgcacgtttcccacaaaaccgccgccaaacccgaagggtcgccgctggttatcggcgaagacgttaccgtggggcacaaagtgatgctgcacggctgccgtatcggcaaccgcgtcctggtcggcatggggacgacggttctggacgatgccgtgattgaggacgaagtgatgatcggcgcgggcagcctcgtgcctccgcgcaaacgcttggagggcggctatctttatgtcggttcgccggtcagacaagtgcgcgtgctgaccgatgaggaaaaagcctttttgaaatattccgccgcgcattatgtgaagctgtcgaaacagtacgggatgtga

SEQ ID NO: 55453 - DNA, 636 bp, Neisseria meningitidis
atgattgtttccattgatgttgatgcacaaaaaacttttacgcctttgtgtcctaaagagctgcctgtaaacgaggggcatttgattgtcgaagaattgaatgcccaagccgctttggcggatttgcgcgtgatgacgaaagatgcgcatcatgcggcagcaaaatggcttgtggataaccctgttgatatgttgaagccgacaggtttgcccgatgcggatttgacttgggtggctcatgcgatggttggtacgcgcggctatgaattgttggacgggctgccttgtgccaaagaatacgattattgcgtttggaaaggtattgatcctgaattgcatccttacggcgcgtgttttcacgatattgaggaaaaactaagcacagggctgattgaatggctgcgttgtcaaaatacggatacggttattatcggtgggttagctacggattattgtgttaaaacaacggttttgcagttactcaaaggcggtcgttggcaggttgtcgtcaatgaagcggcttgtcggggtattgcgccggaaaccatcgaaacagcatggcaggaaatgcattctgccggggcaatcatcttaaaaaacgctgatgaaataaataaatatattaataatcaataa

SEQ ID NO: 55454 - DNA, 1065 bp, Neisseria meningitidis
atggcactcgtatccatgcgccaactgcttgatcatgctgccgaaaacagctacggcctgcccgcgttcaacgtcaacaacctcgaacaaatgcgcgccattatggaagccgccgaccaagtcaacgcgcccgtcatcgtacaggcgagtgcaggtgcgcgcaaatatgcgggcgcgccgtttttgcgccacctgattctggcggctgtcgaagaatttccgcacatccccgtcgtgatgcaccaagaccacggcgcatcgcccgacgtgtgccaacgctccatccaactgggcttttcctccgtgatgatggacggctcgctgatggaagacggcaaaaccccttcttcttatgaatacaacgtcaacgccacccgtaccgtggttaatttctcccacgcttgcggcgtatccgtcgaaggcgaaatcggcgtgttgggcaacctcgaaactggcgaagccggcgaagaagacggtgtaggcgcagtgggcaaactttcccacgaccaaatgctcaccagcgtcgaagatgccgtgcgtttcgttaaagataccggcgttgacgcattggcgattgccgtcggcaccagccacggcgcgtacaaattcacccgtccgcccacaggcgacgtgttgcgtatcgaccgcatcaaagaaatccaccaagccctgcccaatacacacatcgtgatgcacggttccagctccgttccgcaagaatggctgaaagtcatcaacgaatacggcggcaatatcggcgaaacctacggcgtgccggttgaagaaatcgtcgaaggcatcaaacacggcgtgcgcaaagtcaacatcgataccgacttgcgccttgcttccaccggcgcggtacgccgctaccttgccgaaaacccgtccgacttcgatccgcgcaaatatttgagcaaaaccattgaagcgatgaagcaaatctgcctcgaccgctacctcgcgttcggttgcgaaggtcaggcaggcaaaatcaaaccggtttccttggaaaaaatggcaaaccgttatgccaagggcgaattgaaccaaatcgtcaaataa

SEQ ID NO: 55455 - DNA, 1155 bp, Neisseria meningitidis
atggttgataaaaaaagccctttgattgccgtcagtgtcggcgaagcgtcgggcgacctgttgggggcgcacctgatacgcgccatccgcgagcgttgcccgcaggcgcggtttaccggtatcggcggggaactgatgaaggcggaaggtttcgagagcctttatgatcaggagcggctggcggtgcgcggctttgtcgaagtggtcaggcggctgccggaaattttacggatacgcagggggctggtacgggatttgctgtcgttgaaacctgatgtctttgtcggtatcgatgcgcccgatttcaatttgggtgtggcggaaaagctgaaacggacgggcattccgaccgtgcattatgtcagtccgtcggtgtgggcgtggcggcgggaacgcgtgggcaaaatcgtgcatcaggtcaaccgcgtgctgtgcctgttcccgatggagccgcagctttatctcgatgcgggcggacgtgcggagtttgtcggtcatccgatggcgcagcttatgcccttggaagacgaccgtgaaacggcgcggaaaactttgggcgtggatgccggcatccccgtattcgccctgctgcccggcagccgcgtcagcgaaatcgactatatggcgccggtgttttttcagacggcattattgttgttggaacgctatcctgccgcacgcttcctgctgcctgccgcaacggcggcgacgaagcggcgtttggcggaagttttgcagcggccggagtttgccggattgccgctgacggtaatcgacagacagtctgaaacagtgtgcagggcggcggatgcggtgctggtaacgagcggtacggcaactttggaagtggctctgtgcaagcgtccgatggtcatcagctacaagatttcgccgctgacttatgcttatgtgaaacgcaaaatcaaagtgccgcatgtcggcctgccgaatatcctgttgggtaaggaggctgtgccggagctgcttcaacatgatgccgtaccggaaaaactggcggcggcgttggcggactggtacgaacaccccgataaggttgccgcgctgcaacaggatttcagggcgttgcacctgctgttgaaaaaagatacggcggatttggccgcgcgcgcggttttggaagaggcgggatgttga

SEQ ID NO: 55456 - DNA, 1686 bp, Neisseria meningitidis
atgtctatggaaaattttgctcagctgttggaagaaagctttaccctgcaagaaatgaacccgggtgaggtgattaccgctgaagtagtggcaatcgaccaaaacttcgttaccgtaaacgcaggtctgaaatcagaatccctgattgatgtagctgaattcaaaaacgctcaaggcgaaattgaagttaaagtcggcgacttcgttaccgttaccatcgaatccgtcgaaaacggcttcggcgaaaccaaactgtcccgcgaaaaagccaaacgcgctgccgattggattgccctggaagaagccatggaaaacggcaacatcctgtccggcatcatcaacggcaaagtcaaaggcggcctgaccgttatgattagcagcatccgcgcattcctgccgggttctttggtcgacgtacgtcctgtaaaagacacttctcacttcgaaggtaaagaaattgaattcaaagtgatcaaactggacaaaaaacgcaacaacgttgttgtgtcccgccgcgccgttctggaagctaccttgggtgaagaacgcaaagccctgctggaaaacctgcaagaaggctccgtcatcaaaggcatcgttaaaaacattaccgattacggtgcattcgttgacttgggcggcatcgatggtctgctgcacatcaccgatttggcatggcggcgcgtgaaacacccgagcgaagtcttggaagtcggtcaggaagttgaagccaaagtattgaaattcgaccaagaaaaacaacgcgtttccttgggtatgaaacaactgggcgaagatccttggagcggtctgacccgccgttatcctcaaggcacccgcctgttcggcaaagtatccaacctgaccgactacggcgcattcgtcgaaatcgaacaaggcatcgaaggtttggtacacgtctccgaaatggactggaccaacaaaaacgtacacccgagcaaagtcgtacaactgggcgacgaagtcgaagtcatgattttggaaatcgacgaaggtcgccgccgtatctctttgggtatgaaacaatgccaagccaatccttgggaagaatttgccgccaaccacaacaaaggcgacaaaatctccggcgcggttaaatccattaccgatttcggcgtattcgtcggtctgcctggcggcatcgacggtttggttcacctgtccgacctgtcctggaccgaatccagcgaagaagccgtacgcaaatacaaaaaaggcgaagaagtcgaagccgtcgtattggcaatcgacgtggaaaaagaacgcatctccttgggtatcaaacaactggaaggcgatccgttcggcaacttcatcagcgtgaacgacaaaggttctttggttaaaggttccgtgaaatctgttgacgccaaaggtgctgttatcgccctgtctgacgaagtagaaggctacctgcctgcttccgaatttgcagccgaccgcgttgaagatttgaccaccaaactgaaagaaggcgacgaagttgaagccgtcatcgttaccgttgaccgcaaaaaccgcagcatcaaactttccgttaaagccaaagatgccaaagaaagccgcgaagcactgaactccgtcaatgccgccgccaatgcgaatgccggcaccaccagcttgggcgacctgctgaaagccaaactctccggcgaacaagaataa

SEQ ID NO: 55457 - DNA, 654 bp, Neisseria meningitidis
atgttggaaattttgttccgccatcaagacttcgtcgccatcaacaaaccgggcggcatatccgtccaccaagacagcggcgagaccggactggcccgaacactcgccatacagttgggcgtagagcgtgtgtggctgctgcaccgattggacaaacagaccagcggcattttactgtttgccctcaacagagaaagcgcgtccgcccttagcggacagtttgccggcaaaagcatcaaaaaaacctatttggcactatccgaccgcaaaccgtccaaaaagcagggttggattaaaggcggaatggaaaaatccagacgcggaatgtggaagttgacgcgcaatacagaaaatatcgccgttacccgattccacagcatcagtatcgccgaaaaactgcggctgttcatcctggaaccgcatacgggcaaaacgcaccaattgagagtggcgatgaaaagtttgggcagtccgattctgggcgacagcttatacggcggaacagaatccgaaaccatgtttctgtatgcatggaaaatacaatttgcctaccaaaaccgacaaatcgaaattgttgcacccttaaaaaacgaatggcagactgaaaatatctctcatgcgctggaagaattttatatggcaaaagcaggttaa

SEQ ID NO: 55458 - DNA, 1581 bp, Neisseria meningitidis
atgtccgtcatcaaacgtgccctgatcagcctgtccgacaaggcaggcgcggtcgaatttgcccaaaccctgcacaagctcggtgtcgaaatcctctccaccggcggcacggcgaaactgcttgccgatgcgggcgttcccgtgattgaagtcgccgactataccggcttccccgaaatgctcgacggccgcgcgaaaacgctgcatccgaaaatccacggcggtattttgggtcggcgcgatttggacgaacacgttgccaagatggaagaacacggtatcggcaacatcgaccttgtgtgtgtcaacctctaccccttcgccgccaccattgccaagcccggctgcacgctggaagacgcgattgaaaacatcgacatcggcggcccgaccatggtgcgttctgccgcgaaaaactggaaacacgtcgccatcgttaccgacacagccgatttcccggccatagctgccgaaatggaagccaacaacggcgcattgagcgacaaaacccgcttcaacctctcacgcaaagcattcagccataccgcccaatacgacggcatgatttccaactacctgacctcgctttcagacgacgtcttgagcggccagccccaaatcggcgaattcccaagtcggttcaaccaaagctggattaaagtgcaagacatgcgctacggcgaaaatccgcaccaacgcgccgcgttctaccgcgatatttaccccgccgcaggcagcctcgctgcatacaaacaactgcaaggcaaagaattgtcctacaacaacatcgccgatgccgatgccgcatgggaagccgtcaaatcctttgacgcaccagcctgtgtgattgtgaaacacgccaatccgtgcggcgtcgccgttgcagccgatacattgaccgcctacaaactcgcctacgtcaccgacaccaccagcgcgttcggcggcatcatcgccttcaaccgcgaagtggacggcgaaaccgtcaaacagattaccgacaaccagtttatggaagtcttgatggcgccgaagtttaccgccgaagccctcgaaatcgccgccgccaagaaaaacgtgcgcgtattggaagtgccgcttgaggcaggcgcaaaccgcttcgaactcaaacgcatcggcggcggactgttggtacaaacccccgacatccaccgcatcagccgcgccgatttgaaagtcgtctccaaacgccaaccgaccgagcaggaatggaacgatttgctgtttgtctggaacgtcgccaaatacgtcaaatccaacgccatcgtcttcggcaaaggcggtcaaacctacggcatcggcgcaggtcaaatgagccgcgtggacagcactcgcatcgccgctcgcaaagcgcaagatgccaatctcgacctcaatggcgcatgtgccgcttccgatgctttcttccccttccgcgacggcgtagatgtcattgccgagcagggcatcaaagccatcatccatccggcaggctccatgcgcgatcaggaagtcttcgacgcagcggacgaacacggcatcgccatggtcgtaaccgacgtgcgccacttccgccattaa

SEQ ID NO: 55459 - DNA, 321 bp, Neisseria meningitidis; identical to SEQ ID NO: 43250

SEQ ID NO: 55460 - DNA, 186 bp, Neisseria meningitidis; identical to SEQ ID NO: 37303

SEQ ID NO: 55461 - DNA, 291 bp, Neisseria meningitidis; identical to SEQ ID NO: 55030

SEQ ID NO: 55462 - DNA, 438 bp, Neisseria meningitidis
atgatagggcttttaatcatcacacacgaaaccataggcgaagcctaccgcaagctggcacatcattttttcccgggcgggctgcctgaaaacgtccgcatactcggcgtgcaaccgacggaagaccaagacgacatcatcaacaacgccattgccgcgcttcaggaatttcccgacaacgacggcgtgctgattatgaccgatattttcggcgcgaccccctgcaatgcagcccgccgcctcgtgcgcgaaaacaaatcggcgattttgaccggactgaacgcgccgatgatggttaaggccgtccaatattcgccggcggcggaagaccttgccgcctttaccgaatgcgtcagggaggcggcggtaaaaggcattttcgccatcacgtccgcgcccgaagatttggtgtgccggcgcagcggcgatgccgtctga

SEQ ID NO: 55463 - DNA, 1266 bp, Neisseria meningitidis
atgagcaaaaaccaacccgcacaaccgaccaggcgcactctttttaaaaccgcgatcgcagccggagcagtcggcgcaatcggaggttatctcggcggcaaaaaacagggcgaaaccgccgaacgcaccgccgaaagccaacactcgccccaagcctatccctgctacggcgaacatcaggcaggcatcgttacgccgcagcaggcgttttcgattatgtgcgccttcgacgtaaccgcgcaaagtgccaagcagctggaaaacctgttccgcacgctgaccgcccgcatcgagtttctcacccaaggcggcgaataccaagacggcgacgacaaacttccgccagccggcagcggcattttgggcaaagccttcaaccccgacgggttgaccgttaccgtaggggtgggcagcagcctgtttgacggtcggttcggactcaaagacaaaaaaccgattcatttgcaggaaatgcgcgacttctccaacgataagctgcaaaaaagctggtgcgacggcgatttgagcctgcaaatctgtgccttcacccccgaaacctgccaagccgccctgcgcgacatcatcaaacacaccgtccaaaccgccgttatccgttggagtatcgacgggtggcagcccaaatccgaacccggcgcgatggcggcgcgcaacctgttgggcttcagggacggcacgggcaaccccaaagtttccgaccccaaaactgccgacgaggttttgtggacgggggtggccgccaacagcctcgacgaaccggagtgggcgaaaaacggcagctatcaggcagtccgccttatccgccactttgtcgagttttgggacaggacgccgcttcaagagcaaaccgacattttcgggcggcgcaaatacagcggtgcgccgatggacggcaaaaaagaagccgaccaaccggattttgccaaagaccccgagggtgatatcacgcccaaagacagccatatacgcctggcgaatccgcgcgatcccgaattcctcaaaaaacaccgcctcttccgccgcgcctacagctattcgcgcggactcgcctcaagcggacagcttgatgtcgggctggtgttcgtctgctatcaggcaaaccttgccgacggattcatcttcgtgcaaaacctcctcaacggcgaaccgctggaagaatacatcagccccttcggcggcggctatttcttcgtcttgcccggcgtggaaaaaggcggctttttggggcaagggctgctgggcgtataa

SEQ ID NO: 55464 - DNA, 594 bp, Neisseria meningitidis
atggcaagcattcaaaacttatacgaaaccgtcagccgcgttttgggcaatcaggcaggcaaagtcatttcagctttgggcgagattaccgtcgagtgtctgcccgaacactatatttcagtcatgaccgcattgcgcgatcatgaagagctgcatttcgagcttctggtcgatttgtgcggtgtcgattacagcacttacaaaaacgaagtatggcagggcaaacgctttgccgtcgtcagtcagttgctttccgttaaaaacaatcaacgcatccgcgtacgcgtctgggtttcagacgacgacttccctgtagtcgaatccgtagtcgatatttacaacagcgcggattggtacgaacgcgaagccttcgatatgtacggcatcatgttcaacaaccacccggacctacgccgcatcctgaccgattacggtttcgtcggacatccgttccgcaaagacttcccgatttccggctatgtggaaatgcgttacgacgaagagcaaaaacgcgtgatttaccaacctgttaccatcgagccgcgcgagatcacgccgcgtatcgtccgtgaggagaactacggtggccaataa

SEQ ID NO: 55465 - DNA, 1101 bp, Neisseria meningitidis
atgacccgtatcgccatcctcggcggcggcctctcgggaaggctgaccgcactgcagcttgcagaacaaggttatcagattgcacttttcgataaaggctgccgccggggcgaacacgccgccgcctatgttgccgccgccatgctcgcgcctgcggcggaagcggtcgaagccacgcctgaagtcatcaaactgggcaggcagagcatcccgctttggcgcaacatcagaggccatctgaaaacgcctgccatgatgcaggaaaacggcagcctgattgtgtggcacgggcaggacaagccattatccagcgagttcgtccgccatctcaaacgcggcggcgtggcggatgacgaaatcgtccgttggcgcgcagatgaaatcgccgaacgcgaaccgcaactcggcggacgtttttcagacggcatctacctgccgaccgaaggccagctcgacgggcggcaaatattgtctgcacttgccgacgctttggacgaactgaacgtcccctgccattgggaacacgaatgcgtccccgaaggcctgcaagcccaatacgactggctgatcgactgccgcggctacggcgcaaaaaccgcgtggaaccaatcccccgagcacaccagcaccctgcgcggcatacgcggcgaagtggcgcgggtttacacacccgaaatcacgctcaaccgccccgtgcgtctgctccatccgcgttatccgctctacatcgccccgaaagaaaaccacgtcttcgtcatcggcgcgacccaaatcgaaagcgaaagccaagcccccgccagcgtgcgttcagggttggaactcttgtccgcactctatgccatccaccccgccttcggcgaagccgacatcctcgaaatcgccaccggcctgcgccccacgctcaaccaccacaaccccgaaatccgctacagccgcaaacgccgcctcatcgaaatcaacggccttttccgccacggtttcatgatctcccccgccgtaaccgccgccgccgtcagattggcagtggcactgtttgacggaaaagacgcgcccgaacgtgatgaagaaagcggtttggcgtatatccgaagacaagattaa

SEQ ID NO: 55466 - DNA, 1380 bp, Neisseria meningitidis
atggcaaaaacgcttaaaaccctttaccaatgcaccgaatgcggcggcacttccccgaaatggcagggcaaatgcccgcattgcggcgagtggaacacacttcaggaaagcttggccgcgcccgagccgaaaaacgcccgcttccaatcttgggcggcggatacctcgaccgtccaatccctctcctccgtgaccgccaccgaagtgccgcgcaatccgaccggcatgggcgaactcgaccgcgtattgggcggcggtttggtcgatggtgcggtcatcctgctcggcggcgaccccggcatcggcaaatctacgctgctgctgcaaaccatcgccaaaatggcgcaaagccgtaaagtgctatacgtttccggcgaagaatccgcccaacaggtcgccctgcgcgcgcagcgtttggaactgcccaccgaaggcgtgaacctgcttgccgaaatccgcatggaagcgattcaagcagcgttgaaacagcatcagcccgaagtcgtggttatcgattccatccaaaccatgtattccgaccaaatcacttccgcccccggttctgtgtcgcaggtgcgcgagtgtgccgcccaactgacgcgcatggcgaaacagatgggcatcgccatgatactggtcggacacgtgaccaaagacggcgcgattgccggcccgcgcgtgctggaacacatggttgataccgtgctgtatttcgagggcgaccaacattccaactaccgcatgatacgcgccatcaaaaaccgcttcggcgcggcaaacgaactgggcgtgttcgcgatgacggaaaacggtttgaaaggtgtgtccaacccgtccgccatcttccttgccagctaccgcgacgacacgcccggttcgtgcgttttggttacgcaggaaggcagccgaccgcttttggttgaaattcaggcattggtcgatgacgcgcacggattcacccccaaacgccttaccgtcggactggaacaaaaccgcctcgcgatgctgctcgccgtgttaaaccgacacggcggcatcgcctgtttcgatcaggatgtgttcctcaacgccgtcggtggcgtgaaaatcggcgaaccggcggcggatttggcagtcatcctcgcgatgctttccagcttccgcaaccgcccgctgcccgaaaaaatggttgcatttggagaaatcggtttgagcggtgaagtccgccccgtcgcgcgcggacaagagcggctcaaagaagcggaaaaactcggcttcaaacgcgccatcgtccccaaagccaatatgccgcgcaacgccaaagagtttccgaacctgaaaatctacggcgtttcgagtttgcaggaagccattgatatttgtcgggaagatagggattga

SEQ ID NO: 55467 - DNA, 1452 bp, Neisseria meningitidis
atgccgtctgaacgcccacgggttttcagacggcatcaggacttttttatggatactacattgaaaaccaccttgacttctgttgcagcagccttcgcattatccgcctgcaccatgattccccaatacgagcagcccaaagtcgaagttgccgaaacgttcaaaaacgataccgccgacagcggcatccgcgccgtcgatttgggttggcacgactattttgccgacccgcgcctgcaaaagctgatcgacatcgcactcgagcgcaataccagtttgcgtaccgccgtattgaacagcgaaatctaccgcaaacaatacatgattgagcgcaacaacctcctgcccacgcttgccgccaatgcgaacggctcgcgccaaggcagcttgagcggcggcaatgtaagcagcagctacaaagtcggactgggtgcggcatcttacgaactcgatctgttcgggcgtgtacgcagcagcagcgaggcggcactgcaaggctatttcgccagcaccgccaaccgcgatgcggcacatttgagcctgattgccaccgttgccaaagcctatttcaacgaacgttacgccgaagaagcgatgtctttggcgcaacgtgttttgaaaacgcgcgaggaaacctacaagctgtccgaattacgttacaaggcaggcgtgatttccgccgtcgccctacgtcagcaggaagccctaatcgaatctgccaaagccgattatgcccatgccgcgcgcagccgcgaacaggcgcgcaatgccttggcaaccctgattaaccaaccgatacccgacgacctgcccgccggtttgccgttggacaagcagttttttgttgagaagctgccggccggtttgagttccgaagtattgctcgaccgtcccgatatccgtgctgccgaacacgcgctcaaacaggcaaacgccaatatcggtgcggcacgcgccgcctttttcccatccatccgcctgaccggaaccgtcggtacgggttctgccgaattgggtgggctgttcaaaagcggcacgggcgtttggtcgttcgcgccgtctattaccctgccgatttttacctggggtacgaacaaggcgaaccttgatgtagccaagctgcgccaacaggcacaaatcgttgcctatgaatccgccgtccaatccgcatttcaagacgtggcaaacgcattggcggcgcgcgagcagctggataaagcctatgacgctttaagcaaacaaagccgcgcctctaaagaagcgttgcgcttggtcggcctgcgttacaagcacggcgtatccggcgcgctcgacttgctcgatgcggaacgcagcagctatgcggcggagggtgcggctttgtcggcacaactgacccgcgccgaaaaccttgccgatttgtacaaggcactcggcggcggattgaaacgggatacccaaaccgacaaataa

SEQ ID NO: 55468 - DNA, 789 bp, Neisseria meningitidis
atgatggaaaacggaaaaacagtcccgagatggcgttttgccttgaaaagtgcgggctggcacctcttaatcagcctgtcggttgcagggctggcggcattgctggtttttaaggtttggtatccttatccttatgccgagctgacgggagggctgtcgctttatcagctggtggtggctgtcgatattgtatgtggtccgctgctgactttaattttggcaagcccgaagaaaaagacaaaggcacgcatggtcgatttttccatggtcggcatcatccagctggcggctttggtgtacggtctgcacagcgtttctttggcgcgccctgtgatagaggcgtttgaaaaagacaggattaatgttgtgaccgccgccgaagtggcggttgaagatttgcacaaagcgccggaagggctgcaaagcctgtcgtggttcggcatccgccgcattgcattgaaagaacctgaggatgcggatgagaagaacaagacgctggatttgtccctgaaaggtatcgagccgagtatgcgtcccgaccggtggctgccgtattccgacaaggaagcagaaaaaatccgcaaacatctgaaaccgctgaaagtcttggcggatgcgagaaaaacgacggttgcggacattctgaaacaggcaggtctcgccgaaggggaggagctgtattacctgccgtttaccagcagcaggcagaaagagtggatagtcattaccgataaagagggcaacaccaaaggctacgcgccgatagacggcttcatcatcaccccttaa

SEQ ID NO: 55469 - DNA, 348 bp, Neisseria meningitidis
atggacaaagagctaaaccccagcatcggcgactataccggccgcaccgtcgatacgctgcaaaatgccgtgtatatccgcttgatgacaccgttgggcagctggtgggcggataaaacgctcggctcgctgctgcatttgttgcagcgcgaaaaagacctgcaacgggtcagcctgttggccgagcaatatgccgatgaggcactgcaaccgattgttaagagcgggcgtgccgacaagattaccgtgcgcgcagagcagccgcacgacggccgcctgatcctgcatatccgggtggatacggcggcgggcgggtttgattaccgccacgaagtgcccgtgatttaa

SEQ ID NO: 55470 - DNA, 2427 bp, Neisseria meningitidis
atgtcggcacaaaccgatccgggctactttttcatgcccaaccacattattctgataggcgcgagcgaacgtccgtacagcctgggcgaacgcgtactcagcaacctgctgagtacgccctttcaaggaaaaatcacccccgtaaacccgcgccaccacaccatagccgggcttcccgcctacaccagcctcaacaaaatccccggcaatgcagacctgattattgccgttaccctacccgacagttacgacaccctcttcaaaacctgccgcaaaaagcagctccgacacatcatcctcatacaggactgggacagcctgtctgccgcagaactgcacaccgccgaaactgccatccgcaaacaccacggcaacggactcaacatcaccgcctgcaccaccgcaggcatccaactgccctcactcggactcaacatcagtacccaagacggatacgccgcaggccataccgccatactgaccggcaatgccgccgtcagccgtcaaatcgacaacatcctgaacaaactccgtcaaggcacatctcgccacatcagcctgcatcccggcatcagccccatcacatccgccgattggctcaaccgcttcggacacagcctgcacaccaaaaccgccgtcctacaccacaaccctgaagaggatcagcgcaaactgttcagcgcaatccgccaatttacccgccatacgccgctgattctccacatcacctgccgcacgacagaaaccgaccgtgccgtactgcactgcctcgcccgacactgcaacttcctcatcagtttcaacgccgacgacctcgaagccgcactgcgcgcccaactgtccgacattccacccctgtcccgactcgacatcctgtccgacacgcctgccgaatggctgaacgcgcacgcgccaaaaaccctcgccctccactttcccaaccttccccaccacatccgcaacggacacctgaccggcacacccacaccctcaatctgccacgacatcgcctcacgtcagcttgcccgccccgacacccaagccgtcctgaccatcctcagcccctccggacacgaggattacaaaaaaacagcacgcgcccttatccgcctgtccgaacagaccgccaaacccctgctcgtcagcagccccttttcagacggcataacccatttcgacacccccactcaggcaatccgcaccctttcctaccgcaacaccgccgccgccctgaaacaggcacagctcgacattgcaccgccgcaaccgtgccgtctgaaaacaccgcaaccccaaaacatcaaaaaagccctcgaagccgccgaccccgccctaatcgccgaagccctgcacctccccccctaccggcacaccacccataacgccgtccaattccaattcggcagccactccctctatggcgacatcctgaccgcacgttgcaacggacaaaccactgccgtactcccgccgtttaccacgctcgacagccgccaccttgcccgctttgccgaactcgacggcacacaaaccctcgaccagttcctgcacacactgaccgtcattcccgaataccgccaacacattctcggcatcaccctcaacctaaacggcggacaatacagcagcgatttcatcttaaagacacccgaaacacacgacacgcccaaacgcaagaacacaggcaaagccgcccaaaccctcgaacatgccgccgcaaaaatgcagagtgccgccgcatacctgaaacacaaaaacccgacagccgccgaatttctccgccacacaagcgaagccgccgcagaactgctcggcagcaaaaccgaaaccggagcagccgtacccaacgtacttgccccctatcccgcagcacaccccaaaacactgtccctaaaaaacgacacgaccgttaccattacccccattttgcccgaagacgcagaagccaaacagcagttcgtccgcagcctcggtcccgaagcacggtacacacgcttcatgacccacaccaacgaactgcccgcagccacgttggcacgcctgtgcaaccccgattaccactgtgaagccgcatggacggcaaaggatgccgacagcaacatcgtcgccgtcgtccgccacagccgcctgaatcgcaacgaatgcgaattcggcatcacactggcggaacatatgcgcggcagcggactggcacagaaaatgatggaactcatcatccaaaccgccgcacagcaaggctaccggactatgagtgccgacattctcaaaaccaatacccccatgatcaaacttgctgaaaaatcaggatttaccctcaaggaatcggacaccgaaaaaaacctgtaccgcgcatatctgaaccttgcggcagacaaaacaacagaaaaaacaaataaaaacttgcacaccgaccacaaaataacctaa

SEQ ID NO: 55471 - DNA, 324 bp, Neisseria meningitidis
gtgaacattttggcatccgaccgaaattatgaattaaatattgaaatatttattgacaatataattcattttcaaataacagatgaatcttataaagtaaaattttcagaatatttatttgaaaataaagaaaaaaatgattgggatagaaatcctgctataaattattttttcgagataatagatgacagttatatggactggttgaaagaagaaagttttggtttttttgaaaagaaatattataaggcttatattttcttttttagcgattctgtaatagaagttatcagctcgacagaacctgtattttattcaaaataa

SEQ ID NO: 55472 - DNA, 1092 bp, Neisseria meningitidis
atgaaaaagagaaaaatactgccgctggcaatttgtttggcggctttgtctgcctgtacggcgatggaggcacgcccgccccgggtaaatgaagcccaagccccccgcgcggatgaaatgaaaaaagaaagccgccccgcgtttgacacggcagccgtaccggtatccgacagcgggtttgccgccaatgcaaatgtccgccgttttgtggacgatgaagtcgggaaaggggatttttcccgggcggaatggcaggatttttttgacaaagcggcttacaaggcggacatcgtcaagattatgcaccgaccctccacatcgcgtccgtggtatgtgttccgcacgggaaattcgggcaaggcgaaatttcgcggcgcgcgccggttttatgcggaaaaccgcgcagttgtcgatgatgtggcgcaaaaatacggcgtgcccgccgagcttatcgtggcgattatcgggattgaaacgaattacggcaaaaatacgggcagtttccgcgtggcggacgcattggcgactttaggtttcgattacccccgccgcgccgggtttttccaaaaagaattggtcgagcttttaaagctggcaaaagaagagggcggcgatgttttcgcctttaagggcagctatgcgggtgcaatgggtatgccgcaatttatgccttcgagctaccggaaatgggcggtggattatgacggggacggacatcgggacatatggggcaacgtcggcgatgtcgcggcatcggttgccaattatatgaagcagcacggttggcgcacgggcggtaaaatgctggtgtctgcaacattggcgccgggtgcggatgttcaggcaatcattggcgaaaaaaccgccctgacgcggacggtggcggatttgaaggcgtacggcatcatccccggcgaagagcttgccgatgatgaaaaggcggttttgttcaaactggaaaccgcaccgggcgtgtttgaatattatttgggcttgaacaatttttatacggtatggcagtacaaccacagccggatgtatgtaacggcggtcagggacattgccaattcgcttggcggcccgggattgtaa

SEQ ID NO: 55473 - DNA, 2664 bp, Neisseria meningitidis
gtgctgaagacaccccctacgcttgctgcagaactttcgggtaaaaccggtgtgagcattagcgcaccgtatgccaatgagaacagtcgcatcctgctcagcaccacggatatcagttcggaaaacggcaaaatcaaaattcaatcttacggtgaccaatattactatgcgagacagagcgaactctatacctttgaacgccgcagctacaaaactggcaaatggtacaaccgcaaacacattaccgaagtcaaagaacacaaaaacgccaagcccgacgcagtaaacctcggcgcatcccaaggcatcgacatcaaatctggtggcagcatcgacgcctacgccaccgcattcgatgcccccaaaggcagcattaacatcgaagccgggcggaaattgacactctatgccgtagaagagctcaactacgacaaactagacagccaaaaaaggcgcagatttctcggcatcagctacagcaaagcacacgacaccaccacccaagtcatgaaaaccgcgctgccctcaagggtagttgcagaatcagccaacctccaatcgggctgggataccaaactgcaaggcacacagtttgaaaccacactgggtggcgcaaccatacgcgcaggcgtaggtgagcaggcacgggcagatgccaagattatcctcgaaggcatcaaaaccacgatccacaacgaaaccgtgagcagcagcaaatctgctctatggcaaaaacaggcaggacggggcagtaacatcgaaaccttgcaattgccgagtttcaccggtcccgttgcgcccgtactgtccgcacccggcggttacattgtcgatattcccaaaggcaatctgaaaaccgaaatcgaaaaactggccaaacagcccgaatacgcctacctgaaacagcttcagacggccaagaacgtcgattggaaacaggtgcagctggcctacgacaaatgggactataaacaggaaggcttgaccggagccggtgcagcgattgtggtgattattgtaaccgctctaacttatggatacggagcggctgcagcgggtagcgtaactgccgcaggaagtagtacagccgcagctgcaacaacgacagcggcagcaactaccactgtttctactgcagctgccatgcaaaccgcagctttagcctccttgtatagccaagcagctgtagccatcatcaataataaaggcgatgtcggcaaagcgttgaaagatctcggcaccagtgatacggtcaagcagattgttacttccgcactgacggcgggtgcattaaaccagatgggagcagatattgcccaattgaacagcaaggtaagaaccgaactgttcagcagtacgggcaatcaaaccattgccaaccttggaggcagattggccaccaacctcagcaatgcaggtatctcagctggtatcaataccgccgttaacggcggcagcttgaaagacaacttaggcaatgccgcattgggagcattggttaatagcttccaaggggaagccgccagcaaaatcaaaacaaccttcagcgacgattatgttgccaaacagttcgcccacgctttggcgggttgtgttagcggactggtacagggaaaatgtaaagatggggcaattggcgcagcagttggggaaatcgtagctgaatccatacttggcggcagaaaccctgctacactcagcgatgcagaaaagcataaagttatcagttactcgaagattattgcgggcagcgtggcggcactcaacggcggcgatgtgaatactgcggcgaatgcggctgaggtagctgtggtgaataatgctttgaattttgacagcacccctaccaatgcgaaaaagcatcaaccgcagaagcccgacaaaaccgcactggaaaaaatcatccaaagtattatgcctgcacatgcggcaggtgcgatgactaatccgcaggataaggatgctgccatttggataagcaatatccgtaatggcatcacaggcccgattgtgattaccagctatggagtttatgcagcaggttggacagctccgctgatcggtacagctggtaaagcagctatcagcacctgtatggctaatccttctggttgtactgtcatggttacgcaggctgctgaagcgggcgcgggaatcgccacgggtgcggtaacggtaggcaacgcttgggaagctccagtaggagcgttgtcgaaagcgaaggcggctaagcaggctataccaacccagacagttaaagaacttgatggcttactacaagaatcaaaaaatataggtgctgtaaatacacgaattaatatagcgaatagtactactcgatatacaccaatgagacaaacgggacaaccggtatctgctggctttgagcatgttcttgaggggcacttccataggcctattgcgaataaccgttcagtttttaccatctccccaaatgaattgaaggttatacttcaaagtaataaagtagtttcttctcccgtatcgatgactcctgatggccaatatatgcggactgtcgatgtaggaaaagttattggtactacttctattaaagaaggtggacaacccacaactacaattaaagtatttacagataagtcaggaaatttgattactacatacccagtaaaaggaaactaa

SEQ ID NO: 55474 - DNA, 966 bp, Neisseria meningitidis; identical to SEQ ID NO: 44673

SEQ ID NO: 55475 - DNA, 462 bp, Neisseria meningitidis
atgtttgattttccccccgtttcccgattccttgccgacgaagccgccacactcgatttgggcgcggcgtggtcttcccgtttaaacgcaccgctggtcatttacctcgaaggggatttgggtgcggggaaaaccacgctgacacgcggcatcctgcgcggattgggtcatcagggcgcagtcaaaagcccgacttacgccatcgtcgaatcttatccgctggaacgcttcaccttgcaccatttcgacctctaccgcttctcgttccccgaagaatgggaagatgccggattggacgaactgttttccgcaaacagcgtctgcctgatcgaatggccgcaacagggaggcgaatttacgccgcctgccgacatcaccgcaacattgacacacgacggcgacggcagaaaatgcctgctgaccgcccataccgaacgaggacgcgaaagcctgccgctatga

SEQ ID NO: 55476 - DNA, 261 bp, Neisseria meningitidis; identical to SEQ ID NO: 42390

SEQ ID NO: 55477 - DNA, 651 bp, Neisseria meningitidis
atgatttcagttgaacacgtttccaaacgctatctgacccgccaaggttggcggacagtcttgcacgatattagcttcaaaatggagaagggcgagaaaatcggtattctcggccgcaacggtgcaggtaaatcgacgctcatccgtttgatcagtggcgttgagccgccgaccacgggtgaaatcaagcggacaatgagtatttcttggcctttggcattctccggtgcgtttcaaggtagtctgaccggtatggacaatttgcgtttcatctgccggatttacaatgtcgatatcgattatgtgaagaactttaccgaagagttttccgagttggggcaatatctttacgagccggtcaagcgttattcttcaggtatgaaggcgcgtttggcatttgctttgtcgttggcggtagagtttgattgctatttgattgacgaagtgattgcagttggtgactcgcgttttgccgataaatgtaagtacgagttgtttgaaaagcgcaaagaccgttccatcatcttggtgtcgcacagccacagcgccatgaagcaatattgcgataatgcgatggtgctggaaaaagggcatatgtaccagtttgaagatatggacaaagcctacgaatattataattcgctgccttaa

SEQ ID NO: 55478 - DNA, 159 bp, Neisseria meningitidis
atgataggggcggtttcgtttgaatcggcgcaccgggatgaatgcccccgcgccgtctcgataccgatttaccggttgttccgtatcggttgccgccgtgaaatgacggacggatgcaggaatgacggcagacgggaggcggaggaaatgattgattga

SEQ ID NO: 55479 - DNA, 1635 bp, Neisseria meningitidis
atgaccaaattcattttcgtaaccggcggcgttgtctcctcactgggtaaaggtatcgccgccgcttctattgccgccatcctcgaatcgcgcggcttgaacgttaccatgctcaagctcgatccttatatcaacgtcgatcccggcacgatgagcccgttccaacacggcgaagtgttcgtaaccgacgacggcgcggaaaccgacctcgacttgggacactacgaacggtttatcgattccacgatgacccgccgcaacagcttcagcacggggcaggtgtacgaaaacgtcatcgccaaagaacgacggggcgactacctcggcggcacggttcaagtcattccgcacattaccgacgaaatcaaacgccgcatccacgaaggcgcggcaggttatgatgtggcgattgtcgaaatcggcggcacggtcggcgacatcgaatcgctgccgtttttggaagccatccgccaaatgcgaagccagttgggacgcagcaacaccctgttcgcccacttgagctacgtcccctacatcgccgccgccggcgaaatcaaaaccaaaccgacccagcatactgttaaagaaatgttgagcatcggtttgcaaccggacatcctgatctgccgtatggacagagaaatgcctgcggacgagcgccgtaagattgcattgttctgtaacgttgaagaacgtgccatcgtgggcagttacgacgtggacagcatttacgaatgccctgaaatgctgcacaaccaaggcatcgacagcattattaccgagcagttgcagcttaatgtgcagcaggcggatttgaccgcgtggaaaaaaatcgtccacgccatccaaaacccgaaacacaccgtcaaaatcgccatggtcggcaaatacgtcgatttgaccgagtcctacaaatcgctgatcgaagccttgaaacacgcaggcattcacaccgaaaccgacgtacaaattacctttgttgacagcgaaagcatcgagaaaaacaacggcgacgtttctatgcttaaagatatggacgccatcctcgttcccggcggttttggttcgcgcggcgtggaaggcaaaatcgccgctgtgcgctatgcccgcgaaaacaacgtgccatacttgggcatctgcctcggtatgcagattgcgctgatcgaatacgcccgcgacgtggcaggtttgaaaggtgcgaattccaccgagttcgacctcaaatgcgccgcccccgtcgttgccctgattgacgaatggcaaactgccgacggcagcgtcgaaacccgcgacgaatccgccgatttgggcggcaccatgcgtttgggcgcgcaagaggttgagttgaaagcaggcagcctcgccgccaaaatctacggcagcgaacacatccgcgaacgccaccgccaccgctacgaagtcaacaacaactacgttcctacgctggaacaagcaggtttggtcgtcggcggcgtatccgcaggacgcgaacgcttggtcgaaaccatcgaactgccgaaccatccttggttcttcgcctgccagtttcatcccgaattcacttccaacccgcgcaaagggcatcccttgttcaccgcgtttgtcaaagctgcgttgaacaataaaaaagcctga

SEQ ID NO: 55480 - DNA, 1218 bp, Neisseria meningitidis
atggagattattttaggtatcgtgatgtttaccgtcatcgttttggttttggcactgatgattctatttgccaaatccaaactggtcagcgaaggcgacatcaccatcaaagtcaacggcgaaaaagagctgacgatgcccgccggcggcaaactcttgggcgcgcttgccaacgaaggcatctttatcccctccgcctgcggcgggggcggttcgtgcggacaatgccgcgtcgtcgtaaaaagcggcggcggcgacatcctgccgaccgagctgtcccacatcagcaaacgcgaagcacgcgaaggctgccgtctgtcgtgccaagtcaacgtcaaaaccgacatggacatcgaagtccccgaagaagtgttcggcgtgaaaaaatgggaatgcaccgtcatctccaacgataacaaagccacgttcattaaagaactcaagcttgccattcccgaaggcgaagaagtccccttccgcgccggcggctacattcaaattgaagctcctcctcacactgttgcctacaaagacttcgacattcctaaggaatatcacgaagactgggacaaatacaatttgtggcaatacgtttccaaagtggacgagccgattttgcgtgcctactctatggcttcgtatcctgaagaaaaaggcatcattatgctgaacgtgcgtatcgccacgccgcccccgcgcgtacctgatgcgcctccgggacaaatgtcgtcctacatctggtcgctcaaacccggcgacaaagttacgatttccggcccgttcggcgaatttttcgccaaagacaccgatgccgaaatggtatttatcggcggcggtgcgggtatggctccgatgcgttcccacattttcgaccagttgaaacgtttgaactccaaacgtaagattaccttctggtacggcgcacgttccaaacgcgagatgttctatgtcgaagactttgaccaactcgcggcagagttcccgaacttcacgtggcacgtcgctctgtccgatccgctgccggaagacaactgggacggctacacaggcttcatccacaacgtggtttacgaaaaccacctgaaaaaccacgaagcgccggaagactgcgaattttatatgtgcggtcctccgattatgaaccagtccgtcatcaaaatgctcaaaaacttgggcgtggaagacgaaaacatcctcttggacgatttcggcggttaa

SEQ ID NO: 55481 - DNA, 453 bp, Neisseria meningitidis; identical to SEQ ID NO: 45863

SEQ ID NO: 55482 - DNA, 855 bp, Neisseria meningitidis
atgccgcccatccctgccccatccgcaccatccgagcacactgtcgcatgggtattcggccaacccgttaccgatttgccgcaggatttgtttatcccacccgacgcgctgaaagtcgtattgggcagttttcaaggccctttggatctactgctgtatctgatccgcaagcagaacatcgatgttctcgatattccgatggtgaagattaccgagcagtatctgcactacatcgcccaaatagaagcctatcagtttgatttggcggcggaatacctgcttatggcggccatgctgattgaaatcaaatcgcgcctgctgctgccgcgtaccgaaaccgtcgaagacgaagaagccgacccgcgtgccgagttggtgcgccgcctgctggcttacgaacagatgaagctggcggcgcagggtttggacgcgctgccccgagccggacgggatttcgcgtgggcttacctgccgctggaaattgccgtcgaagccaagctgcccgaagtctatattaccgacttgacgcaagcgtggctgggtattttgtctcgggcaaaacacacgcgcagccacgaagtaatcaaagaaaccatctccgtgcgcgcgcaaatgacggcaatcctgcgccgtttgaacggacacgggatatgcaggtttcacgacctgttcaatcccgaacagggcgcggcttacgtggtcgtcaacttcatcgcactgttggagcttgccaaagaaggtttggtcggaatcgtacaggaagtcggtttcggagaaatccgaatcagcctcaatcatgagggggcacattcagacggcatttccggcacacggggcgggcgcgatgtgttctaa

SEQ ID NO: 55483 - DNA, 816 bp, Neisseria meningitidis; identical to SEQ ID NO: 40607

SEQ ID NO: 55484 - DNA, 369 bp, Neisseria meningitidis; identical to SEQ ID NO: 39932

SEQ ID NO: 55485 - DNA, 696 bp, Neisseria meningitidis
atgtttgtttggcacgaatacgaaaatgcggcagaagcggcgcagtctttggctgacgcagtggcggatgctttgcagggcgcactggacgagaagggcggtgcggtgttggcagtttccggcggacgttcgccgattgcatttttcaacgccctgtcgcaaaaagatttggattggaaaaacgtcggcatcaccttggcagatgaacgcatcgtgccgaccgtccacgccgacagcaataccggtttggtgcgcgaatacctgttgaagaataaagcggaagcggcaatgtggattcctatggtggaagacggaaaaactgaaaccgaattacatcccgatgctgttgtcgattatgcactgaaacattacaaacagcccgatgttttggttttgggtatgggaaacgacgggcatacggcttcgattttcccgaaagctccgcagtttcagacggcaatcgacggttcggcaggtgtcgcgctggtgcataccacgcccgttaccgcgccgcacgaacgcgtcagtatgaccttggatgcgattgcccatacggggcatgtgtttttggctatacggggcgaagagaaaaaagccgtgttcgaccaagccgcacaaggcgaaaaccgcgaatatccgatcaacctcgttttgaaccatcaaggagtgaactgccatgtcttctacgccgaataa

SEQ ID NO: 55486 - DNA, 333 bp, Neisseria meningitidis
gtggcaacctcctctaaaatcaaaggaaaatatgttaaggaagttacagtcgcaaacggcgtcgttaccgccacaatgctttcaagcggcgtaaacaacgaaatcaaaggcagaaaactctccctgtgggccaagcgtcaagacggttcggtaaaatggttctgcggacagccggttgagcgcaccgcccccaccacaaccaacgacgacgtcaaagccgacaccgccgccaacggcaagattgacaccaagcacctgccgtcaatctgccgcgacgcttcatctgtcgtttgcatagaaacaccacctacggctttctataaaaatacctaa

SEQ ID NO: 55487 - DNA, 794 bp, Neisseria meningitidis
atgaaggcctatttggacttgatgcgccacgtcctcgacaacggtacggacaaatcagaccgcaccggtacgggcacgcgctccgtattcggttatcagatgcgttttgacttgggcaaaggttttccgctgctgacgaccaaaaagctgcatttgcgctcgattatccacgagctgctttggtttctcaaaggcgataccaatatcaaatacctaaaggacaacaatgtttccatttgggacgagtgggcggacgaaaacggcgacttaggcccggtttacggctaccagtggcgtaactggcccgcgcccgacggcaggcatatcgaccaaatcgccaatgtggtggaacaaattaagaaaaaccccgactcgcgccgcctgattgtatcggcgtggaatccggctttggtcgatgaaatggcattgccgccctgccacgcgctgtttcagttttacgttgccgacggcaaactgtcctgccagctttaccagcgcagcgcggatattttccttggtgtgccgtttaatattgccagctacgcgctgttgaccatgatgatggcgcaagtgtgcggattggaggcgggcgagtttgtccatacgtttggcgacgcgcacctgtaccgcaaccatttcgagcaggccgcattgcagttggaacgcgaaccgcgcgccttgcctgtgatgaaaatcaatcctgaagtcaaagatttgtttgccttcaaatttgaagattttgagttggaaggctacgatccgcatccgcacatcaaggcggcagtgtcggttta

SEQ ID NO: 55488 - DNA, 435 bp, Neisseria meningitidis; identical to SEQ ID NO: 42997

SEQ ID NO: 55489 - DNA, 1056 bp, Neisseria meningitidis
atgactattttatcggacgttaaagcattaggacaacaaatctggctggacaacctttcccgctcgctggtgcaaagcggcgaattggcgcaaatgctgaaacaaggcgtgtgcggcgtaacttccaatcccgccatctttcaaaaagccttcgccggcgacgcgctttacgccgacgaggttgccgccctcaagcagcaagacctgacccccaaacaacgctacgaaacgatggcggttgccgatgtgcgtgccgcctgcggcgtctgtcttgccgaacacgaatccaccggcggcaaaaccggcttcgtcagcctcgaagtttcgcccgaattgtccaaagacgcgcaaggcacggttgaagaagcgcgccgcctctacgccgccatcgggtgcaaaaacgcgatgattaaagtgcctgccaccgacgcaggcatcgatgcgctcgaaaccctcgtttcggacggcatcagcgtgaacctcacgctgctgttctcacgcgcccaaaccctcaaagcctacgccgcctacgcgcgcggcattgccaaacgcttggcagctggacaaagcgttgcccatatccacgtcgtcgccagcttcttcatctcccgcgtggacggcgcgctggacacaacactgcccgaccacctcaaaggcaaaatcgccatcgcccttgccaaaaccgcctatcaagattgggaacaatatttcaccgcccccaaatttgccgcactggaaaccaaaggcgcaaaccgcgtgcagcttttgtgggcatctaccggcgtgaaaaacccagcctatcccgacacgctctacgttgacagcctgatcggcgcgcacaccgtcaacaccgttcccgatgccacactcaaagcctttatcgaccacggcacagccaaagccacgctgaccgaaggcgtagaagaagcacaagcgcagcttgctgaaaccgccgcgctcggcatcgatgtcgaaaccttggcggcgcgtttgcaggaagacggtttgaaacaatttgaagaagcgtttgaaaaactgctcgcaccgttggtttaa

SEQ ID NO: 55490 - DNA, 987 bp, Neisseria meningitidis
atgcaataccgaatcagaagagaaaacgaagcacccgaagcaaaaaatgcgggggaaaccttatgggagcgcgacatcatgcgcgaagtgctgctgtccgcctatcgggacaggcgcagggagcggatgtggaaaaacatctggcgcgccgtcagcaccctgattctggttgccctgattgcaggcattttccaaaaagacgaagccgcattgcagttggcgggcaacacgccgcataccgcagtcgtcaacctgtacggcgaaatcggcaacggtgtagaagaccaggtcaaaaaactcaaagacggtatggaggccgcctacaaaaacccgcaggcaaaagccatcatcatccgcgccaacagtccgggcggctctcccgtcgtatccaatactgcctttgaggaaatacgccgtctgaaagcgcaacatcccggcatccccgtttatctcgtggcggaagatatgtgcgcgtccggctgctactacatcgcggcggcggcggacaaaatctatgccgacccgtccagcatcatcggcagcatcggcgttatcggcagcagtttcgacgcgaccggcctgatggaaaaaatcggcgtgaaacgcagggttaaaattgcaggcagcaacaaaggcatgggcgatccgttttcgcccgaaacgcccgaacagtcgaaaatctgggaagaaatgctgaccggcatacacggcgagttcatcaaagccgtcaaaaccggacgcggcgaccgcctcaaattccgacaatatcccgacgtgttcagcggtcgcgtgtacacaggcgcggatgcgctgaaagtcgggctggtggacggactcggcaatatttacagcgtggcgcgagacgtggtcaaagcccccgatgtggtggattacactccgaaggacgatttcggcagaatcttgggcagacgcttcggcgcagaactcaaagcaagcgtgcgcgaagccctgcaggccgtccggtag

SEQ ID NO: 55491 - DNA, 936 bp, Neisseria meningitidis
atggggcacaatatgatgaccacccaaaaatggtatgagcatattactaatgtaatcataggcaatactgctaatttcaatagcggttgccttgactctatagattatgtagatgaaagaaaaggcgttccgcttgcagctatgcaacatattttcatggacgttagagctgcagcttcccatgcctatctatttgaacatgatcttaagaaattcaagcaatatgcttatgttgcaggaaagctgggggttttgctgagtgtaaattctacagaccctgaacccttcttctttccctgtgacatgctcaacattcaaaatccgatgtttctgatgctgatgagcgacagcccacagctgcgcgagtttctggtgcgcaatatcgacaacatcgccaacgatacagaagcctttataaaccgctacgacctcaaccgtcatatgatttacaatactctgctgatggtagagggtaagcagcttgatcggttgaaacaacgtagcgagaaagtcttggcgcatcccacccctagcaaatggctgcaaaagcggttgtacgattaccgcttcttcctcgctttcgccgaacaggatgccgaggcgatgaaggccgccttagagccgcttttcgataaaaaaaccgcgcgtatggctgccaaagaaacattgtcctatttcgatttctacctgcagccgcaaatcgttacctacgccaaaatcgcatccatgcacggtttcgatttgggcatagatcaagaaatcgcaccgagggatttgactgtttacgatccgctgccggcagacgaatatcaagacatcttcgattttatgaaacagtatgacttgtcttacccgtatgaatatctgcaggattggatagattactatacgttcaaaaccgataagctggtatttggtaacgcgaagcgagagtga

SEQ ID NO: 55492 - DNA, 849 bp, Neisseria meningitidis; identical to SEQ ID NO: 37501

SEQ ID NO: 55493 - DNA, 1194 bp, Neisseria meningitidis
atgaaccccaaacacctcatcgcattttccgccctgttcgccgccacgcaggcagaagccctgcctgtcgcctccgtcagcctcgacaccgttaccgtttccccgtccgccccctacaccgatacaaacgggctgctgaccgactacggcaacgccgccgcctcgccttggatgaaaaaactccgatccgtcgcacaaggcagcggcgagaccttccgcatcctgcaaatcggcgactcacataccgccggcgacttctttaccgacaccctgcgcaaacgcctgcaaaaaacttggggcgacggcggcataggctgggtttaccccgccaacgtcaaagggcagcgcatggcggccgtccggcacaacggcaactggcaaagcctcaccagcaggaacaatagcggagacttcccgctcggcggcatcctcgcccacaccggcagcggcggcagcatgaccctgaccgcatcggacggcaagaccggcaaacagcgcatttccctgtttgccaaacccctgctcgccgaacaaaccctgaccgtcaacggcaacaccgtctccgccaacggcggcggctggcaggtactggatacccgcgcggcactgcccttgaccatacagaccgaaatgccgtgggacatcggcttcatcaacatcgaaaatcccgccggcggcattaccgtttccgccatgggcatcaacggcgcacaattgacccattggtcgaaatggcgtgccgaccgtatgaacgaccttgcccaaaccggcgccgatttggttatcctttcctacggcaccaacgaagccttcggcgacaacatcgacattgccgacaccgaacaaaaatggctggataccgtccgccaaatccgcgacagcctgcctgccgccggcatcctcatcatcggcgcacccgaatccctgaaaaacacgctcggcgtatgcggcacacgccccgtccgcctgaccgaagtccaacagatgcagcggcgcgtcgcccgacagggacaaaccatgttctggtcttggcaaaacgccatgggcggcatatgcagcatgaaaaactggctcaaccaaggatgggccgccaaagacggcgtacacttctccgccaaaggctaccggcgcgcggcggaaatgctcgccgacagcctcgaagaactcgtccgcgccgccgcaatcaggcaataa

SEQ ID NO: 55494 - DNA, 876 bp, Neisseria meningitidis
atggcagtaggaaaagagattctcaccaaaatccgcagtgttcagaatacccaaaagatcactaaagcgatgcagatggtgtcaacctctaaaatgcggaagactcaggaacggatgcgtttggcgcgtccgtatgccgaaaaagtgcgtatggtgatgagccatcttgcgcaaaccaataccgatcatggtattccgttactggaatctcatcgggaaatcagacgtgtcggttttattttgattacgtctgataagggtttgtgtggcggtttgaacgccaacgtgctgaaaaagtttttggcacaagttcaagagtatcagaatcaaggtattgaagaggaaatcgtatgccttggcagtaaaggtctgatggcgtgtcagagcattggtctgaatgtggttgccagtgccgtaaatttgggcgataccccaaaaatggaaatgctgctcggacctttgacagaactcttccaacggtatgagaaacatgaaattgacagaatccatctggtgtattcgggttttgtcaataccatgcgtcaagaaccgagaatggaagtattgctgcctatcggtgagaacgtgattggcgattcagctcccaaatcaccgttcagctgggaataccgctacgaaccgactgcacttgcagtgttggaatatctggttcgccgctatttagagtctgtggtttatcaggcgttgagcgacaatatggcatccgaacaggcagcccgcatggttgccatgaaagctgcaacagacaatgcaggcaatgccatcaaagagttgcgtttggtatataacaaatcgcgtcaagctgcgattaccacggaattgtcagaaattgtagcaggtgcggcggctgtctga

SEQ ID NO: 55495 - DNA, 717 bp, Neisseria meningitidis; identical to SEQ ID NO: 45129

SEQ ID NO: 55496 - DNA, 339 bp, Neisseria meningitidis
atgaacacacgcatcatcgtttcggctgcgttcgttgcgttggcattagcaggttgcggctcaatcaataatgtaaccgtttccgaccagaaacttcaggaacgtgccgcgtttgccttgggcgtcagcccaaatgccgtaaaaatcagcaaccgcagcaatgaaggcatacgcatcaactttaccgcaactgtgggtaagcgcgtgagccaatgctatgttaccagtgtaatcagcacaatcggcgttaccacttccgatgcaatttgtttgggaggcggaacgcacaaaggcaaaagtcaatgcaatgctttgcttaaagcggcaggccgttgctaa

SEQ ID NO: 55497 - DNA, 1035 bp, Neisseria meningitidis; identical to SEQ ID NO: 54966
  misc_feature 1012, 1013, 1014, 1015, 1016: 'n' is a, c, g or t

SEQ ID NO: 55498 - DNA, 1764 bp, Neisseria meningitidis
atgggttttcctgttcgcaagtttgatgccgtgattgtcggcggtggtggtgcaggtttacgcgcagccctccaattatccaaatccggtctgaattgtgccgttttgtctaaagtgttcccgacccgttcgcataccgtagcggcgcagggcggtatttccgcctctctgggtaatgtgcaggaagaccgttgggactggcacatgtacgataccgtgaaaggttccgactggttgggcgaccaagatgcgattgagtttatgtgccgcgccgcgcctgaagccgtaattgagttggaacacatgggtatgccttttgaccgtgtggaaagcggtaaaatttatcagcgtcctttcggcggccatactgccgaacacggtaaacgcgcggtagaacgcgcctgtgcggttgccgaccgtacaggtcatgcgatgctgcatactttgtaccaacaaaacgtccgtgccaatacgcaattctttgtggaatggacggcacaagatttgattcgtgatgaaaacggcgatgtcgtcggcgtaaccgccatggaaatggaaaccggcgaagtttatattttccacgctaaagctgtgatgtttgctaccggcggcggcggtcgtatttatgcgtcttctaccaatgcctatatgaataccggcgatggtttgggtatttgtgcgcgtgcaggtatcccgttggaagacatggaattctggcaattccacccgaccggcgtggcgggtgcgggcgtgttgattaccgaaggcgtacgcggcgagggcggtattctgttgaatgccgacggcgaacgctttatggaacgctatgcgccgaccgtaaaagacttggcttctcgcgacgttgtttcccgcgcgatggcgatggaaatctacgaaggtcgcggctgcggtaaaaacaaagaccatgtcttactgaaaatcgaccatatcggcgcagaaaaaattatggaaaaactgccgggcatccgcgagatttccattcagttcgccggtatcgatccgattaaagacccgattcccgttgtgccgactacccactatatgatgggcggcattccgaccaattaccacggcgaagtcgttgtgccgcaaggagacgaatacgaagtgcctgtaaaaggcctgtatgccgcaggtgagtgcgcctgtgcttccgtacacggtgcgaaccgtttgggtacgaactctctgctggacttggtggtgttcggtaaagctgccggcgacagcatgattaaattcatcaaagagcaaagcgactggaaacctttgcctgcggatgcgggcgagctgacccgccaacgtatcgagcgtttggacaatcaaactgatggcgaaaacgttgatgcattgcgtcgcgaattgcaacgctccgtacaactgcacgccggcgtgttccgtactgatgagattctgagcaaaggcgttcgagaagtcatggcgattgccgagcgtgtgaaacgtaccgaaatcaaagacaagagcaaagtgtggaataccgcgcgtatcgaggctttggaattggataacctaattgaagtggcgaaagcgactttggtgtctgccgaagcacgtaaagaatcacgcggtgcgcacgcttcagacgaccatcctgagcgcgatgatgaaaactggatgaaacatacgctgtaccattcagataccaataccttgtcctacaaaccggtgcacaccaagcctttgagcgtggaatacatcaaaccggccaagcgcgtttattga

SEQ ID NO: 55499 - DNA, 1542 bp, Neisseria meningitidis
atggttttcgataataattatcattacaatgcaatgtcggttcgtttgcttgtgaacattcaagatgccgactctgacggcattcagacagcatctgaaaacaataacggcacaaggatggggtacaatcgctctatggaaaaaaacaccctatccgcccgcgcactatccccttggctgccgcttctgctggcaattgccatttttatgcagatgttggatgcgaccattttaaataccgcactgcctgaaattgccgccgacctggacgaatcgcctctggatatgcaactggcagtcgttgcctatacgctgacggttgccctgctgattcctttgagcggttatttggcggacaggttcggaacgaaaaaagtctttttcggttcgattgccgtttttatactcggatcggcattgtgcgccgcatcgggttcgctgtttgaattgacgctttcccgtgtcgttcagggcatcggcggttcgatgctgattccgataccgcgtctgaccatcttgcgtatgtacgacaagtccaagctgctcaatgccatcaattatgcggtcatgcctgcattaatcgggccggttttagggcctttggcgggcggttatctggtcgaatacgcttcgtggcactggattttcctgctcaacctgcccatcggtctgctgggtttcatattgggacgcaacatcatgcccgatattaaaggcagcaatatctctttagacttcaaaggttatctgattttttctgccgccgcgtgcctcttgttactttcggcagaaagcctgtcgcacgcgctgcctccgtattttgcactgttgccgctgtgcggcggactgctgtttgcacgccgttatttccgacatatgaaaaccgcgtccaaaccgatttattccgccgacctgtttctgatacgcactttccgtctgggactggcgggcaatctgttcagccgtctcggcatcagctcgattccttttctgatgcccctgatgtttcaagtcgctttcggcttcggcgcaagcctgtcgggttggctggtcgcccccgtcgccctgtcttcgctgctggtcaaaccgctgattgcaccgctcatgaaacgtttcggctaccgcacggtactgctttggaacaccaagctgcttgccgccttcatcatgctgctcgccctgcctgatggaaactcgccgctgtggatttggattttcctctcgctggcgatcggcgcgtgcaactccctacagttttctgccatgaacacactgaccctcgccgatttgcgcccgcaacagaccggcagcggcaacagcctgatggcggtcaaccaacagcttgccatcagcatgggcattgttgtcggcgcattaatccttaaaaactggacatttctgataccggcttcttcaggtctgcattccgccttccgtatgaccctgctcagtatcggcggcatcacccttgcctcgtcgttggttttcaagcgtctgcacgtttcagacggtgcaaacctgacacggaacacaccgtcctaa

SEQ ID NO: 55500 - DNA, 2286 bp, Neisseria meningitidis
atgcaactgctggcagccgaaggcattcaccaacaccaattgaatgttcagaaaagtacccgtttcatcggcatcaaagtgggtaaaagcaattacagcaaaaacgagctgaacgaaaccaaactgcccgtacgcgttatcgcccaaacagccaaaacccgttcaggctgggataccgtgctcgaaggtaccgaattcaaaaccacgctggccggtgccgacattcaggcaggtgtaggcgaaaaagcccgtgtcgatgcgaaaattatcctcaaaggcattgtgaaccgtatccagtcggaagaaaaattagaaaccaactcaaccgtatggcagaaacaggccggacgcggcagcactatcgaaacgctaaaactgcccagcttcgaaagccctactccgcccaaattgtccgcacccggcggctatatcgtcgacattccgaaaggcaatctgaaaaccgaaatcgaaaagctgtccaaacagcccgagtatgcctatctgaaacagctccaagtagcgaaaaacatcaactggaatcaggtgcagcttgcttacgacagatgggactacaaacaggagggcttaaccgaagcaggtgcggcgattatcgcactggccgttaccgtggtcacctcaggcgcaggaaccggagccgtattgggattaaacggtgcggccgccgccgcaaccgatgcagcattcgcctctttggccagccaggcttccgtatcgttcatcaacaacaaaggcgatgtcggcaaaaccctgaaagagctgggcagaagcagcacggtgaaaaatctggtggttgccgccgctaccgcaggcgtagccgacaaaatcggcgcttcggcactgaacaatgtcagcgataagcagtggatcaacaacctgaccgtcaacctagccaatgcgggcagtgccgcactgattaataccgctgtcaacggcggcagcctgaaagacaatctggaagcgaatatccttgcggctttggtcaataccgcgcatggagaagcagccagtaaaatcaaacagttggatcagcactacatagtccacaagattgcccatgccatagcgggctgtgcggcagcggcggcgaataagggcaagtgtcaggatggtgcgataggtgcggctgtgggcgagatagtcggggaggctttgacaaacggcaaaaatcctgacactttgacagctaaagaacgcgaacagattttggcatacagcaaactggttgccggtacggtaagcggtgtggtcggcggcgatgtaaatgcggcggcgaatgcggctgaggtagcggtgaaaaataatcagcttagcgacaaagagggtagagaatttgataacgaaatgactgcatgcgccaaacagaataatcctcaactgtgcagaaaaaatactgtaaaaaagtatcaaaatgttgctgataaaagacttgctgcttcgattgcaatatgtacggatatatcccgtagtactgaatgtagaacaatcagaaaacaacatttgatcgatagtagaagccttcattcatcttgggaagcaggtctaattggtaaagatgatgaatggtataaattattcagcaaatcttacacccaagcagatttggctttacagtcttatcatttgaatactgctgctaaatcttggcttcaatcgggcaatacaaagcctttatccgaatggatgtccgaccaaggttatacacttatttcaggagttaatcctagattcattccaataccaagagggtttgtaaaacaaaatacacctattactaatgtcaaatacccggaaggcatcagtttcgatacaaacctaaaaagacatctggcaaatgctgatggttttagtcaaaaacagggcattaaaggagcccataaccgcaccaattttatggcagaactaaattcacgaggaggacgcgtaaaatctgaaacccaaactgatattgaaggcattacccgaattaaatatgagattcctacactagacaggacaggtaaacctgatggtggatttaaggaaatttcaagtataaaaactgtttataatcctaaaaaattttctgatgataaaatacttcaaatggctcaaaatgctgcttcacaaggatattcaaaagcctctaaaattgctcaaaatgaaagaactaaatcaatatcggaaagaaaaaatgtcattcaattctcagaaacctttgacggaatcaaatttagatcatattttgatgtaaatacaggaagaattacaaacattcacccagaataa

SEQ ID NO: 55501 - DNA, 2190 bp, Neisseria meningitidis
atgatctaccaccgtatcgccgtaaacgtgccgctttcagacggtcttttaacttattcccattccgagccgctgccgcagggaacgcgggtgcttgtgcctttccgcaataaaaccgtggtcgggatggtgtgggaaacggatattacgcctgatatggatacggcgcggattttgagcgttcagacggccttttcggacgaaccgccgttgcctcaaaactggcgtgatttgttggcgtttacgtcgcgttattaccactatccgacggggcaggcggtgtttgccgcgctgccgcagggtttgaaggaaacgcgcgcggtggaaatgccgcagccgcccttgttttatgcgttgaacgaagcgggcagggcgcaaacgccgccgccggcgcggttcaacaaaaaagcggctctgtgggacgcactgctgtcgggcgggatgacgatggcggcgttgaagcaggtaaacgcgcaggcggcgaaattaatcgaagattgggcggagcagggctggattgaaacgacggaagcggcgaagcctgtattgagaccgtaccacgggcaggcttcgcactctgaatttgtgttgaatgccgaccagcagaaggcttccgatgaaattcagacggcattgggacgcttccagccgtttctgctgtacggcatcaccggcagcggcaagaccgaggtgtatttcgatgcgatggcgaaagtgttggcgcaggggcggcaggtgttgtttctgttgcccgaaatcaacctcacgccgcagcttttaaaacgggtggaagaccgttttgctgacgtaccgaccgccgtgttgcacagccagatggcggcaggcaggcgcacgcaggattatctgcgcgcgatgtcggggcaggcgaagctggtgattggcacgcggctggcggtgttcacgcctttgtctgatgtcgggctgattgtggtcgatgaggaacacgacggctcgttcaaacaaggcaacgaattgcgctaccacgcccgcgatttggcggtgtggcgggcgaagcagggcggctgccccgttgtgttgggcagcgccacgcccagcttggagagctggcacaaggcgcaaagcggcgcgtaccgcctgctgcaactgaccgagcgcgcccataccgctgcgcaactgccgcaagtggacatcctcaacgtaggccgtctgaaactagacaatggcttctcgccgcaagccttgcagcttttgaaacagaattttgaagcgggcggtatgtcgctggtgtacctcaaccgtcgcggcttcgcgcccgcgctgttttgcggcgactgcggccataccttcggctgcccgaactgctccgccaaaatggtgctgcaccaacgcgtccgccaactgcgctgccaccactgcgaccaccgcgaacccataccgttcaaatgccccgactgcggaaatcaagacctgaccgccgtcggacacggcacgcagcgcgtcgaagaaaccctgcgcgccttcctgcccaaggcagccgtcgtccgcgtggacagggacagcaccgcgcacaaaaacgactgggcggatttgtaccgccgcatcgccgacaacgaaatcgacattctggtcggcacgcagatgctcgccaaaggccatgactttgcgcggctcaacctcgttatcgtattgaacgccgacggcagcctttacagcgcggatttccgcgcgccggaaagactgttcgccgagctgatgcaggtgtccggcagggcggggcgcgccgacaaacccggcaaggtgttgatacagacccaactgcccgaacatcccgtcttcgccgccgtcaaagcgcaggattatgccgtgtttgccgaaaacgaattgaacgaacggcaaatgttcgccatgccgcccttcggttttcagaccgccgtccgcgcggacgcgccgcgtgttgccgatgcgctggaatttctcaatgccgccaaagaaaccctcgccccgctgttgcccgcaagcgtttcccagtttggcgccgcccccatgctgatggtgcgcctcgccgaacgcgaacgcgcgcaaatcttcctcgaatccccgtcccgacaggatttgcaccgtgccgtgagtttgtgggtgcaggtgttgcagcaaaaccgcgacggcaaaattagatggtcggtggatgtcgatccgcaggaggcttga

SEQ ID NO: 55502 - DNA, 396 bp, Neisseria meningitidis; identical to SEQ ID NO: 37459

SEQ ID NO: 55503 - DNA, 1068 bp, Neisseria meningitidis
atgagaaaaatccttgttaccggcggcgcgggctttatcggttctgccgttgtccgtcatattatccgaaacacccaagattccgtcgtcaacctcgacaaactgacctacgcgggcaatctcgaatcgctgaccgacattgccgataatccccgctatgctttcgagcaagtggacatttgcgaccgcgccgaactcgaccgcgtattcgcacaacaccggcccgatgccgtgatgcacttggcggcggaaagccatgtcgaccgctctatcggttcggcaggcgagtttatccaaaccaatatcgtcggcacattcaatctgcttgaagcagcccgcgcctaccggcaacaaatgccgtctgaacagcacgaagccttccgtttccaccatatttccaccgatgaagtctatggcgatttaggcggcacggacgatttgtttaccgaaaccgcgccctacgcgccgtccagcccctactctgcctctaaagcgtccagcgaccacctcgtccgcgcgtggttgcgtacttacggcttgccgaccattgtaaccaactgctccaacaactacggtccttaccattttccggaaaaactcattcctttgatgattctgaacgcgcttgacggcaaaccgctgcctgtgtacggcgacggtatgcaaatccgcgactggctgtttgtcgaagaccacgcgcgcgcactgtatcaggttgttaccgaaggtgttgtcggcgaaacctacaatatcggcggccacaatgaaaaagccaatattgaagtcgtcaaaaccatctgcgccctgctggaagaactcgctcccgaaaaaccggccggtgtggcgcgttatgaagatttgattactttcgtacaagaccgccccggccatgacgtacgctacgccattgatacagccaaaatcagtagggaactaggctggaaaccgcaggaaaccttcgagtccggcctccacaaaaccgtgcaatggtatctggacaacaaaacctggtggcaaaacgtattgaacggcagctatcgtttggaacgcttaggtacaggcaaatag

SEQ ID NO: 55504 - DNA, 612 bp, Neisseria meningitidis; identical to SEQ ID NO: 50870

SEQ ID NO: 55505 - DNA, 951 bp, Neisseria meningitidis
atgaaattacaacaattgaaatacgccttagaagtttaccagcacaacctgaacgtttccgaagcggccgaagccttgtttacttcgcaacccggcatctccaaacaaatcaaattgctggaagaagaaatcggcattcagatttttatccgcagcggcaagcgcgtggtttcggtctcgcagccgggcaaggtggttttggatattgcggaacgtattttacgcgatgtacagaacattaaaaatatcggcagcgagtttaccggacaggacagcggttcgctgacggttgccacgacgcatactcaggcacgctatgccctacccttgattgttgccgattttgtgaaacgctatccgaaagtcaacctgaccatcaaacaggggagccctgccgccatcgcacgtatggttacctcaggcgaggcggacttggcgattgttacggaacggatagacgaccatcccgaactgggaaaacttccctgctatgactggactcatgcggttatcgtaccgaacgaccaccccttgctcgaatgcagaaaccccctccgtattgaagatttggcgaggtttccgctgattacttatgaatttgcattcaatgcgggcagcagcatcgcgcgggcattttccaaagcccgtttggaacagccggatgtcgcattggcggcggcggatacggacgtattgaagacttatgtgcgcttgggtttgggcgtgggactgatggcgaaaatggcgtacaacccggatacggacggcgatttgcagcttgtggatgcggcacacctgttcgagccgtcgccgacgtggattgctttgcgcagcgatacttatttgcgcggatatgcctacgactttatccaagcgtttgcgccgcacctgacacgcgagaaggtggataggattctgtacacgcccatcagcgaggatttttcgatttag

SEQ ID NO: 55506 - DNA, 2535 bp, Neisseria meningitidis
gtgctgaagacaccccctacgcttgctgcagaactttcgggtaaaaccggtgtgagcattagcgcaccgtatgccaatgagaacagccgcatcagtctgagtgcggcaaacatcgaagctgaaaacggcaaaatcaaaattcaatcttacggtgaccaatattactatgcgagacagagcgaactctatacctttgaacgccgcagctacaaaactggcaaatggtacaaccgcaaacacattaccgaagtcaaagaacacaaaaacgccaagcccgacgcagtaaccctcagcgcatcccaaggcatcgacatcaaatctggtggcagcatcgacgcctacgccaccgcattcgatgcccccaaaggcagcattaacatcgaagccgggcggaaattgacactctatgccgtagaagagctcaactacgacaaactagacagccaaaaaaggcgcagatttctcggcatcagctacagcaaagcacacgacaccaccacccaagtcatgaaaaccgcgctgccctcaagggtagttgcagaatctgccaatctgcaatcaggttgggataccaaactgcaaggcacacagtttgaaaccacactgggtggcgcaaccatacgcgcaggcgtaggcgagcaggcacgggcagatgccaagattatcctcgaagggatcaaaagcagcatccacacagaaaccgtgagcagcagcaaatctactctatggcaaaaacaggcaggatggggcagtaacatcgaaaccttgcaattgccgagtttcaccggtcccgttgcgcccgtactgaccgctcccggcggctatatcgccgacatccccaaaggcaacctcaaaaccgaaatcgaaaaactcgccaaacagcccgagtatgcttatttgaaacaacttcaagttgcgaaaaacatcaactggaatcaggtgcagcttgcttacgacagatgggactacaaacaggagggcttaaccgaagcaggtgcggcgattatcgcactggccgttaccgtggtcacctcaggcgcaggaaccggagccgtattgggattaaacggtgcggccgccgccgcaaccgatgcagcattcgcctctttggccagccaggcttccgtatcgttcatcaacaacaaaggcgatgtcggcaaaaccctgaaagagctgggcagaagcagcacggtgaaaaatctggtggttgccgccgctaccgcaggcgtagccgacaaaatcggcgcttcggcactgaacaatgtcagcgataagcagtggatcaacaacctgaccgtcaacctagccaatgcgggcagtgccgcactgattaataccgctgtcaacggcggcagcctgaaagacaatctggaagcgaatatccttgcggctttggtgaatactgcgcatggagaggcagccagtaaaatcaaacagttggatcagcactacattgcccataagattgcccatgccatagcgggctgtgcggcagcggcggcgaataagggcaagtgtcaggatggtgcgataggcgctgcagtcggtgagattgttggtgaggctttggttaagaatactgatttcagtcgtatgagtgcgaccgaaatcgaaaaagctaaagcgaagattactgcctattcaaaactggttgccggcactgcgtctgccgttgtaggcggggatgtgaatacagcggcgaatgcggcacagatagcggtggagaataatactttgtatcctagatgcgttggtgcaaagtgtgatgaatttcaaaaggaacaacaaaaatggatacgtgaaaatcctgaagaatatcgagaagttttgcttcttcagacaggatttattccaattatcggtgatatacagagttttgtacaagcacagaccgctgccgatcacctgtttgctttgctgggtgtggttccgggtatcggtgaatcgatacaggcctataaagtagcgaaagcggcaaaaaatttacaaggcatgaaaaaagccttggacaaggcagcaaccgttgccactgcacagggctatgtcagtaaaaccaaaatcaaaatcggtcaaactgaattaagggttactgcagcaactgacaaacaattgctgaaagctattggcgaaggaagggacacgacaggtaaaatgaccgagcagttatttgactctttagctaaacaaaatggcttcagagtgctttcgggcggcaaatacggcggaaataacggttttgatcatgtatggcaggctgccgatggtagtgttgttttgattgtagaaagtaagcagattaggaacggtacggtacagctgaatccgaatggtgcgggtggatatacgcaaatgagtgaggattggattagacaagttttagatcaattacccgatggtagtcccgctaaagctgctgtcttcaaagcaaataagaacggcacattaaaaacagcaatagcaggcgttgatcgtcaaacaggtaaggccgttattcttcctgtcaaagttccttctaaagccaatataaggagataa

SEQ ID NO: 55507 - DNA, 1392 bp, Neisseria meningitidis
gtgtccgccgcccgaatattaacgaaagtaaatatgaaaccactggacctaaatttcatctgccaagccctcaagcttccgatgccgtctgaaagcaaactcgtgtcgcgcatcgtaaccgacagccgcgacatccgcgcgggcgatgtgtttttcgcattggcgggcgggcggtttgacgcgcatgattttgttgaagacgtattggctgctggtgcggcggcggttgtggtttcgcgcgaagattgcgcggctttgaaagacgcgttgaaagtcgatgacacgcttgcggcattgcaaacgctggcgaaggcgtggcgcgataatgtgaatccgtttgtgttcggcattaccggttcgggcggcaagacgacggtgaaggaaatgttggctgcggtattgcgtcatcgattcggtaatgaagctgtgttggcgacgacgggtaatttcaacaatcatatcggcctgccgttgactttgttgaaattaaacgaaaaacaccgctatgccgtgattgaaatgggcatgaaccattttggcgaactggcggttttgacgcaaatcgccaagcccgatgccgccttggttaacaacgccctgcgtgcccatgtcggctgcggtttcgacggagtgggcgatattgccaaagcgaaaagcgagatttatcaaggcttatgttcagacggcatggcgctgattcctcaagaagatgccaatatggctgtcttcaaaacggcaacgcttaatttgaatacgcgcactttcggcgtcgatagcggcgatgtccacgcggaaaatatcgtgctgaaaccgttgtcgtgcgaatttgatttggtgtgcggcaacgagtgcgcagccgtggttctgcccgttcccggtcgccacaatgtccacaacgccgccgctgccgccgcgctgtctttggctgcaggtttgagtttgaacgatgtggcggaaggtttgaaaggcttcagcaatatcaaaggccgtctgaacgtcaaatccggaatcaagggcgcaaccctgattgacgatacttataatgcgaacccggacagcatgaaagccgcgattgacgtgttggcgcgtatgcctgcgccgcgtattttcgtgatgggcgatatgggcgaactgggtgaggacgaagccgccgccatgcacgccgaagtcggcgcgtatgctcgcgaccaaggcatcgaagcggcttattttgtcggcgacaacagcgtcgaagcggcggaaaaatttggcgcggacggtttgtggttcgccgccaaagacccgttgattcaagtgttgcgccacgatttgcccgaacgcgccaccgtgttggtgaaaggttcgcgctttatgcagatggaagaagtggtcgaggcattggaggataagtga

SEQ ID NO: 55508 - DNA, 729 bp, Neisseria meningitidis
atgggagggaaaatgtccgacaaaaaatataatgtcgatgagggggaaatcgccaaattcagccggattgccgacaaatggtgggacaagtcgggcgagttcaaaaccttgcacgacatcaatccgctgcggctggattatatcgacggacacgcggatttgcgcggcaaacgggttttggatgtgggctgcggcggcggcatcttggcggaaagtatggcgcggcgcggcgcggcgtttgtaaagggtatcgacatggcggagcagtcgctggaaaccgcccgcctgcacgcggctttgaacaatgtcgccgatatcgaatacgaatgtatccgcgtggaagaccttgccgaggcggaaccgcactcgttcgatgtggtaacgtgcatggaaatgatggaacacgtccccgatcccgccgccatcgttcgcgcctgtgccaagctggtcaaaccggacggcatggtgtttttttccaccatcaataaaaacccgaaatcgtacctgcatctgattgtggcggcggaatatctgttgaagttcgtccccaaaggtacgcacgactggaaaaaattcatcgcgcctgccgagctggcgcggatgtgccgtcaggcaggcttggatgtggcggatacgaagggtatgacttaccatgtgttgtcgcaaacttatgccctgtgcgattcgaccgatgtgaattatatgtttgcctgccgtccggcgttctga

SEQ ID NO: 55509 - DNA, 246 bp, Neisseria meningitidis; identical to SEQ ID NO: 43892

SEQ ID NO: 55510 - DNA, 186 bp, Neisseria meningitidis
atggctgaacaaaaaaagattagggttacattggttaaaagcctgattggtacaattgaatctcatcgtgcatgtgcacgcggtttaggtttgtgtcgtcgcgagcatacggtagaggttttagatacccctgaaaaccgtggtatgattaataaaatcagctacttgttgaaagtggagtcttga

SEQ ID NO: 55511 - DNA, 1386 bp, Neisseria meningitidis
atggacggctggacacagacgctgtccgcgcaaaccctgttgggcatttcggcggcggcaatcatcctcattctgattttaatcgtcaaattccgcatccacgcgctgctgacactggtcatcgtcagcctgctgacggctttggcaaccggtttgcccacaggcagcattgtcaacgacgtactggtcaaaaacttcggcggcacgctcggcggcgtggcgcttctggtcggcctgggcgcgatgctcggacgtttggtcgaaacatccggcggcgcacagtcgctggcggacgcgctgatccggatgttcggcgaaaaacgcgcaccgttcgcgctgggcgttgcctcgctgattttcggcttcccgattttcttcgatgccggactaatcgtcatgctgcccatcgtgttcgccaccgcacggcgcatgaaacaggacgtactgcccttcgcgcttgcctccatcggcgcattttccgtcatgcacgtcttcctgccgccccatccgggcccgattgccgcttccgaattttacggcgcgaacatcggccaagttttgattttgggtctgccgaccgccttcatcacatggtatttcagcggctatatgctcggcaaagtgttggggcgcaccatccatgttcccgttcccgaactgctcagcggcggcacgcaagacaacgacctgccgaaagaacctgccaaagcaggaacggtcgtcgccatcatgctgattcccatgctgctgattttcctgaataccggcgtatcggccctcatcagcgaaaaactcgtaagtgcggacgaaacctgggttcagacggcaaaaacaatcggttcgacaccgatcgcccttctgatttccgtattggtcgcactgtttgtcttgggacgcaaacgcggcgaaagcggcagcgcgttggaaaaaaccgtggacggcgcactcgcccccgtctgttccgtgattctgattaccggcgcgggcggtatgttcggcggcgttttgcgcgcttccggcatcggcaaggcactcgccgacagcatggcggatttgggcattcccgtccttttgggctgtttccttgtcgccttggcactgcgtatcgcgcaaggttcggcaaccgtcgccctgaccaccgccgccgcgctgatggctcctgccgttgccgccgccggctttaccgactggcagctcgcctgtatcgtattggcaacggcggcaggttcggtcggttgcagccacttcaacgactccggcttctggctggtcggccgcctcttggacatggacgtaccgaccacgctgaaaacctggacggtcaaccaaaccctcatcgcactcatcggctttgccttgtccgcactgctgttcgccatcgtctga

SEQ ID NO: 55512 - DNA, 420 bp, Neisseria meningitidis
atgggaaaaatccaaatccttaataagctaccaacaaagaatccagcaaccattccgtttgatgcagcttctaattcgttttttcgcatcttagaagcacgcaacgaatataagaaaattgctgcacaagagaaaaccaaacgtgaagtcattggtgcatggcgtgatgtccgattagcagaattgaaaaaccaacaagaaattttgcgcttgtatctggaaaatacgttcaaagaacgtcgcaaaatgattgacggtttatttgaggcattggacaaaggaatggaagcgggaaatatccacgtcattgatacagcaattaacggcattgtgagcattgccaaagattctccactgaaacaggtggacaatctgattgcagctttgaaaaacgacaatgtgaaagtaatcgatttttga

SEQ ID NO: 55513 - DNA, 2970 bp, Neisseria meningitidis
atgaaaacctccgaactgcgccaaaaattcctaaaattttttgaaaccaaaggccacaccgtcgtccgctcttccagcctcgtgccgcacgacgacccgaccctgctgtttaccaacgcgggcatgaaccaatttaaagacgtattcttaggtttcgacaaacgcccgtacagccgcgccaccaccgcgcaaaaatgcgtacgcgcaggcggcaagcacaacgacttggaaaacgtcggctacaccgcccgccaccacaccttctttgaaatgatgggcaacttctccttcggcgactacttcaaacgcgacgccatccacttcgcttgggaatttctgacttcccccgaatggctcaacatccctaaagacaaactgttggcgaccgtttacgcggaagacgacgaagcctacaacatctggttgaacgaaatcggtatgccgtccgagcgcatcgtccgcatcggcgacaacaaaggcgcgaaatacgcatccgacaacttctggcaaatgggcgacaccggcccctgcggcccctgctccgaaattttctacgaccacggcgaagaaatctggggcggcattcccggcagccccgaagaagacggcgaccgctggatcgaaatttggaactgcgtatttatgcagttcaaccgcgacgaacaaggcaatatgaatccgctgcccaagccgtccgtcgataccggcatgggtttggagcgcatggcggcagtaatgcaacacgtccacagcaactacgaaatcgacttgttccaagacctgctcaaagccgttgcccgcgaaaccggcgcagctttcagcatggaagaaccaagcctaaaagtcatcgccgaccacatccgctcctgctcattcctgattgcagacggcgtattgccttccaacgaaggccgcggctacgtattgcgccgcattatccgccgcgccgtgcgccacggttacaaactgggtcagaaacaagcatttttctacaagctcgtgcctgatttggtgaaagcgatgggcgacgcgtatcccgagttgaaagagaagcagacgcaaattatggaagccctgcgcgcggaagaaagccgcttcggcgaaacgctggaaaaaggcatgggcttgttcaaccaagtctataatgaattgaaattcaatcaaatttttgatcttctggcgaaagaatttaaggttacacctgttgaagatattgatcttgatatgtttagtacaagaaattttgtaggaagaagtgctgaaattccttatatatcaaatcaacaccctaacgtggattatcccgctcctatggggaacgtaaatgaaaaaatttatgctatgccagtgagattaacagatggaagaattggtattaatatttttcctactgatgaaactgcacgcctaatccttagcaatgattggaatagtttgcgcttctattctttttgtaattcgttgattacttattatcaacagaaaggtcaattagaaacattaaaattgaacggcgaacacatcttcaaactctacgacacctacggtttcccctacgacctgactgccgacatctgccgcgaacgcaatatcgaactggacgaagcaggcttcgagcgcgaaatggaagcccaacgcacacgcgcacgcgccgcacaaagcttcaaagccaacgcccaactgccttacgacggtcaagacaccgagtttaaaggttatagcgaacgccaaaccgaatccaaagtcctcgccctctacaaagacggcgagcaagtcaacgaattgaacgaaggcgacgaaggtgccatcgttatcgactttaccccgttctatgcagaatccggcggccaagtcggcgacgtcggctatatctttgcaggcgaaaaccgctttgaagtacgcgatacccaaaaaatcaaagcagccgtattcggccaattcggcgtacaaacttcaggccgtctgaaagtcggcgacagcgttaccgccaaagtggacgacgaaatccgcaatgccaatatgcgcaaccacagcgcgacccacctgatgcacaaagccctgcgcgacgtattgggcggacacgtcgaacaaaaaggctctttagttaccgccgaatccacccgtttcgacatttcccatccccaagcggtcactgccgaagaaatcgccgaagtcgaacgccgcgtcaacgaagccgttttggcgaacgttgccgtcaatgcagccattatgagcatggaagacgcgcaaaaaaccggcgcgatgatgctcttcggcgaaaaatacggcgaagaagtgcgcgtactgcaaatgggcggtttctctaccgaattgtgcggcggcacacacgtttcacgcaccggcgacatcggcctcttcaaaatcatcagcgaaggcggtattgccgcaggcgtgcgccgtatcgaagccatcaccggcctgaacgcactcaaatgggcgcaagagcaagagcgtttggtgaaagacattattgccgaaaccaaagcccaaaccgaaaaagacgtactggcaaaaatccaagcaggcgcggcacacgccaaagcattggaaaaagaattggcacgcgccaaagccgaactcgccgtccacgcaggcgccaaactcttggacgatgcaaaagacttgggcgcagccaaactcgttgccgcccaaatcgaagccgacgcagccgccctgcgcgaaatcgttaccgatttaaccggtaaatccgacaacgccgtgattcttttagcggcagtaaacgacggcaaagtctccctgtgcgccggcgtatccaaaccgttgaccggcaaagtgaaagcaggcgatctggttaaatttgcagccgaacaagtcggcggcaaaggaggcggcagaccagatttggcacaggcagggggcacggatgcaggcaaattgcccgccgtgttggatagcgtgaaagactgggtcggcgcgaagctggcttga

SEQ ID NO: 55514 - DNA, 804 bp, Neisseria meningitidis; identical to SEQ ID NO: 43212

SEQ ID NO: 55515 - DNA, 450 bp, Neisseria meningitidis; identical to SEQ ID NO: 40267

SEQ ID NO: 55516 - DNA, 591 bp, Neisseria meningitidis; identical to SEQ ID NO: 43293

SEQ ID NO: 55517 - DNA, 825 bp, Neisseria meningitidis
atggacggtacgcagtcgaaacccaagtttttcgaacgcctgatctcccgacttgccggcgagcccgactccgccgaagacgtattgaccctgctgcgccaagcgcacgagcaggaagtttttgatgcggatacgcttttaaggttggaaaaagtcctcgatttttccgatttggaagtgcgcgatgccatgattacgcgcagccgtatgaacgttttaaaagaaaacgacagcatcgagcgcatcaccgcctacgtcatcgataccgcccattcgcgcttccccgtcatcggcgaagacaaagacgaagttttgggcattttgcacgccaaagacctgctcaaatatatgttcaaccccgagcagttccacctgaaatccgtcttgcgccctgccgttttcgttcccgaaggcaaatctttgaccgcccttttaaaagagttccgcgaacagcgcaaccacatggcgattgttatcgacgaatacggcggcacgtcgggtttggtcacctttgaagacatcatcgagcaaatcgtcggcgaaatcgaagatgagtttgacgaagacgacagtgccgataatatccacgccgtttcttccgaacgctggcgcatccacgcggctaccgaaatcgaagacatcaataccttcttcggcacagaatacagcagcgaagaagccgataccatcggcggcctggtcattcaagagttagggcatctgcccgtacgcggcgaaaaagtccttatcggcggtttgcagttcaccgtcgcccgcgccgacaaccgccgcctgcacacgctgatggcgacccgcgtgaagtaa

SEQ ID NO: 55518 - DNA, 129 bp, Neisseria meningitidis
atgcccattgaggacatccctttttatatttttgacttggcggatttcgatgtaggaattggcgatattggcaatattgtaggttttgctccgagttccagcctgccgaaatcgaaaaaaatgccttga

SEQ ID NO: 55519 - DNA, 693 bp, Neisseria meningitidis
atgccgtctgaaaccgcttcagacggcatcgtcagcacaagacgcaaacccatgaaagcctttaccaaaattaccgccatcgtcgccccgctcgaccgcagcaacgtcgataccgacgccatcatccccaaacaatttttaaaatccatcaaacgcagcggcttcggccccaatgcctttgacgaatggcgttacctcgaccacggcgaaccaggcatggacaacagcaaacgcccgttgaaccctgatttctcgctgaaccagccgcgttaccaaggcgcgcaaatcctgttgacgcgtaaaaacttcggttgcggctcttcacgcgaacacgccccttgggcattggacgactacggcttccgcgccgtcatcgcccccagcttcgccgacatcttctttaacaactgctacaaaaacggccttttgcctatcgtgttgaccgaagaacaggttgaccggcttttcaaagaagttgaagccaacgaaggctaccggctctccatcgaccttgccgggcaaaccctgaccacccccggcggcgaaacattagcattcgacattaccgaacaccgcaaacactgcctcttaaacggcttggacgaaatcggactgaccctgcaacacgccgatgaaattcacgcctttgaagaaaaacgccgccaaagccagccttggctgtttaacggttaa

SEQ ID NO: 55520 - DNA, 537 bp, Neisseria meningitidis
gtggatttgagggaagtaaaattaggcggcgaaaccatttacgagggcggttttgtcagcatcagcagggataaggtcaggttgcccaacggcaatgaagggcagcgtatcgtcatccgtcatccgggagcggcgtgcgtgttggcggtaacggatgatgaaaaggtcgttttggtacggcagtggcggtatgcggcaaatcaggcgacattggaacttcctgcgggcaagctggatgtggcgggcgaggatatggcagcgtgtgcgctgagagaactggctgaagaaacgccttatgttgccgacagcgtgcgcctgctttacagtttttatacggcggtcggtttttgcaacgaaaaaatgtatctgttcgaagcggaaggcgtgcgtttgggcagtacgcttgccaatgacgaagacgagattacggaaaccgtattgatgtcgaaagaagaagtccgtcaggcattagcaaacgatgaaattaaagacggcaagacattaatcggtttgcaatactggctgatgaaggattga

SEQ ID NO: 55521 - DNA, 657 bp, Neisseria meningitidis
atgaacagacaaaaagtcatcgccatcgacggcccgggcgcatcgggcaaaggcacggttgccgcccgcgttgccgccgcattgggatacgattatctcgataccggcgcactctaccgcctgaccgccctatatgcacaaaaacaaggcgtgggatggcacgatgaagaaaacgtttccgaactggcaaaaaaactgcccgccgtattttcaggcagccgcatcctgctcggcggcgaagacgtttcagacggcatccggacagaagccatcggcatgggcgcatccgcagtcgcacagttgcctaaagtccgcgccgccctgctgcaacgccaacgcgattttctgaccgaaaaaggactggtcgccgacggacgggacaccggatcggtcgtcttcccccaagccgaacttaaaatcttcctgacggcagaatccaaaatccgtgccgaacgccgcgccaaacaaatcggcatcccctgcgaaggtttggcattcgagcgcatcctgtccgacatcgaagccagagacgaggcagaccgaaaccgcaaggttgcccccctgaaacaacaacccgatgccctgcttttggatacgagccgcctgactatagaagaaactgtaaaaaaagtgcttgattggtatcgtaaagtttaa

SEQ ID NO: 55522 - DNA, 579 bp, Neisseria meningitidis
atgagcgaacagacacagcagcaaaacagtgaagaagcggttgaaaatgtggaggcggtggaaactgtcgagacagtaggaaatgtggacggtgtgcaggaacaggctgccgcagagccggcttatgaggatttgcaggcgcggattgccgagctggaagcgcagttgaaagacgagcagctgcgcgctttggcaaacgagcaaaacctgcgccgccgccaccagcaggaaattgcggatacgcacaagttcgccggacagaagtttgccgtggaaatgctgccggtcaaggattatctggaaatggcgcttttggatcagagcggcaatttcgatgcgctgaaaatgggcgtgcagatgactttgaacgagttgcagaaagcatttgatgctacgcaaatcaaggaaatcaaccctaaagcgggcgataagctcgatccgaatatccatcaggcgatgcaggcggtggcaagcgaacaggagccgaataccgtggtgggtgtgatgaagaagggttatacgctgtccgaccgcgtgttgcgcccggctatggttacggtggcgcagaaggaagcctga

SEQ ID NO: 55523 - DNA, 177 bp, Neisseria meningitidis
atggctatactgttgaaaaaactaaaagaaaattttgcccaaaacggccaaacgctggcgcagtgggcaagagagaacggctttaagccgcgcgatgtgtatctggtggtcggcggacagcgcaaaggcaattacggcaaggggcatgaaattgccaagaagctgggactgaaataa

SEQ ID NO: 55524 - DNA, 1386 bp, Neisseria meningitidis
atgtcttcaggactcgtaacagcggcgtatatcgttgccgcaattttatttatcttttcgctggcggggctgtccaagcaggaaaccgccaaacagggctgctattccggtatcgccggtatggcggtcgccctttttgtaactgttttttccgacaatacccacggactgggctggatcatcatcgccatgctcatcggcgcggcaatcggcatctacaaagccaaaaaggtggaaatgaccgaaatgcccgaactgattgccctgctgcacagcttcgtcggcctagcggcggttttggtcggcttcaacagctatatcgcgccgggcaacgtttcgcacgatatgcacaccatccatctggtcgaagtgtatttaggcatcttcatcggcgcggtaacctttaccggctcgctggtcgcattcggcaaactcaacggcaaaatcagcagcagcccgctgcaactgcccgccaaacacaagctcaacgcactggcacttgccgtatcgtttgtgttgctgctcgtatttgtcggcattgacggcagcggcttcatcctgctgattatgaccctgattgccctcgcattcggctggcacttggttgcctccatcggcggcgcagatatgcccgtggtcgtgtccatgctcaactcctactccggctgggcggccgcagcggcaggcttcatgctctccaacgacctgctcatcgttaccggcgcgctggtcggctcaagcggcgcgattctgtcctacattatgtgcaaagccatgaaccgctcgtttgtctcggtaattgccggtggtttcggcagcgacagcggcacattatcttccggcagccaagagataggggaataccgagaagtcaaagctgccgatattgccgaaatgctgaaaggcgcaaacaatgtcatcattaccccgggctacggtatggcagtcgcacaagcgcaataccccgttgccgaaatcaccgagcttttacgtaaaaacggcaccgaagtacgcttcggcatccaccccgtcgccggccgcctgcccggtcatatgaacgtactgctcgccgaagccaaagtcccctacgacatcgttttggaaatggacgaaatcaacgacgacttccccgaaaccgatgtggtcttggtcatcggtgcgaacgacaccgtcaaccccgccgcccaaaccgacccgaacagcccgattgcgggtatgcccgtgttggaagtgtggaaggcaaaagaagtcgtcgtcttcaaacgctcgatgaataccggctacgcaggtgtacaaaacccactgttcttcaacgaaaacagcgtgatgtgtttcggagatgcgaagaaaaccgtagatgacattctgtccgaactgaaaaaataa

SEQ ID NO: 55525 - DNA, 672 bp, Neisseria meningitidis
atgaaaaccgtttccaccgccgttgtccttgccgccgctgccgtttcactgaccggctgtgcgaccgaatcctcacgcagtctcgaggtagcaaaagtcgcctcctacaatacgcaatatcacggtgttcgtaccccgatttccgtcggaacattcgacaaccgctccagcttccaaaaaggcattttctccgacggggaagaccgtttgggcagccaggcaaaaaccattctggtaacgcacctgcaacagaccaaccgcttcaacgtactgaaccgcaccaatttgaacgcattaaaacaggaatccggcatttccggcaaagcgcataacctgaaaggcgcagattatgtcgttaccggcgatgtaaccgaattcggacgcagagatgtcggcgatcatcagctcttcggcatttttggtcgcggcaaatcgcaaatcgcctatgcaaaagtggctctgaatatcgtcaacgtcaatacttccgaaatcgtctattccgcacagggcgcgggcgaatacgcactttccaaccgtgaaatcatcggtttcggcggcacttccggctacgatgcgactttgaacggcaaagttttagacttggcaatccgcgaagccgtcaacagcctggttcaggctgttgacaacggcgcatggcaacccaaccgttaa

SEQ ID NO: 55526 - DNA, 300 bp, Neisseria meningitidis
atgaagaaaatgttcgtgctgttctgtatgctgttctcctgcgccttctcccttgcggcggtaaacatcaatgcggcttcgctgcaggagttggaggcgctgccaggcataggcccggcgaaggcgaaggccattgcggaataccgtgcgcaaaacggtgcgttcaagtctgtagacgatttgaccaaggtaaagggtatcggccccgcggtgctggcaaagctgaaggatcaggcttccgtcggtgcgcccgcacccaaagcccccgccaaaccggcaacgaccgcagtgaaaaaatag

SEQ ID NO: 55527 - DNA, 519 bp, Neisseria meningitidis
atgctgtctgaaacaccgttttccttgtccgaaagccgccattatgaatttgaaggaaactccactataatacggcattcagattttcagacggcatcgcgcccgtcaaaccgcacacaaaccaaaaggaaatacatgttccgtactatgcttggcggaaaaatccaccgcgccaccgttaccgaagccgatttaaactatgtcggcagcattaccgtcgatcaagacctgttagacgcggcaggcatctaccccaacgaaaaagtcgccatcgtcaacaacaacaacggcgaacgttttgaaacctataccattgcagggaaacgcggcagcggcgtgatttgtctgaacggtgctgcggcaaggctggtgcagaaaggcgatatcgtcatcatcatgtcttacgtccaactctccgaacccgaaatcgccgcgcatgaacccaaagtcgtcttggtagacggaaacaacaaaatccgcgacatcatctcctatgagccgccgcacaccgtgctgtaa

SEQ ID NO: 55528 - DNA, 1179 bp, Neisseria meningitidis
atggaatttgtttacgacgtggcagaatcggcagtcagccctgcggtgattaaagtaatcggcttgggcggcggcggttgcaatgcaatcaataacatggttgccaacaatgtgcgcggtgtggagtttatcagtgccaatacggatgcgcagtctctggcaaaaaaccatgcggcgaagagaatccagttgggtacgaatctgacacgcggtttgggcgcgggcgcgaatcccgatatcggccgtgcggcagcccaggaagaccgggaagccattgaagaagccattcgcggtgcgaatatgctgtttatcacgaccggtatgggcggcggtaccggtaccggttccgcgccggttgttgctgagattgccaagtctttgggcattctgaccgttgccgtggttacccgaccgttcgcatatgaaggtaagcgcgtccatgtcgcacaggcagggttggaacagttgaaagaacacgtcgattcgctgatcatcatcccgaacgacaaactgatgactgcattgggtgaagacgtaacgatgcgcgaagccttccgtgccgccgacaatgtattgcgcgatgcggtcgcaggcatttccgaagtggtaacttgcccgagcgaaatcatcaacctcgactttgccgacgtgaaaaccgtgatgagcaaccgcggtatcgctatgatgggttcgggttatgcccaaggtatcgaccgtgcgcgtatggcgaccgaccaggccatttccagtccgctgctggacgatgtaaccttggacggagcgcgcggtgtgctggtcaatattacgactgctccgggttgcttgaaaatgtccgagttgtccgaagtcatgaaaatcgtcaaccaaagcgcgcatcccgatttggaatgcaaattcggtgcggctgaagacgagaccatgagcgaagatgccatccggattaccattatcgctaccggtctgaaagaaaaaggcgcggtcgattttgttccggcaagggaggtagaagcggttgccccgtccaaacaggagcaaagccacaatgtcgaaggtatgatccgcaccaatcgcggtatccgcacgatgaaccttaccgctgcggatttcgacaatcagtccgtacttgacgactttgaaatccctgcgattttgcgtcgtcaacacaattcagacaaataa

SEQ ID NO: 55529 - DNA, 714 bp, Neisseria meningitidis
ttgcggcggcaatttgcagcatcggatgcctgccgcacgggtttgaaggagggggaaataatgggattgggcatggaaatcggcaagctgattgtggcttttttggtgctgattaatccgtttagcgcgttgtcgctttaccttgacctgaccaacgggcacagcacgaaggagcgcaggaaggtcgcgcggacggccgccgttgccgtgtttgccgtgattgcggtatttgcgctgatcggcggtacgctgctgaaggttttgggcatcagcgtcggttcgtttcaggtcggcggcggaattttggtgttgctgattgccatttcgatgatgaacggcaacgacaatcccgccaagcagaatctcggcgcgcagccggaaacggggcaggtgcgccccgcccgcaatgccggagcgattgccgtcgtgcccatcgccataccgatcaccatcggcccgggcggtatttcgaccgtgattatttacgcttcggcagccaaaacgtacagcgacatcgcgctgattatcgtggccggtttggtggtcagtgcgatttgttatgccattttaatcgttgccgggaaggtcagccgcctgctgggcgcgacggggctgacgattttaaaccgtatcatgggtatgatgctggcggcggtatcggtggagattattgtgtcgggactgaaaacgatattcccgcaactggcaggttga

SEQ ID NO: 55530 - DNA, 621 bp, Neisseria meningitidis; identical to SEQ ID NO: 48243

SEQ ID NO: 55531 - DNA, 1182 bp, Neisseria meningitidis
atgattattgatgtaaaagtacctatgctgtctgaaagcgtatctgaaggcacgctcttggaatggaagaaaaaagttggcgaagcagttgcccgtgacgaaatcctgatcgatatcgaaacggacaaagtggttttggaagtcccttccccacaagccggcgtattggttgaaatcgtagcgcaagacggtgaaaccgttgttgccgaccaagttttggcacgcatcgatacagctgctactgccgctgccgaagcacccgtagccgctcctgccgaagccgccccggctgccgctcctgctgccgcacaaaacaacgccgctatgcctgccgccgccaaactggctgcggagaccggtgttgacgtgaacgcattgcaaggttccggccgcgacggtcgcgtattgaaagaagacgtacaaaatgccgctgccaaacctgccgcagccgctgctcctgctgttgcacttcctgccggcgcacgtcctgaagaacgcgtaccaatgagccgcctgcgtgcccgtgttgcagaacgcctcttggcttctcaacaagaaaacgccattctgactacattcaacgaagtcaacatgaaacctatcatggacttgcgtgcgaagtacaaagaaaaatttgagaaagaacacggcgtgaaattgggctttatgtccttcttcgttaaagccgctgttgccgccctgaaaaaatacccggttgtgaatgcttctgttgacggcaaagacatcgtttaccacggctacttcgacatcggtatcgcgattggcagcccacgcggtttggttgtgccaatcctgcgcgatgccgaccaaatgagcattgcagacatcgaacaagcaattgttgattacgcgaaaaaagccaaagacggcaaaatcgctatcgaagatctgaccggcggtacattcagtattaccaacggcggtactttcggttctatgatgtctaccccgatcatcaacccgcctcaatctgcaattttgggtatgcacgccactaaagagcgcgctgtggttgaaaacggtcaagttgttgtccgtccaatgatgtatctggctctgtcttacgaccaccgtatcattgacggccgcgaagctgtattgaccttggtagccattaaagacgcgttggaagacccagcccgcctgttgttggatctgtaa

SEQ ID NO: 55532 - DNA, 600 bp, Neisseria meningitidis; identical to SEQ ID NO: 37200

SEQ ID NO: 55533 - DNA, 561 bp, Neisseria meningitidis; identical to SEQ ID NO: 36282

SEQ ID NO: 55534 - DNA, 663 bp, Neisseria meningitidis; identical to SEQ ID NO: 45178

SEQ ID NO: 55535 - DNA, 1170 bp, Neisseria meningitidis
atgagcgaatatctgtttacttccgaatcggtatccgaaggccatccggacaaagttgccgaccaagtatccgatgcgattttggatgccatcttggcgcaagaccccaaagcgcgtgtcgccgcagaaactttggtcaacacaggcttgtgcgtattggcaggcgaaatcaccaccaccgcccaagtggactacatcaaagtcgcacgcgaaaccatcaaacgcatcggctacaactcctccgagctgggctttgatgccaacggctgcgcggtcggcgtgtactacgaccaacaatcccccgacatcgcccaaggcgtaaacgaaggcgaaggtatcgacttgaaccagggcgcaggcgaccaaggtttgatgttcggttatgcctgcgacgaaaccccgaccctgatgccgtttgccatctattacagccaccgcctgatgcaacgccaaagcgaattgcgtaaagacggccgcctgccgtggctgcgtcccgacgcaaaagcgcagttgaccgtggtttacgacagcgaaaccggtaaggtaaaacgcattgataccgtcgtcctctctacccagcacgatccgtccatcgcttacgaagaactgaaaaacgccgtcatcgagcagattatcaagcccgtcctgccgtctgaactgctgaccgacgaaaccaaatacctgatcaacccgaccggccgcttcgtcatcggcggcccgcaaggcgactgcggtttgaccggccgtaaaatcatcgtcgatacctacggcggcgcggctccgcacggcggcggcgcgttttccggcaaagacccgtccaaggttgaccgttccgccgcctacgcctgccgctatgtggcgaaaaacatcgtcgccgcaggattggcaacccaatgccaaatccaagtttcctacgccatcggcgttgccgaaccgacttcgatttccatcgacactttcggcacaggcaaaatcagcgaggaaaaactgattaccttagttcgcgaacatttcgacctgcgccccaaaggcatcgtccaaatgctcgatctcttgcgcccgatttacagtaaatccgccgcttacggacatttcggccgcgaagaacctgagttcacttgggagcgcaccgacaaagctgctgcattgagggcggcagcggggctgtaa

SEQ ID NO: 55536 - DNA, 576 bp, Neisseria meningitidis
atgccgtctgaaaacccgataggaaaaacgatgaaatccatagacgaacaaagcctgcataatgcccgccgcctgtttgaaagcggcgacatcgaccgtatcgaagtcggtaccaccgcgggcctgcaacagattcaccgttacctgttcggcggcttatatgattttgcgggtcaaatcagggaagacaacatttccaaaggcggttttcgttttgccaacgccatgtatttaaaagaggctttggttaaaatcgagcagatgcccgagcggacttttgaagaaatcatcgccaaatatgttgaaatgaacattgcccatccgtttttggagggtaatggcagaagtacccgcatctggctggatttggtgctgaagaaaaacctgaaaaaaatcgtaaactggcaaaatgtaagcaaaaccctgtatttgcaggcgatggaacgcagccccgtcaacgatttagaactgcgctttctgttaaaggacaacctgaccgacgatgtggacaaccgtgaaatcatctttaaaggtatcgagcagtcgtattattacgaagggtatgaaaaaggctga

SEQ ID NO: 55537 - DNA, 522 bp, Neisseria meningitidis
ttgctgccgcaaaacggtgtgccggaatatggagaaaaaagaccgatgcaaaaaatccccctgaccgtacgcggtgcggaattgctgaaacaggaattgcagcagctcaaaagcgtggcgcgtcccgaagtgatcgaagcgattgccgaagcccgttcgcacggcgatttgtccgaaaacgccgaatacgaagccgccaaagaacgccaaggctttatcgagggccgcatttccgagctggaacacaaactttccgttgcccacatcatcaatccgaccgaaatccacgccgaaggcaaaatcgtgttcggtacgacggttacgctggaagatttggaaacggaagaacacgttacctaccaaattgtcggcgaagacgaagcggatatcaaacagggcaaaatctatgtcggctcaccgattgcccgcgccttaattggcaaggaagagggcgatacggcggaagtccaagccccgggcggcgtgcgcgaatacgacattatcgaagtccgatatatttga

SEQ ID NO: 55538 - DNA, 1008 bp, Neisseria meningitidis; identical to SEQ ID NO: 54301

SEQ ID NO: 55539 - DNA, 258 bp, Neisseria meningitidis
ttgtttttgtatattcctttgccaaccgttattgctatccaatctaatattatggctatcgtatctacaccacaccccgctctttccgccctcatcatcctcgcccattatcacggcattgccgccaaatctttgggattgaaggcaaaggtagtacgccagcctgtcaaacgtttggctatggtgaccttacctgcattggtatggtgtgatgacggcaaccattttaaggaaaagtggttgttttcggcattctga

SEQ ID NO: 55540 - DNA, 1344 bp, Neisseria meningitidis
gtgaaaaatctgatggttgccgccgctaccgcaggcgtagccgacaaaatcggcgcttcggcactgaacaatgtcagcgataagcagtggatcaacaacctgaccgtcaacctagccaatgcgggcagtgccgcactgattaataccgctgtcaacggcggcagcctgaaagacaatctggaagcgaatatccttgcggctttggtgaatactgcgcatggagaggcagccagtaaaatcaaacagttggatcagcactacattgcccataagattgcccatgccatagcgggctgtgcggcagcggcggcgaataagggcaagtgtcaggatggtgcgataggcgctgcagtcggtgagattgttggtgaggctttggttaagaatactgatttcagtcgtatgagtgcgaccgaaatcgaaaaagctaaagcgaagattactgcctattcaaaactggttgccggcactgcgtctgccgttgtaggcggggatgtgaatacagcggcgaatgcggcacagatagcggtggagaataatactttgtatcctagatgcgttggtgcaaagtgtgatgaatttcaaaaggaacaacaaaaatggatacgtgaaaatcctgaagaatatcgagaagttttgcttcttcagacaggatttattccaattatcggtgatatacagagttttgtacaagcacagaccgctgccgatcacctgtttgctttgctgggtgtggttccgggtatcggtgaatcgatacaggcctataaagtagcgaaagcggcaaaaaatttacaaggcatgaaaaaagccttggacaaggcagcaaccgttgccactgcacagggctatgtcagtaaaaccaaaatcaaaatcggtcaaactgaattaagggttactgcagcaactgacaaacaattgctgaaagctattggcgaaggaagggacacgacaggtaaaatgaccgagcagttatttgactctttagctaaacaaaatggcttcagagtgctttcgggcggcaaatacggcggaaataacggttttgatcatgtatggcaggctgccgatggtagtgttgttttgattgtagaaagtaagcagattaggaacggtacggtacagctgaatccgaatggtgcgggtggatatacgcaaatgagtgaggattggattagacaagttttagatcaattacccgatggtagtcccgctaaagctgctgtcttcaaagcaaataagaacggcacattaaaaacagcaatagcaggcgttgatcgtcaaacaggtaaggccgttattcttcctgtcaaagttccttctaaagccaatataaggagataa

SEQ ID NO: 55541 - DNA, 324 bp, Neisseria meningitidis; identical to SEQ ID NO: 37053

SEQ ID NO: 55542 - DNA, 2526 bp, Neisseria meningitidis
atgaatccaaactcaaaacataacactaaccttaccaatcttcttaaaccgtctgatagtgatataaaacaatttgccgcacaacacatccgccacctcaccgacctgctcaaccgctacgcctacgaatactacaccctcgacgcgcccagcgtacccgatgccgaatacgacaaattattccgtgaactcgaagcgttggaacgaaaccatcccgagctcaaactgcccgacagcccgacccagcgcgtcggcggcgagcctttggcaggctttgccgaagtgcgccacgaagtgccgatgctgtcgctgaccaacgctttttccccgcaagatgaaaacggcgtgttcgaccatgccgaaatgtacgctttcgaccaacgcgtgcgcgacggtttggacggcggcaatcccgaatacgttatcgaacctaaattcgacggcctcgccatcagcctgctctatcgcgacggcgtattgattcaagcagcaacgcgcggcgacggcacgacgggcgaagacgttacccaaaacatcaaaaccgtatccaacatccccttgcggctgcacggcgaaaatacgcccgaactcatcgaagtacgcggcgaagtactgatgcaaaaagccgattttgccgccctcaataaaagacaagccgaaaacgggcaaaaaccctttgccaatccgcgcaacgccgccgccggcagcctacgccaactcgattcgcgcatcaccgcgcagcgcaaactgcactttttcccctactccgttgcccgccagcaaggcggtttcgtcgcggaagaacacatccaagaactcgcctatttccaagcactcggcttcagtctgcccaatggcaatttcggctgtttcaaaaatatcgacgaagtattggcgttttacggacacatgcagcaaaaacgccccgaactgccctacgaaatcgacggcatggtcgtcaaagtcaacagcttggcgcaacagcacgaactcggcttcatctcccgcgcgccgcgttgggcggttgcccacaaattccctgccgaagaagccctgaccattgtcgaagcgattgacgtgcaaatcggcaggacgggcgcggtaacgccggttgcccgattacaacccgtattcgtcggcggcgtaaccgttaccaacgccaccctgcacaatcaggacgaagtatcgcgtaaagacgtgcgcgtcggcgataccgtcgtcgtgcgccgcgctggagacgtgattcccgaagtcgtgcgtgtgatttttgaacgccgcccgatgcaggaaaccgccgttgctgtttcagacggcatcgggcatcggcaggacgatttgtttgccgaagcaccggctgcaaaccaaacccaatccgttccgctctacaagccctaccgcctgccgacccattgccccatctgccgcagcgaaatcgaacgcgaagaaggtgaagccgtcgcccgatgcagcggcggcatgctttgtcaggcacaacgcgcgcaaggcttaatccacttcgcctcgcgcaaagcgatggacatcgacggcttgggtgaaaaacaaatcgaacagcttgtcgcccaagacctcgtccgccacttcgccgacctctaccgcctcgatattccgaccctgcaaaaaatgaaggaaacggcggacaaaaccgttgccgaatcggatcaaatgccgtctgaaggcagttcggtcggcgcgtcgggcaaacataaaaaacaaccgaccaagtgggcggaaaacatcctcgcaggcatagaatccggcaaaacgcccgaactcgcgcgcttcctgttcgcgctcggcatccgccacgtcggcgaacgcaccgccaaaacgctggcgcaggcattcggcacattggaacgcgtccgccgcgcccccgaacccgtcctcgcctgcctgcccgacatcggtacggtagtggcgcattccattgcccacttcttcgcccaagccgaacagcaggcgatgatagacgaactgctcgccgcaggcgttgccccgcaaacccaagccgttaccatcccgcccgcccgccacgccgaaccgcaacgctggatcgcccgcctgcccgacttcaaaattagcgaaaacaaagcccaagccttatgggaactcgctggtaaaaacatagaaggtctacaaaacgacaaagccctccccgccgactggcaagcatggcgcagcgaaccacaaaacgccgccctgctcgaaaacctaaaaaccttcttcgcgcaaatgccgtctgaagacgaggcggcgcaaggttcagacggcatcaataaagccgtagcaggcaaaacctttgtattaaccggcacgctgcccacgctcaaacgcgaccaagcccaagccctaatcgaagccgcaggcggcaaagtttccggcagcgtttccaaaaaaaccgattacgtcgtcgctggagaagccgcgggcagcaagctggaaaaagccaatgccttgggcgtttccgtcctcagcgaagccgaactgcttaccctgctcggctga

SEQ ID NO: 55543 - DNA, 516 bp, Neisseria meningitidis
atgcccaagctccatatgttttacctcggcggcaatgccggcaggtcgaatatcgaagtgcacgacatccaatttgccgtgtgcgacgactaccgcgaagccatccccgcactcaaagccgcatggttcggcgatgcggacaaaatccacatcgacggttggcaggttgtcgaatgggcggacggttacgacatcgccgtatccgaaatgcccaaaacggaaatgccgtctgaacacgccccgcgcctgtattttgccaatgtcggcggttatcgcgcggggcagcttgccgaggcgcacgcgttcgggctgttcaccgccgccacgcctgccgaagccaaacaaaaagccctgcaaaccctgttgaccgaccatgttcagcaacataaagacaacttaaaagacgtggacaacctgcttgcgctcgaccgcatcggcaatttccatatccgcctgaccccgaatccgcacggcaaacccgccgaaatcggctttcaaggctatttgcccatttga

SEQ ID NO: 55544 - DNA, 294 bp, Neisseria meningitidis; identical to SEQ ID NO: 38787

SEQ ID NO: 55545 - DNA, 537 bp, Neisseria meningitidis
atgtcgtctgaaagcgctagcttcaacgaagttaaaaaccttaaacaacaagccattccttctccaacgctcaaaccaaaaacaaaaatcctatggcgcgttatcgcagaaacttcattgccggcggcacattctttttcaccgtcaaactcgccgacccgaaatcgcgcctgcttgtcgaacatatcgacttcgcgggcggcttatatggatgtgcaaaaacaatattcctttgaaaccgtcgccgtatgcgtgctgccgaaccatattcacgccatttggacgctgccgcccgacgatgcggattattccctactccggcggctgattaaaaccaaattctccgcatattccccttatactaaaaacttatccgccggcaaacagcggcagcacgaacgcggtatttggcaacggcgtttttacggacacaccgtgcgcgacgaaacggatttgcagcgttgcgcggactacatccattccaatcctatcaaacaaaaaatgtcgcgtgctaaaacagaatcctgcaaaaaataa

SEQ ID NO: 55546 - DNA, 1839 bp, Neisseria meningitidis
atgtgcggtatcgtcggcgccatccgcgcccatcacaacgtcgtcgattttctgaccgacggcctcaaacgcctcgaataccggggttatgactcatcaggtattgccgtcaacaccgacggcaaaatcaaacgcgtgcgccgcgtcggacgcgtgcagcttatggaggacgctgcccgtgaaaaaggaatagcgggcagcatcggcatcggacatacgcgttgggcgacacacggcggcgttaccgagccgaatgcccatccgcatatttccggtgggatgatagccgtcgtccacaacggcatcatcgaaaactttgaaagcgaacgcaaacgcttggaaggtttgggataccggtttgaatcgcaaacggataccgaagtcatcgcacacagcatcaatcacgaatacgcgcaaaacggcggcaggctgtttgaagcggtacaggaagcggtcaaacgtttccacggcgcatacgccatcgcggttattgcccaagacaagcctgatgaattagttgtggcgcgtatgggttgcccgcttttggtcgctttgggcgacgatgaaacctttatcgcttcggacgtatccgccgtcatcgcctttacgcgccgcgtggcgtacctcgaagacggcgacatcgcgctgctggcttcagacggcatcaaacggctgaccgataaaagcggcctgcctgccgaacgcaaagtcaaggtatccgaactctcgctcgcctctttggaactgggaccgtacagccactttatgcaaaaggaaatccatgagcagccgcgcgcgattgcagacacggcggaggttttcctcgacggcggcttcatccccgaaaacttcggcaaaaacgccaaaagcgtgtttgaaagcatccgcagcgtcaaaatccttgcctgcggcacgtcctattacgccgcgctgaccgccaaatattggttggaatccatcgccaaaatcccggccgatgtcgaaatcgccagcgaataccgataccgcagcgtgattgccgatccggaccaactggtcattaccatttcccaatccggcgaaacgctggacacgatggaggcgttgaaatacgcaaaatccttgggacaccgccacagcctctccatctgcaacgtgatggaatccgccctgccgcgcgaaagcagcctcgtgctttatacccgtgccggtgcggaaatcggcgtcgcctcaaccaaagcatttaccacgcagctggttgcgctgttcggtttggcggtaacgctggcgaaagtgcgcggtttggtttccgaagaagacgaagcacgttacaccgaagaactccgccagcttcccggcagcgtgcagcacgctttaaacctcgaaccgcaaattgccgcctgggcgcaacagtttgccaagaaaaccagcgcgctgtttttggggcgcggcatccattacccgattgccctcgaaggcgcgttaaaactgaaggaaatcacctacatccacgccgaagcctatcctgccggcgaactgaagcacgggccgcttgccttggtggacgaaaacatgcccgtcgtcgtcatcgcacccaacgacagcctgttggacaaagtcaaagccaatatgcaggaagtcggcgcgcgcggcggcgaacttttcgtctttgccgacctcgacagtaattttaatgccaccaaaggtgtgcacgttatccgcgcaccgcgccacgtcggcaaactgtcccccgtcgtgcatactatccccgtgcagctcctcgcctaccacaccgccctcgcacgcggtaccgatgtggacaagccgcgcaacctggcgaaatccgtaaccgtcgaataa

SEQ ID NO: 55547 - DNA, 1254 bp, Neisseria meningitidis
atgtccgaacaacatatttcgacttggaaaagtaaaatcaacgcattgggaccggggattatgatggcttcggcggcggtcggcggttcgcacctgattgcctcgacgcaggcgggcgcgctttacggctggcagatcgcgctcatcatcatcctgaccaacctcttcaaatacccgtttttccgcttcagcgcgcattacacgctggacacgggcaagagcctgattgaaggttatgccgagaaaagccgcgtttatttgtgggtattcctgattttgtgcatcctctccgccacgattaacgcgggcgcggtcgccattgtaaccgccgccatcgtcaaaatggcgattccctcgctgatgtttgatgtcggcacggttgccgccttgattatggcatcctgcctgattattttggtgagcggacgttaccgcgctttggatcgcgtttccaaaatcatcatcgttactttgagtatcgccacgcttgccgccgccggcatcgctatgtcgcgcggtatgcagatgcagcccgattttatcgagccgacaccgtggacgcttgccggtttgggcttcctgatcgcgctgatgggctggatgcccgcgccgattgaaatttccgccatcaattctttgtgggtaaccgaaaaacaacgcatcaatccttccgaataccgcgacgggatttttgatttcaacgtcggttatatcgccagtgcggttttggctttggttttccttgcactgggtgcgtttgtgcaatacggcaacggcgaagcagtgcagatggcgggcggcaaatatatcgggcaattgatcaatatgtacgccgttaccatcggcggctggtcgcgcccgctggtggcgtttatcgcgtttgcctgtatgtacggcacgacgattaccgttgtggacggctatgcccgtgccattgccgaacccgtgcgcctgctgcgcggaaaagacaaaacgggcaacgccgaattctttgcctggaatatttgggtggcgggcagcggtttggcggtgattttttggtttgacggcgtaatggcgaatctgctcaaatttgcgatgattgctgcttttgtgtccgcccctgtgtttgcctggctgaattaccgtttggtcaaaggtgatgaaaaacacaaactcacatcaggtatgaatgcccttgcattggcaggcttgatttatctgaccggttttaccgttttgttcttattgaatttggcgggaatgttcaaatga

SEQ ID NO: 55548 - DNA, 183 bp, Neisseria meningitidis; identical to SEQ ID NO: 42652

SEQ ID NO: 55549 - DNA, 1623 bp, Neisseria meningitidis
atggaaacaataccggcagcgcaaaacaaagccgtaagcccgtctttttcagacggcatctccggtcagactgtcaacaattccgataaaatgctatactcgcgcccgttgccgcgccgtccgaaaccgccctttgggaaagcagaaatgatcagcaaacaagaataccaagcccaagccgcccaaggctacaaccgcatcccgctcgtgcaagaactccttgccgatttggatacgccgctttccctctatctcaaactcgccaaccgcccctatacctacctgctcgaatccgttgtcggtggcgaacgtttcggccgctattcttttatcggcctgccttgcagccactatctcaaagccagcggcaaacacgtcgatgtttatcaaaacggcgaaattgtcgagcaacacgacggcaaccccctgccctttatcgaagccttccacaaccgcttcaaaacacccgaaatcccaagcctgccgcgctttaccggcggactggtcggctacttcggttacgaaaccatctacaattttgaacacttcgcccaccgcctgaaaaacaccaccaaagccgacccgctcggcacgcccgacatcttgctgatgctgtcgcaagaattggcggtgatcgacaatttgagcggcaaaatccatctcgtcgtttacgccgatccgtcgcagcccgacggctacgaacgcgcccgcgaacgcctcgaagacatccgcacccagttgcgccaaagctgcgccatcccgctctcgctcggcagcaaacacaccgaagccgtcagcgaattcggcgaagagccgttcaaagcctgcgttaacaaaatcaaagactacatcttcgcaggcgactgcatgcaggttgtccccagccagcgcatgagcatggaattcaccgacagcccgctcgccctctaccgcgccctgcgtacgctcaacccttcgccttatctcttttactacgatttcggcgatttccacatcgtcggctcctcgcccgaaatcctcgtccgccgcgaacgcgacgatgtcatcgtccgccccatcgccggcacgcgcctgcgcggcaaaacccccgccgaagaccttgccaacgaacaagatttgttaagcgatgccaaagaaatcgccgaacacgtcatgttgattgacttaggacgcaacgacgtcggccgcatcagtaaaaccggcgaagtcaaagttaccgacaaaatggtgattgaaaaatactcccatgtaatgcacatcgtttccaacgtcgaaggccgtctgaaagacggcatgaccaacatggacatcctcgccgctaccttccctgccggcacactctccggcgcacccaaagtccgcgccatggaaatcatcgaagaagtcgaaccgagcaaacgcggcatctacggcggtgccgtcggcgtatggggtttcaacaacgacatggatttggcaatcgccatccgcaccgccgtagtaaaaaacaacacgctatacgtccaaagcggcgcgggcgtggttgccgactccgatccggcctccgaatggcaggaaacacaaaacaaagcccgagccgttatacgcgccgcgcagatggtgcaggaagggttggataaatga

SEQ ID NO: 55550 - DNA, 522 bp, Neisseria meningitidis
atgtcctgtttttcaatcaaacgtatgtccgcgtttcgggcgcggataacggcgttttttgccgcctttgtctttttgacggcggcactgcccgcttatgcggagcgtctgcctgattttctggcgaaaatacagccttcggaaatttttccgggtgcggaccgttacggcaagccggaaggtaagcctatggttgcccgcgtttacaaaggcgatgagcagttgggcttggtctatatcacgaccgatgcggtcaatacgcgcggttattcgagcaaaccgattgatacgctgatggcgttggctaaagacggtacgatagccggagcgaaattggttgatcaccatgagtcgattatgctgatcggtatcccgcatttgcccgcgcccgggcgggcgatacgctcaaactggcttccggcgtatatcaaaccaaactttatatcgacaaaccgattacgattgaagggcctgccgaccgttctgcaaccatcgaaggggacaggagcgggcgtaccatag

SEQ ID NO: 55551 - DNA, 1935 bp, Neisseria meningitidis
atggcaaccgaaccgaaccgaaccgaaccgaaccgaaccgaaattatacacgatttagaagataatttcaaacaaaacaatatattaaaactcaaacaactctttcccgaagtcttttgtgaagaccaaattgactttgaaaagctcaaactcgtcctcggcgcagaaaaccttgccggtgcgggcgaacgttatcaactcgattgggcgggcaaaaccgcctcctatctcaacctgcaaagccccacttcccgcaccctcgtcccctgcaaagaagaatccgcagatttcgacggcacgcaaaacgtgtttatcgaagccgaaaacctcgaagcactgaaaatcctgcaaaaatcctacgccggcagcgtaaagatgatttacatcgacccgccctacaataccggcaacgattccttcgtctatcccgacaaattctccgaaagccgcgaagaatacgcccgccgcgtgggcgataccgacgacgcgggttacctgaagcgcgacggcgtgttccagggcgcgtggcgcaaaaacggcaaagacagtggccattaccacagcaactggctctctatgatgctgccgcgcctgcatctggcgaaaaccctgctgcgcgaagacggcgtgatttttatcagcattgacgacaacgaacaggcgcagttgaaattgttatgtgatgaagtgtttggggcggagaattttgtcggtcagtttccttggcgcaaacgcacggcaaaatcggacgtgccgttcggcgtttccgccgattatgaatatctgcttgcctatgcccgcagtaatgcctttattgccagtatcgatgcggaagaacgcagatattttgaaaccgatgatttcccgaatcgcccgtggcggacgcatgatttgactactcaaagaaatgccagtgaacgaccaaatagttttttcactatggttaatcctaaaacaggcaaagaatatccggcgaatccaaatgcaacttggcgtgttactaaggatacatttcaagaatattacaatgcgggaaaaatcgttttccccgatgattacgatttcctcaaaattaaaaaccccgttatgcgttattttaaagatgacgacatgaagaaagacggagagcgcttcggacgtaaggcagtcagtacacggctacctgaaaatgtaggtatgtcgctgaacggtacaaaagaaattaccgaactgtttaaaagcaagttgtttgattttcccaaaccgtcatccctaattaaatatttactgcaaatcctccatgtttcagacggcctcatcctagacttcttctccggcagcggcactaccgcccatgccgtgatgcagcttaacgccgaagacggcggctgccgccgtttcatctgtgtccagcttcccgaagaaaccgacgaaaaatccgaagcgcgcaaggcgggtttcaacacgattgccgaaattgccaaagaacgcatccgccgcgcgggcaggcagatttcagacggccttcaagagggagcggaaatagatacgggttttaaagttttcaaacttgctgaaagcggtttcaaacaatggcggcagcccgagcagtccgatacggaagccctgcaaggcgagttgtccttgaacattgattccgtgttgtctgaaatgccgtctgaaaacctgctctacgaattgatgttgcgtttaggtttgaagctgacttgcaagatttcgctttcagacggcgtgtatttcgtggaagacgaggatacgggcggactgtacgccttcctgctggaacgcgtgaatcaggatttgattgatgccgtgctggcgaagcatcccgtcaaggcggtggttttggacaggctgttcgacggcgacgacgcgctcaaaggcaataccgtattgcagatgaaggacgcgggcgtgatgttcgaatgcgtgtag

SEQ ID NO: 55552 - DNA, 768 bp, Neisseria meningitidis
atgtcttcaaataaagcttcattttttacacgtctgcgccgcttgtgccgtttggcggtctggctgttcaaaaccgggaaaaacctgcgcggtattgacggcggttgccccgagtcgcgcaatcgggcggtaatcgagttgggcaggggggttttggcggctttggatatcggattggaggtgggcagacccgcacccgaacatccgaacggtgtcttggttgccgccaaccacgtgtcctggctggatattttcgcgatgagcgcggtttatccgagcagctttatcgccaagcaggaaatcaaaagctggccggtattgggcaagatggggcagaacgcgggaacggtgttcatcaaccgcaattcgcggcgcgacatcgaaccgattaaccgcgccgtctgcgaaaccttgcaacgcggtcaaaacgtcagttttttccccgaagcgcggacttcctccggattggggcttttgccgttcaaagccgcgctgttccaatccgccatcgatgcgggggcaaaggttttggcggtcgcgctgcgttattatgacgaaacgggaaaaaggacggctcgtccctcatatgccgatgtcggtttgccgacctgcctgtggcgcatcgtgtctatgaaaaaattgacgataaaagtcgatttcgtttgcgtggcggatgcggcggaaagcgaagaccgttatgctttaaaagataaaatcgaagaaagcatccgtgccgttgtcgccgacgatgcggatatcgctgtctga

SEQ ID NO: 55553 - DNA, 1155 bp, Neisseria meningitidis
atgactgaaactactcaaaccccgactttcaaacctaaaaaatccgttgcgctttccggcgttgcggcgggtaatacagcattgtgtaccgtcggccgtaccggcaacgatttgagctatcgcggttacgacatcttggatttggcacaaaaatgcgagtttgaagaagtcgcccacctgctgattcacggtcatttgcccaacaaattcgagctggccgcttataaagccaagctcaaatccatgcgcggcctgcctatccgtgtgattaaagttttggaaagcctacctgcacatacccatccgatggatgtgatgcgtaccggcgtatccatgctgggctgcgttcatcctgaacgtgaaagccatccggaaagcgaagcgcgcgacatcgccgacaaactgatcgccagcctcggcagcatcctcttgtactggtatcaatattcgcacaacggcaaacgcattgaggttgaaagcgacgaagagaccatcggcggtcatttcctgcaactgttgcacggcaaacgcccaagcgaatcccacatcaaagccatgcacgtttcactgattctgtatgccgaacacgagttcaacgcttctaccttcaccgcccgcgtgattgccggtacaggctctgatatgtactccagcattaccggagcaatcggcgcgttgaaaggtccgaaacacggcggcgcgaacgaagtggcttacgatattcaaaaacgctaccgcaatgccgacgaagccgaagccgacatccgcgaacgcatcggccgcaaagaaatcgtgatcggtttcggtcatccggtgtacaccatctccgaccctcgcaacgttgtcattaaagaagtggcacgcggtttgagcaaagaaaccggcgatatgcgcctctttgacattgccgaacgtttggaaagcgtgatgtgggaagagaaaaaaatgttcccgaatctggactggttctccgccgtttcctatcaaaaattgggcgtaccgaccgctatgttcacaccgctgttcgtgatttctcgtacaaccggttggagcgcacacgttctcgagcaacgcaaagacggcaaaatcatccgtccgagcgcgaactacacgggccctgaagatttggcgtttgtggagattgaagaccgctaa

SEQ ID NO: 55554 - DNA, 1410 bp, Neisseria meningitidis
ttgtttgaatttaaagagaataaaatgattgttacttcccgttggcccttgctggaaaaggcatttttacggtttggaatgcctgttgccgtggttgatttggaatcgacgggcggcaatctgtatgaagacagggtaaccgaagtggctttggtcaagtttgagcagggaagggtggtgaggcatgagtggttggttaatcctcaaaaaccgattccgcagtttgttgcggggctgacggggatttcagacggcatggttgccgacgcacctgtttttgcagagattgccggcgagttgttttcggtattgaagggttgtgtgctggttgcacataacagccgtttcgactatacgtttttaaagcatgagtttcatcgtgcgggtatcggattttcatcgcctgctttgtgcagtgtgcaactgtcccggtgtctgtatccgcaattttacaagcacagcctggacagtatcatcgaaaggttggggattgttgtggaagacaggcatcgtgcgatggcggatgtatcggcattgtgcgattatttggaatacagtctgtcggaacacggggtcgaggcatggatcaggcagtgtttccgtttgatgaatccgaaaccgctgcctgccgcgctgcccgaacggttgagggaacagttgtacggtttgcctgacagtatgggggtgctggcttgtttcgacggaggagggaaagtaaattacatcggtacgtttgaacgggtatatagcgaggtttcggctttattggattccggaaaagccccgtttgattggtgcaatacggaggaagtccgtttttttcctgcattgggcagcctgcatgcatataagattaaagcggaattggtcggacgttatcattcgggttgttatgtatctgccaaaaatctgcttaaaacatttacgaccgtcaggtttgaaaaaggttcagacggcatgttgaatgcgaaaacagcggctttgaaaaacggtgtgacggataatccgcctaccggattatttgccaataaaaaggcggcgagacgggctttgtcgtcgtgggcggaaacatacggattgtgtcctgcctcagccggtatccttccggacggttatgcagaggatgagccttgtcccgtatatgtttcaggccgatgcgataaggcgtgcggccgttctgacgaacaggttttggcgtttgcacacaagttgcctattttggattggggaaaaatgcatgaggtagaaattaccgaaactgatcctttaacgggggaaaaagttgttctgcacggaatgggcggcgcattggaaatgggtgacgggctttggtatttcgataaagatttaccggatgcgtttaaggcgaagtttaaaacggacaggaaaaatattaaggaaatcggttaa

SEQ ID NO: 55555 - DNA, 474 bp, Neisseria meningitidis
atggaacaaaaagggtttacattgattgagatgatgatagtcgtcgcgatactcggcatcatcagcgtcattgccataccttcttatcaaagttatattgaaaaaggctatcagtcccagctttatacggagatggtcggtatcaacaatatttccaaacagtttattttgaaaaatcccctggacgataatcagaacatcaagagcaaactggaaatatttgtctcaggctataagatgaatccgaaaattgccgaaaaatataatgtttcggtgcattttgtcaataaggaaaaaccaagggcatacagcttggtcggcgttccaaagaaggggacgggttatactttgtcggtatggatgaacagcgtgggcgacggatacaaatgccgtgatgccgcttctgcccaagcccatttggagaccttgtcctcagatgtcggctgtgaagccttctctaatcgtaaaaaataa

SEQ ID NO: 55556 - DNA, 1047 bp, Neisseria meningitidis
atgattccggccacctacaccctgtcccaaatcaccgcgcggctcggcggcgaatggcgcggcgaggacatttccgttaccgccgtgcgcccgctcgcagacgcgcaggcggaacacatcagcttccttgccaatccgaaatacaaagccgaagtccacgacagcagcgcgggcgcggtcatcgtttccgccaaagcggcagacggatttgaagggcgcaacctgattgtcgccgacgacccctatctctatttcgccaaagtcgcccgcctgttttcacccgtcgtcaaagcgcgcggcggcatccatccgaccgccgtcgtcgaaccgggcgcgaccgttcccgcaagctgcgaaatcggctcgaacgcctacatcggcgcgaacaccgtactcggcgaaggctgccgcatcttggcaaacgccgtcgtccaacacgattgcaaactgggcgacgaagtcgtcctgcatcccaacgccgtcgtttattacggctgcacactgggcagacgcgtcgaaatccacagcggcgcggtcatcggcgcggacggtttcggactcgcttttgccggcgattcatggtttaaaatcccgcaaaccggcgcggtaacgctgggcaacgacgtagaaatcggctcgaacaccaacatcgaccgcggcgcgatgagcgacaccaccgtcggcaacggcaccaaaatcgacaaccaagtccaaatcggacacaactgcaaaatcggttcgcacaccgtcatcgccgccaaaaccggcatctcaggcagcgtaaccataggcagctactgcatcatcggcggcggcgtcggtacggtcggacacatcgaaatcgccgacaaaaccaccatcggcggcggcacgtccgtcacccacagcattaccgaaagcggcaaacacctcgccggcatcttcccgatgtccacccataaagaatgggcgcgcaacgctgtttacatccaccgcttaagcgaaatgaacaaacggctcaaaacactggagcagcagctttcagatgccggtcaagacagcaaataa

SEQ ID NO: 55557 - DNA, 891 bp, Neisseria meningitidis
atgagcgtattgattaataaagacaccaaagtattggttcaaggtttcaccggtaaaaacggtactttccactccgaacaagctctggcttacggcactaaagttgtcggcggcgtgaccccgggcaaaggcggtcaaacccacctgaacctgcccgtgttcaacaccatgaaagaagccgttaaagaaaccggcgcggatgcatctgtaatttacgttcccgctccgtttgtgttggattctatcgttgaagccgttgattccggcgtaggcttggtggttgtgattaccgaaggcgtgccgactctggacatgctcaaagccaaacgttacttggaaaccaacggcaacggtacccgcttggtcggccctaactgcccgggcgtgattaccccaggcgagtgcaaaatcggtattatgccgggccacatccacactccgggccgcatcggtattatttcccgttccggtacattgacttacgaagccgtggcacaaaccaccaaactgggcttgggtcaatcaacctgtatcggtatcggcggcgacccgattcccggtatgaaccaaatcgacgcactgaaacttttccaagaagacccagataccgacgccatcatcatgatcggtgaaatcggcggtactgcggaagaagaagcagccgaatacatccaatccaacgtaagcaaacctgttgtcggctacatcgccggtgttaccgctcctaaaggcaaacgcatgggccacgccggtgcgattatttccggcggcaaaggtactgccgaggaaaaattcgccgcgtttgaaaaagccggtatcgcttacacccgcagccctgccgagttgggcactaccatgctggaagtgttgaaaacaaaaggtttggcataa

SEQ ID NO: 55558 - DNA, 936 bp, Neisseria meningitidis
atggggcacaatatgatgaccacccaaaaatggtatgagcatattactaatgtaatcataggcaatactgctaatttcaatagcggttgccccgaatctatagattatgtagatgaaaaaaaaggcgtgccgcttgcagcgatgaaatacattttaatgtacactgaagctgcggcttcccatgcctatctatttgaacatgatcttaagaaattcaagcaatatgcttatgttgcaggaaagttgggtattttgcagagtgtagatgatgaagaccccgaacccttcttctttccctgcgacatgctcaacattcaagatccgatgtttctgatgctgatgagcgacagcccgcagctgcgcgagtttctggtgcgcaatatcgacaacatcgccaacgatacagaagcctttataaaccgctacgacctcaaccgtcatatgatttacaatactctgctgatggtggagggtaagcagcttgatcggttgaaacaacgtagcgagaaagtcttggcgcatcccacccctagcaaatggctgcaaaagcggttgtacgattaccgcttcttcctcgctttcgccgaacaggatgccgaggcgatgaaggccgccttagagccgcttttcgataaaaaaaccgcgcgtatggctgccaaagaaacattgtcctatttcgatttctacctgcagccgcaaatcgttacctacgccaaaatcgcatccatgcacggtttcgatttgggcatagatcaagaaatcgcaccgagggatttgactgtttacgatccgctgccggcagacgaatatcaagacatcttcgattttatgaaacagtatgacttgtcttacccgtatgaatatctgcaggattggatagattactatacgttcaaaaccgataagctggtatttggtaacgcgaagcgagagtga

SEQ ID NO: 55559 - DNA, 321 bp, Neisseria meningitidis; identical to SEQ ID NO: 45714

SEQ ID NO: 55560 - DNA, 1404 bp, Neisseria meningitidis; identical to SEQ ID NO: 39890

SEQ ID NO: 55561 - DNA, 1680 bp, Neisseria meningitidis
atgatttacggctcaatgccgtctgaaaagctcacaatttttcagacggcatttgttatgcaagtaaatattcagattccctgtatgctgtacagacgcgggagtgttaagccccccttgtttgaagctccgcggctcctgccgagcttcaccgaccccgttgtgcccaagctctctgctcccggcggctacattgtcgacatccccaaaggcaatctgaaaaccgaaatcgaaaagctggccaaacagcccgagtatgcctatctgaaacagctccaagtagcgaaaaacgtcaactggaaccaggtgcaactggcttacgataaatgggactataagcaggaaggcttaaccagagccggtgcagcgattatcgcgctggctgttaccgtggttactgcgggcgcgggagtcggagccgcactaggcttaaacggcgcagccgcagcagcggccgatgccgcctttgcctcactcgcttctcaggcttccgtatcgctcatcaacaataaaggcgatgtcggcaaaaccctgaaggaactgggcagaagccgcacggtaaaaaatctggttgtagcggcggcaacggcaggcgtatccaacaaactcggtgcctcttcccttgccacttggagcgaaaccccttgggtaaacaacctcaacgttaacctggccaatgcgggcagtgccgcgctgatcaacaccgctgttaacggcggcagcctgaaagacaatctggaggcaaatatcctggcggcattggtgaataccgcgcatggggaggctgcgagtaagattaagcaattggatcagcactatatcgcccacaaagttgcccatgccgtagcaggctgtgcagcagcgacggcgaataagggtaagtgtcaggacggtgcgattggcgcagccgtgggtgagattgttggggaagctttggttaaaaataccgattttagcgatatgaccccggaacaattagatctggaagttaagaaaattaccgcctatgccaaacttgcggcaggtacagttgcaggcgtaacgggaggagatgtcaatactgctgcacaaaccgcacaaaacgcggtagaaaataatgcggttaaagctgttgtaactgctgcaaaagtggtttataaggtagccagaaaaggattaaaaaacgggaaaatcaacgttagagatttaaaacagacgttgaaagacgaaggttataatttagccgacaacctgaccaccttattcgacgaaacattggattggaacgatgccaaagccgttattgatattgtcgtcggaacagagctgaatcgcgctaataaaggggaagcggcacaaaaggtcaaggaagttttagaaaaaaatcgtccttatatccctaataaaggtgctgtaccgaatatgagtacatacatgaaaaataatccttttggaaaacagctggctcaaatttcagaaaagacaacgcttccgacgcagcaagggcagtctgtcttcttggtaaaaagaaaccaagggttattaaaaaccggtgataggttttatttagatggccaacataaaaatcatttagaggtttttgataaaaatgggaactttaagtttgttctaaatatggatggttcgcttaaccaaatgaaaactggggcagcaaaaggtcgtaaattaaacttaaaatag

SEQ ID NO: 55562 - DNA, 2208 bp, Neisseria meningitidis
atgtttcccgaccaatccgcccccaacctgctgcaaggcttgaatcccgaacaactttccgccgtaacctggccgccgcaatccgcccttgtgctggcaggcgcgggcagcggcaaaacgcgcgtgctgaccacgcgtatcgcatggcttttgcaaaccggtcaggcaagcgtgcacagcattatggcggtaacgtttaccaacaaagccgccaaagaaatgcagacccgtttgggcgcgatgattcccgtcgacgtccgcgctatgtggctcggcacgttccacggcctctgccaccgctttctacggctgcaccaccgcgatgccggtttgccgtcttcctttcaaatcctcgacggcggcgaccagctttccctcatcaaacgcctgctcaaaagcctcaacatcgccgaagaaatcatcgcgccgcgttcgctgcaaggctttatcaacgcgcaaaaagaatccggtttgcgcgcttccgtcttgagtgcgcccgatccgcacacaagccgcatgattgaatgctacgccgaatacgacaaaatctgccaacgcgaaggcgtggtcgattttgccgaactcatgctccgcagctacgaaatgctgcaaagcaacgaaatcctgcgccagcattaccaaaaccgcttcaaccacattctcgtcgacgagttccaagacaccaacaaactgcaatacgcctggctcaaactcatggcgggcggcaacgcggcagtgtttgccgtcggcgacgacgaccaaagcatctaccgcttccgtggcgcaaacgtcggcaatatgaccgcgctgatggaagagttccatatcaacgcgcccgtcaaactcgaacaaaactaccgctctgtcggcaacatccttgccgccgccaatgccgttatcgaaaacaacgacgaacgactcggcaaaaacctgcgcaccgacgccgaagcaggcgacaaaattcgctactactccgcctttaccgacctcgaagaagcccggttcatcgtggacgaaaccaaagccctcgaacgcgaaggctgggatttggacgaaatcgccgtcctctatcgcagcaacgcccaatcccgcgttatcgaacaaagcctgttccgcagcggcatcccttacaaaatctacggcggcctgcgcttttatgaacgccaagaaatcaaacacgcgctcgcctaccttcgcctcgccgttaatcccgacgacgacaacgccctcttgcgcgtcatcaacttcccgccgcgcggcatcggcgcacgcaccatcgaaaaccttcagacggcctcaaacgaacaaggcatcaccctttggcaggcagcctgcaacgccggcgcaaaagccaccaaagtcgccgccttcgtccgcctcatcgaagccctgcgcaaccaagtcggacaaatgcccctgcccgaaatcatcgtcggcatcctcaaagacagcggcctgaccgaacactacaaaacccaaaaaggtgacaaccaagaccgcctcgacaacctcgacgaactcgtcaacgccgccatcgagttcaaacccgaagacagcaactttgaaatcctgcctgaaaacatttcagacgatcccgccttccccatcctcgctttcttgagcaacgccaccctcgaatccggcgaaaaccaagcaggcgtgggcgaaaaagccgtccaactcatgaccgtccacgccgccaaaggcttggaattcaacgccgtcttcctcaccggtatggaagaaggccgtttccccagcgaaatgagccttgccgaacgcggcggcctcgaagaagaacgccgcctcatgtacgtcgccatcacccgcgcccgcaaacgcctctacatcaccatggcgcaacaacgcatgctgcacggacaaacccaattcggcatcgtctcccgcttcgtcgaagagatcccacccgaagtattgcactacctgtccgtcaaaaagaccgcctacgacagctacggcagcccgcgccaaaccgccgcatccaaagacaaaatcatcgacgactacaaacagccccaaacctacgcaggtttccgtatcggacaaaacgtccgccacgccaaattcggcaccggcgtgattatcgatgccgcagataaaggcgaatccgcccgactgaccatcaacttcggcaaacagggcgtgaaagagttggataccaagtttgcgaaattggaagcgatgtaa

SEQ ID NO: 55563 - DNA, 279 bp, Neisseria meningitidis; identical to SEQ ID NO: 55063

SEQ ID NO: 55564 - DNA, 1011 bp, Neisseria meningitidis
atgagcaaaaaacgagttctgaccggcgtaaccaccaccggcatcccgcatctgggcaactacgtcggcgccatccgccccgccgtccgcgcggcgcaaaaccctgataccgaatccttcctcttcctcgccgattaccacggtatcatcaaatgccacgagccggagatgattcaccaatccacccaagccgttgccgccacttggcttgcctgcggactcgaccccgagcgcaccaccttctaccgccaaagcgacattcccgaagtgatggaattaaactggattctgacctgcatcaccgccaagggtttgatgaaccgcgcccacgcctacaaagccgctgtgcaggcaaatgcagaaaacaatcaggaagatcccgatttcggcgtggaaatgggtttgttcagttatccgattctgatgactgccgacatcctcatgttcaacgccaacgaagtgcccgtcgggcgcgaccaaatccaacacgtcgaaatggcgcgcgacatcgccggccgcttcaaccaccgctttaaagaaatctttaccctgcccgaagtgaaaatcgacgaaaacgtcgaactcttggtcggtttggacggacgcaaaatgtccaaatcctacggcaacaccattccgctttgggaaaacgacaaaaaaacccaaaaatcggtcaacaaaatcatcaccaatatgaaagagccgggcgagccgaaacagcccgacgaaagcccattgtttgaaatctacaaagccttctccacgccgtctgaaacggtggaatttacgaaaatgcttgccgacggcttggcttggggcgaggcaaaaaaacttttggcggcgaaaatcaacgccgaactcgccgaaccgcgcgaacgctacaacgagctgaccgccgacccttcgcaaatcgaagagattttacaggcaggcgcgcaaaaagcgcgtaaagaagcacgcgaattgttggacaaagtacgcgatgcggtcggcatccgcccgttgaaataa

SEQ ID NO: 55565 - DNA, 1344 bp, Neisseria meningitidis
atgtttcacagtgtcaatgtatttacgggcgaaacgctttaccgccgtccagctcaagattatgcggagtttgaacggcggctggcggatttgaaaatgcgcggcggggcgttcgcgcaactgggcgtaaccgaacgtgccgcgcgcctgcaaaaatttgccgaccgtttggaggcggagaaagagcgttttgcggaaatggtgtgtgaggaagtcggacgctgcttgcacgaatgccgtgcggaaatcggcaagtctatcgaactgatacgctattacgcccgccttgcccccgaactgcttgcccacaaaaccatcgcgacgcaggcgagtttgagtcaggtgcgcttcgagcctttgggcgtggtgtttgccgtcatgccttggaactatcccgtctggcaggtattgcgtttcgccgttcccgctatgtgcgcgggcaacgcgtgcgccgtcaaacccgcgcccagcgtggcacgcgtcagtcaggcactgttcgatttggcttcagacggcattcctctggcaggcgtgtggctggatgaggcgggcacgctcaaggcggttgaagataccgatgcaatggcgtttaccggttcaacgcatacggggcgcatccttgcggcacacgcgggcgcaaaccttaagaaaaccgtgttggagctcggcggtagcaacgcctttatcgtgatgcccgatgctgatttggagcgtgccgccgcagaagcctgttattcccgtttccgcgatgcggggcaatcgtgtaacgccgccaagcgcatcatcgtaaccgaagccgcagccgatcgttttatcacgctgtttcttgccgaatgcgctaaattgaaaatgggcgaccccaaacatcccgatactacgcttgcaccgctgcaccgcgaagatttgcgggacagggttcacgggcaggttgaagatgccgtttcaaacggcgcggtatgcctgaccggcggaaaaatcccacaagggcgaggctggttttatcccgcgacggttttagacagggtaaatcctgcctgccgcgtctggagagaagaagtattcgggccggccgccctgattttgcgcgccgaaaacgaagaacatgccatccgccttgccaatgattccccgttcgggctcggtgcctgcatttataccgccgataccggatgcgcctggcggtttgccgaaaaaatacaggcgggatcggtgtttatcaaccgccataccagcagcgatttgcgcctgcctttcggaggggttaaagattccggttacgggcgcgaattgtccgaattcgggctgtacgagttcgtcaacgtcaaaacctactggcagaaataa

SEQ ID NO: 55566 - DNA, 855 bp, Neisseria meningitidis
atgtcggcacaactgatcaatggtaaagaagtttcgcaaaaacgcctgcaggcggttgccgaagcggtggcgcaacgccaacaggacaatctgcacatgccttgcctggccgtggttttggtcggaggcgaccctgccagcgcggtttatgtccgcaacaagaaaactgcctgccaaaaatgcggcatcaaatcactgtcttacgaactgcccgaatcaacatcgcaggaagaactgctggcactggtcgaccgcctgaatgccgattccgaagtggacggtattctggttcagctgcccctgccgaagcacctcgacagccaggcggttttggaacgtatttcgccggataaggacgtggacggcttccatccttacaatgtcggcaggctggcggtcaaaatgccgctgatgcgcccgtgtacgcccaagggcgtgatgacgcttttggaagcttacggcattgatccgaaggggaaaaaagcggtcgtggtcggcgcgtcgaatatcgtcggccgcccgcaggctttggaactgctgctggcgcgcgcaacggtaacggtctgccacagcgcaaccgaaaatctggcagacgaggttgccggagccgatattttggtggtcggcgtgggcattccgaactttgtcaaaggcgaatggatcaaacccggcgcggtcgttatcgatgtgggcatcaaccgtttggacgacggcagcctgtgcggcgacgtgaaatttgaaacggcaaaagaacgggcggcgatgattacgcccgttcccggcggcgtgggtccgatgacgattgccacattgatggaaaacaccctgcacgcggcttcactgcacgatgcttga

SEQ ID NO: 55567 - DNA, 888 bp, Neisseria meningitidis
atgcagaaatccaaattatcttggttcttgaaactgatgttggcactgtcgctggcgtttctgtatatcccgctggttgttttggtcatctattcgtttaacgaatccaagctggtaaccgtttggggcggcttttcgaccaagtggtacggcgcattgctggaaaacgacaccatcttggaagccgcttggctgtcgctgcggattgccgttgtgtcttcgcttgctgccgtcgttttgggcacgctggcaggctatgcgatggcgcggattaaacgttttcgcggcagtaccttgttcgccggtatgatttccgcacctatggtgatgcccgacgtgattaccggtctgtctatgctgctgctgattattcaggtacagatatttttgcagggcagcgaatggttacaacatctctacttcgatcgtggctttttcaccatcttcctcggacatacgacgctgtgtatggcgtacattaccgttgttatccgttcgcgtctggttgagcttgaccaatcgctcgaagaagccgcaatggatttgggcgcgcgtccgctgaaaatcttttttgtcatcactttgcctttgattgcccctgccatcgcttcaggctttctgctcggcattaccctgtctttggatgatttggtaattacctcattcctctccggccccggttcatccacattgccgcaggtgattttctccaaaatcaagctgggtcttgatccgcagatgaacgttttggcaaccatcctgatcggcatcatcggaacattggtcatcatcgtcaattattggatgatgaggcaggcgaccaggcgtgaccgagaagcggcagaagcctaccgccaggaaaaactggctgctgagaaagcgcattga

SEQ ID NO: 55568 - DNA, 1452 bp, Neisseria meningitidis
gtgaattatttccctattttcgccaacctcgccggccgccccgtattggtcgtaggcggcggcgcggtcgccgcacgcaaaatcagcctgctgctgaaggcgggcgcagaggtcagggttgccgcaaaacacctgaatgccgaactctccgcgttggcggcggaaaacaaaatcctgtggcttgccgaagaatttcgtgccgaacacatccgcacagttttcctcatcattgcggcaagcagcgaccaagccctcaaccggcgcgttttccatcttgccgaaagctgccaaaagccggtcaacgtggtggacgaccgcgaccattgcagcttcatcttcccgtcggttatcgaccgcaacccggttcagattgccgtttccagctccggcagcgcgcccgtcctcgcccgactgctgcgtgaaaggctggaagccctgctgccgccgtctttgggcgatatggcggaaatttcaggaaggtggcgcgatgccgtcaaggacaaactgaaatccgttaccgaacgccgccgcttttgggaaaagcagtttaacggacgtttcgccgccctcgtcaaaaaccggcaaaacacccttgccgaacgggaattggcaggccaattggaacaaagtcgtcaaaatgatcaaggcggctccgtctcgctggtcggcgcgggtcccggcgatgcggggctgctgacgctcaaagggctacaggaaatccagcaggcagacgtggtgctttacgacgcgctggtttcagacggcatactgtccctcgtccgccgcgatgcggaacggatttttgtcggcaagcgcgcccggggcgaccgcaccccgcaagaggacaccaatgcgcttatggtcaggctggcccgcgaaggcaggcgcgtggtgcgtttgaaaggcggagaccctttcgtgttcggacgcggcggcgaagaattggaaaccttggcacgccatcagattccgttttcggtcgtccccggcattaccgccgccgtcggcgcgaccgcctatgccggcatcccgctcacgcaccgcgattatgcccaaagtgcggttttcgtaaccggccaccgcaaggcggatgcgcccgacatcgaatggcagaccctcgcccgcagccgccagaccttggtgatttatatgggtgcgctcaaagccgccctgattgccgaacggctgcaacagcacggacgctcgcccgacacgccggcagccgtcatcagccaaggcacgttgccggctcaaaaaaccgcaaccggcacgctcgccaaccttgccgaactcgccgaaaccgcgccgaatccggcattgattgtcataggcgaagtggtggggctgcacgaaaaactcgcctggttcggtgaaaacggcgaaggagaaaaccgggtcgggcaggcgtatcccgcattgggcggactgaatgccggacaacgggcggcataa

SEQ ID NO: 55569 - DNA, 825 bp, Neisseria meningitidis
atgaaatggctcttcacccttttggcggtactcaatattgccgtattcggcggcacggtgggctataaattagccgttaaagcgacgggcggcgtgccggaaaaccgggccgtcgaaaacacgccccccgcaacgcccgccgccgacaatgcggcggcatccgtggaggatacggcggcactgctcaaaccgggcgacatcctgaccgaagagcaggccgagcagttgcgcttgaaaaaggaagcggaacagaaaaaactgagggagaaaaaacagcgtgaagaaaaagcccgccgcgaaaaactcgccgccgaaaaggcgcaggcggaacgcgaaaacggcgcggcggatgccttatgcgccgcgcaggcaagcctcacgatggacgaagatgactaccaccgcatcaaaggacttttgggcaaatggtcgcacgttgccagcaggagcgtcgaaaaacgcaccgcccaagccaaacctgccgacaaaacctaccgcgtcgtcctgcccgtttccgccgatgccgaaaatcaggcggcggagctgtctgccaaaggtttcaaccccataccgtttgacggcgcattgagtttgggtgtcggcaacagccgggaaaacgcccaagccctgcaaaaccggcttgccggcgccggattcggcggggcgcatattgtcgaacactttgccgaagccgacaggcaggacgattctttgagcgtgtcgcgtatgacggttttgtttaccggcgtgaatgccgccgatgcggaagaaattcgtaaaatcacgtccctatacggcaaactgaacctcaagtcttgcaaatag

SEQ ID NO: 55570 - DNA, 1068 bp, Neisseria meningitidis
atgggcggtaaaacctttatgctgatggcgggcggaacgggcggacatattttccccgcgctggcggtggcggattcattgcgcgcgcgcggccatcatgtgatttggctgggcagcaaggattcgatggaagagcgtatcgtgccgcaatacggcatacgcttggaaacgctggcgattaaaggcgtgcgcggcaacggcatcaaacgcaagctgatgctgccgtttactttgtatcaaaccgtccgcgaagcgcagcggattatccgcaaacaccgtgtcgagtgcgtcatcggcttcggcggcttcgttaccttccccggcggtttggcggcgaagctattaggcgtgccgattgtgattcacgagcaaaacgccgtggcaggtttgtccaaccgccacctgtcgcgctgggcgaagcgggtgttgtacgcttttccgaaagcgttcagccacgaaggcggcttggtcggcaaccccgtccgcgccgatattagcaacctgcccgcgcctgccgaacgcttccaagggcgtaaaggccgtctgaaaattttggtggtcggcggcagtttgggcgcggacgttttgaacaaaaccgtaccgcaggcattggctttgctgcccgacaatgcgcgtccgcagatgtaccaccaatcgggacggggcaagctgggcagcttgcaggcggattacgacgcgctgggcgtgaaagccgaatgcgtggaatttattaccgatatggtgtccgcctaccgcgatgccgatttggtgatttgccgtgccggcgcgctgacgattgccgagttgacggcggcgggattgggtgcgttgttagtgccgtatcctcacgccgttgatgaccatcaaaccgccaacgcgcgttttatggtgcaggcagaagcaggactgctgttgccgcaaacccagttgacggcggaaaaactcgccgaaatcctcggcagcctgaaccgcgaaaaatgtctcaaatgggcggaaaacgcccgtactttggcattgccgcacagcgcggacgacgttgccgaagccgcgattgcgtgtgcggcgtaa

SEQ ID NO: 55571 - DNA, 510 bp, Neisseria meningitidis
atgaatccgtttgaaaccaaaagcgttacctttgccgaaccgattgaaatgctgtatgcctgccacggcaaagtgcgccgtttttgcggacaagtcgccatgctgtcggactacatcgccgaaaacggctgcaatcaaattgttttgcaaaccatccgccaaatcacccggtatttcaacgttgccgcgccgctgcatcatgaggacgaagaagaagactttttcccgctgctgctgcaatacgcgccgcaagcacgtgaaggtgtggacgagcttttacgccaacatatcgggctgcacgacaactgggcggctgtttccgccgaatttgccaagctcgaagcagacaatgcttatgttcccgatgcggaagcgttcaaacgttttgtggcgggatatgatgttcatttggcgattgaagagccgctgtttgatatgggcaacacctttatccctaaagaaaaactgaccgaaatcggtgaaatcatggcggcgcgtcggcgcaaataa

SEQ ID NO: 55572 - DNA, 1470 bp, Neisseria meningitidis
atggacaaacataatgggacttatcgggatttgcaccgtccggcttcggaatttgcgacgcgggacgaatatttggaacatgaattgcagattatgcagccaaaacgctggcggcccaacctgccctttcgcgattaccgcttcgagtgggaagatttgattcctgcgatggcgggaacgattggaaaagtggtgatggtgggggcggtggcggcggcgtttgccgcacctttggggctgcctgacagctttgtactggaaaatgtgcgctatgagcttttaatcgccgccgcgtttatcttattggtatcgggcttttttctgcccggcgccaacctgcccggtacgcacgggccgctgattccgatgattcccatcgttgtgtcggcaggcgggcatcctttggcgttcggcatttcgattgcggttttaggtctgctgatggctttatttcgcggcggcagtattatggcgaagctgacaagcaacggcgtatgcggcggattattactctatttgggctttatcggcacgacggggcaagtaaaaaaattgttttcgtgggcaggcggttttaatatgccctacatcgcttttaccgtcattattgtaacgattgtgatgtacgctttgttggagcattggaaaaaacgctggttagccgtgcctttgggatgcttgattgccggtgtggtggcatttgcattgggtgcgccgtttgagtttcacaccgcccccggcctgcctccaatgagtcctgcttattggtggggtgaaaacagcggctggcatctggggttgccgacggcagaaagttttttggttgtctttccatttgcggtattggctgttgcaatgtggtcgcccgattttttaggacatcaagtgttccaaaaaatcagctatccggaaaaaaccgataaggtattgatgaatatagacgacaccatgacaagttgttctgtccgtcaagcagtgggttctattttagggggtgcaaattttacctcttcttggggaacttatatcgtaccggcatcgattgccaaacgccccattccgggcggtgcggttttaacggcggttttatgtattatcgccgggttatggggctatccgatggacttggcgatttggcagccggtattgagcgtagccttggtcgtaggcgtatacttaccgcttttggaagcgggcatggaaatgacgcgcaaaggcaaaaccacccaatccgccgccatcgtggtgttctcttccgccttggtcaatccggttttcggctgggcgttgacgatgctgttggataatttgggcttaatcggctgcaaagagcgcagtgcgcaattaggtttcgccggacgcgtgttgatacccgcagtaggtttcttgatcttgtgtgtggcgatgggtgcggtcgggatgctgcccggtatcccgccgtttttggaacacttcaaatctttgggctag

SEQ ID NO: 55573 - DNA, 603 bp, Neisseria meningitidis; identical to SEQ ID NO: 36499

SEQ ID NO: 55574 - DNA, 738 bp, Neisseria meningitidis; identical to SEQ ID NO: 50415

SEQ ID NO: 55575 - DNA, 417 bp, Neisseria meningitidis; identical to SEQ ID NO: 37115

SEQ ID NO: 55576 - DNA, 2283 bp, Neisseria meningitidis
atgacggtttttcggatttgctttattatccgtttatttttgaaatatctggggtggggagacgtgttccgtcgttggtttttgccgtgttgggttgtcggtgcggcggcttcgttcgcgctgccggtcgtgccgcattggctgttttggctggcggcttttgcggtttttgctgtgtttgcaaggcgttttgcgtttgccggtctgatgctgtgcgtgttggcgggcgcggcttacggcgtattcaggacggaggcggcattgtcttcccaatggtgggcagaagccgtttcaggcgtgcctttgacggtggaagtggcggatatgccgaggtcggacgggcggcgtgtgcagtttgcggcaaaggctgtggacagcggtggtcggacgtttgatttgctgctgtcggactacaaacggcgcgaatgggcggtcgggagcagatggcggataacggcacgtgtgcaccctgtcgtcggggagttgaacctgcgcggtttgaaccgtgaggcgtgggcattatccaacggaataggcggcgcggggacggtcggtgcggacagggttttgctgcatggcggaagcggttgggggattgcggtttggcgcagccgcatcagccgtaattggcagcaggcggatgcggacggcgggctttcagacggcatcgggctgatgcgcgcgttgagcgtgggcgaacagtcggcattgcgccccgaattgtggcaggcgttccggccgttggggctgacgcatttggtcagtatttcgggtttgcacgttacgatggtggcggtaatgtttgcgtggctggcgaagcggctgcttgcctgttccccgcgccttcctgcccggccgcgcgcgtgggttttggcggcggggtgtgcaggcgcgctgttttacgcgctgcttgccggtttttccgtgccgacgcagcgcagcgttttgatgttggcggcgtttgcgtgggcttggcgcaggggaagattgtcggcgtgggcgacgtggtggcaggcgttggcggcggtgctgctgttcgacccgtcggcggtcttgggtgtggggacttggctgtctttcggtttggtggcggccctgatatgggcgtgctcggggcgtttgcacgagggaaaacggcaaactgctttgcgcgggcagtgggcggcttcggtgttgtcgctggttttgctcggttatctgtttgcttcgctgcctttggtcagccctttggtcaatgcggtggcaattccgtggttttcttgggtattgacgccgctggcgttgctgggttcggtcgtgccgtttgcgcctttgcaacagttgggggcatttttggcggaatatactttgcggtttttggtgtggcttgccgatgtgtcgcccgagtttgccgttgcctccgcacctttgccgctgttggtgttggcggtgtgtgccgctttgctgttgctgctgccgcgcggcttgggtttgcgtccgtgggcggtgttgctgttggcagggtttgtgttttaccgttcacccggcgtgccggaaaatgaggttgcggttacggtttgggatgcggggcagggtttgtcggtgtcggttcagacggcaaatcatcatcttttgtttgacaccggaacggcagcggcggcgcagatggggattgtgccgagcttgaatgcgtcgggaatcaggtatttggattatttggttttgtcgcatcacgacagcgaccacgacggcggttttcaggcagtcggcaagataccgaacggcgggatttatgccgggcagccggaattttatgagggggcgcggcattgtgcggaacagcgttggcaatgggacggcgtggattttgagtttttgatgccgtctgaacgcaaaaacatcgatgataatgggaaaagttgtgttttgcgtgttgtggcgggcggtgcggcactgctggtaacgggcgatttggatacgaagggcgaggaaagcctggtcggcaagtatggaggcaacctgtacagccaggttttggttttgggacatcacggcagcaatacgtcctcgtcgggcgtgttcctcaatgccgtctcgcccgaatatgccgttgcttcaagcggttatgccaacgcctacaaacatccgaccgaagcggtgcagaaccgtgtccgcgcacacggcatcaaactgctgcgtaccgatttgtcgggcgcactgcaattcggcttgggacgcggcggcgtgaaggctcaacgtttgagagggtataaattctattggcagaaaaaaccgtttgaatga

SEQ ID NO: 55577 - DNA, 993 bp, Neisseria meningitidis
atgaaaacgcacgaaataagcaaagattcggtcagcttgataggggttgccgaacatgaggcgggtcaacgccttgataactatctgataaaaatcctcaagggtgttcccaagagccatatccaccgcattatccgcgccggcgaggtgcggttgaacaagaaacgctgcaaacccgacagccgtattgcggagggggatacggtgcggattccgcctgtgcgcgtggcggagaaggaaatgccgtctgaaaggcgtgccgccgtaccggcgcgtgcgtttgacgttgtttacgaagacgatgcgcttttggtcatcgacaaaccgtccggcgttgccgtccacggcggcagcggcgtgagtttcggcgttatcgaacagttgcgccgcgcccgtccggaggcgaagtatttggagttggttcatcgtttggacaaggatacgagcggcttgttgatggtggcgaagaaacgcagcgcgctcgtcaaacttcacgaagccatccgtaacgaccaccccaaaaaaatctaccttgcgctgggggtgggcaaactgccggacgacaatttccatgtcaaactgcccctgttcaaatataccggcgcacaaggcgaaaagatggtgcgcgtcagtgcggacgggcagtcggcgcatacggtgttccgtgtgttaagccgtttttcagacggcattttgcacggtgtcgggctgtcgcacctgactttggtgcgggcgacgttgaaaacggggcgcacgcaccaaatccgcgtccacctgcaatctcaaggctgtccgattgcgggcgacgaacgctacggcgattatcaggcgaaccgtcgtttgcagaagttgggtttgaagcggatgtttttgcacgcgtccgagctgcacctgaaccatccgctcacgggcgagccgctggtgttaaaggtggggctgccgccggatttggcacagtttgcggtgatgttggaaaacgggacgaaaatgtga

SEQ ID NO: 55578 - DNA, 369 bp, Neisseria meningitidis; identical to SEQ ID NO: 42386

SEQ ID NO: 55579 - DNA, 903 bp, Neisseria meningitidis
atgtttgtttttcagacggcattttttatgtttcagaaacacttgcagaaagcctccgacagcgtcgtcggagggacattatacgtggttgccacgcccatcggcaatttggcggacattaccctgcgcgctttggcggtattgcaaaaggcggacatcatctgtgccgaagacacgcgcgttaccgcgcagcttttgagcgcgtacggcattcagggcaaactcgtcagcgtgcgcgaacacaacgaacggcagatggcggacaagattgtcggctatctttcagacggcatggttgtggcacaggtttccgatgcgggtacgccggccgtgtgcgacccgggcgcgaaactcgcccgccgcgtgcgtgaggtcgggtttaaagttgtccctgttgtcggcgcaagcgcggtgatggcggctttgagtgtggctggtgtggcgggatccgatttttatttcaacggttttgtaccgccgaaatcgggcgaacgtaggaaattgtttgccaaatgggtgcgggcggcgtttcctatcgttatgtttgaaacgccgcaccgcatcggggcgacgcttgccgatatggcggaactgttccccgaacgccgtctgatgctggcgcgcgaaatcacgaaaacgtttgaaacgttcttaagcggcacggttggggaaattcagacggcattggctgccgacggcaaccaatcgcgcggcgagatggtgttgatactgtatccggcgcaggatgaaaaacacgaaggcttgtccgagtccgcgcaaaatgtgatgaaaatccttgctgccgaactgccgaccaaacaggctgccgagcttgccgccaagattacaggtgagggcaaaaaggctttgtacgatttggcagtgtcgtggaaaaacaaatag

SEQ ID NO: 55580 - DNA, 624 bp, Neisseria meningitidis; identical to SEQ ID NO: 36421

SEQ ID NO: 55581 - DNA, 996 bp, Neisseria meningitidis
atgaaaacatctatccgatacgcactgcttgccgcagccctgaccgccgcaacccccgcgctggcagacattaccgtgtacaacggccaacacaaagaagcggcacaagccgttgcagatgcctttacccgggctaccggcatcaaagtcaaactcaacagcgccaaaggcgaccagcttgccggtcaaatcaaagaagaaggcagccgaagccccgccgacgtattctattccgaacaaatcccggcactcgccaccctttccgccgccaacctcctagagcccctgcccgcctccaccatcaacgaaacacgcggcaagggcgtgccggttgccgccaaaaaagactgggtggcactgagcggacgttcgcgcgtcgtcgtttacgacacccgcaaactgtctgaaaaagatttggaaaaatccgtcctgaattacgccacgccgaaatggaaaaaccgcatcggttacgcccccacttccggcgcgttcttggaacaggttgtcgccatcgtcaaactgaaaggcgaagcggccgcattgaaatggctcaaaggtctgaaagaatacggcaagccttacgctaaaaactccgtcgcccttcaagcggttgaaaacggcgaaatcgatgccgccctcatcaacaactactactggcacgcttttgcgcgtgaaaaaggcgtacaaaatgtccacacccgcctgaatttcgtccgccacagagatcccggcgcactcgttacctattccggcgcagccgtgttaaaatcctcccaaaacaaggatgaggcgaaaaaattcgtcgccttcctcgccagcaaggaaggacagcgcgccctgaccgccgtccgtgccgagtatcctttgaatccgcacgtggtatccaccttcaatttggaacccatcgccaagttggaagcaccccaagtgtccgccaccactgtttccgaaaaagaacacgccacccggctgcttgagcaagccggtatgaaataa

SEQ ID NO: 55582 - DNA, 792 bp, Neisseria meningitidis
ttgcaggattcgaccatgtccgacaacgctttgacctcttcgcgacgcttcggcggcatcgccagactctacggagactctgccttggcgcacttttcacaggcacacgtctgcgtagtcggcgtgggcggtgtcggctcgtgggcggtcgaggctttggcgcggacgggcatcggacgtttgactttgattgatttggacaacgttgccgaatcgaatgtcaaccgccagctgcacgccctgaccggagacttcggcaaagcaaaagttaccgccttgcgcgaacgcgtcgcccaaatcaacccagaatgccaagtgtttgaaattgaagatttcgttaccgaagacaatttgccggaatacttcggaaaaggttttgatttcgtcatcgacgcgatcgaccaagtgcgcgtcaaagcagcaatggcggcttattttgtggaacgcaaacaaccgtttgtcctcagcggcggcgcgggcggacaaaaaaatccggcgttaatccaaaccgccgatttgagccgcgtaacccacgacccgctgcttgccaacctgcgctacaccttgcggaaacgctacggattcagccgcgatacgaaagcaaatatgcgcgtgccttgcgtgtattcgaccgaaaatatcgtgccgccgcagtctagggaggcttgttcggcagatgccgctccgcaaggcttgtcgtgcgccggctacggtgcaagcatgctcgttaccgcttcgttcgggctatattgcgcacaggcggcggtggaacacatcgcagacaaaaaataa

SEQ ID NO: 55583 - DNA, 786 bp, Neisseria meningitidis
atgggttttctgcaaggcaaaaaaattctgattaccggcatgatttccgagcgttccatcgcttacggcatcgccaaagcctgccgcgaacaaggcgcggaactggcgtttacctacgttgtggacaaactggaagagcgcgtccgcaaaatggcggcggaattggattccgaactcgtgttccgttgcgatgtcgccagcgacgacgaaatcaaccaagtgttcgccgacttgggcaagcattgggacggcttggacggtttggtgcattccatcggcttcgcgccgaaagaagccttgagcggcgatttcctcgacagcatcagccgcgaagcgttcaacaccgcacacgaaatttccgcatacagcctgcccgcgctggcaaaagccgcccgtccgatgatgcgcggcagaaattccgccatcgtcgccctgagctacttgggcgcggtacgcgcgattccgaactacaacgtgatgggtatggcaaaagccagccttgaggcaggcatccgctttaccgccgcctgcttgggcaaagaaggcatccgctgcaacggcatttccgccggcccgatcaaaacgcttgccgcctccggcatcgccgatttcggcaaactcttgggacacgtcgccgcccacaatccgctgcgccgcaacgttaccatcgaagaagtcggcaataccgccgccttcctgctgtccgacctgtcgtccggcattaccggcgaaatcacttacgttgacggcggttacagcatcaatgccttgagcaccgagggataa

SEQ ID NO: 55584 - DNA, 507 bp, Neisseria meningitidis
atggttgacgcttggtctgtccctgattttgaatcgaaaatctgtccgcccgaggcgttggcggcgcgtttggcgttgttgccgcgcccgctggtgtttaccaacggctgtttcgacatcctccacagggggcatgttacttatctggcgcaggcgcgttcgatggggggcgcgttggtgctggcgttgaataccgatgcttcggtgcggcgtttgggcaagggcggcgaccgcccgattaatcctttggagaaccgtgccgccgttgccgccgcgttggaaagtgtggatttggtaacgtggtttgacggggatacgccggcggcgttgattgaggcggtcaaacctgaaattttggtcaagggcggcgattgggctgcggataagattgtcggtgcggcagaaacgttggcgcgcggcggtcaggtgttttcaattccgtttctgcaccagacttcgacaacgaagactttggcaaaaatccgtgcggcagagggcggaaaatga

SEQ ID NO: 55585 - DNA, 735 bp, Neisseria meningitidis
atgaacgctgcggctgccaaagattatatgaaaacggttgagttgaacaagtctgccggcaatgtcgataccacatccagaacagcccgcagggtgcaggcagtatttcgacgtatgctgccttatgccgatgcggcaaataataccggccataggtttgactggaaaatgacggttttcaaaaacgatgagctgaacgcgtgggcgatgcccggtggaaaaatggcgttttatacggggatagtcgacaaactcaagctgaccgatgacgaaattgccgccattatggggcatgaaatgacgcacgccctgcatgaacacggtaaaaataaggtcgggcagcaaatcttgaccaatacggcggcgcagataggcacgcagattatattagacaaaaaaccggatactaatccggaattggtcggattgggtatggatattttggggacgtacggtcttaccttgccttatagccgcagcttggaagaagaagccgatgaggggggaatgatgttgatggcgcaggcaggctatcatccggcggccgctgtcagggtttgggaaaaaatgaatcaggaaaacgaccaaaacggctttatttatgctattacctctactcatccgacaaacaatgcccgtatagaaaatctaaaacggttgttgccgaccgttatgccggtttatgagcaaagtgtcagaaataaggggcgcgttaataaaaaacgtcggcgttaa

SEQ ID NO: 55586 - DNA, 1128 bp, Neisseria meningitidis
atgttagaatgcacgataaattactgttcaggcgaaattatgtcccaaactatcgacgaactcctccttccccaccgcaacgccatcgacaccattgatgcggaaatcctgcgcctgctcaacgaacgcgcgcaacacgcacacgccatcggcgaactgaaaggcacgggcgcagtgtaccgtcccgaacgcgaagtcgccgtgttgcgccgcattcaggatttgaacaaaggcccgctgcccgacgaatcggtagcacgcctgtttcgggaagtgatgagcgagtgcctcgccgtagaacgcccgctgaccatcgcctatctggggccgcagggcacgtttacccagcaggcggcgatcaagcatttcggacacgccgcgcacaccatggcgtgtccgaccatagacaactgcttcaagcaggttgaaacccgtcaggcggattatctggtcgcgcccgtggaaaactcgaccgaaggctcggtcgggcgcacgttggatttgcttgccgttaccgcgttgcaggcgtgcggcgaagtcgttttgcgcatccaccacaaccttttgcgtaaaaacaacggcagcaccgaaggcattgccaaagtcttttcccacgcgcaggcgttggcgcagtgcaacgactggttgggcagacacctgcccaacgccgaacggattgccgtgtccagcaatgccgaagccgcaaggctggttgccgaatcggacgacggtacggttgccgccatcgccggacgcacggcggcggaaatctacggactcgatatggttgccgagtgcatcgaagacgaaccgaacaacaccacgcgcttcttggtgatgggacatcacgaaaccggtgcaagcggcagcgacaagacttcgctggccgtttccgcgcccaaccgcgccggtgcggttgcctcgctgctgcaaccgctgaccgagtcgggtatttccatgaccaagtttgagagccgtccgagcaaatccgttttgtgggaatacctgttctttatcgatatcgagggacaccgccgggacgcgcagattcagacggcattggaacgcttgggcgaacgcgcttcgttcgtcaaagtcatcggttcgtacccgaccgccgttttgtag

SEQ ID NO: 55587 - DNA, 1311 bp, Neisseria meningitidis
atgaccgatttgtttgcccgagaacccgacgcgccgcttgccgaacgattgcgtccgcatacgcttgacgacgtggtggggcaggaacacctcatcggcgaaggtaaatctttgcgcgtggcggtagaagggggcaagccgcattctatgttgctgtgggggccgccgggcgtgggcaagacgacgttggcgcggattttggcgcagagtttcaatgcccagtttctgcctgtttccgccgtgttttccggcgtaaaagacatacgcggggcaatcgacaaggctgaaatcgctttgcagcaggggagggcgacgattttgtttgtcgatgaagtccaccgcttcaacaaggcgcagcaggatgcgtttttgccttatgtggaaaacggtttgctgacctttattggcgcaacgacggaaaatccgtcgtttgaagtgaatcccgcgctgttgagccgcgcgcaggtgtatgttttgcaatccttgtcttcagacgacctgaaaaagctgattgccaaggtattggctttgcctgaataccaagagtttacgattgaaacggatgcgcaaaaattactcgtgaataccgccgacggtgatgcgcgcagattgttgaatttgttggaacaactgttaggcgccgctgaaacgcgccgtctgaaaaccctgactgccgaatttctcgccgacagtctcggggcgcaaatccgccgtttcgacaaaggcggcgagagtttctacaaccaaatctccgccctgcacaaatccgtgcgcggttcgcatccgaacgccgcgctgtattggttctgccgtatgctcgacggcggcaccgacccgcgctacctcgcccgccgcatcgtgcgtatcgcttgggaagacatcgggcttgccgacccgcgcgccttgcaaatcgccaacgatgccgccgccaccttcgaacgcttaggctcgcccgaaggcgaactggctttggcgcaagcggtattgtatcttgccgccgccgcgaaatccaacgcgggctacaaggcatacaatcaaatgcgccgtttcgtcaaagaaaacgccagcgacgaagtacccgtccacctgcgcaatgccccgaccaagctgatgaaggaattgggctacggacgcgaataccgctacgcccacgacgaaccgaacgcctacgccgccggcgaaagctatatgcccgactgcttggacgaaccggacttctaccaacccgtcccgcgcgggttggaaatcaaaatcggcgaaaagctggaatggttgaaatcgctggacgaagaagtattaaaggcaaaatga

SEQ ID NO: 55588 - DNA, 1578 bp, Neisseria meningitidis
atgagtaaattcttcaaacgcctgtttgacattgttgcctccgcctcgggactgattttcctctcgccagtatttttgattttgatatacctcatccgcaagaatctgggttcgcccgtgttcttcatccaagagcggccgggcaaggacggcaagccgtttaaaatgattaaattccgctctatgcgcgacgcgcttgattcagacggcattccgctgcccgacggagaacgcctgacaccgttcggcaaaaaactgcgtgccgccagcttggacgaactgcccgaactgtggaatgtcttaaaaggcgagatgagcctggtcggcccgcgcccgcttttgacgggctacctgccgctttataacgacttccaaaaccgccgccacgaaatgaaaccgggcattaccggctgggcgcaggtcaacgggcgcaacgcgctttcgtgggacgaaaagttcgcctgcgatgtttggtacaccgacaacttcagcttttggctggatatgaaaatcctgtttttgacagtcaaaaaagtcttgatcaaagaaggcatttcggcggaaggggaagccactatgccttatttcactggaaatcaaactaatgaaaaaaataatatactgattctgtcggcaggtcgccgtgtcgaattggtgcaggacttccaaaccgaagccgcacgtttttcagacggcatcagcgtttttgccactgacctcaacccccgcatgtcttctgcctgccatgtttcggacggttcatttgaagtgccgccgattagtgccgattcatatatcgacagcattttcaatctggcggtacgcgaaaatatcggtttaatcatcccaaccatagacaccgaactgcaaaagctggcagacgagcgcgaacgctttgaagcggcaagtgtccacatcgtcgtttccgattcggacttcatcgcacaatgccgcgacaaacggaaaaccgccaccttgtttgcccgctacggcatacgctcacccgaaatttacgaccgcaagaagttggttttcccttgcttcgccaagccttatgacggcagccgcgccatcggtgcaaaacggattgacacacctgccgacctgacaccggaagtcttggcagacaccaaattaatgttctgtcagtttatcgacatcgaaaataaattttccgagtttaccgtcgatatgtattacgaccgtcaatgccgtctgaaatgcgccatcccgcgaaaacgcttggaagtgcgctccggcgaaatcagcaaaggcgttacctgcaaaaacagcctctaccaaacgctgctggaaaaaatgtcggtattgcagggcgcgcgcggctgtatcacggcgcagttcttctacaacgaagaaaccggcgaattctacggcgtggaaatcaacccccgcttcggcggtggcttcccgctgacgtatgccgcaggcggcaattatccgagccggttgatgcgcgaatacctcggcgacgaagaaatcccgttttcagacgactgggaaaacaacctcattatgttgcgctacgatgccaaggtcttggttcatgaaaacgattaa

SEQ ID NO: 55589 - DNA, 621 bp, Neisseria meningitidis
atggcacagtttttcgccgttcatcccgacaacccccaagaacgcctcatcaagcaggcggtcgaaatcgtcaataaaggcggcgtggtcgtttatccgaccgattcctgttatgccttgggctgcaaactcggcgataaggcggcgatggaacgcatactctccatccgcaaaatcgatttgaaacaccacctgaccctgatgtgcgcagatttgagcgagttgggcacatacgccaaagtcgacaacgtacagtttcgtcagcttaaagccgccacacccgggccttatacttttattttacaggcgacgaaggatgtgccggcgcgcacgctgcacccgaaacgcaaaaccatcgggctgcgtattcccgataatgccattgcacaagccctgctgggggaattgggcgagccgcttttaagctgcaccctgatgctgcccgaagacggcgaaccattgaccgatccttatgaaatccgcgagcgtttggaacacgccgtcgatttggtgattgacggcggctggtgcggaaccgagccgaccaccgtcgtcgatatgaccgacggcacggaattggtgcgccaaggttgcggcgatacggcggtgttcggtttgtag

SEQ ID NO: 55590 - DNA, 435 bp, Neisseria meningitidis; identical to SEQ ID NO: 55181

SEQ ID NO: 55591 - DNA, 644 bp, Neisseria meningitidis
atgagaaaaagtcgtctaagccggtataaacaaaataaactcattgaactgtttgtcgcaggtgtaactgcaagaacggcagcagagttagtaggcgttaataaaaataccgcagcctattattttcatcgtttacgattacttatttatcaaaacagtccgcatttggaaatgtttgatggcgaagtagaagcagatgaaagttattttggcggacaacgcaaaggcaaacgcggtcgcggtgctgccggtaaagtcgccgtattcggtcttttgaagcgaaatggtaaggtttatacggttacagtaccgaatactcaaaccgctactttatttcctattatccgtgaacaagtgaaacctgacagtattgtttatacggattgttatcgtagctatgatgtaattagatgtgagcgaatttagccattttagcttcgctgaaacttcgttttcgtatcaatcacagcacacattttgctgaacgacaaaaccatattaatggaattgagaacttttggaaccaggcaaaacgtcatttacgcaagtttaacggcattcccaaagcgcattttgagctgtatttaaaggagtgcgaatggcgttttaacaacagtgagataaaagttcttgttccattttaa

SEQ ID NO: 55592 - DNA, 1173 bp, Neisseria meningitidis
atgaaacaaattaatcaagcattacaacaaaaactggttgaatttaaagaaaaatcgggtatgaaccaaacccaactggcacgcggtatcgatacttcgccggcatccatcagtatgtatctgaacggcacttatgcggaaaaaggcggcaattatgaaaccatcgagacgaaaatcgaggcgtttttggagatgcagaaaagtaaggcgcgacgcgaagaactggtgttgggttttgtagcgactaagacgacccgccgaatcgcggaagtgatgcgcaatgcgcacgaaggcggcgaaacagtggtgatctacggtcaggcgggattgggaaagactcaggcggtcaaaaactactgcgagaaaaacccagcggccatcttgattgaggctaatccgagctttacggctttggtcttgatgcgcaagttggcgacggcggcgaaggtatcggcgatgggcagcctgaatgatttgtttgagtctgtatctgaccgcctgcgcgattcgggccgtctgattgtggtcgatgaagcggaaaacctgcccttgcgcgcccttgagattatccgccgactgcatgatgaaacgggctgcggcttggtgttgagcggtatgccccgactggtggccaacctgcgcggtaagcatggcgagctggtgcaactttatagccgcgtgtctgttgcgctgaatttgggcgaatctttgccggatgacgagctctttgagattgcgaaagcggctttgcctgatgcggtcaagcatctgctccctgatagtgtacaagcgttgattacggtcatcgggtttaatgaaacgctggagctggtgcgcctgatgggcggtacgacttatcctttgcggcagggttatacgaaaaacagtcaatcccgtgttgcatacttggaagagattatcggcagtgaggcggccggtcggctggtggaggcaatggctccgtgcaatctgtttataccccgttgcgagacggccttgtatgagttgcgaaaccgtaaaatccgcagtcagtttgaccggcagacggcaggcggtacccctgcttatgaggccgttaacgatttggccttggcacaccgcctaagcgaccgccatgtgtggcgaattttaaagcaggcggataaggaagcggagcaggagaatttgttttag

SEQ ID NO: 55593 - DNA, 987 bp, Neisseria meningitidis; identical to SEQ ID NO: 40869

SEQ ID NO: 55594 - DNA, 2292 bp, Neisseria meningitidis
atgcttgcacccgaattggaacagattttgcagcagctttaccgcgaggcgcgtaaggctcattatgaatttatcagcctcgagcatctgcttttggtactcatcgaagaagatgcctccgtgccgaacgtcttaaaactctgcggcgcggatttgaaagtggtgtccgaacagctcgccgccagcgttgccgaaaacacccccctgattcccgaacaccttttagacacggtcgaaacacggcccacgctcggcttccaacgcgtgatgcaacgggcgatggtgcatacccagtctgccggaaaagccgcagtcgaaccgttggacgttttggtcgcgctgatgagcgaaaccgacagccacaccgtctatttcctcaagctgcaatcggttacgcgttttgaagttttgcgctgtattgcccacggctctcccgatgaagatgaagacgatggcaactattcttcagacggcatggacgacgataatgaaaaccgcaccaaaccgggcaaaaaccctttatcggcgtacaccgtcaacctcaacgccgaagtcaaagccggccgtatcgaccctttgattggtcgcaaacacgaaatggaacggctggtgcaaatcctatgccgccgccgcaaaaacaatccgcttttggtcggcgaagcgggcgtgggcaaaaccgcgctggcggaaggtttggcacatcaaatcgtcaacggcggcattccagacgcgctcaaagatgccgaagtgtacgcgctggatatgggctcgctgttggcgggcacgaaataccgcggcgactttgaagcgcgggtcaaatccgtcttgaaacagctcgaaaaaatcccgcacgccattttgtttatcgacgaaatccacaccatcatcggcgcaggcagcaccagcggcggcaccatggacgcgtccaacctgctcaaacccgcgctggcaaaaggttcgctgcgctgcatcggcgcgaccacttacgacgaataccgcaccattttcgacaaagaccacgccttaagccgccgcttccaaaaaatcgacgtggtcgaacccaccgtttccgaaaccgtacaaatcctgcgcggcttgaagccgatgtttgaagccttccaccaagtccgctatacgcaaggcgcactcgaagccgccgccgaactctccgcacgctacatcaacgagcgtttcctgcccgacaaagccatcgacgtgatggacgaagcaggcgcggcgcaacggattctgcccaaatccaaacagaaaaaagtcatcggcaaagcacaaattgaaaccgtcatcgccaaagttgcgcggattcccgaaaaaaccgtgtcgcacgacgacaaacaagtgctgcaattcctcggtcgcgatttgaaaaacatggtttacggtcaagaaaacgccatcgacgcgctggttgccgccgtcaaaatgtcgcgttccggccttgccctgcccgacaaaccgataggcagcttcctcttctccggcccgaccggcgtgggcaaaaccgaagccgccaaacagcttgcctactcgctgggcgtaccgctgcaacgctttgatatgtccgaatacatggaacgccatgccgtatcgcgcctcatcggcgcgccaccgggctacgtcggctttgaacaaggcggccttttgaccgaagccgtcaacaaacagccgcattgcgtattgctcttggacgaaatcgaaaaagcccaccccgacattttcaacgtcctcctgcaagtcatggacgcaggcaaactgaccgacaacaacggcaagagtgccgatttccgcaacgtcatcctgattatgaccaccaacgcaggcgcggaaagcctcagccgccccagcctcggctttaccgccaagcgcgaacgcggcgacgaaatgcaggcaatcaacaagctcttcacgcccgagttccgcaaccgcttggacgcgattatcccgtttgcacccttgtccgaacccatcatcgtcaaagtcgtggacaaattcctgctccagctcgaacaccagctcctcgacaaaaaagtcgaagccgaattcacgtcggcattgcacaaatatctggcggaaaaaggtttcgacccgcaaatgggcgcgcgcccgatgcaccgcctgattcaggaaaaaatccgcaaaccgctcgccgacgaactcctgttcggcaaactatccgacggcggcttcgtgcggatagactgggatgcggcaaaagaagaagccgtgttgaagtttaagaaaagcaaggtcaaaataaaaaccgcctccgcataa

SEQ ID NO: 55595 - DNA, 435 bp, Neisseria meningitidis
gtgaaatatgaatttaccctgccttcgagcagcggtgcggattttcattcggcagaacatctgcctttggtcgtgtatttttatccgaaagacagtacgccgggctgtacgacggaaggcttggatttcaatgcgcgtttggaacagtttgaggcattgggttataccgtggtcggtatttcccgcgacggcgtaaaggcgcatcagaatttttgcgccaagcagggtttccggttcgagctgttgagcgacaaggatgaaacagtgtgccgcctgtttgatgtcatcaaattgaagaaactgtacgggaaagagtcgttaggtatcgagcgcagtacgttcgtcttgaataaggatggagaaatcgcccatgaatggcggaaagtcaaagtggcgggtcatgcacaggaagtgttggaaacgctttcccgataa

SEQ ID NO: 55596 - DNA, 1662 bp, Neisseria meningitidis
atgacagaatccatcacccgcgacagtatgcaatacgatgtcgtgattgtcggcgcaggcccatcgggtttgtccgccgccatcaaactcaagcagcttgccgaacaaaatgggcgcgaaatcagcgtttgcgtggtggagaaaggttcggaggcgggtgcacattcgctggcgggcgcggttatcgatccgattgcgctgaatgagttgattcccgactggaaagaaaaaggcgcgccgctgacgcgtacggtaacgcaggacaaagtgttgttcctgactgagaaaaaagcgttcaatctgcctattaccccaaatttcgacaatcacggcaactacatcgtcagcttgggcgaagtcgtgcgctggttggcggagcaggcggaaaatttgggcgtggaaatttatccgggctttgccgccgccgaagtgctgtatcacgaagacggttcggtcaaaggcattgcaaccggcaatatgggcattggcaaagacggcgagccgaccgacagtttccagcccggcatggagctttgggcgcagcaaactctgtttgccgaaggttgtcgcggttcgctttccaaacaagtcatcgaacgtttccaactcgaccaaaacagccagccgcaaacttacggcttgggcatcaaagaaatttgggaagtgccgtctgaaaaacatcagcccggcttggtggtgcacagcgcgggctggccgctggacagcaaaacctacggcggcgcgtttgtttaccatttcgatgacaacaaagtcgccgtcggtttcgtggtcggtttggactatcaaaacccttatctgtcgccgtttgaagagttccaacgtttcaaaacccatcccgaaatccgcaaaacctttgaaggcggccgccgcatcgcttacggcgcgcgttcgctgattgaaggcggtttgcaaagtttgccgaagctctcgttcaaaggcggcgttttaatcggcgacgcggcaggcttcctcaatatgccgcgcatcaaaggcattcataccgcgatgaaatccgccatgctcgccgcagaagccgtgttccccttgttggaaaaccttgaagaagtggaaaacttcgacagcggcaaagaggcggcggattatcagcaacgttttgaacaaagctggctgtatcaagagctttacgccgcgcgcaatgtccgtccgtcattcaaatggggcgtttacctcggctcaatctacaccggcatcgatcagatgattttcagaggcaaagccccgtggaccttgaaacatcacggcaaagacaacgagcagctcaaaaaagccgccgcgtgcaagccgattgattatccgaaacccgacggcgtgttgaccttcgaccgcttgagcagcgtcttccttgccaatctcgcgcacgaagaaaaccagcccgaccatttggtgctgaacaatccgcaaacgatgatagacgtgaactacaaagaatacgcctcgcccgaaacgcgctattgtccggccggcgtgtacgaaattgttgaagaaaacggcaatccgcgcctgcaaatcaacgcggcaaactgcgtgcactgcaaaacctgcgatatcaaagacccgacgcaaaacatcacttggatttgccccgaaggcgcgagcgggccgaattacggcgggatgtga

SEQ ID NO: 55597 - DNA, 411 bp, Neisseria meningitidis
gtgaaactgctggcgaataactggcaaccgattgccatcatcgcgcttgtcggcacgctcttggcggtgtcgcaccatcaaggctacaagtcggcttttgcgaagcagcaggcggtcattgacaagatggaaaaagacaaagcgcaagccctgctgttgtcggctcaaaactacgcccgcgagctggaacaggcgcgtgcggaagctaaaaaatatgaagtcaaggcgcacgctgtcggcatggctttggcgaaaaaacaggcggaagtcagccgtctgaaaacggaaaataaaaaggaaatcgaaaatgtccttactcaagaccgtaaaaatgcaggcggcggttgtattgacggctttggccatcacggcttgcagctctacaagcgcgccctcggctacggaaattaa

SEQ ID NO: 55598 - DNA, 198 bp, Neisseria meningitidis
atgagcgacccgattttggaagccttggcgcgtattgaaaacaagactgatcaaacgctgaaaaatcagaaagaaatgcaggcggaaattgcgcaaatccgccaagacacgaaacgcacggccattacattcggcgcactgggcggcggcgtgattacggtcggctgggaattgcttaaagcgaaaatgggactgtaa

SEQ ID NO: 55599 - DNA, 708 bp, Neisseria meningitidis
atggaaaaaatgagttttgaaatttaccgttacaacccggatgttgatgccaagccttatatgcagcgttacgagttggaattggaaccgaccgacgtgaaacttttggatgctttggtacgcctgaaagcacaagacgataccttgtctttccgccgctcctgccgcgaagggatttgcggttctgacggtatgaacatcaacggcaaaaacggcttggcgtgtttgaccgatctgcgtggcttgaaacagccggttaaaattcgtcctctgccaggtctgcctgttatccgcgacctgattgtggatatgacccagttcttcaaacaataccattccgtcaaaccttatgttgtcaacgataatccgattgatgcggacaaagagcgtctgcaaactcaggaagagcgtaaagagttggacggtttgtacgagtgtattttgtgcgcctgctgttcgactgcctgcccgtcattttggtggaaccctgataaattcgtcggtccgtccggtttgctgaatgcttaccgtttcattgcggacagccgtgataccatcactaatgagcgtttggataatctgaacgacccataccgtttgttccgttgccacaccattatgaactgcgtagacgtatgtcctaaacacttgaatccgacccgagccatcggtaagattaaagagattatgttgaaacgggccgtttaa

SEQ ID NO: 55600 - DNA, 375 bp, Neisseria meningitidis; identical to SEQ ID NO: 42749

SEQ ID NO: 55601 - DNA, 687 bp, Neisseria meningitidis
atgtttgatttcggtttgggcgagctggtttttgtcggcattatcgccctgattgtcctcggccccgaacgcctgcccgaggccgcccgcaccgccggacggctcatcggcaggctgcaacgctttgtcggcagcgtcaaacaggaatttgacactcaaatcgaactggaagaactaaggaaggcaaagcaggaatttgaagctgccgctgctcaggttcgagacagcctcaaagaaaccggtacggatatggagggtaatctgcacgacatttccgacggtctgaagccttgggaaaaactgcccgaacagcgcacgcctgctgatttcggtgtcgatgaaaacggcaatccctttcccgatgcggcaaacaccctattagacggcatttccgacgttatgccgtccgaacgttcctacgcttccgccgaaacccttggggacagcgggcaaaccggcagtacagccgaacccgcggaaaccgaccaagaccgcgcatggcgggaatacctgactgcttctgccgccgcacccgtcgtacagaccgtcgaagtcagctatatcgatactgctgttgaaacgcctgttccgcacaccacttccctgcgcaaacaggcaataagccgcaaacgcggtttgcgtccgaaacaccgcgccaaacctaaattgcgcgtccgtaaatcataa

SEQ ID NO: 55602 - DNA, 1104 bp, Neisseria meningitidis
atggaagccgaagtaatcaaccagctcaacaataccctgaatgatttggaaaagcgcagcgaagacatccgcgtttatatggattatcagggcaagaaagaccgattggaagaagttgtcggtctttccgaagaccccgaactttggaacgacccgaaacgcgcccaagaaatcggcaaagagcgcaaaatcctcgaaggcatcgtgttgacgctcgacaacatcgcgacgggcatcgaagacaaccgcatgctgattgaaatgaccgtcgaagaaaacgacgaagaaggttttgccgccgtgcaggaagatgtggcggggctggaaaaacagatggcggatttggagttcaaacggatgttcaaccagcccgccgacccgaacaactgctttatcgacatcaccgcaggcgcgggcggtacggaagcggaagactgggcgggtatgctgttccgtatgtacagccgctacgccgagcgcaaaggcttcaaaatcgaaatcctcgaagaagacgacggcgaaatcgcgggcatcaaccgcgcgactatccgagtggaaggcgaatacgcctatggtttgctgcgtaccgaaaccggcgttcaccgcttggtgcgctattcaccgtttgactcgaacaacaaacgccatacttcgtttgcctccgtgttcgtttaccctgaaatcgatgattccattgaaatcgaaatcaaccccgccgatttgcgtatcgacacctatcgcgcatcgggcgcgggcggtcagcacatcaacaaaaccgactccgccgtgcgtattacccacgagccgacggggattgtggtgcaatgtcaaaacgaccgttcgcaacacgccaacaaagcggccgcgatggaaatgttgaaatccaaactgtatgaattggaaatgcgcaaacgcaacgaagagaaacaggcgttggaagaaggtaaatccgatgtaggttggggcagccaaatccgttcgtatgttttggattcctcacgtatcaaagacttgcgtacaggctacgaagtcggcaacaccaaagccgtattggatggcgatttggacggctttatcgaagccagcctgaaacagggcgtgtag

SEQ ID NO: 55603 - DNA, 270 bp, Neisseria meningitidis; identical to SEQ ID NO: 36672

SEQ ID NO: 55604 - DNA, 756 bp, Neisseria meningitidis
atggggcgtttacttttgggcagtatccgcatgagcatcattgtcgaaaacctgaccgtcagctaccgccgccgccccgccgtgcaccatgtggacattacttttgaagaacatagtatgtgggcggttttcggtcccaacggcgcagggaaatctacctttcttaaatccttgatgggattgcagcccatcgacactggcagcatccggctggacggattgacccgtcagaacattgcctaccttccccagcaatccgacatcgaccgctcgcagcctatgaccgttttcgacttggcggcaatggggctgtggtatgaaatcggttttttcagaggaataaatgccgttcaaaaacaacgcgttcacgaatctttggaacgcgtcgggatgcggcagtttgccggccgccaaattgcccacctttccaacggacaattccagcgtgtcctttttgcccgaatgctggttcaaaacgccaaattcctacttctggacgaacctttcaacgctgttgatgcacggacaacctacgagcttctcgacgtgttgcaaaaatgccattgcggcggacacgctatcattgccgttttgcacgattacgaacaagtccgtgcctactttcccaataccctgctgctcgcccgagaaaaaattgcggcaggcgcaaccgagaccattctgacagaaccctacctcgcccaagccaacgccaaaatgcagcaacaggaaagccccgagtggtgcgcgtcataa

SEQ ID NO: 55605 - DNA, 1344 bp, Neisseria meningitidis
atgaaccaaaaccatactattttacaaaacctccccgtcggtcaaaaagtcggcatcgctttctccggcggtcttgatacctctgccgcgctgttgtggatgaaactcaaaggcgcactgccttacgcctacaccgccaacctcggccagcccgacgaagacgactacaatgccattcccaaaaaagcaatggaatacggtgcggaaaacgcccgcctgatcgactgccgcgcgcagttggcacacgaaggcatcgccgccatccaatgcggcgcgttccacgtttccaccggcggcatcgcctatttcaacaccacgcctctgggtcgcgccgtaaccggcacgatgcttgtttccgccatgaaagaagacgatgtgaatatttggggcgacggcagcacctacaaaggcaacgacatcgagcgtttctaccgctacggtttgctcaccaatcccgcgctgaaaatctacaaaccctggctcgatcagcaatttatcgacgaactcggcggccgtcacgaaatgagcgaatttctgattgccaacggcttcaactacaaaatgtcggtggaaaaagcctactccaccgattccaatatgttgggtgccacccacgaagccaaagacttggaatttttgaactcgggcatcaaaatcgtcaaacccattatgggcgttgccttttgggacgaaaacgtcgaagtcagccccgaagaagtcagcgtgcgctttgaagaaggcgtgccggttgcactgaacggcaaagaatacgccgatcccgtcgaactcttcctcgaagccaaccgcatcggcggccgccacggcttgggcatgagcgaccaaatcgaaaaccgcatcatcgaagccaaatcgcgcggcatctacgaagccccgggcatggcattgttccacatcgcctacgaacgcttggttaccggcatccacaacgaggacaccatcgaacaataccgcatcaacggcctgcgcctcggccgcctgctctaccaaggccgctggttcgacagccaagcactcatgttgcgcgaaaccgcccaacgctgggtcgccaaagccattaccggcgaagtaaccctcgaattgcgtcgcggcaacgactactcgattctgaacaccgaatcgcccaacctgacctaccaacccgaacgcctgagtatggaaaaagtcgaagacgcagcgttcacaccgctcgaccgtatcggacaactgactatgcgcaacctcgacatcaccgacacccgcgccaaactgggcatctactcgcaaagcggtttattggcattgggcgaaggctcggtattgccgcagttgggcaataagcaataa

SEQ ID NO: 55606 - DNA, 1260 bp, Neisseria meningitidis; identical to SEQ ID NO: 45570

SEQ ID NO: 55607 - DNA, 1335 bp, Neisseria meningitidis
gtgggcgaacctgaaaacaaatcatccgaacccgtacgcgagatacaggcatcaaaagaaatgccgtctgaaacctcttccccacgcaaagaaaacgaaacagaagtacacattcctgccgctccttttatcgtcaaacagtccggcagcaacgctttggcagtctgcgccctggtattggcggcattgggtttgggtacaagtggttttttgtttgtccaaggacagaatgtcttgaaaaaccaagagttggcattcaaccaaaaaatcgacaaagccgctttgggcgagtcggaaaacgccgccctgctcaaagacaacctcaaccgccaaagtgccatacagtccgaactcgaccgtttggacagcggtgtcaaagccaacggcgaacagattctgatgacgcaaaaagcctatcgcgagctgaccaaagggcgtgccgattggctggtggacgaaaccgagaccatactcaatctggcggcgcaacagctggtgttgaccggcaatatccaaacggcagtcggcgtgttggagcatatcgacagccgcctgtcccgtttcaatcaggcagagcttctgccgatcaaacaggcagtcagcagcgacttggcggaactgaaaaaccgtccctatgtcgatatttccggcacggcattgcgcctcgacaggctggaaaccgccgtatccggactgccgctgattttggacggcgtattgaaaccgggcgtacaggcacgcaacgaagccgtttccgcttcatggtggcagaacgtatgggaaaaatccctcggcacattgaaggggctggtcgaaatccgccgtttggaaaacaacgatgccatgctgctttcaccggaacaggcatattttgtgcgtgaaaacctgcgcctccgccttttggatgcgcgcattgcattaatgcagcgcaacggcgaagtctatcagggcgatttgaacaatgccgaagccgccgtcagacagtatttcgatgccaagtctcccgccacgcagtcgtggctgaaagaactggcggaattgaaggcgttggatgtgcgcatgacggcggatgacggtttgaaaaacagcctaaatgccgtccgcgcctatcgcgacggtacgcgcatgacggcggcggaaaatcaagaagcggaacaggcggcttccgaaccggcaaacgaaaacacagcttccgaaccggctgccgcatcggatgtgaagaccatagaagcaccgtccctgccttcggaacgcaaaccggaacagcctgcaaaaaaacagtccgtgccggaaaaggcagggcgttcgccgtccgctaaaggagaacgcgcatga

SEQ ID NO: 55608 - DNA, 1302 bp, Neisseria meningitidis
atgaccgaatccgtccgcctccccgtcgcccgtctcaaaccttccactgtcgccctgcccggctccaaaagcatcagcaaccgcaccctgctgcttgccgccttgtccgacaatgcttgcgaaatccattccctgctcaaatccgacgataccgaccgtatgctcgaagcactcgataaactcggcgttcaaatcgaatatcttgccgaagaccgtctgaaagtgcacggcacaggcggacgcttccccaaccgcactgccgatttgtttttgggcaacgcgggcacggcgttccgcccgctgaccgccgcgcttgccgttttgggcggcgattatcgcctgcacggcgttgcgcgtatgcacgaacgccccatcggcgatttggccgatgcactgcggattgccggcgccgatgtcgaatatctcggcaaggaacactatccgccgcttcatatcggcgaacgccaagacaacggcgagcgcgtgattccgattaaaggcaatgtgtccagccagtttctgaccgcccttttaatggcgttgccgctgaccgggcaggcgtttgaaatccgtatggtcggcgagttaatttccaagccctatatcgacattactttaaaactgatggcgcaattcggcgtacaggttatcaatgaaggctaccgcgtcttcaaaattcccgccgatgcgcactaccacgcgcccgaacacttgcacgtcgaaggcgatgcctccagcgcgtcctacttcctcgcagccggtttgattgccgccacgcccgtccgcgttaccggtatcggcgcaaacagcatacagggcgatgtcgcctttgcctgcgagctggaaaaaatcggtgcggacgtggtttggggcgaaaacttcgtcgaagtctcgcgcccgaaagaacgtgccgtccaagcctttgatttggatgcaaaccatatccccgatgccgccatgaccctcgccgtcgtcgcgcttgctacagggcaaacctgcacgcttcgcaacatcggttcgtggcgcgtcaaagagaccgaccgcattgccgcaatggcgaacgagttgcgcaaactcggtgcaaaagtcgccgaagaagccgaagcaattcacatcaccccgcccgaaacgccgacacccgacgccgtcatcgacacttacgacgaccaccgcatggcgatgtgtttctcgctggtttcgctgttggacgtacccgtcgtcatcaacgatccgaaatgcacccacaaaaccttcccgacttatttcgacgtgttctcatcgctgaccgaaacagcggaataa

SEQ ID NO: 55609 - DNA, 1344 bp, Neisseria meningitidis; identical to SEQ ID NO: 55565

SEQ ID NO: 55610 - DNA, 441 bp, Neisseria meningitidis
gtggcatccaccgccaccgacatcaaaggcaaatatgttcaaagcgttgaagtcaaaaacggcgtcgttaccgccacaatggcttcaagcaacgtaaacaacgaaatcaaaggcaaaaaactctccctgtgggccaagcgtcaagccggttcggtaaaatggttctgcggacagccggttacgcgcgccaacaccgccaccgacgccgccatcaccgccgacaccgacaccaacggcaagatcgacaccaagcacctaccgtcaacctgccgcgatgcgtcatctgccgtttgcacaaaaacaccacgcgccgatttcaaacactttcaaaaaatcagccgttaccgagtattacctgaatcacggcaaatggcagaaaaacttcgtcattcccgcgcaggcgggaatctaggtttgtcggtgcggaaacttatcgggtaa

SEQ ID NO: 55611 - DNA, 1011 bp, Neisseria meningitidis
atgaacgacaatacacacacccttcccccgcgccacctgtccgtcgctcccatgctcgactggacggacaggcactaccgttatatggcgcgccagattacccgaaatgcttggttgtacagcgaaatggtcaacgccggcgcgattgtttacggcgacaaagaccgctttttgatgttcaatgaaggcgagcagcccgtcgccctgcaactgggcggcagcgatccgtccgatttggcgaaagccgccaaagccgccgaagcatacggctacaacgaggtcaacctcaactgcggctgtcccagtccgcgcgtccagaaaggttcgttcggcgcgtgtctgatgaacgaagtcgggctggttgccgactgcctcaacgccatgcaggacgcggtcggcattaccgttaccgtcaaacatcgcatcggtgtggacaggcagaccgaataccaaaccgttgccgatttcgtcggcacgctgcgcgacaaaaccgcctgcaaaacctttatcgtccacgcccgcaacgcttggctggacggtctttcacccaaagaaaaccgcgacgttccgcccttgaaatacgattatgtttaccgcctcaagcaggagtttcccgggctggaaatcatcatcaacggcggcatcaccaccaacgaagcaatcgccggacacctgcaacacgttgacggcgtgatggtcgggcgcgaggcgtaccacaacccgatggtgatgcgcgaatgggacagattgttttacggcgacactgcgaacccgatcggatacgccgatttggtgcaacgcctctacacatacagccaagcccaaatccaagccggacgcggcacaatcctgcgccatatcgtccgccacagcctcgggctgatgcacggcttgaaaggcgcgcggacttggcggcgtatgctttccgacgcaacgctcttgaaagacaacgacggcagcctgattctcgaagcgtggaaagaagtcgaacgggcaaatatgcgcgaatag

SEQ ID NO: 55612 - DNA, 966 bp, Neisseria meningitidis; identical to SEQ ID NO: 42751

SEQ ID NO: 55613 - DNA, 486 bp, Neisseria meningitidis; identical to SEQ ID NO: 41484

SEQ ID NO: 55614 - DNA, 792 bp, Neisseria meningitidis
atggcaagacatccctaccgccgcctccgtcctgcaaaatccggctttcccgaagtcggcatttccgaagaaggcaatatccgttcgcttcacttgggcagcgacaccgttcaaagctcgatgaacctcgaccacccgtccgagctggtactctcttacagccgtgccatgatgggatggctgctgtttaccgacgcgcttccgcaacatatcacccaaatcggcttgggcggcggctcgtttgcgcgctggatagataactacctgcctgatacgcgtcaaactgccgtagatatcaacccgcaggttatcgccattgcccgcaacctgtttgagttgcctttcgagagtgagaaatttgaaattattgaagcggatggtgcagagtacatcaaagtcttccgccacaacactgatatcatcttggtggacggattcgacggcgaacaaatcatcgatacgctggttgaagaaccgttcttccgagactgccgaaacgcactctcttcagacggcatattcgtaaccaactggtggagcggcgacaaacgctaccaacgcttcatcgaacggttgttgagcgtttttgaagggcgcgtcttggaacttcctgccgaaagccacggcaatgtcgcggtaatggccttccaaagcagccccaaagagcaaaacatagacaaactcaagaaacgcgccgacaaactgagcaacgcatacggattggacttccaccgcatgctcgccggcctgaaagcatccaaccccaacaacggcaagcatttctacctttaa

SEQ ID NO: 55615 - DNA, 933 bp, Neisseria meningitidis; identical to SEQ ID NO: 38763

SEQ ID NO: 55616 - DNA, 846 bp, Neisseria meningitidis
atgaaaatagccaatgcattaattcacaatacagtccgtattgaatgcctttcagcagacggccaatctatatcaacgggaacggcattcttattccttttcgatttcgacaaaacaggggtaattccagttcttgtaacaaataaacatgttgtttttgtagagtccgcaaaaaaaatagctattactttgacaaaagatgaaaatggctctccaaatcataaagaaaatataacttttacaattgaagattttatacaaaattgtttacctcatcctgatgaaaatattgatctatgcattgctcctgttggacatttttttaatcagctgattaatcataatttctcgccttttataaaaggaataagagaatctgatattatgcaaactgaagaaatggatcaattatcagctttcgaagaagtttttatgataggctatcctaatggcttatgggactcaaaaaacaacttaccaatatttagaacaggaattactgctacccatccagctattgattttgaagggaaaaaagaatttatgattgatgttgcctgtttccctggttcaagcggttctccggtgttcaaatatatacctgctgggttaagaaaaatagaaaacgatgggtttgcaattacagcagatgaaacatttaaattaatgggaatcctatatgctggacctcagcaaacaatatcaggggaaatttatataacaactgttaataaaccaatttctgtatcttctattcctattaatttaggttttgtcataaaggcagaaaaacttttagactttaaaccaattttaaagaattttttggaaaaaaatagagaatga

SEQ ID NO: 55617 - DNA, 1407 bp, Neisseria meningitidis
atgaaactgttccaacgcatcttcgccacattttgcgcggttatcgtctgtgcaatctttgtggcgagtttttctttctggctggtgcagaacacccttgccgaaaaccagttcaaccaacgccgcaccatcgaaaccactttgatgggcagcatcatttccgcattccgggcacgcggggacgcgggtgcgcgcgaaatcctgacggaatggaaagacagccccgtctcatcgggcgtgtacgttatacagggcgacgagaaaaaagatatcctgaaccggtatatcgacagctataccatcgaacgcgcccggcttttcgccgccggacacccgcattccaacctcgtccatatcgaatacgaccgcttcggcgaagaatacctgttcttcaccaaagactgggacaaactccaagcccgccgcctgcccagccccctgttgatccccggcctgccgctcgccccgatttggcacgaactcatcatattgtccttcatcatcgtcgtcggactgctgatggcgtacatcctcgccggcaacattgccaaacccatcagaatcttaggcaacggcatggacagggtggcaaacggagaacttgaaacccgcatctcccaacaggtcgacgaccgcgacgacgaattgtcccatcttgccatccaattcgacaaaatggcggaaaaactcgaaaaactcgttgccaaagaacgccacctgctccatcacgtctcccatgaaatgcgttctccccttgcgcgcatgcaggcaattgtcggactgattcaggcgcagccccaaaaacaggagcaatatctcaaacggctggaaggcgaactgacccgcatggatacgctggccggggaactgttaaccctgtcccgtctcgaaacttccaatatggctttggaaaaagaaagcctgaaactcctgcccttcctgggcaacctggtagaagacaatcaaagcattgcccagaaaaacggacaaacggttaccctgtctgccgacggaaaaatccccgaaaatacaaccatccttgccaacgaaagctacctgtaccgcgccttcgacaacgtcatccgcaacgccgtcaactacagtcccgaaggcagcaccatcctgatcaacatcggacaagaccacaaacactggataatcgacgttaccgacaacggccccggcgtggacgaaatgcagctcccgcacatcttcaccgctttctaccgtgcagactccagtgcgaacaaacccggaacaggactggggcttgcattgacccaacatattattgaacagcactgcggaaaaatcatcgccgaaaacatcaaaccgaacggtctgcggatgcgcttcatcctgcccaagaaaaaaaccggttccaaaacagaaaaaagtgcgaactga

SEQ ID NO: 55618 - DNA, 270 bp, Neisseria meningitidis; identical to SEQ ID NO: 37651

SEQ ID NO: 55619 - DNA, 456 bp, Neisseria meningitidis; identical to SEQ ID NO: 45576

SEQ ID NO: 55620 - DNA, 957 bp, Neisseria meningitidis
atgaaagtcctctttatcgccgacccgatggcaagtttcaaaacctacaaagacaccacctacgccatgatgcgcgagatggcaaaacgcggttggcggctgtttcataccttgagcggggaattgtcggttaaaaacggtctggtggttgctgatgcgtctgcttttgagtttctcggcgcacaagacgaccacgacaaaaactggtttgccgccgccgacaaagttcagacggcattgaaagcatttgatgccgtgattatgcgtaccgatccgccgttcgatatgcaatacctctacgccacccaattactgacgctggcggaacagcagggcgcgaaagtctttaacagcggacagtcgatgcgtgacttcaatgaaaaactggcgattttgaacttcagccgctttaccgcgcccacgctggtaacgacccgttccgccgatgtccgcgcatttttgaaagaacacggcgacattatcatcaaaccgctggacggtatgggcggtatgggtattttccgcctgaccgaaaaagaccccaacatcggcagcatcctcgaaaccctgatgcggcttgattcccgcaccattatggcgcaacgctacattcccgaaatcgtacacggtgacaaacgcatcctgattatcggcggcgaagtcgtcccctatgctttggcgcgtatcccgcaaaacggcgaaacacgcggcaaccttgcggcaggcgggcgcggcgtggcgcaggaattggacagacgcgaccgcgaaattgccgaaacgctcgcccccgaactcaaacggcgcggcatcctgctggccggtttggacgttatcggcagcaacctgaccgaagtcaacgtaaccagcccgaccggattccaagaaattatgaaacaaaaaggtttcgacgtggcggcaatgtttgccgatgccgttgccgcgtggtcggtacgttaa

SEQ ID NO: 55621 - DNA, 267 bp, Neisseria meningitidis
atggcacgcatggtattctgcgtcaagctcaacaaagaagccgaaggcatgaaatttccgccgcttcccaacgaattgggcaagcgcatttttgaaaacgtatcgcaagaagcgtgggcggcgtggacgcgccaccaaaccatgctgattaacgaaaaccgcttaagccttgccgatccgcgcgcgcgcgaatacctggctcagcagatggagcagtatttcttcggcgacggcgcggatgccgttcagggatacgttccgcaataa

SEQ ID NO: 55622 - DNA, 2064 bp, Neisseria meningitidis
atgatgatccaaacccttttaatcgaactccttaccgaagaactcccgcccaaagccctgaataatttaggcaaccattttgccgccgccgttgccgaaggcttggaaaaagcgcaactggttgacggtgcagccgaatttacggcttatgcctcgccgcgccgtttggcggttcaagtcaaaaacgtcaaagccgttcaggcagatcaaaaaatcgtgaaaaaaggccctgccgtggcgaatgccatgaaagacggtgcgccgaccaaggctttggaaggtttcgcacgcggtgcaggggcaaaaatcgaagacttgaccatcgtccacgacggcaaacaggatgtgtacgcctacgaatacgtccaaaccggcaaaccgttgggcgagcttttggaagacattatcaatcaagccgttaagaaactgccgattccgaaagtgatgcgttggggcagcagcacgtttactttcgtgcgccccgttcacgggctgattgtgctgcacggcggcgacatcgtaaacgtcagcgttttgggtctgcaaagcggcaacaaaaccttgggacaccgcttcttgtccaacggcgaaatcaccattgaaaacgccgacagctacgccgaacaaatgcgcgagcaaggcaaagtggaagcttcgtttgccgagcgcaaagccgcgattcagacggcactggaagggcaggcacgccgtctgaacgcgactgttgccgccgatgaagcattgttggacgaagtaaccgcgctggtcgaatggcctgttgttttggaagccggttttgaggaacacttcctcgccgtgccgcaagaatgcctgattctgacgatgcagcaaaaccaaaaatactttccgctgctcgaccaaaacggcaagctgatgaaccgcttcctgctggtctccaacctgcaaaccgaagatccgtcgcacatcatccgaggcaacgaacgcgtcttgcgtgcgcgcctgtctgatgccgagttcttctacaaacaagaccaaaaagcgactttggaaagccgcctgccgaaattgtccagcgtggtttaccacaacaaaattggttcgcaagccgagcgtatcgaacgcctgcaaagcatcgccgcccatatcgccaaagcattgggcgcggatgccgccgccgccgaacgcgccgcgcgtcttgccaaagccgacttggttaccgaaatggtcggcgagttccccgaactgcaaggcacgatgggcaaatactatgcccgtttggacggcgaaaccgaagaaatcgccgaagctgtcgagcagcactatcagccgcgttttgccggcgacaagctgcccgaaagcaaagtcgccactgccgttgcacttgccgacaagctggaaaccttggtcggcatttggggcatcggtctgattccgaccggcgacaaagacccctacgccctgcgccgcgccgccttgggtattttgcggatgctgatgcagtacggtttggacgtgaacgaactgattcagacggcattcgacagcttccccaaaggtttgctcaacgaaaaaacgccgtctgaaactgccgactttatgcaggcgcgccttgccgtgttgctgcaaaacgattatccgcaagacatcgttgccgccgtactcgccaaacagccgcgccgtttggacgacgtagtggcgaaactgcaagccgttgccgcgttcaaacaactgcccgaagccgccgcgctcgccgccgccaacaaacgcgtgcaaaatctgctgaaaaaagccgatgccgagttgggcgcggttaacgaaagcctgctgcaacaggacgaagaaaaagccctctttgccgccgcacaaggcttgcagccgaaaattgccgccgccgttgccgaaggcaatttccaaaccgccttgtccgaactggcttccgtcaaaccgcaagtcgatgccttcttcgacggcgtgatggtgatggcggaagatgccgccgtaaaacaaaaccgcctgaacctgctgaaccgcttggcagagcaaatgaacgcggtagccgacatcgcgcttttgggcgagtaa

SEQ ID NO: 55623 - DNA, 681 bp, Neisseria meningitidis
atgacttacaccatcgtccctatcgccaccgcccgatcgccctacaaacagaaattcggcatcgcccgccagcccggtttggtctctgccgcagaagtatgcatcgagctgaatcccgaatttaccgcagacagcgtacgcggactggaacacttcgactatgtgtggataagttttatttttcacggcgtattggatgaaggctgggcacaaatggtgcgcccgccacggctcggcggcaaacaaaaaatgggcgtattcgccacgcgcagcccccaccgccccaaccatctcggactctcgctcctgaaactcgaacgcatcgaaaccggcaaacccgtccgcctctattgcagcggcgcagacctgctggacggcacgccgattgtggacatcaagccttatatcccctttgtcgaatccaaacccgatgccgcatctggtttcgtcagcggcaaacccgtagagttggaagtcgtttggcaggaaaacatcggcgcggaaaatttatctgcaaacaccaaaaaccttatcagccaaagcattgcccaagatccgcgccccgcctatcagaatattcccgaacggatttatgtgatgaatattgcagattacgaagtcagatttcaaatcgaggaaaaccgtgcaaccgttattgatctttccccaaccccgctttaa

SEQ ID NO: 55624 - DNA, 1893 bp, Neisseria meningitidis
atgcctatccttaccatccgtgaagtgtgcaacattaatcattggggcataggttattatgatgttgacgattccggcgaaatcatcgtctgccccaatccctcgcaacacaatcaaactgtttcactgcaaaaactgactgaagccgtgcaacaaaaacatcaggcgcgcctgcctgttttgttttgttttccgcaaatcctcgaacaccgcctccgcgacattaaccgcgcctttcagacggcacgggaagagtgcggctataagggcggttattgtttggtttaccctatcaaggtcaaccaacaccgccgcgtcatcgaatcgcttatgtcaagcggacaaccgcatggtttggaagctggttctaaagccgaactgatggcggttttggcacacgccggcacccggcaaacattaatcgtctgcaacggctataaagaccgtgaatatatccgtttcgccttgatgggcgaaaaactggggcatcaggtttatttggtgattgagaagctgtccgaaatacaaatggtattggaagaggcggaaaaactcggcatcaagccccgtttgggtgtgcgcgccagactggcttcccaaggttcgggaaaatggcagtcttcgggtggggaaaaatcaaaattcggcttgtcggcttcccaagttttgcaactggtcgatattttgaaacaaaaaaacaggctggattgcctgcagcttttgcatttccatttgggctcgcagcttgggaacatccgtgatgttgccacaggtgtacacgaatcggctcggttttatgttgagttgcacaaactgggggtaaatatccgctgttttgatgtaggcggcgggcttggcgtggattacgaaggaaaccgcacacaatcggattgttccgttaattacagcctcaacgaatatgccgccacagtcgtatggggcatcagtcaggcttgtctcgaacacgggctgccgcatccgacaatcatcaccgagagcgggcgcggcattaccgcacatcacgccgttttggttgctaatgttataggcgttgagcgttacaaaccgcgccggctggatgcgccatcgcccgaagcgccgcgtgtgttgcacagtatgtgggaaacttggacggatatttccgcctcgcgggaaaaacgttccttacgcagctggatacacgaagggcagtttgatcttgccgatgtgcataatcagtataatgtcgggctgttgagtttggcgcaacgtgcgtgggcggagcaactgtatttaaatatctgtcatgaagtcggcgaattgtttaatgaaaaacaccggtctcaccgaaccattattgacgaattgcaagaacgttttgccgataagctgtatgtcaatttctcactcttccaatctttgcccgatgcttggggcatagatcaacttttccctgtttgtcccattaccggtttgaatgaaccgattgcgcgccgcgccgtgttgttggacattacctgcgattcagacggtacgattgatcactacatcgacggagacggcatcgccggtacgatgcctatgcctgattatcccgaagaagagccgccgcttttaggcttttttatggtgggagcatatcaggaaatactcggcaatatgcacaatcttttcggcgacactgccactgccgatgttgttgtaggggaagacggacaatttaccgtcatcgattacgatgaaggaaacaccgttgccgatatgctcgaatacgtttatcaagatccgaaagagctgatgaaacgctatcgcgaacaaatcgaacattcagaccttcctgcctcgcaggctatgtctttcttaaaagaactcgaagcggggcttaatggttatacctatttggaagacgaatag

SEQ ID NO: 55625 - DNA, 561 bp, Neisseria meningitidis
atgagctatcaagacatcttgcggggcctgttgccccccgtgtcgtatgcccgcaatgccccgcgtgtgcgggcgcaggcagaaatagacggcgcagcgctggatgcggtggcggaatcggctcaaagcgttgccgatgccgtcgacccgcgcagcgccggccaaatgctggccgattgggagcgcgtattaggtttggacggtacgggcaaaaaccgccagcgccgtgtgttggccgtcatggccaagctaaacgaaacaggcggcttgagtattccttattttgtgcgtttggccgaggcggcgggctatcaaatccaaatcgacgaaccgcagccgttccgcgccggtgtaaaccgcgccggcgaccgtcttgcgccgcaggaaatcatgtgggtgtggcacgttaacgtgcgcggcggcaacaaccgcattacccgattccgcgccggtatctcggcggcgggcgacaggctgaccgattacagcgatgccgtgatcgagagcctgttcaaccgcctcaagcccgcccacaccgctatccgatttacctaccgataa

SEQ ID NO: 55626 - DNA, 951 bp, Neisseria meningitidis
atgaccaaacaggaaaagcaagaagaccgcgaaaaaaaatataaaattatttctttatttagcggttgtggcggaatggatttgggttttctggggggctttgagtttttaaaccgtacttatgacaaacatgattttgatattatttgggcgaacgaaatcgacgaacacgctgttagaacctaccgccacaacttaggaaatcacattgtacatggtgatatttggcagcatttggatgaaatacccactagcgcagacatcattatcggtggctttccttgtcaggatatttctattaatggtaaaggtgcaggtatttcaggcagccgcagcgggctgtataaagccatgttgtctgctgttgaacgcgttcgccccaaaatatttgttgctgaaaatgtcaaagggctactgatgaagcatcatcggaaagatttggaaacagtgctttcagattttcgcaatttgggttatcaggtagattactacttgctgaatgcagccgattacggtgttccacagactcgggagcgagttattatcgttggaaggctacctgaaattcccgaaatacagattgaaaaaacaaataccagcaacagctatgtaacagccagacaggctataggcgatttggtcgacaaagtagaagacgaaattgccaaccatatttggagtagagcagaaaaaagccccgatcaaggtagtcgaaaattggatgccgaaagggcgggctacactattagggcagaatgccatggaaacatacagtggcattacgaattaccccgccgcatctccatgcgtgaggcggcgcgcatccaatcgtttcccgacaattttattttccaggcaaaattgcgtgccacagaacggcaaattggcaacgccgtccctcctgttttagggtggcacatcgccgccgctgtcagtaaggcacttaaataa

SEQ ID NO: 55627 - DNA, 1380 bp, Neisseria meningitidis
atgtttgctttcaaatccttactcgatatgccgcgcggtgaggcacttgccgtcgtcgtcgctctgattgccgcgatgggctataccatcatttcattggagtggctgccgcatatgtccattattgccgccatcgtcgtgctgattttgtacggcttggcgcgcggtttgaaatacaacgatatgcagcagggcatgataggcgcgttgaatcagggtatgggcgcgatttacctgtttttcttcatcgggctgatggtcagcgcgctgatgatgagcggtgcgattccgacgctgatgtattacggtttcgggctgatttccccgacttatttttatttttccgctttcgcgctgtgttccgtcatcggcgtgtccatcggcagcagcctgaccacctgcgccaccgtcggcgttgcctttatggggatggcggcggcgtttcatgccgatatggcgatgacggcgggcgcgattgtttcgggcgcattttttggcgacaaaatgtccccgctttccgacaccacgggcatttccgcgtccatcgtcggcatcgacttgtttgagcacatcaaaaatatgatgtacaccaccatccccgcgtggctcattagtgcggcactgatgctttggcttttgccgaatgtcgccgcgcaggatttgaacggcgtcgaatccttccgcagccagcttgaagccacgggattggtgcacggctattcgctgattccgtttgcactgttggtcgttttggcattgatgcgcgtcaatgccgtggtcgccatgctctttaccgtcattgccgccgttgccgtaacgtatctgcacagcacgcccgatctgcgtcagctcggcgcgtggttttacggcggttacaaactcgaaggcgaagcgtttaaagatgttgccaaactgatttcgcgcggcggtttggaaagtatgtttttcacgcaaaccatcgtgattctcgggatgagtttgggtggactgctgtttgcgctgggcgcgattccttccctgctggatgccgtccgcagctttttgacgaatgccggacgcgcgacgttcagtgttgccatgacttcggtcggggtcaatttcctgattggcgaacaatatttgagcatcctgctttcgggagaaacgttcaaacccgtttacgacaggctcggactacattcccgcaacctctcgcgtacgctcgaagacgcgggtacggtcatcaacccgcttgttccgtggagcgtgtgcggcgtatttatcagccacgcgctgggtgtgccggtgtgggaatatctgccgtatgcctttttctgctatttgagtttggcactgacgcttctgttcggctggacggggctgactttgagcaaaaaataa

SEQ ID NO: 55628 - DNA, 729 bp, Neisseria meningitidis; identical to SEQ ID NO: 39174

SEQ ID NO: 55629 - DNA, 1599 bp, Neisseria meningitidis
atgagtatcgtagaaatcaaagtccccgatatcggcggtcacgaaaacgtcgacatcatcgccgtagaagttaaagcgggcgacaccatcgccgttgacgacaccctgattacactggaaaccgacaaagccacgatggatgtgcctgccgatgctgccggtgtcgtgaaagaagtaaaagtcaaagtcggcgacaaaatctccgaaggcggcgtaattttgaccgttgaaaccggtgcctccgccgccgaagccgctccggctgttgccgctgaagcacaacctgcacctgccgccgcacccgttgccgcaggcggtgcaaccgttcaagtagccgttcccgatatcggcggtcataccgatgtggatgtaatcgccgttgaaatcaaagtgggcgacaccgttgccgaagacgacacgctgattactttggaaaccgacaaagcgacaatggacgtaccttgtaccgctgccggcgtcgttaaagccgtattcttaaaagtcggcgacaaagtgtccgaaggctctgccattatcgaagtggaaaccgccggctctgtcgcagcagctcctgctcaagccgctcaagctgccgcaccggctccgactgctgccgccgcacccgccgccgcgcctgcaccttctgcacctgccgctgccaaaatcgacgaggccgctttcgccaaagcacacgccggcccttccgcacgcaaactggcgcgcgaattgggcgtggatttgggccaagtcaaaggtaccggcttgaaaggccgtatcgtgggcgacgacatcaaagcctttgtgaaatccgtaatgcagggtggcgcggcaaaacctgccgcagccggcgcatctttgggcagcggtctggacttgctgccgtggcctaaagtggacttctccaaattcggcaatgtcgaagttaaagaattgtcccgcattaagaaaatctccggtcaaaacctgtctcgcaactgggtggtgattccccacgttaccgtacacgaagaagcagatatgaccgagctggaagaattccgcaaacaactgaacaaagaatgggaacgcgaaggcgtgaaactgtctcctctggcgttcatcatcaaagcctccgtttccgcgctgaaagccttccccgaattcaacgcttctctggacggcgacaacctgatgctgaaaaactacttcaacatcggtttcgcagccgatacgccgaacggcttggttgttcccgtcatcaaagacgtggatcaaaaaggcttgaaacaaatcagccaagagctgacagaattgtccaaaaaagcccgcgaaggcaagctcaaaccacaagaaatgcaaggcgcatgctttaccatttccagcttgggcggcatcggcggcacaggcttcacgccgattgtgaacgctcccgaagtcgccatcttgggcgtgtgcaaatcccaaatcaaaccggtttggaacggcaaagagtttgccccgcgcctgatgtgcccgttgagcctgtccttcgaccaccgcgtcatcgacggtgcggccggtatgcgcttcaccgtattcttggcgaagctgttgaaagacttccgccgcattaccttataa

SEQ ID NO: 55630 - DNA, 540 bp, Neisseria meningitidis; identical to SEQ ID NO: 55229

SEQ ID NO: 55631 - DNA, 1233 bp, Neisseria meningitidis
atggctaaaaacggaggattttctttgttcgcaaagaaagaaaaacgctttatctttgaaggcaggcattccgcctccgacaaactggtcaacggcgaagtatccgcgtttaccgaagaagaggcgcgcaaaaaactggcaaaacgcggcatccgcccgttgcagattacccgtgtgaaaacaagctccaagcgcaaaatcacacaagaagacatcaccgttttcacccgccagctgtccacgatgattaaagcgggcctgccgctgatgcaggcatttgaaatcgtggcgcgcggacacggcaacccgtctatgacggaaatgctgatggaaatccgaggcgaagtggaacagggcagctcgttgagccgcgcattctcaaaccacccgaaatatttcgaccgcttctactgcaacctggttgcggcgggcgaaacgggcggcgtattggaaagcctgctggacaaattggcaatttacaaagaaaaaacccaggccatccgcaaaaaggtaaaaaccgcgctgacctatccggtatccgtcatcgccgtcgccatcggtttggtattcgtgatgatgattttcgtactgcccgcctttaaagaagtttacgccaatatgggcgcggagcttcccgcactgacccaaacagtgatggatatgtccgactttttcgtctcatacggctggatggtgctgatcgcactgggctttgccatatacggcttccttaaattgaaggcgcgttcgattaaaatccaacggcgtatggatgccatactgctgcgtatgccgattttcggagacattgtccgcaaagggacgattgcccgctggggcaggacgacggcgacgctgattgcggcaggcgtgcctttggtcgatgtattggactccactgccggcgcggcgggcaatttaatctatgaagaagccacccgggaaatccgtacgcgcgtcatccaaggtttgtctatgacttcggggatgcgtgcgacggaactgttccccaatatgatgttgcagatgtcttccatcggcgaggaatcgggttctttggacgatatgctcaacaaagccgccgaattttacgaagacgaggtggacaatgcggtcggcaggctgtccgctatgatggagccgatcattatcgtgattttaggcttggtcatcggcacgcttctggtcgccatgtatctgccgctgtttaatttgggcaacgtggtcgcctga

SEQ ID NO: 55632 - DNA, 789 bp, Neisseria meningitidis
atgaatccgcaggacaaatgctggcaggttcaccgccatcttgccgaacatgccgaccaacggctgacactcgtccgcaacgcgcccaaacatatcctgcttgccggggcggatgcggacatcagccgcagcctgctggcgaaacgatatccgcaggcggtatttgaagaatacgattcccgtgcggattttttggcggctgccgcagccgtgcgcaagggcggtttttggcaaaggtttacgggtaagggcgtggtgcaacactgccaatccccgaccgcgccgctgcccgaagcgtgtgccgatatgttgtggtcgaatctcggactgttggcggcggaacaaatccttcctgtgctgcacaactgggcgcgcgcgctggagacggacgggctgctgttttttacctgcttcgggcgcgacacttttaccgaactgaaatgccgtctgaaagaaaacggcattgaaagccgcagcgtgatgtttcccgatatgcacgacttgggcgatatgcttgctgaaaacgggttttacgaccccgttaccgatacggcgaagctggtgttggattacaaaaaggcggaaacgttttgggcggatatggacacgctgggcgtttggcgggcgatgtcgtggaacgatgaaaacgccgcgcgttcgtgtgtcgggacaatatttgaacgggaaggcggtttgagtattacgctggaaacagtgtacggacacgccgttaaaaaactgatgctgccgcaaggggagaacgtggtgcagttttttccgaagagatga

SEQ ID NO: 55633 - DNA, 729 bp, Neisseria meningitidis
atgaccaaacagctgaaattaagcgcattattcgttgcattgctcgcttccggcactgctgttgcgggcgaggcgtccgttcagggttacaccgtaagcggccagtcgaacgaaatcgtacgcaacaactatggcgaatgctggaaaaacgcctactttgataaagcaagccaaggtcgcgtagaatgcggcgatgcggttgctgcccccgaacccgagccagaacccgaacccgcacccgcgcctgtcgtcgttgtggagcaggctccgcaatatgttgatgaaaccatttccctgtctgccaaaaccctgttcggtttcgataaggattcattgcgcgccgaagctcaagacaacctgaaagtattggcgcaacgcctgagtcgaaccaatatccaatctgtccgcgtcgaaggccataccgactttatgggttctgacaaatacaatcaggccctgtccgaacgccgcgcatacgtagtggcaaacaacctggtcagcaacggcgtacctgtttctagaatttctgctgtcggcttgggcgaatctcaagcgcaaatgactcaagtttgtgaagccgaagttgccaaactgggtgcgaaagtctctaaagccaaaaaacgtgaggctctgattgcatgtatcgaacctgaccgccgtgtggatgtgaaaatccgtagcatcgtaacccgtcaggttgtgccggcacacaatcatcaccaacactaa

SEQ ID NO: 55634 - DNA, 1467 bp, Neisseria meningitidis; identical to SEQ ID NO: 43542

SEQ ID NO: 55635 - DNA, 1434 bp, Neisseria meningitidis
atgtctcaatatgatgtagtagtgattggtgcaggcccgggcggatacgttgccgccatccgtgccgcacaactgggtttcaaaactgcctgtgtcgatgcaggcgttaacaaagcaggcaatgcccctgcattgggcggtacttgcttgaacgtaggttgtatcccttctaaagccctgttgcaatccagcgaacatttccacgctgcgcaacacgattttgccgaacacggtatcactgtcggtgacgtaaaattcgacgcggccaaaatgattgagcgcaaagatgccatcgtgaccaaactgaccggcggcgtgaaattcctgttccaaaaaaataaagtaaccagtctgttcggtacggcttcctttgccggtaaaaatggcgatgcttaccaaatcgaagtcgataacaaaggagagaaaaccgttatcgaagccaaacacgtcatcgtagcgaccggttccgtaccgcgtccgctgccacaagtcgctatcgacaatgtgaacgtattggacaacgaaggcgcattgaacctgaccgaagtacctgccaaactcggcgtgatcggttccggtgtgattggtttggaaatgggttccgtatggaaccgcgtgggtgcggaagttaccattcttgaagccgcgccgaccttcctggctgccgccgaccaacaaatcgccaaagaagccttcaaatacttcaccaaagagcaaggtctgagcatcgaattgggcgtgaaaatcggcgacatcaagtctgaaggcaaaggtgtttccgttgcttacgaaactgctgccggcgaagccaaaaccgaagtattcgacaaactgatcgttgccatcggccgtattccaaacaccaaaggcctgaacgcggaagccgtaggcttggaaaaagacgagcgcggctttatcaaagtagatggcggatgccgtaccaacctgcctaacgtatgggcaatcggcgacgtggttcgcggcccgatgttggcacacaaagccagcgacgaaggcgttgccgttgccgaacgcattgccggtcaaaaaccgcatatcgacttcaacaacgtaccgttcgtgatttacaccgatcctgaaatcgcttgggtgggtaaaaccgaagagcagctcaaagccgaaggcgtggagtacaaaaaaggtacttcaggttttggtgcgaatggtcgcgcattggcaatgggcaaagccaaaggtacggttaaagtattggcagatgccaaaaccgaccgcatcttgggcgtacacatgattggcccggttgtcagcgaattggttaccgaaggcgtgactgcgctcgaattcttcgccagcagcgaagacatcgcccgcattatccatgcccacccaaccttgtccgaagtggttcacgaagctgcattggcggccgacaaacgcgctttgcacggttga

SEQ ID NO: 55636 - DNA, 834 bp, Neisseria meningitidis
atgccgcacgccctcgtcctccaatttccctccgccgaagtcctgccttccgacttcccctcacgcctgcccgaacctgattgcgccgatgaaaagcgtatgcgttttatcgttgaagaagggttttctttaagcgaaaaagacgcggcgttgcttggcagccgtcaaatcgaccacgccgtgttgccggatatggatttcggcgaactcggtttgattgtcagcgatatggattcgacgctgattaccatcgaatgcgtcgatgaaattgcggcaggcgtgggtttaaaagacaaagtagcggaaattaccgagcgttcgatgcgcggcgaactcgatttcgaacagtctttacgcagccgcgtcgcgctgttggcgggattggacgaacgggttttggcggatgtttatgaaaacattttgaagctctcgcccggtgcggaatttttgttggacgaatgcaaaaggcacgatgtgaaattcctgctggtgtcgggcggcttcacgttttttaccgaaaggctgcaacaacgcctcggcttcgaataccagcacgccaatgttttggaaattgaaaacggcaggctgaccggccgtctgaaaggtagaatcatcgacgcgcaggcaaaggcagatttattgctcgaataccgcagccgcctcggattgcagccacatcaggtgttggcgatgggcgacggtgcgaacgatattctgatgctcaaagaaacgggcataggcgtggcttaccgtgccaaaccgaaagtgcgggcagccgccgatgtctgtatcaacttcggcggtttggagcgtgtacgcggcctgttcaggtag

SEQ ID NO: 55637 - DNA, 2790 bp, Neisseria meningitidis
atgtccaacagacctacactcctcctcgttgacggctcgtcctacctctaccgcgcgtatcacgcgatggcgcagttgaccgcgcccgatggtgcgccgacgggcgcgatgtatggcgtgttgaacatgctgcgccggttgcgggcggattatgtgcatgattattgcgcggtggtgtttgatgcgaagggcaagaatttccgccacgagatgttccccgactacaaggcgacgcgcccgccaatgccggacgatttgcgtcctcaagcggaagccttgccggatttggtgcggttgataggctggccggtgctggtgattccgcaagtcgaagcggatgacgtgattggcacgctggcggcaatggcaggcgaagcaggttggaatgtggtggtgtccaccggcgataaggacatggcgcagttggtgaacgaacgcgtaacgctggtgaacacgatgagcggcgaaacgctggacattgaaggtgtgaaggcgaaattcggcgtgcgccccgaccaaatccgcgattatctcgcgctgatgggcgacaaggtggacaacgtgccgggcgtggaaaagtgcggcccgaaaacggcagtgaaatggctggaagcctacggctcgctggcgggcgtgatggaacacgcggcggaaatcaagggcaaagtgggcgagaatctgcgtgccgccctgcagcgcctgccgctgtcgtatgatttggtgacgattaaaaccgatgtggacttgcacaccgaactttcagacggcatcgaaagcctgcgccgtaccgcgccgaaatgggcgcaactggttgtcgatttcaaacgctggggcttccgcacctggctgaaagaagcggaaagtcgtatgcacgaagcggcggacggtgatttgttcggcagcgacagcatcggcgagcaggcggctttgaatgcggaggtgccgtctgaaaaacaacccgaacttgccccgacccccgaaaaactggattatcaagccgttaccaccgaagcgcagcttgccgccttgttggacaaactgtcgcaggcggacacaatcggcatcgatacggaaaccacgtcattagacgcgatgaacgcctcgttagtcggcatcagcatcgcgttccaagcaggcgaagcgatttacatccccgtagggcacagcctgaccgctgcacccgaacagattgatttgcaagacgtattaggccgtctgaaaccgcatttggaaaaccccgccctgaaaaaaatcgggcaaaacctcaaatacgaccaacacgttttcgccaactacggcattgccttaaacggcattgccggcgacgcgatgcttgcttcctacatcatcgaaagccacctcggacacggcttggacgaattgtccgaacgctggctgggcttggaaaccattacctacgaatcgctgtgcggcaaaggcgcgaagcaaatcagttttgccgatgtcgccatcggacaggcgaccgaatacgccgcccaagacgccgatttcgccctgcgcctcgaagcgcatctgcgtgcgcaaatggacgccaaacagcttgaaatgtatgaaaaaatggagctgcccgtcgcgcaggtattgtttgaaatggaacgcaacggcgtgcaaattgatcgcgccgaactctcccgccaaagcgcggaactcggcgcagagctgatgaagctcgaacaagaagcctatgccgtcgcaggccagccgtttaacctcaactcgcccaaacagctccaagaaatcctgttcgacaaaatgggcattcccaccaaaggcctgaaaaaaaccgccaaaggcggcatttccaccaacgaagccgtgctcgaacagctcgcacccgactaccccctgcccaaaatcatcctgcaaaaccgcagcctggcgaagctcaaatccacctacaccgacaaactgcccgaaatgatttcccccaaagacggccgcgtgcataccacctacgcccaagccgtcgccattaccggccgtctcgccagcaacaaccccaacctgcaaaacatccccatccgcaccgccgaaggccgccgcgtgcgccgcgcctttaccgcaccgcaaggcagcgtcatcgtttccgccgactattcccaaatcgagctgcgcatcatggcgcacctctccggcgacaaaaccctgattaccgcgttccaaaacggcgaagacgtacaccgccgcaccgccgccgaagtgttcggcattgcccccgaaaacgtctcgtccgaacaacgccgctacgccaaaaccatcaacttcggtctcatttacggcatgggccaatacggcctcgccaaatcattgggtatcgacaacatctccgccaaaaccttcatcgaccgctacttcgcccgctatcccggcgtcgccgaatacatgcagcgcaccaaagaacaagcagcagcgcaaggcttcgtcgaaactctgttcggccgccgcctctacctgcccgacatccgcaacaaaaacgccaacgcccgcgccggagccgaacgcgccgccatcaacgcccccatgcaaggcaccgcctccgacctcatcaaacgcgccatgatagacgtgcgaaactgtctttcagacggcatcggcagcaaactggtcatgcaggtgcatgacgaactggtgctggaagtcgttgaaaccgaactggattttgtcaaagaaaaactgccgcagattatggcgaaagtggacggcggattattggatgtaccgctggtggctgaggttggcgtaggggagaattgggaagaggcacattga

SEQ ID NO: 55638 - DNA, 1128 bp, Neisseria meningitidis; identical to SEQ ID NO: 36955

SEQ ID NO: 55639 - DNA, 924 bp, Neisseria meningitidis
atgcaatacagcacactggcaggacaaaccgacaactccctcgtttccaataatttcgggtttttgcgcctgccgcttaattttatgccgtatgaaagtcatgccgattgggttattaccggtgtgccttatgatatggcggtttcagggcgttccggcgcgcgtttcggtcctgaagccatccggcgcgcctccgtcaacctcgcttgggagcaccgcaggtttccatggacatttgatgtgcgcgaacgcctgaacattattgattgcggcgacttggttttttcttttggcgacagcagggattttgtcgaaaaaatggaagtgcacgccggcaaattactttcttccggcaaacgctgtttgagtttgggcggcgaccatttcattaccctcccgttgttgcgcgcccacgcccgctatttcggcaaactcgcactgattcattttgacgcgcacaccgacacctacgacaacggcagcgaatacgaccacggtacgatgttctataccgcccccaaggaaggcctcatcgacccgtcccgttccgtacaaatcggcatacgcaccgaacacagtaaaaaattgccttttactgtgttgtccgcccccaaagtcaatgaagacagtgttgaagagaccgtccgtaaaatcaaagaaaccgtcggcaatatgcccgtttacctgactttcgacatagactgcctcgacccgtcgttcgcccccgggaccggtacgcccgtatgcggcggcttgagcagcgacagggcattaaaaatcctacgtgggctgacggatctcgacatcgtcggtatggatgttgtagaagttgccccctcttacgaccaatccgacattaccgctttggccggtgccacaattgccttggaaatgctttaccttcaaggtgcgaaaaaggactga

SEQ ID NO: 55640 - DNA, 237 bp, Neisseria meningitidis; identical to SEQ ID NO: 37642

SEQ ID NO: 55641 - DNA, 705 bp, Neisseria meningitidis; identical to SEQ ID NO: 42711

SEQ ID NO: 55642 - DNA, 345 bp, Neisseria meningitidis; identical to SEQ ID NO: 39608

SEQ ID NO: 55643 - DNA, 678 bp, Neisseria meningitidis; identical to SEQ ID NO: 47619

SEQ ID NO: 55644 - DNA, 213 bp, Neisseria meningitidis
atgccccatatccacccgctccacctgttcccgccccatatcgccgaacgcggactgctctattttcagcagggcaaagttggtgctgtccaaaaaacttccaccgggcgttatcgggcggaggtatgcggtttggaaaactattgggtatggctgaagctggatagtgatttgtatattaaagacgaaagctgcgattgcccttatgtctaa

SEQ ID NO: 55645 - DNA, 1923 bp, Neisseria meningitidis
atgattgaaatcaaaaacctcaccctgcaacgcggtttgaaagtcctgctcgacaaagccaacgctaccgtcaatcccggtcagcgcgtcggtttgatcggcaaaaacgggacgggcaaatcgagcctgtttgccttaatcaagggtgaaatcactcaggacggcggcgatgtctcgattccgaaaaactggcggctcgcttccgtttcccaagaaacgcccgatttggatatttccgctttagattacgttttgcagggcgatgccgagttacagacccttcagacggcattgaggcaggcggaagcgcaaaacgacggcatgaaacaggcggaatatcatgccaaattggaagaaatcgacgcttataccgcgccggcccgcgcggcaaaattgttgaacgggctgggtttttcgcaagaagaacacagccgccccgtcaaatccttttccggcggctggcgtatgcgcttgaatcttgcgcaagccctgatttgccgcgccgatttgctgcttttggacgaaccgaccaaccacttggatttggaaaccgtcttgtggctggaaaaccaccttgcctctttaccctgcacgcaaatcatcatttcccacgaccgcgatttcctcaatgcggcaaccacccaaaccatcgaattgtcccagcaaaagctcacgcaatacggcggcaattacgatttttaccaaaacgaacgcgcgcagcgtctcgcgcagcaacaagccgcctatgtcaaacagcaggcgcaaatcaaacatctgcaatcctttatcgaccgcttcaaagccaaagccaccaaagccgttcaggcgcaaagccgcatgaaggctttggcaaagctcgaacgcatcgctcccgcgcatttggacagcgagttttcctttgagttttacaatcccgagcatctgcccaatcctttgctgaagctggaacacgcagatttgggttacgaaggcaaaactgttttgcacgacattaccctgtcgctggaaagcggcgcgcgctatggtttattgggtgtcaacggcagcggtaaatctacatttatcaaagccttggcgggcaaaatcgatttgctctctggcagcatcgtccgttccgaaaaactcaatatcggctattttgcccaacaccaactcgataccatccgcgccgaccaaaaccctgtttggcatattcagcagctttctcccgaagtacgcgaacaagaaatccgaaatttcctcggcggcttcaattttgttggcgatatggcgttacagaaaaccgaacctttttccggcggagaaaaagcccgccttgcccttgccatgattatctggcaaaagccgaacctgttgctgcttgacgaaccgaccaaccatttggacttggatatgcgccacgccttaacgctcgcgttgcaaagtttccaaggcgccttaatcatcgtatcgcacgaccgcagcctgcttgaagcgactaccgacagcttcctcctgatcgacaaaggccgtctgaagaacttcgacggcgatttgaacgattaccgccaatggcgtttggcacaggaaaacgccgccgccgcacccgcagcatccgcacaaagccaaagccgcaaagacaccaagcgcatcgaagcgcaaatccgtcaggaaaaagcccgacgcggcaagccgatacagcagaaaatagaccgtgccgaaaaagaaatggcgcagctttccgaaattcagacggcatgtgaagcatttttagcacaagaagacgcttaccttgaagcaaacaaagaaaaattgcaaaataccttatcccagctggcaaaagtcaaaacacaacttgcccaaatcgaagaggtttggctggcttgtcaagaagaattggaacggattgaaactgaaatcgagaaacagtttgccgagcgataa

SEQ ID NO: 55646 - DNA, 1674 bp, Neisseria meningitidis
atgcttctaacactttctttgcgtgattttgtcattgttgaaaatctgaatctggattttcaaagcggctttaccgtattgaccggagaaaccggtgcgggcaagtccattactttggatgcgattggtctgctgttgggcgataaagccgattacagccaagtccgcagcggcgcaaaagaagcgcagttgtcggcgttgtttgatatttcccatttacctgttttaaaagcagaattgtatgaacaggggcttttaaacgacggagaagaagaactcagtatccgccgcattatcgatgccaaaggcaaaaaccgcagctttatcaacaatcaggccgctaccttggcgcaactcaaagccgtcggcagccagcttatcgacatccacgggcaaaacgcccatcattcgcttaatcaggaagccgcccagcgcgaattgttggacgcatttgcgggcagcagggcgcaggcggaaaccgtcaggcagctttatcaaaactgggcaaactcaaaaaaagcattgcaggaagcgcaggaacaggcagaaaacattgcactcgaacaagagcgtctggaatggcagtttaacgaattgaatcagttggacattaaacaaggcgaatgggaagccctcagccaaagccacgacagccttgcccattctgccgagctgttgcaggctgccgaagaagtcggaagcaagattgacggcgacaacggcatccaacgccatatctatcaatgtcaaaaactattggccaatctgcaaaacatcgagccgcgctttgccgagagcctgaatatgttggcaagcatcgaggccgaattgggcgaaatcagtgccaatatgcgcgatgtggcaggtcgcagcgacatcaaccccaatgaattggcggcacaggaacagcgtatgggcgaactgatggggatggcgcggaaataccggatcgagcctgaagagttgcctgccaagttggcagaaatcgaagaacgcctgcaaagcctgcaagctgccgccgatttggacgcgctcgagcataatgttgcccacaattttgccgaatatcaggaagctgcccacatcctttctgccatgcgccatcaggcggcagagcgtttgagcggcgaaacgaccgagcatatgcaacaccttgccatgaaaggtgcacgtttcgacatcgtcctgttgccctcgtcgccgacggcacacggtttggagcaggttcaatttcaagttgccgccaacaaaggcaatccgccccgtccgctgaataaagttgcctccggcggcgaattggcgcgtatcagccttgccttacaggttgttgccagccaatatacccaagttcccaccctgatttttgatgaggtcgataccggtattggagggggagtggctgaaatggtcggcaaggcattacgtgcgttgggcagaaaacatcaggtgcttgccgttacccatcttccgcaagtcgcatcctgcggcgaaaaccactggcgggtgcgcaagcacagcgagggagagcaaaccgtcagcgaaatcagtatattggatgaaatccaacgggtcgaagaggttgcccgtatgttgggcggagaagtcattaccgatacgacgcggcaacatgcggcagaattgctgcaacttgcgtcgaaaaatagtttattttaa

SEQ ID NO: 55647 - DNA, 627 bp, Neisseria meningitidis
atggctgatatgaaacgcttgaaacacttgatgttttcaccctttatcgacaacaacccgattgccttgcaggttttgggtatttgttcggctttggcggttaccaccaaacttcagacggccatcgtgatgggtatttccgtagctttggtaaccggtttttccagcttcttcatttcgctggtacgcaactacatccccaacagcatccgtattatcgtgcaaatggcgattatcgcgtcgctggttacgctggtcgaccaactcttgcaggcatttgcctacgaattgtccaaacagctttccgtattcgtcggtctgattattaccaactgtatcgtgatgggccgcgccgaagcatttgcgatgaaagagccgccgctggaaagcctgatcgacggcatcggcaacggcgcgggctacgggatgatgctgcttgtcgtcgccaccgtccgcgaactgattggctcgggcaaactcttgggctacaccgttttccaaaccgtgcaggacggcggctggtatcagaccaacggcttgttcctgctcgcccccagcgcgttcttcatcatcggctttttgatttggggactgcgtacctggaaacccgaacaggcggaggaataa

SEQ ID NO: 55648 - DNA, 999 bp, Neisseria meningitidis
atgaaaaaatccctgattgccctgactttggcagcccttcctgttgcagcaatggctgacgttaccctgtacggcaccatcaaagccggcgtagaaacttcccgctccgtagctcacaatggagctcaggcggctagcgttgaaaccggtaccggcatcgttgatttgggttcgaaaatcggcttcaaaggccaagaagacctcggtaacggtctgaaagccatttggcaggttgagcaaaaggcatctatcgtcggtactgactccggttggggcaaccgccaatccttcatcggtttgaaaggcggcttcggtaaattgcgcgtcggccgtttgaacagcgtcctgaaagacaccggcgacatcaatccttgggatagcaaaagcgactatttgggtgtaaacaaaattgccgaacccgaagcacgcctcatttccgtacgctacgattctcccgaatttgccggcctcagcggcagcgtacaatacgcgcttaacgacaatgcaggcagacataacagcgaatcttaccacgccggcttcaactacaaaaacggtggcttcttcgtgcaatatggcggtgcctataaaagacatcatcaagtacaagaggacttgaatattgagaaataccagattcaccgtttggtcagcggttacgacaatgatgccctgtacgcttccgtagccgtacagcaacaagatgcgaaattggctttgccaaacgacaattcgcacaactctcaaaccgaagttgccgctaccttggcataccgcttcggcaacgtaacgccccgcgtttcttacgcccacggcttcaaaggctcgtttgatgatgcagacttaagcaacgattacgaccaagtggttgtcggtgcggaatacgacttctccaaacgcacttctgccttggtttctgccggttggttgcaagaaggcaaaggcgaaaacaaattcgtatcgactgccggcggtgtcggtctgcgccacaaattctaa

SEQ ID NO: 55649 - DNA, 303 bp, Neisseria meningitidis; identical to SEQ ID NO: 54163

SEQ ID NO: 55650 - DNA, 726 bp, Neisseria meningitidis
atgcgtattccgctgcttgcccctgacaattatgcctttcccgatcctgcctatgctttggcacggtgcgacgggctggtcggcgtgagcagggatttggacgcggggcggctgctcgaggcgtatcagaacggcgtgtttccttggtttttgcgggacggttggtttttttggtatgcggtcgggccgcgtgcggtgattgttcccgaacgtctgcacgttccgtgctcgctggcgaaaacgctacgcaacggcagctatcgggttgcagtcaacggctgttttgcggaagtggtcgcgcattgtgcggcagcggcgcgcccgaatcaggacggaacttggattgcgcccgagtttcagacggcatatttgaagctacacgaaatggggtacgcgcattctttcgagtgccattatcccgatgaaaacggtaaaacgaggttggcgggcggcttttacggcgtgcaaatcggcagggtgttttacggcgaatcgatgttcgcattacaaccggatgcgtcgaaaatcgcttttgcctgcgccgtgccgtttttggcggatttgggcgtggaactgatagactgccagcaggatacggaacatatgcgccgtttcggttcggagctgctgccgtttgcggattttgccgaacgtctgcggatgttgaacgccgtgccgttgaaagaggaaatcgggcggcgcgaagtggcgtgcaaggggctttga

SEQ ID NO: 55651 - DNA, 324 bp, Neisseria meningitidis
atgatgaccgaaagcgagtttatccgcgcgagcgaagcattatttgaacacatcgaagaccaaatcgacgaaaacggctgggatttcgactgccggtttgccggaaacgtcctgaccatcgaagccgaaaacggcacgcaaatcatcgtcaaccgccacacgcccaaccaagaattatggattgccgccaaaagcggtggctaccatttcgccgaacaaaacggcaaatggctggcaacgcgcgacggacgggatttttacgacgttttaaacgaagccctgagcgcggcttcgggcgaagcggtagagattgaggaattgtga

SEQ ID NO: 55652 - DNA, 177 bp, Neisseria meningitidis
atgaaaagtcgacgtttttttaaagccttattgttgattgccgcgctggtcggcgcgttttatgccggaatgcagacgcaggcgtatctttatgaagatttatgtttagacttgggtggcggcaaaaatccggggagttacccgatttgcgtgattgggaaagtctctgcacgttaa

SEQ ID NO: 55653 - DNA, 606 bp, Neisseria meningitidis; identical to SEQ ID NO: 51371

SEQ ID NO: 55654 - DNA, 2376 bp, Neisseria meningitidis
atgaaaccattacaaatgctccctatcgccgcgctggtcggcagtattttcggcaatccggtcttggcagcagatgaagctgcaactgaaaccacacccgttaaggcagagataaaagcagtgcgcgttaaaggtcagcgcaatgcgcctgcggctgtggaacgcgtcaaccttaaccgtatcaaacaagaaatgatacgcgacaataaagacttggtgcgctattccaccgatgtcggcttgagcgacagcggccgccatcaaaaaggctttgctgttcgcggcgtggaaggcaaccgtgtcggcgtgagcatagacggtgtaaacctgcctgattctgaagaaaactcgctgtacgcccgttatggcaacttcaacagctcgcgtttgtctatcgaccccgaactcgtgcgcaacatcgaaatcgtgaagggcgcagactctttcaataccggcagtggtgcattgggcggcggtgtgaattaccaaacgctgcaaggccgtgatttgctgttggacgacaggcaattcggcgtgatgatgaaaaacggttacagcacgcgtaaccgtgaatggacaaatactctcggtttcggtgtgagtaacgaccgcgtggatgctgctttgctgtattcgcaacgtcgcggtcatgaaaccgaaagcgcgggaaaccgaggctatgctgtggaaggggaaggcagtggcgcgaatatccgtggttcggcacgcggtatccctgattcgtccaaacacaaataccacagctttttgggtaagattgcttaccaaattaacgataaccaccgcatcggcgcatcgcttaacggccagcagggacataattacacggttgaagagtcttataacctgaccgcttcttcctggcgcgaagccgatgacgtaaacagacggcgcaatgccaacctcttttacgaatggatgcctgattcaaattggttgtcgtctttgaaggcggacttcgattatcagaaaaccaaagtggcggcggttaacaacaaaggctcgttcccgatggattattccacctggacgcgcaactataatcagaaggatttggacgaaatatacaaccgcagcatggacacccgattcaaacgttttactttgcgtttggacagccatccgttgcaactcgggggggggcgacaccgcctgtcgtttaaaactttcgtcagccgccgtgattttgaaaacctaaaccgcgacgattattacttcagcggccgtgttgttcgaaccaccagcagtatccagcatccggtgaaaaccaccaactacggtttctcactgtctgaccaaattcaatggaacgacgtgttcagtagccgcgcaggtatccgttacgaccacaccaaaatgacgcctcaggaattgaatgccgagtgtcatgcttgtgacaaaacaccacctgcagccaacacttataaaggctggagcggttttgtcggcttggcggcgcaactgaatcaggcttggcatgtcggttacgacattacttccggctaccgcgtccccaatgcgtccgaagtgtatttcacctacaaccacggttcgggtaattggctgcctaatcccaacctgaaagccgagcgcagcaccacccacaccctgtctctgcaaggccgcagcgaaaaaggcatgctggatgccaacctgtatcaaagcaattaccgcaatttcctgtctgaagagcagaagctgaccaccagcggcactcccggctgtactgaggaaaatgcttactacggtatatgcagcgacccctacaaagaaaaactggattggcagatgaaaaatatcgacaaggccagaatccgcggtatcgagctgacaggccgtctgaatgtggacaaagtagcgtcttttgttcctgagggttggaaactgttcggctcgctgggttatgcgaaaagcaaactgtcgggcgacaacagcctgctgtccacacagccgctgaaagtgattgccggtatcgactatgaaagtccgagcgaaaaatggggcgtattctcccgcctgacctatctgggcgcgaaaaaggccaaagatgcgcagtacaccgtttatgaaaacaagggctggggtacgcctttgcagaaaaaggtaaaagattacccgtggctgaacaagtcggcttatgtgtttgatatgtacggcttctacaaaccggctaaaaacctgactttgcgtgcaggcgtatataatgtgttcaaccgcaaatacaccacttgggattccctgcgcggcctgtatagctacagcaccaccaactcggtcgaccgcgatggcaaaggcttagaccgctaccgcgccccaagccgtaattacgccgtatcgctggaatggaagttttaa

SEQ ID NO: 55655 - DNA, 360 bp, Neisseria meningitidis
atgacgggatttaatgatgccgccggcgtggcatccaccgcctccgacatcaaaggcaaatatgttcaaagcgttacagtcgcaaacggcgtcgttaccgcccaaatggcttcaagcggcgtaaacaaagaaatccaaggcagaaaactctccctgtgggccaagcgtcaaaacggttcggtaaaatggttctgcggacagccggttgagcgcaacgccaaagccaccgccgacgccgtcaccgccgccacacccgacaccgacaaaatcaacaccaagcacctgccgtcaacctgccgcgacgcagcatctgccgtttgcatagaaacaccacctacggctttctataaaaatacctaa

SEQ ID NO: 55656 - DNA, 138 bp, Neisseria meningitidis
atgctaccgcgcaaattcaaaaatctcaaattccgacccaatcaacacacccgatgccccatgccaatagaaataccccatgccaataaaaaagtgccgaaaatcggcactaaaactgacaattttcaacactactaa

SEQ ID NO: 55657 - DNA, 2016 bp, Neisseria meningitidis
atgaaatcctaccccgacccctaccgccattttgaagacctcgattccgccgaaacgcaaaacttcgctgctgaagcgaatgccgaaacgcgcgcgcgttttttaaacaacgacaaggcgcgcgcattgtctgacggtattttggcgcagttgcaggacacgcggcagattccgttttgtcaggaacaccgtgcgcggatgtaccatttccatcaggacgcggaatatccgaagggcgtgtaccgcgtgtgcacggcggcgacgtatcgttccggctatcccgagtggaaaatcctgttttcagtggcggatttcgacgagctgctcggtgacgatgtgtatttgggcggcgtgtcgcacttggtggaaaagcccaaccgcgcgttgttaacactgagcaaatcgggcggcgatgcggcgtacacgctggaagtggatttggaagcaggggagttggtagaaggcggttttcactttccggcaggtaaaaaccatgtgtcgtggcgcgatgaaaacagcgtatgggtgtgtccggcttgggacgaacgccagttgaccgaatcgggctatccgcgcgaggtgtggctggtggaacgcggcaaaagtttcgaggaaagcctgcctgtgtatcaaatcgataaagatgcaatgatggtgaacgcgtggcgttatctcgatccgcagggttcgccgattgatttgattgaagcgtcggacggtttttacaccaaaacctatttgcaggtgtcgtcggaaagcgaggcgaaaccgttaaacctgcccaacgattgcgacgtggccggctatctggccggacatcttttgctgacgttacgtaaagactggaaccgcgcgaaccaaagctatccgagcggcgcattggtggcggtgaagctgaatcggggcgaactcggggcggcacagcttttgtttgcgcccgatgaaacgcaggcattggaaagcgtggaaacgaccaagcgttttgtggtggcgagcctgctggaaaacgtacaaggccgtctgaaagcgtggcggtttgccgatggcaaatggcaggaagctgagttgccgcgcctgccttcgggcgcgttggaaatgaccgatcagccttggggcggcgacgtggtttaccttgccgccagcgatttcaccacgccgctgacgctgtttgcgctggatttgaacgtgatggaactgaccgtcatgcgccgccagccgcagcagtttgattcagacggcattaacgtgcagcagttttggacgacttcggctgacggcgagcgcattccttatttccacgtcggcaaaaacgccgcgcccgacatgccgacgctggtctatgcctacggcggtttcggcattcccgaattgccgcattatctgggcagcattggcaaatattggctggaagagggcaatgcctttgtattggcgaacatccgcggcggcggcgagttcggcccgcgctggcatcaggcggcgcagggcatcagcaaacataaaagcgttgatgatttattggcagtcgtgcgcgatttgtccgaacgcggcatgagttcgcccagacacatcggtttgcagggcggcagcaacggcggcctgattaccgccgctgccttcgtgtgcgaaccgcaaagcatcggcgcgctggtgtgcgaagtaccgctgaccgacatgatccgttatccgctattgtccgccggttcaagttggacggacgaatacggcaatccgcaaaaatacgaagtctgcaaacgctggctgggcgaattgtcgccgtatcacaatctttcagacggcatcgattatccgcctgcgctcattaccaccagcctcagcgacgaccgcgtccatcctgcccacgcgctcaagttttacgccaaactgcatgaaacctcggcgcaatcttggctctactcgcctgacggcggcggccataccggcaacggcacccaacgcgaatccgccgacgaactcgcctgcgtcttgctgtttttgaaagagtttttgggctaa

SEQ ID NO: 55658 - DNA, 246 bp, Neisseria meningitidis; identical to SEQ ID NO: 38743

SEQ ID NO: 55659 - DNA, 417 bp, Neisseria meningitidis
atgcttaaacatctcgcattcctactgcccgccatgatgttcgccctccccacttcggccgccgttctgacttcctatcaagaacccggctgcacctacgacggcggagtcggaaaagacgggcttccttcaggcaaaggcatatggcgttgccgggacgggcgcggttataccggttcgtttaaaaatggcaaattcgacggacaaggcgtttataccgtttccgccaaccgcgaaatatttatcgaaccgttcaattccgacagtaccaaattccgcaacatggtactctcgggcacgttcaaaaaaggcctggcacacggcaggtttaccgtctcgcaaaacggcgaaaccctcttcattatgaaatgtgaaaacggcatgattcaagaagtgaaactgcccaaaaacaaataa

SEQ ID NO: 55660 - DNA, 1485 bp, Neisseria meningitidis
atgtcgaaacctgtttttaagaaaatcgcactttatactttgggtgcaatcagcggcgtggccgtcagtctggcggtgcagggttttgccgccgagaaggacaggcgggataacgaagtcctgccggtgcaatccatccgcacaatggcggaggtttacggtcaaatcaaggcaaactactatcaggacaaacccgatgccgatttgtttgaaggtgcgatgaagggtatggtggccggtttggatccgcattccgaatatatggataaaaaaggttatgccgagataaaggagtccaccagcggcgaatttggcggcttggggatggaaatcgggcaggaagacggatttgtcaaagtggtttcgccgattgaggacacgcctgcggaacgggcgggggtgaaaagcggcgatttcattgtgaaaatcgataatgtttcgacacgcggcatgacggtcagcgaagcggtgaagaaaatgcggggcaagccgggtacgaagattactttgacgctgtcgcgcaaaaatgccgacaagccgatagtcgtcaacctgacccgtgccattattaaagtgaaaagcgtccgccatcacctgatcgaacccgattacggctatatccgcgtgtcgcagttccaagagcggacggtcgaaagcgtcaataccgccgcaaaagagctgctaaaggaaaataaaggaaaaccgctcaaggggctggtgttggatttgcgcgacgaccccggcgggcttttgactggcgcggtcggcgtgtcggcggcatttctgccgtctgaagcagtcgtcgtcagcaccaagggacgcgacggcaaagaccgcatggtactgaaagccattcctgaagattatgtgtacgggatgggcggcgattcgttggcgggcattcctgccgagttgaaaaccataccgatgacggtattggtcaattccggttcggcttccgcgtcggagattgtcgcaggtgcattgcaggatcataaacgcgcggtcatcgtcggtacgcagagcttcggcaaaggttcggttcagactttgattcctttgtccaacggcagcgcggtcaagctgacaacggcactgtattatacgccgaacgaccgttctattcaggcgcaggggattgttcccgatgtcgaagtaaaagataaggaacgcatttttgaaagccgcgaggcggatttggtcggacacatcggcaatcctttgggcggcgaggatgtgaacagtgaaacccttgccgtgccgcttgaaaaagatgcggataagcccgctgtaaaagaaaaaggtaaaaagaaaaaggacgaggatttgtcttcaaggcggattcccaaccctgccaaagacgaccagttgcggaaagctttggatttagtcaagtcgcccgagcagtggcagaagtctttggggctggcggcgaaaaagccggtttcaaataaagataagaaagataaaaaagataagaagtag

SEQ ID NO: 55661 - DNA, 1047 bp, Neisseria meningitidis
atgtcagacgacaaaagcaaagcccttgccgccgcactggcgcaaatcgaaaaaagtttcggcaaaggtgccatcatgaaaatggacggcagccagcaggaagaaaacctcgaagtcatttccaccggatcgctcggattagacctcgccctcggagtcggcggtctgccgcgcgggcgcatcgtcgaaatcttcggccccgaatcctccggcaaaaccaccctctgcctcgaagccgtcgcccaatgccagaaaaacggcggcgtgtgcgcctttgtcgatgccgaacacgccttcgatcccgtttacgcccgcaaactcggcgtaaaagtcgaagagctttacctctcccagcccgataccggcgaacaggctttggaaatctgcgacacactcgtccgttcaggcggcatagatatggtagtcgtcgattccgtagccgcactcgtccccaaagccgaaatcgaaggcgatatgggggacagccatgtcggactgcaggcgcgcctgatgagtcaggctttgcgtaaactgaccggacacatcaaaaaaaccaacacgctggttgtgttcatcaaccaaatccggatgaagatcggcgtaatgttcggcagccccgaaaccaccaccggcggcaacgcgctgaaattctattcttccgtccgcctcgacatccgccgcaccggatccatcaaaaaaggcgaagaggtattgggcaacgaaacccgcgtcaaagtcatcaaaaacaaagtcgcccccccgttccgtcaggcagagtttgacatcctctacggagaaggcatcagttgggaaggcgaattgatcgacatcggcgtgaaaaacgacattatcaacaaatccggcgcgtggtacagctacaacggcgcgaaaatcggtcagggcaaagacaacgtccgcgtctggctgaaagaaaaccccgaaattgccgacgaaatcgacgcaaaaatccgcgccctcaacggcgtagaaatgcacatcaccgaagggacgcaggacgaaaccgacggcgagcgtcccgaagagtaa

SEQ ID NO: 55662 - DNA, 423 bp, Neisseria meningitidis
atgaatttggaacagttgggcaggcgggacgcgctgctttccggacttttgaaacaggcgggacagtggcggcggttggatgccgccgtgaaaaaactgctgcctgccaacctgcacccgcattttcagacggtatgtatcgaagacggcaggcttgtccttttggcggcaaacaatatggcggcatcgcgcttgaaaatgattgcaccgtcggtattgccgcagttggcagggcttgacgcttcgatacgctctgtttcggtcaggctggtcccgaaaccggaaaaaccgccgaaaaccaataccctgcatttgagtaaggctgcgctggagagtttcggttcggcggcggtaaagttggaaaaacggcatcccgaattggcggaggcattggcaaacttggttagaaggcatggcgcataa

SEQ ID NO: 55663 - DNA, 444 bp, Neisseria meningitidis
atgagcgaagaactgcaacccgtattcagcatcgagcgactgtatgtcaaagacttgtctttggaagtgccgcacgcgccgcaaatctttttggaacagggcgagcctgaagtggatatgcgcgtttccaccggcagccaaaagctggaagacggctactacaacgtggacgttaccgtaaccgttaccgccaagctggataacgagcgcacgatgtttttgaacgaagtaacccaaagtggcatcttccgtttggaaaacatccccgaagaagatgtgcagctgctgctgggcgtggcgtgtccgaacatcctcttcccttacgcgcgcgaagccgtttccggtacggtaacacgtgccggcttcccgcccgtcctgctcgcgccgattaattttgaggcgatttaccaacaacagcaggaagccgaagccgccggggcttga

SEQ ID NO: 55664 - DNA, 390 bp, Neisseria meningitidis
atgaaaaacgttcaaaaaggctttacgctgctcgagctgatgattgccgtcgccatcctcggcatcctgacgctcatcacctacccttcctataaaacctacatccggcgcgtccgcctgacggaagtcaggacgaccctgctgcacaacgcgcagaccatggaacgttactaccgccaaaaaggaacgtttgaacactacaatcagacgaaactggaacaaaacgaatatttcaatatcactttaagcgaagtcagccccgaccattttacccttaaggcaacgcccaatcccaccaccaacgacggtgaaacctgcttcgttacgctcaacgacggcggtatcattgccgcttccggtacaaaccaatcctgccccggcttcgactaa

SEQ ID NO: 55665 - DNA, 729 bp, Neisseria meningitidis
atgcttttaggtgtcaacatcgaccatattgccaccgtccgcaatgcacgcggtacgatttatcccagccctgtcgaagcggcgctgattgcggaaacccacggcgcagatttgattaccatgcacttgcgtgaagaccgccgccatattaaagatgcggacgtgtttgccgttaaaaacgccatccgcacgcgcctgaaccttgaaatggcgttgacggaagaaatgctcgaaaacgcgcttaaagtgatgccggaagacgtgtgcatcgtgcctgaaaaacggcaggaaatcacgaccgaaggcggtttggacgtattggcgcaacaagacaaaattgccgagttcaccaaaatcctgaccgatgcgggcatacgcgtgtccttgtttatcgatgccgacgacaggcaaatccaagccgcccgtgatgtcggtgcgcccgttgtcgagctgcacacaggcgcgtatgccgacgcgcgcagccacgccgaacaactcaagcaattcgagcgtctgcaaaacggcgcgcattttgccggcgatttgggcttggtcgtcaacgccggacacggactgaccatacacaacgttacccccatcgcccaaatcctcgccatccgcgaactgaacatcgggcattcgctgattgcccaagccctcttcctcggactgcccgaagccgtgcgccaaatgaaggaggcgatgttcagggcaaggctgctgccgtaa

SEQ ID NO: 55666 - DNA, 1278 bp, Neisseria meningitidis
atgaatgagggtgaagttgttttaacaccagaacaaatccaaaccttgtatggttatgcttctcgtggcgatacctatggcggttggcgttatttggctaatttgggtgaccgttatgcggataatgctgccgcaattgtcggtaaggatgcaaacttaaatggtttgaatttatggatgaaaaaaggggtggaaaacctatgggatgatacggtcggtaaaaagacccgtttagagaaatttgatcgggttgcattgcaacatttcagccaatatgtagatctaattaatgaaaataatggtagattacctaacactagtgaaattgagagaagttactataaagccgttacctatcatggcgtttcttctagtgcagctattgatttagttattaatcgttcacttccggatatggcggatggttattgggcattaggtttggggatagaagccgaacgtatccacaatgagcaagcagtaaataatccgaacggtagcgaatcggataatagaaagcagttaatatctgctttagataaaggatttgatggatcttttaaagagaagcattttacttttttacaatctgtgataatggatgtaacaaagttaggtgttgaatatacaatagatggttggcaaaaaattggaggttggggtaatgggataatcaatgatttatataaaagtgttgcaaaaagagagtggactggaatatttgagatcgttaataataacatcaagcaatttagagatctgttcccaaatccggaaggctggatcgatgatggtcaccaatgtttcgctccttgggttaaagaaactaaaaaacgcaatggcaaatatcatgtctacgaccccctcgccctagacctagacggcgacggcatagaaacagtcgccgccaaaggcttttcaggcagcctcttcgaccataacggcaacggcatccgcaccgccactggctgggtttctgccgatgacggtttactcgtccgcgatttgaacggcaacggcatcatcgacaacggcgcggaactcttcggcgacaacaccaaactggcagacggttcttttgccaaacacggctacgcagctttggccgaattggattcaaacggcgacaacatcatcaacgcggcagacgccgcattccaatccctgcgtgtatggcaggatctcaaccaggacggcatttcccaaaccaacgaactccgcacccttgaagaattgggtattcaatctttggatctcgcctatcaaagatgtaaataa

SEQ ID NO: 55667 - DNA, 618 bp, Neisseria meningitidis
atgcttgccaaaattcccgacggcgatacaataaaaccgattttccacccaaacaggacacacatgaaaaaaatcatcgcctccgcgcttatcgcaacattcgcactcgccgcctgccaagacgacacgcaggcgcggctcgaacagcagcagaaacagattgaagccctgcaacagcagctcgcacagcaggcagacgatacggtttaccaactgactcccgaagcagtcaaagacaccattcctgccgaagcacaggcaaacggcaacaacgggcaacccgttaccggtaaagacgggcagcagtatatttacgaccaatcgacaggaagctggctgctgcaaagcctggtcggcgcggcggcaggcgcgtttatcggcaacgcgctggcaaacaaattcacacgggcaggcaaccaagacagtcccgtcgcccggcgcgcgcgtgcagcctaccatcagtccgcacgccccaatgcgcgcaccagcagggatttgaacacgcgcagcctccgcgcaaaacaacaggcggcgcaggcgcagcgttaccgcccgacaacgcgcccgcccgccaattaccgccgaccggctatgcgcggtttcggcaggaggcggtaa

SEQ ID NO: 55668 - DNA, 756 bp, Neisseria meningitidis
atgaagtacatccggttattttttctctgtacggcactcatcagtaccaatgcggcagctgccgaaatggttcaaatcgaaggcggcagctaccgcccgctttatctgaaaaaagataccggcctgattaaagtcaaaccgttcaaactggataaatatcccgttaccaatgccgagtttgccgaatttgtcaacagccacccccaatggcaaaaaggcaggatcggttccaaacaggcagaacccgcttacctgaagcattggatgaaaaacggcagccgcagctatgcgccgaaggcgggcgaattaaaacaaccggtaaccaatgtttcctggtttgccgccaacgcctattgcgccgcacaaggcaaacgcctgccgaccattgacgaatgggaatttgccggacttgcttccgccacgcagaaaaacggctcaaacgaacccggctacaaccgcactattctcgattggtatgccgacggcggacggaaaggcctgcacgatgtcggcaaaggccgcccgaactactggggcgtttatgatatgcacgggctgatttgggaatggacggaagatttcaacagcagcctgctttcttccggcaatgccaacgcgcaaatgttttgcagcggcgcgtctatcgggtcgagcgactcgtccaactatgccgccttcctccgctacggcatccgcaccagcctgcaatccaaatatgtcttgcacaacttgggcttccgttgcacaagccgataa

SEQ ID NO: 55669 - DNA, 231 bp, Neisseria meningitidis
atgtttaagacgctcaaaagcatttggcagggacttacgcaaaaaggcaaaatcttcccgtaccaactggcattcacgctgctgattcctttgcgtaactgggcgctttcaccgcaacaaatcacgcaacggctgcactttgttccgcaccaccgaatttgctgcggggcgggttatttcagttgcgtaggatgtgcttcagcccaccgtttcctcatttttgcttgttaa

SEQ ID NO: 55670 - DNA, 207 bp, Neisseria meningitidis
atgaatattattggtaaattgaaagaagctgcttcctattttcttacaaaattgattggagaaaatcctagtaatgagcaggtaaaccgcgcacttatacagatgccaaatgttcgtccgatacacacctatccacgcccaaatttaagaaactcaggcgtggcggcagccaaacgcgcggcgcgcaaacgcaagaatcgtcgttaa

SEQ ID NO: 55671 - DNA, 246 bp, Neisseria meningitidis; identical to SEQ ID NO: 44126

SEQ ID NO: 55672 - DNA, 261 bp, Neisseria meningitidis
ttggaaatgtttgatggcgaagtagaagcagatgaaagttattttggcggacaacgcaaaggcaaacgcggtcgcggtgctgccggtaaagtcgccgtattcggtcttttgaagcgaaatggtaaggtttatacggttacagtaccgaatactcaaaccgctactttatttcctattatccgtgaacaagtgaaacctgacagtattgtttatacggattgttatcgtagctatgatgtaattagatgtgagcgaatttag

SEQ ID NO: 55673 - DNA, 792 bp, Neisseria meningitidis
atggatacgcaggcagttatcacacatatcgcccgatggttggacgaatacgccactcaggcaaatgcaaaaggattcgtcataggcgtttccggcggcatcgattccgccgtcgtctccacactcgccgcccgcaccggccgccccacgctgcttctggatatgccgatacgccaacaccccggccagcttgagcgggcaaggctgcacatccgcaatctgcaacggcaatatgccaatgtaagcgcgcaaacggccgatttgaccgacaccttccagacctttgaacaaaccgtcggcattcatcagacggcatttgacaatcagccgctttccctcgccaacgccaaaagccgcctgcgtatgctgaccctgtactactacgggcagatacacggactgctggttacggggacaggtaataagattgaagatttcggcgtgggattttttaccaaatacggcgacggcggcgtagacatcagcccgattgccgacctgaccaaaacgcaggtttaccggcttgccgaagcattgggcgtggacgaggcgattcaaaaagccccgccgaccgacggcctgtgggatacggaacgcaccgacgaagaacagatgggcgcaagctatcccgaactggagtgggcaatgggcgtgtacggcacgcgcaaacccgaagattttgaagggcggcagcgcgaagttctggaaatctatacgcggctgcaccgcgcgatgcagcacaaaatcaacccgattcccgtgtgccgcattccgcccgaattgttgggctga

SEQ ID NO: 55674 - DNA, 411 bp, Neisseria meningitidis
atgcctgtctatttccgcaccccaagcaggaaacgcctgcacaaaatgaaccgtcgccagcataaaaagctgcatttgggcgagtttcaaacattgattttcggcgttcaaggcagtttgcaccaagctgaggacgatgccgaagcgttcggccgctttatggacgagctgattgcgtatcttgcggcaaacggcttggaaatggcgggcgggggcgattgcggcgatttttcgtgcctgtttcaaaaatctggtccccgaggcttgggcgaaaccgagaaaaaagccattatctcttggctggcaggtcgcgaagatgtcgccactttgtacgccaccccgctggttgatggtttttacggggatgacggctgggaaaattacagcgaaacctataaacaggcagattaa

SEQ ID NO: 55675 - DNA, 285 bp, Neisseria meningitidis; identical to SEQ ID NO: 54791

SEQ ID NO: 55676 - DNA, 120 bp, Neisseria meningitidis; identical to SEQ ID NO: 43584

SEQ ID NO: 55677 - DNA, 969 bp, Neisseria meningitidis
atgactgccaaacctttttccctcaacctgaccaacctcctgctgctggcggcgttgtttgccgtcagcctgtcggtgggcgttgccgatttccgctggtctgatgtgttttccctgtcggacagcaccgaactgatgctggtcagccgcctgccgcgcacgtttgcgattgtgctgacgggcgcgtcgatggcggtggcggggatgattatgcagattttgatgcgcaaccgttttgtcgaaccttctatggcgggcgcgagccaaagtgcggctttgggtttgcttctgatgtccctgctgctgcctgccgcgccgctgccggtcaaaatgtcggttgccgccgttgccgcgctaatcggaatgctggtgtttatgctgctgatccgccgtctgccgccgacggcgcaactgatggtgccgctggtggggattattttcggcggcgtggttgaggcagtggcgacgtttatcgcgtatgaaaacgaaatgctgcaaatgctcggcgtgtggcagcagggcgatttttcgagcgtgctgctggggcggtacgagctgctttggattacgggcggtttggcggtgtttgcctatctgattgccgaccggctgacgattttggggctgggcgagacggtcagcgtgaatttgggtttgaaccggacggcggtgttgtggtcggggctgattattgtggctttgattacgtcgccggttatcgttacggtcggcaatattccgtttgtcgggctggtcgtgccgaacatcatcagccgcctgataggcgacaggctgcgccaaagcctgcctgcggtggccttgttgggcgcgtctttggttttattgtgcgacattatcggacgtgtgattgtgtttccgtttgaaattccggtctctacggtttttggtgtgttgggtacggctttgtttttgtggcttttgttaaggaaacctgctcatgccgtctga

SEQ ID NO: 55678 - DNA, 933 bp, Neisseria meningitidis; identical to SEQ ID NO: 55401

SEQ ID NO: 55679 - DNA, 336 bp, Neisseria meningitidis; identical to SEQ ID NO: 44858

SEQ ID NO: 55680 - DNA, 720 bp, Neisseria meningitidis
ttgactttaacccgaaaaacccttttccttctcaccgccgcattcggcacacactcccttcagacggcatccgccgacgcagtggtcaaggcagaaaaactgcacgcctccgccaaccgcagctacaaagtcgccggaaaacgctacacgccgaaaaaccaagtcgccgaattcacgcaaaccggcaacgcctcgtggtacggcggcaggtttcacgggcgcaaaacttccggcggagaacgatacgatatgaacgcctttaccgccgcccacaaaaccctgcccatccccagctatgtgcgcgtaaccaataccaaaaacggcaaaagcgtcatcgtccgcgtcaacgaccgcggccccttccacggcaaccgcatcatcgacgtatccaaagccgccgcgcaaaaattgggctttgtcaaccaagggacggcacacgtcaaaatcgaacaaatcgtcccgggccaatccgcaccggttgccgaaaacaaagacatctttatcgacttgaaatctttcggtacggaacacgaagcacaagcctatctgaaccaagccgcccaaaacttcgccgtttcgtcatcgggtacgaacctctcggttgaaaaacgccgttacgaatacgtcgtcaaaatgggaccgtttgcctcgcaggaacgcgccgccgaagccgaagctcaggcacgcggtatggttcgggcggtattgaccgccggctga

SEQ ID NO: 55681 - DNA, 900 bp, Neisseria meningitidis; identical to SEQ ID NO: 43336

SEQ ID NO: 55682 - DNA, 852 bp, Neisseria meningitidis
atggcacgacacgtttggcaggcaggacggtttgaaatcggtttggacaaaccgaaaatcatgggtatcgtgaatctcacgcccgattctttttccgacggcggcgcgtattcgcaaaatgcccaaaccgctttggcgcacgccgaacggcttttgaaagagggtgcggacattctcgacatcggcggcgaatcgacgcggccgggtgcggattatgtttctcctgaagaagaatgggcgcgggttgagcctgtattggcagaagtggcggggtggggcgttcccgtcagtttggacacgcgccgcacggtggttatggaaaaagcgttggcactcggtggcatcgatattattaacgatgtggcggcgttgaccgacgaaggcgcggtcgaattgctggcgcgtcaggcggacacgggcatttgcctgatgcacatgcagggtttgcctgaaaacatgcagattaatccgaaatatcaggatgttgtcggtgaagtggcgcggtatttgaaagcgcgggcggcggaatgcatcgcggcaggcatcgcaccgcaacgcatcacgctcgatccgggtttcggcttcggcaaaaccctgcaacacaatatcgcgctgatgaggcatttgcccgaattgatggcggaaacaggctttccgctgctgatcggcgtatcgcgcaaacgcatggtaggcgaactgacgggcgaaaccgacgcggcggcgcgcgtacacggcagcgtggcggcggctgtggcggctgtggcgcgcggcgcgcaaattgtgcgggtgcatgacgtgaaggcgacggcggacgcgttgaaggtgtgggaagcgttgggcatcaatctgtaa

SEQ ID NO: 55683 - DNA, 423 bp, Neisseria meningitidis; identical to SEQ ID NO: 38711

SEQ ID NO: 55684 - DNA, 1296 bp, Neisseria meningitidis
ttggcaggagtcggcaaacttgcccgcttaggcgcgaaattcagcacaagggcggttccctatgtcggaacagcccttttagcccacgacgtatacgaaactttcaaagaagacatacaggcacaaggctaccaatacgaccccgaaaccgacaaatttgtaaaaggctacgaatatagtaattgcctttggtacgaagacgaaagacgtattaatagaacctatggctgctacggcgttgacagttcgattatgcgccttatgtccgatgacagcagattccccgaagtcaaagaattgatggaaagccaaatgtataggctggcacgtccgttttggaattggcataaagaagaactgaataaattaagttctttggattggaataattttgttttaaatcgttgcacatttgattggaacggcggagattgtgtggtcaataaaggtgatgattacagaaatggggctaatttttcccttagccgcaatccgaaatacaaagaagaaatggatgccaaaaagctggaagagattttatcgttgaaagtcgatgccaatcccgacaaatacataaaggcaaccggatatcccggttattccgaaaaagtagaagtagcacccggaacaaaagtgaatatggggcctgttacggacaggaacgggaatcccgttcaggttgtcgcaacattcggcagggattcgcaaggcaacaccacagtggatgttcaagtaatcccgcgtcccgacctcacacccggaagcgcggaagcaccgaacgcacagccgctgcccgaagtatcgcccgctgaaaaccccgcaaacaacccggcccccaatgagaaccccggcacgcgtcccaatcccgaacccgaccccgatttgaatcccgatgcaaatcccgatacggacggacagcccggaacaagccccgattccccggccgttccggaccgcccaaacggcagggacggcaaagatggcgggcttttgtgcaaattcttccccgacattctcgcttgcgacaggctgcccgagcccaatccggcagaagatttaaatctgccgtctgaaaccgtcaatgtagagtttaagaaatccggaatctttcaagattccgcacagtgtcccgcccccgttacgttcactataaccgtgcttgattcaagcaagcagttcgcgttcagctttgagaacgcatgtaccatagccgaacggctaaggtacatgcttctcgcccttgcttgggcggttgccgcctttttttgtatccgcacagtatcccgtgaagtctag

SEQ ID NO: 55685 - DNA, 645 bp, Neisseria meningitidis
gtgcttgcctccgccatcgacttcatcctccatatcgaccaacacctgctcgcgctgtcggcgcaatacggtgtgtggatttatgcgattctgtttttgattgttttttgcgaaaccggcctgattgttacgcccttactgcccggcgattcgctgctgtttgccgccggcgggattgctgcgctgggcggtatggatattcatttgatggttgcattattaagccttgccgccatactcggcgacgcgctcaattttaccgtcggcaaatatttcggcggcaggctgttcgccaaccccgattctaaaatcttccgacgtgaatatctcgataaaacccaccgtttttacgaaaaacacggcggcaaaaccatcatcattgcccgttttatgcccatcgtccgcaccttcgcccccttcgtcgccggtatggggaaaatgcactatgccaaatttatccgctacaacatcatcggtggcttgttgtgggttatcctgttttcttacgcgggctatttctttgccaacttccccgtcgtaaaaaacaatctgggcttggtgatgggcggcatcattattgtttccgtcctgccgggtgcggttgaaattgcccgcgccaaacttgcggtaaaatccaaacggtaa

SEQ ID NO: 55686 - DNA, 1431 bp, Neisseria meningitidis; identical to SEQ ID NO: 55213

SEQ ID NO: 55687 - DNA, 186 bp, Neisseria meningitidis
atgtatcactaccaatccgatgccacacaattcctcaaccgtctgattgaagaaaaacctgagttggaacagcagcgtttggaaaaccgggggcttttgtgggatgtcgaactcaatcccgaagaacaggaaaacttcgaggcggcaaaagtagcgaaaaaaccttatacctattaccaagactga

SEQ ID NO: 55688 - DNA, 225 bp, Neisseria meningitidis; identical to SEQ ID NO: 39182

SEQ ID NO: 55689 - DNA, 627 bp, Neisseria meningitidis
gtgaaccctttttcagaggacggcaaaatgagcgagttggataacatccttgcccataaccggcagtttgtcgagtcgggcgaatatgaaaaatactttaccgacaaataccccgaacgcgggctggcagttttgtcctgtatggatgcgcggattatcgggctgctgcccgacgcgttgggtttgaaaaatggcgatgccaagctgattaaaaatgccggcgcgctggttacgcacccgtggggttcggtgatgcggagtcttttggttgccgtgtttgaattgaaggtcagagagattatggtcatcgcccatcacgattgcggtatgcaggggctgaatgccgaagaattcctcgggcgcgtccgggaaagccggattcccgaagaccgtatcgaaaccctgcgttatgcaggtgtcgacctcgacggctggctgaccggtttcgacaacgtcgaagacagcgtgcgccacacggtggaccttatccgtaaccatccgctgatgccgcgccatatcgccgttcacggactggtcatccatcccgttaccggcaaactgacgctggttgtggacggcagtgtttcagacggcatggacttatcggaaggaatggaaacatcatga

SEQ ID NO: 55690 - DNA, 1077 bp, Neisseria meningitidis
atgatttgccgaaaacctatcggacacacaccatattttgatatgaataaaacaatctgccgcactgctgcactattgataagcggtttttcatacgcaaacaccgtcattcccgatgtctcccccgtcgcacaaggtcaacatgtcttcattaacatccctcagcaacgcctgttcctctacaccgacggcaaactgaccaaggtttatcccgttgcagtaggtcgggcgatgacgcaaaccaatctaggcgaacataaaatcggtgcgaaagcctataaccctgtttggtacatccccaaatccatacagaaagaacgcggcgacggcgtaaaaaccatagccgccggcccggacaaccctttggggccggtttttgtccgcttaggcgaccccaaactcggtttgggcatacacgggaccaatgcgccggccagcgtccccggggttcggagtcacggctgcgtccgcatgaaatcgcccgacgcgctcgagtttgccaaaaccatcgccagcggctcgcccgcctccgtcatctatcaaatggcggggctcaatgaagatgcggatcgcaacctgtggcttgccgccttccgcgacccttacggtaagaacaaccttgacatcgcctctctgaaaaaaagtattgcgcaatgggcaaaaacacagggtaaaaccatcgcgcccgagaaagtcgatgctgtactcaaagaccgcaccggatcggccgtctgcctgacctgcggcaaaaacggcaagatgaagatgccgctcaaatcgctggcgtggatacagggttcttcctcatacagccaagctgaagtcattgaacaaactgaggaaaccaactctgccgaaatatccgagacacgcacgcccgaagtgcctgatgtacacacgcccgaggcacaaccgcatttaaatacccaatccgacggcacgccgactgcctataccgaaccggctgccgattcatcgccgcaagtagaaacacctgatcaggctgcttccgagccggttgatgtattattttcaatagatgtgatacggcagggaaatttgcgtttaggtaattga

SEQ ID NO: 55691 - DNA, 777 bp, Neisseria meningitidis; identical to SEQ ID NO: 39426

SEQ ID NO: 55692 - DNA, 643 bp, Neisseria meningitidis
atgagaaaaagtcgtctaagccggtataaacaaaataaactcattgagctatttgtcgcaggtgtaactgcaagaacagcagcagagttagtaggcattaataaaaataccgcagcctattattttcatcgtttacgattacttatttatcaaaacagtccgcatttggaaatgtttgatggcgaagtagaagcagatgaaagttattttggcggacaacgcaaaggcaaacgcggtcgcggtgctgccggtaaagtcgccgtattcggtcttttgaagcgaaatggtaaggtttatacggttacagtaccgaatactcaaaccgctactttatttcctattatccgtgaacaagtgaaacctgacagcattgtttatacggattgttatcgtagctatgatgtattagatgtgcgcgaatttagccattttagcttcgctgaaacttcgttttcgtatcaatcacagcacacattttgccgaacgacaaaaccatattaatggaattgagaacttttggaaccaggcaaaacgtcatttacgcaagtttaacggcattcccaaagcgcattttgagctgtatttaaaggagtgcgaatggcgttttaacaacagtgagataaaagttcttgttccattttaa

SEQ ID NO: 55693 - DNA, 921 bp, Neisseria meningitidis
atgaccttaaccgaattgcggtacatcgtcgcagtcgcccaagaacgtcatttcggcagggcggcgcggcgttgttttgtcagccagcccactttgtctattgccattaagaaattggaagaagagcttgccgtctctttgtttgaccggagcagcaacgatattattacgaccgaggcgggggaacgtatcgttgcacaggcgcgtaaggtgttggaagaggcagagcttatcaggcatttggcaaatgaagaacaaaacgagctggagggtgcgttcaaactcgggctgatttttacggttgcgccgtacctgctgccgaaactgattgtctcgttgcgccgtactgcaccgaaaatgcctttgatgttggaagagaattacacgcatactttgaccgagtcgctcaaacgcggggacgttgacgcgattatcgttgccgaaccgtttcaagagccgggcattgttaccgaacccttgtatgacgaaccgtttttcgtgattgtcccgaaagggcattcatttgaggaactggatgccgtttcgccccagatgctgggtgaggagcaggttttgctgctgacggaaggcaactgtatgcgggatcaggtactctcaagctgttccgaattggcggcgaaacaacgtatacaggggttgaccaatacattgcagggcagctcgattaatacaatccgccatatggttgccagcggtttggcaatcagcgtgttaccggcaaccgcgctgaccgaaaacgatcatatgctgttcagcattattccgtttgaaggtacgccgccaagccggcgggtcgtattggcgtaccgccgcaattttgtccgtccgaaggcgttgtcggcgatgaaggcggcgattatgcagtcgcagcttcacggggtaagttttatccgcgactag

SEQ ID NO: 55694 - DNA, 204 bp, Neisseria meningitidis
atgggcagtttttctctgacgcactggattatcgtactgattatcgtcgttttgatattcggcaccaaaaaactgcgcaacgtcggcaaagacctcggcggtgcggttcatgacttcaaacaggggctgaacgaaggtacagacggcaaagaagcccaacaagacgatgtaatcgaacacaaaaaagacgaagacaaagcgtaa

SEQ ID NO: 55695 - DNA, 1419 bp, Neisseria meningitidis
atgaatattcacaccctgctctccaaacaatggacgctgccgccattcctgccgaaacggctgctgctgtccctgctgatactgctggcccccaatgcaatgttttgggttttggcactgctgaccgccaccgcccgcccgattgtcaatttggactatcttcccgccgcgctgctgatcgccctgccttggcgtttcgtcaaaattgccggcgtattggcgttttggctggcggttttgtttgacgggctgatgatggtgatccagctcttcccttttatggacctcatcggcgccatcaacctcgtccccttcatcctgaccgcccccgccccttatcagataatgaccgggctgttgctgctgtatatgctggcgatgccgtttgtgttgcagaaagccgccgccaaaaccgacttccgacacattgccgcctgtgccgccgttgtggcggcagccggctatttcactggccatttgagttactacgaccgggggcggatggccaatatcttcggcgcaaacaacttctactacgccaaaagtcaggcgatgctctacaccgtcagccagaatgccgactttattaccgccggcctggtcgatcccgtcttcctccccttgggcaatcaacagcgtgccgccacgcatctgaacgagccgaaatctcaaaaaatcctctttatcgtcgccgaatcttgggggctgccggccaatcccgaacttcaaaacgccacttttgccaaactgctggcgcaaaaagaccgtttttcggtttgggaaagcggcagttttccctttatcggcgcgacggtcgaaggcgaaatgcgcgaactgtgtgcctacggcggtttgcgcgggttcgcactgcgccgcgcgcccgacgaaaaatttgcccgctgcctccccaaccgtttgaaacaagaaggttacgccacctttgcgatgcacggcgcgggcagttcgctttacgaccgcttcagctggtatccgagggcgggctttcaagaaatcaaaaccgccgaaaacctgatcggtaaaaaaacctgcgccattttcggcggcgtgtgcgacagcgagctgttcggcgaagtgtcggcatttttcaaaaaacacgacaagggactgttttactggatgacgctgaccagccacgccgactatcccgaatccgacattttcaaccacaggctcaaatgcaccgaatacggcctgcccgccgaaaccgacctctgccgcaatttcagcctgcacacccaattcttcgaccaactggcggatttgatccaacgccccgaaatgaaaggcacggaagtcatcatcgtcggcgaccatccgccgcccgtcggcaacctcaatgaaaccttccgctacctcaaacaggggcacgtcgcctggctgcacttcaaaatcaaataa

SEQ ID NO: 55696 - DNA, 642 bp, Neisseria meningitidis; identical to SEQ ID NO: 50310

SEQ ID NO: 55697 - DNA, 1137 bp, Neisseria meningitidis
atggaaatgaaacaaaccgattcaaccatcaaatctcgtgcggcggtggcattcgcccctaaccaacccttacaaattgtggaaatcgacgtagaaatgccgcgtaaaggcgaggtgttaatccgcaatacccacactggcgtgtgccatactgatgcgtttacgttatcaggaagcgatcctgaaggcgtattccctgtggtgcttggacacgaaggtgcgggtgtggtcgttgctgtgggcgaaggtgtgtcaagcgtaaaaccgggtgatcacgtgattccgctttacaccgccgaatgtggcgaatgtgagttttgttgttcaggtaaaaccaacttgtgcgtctcagtgcgtgatacacaaggtaaaggcttaatgccggacggcacgacgcgtttttcttatcaaggtcagccaatctatcactatatgggctgttcgactttcagtgaatactccgttgttgccgaagtttcactggcgaaaatcaaccctgaagccaaccatgaacaagtatgtttgctcggctgcggcgttaccacaggtattggtgcggtacataatacggcaaaagtgcaagaaggcgactctgttgccgtgtttggcttaggcgcgattggtttggcggtggtgcaaggtgcgcgtcaagccaaagccggccgtattatcgccattgataccaatcccgcaaaattcgagttggcaaaacagtttggtgcaaccgattgtttgaacccgaacgattacgataaaccgatcaaagatgtgttgttagacatcaacaaatggggcatcgaccacacctttgaatgtatcggcaatgtaaatgtaatgcgtcaggcattagaaagcgcacaccgtggttggggacaatccattatcatcggcgtagcgggtgctggccaagaaatttccactcgtccgttccagttggtaaccggccgtgtttggaaaggcactgcatttggcggcgtgaaaggccgctccgagcttccgaaaatggtggaagattcaatgaaaggcgacatcgagttagaaccgtttgtgacccacacaatgacgctcgatcaaatcaatgaagcctttgatttaatgcatgaaggtaaatcgatccgcgctgttattcattactaa

SEQ ID NO: 55698 - DNA, 282 bp, Neisseria meningitidis
atgaaaaccctcgtcctcctcctgctttccttctccacgaccaccgctttcgccgcatacggtttgggtttggggcaggcaccgaaatatcctgccgactttcgcgcctacggttatgtttattccggacggcagggctgggttttaaaaacagaggcggatgccattaaattagacacgcttttcaaacgctttgtgtaccgtccttccaccgccaatcaaaaccccgtcggacagcgttcggacggcatacccgccaaccacacaaaggaaaaaccatga

SEQ ID NO: 55699 - DNA, 423 bp, Neisseria meningitidis; identical to SEQ ID NO: 37313

SEQ ID NO: 55700 - DNA, 1302 bp, Neisseria meningitidis; identical to SEQ ID NO: 38582

SEQ ID NO: 55701 - DNA, 678 bp, Neisseria meningitidis; identical to SEQ ID NO: 37180

SEQ ID NO: 55702 - DNA, 900 bp, Neisseria meningitidis
atgaaaaccaattcagaagaactgaccgtatttgttcaagtggtggaaagcggcagcttcagccgtgcggcggagcagttggcgatggcaaattctgccgtaagccgcatcgtcaaacggctggaggaaaagttgggtgtgaacctgctcaaccgcaccacgcggcaactcagtctgacggaagaaggcgcacaatatttccgccgcgcgcagagaatcctgcaagaaatggcagcggcggaaaccgaaatgctggcagtgcacgaaataccgcaaggcgtgttgcgcgtggattccgcgatgccgatggtgctgcatctgctggcgccgctggcagcaaaattcaacgaacgctatccgcatatccgactttcgctcgtttcttccgaaggctatatcaatctgattgaacgcaaagtcgatattgccttacgggccggagaattggacgattccgggctgcgtgcacgccatctgtttgacagccgcttccgcgtaatcgccagtcctgaatacctggcaaaacacggcacgccgcaatctgcagaagagcttgccggtcaccaatgtttaggcttcaccgaacccggttctctaaatacatgggcggttttagatgcgcagggaaatccctataagatttcaccgcactttaccgccagcagcggtgaaatcttacgctcgttgtgcctttcaggttgcggtattgcttgcttatcagattttttggttgacaacgacatcgctgaaggaaagttaattcccctgctcgccgaacaaacctccaataaaacgcacccctttaatgctgtttattacagcgataaagccgtcaacctccgcttgcgcgtatttttggattttttagtggaggaactgggaaacaatctctgtggataa

SEQ ID NO: 55703 - DNA, 1407 bp, Neisseria meningitidis; identical to SEQ ID NO: 37873

SEQ ID NO: 55704 - DNA, 954 bp, Neisseria meningitidis; identical to SEQ ID NO: 47463

SEQ ID NO: 55705 - DNA, 1620 bp, Neisseria meningitidis
atggacaatctcgtatgggacggcgttcccgacatccgcacactcgaccaaaccatccgcaaacacgcacacccgctcaacctgattgtctgcctccccgataatcagattcccgattttcaaaccgcacaagatgcttcggacgcggaatgccgtctgaagcaccgtttggatcaggcaacgcagtgcctccagttcgacagcatcaacctcatcgaacacatcctgcccgatgtccgcttctggctggttcccccttcacgcacccgccgcctgcacgaacacttccaccacatttcctggcagaccgaagccatcccgcaaaccgaaagcaaacccgacaaaccctggtttgcacttccacaaacatccgaacggcaaaaaccggaatacatcctcgttatcggcgcgggcatatccggcgcggcaaccgcccacgccttagcatcacacggcatttccgttaccgtattggaagcccgaaaagccgcccaagccgccagcggcaaccgccaagggctgctctacgccaaaatctcgccgcacgacaccgaacaaaccgaactgctgcttgccggctacggctacaccaaacgcctgctcggacacatcctgcccgaatccgacacttggggcggcaacggcatcatccacctcaattacagccgcaccgaacaacaacgcaatcacgaattgggtttgcaaaaacaccataaccacctctaccgcagcatcacgcaggcagaagccgaaaaaatcgccggtatcccgctgtccgtcccatacgaccacccttcatgcggactctactggcaacacggcgtatggctcaatccgcccgcattcgtccgcgccctcctccgccatccgctgatcggactgcacgaagacacaccattaaccgacatttcccacgacggggaaaagtggattgcaagcacgccaaacggcacatttaccgccacacacatcatctactgcaccggtgcgaacagcccctacctacccgaaaccaacctcgccgccctgcctctcaggcaaatacgcggacaaaccggcctcacaccgtccaccccgttttccgaacaactgcgttgcgccgtttcaggcgaaagctacatcagcccgtcgtggcacggactgcactgctacggcgcgagttttattcccaacagcagccataccggatggaacgaagccgaagaagcctcaaaccgccaagcattggcacaccttaaccccgccctttccgaatcattgtttgccgccaacccaaacccccaaaaacaccaagggcacgccgccatacgctgcgacagccccgaccaccttcccctagtcggcgcactcggcgacattgccgccatgcggcagacctacaccaaactcgcgctggacaaaaactaccgcatcgacaccccatgcccatacctgcctaatgcctacgtcaacaccgcgcacggcacccgcggactcgccaccgcccccatctgcgccgccgccattgcagcccaaatcctaggcttgccccatcccttttcacaacgcctgcgccacgccctacaccccaaccgcaccatcatccgcgccatcgtcagaaggaaggatctaaccccttaa

SEQ ID NO: 55706 - DNA, 963 bp, Neisseria meningitidis
atgcccagtatctctgtccgccggctgtttgacgacaaccaatacaaactgcaacttgcctgggccgccggcaattcgggtgcggacaaccgtatcggtgtagaggcggacaagcccgtcctcgccctggtcggacacctgaattttatccaccccaaccaaatccaagtggtcggtttggcagagtcggaatatctgaaccgtctcgaatcgggggaaacgggttatcagttcggagacctgttcgatatttccatgtctttggtcattgtggcaaacggcttgccggtttccccgggactgcgcgactattgtcataaaaacgatattccactgctgacttccaaactcgaaagcccctatctgatggacgtgttgcggatttacctgcaacgcaccttggcggcatcgtccgtcaaacacggcgtatttctcgatgtgtttgaaatcggcgtgctgattaccgggcattccggcctgggtaagagcgaattggcattggaactgatttcgcgcggccacagcctgattgccgacgatgcggtcgagctgttccgcatcggcccggaaacattggaagggcgttgttcgcctatgctgcgcgattttttggaagtgcgcggcttggggatactcaatatccgccatattttcggcgaaacttccatccgccccaaaaaaatcctgcaactcattatcaatttggtcgaggcggacgacgagtatatgaagcagcttgaccggttgagcatccgcaccgaaaccgaatccatcctcaacgtcaacgtccgttcggttacgctgcccgtcgccgtcggacgcaacctcgccgttttggttgaggcggcggtacgcaattacattttgcagttgcgcggtaaggacagtacgcgcgaatttttggaacgccatcagacgcaacttaaagaaaacgaacagaatcatgaaaatcgtcctgattag

SEQ ID NO: 55707 - DNA, 1077 bp, Neisseria meningitidis
atgcaggaatggttccaaaacctctttgccgcaacgctcggtctgggcgatttgggtattaccgtaggtttggtggtatccgtcatcgtcaaaatcgtgattatcctgattccgctgattctgaccgttgcctacctgacgtatttcgaacgtaaagtcatcggctttatgcagcttcgtgtcggcccgaacgtaaccggcccgtggggtctgattcagccgtttgccgacgtgttcaaactcttgtttaaagaggtaacccgtccgaagctgtcaaacaaagccctgttctacatcggcccgattatgtcgctcgccccgtctttcgcggcgtgggcagtgattccgttcaacgaagaatgggtgctgaccaacatcaatatcggccttttgtacatcctgatgattacctcgctgtcggtttacggcgtgatcatcgcgggctgggcttccaactccaaatattcgttcttgggtgcaatgcgtgcttccgcacaaagcatttcctacgagattgccatgagtgccgcgctggtgtgtgtcgtgatggtgtcgggcagcatgaacttctccgacatcgttgccgcgcaggcaaaaggtatcgcgggcggttcggtattctcttggaactggctgccgctgttcccaatcttcatcgtctatctgatttccgccgttgccgaaaccaaccgcgcaccgtttgacgtggcagagggcgagtccgaaatcgttgccggacaccacgttgaatattccggcttcgcattcgcgctgttcttccttgccgaatacattttcatgattctgattgccgcgctgacatcgctgatgtttctcggcggctggttgtctccgttcccgcaaagctggggctttatcggtacgccttccgcattctggatgtttgtgaaaatggcggcagtgttgtactggtatctgtggatccgtgcaaccttcccgcgctaccgttacgaccaaatcatgcgtttgggctggaaagtgctgattccgatcggcttcgcctacatcgtgattttgggcgtgtggatgatttcaccgctgaatttgtggaaataa

SEQ ID NO: 55708 - DNA, 345 bp, Neisseria meningitidis; identical to SEQ ID NO: 36231

SEQ ID NO: 55709 - DNA, 456 bp, Neisseria meningitidis
atggtcgacgcggtcgttaaaactcccgaatttttaccttttacttctgtaggaatattccgttttggtgcggatataacagagtacaaaaacatactggaaacttttatgtatgaacctcctgatgagtttagaacagaatattatgaatctcccgactcaaatttactcatttccgtcaaaaaaaacaaaattatttcgatattttgttatcaggagctatattttatgggcgttaatataataggtctgaattttgaagattttaaacagcttttccatcaccctaaatcatacggtgttgataaatattatttatcaaatgaatcttatccgacatatgtctatgagtttgatgaaataggagtacaagcatgggaagcaaaagggaaaattgttactatcattgccaggggcaaagacaattattcaacagaaccttactacgatgaataa

SEQ ID NO: 55710 - DNA, 330 bp, Neisseria meningitidis; identical to SEQ ID NO: 36564

SEQ ID NO: 55711 - DNA, 2115 bp, Neisseria meningitidis
atggatttattatcggttttccacaaataccgtctgaaatatgcggtggccgtgctgacgatactgcttttggcggcaatcgggctgcacgcttccgtctatcgcatcttcacacctgaaaacatccgcagccgcctccaacaaagcattgcacacacacaccggaaaatctcgtttgatgcggacattcagcgcaggctcctgccccggccgaccgtcatcctgaaaaacctgaccattaccgaacccggcggcgaccggactgccgtttccgtccaagaaaccaaaatcggattgagctggaaaaacctgtggtcggatcagatacagattgaaaaatgggtggtttcgagtgcggaacttgccctgacgcgcgacgggaaaggtgtttggaacatccaagacctgatcgacagccaaaaacgccaagcctcagtcaaccgcattatcgtcgaaaacagcaccgtccgcctcaatttcctgcaggaacagcttatcctgaaggaaatcaacctcaacctgcaatcccccgattcgtcggggcagccgtttgaaagttcgggcatactggtttggggaaagctgtccgtcccgtggaaaagcagggggctgttcctttcagacggcatcggcacgcccaaaatctcaccgttccattttgaagcttccacttcgctggacggacacggcatcaccatttccaccaccggcacacccgccatccgtttcaacgccggcggagcggatgccgccggcctcggcctgcgtgcagacacttccttccgcaacctccacctgaccgcgcaaatccccgcgctggcactcaggaacaacagcattaaaattgaaaccgtcaacggcgcatttaccgccggcggcgaatatgcccaatgggacggttcgttcaaactcgacaaagccaacctgcactccggcatcgccaacatcggcaacgccgaaatctccggcagcttcaaaacaccgcgccaccaaaccaacttctccctcaattcgccgctcgtatggacggaaaacaaagggctggacgcgccgcgcctgtatgtatcgacccttcaggataccgtcaaccgcctgccgcaaccccgtttcatcagccggctcgacggttcgctgtccgtaccgaatctgcaaaattggaatgccgaattaaacggcacattcgaccgccaaaccgttgccgcgaaattcagatacacacatgaagacgcaccgcatctggaagccgccgtcgcactgcaaaaattgaacctgaccccctatcttgacgacgtgcggcaacaaaacggcaaaatatttcccgacaccctcgccaagctgtccggcgacatcgaggcgcacctgaaaatcggaaaagtccaacttcccggcctgcaactggacgatatggaaacctacctccacgccgacaaaggccatatcgcgctcagccgtttcaagtcagggctttacggcggccataccgaaggcggcatcagcatcgccaacacccgtcccgccacttaccgcctgcaacagaatgcaagcaacatccaaatccaaccgctgctgcaagacctgttcggcttccacagcttcagcggcaacggcgatgcggtcatcgacctgaccgcgggcggcgaaacccgaaaagagcttatccgctcgcttcaaggcagcctgtcgctgaacatttccaacggttcgtggcacggtatcgacatggacaatatcctgaaaaacggcatttcgggcaaaactgccgacaatgccgcacccagcacacccttccaccgattcacgctcaacagcgaaatttcagacggcatcagccgccacatcgataccgaactcttctccgacagcctctatgttaccagcaacggctataccaatctggatacgcaggaattgtctgaagatgtccttatccgcaacgccgtccatccgaaaaacaaaccgattcccctgaaaatcaccggtacggtggacaaaccgtccattaccgtcgattacggcaggctgaccggcggcatcaattcgcgcaaagagaaacagaaaatcctcgaagacaccctgctggaacaatggcagtggctcaaacctaaagaaccgtaa

SEQ ID NO: 55712 - DNA, 369 bp, Neisseria meningitidis
atgaaaccgttgaaacgacatcccgcccttatcgggctttcgcgtgaccaccaccattcgctttccctgtgcgtgcgtctgttgcggacgccggaagaaaggcatcgggacgaactcgaaccgcatttttccgaattggaaacccattttcgcgaagaagaagccaagtttgccccaatttggcagaatgtcgcccccgaattgaaacaacgtttcgagaaagaccacgcccgactgcggcagatgatggcaagccccgaatacggtaacgcggcgtggaataccgcttttgccacaaccctgcgcgaccacgcgcgctttgaagaacgcgagctgtttcccgccgccgaaccgtttttgccggcatga

SEQ ID NO: 55713 - DNA, 714 bp, Neisseria meningitidis; identical to SEQ ID NO: 55529

SEQ ID NO: 55714 - DNA, 702 bp, Neisseria meningitidis
atgttcagacggcatcggcatttgaaaaatatgcagattaaaaaaatcatgaaatggcttcccgtcgccttgtcgcttttgggtgcgttgggttatacggggtacggcagcgaggcggtgcggacggcggttgccgtactcgacgtactcggcgcggcaggggacgcgggttccgacgcgcccgcccgccgccgagcatcggcgaaatccggccaccgctacacaggcacggtgtccaaagtctatgacggcgacacccttcacgttatcgacggcgacggcgcgaaacacaaaatccggatggcgtatatcgacgcgccggagatgaaacaggcttacggcacgcgttcgcgcgacaacctgcgtgcggcggcggaaggcaggaaagtcagcgtgcgcgtgttcgacaccgaccgctaccagcgcgaagtggcgcaggtttctgtcggcaaaaccgatttgaacctgatgcaggtgcaggacggggcggcgtggcattataaaagttatgctaaagaacagcaggataaggcggattttgccgattatgccgacgctcaaattcaggcggaaagggaacgcaaaggattgtggaaagctaaaaatccgcaagcgccgtgggcgtaccgccgggcaggcaggagcggcgggggcaataaggattggatggatgccgtgggcgaatggttgggcatttggtaa

SEQ ID NO: 55715 - DNA, 588 bp, Neisseria meningitidis
atggaacataagctgccgcaactgccttatgaaccggacgcattgtccccgcatctgagcaaagagactttggaattccactacggcaaacaccatcaaacctacatcaccaacctgaacaatcaaatcaaaggtaccgaatttgaaaacctacctttggaagagattgtgaaaaaatcttcgggcggcgtgttcaacaacgcggcacaaacttggaaccacaccttctactggctgggtttcacgcccaaaggtcaaggcaaaccttccggcgaactggccgccgccatcgacgcgaaatggggcagcttcgagaaattccaagaagcgttcaatgcctgcgctgccggtactttcggctccggttgggcgtggctggtaaaaacccctgccggcggattggatttggtttctacttccaacgccgctacgccgctgaccactgaaaacacgccgctgctgacctgcgacgtgtgggaacacgcctactacatcgactaccgcaacagccgccccaactacctgaaaggtttttgggaaatcgtcaactgggacgaagtcgccaaacgcttcgccgccttgtcctga

SEQ ID NO: 55716 - DNA, 975 bp, Neisseria meningitidis
atgacagaatatcccggcatcgggtcgccgttgttttacggcgttttttttgcggcagtgctggtcatgattgccttggatatgttttcgctgaagaaaaacggcagccataaagtcggcgtcaaagaagccttggcatggagcggcttgtgggttgccgtatcctgcctgttcgcgggctggctgtatttcgaactcgccggcaatctcggctacggcgcggcagtcgcaaaagaaaaagtattggaattctttaccggctacattttggaaaaatcgttggcagtcgacaatattttcgtgttcctgatgatattcggctacttcaaagtcgcaccacagtttcagcaccgcgtgctgctgtacggcgtattgggcgcattggtattgcgcactgtcatgattttcgtcggcgcggcactggttcagcagtttgagtggattctgtatctgtttggcgcgttcctgctctatactggtatacacatgatgaagcccgaaggcgatgagaaagaggatttggcaaacagcaggctgctgaatgccgtcaagaaagtcgttccggtcggcacggaatttcacggcgagaaattttttaccgtcgaaaacggcaaaaaaatcgccacgccgctgtttttggtgctggtcatgattgaattgagcgatgtcgtgtttgccgtggacagtattcccgccgtctttgctgttaccaccgatccgtttatcgtgctgacctccaatattttcgctattttgggtttgcgggcgatgtatttcctgctggcggatgtggcggaacgctttatcttcctgaaatacggcttggcattcgtgttgagttttatcggtgtgaaaatgctggtaatgcattgggtgcatatcccgatttccgtttcgctgtcggtcgtgttcggcgcgttgggtgcatcgatactgacctcgttaatttatacgaaaaaacagcctgataaataa

SEQ ID NO: 55717 - DNA, 408 bp, Neisseria meningitidis
atgacttataccactgccaaagccgccgaaaaaataggcatctccgcccacaccctacgtttttacgacaaagaaggcttgttgcctaatatcggacgtgatgaatacggtaaccgctgttttaccgataacgatttgcaatggttgggcttattgcaatgcttgaaaaatacgggaatgagcttaaaagacatcaaacgctttgcggaatgtaccgtcattggcgacgataccattgaagaacgcctttccttgtttgaaaatcaaatagaaaatgtgaagtgtcaaattgccgaattaaaacgctatttagatttgcttgaatacaaattggcgttttaccaaaaagcgaaagcattaggttcggtaaaagccgtaaatttgccgcaaattcctgaaacggcttag

SEQ ID NO: 55718 - DNA, 1467 bp, Neisseria meningitidis; identical to SEQ ID NO: 40216

SEQ ID NO: 55719 - DNA, 1422 bp, Neisseria meningitidis
atggacacaaaagaaatcctcggctacgcggcaggctcgatcggcagcgcggttttagccgtcatcatcctgccgctgctgtcgtggtatttccccaccgacgacatcgggcgcatcgtgctgatgcagacggcggcgggactgacggtgtcggcattgtgcctcgggctggatcaggcatacgtccgcgaatactatgccgccgccgacaaagacactttgttcaaaaccctgttcctgccgccgctgctgtctgccgccgcgatagccgtcctgctgctttcccgcccgaccctgccgtctgaaatcctgttttcgctcgacgatgccgccgccggcatcgggctggtgctgtttgaactgagcttcctgcccatccgctttctcttactggttttgcgtatggaagggcgcgcccttgccttttcgtccgcgcaactcgtgcccaagctcgccatcctgctgctgctgccgctgacggtcgggctgctgcactttccggcgcgcaccgccgtcctgaccgccgtttacgcgctggcaaaccttgccgccgccgcctttttgctgtttcaaaaccgatgccgtctgaaggccgtccggcgcgcaccgttttcatccgccgtcctgcatcgcggcctgcgctacggcataccgatcgcactaagcagcatcgcctattgggggctggcatccgccgaccgtttgttcctgaaaaaatatgccggcctagaacagctcggcgtttattcgatgggtatttcgttcggcggggcggcattattgttccaaagcatcttttcaacggtctggacaccgtatattttccgcgcaatcgaagaaaacgccccgcccgcccgtctctcggcaacggcagaatccgccgccgccctgcttgcctccgccctctgcctgaccggcattttctcgcccctcgcctccctcctgctgccggaaaactacgccgccgtccggtttatcgtcgtatcgtgtatgctgccgccgctgttttgcacgctggtagaaatcagcggcatcggtttgaacgtcgtccgaaaaacacgcccgatcgcgctcgccaccttgggcgcgctggcggcaaacctgctgctgctggggcttgccgtaccgtccggcggcgcgcgcggcgcggcggttgcctgtgccgcctcattttggctgttttttgttttcaagaccgaaagctcctgccgcctgtggcagccgctcaaacgcctgccgctttatatgcacacattgttctgcctggcctcctcggcggcctacacctgcttcggcacgccggcaaactaccccctgtttgccggcatatgggcggcatatctggcaggctgcctcctgcgccaccggaaagatttgcacaaactgttgcattatttgaaaaaacaaggtttcccattatga

SEQ ID NO: 55720 - DNA, 414 bp, Neisseria meningitidis
atgataccctcctacacctacgccgccctcgccttttccgccttcacttccgccaccctcctgcccggcacatccgaagccgcctttgccctgttcgtccaccgctttcccgaacacgcatacggcgcgttgctgtgcgccggccttgccaacggattgggcagtatggtttcctattggatggggcgtttgctgccctcccgaaaaatgccgtctgaaaaaacactgaatctgatgcggcgtttcggtatttggctgcttgcgtttgcctggctgcccgtcgtcggcgacgcactgccgcttgccgccggctggctgcggttgaatccgtggacaagcgggctgatgctggttatcggcaaaacggcgcgttacgccttcattctgtggggaatgcaatattacgccgcctga

SEQ ID NO: 55721 - DNA, 309 bp, Neisseria meningitidis
atgaccctgaaaaccgatttattgcttaaaatcaacaacgaagattatcaacgcctcatcctcaaacacatctcggaattcagcgagggcgaaatccgcctgttgaacgaaatccttgaaaaattcaatttcgacgtcgttcaggcgcaggcattggcgcaggcggtaatgcagcaagtccgcttcgaccccaacgcctaccacatcgacagcgacgacgaagacaccacaggcatctgcccacactgcatcaacccgcctatgccgcccctgcgcgactatctcgtttggcgcgaaacgcgcgggtaa

SEQ ID NO: 55722 - DNA, 1446 bp, Neisseria meningitidis
atggcgcattttttcaatattaattatccgacttacaaaggtaaaaacatgactgtccgtatcgaacacgatttattgggcgaccgcgagattcccgccgaagtgtattggggcatccacaccctgcgcgccattgaaaactttaaaatctccacacaaaaaatttctgacgtgccgcagtttgtccgcagtatggtgatggtgaaaaaggcgacggcacaggcaaacggtgagttgggcgcggtcaagcccgaaatcgccgccgccattgaaaaagcctgcgacgaagttctgctgaacaaccgctgcctcgaccaattcccgtccgacgtgtatcagggcggtgcgggtacttcggtcaatatgaacaccaacgaagtcatcgccaacctcgcattggaagtcttgggatacgaaaaaggccgctacgacatcgtcaatccgatggatcacgtcaatgccagccaatcgaccaacgatgcctatcccacgggcttccgccttgccgtgtattacagcatcggcgaattgctcgacaaactgactgtcctgaaaaacgcctttgccgccaaagccgaagaatttaaagacgttttgaaaatgggccgcacccagcttcaagatgccgtgccgatgactgccggccaagaattccaatctttccaagtgttgttggaagaagaaatcctcaacctcgaccgcacccgccaactgctgttggaagtcaatttgggcgcaacggcaatcggcacgggcgtgaacacgcccaaaggctacgccgaactggtggtcaaaaaactctccgaagtcagcggcttgccttgcaaactgaccgaaaacctgattgaggcgacctccgactgcggcgcatatgtgatggtacacggcgcattgaagcgcacggcggtcaaactctccaaaatctgcaacgacttgcgcctgctctcttccggcccgcgtgccggcttgaaagaaatcaacctgcccgaattgcaggccggttcttccataatgcccgccaaagtcaatcccgtgattcccgaagtggtcaaccaagtctgcttcaaagtcatcggcaacgacacgacgattaccttcgccgccgaagccgggcaactgcaattaaacgtgatggagccggtcatcgcccaatgtatgtttgaaaccatttccctcttgggcaatgccgcagtcaacctgtccgacaaatgcgtcaaaggcattacggtcaaccgcgaaatctgcgaacgttacgttttcaactccatcggtttggtgacttatctgaatccgtatatcggacaccacaacggcgatttggtcggcaaaatctgcgcccaaaccggcaaaggcgtgcgcgaggttgtcttggaacgcgggctgttgagcgaagaagaactcaaccgcatcctctctcccgagaacctgatgaacccccatctgtaa

SEQ ID NO: 55723 - DNA, 594 bp, Neisseria meningitidis
atgtctgaattattaaactatgttgcttcctgccgcctgccgaccgaatggggcgtatttacgatgcacggctttgaagaggcaaatgggcaggaacacgtcgcgctgaccgtcggtgatttttcagacggcaatccggttctgacgcgcatccactccgaatgcctgacgggcgatgcgctgttctcgagaaaatgcgactgcggacctcaacttgaagcggccatgagggccgtacagacagaggggcgcggcatcatcgtctatctgcgtcaggaaggacgcggcatcgggctgattaacaaaatccgcgcctatcatctgcaagaccaaggtatggatacggttgaagccaatttggcactcgggctgcccgtcgatgcccgcgatttccgtttggcgcaatctatctacgaatatctgggcatccgctcggtcaaactgctgaccaacaaccccgaaaaaatccaaaccctgaaagatgcggggattaacgtggtcgaacgcatccccctgcacgtcggggaaaaccttgaaaacaaacgctacctccaaaccaaagcagacaagctgggacatctgatgtcggaataa

SEQ ID NO: 55724 - DNA, 1155 bp, Neisseria meningitidis
atgaaattcatcgacgaagcaaaaatcgaagtcgccgcaggcaaaggcggtaatggcgcaaccagtttccgccgcgaaaaattcgtaccgcgcggcggcccggacggcggcgacggcggcaaaggcggtagcgtctgggcggaagccgacgaaaacaccaacaccctcgtcgaataccgcttcgttaaacgctaccaagccaaaaacggcgaaaaaggccacggctccgatcgttacggcgcaggtgcggacgacatcgtcctcaaaatgcccatcggcacccttatccgcgacctcgacaccgacgaaatcgttgccgacctcacctaccacggtcagcgcgtctgccttgccaaaggcggcaaaggcggcttgggcaacatccacttcaaatcctccgtcaaccgcgccccaaaacaatccacgcccggcgaagaaggcgaaacccgctccctgcaactcgaactcaaagtcctcgccgatgtcggcttattgggtatgcccaacgccggcaaatccaccctgattaccgccgtatccgccgcacgccccaaaatcgccaactaccccttcaccaccctgcatccaaacttaggcgtggtacgcatcgacgaaaaccacagcttcgtgatggctgacatccccggcctgattgaaggcgcggcagaaggcgcgggtttggggcatcgtttcctcaaacacttatcgcgcaccggattattgctgcacgtcgtcgatttggcacccttcgacgaaaccgccaaccccgccgaagaagccctcgccatcatcaacgaattgcgcaaatacgacgaagagctctacgacaaaccacgctggctggtgctgaacaaactcgatatgctcgatgaagaagaagcccaagcgcgtagcgccgccttcctcgaagccatcggctgggactacccgaaacccgacgaccgtttccaatttgacatggaaaccccgcgcctcttccaaatcagcgcgctgacccaccaaggcacgcaggaattggtacaccaaatcaaccaatacctgaccgagaaaaaacgtatcgaagctgaaaaagccgaagcggagaaagcagcggcaaatgttgaaattatcgaacagcagcctaaaacggatacgggcgtgtttaagccggagtga

SEQ ID NO: 55725 - DNA, 126 bp, Neisseria meningitidis
ttgaaagaggattttattaataatgagcgatatgaaaaaacagaattatatccccaaaaagataaggtaattctatttccaaagtttggcgaatatgatttggtgttaaatccggacattatttaa

SEQ ID NO: 55726 - DNA, 780 bp, Neisseria meningitidis
atgagcgcaaccattcccccaaaaatcatccgatacgacagcaatccgaccgatgtctattttttcggcacttgcgtccttgatctttttatgcccgaagcaggcatggatgccattaccctaatcgagcagcagggcatacgcgtccatttcccgatggcgcaaagctgctgcggccagcctgcctattcatccggccatccgaccgaagccttcgatgtcgccaaagcgcaacttgaccttttccccgaaaactggccgattgtcgtaccgtccggttcgtgcggcggtatgatgaaacaccattggccgacgctgtttaaaggcagcgagtacgaggaaagggctgtggattgcgccggccgcatcatcgagtttacccatttcctgcttgccatcggtttcaaacccgaagacaagggcgaaccgctcaaagtcgccgttcacacttcctgcgccgcccgccgcgaaatgaatgtccatctttcaggctggcaactgattgacggtatggaaaacgtcgaacgcatcgtccacgaccacgaaagcgaatgttgcggcttcggcggcacattctccgtcaaacaagccgatatttccggcgcgatggtaaccgacaaagtcgccgcgctgaaagaaaccggcgcaaccgaaatcatcagcgcggactgcggctgtatgatgaacatcggcggcaaaatcgccaaggacgagccggatatgccgcgtccgaaacatatcgcatccttcttgttggaacgcaccggaggcaaagcatga

SEQ ID NO: 55727 - DNA, 423 bp, Neisseria meningitidis; identical to SEQ ID NO: 38910

SEQ ID NO: 55728 - DNA, 546 bp, Neisseria meningitidis
atgcttaaaacatcttttgccgtgttgggcggctgcctgctgcttgccgcctgcggcaaatccgaaaatatggcggaacagccgcaaaacgcggtacaaagcgcgccgaaaccggtttttaaagtcaaatatatcgacaatacggcgattgccggtttggctttgggacaaagcagcgaaggcaaaaccaacgacggcaaaaaacaaatcagttatccgattaaaggcttgccggaacaaaacgtcgtctggctgaccggaaagcataccaacgacttggaagccgtcgtcggcaaatgtatggaaaccgacggaaagggcgcaccttcgggctgggcggcaaacggcgtgtgccataccttgtttgccaaactggtgggcaatatcgccgaagacggcggcaaactgacggattacctgatttcgcattccgccctgcaaccctatcaggcaggcaaaagcggctatgccgccgtgcagaacggacgctatgtgctggaaatcgacagcgagggggcgttttatttccgccgccgccattattga

SEQ ID NO: 55729 - DNA, 1512 bp, Neisseria meningitidis; identical to SEQ ID NO: 44625

SEQ ID NO: 55730 - DNA, 483 bp, Neisseria meningitidis
atgggaatagaaggcgttttgaaaaaaggtttcatcaccaccagcgcggatacggtgttgaactatatgcgtaccggttcgttgtggccggttactttcggcttggcctgctgcgccgtggaaatgatgcatgcgggtatggcgcgttatgaccttgaccgtttcggtatcattttccgtccgtccccacgtcaggccgacctgatgattgtggcaggtacgctgaccaacaaaatggcgccagccctgcgccgtgtatacgaccagctcgccgagccacgctgggtattgtctatgggctcgtgtgccaacggcggcggctattatcactattcttattccgttgtgcgcggtgccgaccgcgtcgtgccggtagacgtttatgtgccgggttgtccgccgactgcggaagccctgatttacggcctgattcagctccaacaaaaaatcaagcgcacttccaccatcgcgcgtgacgagtaa

SEQ ID NO: 55731 - DNA, 693 bp, Neisseria meningitidis
atgtattcgaataatgctataactaataatagaaacaatattactctaggtgcgtatagggatgctattatttccatattttctgatgaaaatgtggttagggcgattggtacgattaactcaatgtacgaagaatatttgaccctttcgcacaagatagatcaacgagcatttttaagggagggtgagcgtctgtctgctaaggcaagagaattccaacgcacagcagaagaggcacaaaaaagcttaaaagaaggaattggaagagctgctagtaaatttcgtggtaattcaaaggaggcatttgttgcaagaaaagtacaaagtgatttgcaaaaagcattgaatgctagcaactataacaagcagcaatatgcaagacgtgcggcaacagcgttagagaatgcttcaaaatcaaaagttatggcagcgaatttgggtaagtttacttatggggcaactgttgccatgggaactttgagtatgggaagtgcttggtggaaagccttggatgaagaaggaaattggagtgatgttggtctctcatcagcttcttttttgggtgggctaatgggcttccaatggggtgcggctttgggtgttggggcttttggtttacttactggtggcgcaggttggctagtagttggaactataattggaggtggctcagagcttggtggggatcattag

SEQ ID NO: 55732 - DNA, 435 bp, Neisseria meningitidis
atgtgcgggttgtggctgctgcgcgccctgactgccaaactgccccaacagcgttatgcggctttgtttattacactgttttttgccgcagtattggtgttcgggcggcatgattcgatgtattggtatcccgtcctcgtcaatctgatgatgttggcggtgttcggcggcagcctgtttgcagggcagacggtgattgaaaaacttgcgcggctgcaacagcccgacctgcctgaaaaagccgtgcgctatacccgccgggtaacgcaggtttggtgcgtattttttataatcaacgggacgcttgccgctttgttggcacggttggggcgatatgattggtgggcggtttatacaggcgtgattgcctatgtattgatggggatgctgtttgccggcgaatggctttaccgcaaactcgttttgaaagtctga

SEQ ID NO: 55733 - DNA, 1110 bp, Neisseria meningitidis; identical to SEQ ID NO: 50980

SEQ ID NO: 55734 - DNA, 372 bp, Neisseria meningitidis
atgccaactatcaaccaattggtacgcaaaggccgtcaaaagcccgtgtacgtaaacaaagtgcccgcactggaagcctgcccgcaaaaacgcggcgtgtgcacccgtgtatacacgactacccctaaaaaacctaactctgcattgcgtaaagtatgtaaagtccgcctgaccaacggttttgaagtcatttcatacatcggcggcgaaggtcacaacctgcaagagcacagtgtcgtattgattcgcggcggtcgtgtaaaagacttgccaggtgtgcgttaccacactgtacgcggttctttggatactgcaggcgttaaagaccgtaaacaagcccgttccaaatacggtgctaagcgtcctaaataa

SEQ ID NO: 55735 - DNA, 174 bp, Neisseria meningitidis; identical to SEQ ID NO: 36913

SEQ ID NO: 55736 - DNA, 750 bp, Neisseria meningitidis
atgcttatccaggcagttaccattttccccgaaatgttcgacagcattactcgctacggcgtaacgggacgcgcgaacagacagggaatctggcagtttgaagcagtcaatccccgaaagtttgccgacaacagattgggctacatcgacgaccgcccgttcggcggcggcccgggaatgattatgatggctccgccgcttcatgcagcaatagaacacgccaaagcacaatcttcccaagctgcaaaagtcatttacctcagcccccaaggaaaaccgctgacacacccaaaagcggcagaactggcagaacttccgcatctgattctgctgtgcggacgctatgagggaatagacgaaagactgctgcaaaccagcgtcgatgaagaaatcagcatcggagacttcgttgtttccggcggagagcttcccgccatgatgctgatggatgcggtattgaggctcgtacccggcgtattgggcgatatgcagtctgccgaacaagattcgttctcaagcggcattttggactgcccccactacaccaaacccttagaatttcaaggcatggctgttccggaagtattacgttccggcaatcatggcttgatagcggaatggcggttggaacaatcgctgcgccgcaccttggagcgcagacccgatcttttggaaaagcgcagtttaatcccaaaggaatcccgcatcttgaataaaatcctacaagagcaacgggaaatccaatcataa

SEQ ID NO: 55737 - DNA, 429 bp, Neisseria meningitidis
ttggggaattttgcaaaggtctcaggttatacctacaacaagagcaggtataggaatgcagccgaagtcaacgccgaacgccttgccaaaaattccagtgcagacccgtacaacttcagcaatttcacacccgtgcatatattccgtttcggaacgagtttccatataccgaatacggggctgaccgtcggcggcggcgtgtccgcacaaagcagcacaagcagcctgtacaacatcaggcagggcggctacgggctgatagacggtttcgtccgttacgaattgggcaaacacgccaaattgagcctcatcggtacgaacttaaacggacgcacttattttgagaacaactacaaccgtacgcgcggcgcaaacaacttctatggagagccgcgcactgtcagcatgaaactggattggcagttttaa

SEQ ID NO: 55738 - DNA, 873 bp, Neisseria meningitidis
atgcccattttgaaccatattgccctcatcggtgtagggctgatcggcggttcgttcgttctcgacctcaaaaggcagggactcgtccgcaccgttaccggtatcgacaccgaccgcgacaacctcgaacgtgcattggaacgcggcgtgattgaccgggcttccgttgccatcgacgcggacagcatcggcggtgcggacttggtactgattgccacgcccgtcgccaccgttcctgccattttgaccgcgctgcgccccgttttgccggaacacacttggatttccgatgtcggcagcaccaaatcttcggtcatcgaagccttccgccgctgtctgcccgaccgcctgcaccactgcatcgccacccacccgattgccggttcggacagaagcggtgcgcaagccgcgcagttcgggctgttccgccacagaaaactcatcatcacgccacacggcggcgaacattcagacggcattgccttgatagaaaacctgtggcacgcggtcggtgcggaaatttatacgatggacgcgcaacgccacgacgcggttttcgccgccgtctcccatatgccccacctgaccgccttcgcctatgtccaccagattctcgaccaccccgacggacaggaatatctgaaattcgccgccacgggctttcgggacttcacccgcatcgcctccggccatcccgccgtgtgggcggacatctgccttgccaacaaagacagcctgctgcaactggttcaaggcttgggcaaacagttggacgttttagcagacatcctgaccgccgacgaccgcgaagccctgtaccgctattttgaagaagccaaaaccacacgcgaccgctggctggacggcaactga

SEQ ID NO: 55739 - DNA, 1470 bp, Neisseria meningitidis; identical to SEQ ID NO: 43805

SEQ ID NO: 55740 - DNA, 405 bp, Neisseria meningitidis
atgacacaagaaaccgctttgggcgcggcactgaaatccgccgtccaaactatgagcaaaaagaaacagaccgaaatgatcgccgaccacatctacggcaaatacgatgtattcaaacgcttcaaaccgttggcgctcggcatcgatcaggatttgattgccgctttgccgcaatacgattccgcactgattgcacgcgtcctcgccaaccactgccgccgtccgcgttatctgaaagccttggcgcgcggcggcaaacgtttcgatttgaacaaccgtttcaaaggcgaagttacccccgaagaacaggcgatcgcgcaaaaccatcctttcgtgcagcaggctttgcaacagcagtccgcccaagctgtcgccgaagcagccggatcttccgcagcagaataa

SEQ ID NO: 55741 - DNA, 363 bp, Neisseria meningitidis
atggatatccgatatttcggcacaacgccccgctattccgaagccgtcggcgcaaacggcttgattttcctctccggcatggttcccgaaaacggtgaaacggctgccgaacagactgccgacgtgcttgcccaaatcgaccgctggctggcggaatgcggctcggacaaagcgcacgttttggatgcggtcatctatctgcgcgatatgggcgactatgcggaaatgaacggcgtgtgggacgcttgggttgccgccggcagaacgcccgcccgcgcctgcgtggaagcgcggctcgcccgtccggagtggcgcgtcgaaatcaaaataaccgccgtgaagaaagatgcggcaaccgcataa

SEQ ID NO: 55742 - DNA, 1308 bp, Neisseria meningitidis
atgaagccagtaaacatcggtcttttaggtttgggtacggtcggcggcggtacggctgccgtgttgcgggacaacgcggaggaaatttcccgccgcttggggcgcgaagtgcgcatcagtgccgtatgcgacttgagcgaagaaaaagcccgccaaatctgcccgtccgcagcctttgtcaaagatccgttcgaactggtcgcgcgtaaagacgtcgatgtcgtcgtcgaattgttcggcggcacgggcattgccaaagatgcggtgttgaaagccattgaaaacggcaaacacatcgttaccgccaacaaaaaactgctcgccgaatacggcaacgaaatcttcccgctggcggaagaaaaaaatgtcatggtgcaatttgaagcggcagtagcgggcggtatcccaatcatcaaagccctgcgcgaaggtttggcggcaaacaggattaaatccatcgccggcattattaacggcaccagcaacttcatcctctccgaaatgcgcgaaaaaggcagcgcgtttgccgatgtactgaaagaagcgcaggcattgggttatgccgaagccgatccgaccttcgacatcgaaggcaacgatgcgggccataaaatcaccatcatgagcgcactggcattcggcacgccgatgaacttttccgcctgctacctcgaaggcatcagcaaactcgacagccgcgacatcaaatacgccgaagaacttggctatcgcatcaaactgttgggcattacccgcaaaaccggcaaaggcatcgagctgcgcgtccaccctaccctgattcccgaaagccgcctcttggcaaacgtcaacggcgtgatgaacgccgtgcgcgtcaacgccgatatggttggcgaaaccttatattacggcgcgggcgcgggcgcattgccgaccgcttccgccgtggttgccgatatcatcgacatcgcccgcctggttgaagccgataccgcccaccgcgtaccgcatctggcgttccaacccgcgcaagtccaagcgcaaaccatcctgcctatggacgaaattaccagcagctactacctgcgcgtccaagccaaagacgaaccgggcacgctggggcaaatcgccgcgctgttggcacaagaaaacgtgtccatcgaagcactgattcaaaaaggcgtgattgatcagaccactgccgaaatcgtgattctgacccacagcacggtcgaaaaacacatcaagtcggcaatcgcagccatcgaagcactggattgcgtggaaaaaccgattaccatgatccgcatggaaagcctgcatgactga

SEQ ID NO: 55743 - DNA, 648 bp, Neisseria meningitidis
atgagaatagagatcacaccaatcagcgaatccgctttggtctgccgactgaatgcaccttccgaactgggcaaacagcaaaagttgtgggcgtttgccgctgcgctcgggcagcacgacaggattgaggaagtggtggtcggcatgaacaatctgaccgtgtttacccgtttcgataccgatttggcgacgcttgccgatgaattgcaatatgtgtgggaacacaccgccgttacagaccatcagggcaaactggtggaaattcccgtctgctacggcggcgaatacggcccggatttggcggaagtcgctgctttccatcagacggttatttccgaaatcgtccgccgccatacggcgcaaacttataccgtatttatgatgggcttccagcccggtttcccttatctgggcggcttgcccgaagcattgcacacgccccgccgtgccgtgccgagaacgtccgttcctgccggttcggtcggtatcggcggcagtcagaccggtgtgtatccgttcgcttcgcccggcggctggcagattatcggcagaaccgaattacccttgttccgagccgatttgaatccgccgaccctgctggcggcgggtgaccaagtccgctttgttgcagaaaggattgagccatga

SEQ ID NO: 55744 - DNA, 978 bp, Neisseria meningitidis
atgatttatccgtggcataatgagcaatggcggcagattgcggaacattgggagcgtcgtcccaatgcatggctgtttgccggcaaaaaagatacggggaaaactacatttgcccgctttgcggcgaaggcactgttgtgcgaaacccctgcaccgggctgcaaaccctgtggcgaatgtatgtcctgccatctgtttggacagggaagccatcccgatttttacgaaatcacccccttgtcggacgaacccgaaaacggacgcaaactgttgcagatcaaaatcgatgccgtcagggaaatcatcgataatgtgtacctgacttcggtacggggcggtttgcgcgtgattctgattcatcctgcggaaagtatgaatgtccaagccgccaacagtttgttgaaagtgttggaagaaccgccgccacaagtggtctttttgctggtcagccacgcggcggacaaggttttaccgaccattaaaagtcgctgccggaagatggttttgcccgctccttcgcatggggaagcattggcatatctgcgcgacaggggtgtggcggagccggaagaatttttggcgttccattcgggtgcgccgctgtttgatgaggcggacggtgtccgtgcgttgcggattaaactgttggatattttggcagaaccaaggttgttgaagattttggattacgccgcgcttttcgataaggagaaacttccgctcgacgtatttgtcgggtggatgcagaaatggctggtcgatttgggattgtgcctgcaacacatgaaacccgtctattatcccgcttatgaagacaggctgcttcagacggcatccggtttccgcccgcgcaatgtatttgcggcggaggatatgctcaaacagcttgccccttacgggtttcatactttaaatgtcaaaatgcagatcgagcatctgctcatcaattatttggaattgaagaaagagaacgggtga

SEQ ID NO: 55745 - DNA, 552 bp, Neisseria meningitidis
atgaaagttttgaacggttggtcggacaggaagatgtggcgggttttgagtgctttgccgataggcgtggtgttttttgatttgatctacggttttgtgttgaatatcttgcagggtttggatttgcagcgtgccgtgccggattcggaaggcgtgttggcggttacgcccgatattgcattcaacagtttgcagattgtcgccaacggcggtatggcggcggtggtctgtttcgggttggcggttgtgtttctgctcaaccgttcggtgcggcggcggcaggtgttggaaatcggggtgttccggatgttggggctggtggcggtgttggcgttcagtgcgccgtcggtgtgggagtgggcgaacgcgctgccgctgctgctgaagggcgcggacgtggtcaatacggggaatgcgcgttatgtgctgacggctttgtgtatgccctttccggcggtgtcgtgcgtcatcgggctggtggggcggttcaggcttcagacggcatcgggcagggcggcaaaggcagggggtgcggtcaaggcgggcggatag

SEQ ID NO: 55746 - DNA, 372 bp, Neisseria meningitidis; identical to SEQ ID NO: 39277

SEQ ID NO: 55747 - DNA, 537 bp, Neisseria meningitidis; identical to SEQ ID NO: 42803

SEQ ID NO: 55748 - DNA, 942 bp, Neisseria meningitidis; identical to SEQ ID NO: 38511

SEQ ID NO: 55749 - DNA, 546 bp, Neisseria meningitidis
atgaaacactatgccttactcatcagctttctggctctctccgcgtgttcccaaggttctgaggacctaaacgaatggatggcacaaacgcgacgcgaagccaaagcagaaatcatacctttccaagcacctaccctgccggttgcgccggtatacagcccgccgcagcttacagggccgaacgcattcgacttccgccgcatggaaaccgacaaaaaagggggaaatgcccccgacaccaagcgtattaaagaaacgctggaaaaattcagtttggaaaatatgcgttatgtcggcattttgaagtctggacagaaagtctccggcttcatcgaggctgaaggttatgtctacactgtcggtgtcggcaactatttgggacaaaactacggtagaatcgaaagcattaccgacgacagcatcgtcctgaacgagctgatagaagacagcacgggcaactgggtttcccgtaaagcagaactgctgttgaattcttccgacaaaaacaccgaacaagcggcagcacctgccgcagaacaaaattaa

SEQ ID NO: 55750 - DNA, 684 bp, Neisseria meningitidis
atggaattggtatttatccgccacggacaaagcgaatggaacgcgaaaaacctgtttacaggctggcgcgacgtgaagctgagcgggcaggggcttgccgaggccgccgccgccggtaaaaaactgaaagaaaacggctatgagttcgacatcgccttcacatccgtcctgacccgcgcgattaagacctgcaacatcgttttggaagaatccgaccaactgttcgtaccgcaaatcaaaacatggcggctgaacgaacgccactacggccgactgcaaggtttggacaaaaaacaaaccgccgaacaatacggcgacgagcaagtccgcatctggcggcgcagctacgacaccctgccgccgcttttggacaaagacgatgagttttccgcacacaaagaccgccgctatgcccatctgcctgccgatgtcgtacccgacggcgaaaacctgaaagtaacgctggagcgcgtattgccgttttgggaagaccaaatcgcccccgcgattttgagcggcaaacgcgtcttggtggcggcgcacggcaactccctgcgcgcgctggcaaaacacatcgagggcatttccgacaaagacatcatgggcttggaaatcccgaccggtcagccgttggtgtacaaattggacgacaatttgaaagtcatcgaaaaattctacctgtaa

SEQ ID NO: 55751 - DNA, 1065 bp, Neisseria meningitidis
atgaaagcagcacgttttcacgataaaggcgacatccgcatcgaagacatccccgaaccgaccgtcgcccccggcactgtcggcatcaatgttgcttggtgcggcatctgcggtaccgacctgcacgaattcatggaaggcccgattttcattccgccttgcggtcatccgcacccgatttccggcgagtccgcacccgtcacgatgggacacgagttctccggcgtggtctatgccgtcggcgaaggcgtggacgacatcaaagtcggccaacacgtcgtggtcgagccttacatcgtacacgacgacgtaccgaccggcccgggcagcaactaccacctctctaaagacatgaacttcatcggcttgggcggctgcggaggtggcttgtctgaaaaaatcgctgtcaaacgccgttgggtgcatccgatttccgacaaaatcccgttggatcaagccgctttgatcgaaccgctgtctgtcggacaccacgcctatgtacgcagcggcgcgaaagcaggcgacgtcgcattggtcggcggcgcaggtccgatcggtttgctgttggctgccgtgttgaaagccaaaggcatcaaagtcatcatcaccgagttgagtaaagcacgcaaagacaaagcgcgcgaatctggcgttgccgactacatcctcgacccgtccgaagtcgatgttgtcgaagaagtgaaaaaactgaccaacggcgaaggcgtggacgtggcattcgaatgtaccagcgtgaacaaagtgttggatactttggtcgaagcctgcaaacctgccgccaatttggttatcgtatccatctggagccaccctgcaaccgtcaacgtccacagcgtcgtgatgaaagagctggatgtgcgcggcacgattgcctactgtaacgaccacgccgaaaccatcaaactggtcgaagaaggcaaaatcaacctcgaacccttcatcacccagcgcatcaagctggacgaactggtttccgaaggcttcgagcgtctgatccacaacaacgaatccgccgttaaaattattgtgagtccaaacctgtaa

SEQ ID NO: 55752 - DNA, 480 bp, Neisseria meningitidis
atgaaacacatactccccctgattgccgcatccgcactctgcatttcaaccgcttcggcacaccctgccggcaaaccgcccacccaaaacgaaaccgctatgaccacgcataccctcacctcgaaatacagctttgacgaaaccgtcagccgccttgaaaccgccataaaaagcaaagggatgaacatttttgccgtcatcgaccatcaggaagccgcccgccgaaacggcttaacgatgcagccggccaaagtcatcgtcttcggcacgcccaaagccggcacgccgctgatggtcaaagaccccgccttcgccctgcaactgcccctgcgcgtcctcgttaccgaaacagacggcaaagtacgcgccgcctataccgatacgcgcgccctcatcgccggcagccgcatcggttttgacgaagtggcaaacactttggcaaacgccgaaaaactgatacaaaaaaccgtaggcgaataa

SEQ ID NO: 55753 - DNA, 393 bp, Neisseria meningitidis; identical to SEQ ID NO: 40523

SEQ ID NO: 55754 - DNA, 2307 bp, Neisseria meningitidis
atggcgaaaaacctattaatcgtcgaatccccgtccaaagccaaaaccctgaaaaaatatttgggcggcgattttgaaatccttgcatcctacggacacgtccgcgacctcgtccccaaaagcggcgcggtcgatcccgacaacggctttgcgatgaaataccaactcatcagccgcaacggcaaacacgtcgatgccatcgtcgccggagccaaagaagccgaaaacatctacctcgccaccgacccggatagggaaggcgaagcgatttcttggcatcttttggaaatcctcaaatccaaacgcggcctgaaaaacatcaagccgcagcgtgtcgtgttccacgaaatcaccaaaaacgccgtgctcgatgccgttgcccatccgcgcgaaatcgaaatggacttggtcgatgcgcaacaagcccgtcgcgctttggactatttggtcggctttaacctttcgccattgttatggaaaaaaatccgccgcggtttgagcgcgggtcgtgtgcaaagtcccgctttgcgcctgatttgtgagcgtgaaaacgaaatccgcgcgtttgaagcgcaggaatattggacggtgcatctcgacagccacaaaggccgcagcaagtttaccgccaaactcgcccaatacaacggcgcgaaactcgaacaattcgacctgccgaacgaagccgcgcaagccgacgtgttgaaagaactcgaaggcaaagaggccgtcgttaccgccattgaaaagaaaaagcgcagccgcaatcccgccgcgccgttcaccacttctaccatgcagcaggatgccgtgcgcaaactcggcttcaccaccgaccgcaccatgcgtaccgcccaacagctttatgaaggtatagacgtagggcagggcgcgatcggtctgattacctatatgcgtaccgacagcgtgaatttggcggatgaagccttaaccgaaatccgccattacatcgaaaacaaaatcggcaaagaatatctgccgagtgccgccaaacaatacaaaaccaaatccaaaaacgcccaagaagcgcacgaagccatccgcccgacttccgtgtaccgcacgcccgaaagcgtcaaacccttcctgagcgcagaccagttcaaactctatcaaatgatttggcagcgtaccgtcgcctgtcagatgacgcccgccaaattcgaccaaaccaccgtcgatattaccgtcggcaaaggcgtattccgcgtaaccggacaagtgcagactttcgcaggcttcctcagcgtttacgaagaaagcagcgacgatgaagaaggcgaagacagcaaaaaactgcccgaaatgagcgaaggcgacaaattgcccgtggacaaactctacggcgaacaacactttaccactccgccgccacgctacaacgaagccacgctggttaaagccctcgaagaatacggcatcggccgcccctcgacctacgccagcatcatctccacgctcaaagaccgcgaatacgttacccttgagcaaaaacgcttcatgcccaccgacacaggcgacatcgtcaataaattcctgaccgaacacttcgcccaatacgtcgattaccacttcactgccaaactcgaagaccagcttgacgaaattgccgacggcaaacgccaatggattcccttgatggacaaattctggaaaccgttcatcaaacaagtggaagaaaaagaaggcatcgaacgcgccaaatttaccacgcaggaacttgacgaaacctgccccaaatgcggcgaacacaaactgcaaatcaagttcggcaaaatgggtcgcttcgttgcctgcgccggttatccagagtgcagctacacccgcaacgtcaacgaaactgccgaagaagccgccgagcgcatcgccaaagccgaagcagagcaagccgaacttgacgggcgcgaatgccccaaatgcggaggacggctggtgtacaaatacagccgaaccggcagcaaattcatcggctgcgccaactatccgaaatgcaaacacgtcgagccgttggaaaaaccgaaagacaccggcgtccaatgcccgcaatgcaaaaaaggcaacctcgtcgagcgcaaatcccgctacggcaaactgttttacagttgcagcacctatcccgactgcaactacgccacctggaacccgcccgttgcagaaacctgtccaaaatgcgcgtggccggttttgaccatcaaaaccaccaaacgctggggtgtggaaaaagtctgcccgcaaaaagaatgcggctggaaagaacagattgaaccgcctgcaccgaaagagtga

SEQ ID NO: 55755 - DNA, 873 bp, Neisseria meningitidis
ttgcgaccatctgaatcattgggacaaactatgtgtcaactgctgggcatgaactgcaatacgccgaccgatattatgttttcctttgaaggcttccgccggcgcggcggcattaccgaccatcatgccgacggtttcggcatcggctttttcgaaggcaaaggcgtgcgcctgttccatgacgacaaacccagtgccaattcgcccgtcgccgacctcgtgcgcgcctaccagattaaatcggaaaacgtcgtcgcccatatccgcaaagcatcgcaaggacaaacctcgctggcgaacacccatccctttatgcgcgaaatgtggggtggctactggctgtttgcccacaacgggcatttgattgattttttccccgaacagggcgaatttttccaccccgtcggcacaaccgattccgaacgcgcgttctgccacatcctcaaccgcctgcgcacccgctttgccgcccgtcccgacgacgacacgctgtttgacgcgattgcggggctgacgcacgaaatccgcaagttcgggctgtttaactttatgctttcagacggcattgccctgtttgcccacgccagcacactgctgcactacatcgtccgccaagccccgttcggcaaggcgcgcctgctcgacgacgacgtgatggtcgattttgccgaagtaaccacgccctccgaccgcgtcgccgttatcgccaccctgccgctgacccgcgacgaatcatggtcccaacttgccgtggacgaactggtcatgttccgcgaaggcaacatcgtccgacacgaccgtcccgaaaaccccgtttatatgagtgtcgaagaaggtttggaaaccgcgcgcgccgccggcgtcgccgtctga

SEQ ID NO: 55756 - DNA, 1488 bp, Neisseria meningitidis; identical to SEQ ID NO: 39015

SEQ ID NO: 55757 - DNA, 819 bp, Neisseria meningitidis
atgaaaaaagaccatttaaacacaaccggtttcgacctctggcacaccatccgcgaagaaaccgcggccgcggtctccgccgaaccgatgctggcaagttttttgcaccaaaccgtgttgcgccacgagtccctcggctccgtccttgcctaccacctttccagcaaactcggcagcccgattatggacgtgcgtgcgctgtttgaaatctaccagcaggcgttgggtagcgacacccaaatcggcaaatgcgtcgaagcagacttaaaagccatctacgaacgcgatcccgcctgcgacgaatattcgctgccgcttttatatttcaaaggcttccacgcgattcaggcacaccgcatcaaccaccggctgtatctcgacgggcgcaaaacgctggcgtatttcctgcaaaaccgtatgtccgaagtattcggcgtggacatccatcccgccgcccgtttcggatacggtctgatgctcgaccacgccaccggctttgttgccggcgaaaccgccgtgttgggcaacaatatttcgattttgcacggcgtaacgctcggcggttcgggcaaagaaggcggcgaccgccaccctaaaatcggcgacggcgtgatgatcggcgcaaacgcctcgatattgggcaatatccgcatcggcagcaatgccaaaatcggggcgggcagcgtcgtggtttcagacgtgccgccgtccatcacggttgtcggcgtacccgccaaacccgtggcgcgatcgctcaaaacaccgtcggcggatatggatcaaaatatccagtttaccgaaatcgactttatgatttga

SEQ ID NO: 55758 - DNA, 843 bp, Neisseria meningitidis
atggatattaaaatcaacgacttcaccctcggcaacaactcgcccttcgtcctattcggcggcatcaacgttttggaaagcttggattccaccctccaaacctgtgcgcattacgtcgaagttacccgaaaactcggtattccctatatctttaaagcctctttcgacaaggcaaaccgttcctccatccattcttatcgcggcgtaggcttggaagaaggcttaaagatttttgaaaaagtcaaagcagagttcggcatccccgtcattaccgacgtacacgaaccccatcagtgccaacccgtcgccgaagtgtgcgatgtcatccagcttcccgcctttcttgcgcggcagaccgatttggtggccgcaatggcggaaacgggcaatgtcatcaacatcaaaaaacctcagttcctcagcccctctcaaatgaaaaacattgtggaaaaattccacgaagccggcaacgggaaactgattttatgcgaacgcggcagcagcttcggctacgacaacctcgttgtcgatatgctcggtttcggcgtgatgaaacagacttgcggcaacctgccggttattttcgacgttacccattccctgcaaacccgcgatgctggttctgccgcatccggcggtcgtcgcgcacaagctttggatttggcacttgcaggcatggcaacccgccttgccggcctgttcctcgaatcgcaccccgatccgaaactggcaaaatgcgacggccccagcgcgctgccgctgcaccttttagaagattttttaatccgcatcaaagcattggacgatttaatcaaatcacaaccgattttaacaatcgagtaa

SEQ ID NO: 55759 - DNA, 450 bp, Neisseria meningitidis
atgaaaatcggaacaacttggcagacggcatccgctatgctggttttgcgtctgtttgccgcatatgaatttttggaatcgggtttgcaaaaatggaacggggagaattggttttctgaaatcaacgatcaattcccattcccgttcaacttgctgccggacgcgttaaactggaatctcgccatgtatgcggagcttttgctgcccgtactgttgcttttgggtttggcaacgcgtctgtcggcattagggctgatggtcgttaccgccgtcgcttgggctgcggttcacgccggttcgggttacaatgtctgcgacaacggttataaaatggctttaatttatatcgtggtattaatcccgctgcttttccagggtgcgggcggatggtcgctggatacgctgctgaaaaaacggttttgcccccaatgccgtctgaagcaagattga

SEQ ID NO: 55760 - DNA, 657 bp, Neisseria meningitidis
atgaaaaacaaaaccaaagtctgggacttccccacccgccttttccactggctgcttgccgcatccctaccctttatgtggtatagcgcgaaaaccggcggcgatatgctgcaatggcacacgcgcgtcgggctgtttatccttttcctgctcgtattccgcctctgctggggcatttggggcagcgataccgcccgtttctcccgtttcgtccgcggatggtcgggtatcagagagtatatgaaaaacggtattcccgaacacgtccaacccggacacaaccccttgggcgcactgatggtcgtcgcgcttttggccgccgtctcatttcaagtcggcacagggctttttgccgccgatgaaaacaccttcagcaccaacggctacctcaaccatttggtttccgagcatacgggcagccttatgcggaaaatccacctcaactttttcaagctgctcgccgttttttccgccattcatatcgccgccgtcgccgcataccgcgtgttcaaaaagaaaaacctcgtcctcccgatgataaccggcttcaaatacatcgaaggcaaaacctcaatccgctttgccggcaaaaccgcgcttgccgccgcattatcggttgccgcgcttgccgcagccgccatcctgctcctgtcctga

SEQ ID NO: 55761 - DNA, 492 bp, Neisseria meningitidis; identical to SEQ ID NO: 45366

SEQ ID NO: 55762 - DNA, 321 bp, Neisseria meningitidis; identical to SEQ ID NO: 37031

SEQ ID NO: 55763 - DNA, 1227 bp, Neisseria meningitidis
atgccgtctgaaactttccggagtaagaaaatgtcccaaaaattgatcttggttttgaactgcggcagctcgtccctcaaaggcgcggtcctggataacggcagcggcgaagtcctgctcagctgccttgccgaaaaactcaacctgcccgatgcctacatcacattcaaagtaaacggcgaaaaacacaaagtcgatctgtccgcacatcccgaccacaccggcgcggtcgaagccctgatggaagaactcaaagcccacggcctcgacagccgcatcggcgccatcggccaccgcgtcgtcagcggcggcgaactgtacagcgaatccatcctcgttgacgacgaagtcattgccggcatcgaaaaatgcatcccgctcgcccccctgcacaaccccgcccacctcttgggcctgcgtgccgcgcaaagcattttcaaaggcctgcccaacgtcgtcgtattcgatacctccttccaccaaaccatgcccgaagtcgcctacaaatacgccgttccgcaggagttgtatgaaaaatacggcctgcgccgttacggcgcgcacggtaccagctaccgcttcgtcgccgacgaaaccgcgcgcttcctcggcaaagacaaaaaagacctgcgtatggtcattgcccacttgggcaacggcgcgtccatcaccgccgtcgccaacggcgaatcgcgcgacaccagtatgggcctgaccccgctggaagggctggtaatgggtacgcgcagcggcgacatcgatccttccgtattcggcttcctcgccgaaaacgccaatatgaccatcgcccaaatcactgaaatgctgaataaaaaatccggtctgctcggcatttccggcctgtccaacgactgccgcaccattgaagaagaagccgccaaggggcataaaggcgcgaaattggccttggatatgtttatctaccgccttgccaaatacatcggcagtatggcggttgccgcaggcggtttggacgcactggtctttaccggcggcatcggcgaaaactccgacatcatccgcgaacgcgtgatcggctacttgggcttcctcggtctgaacatcgaccaagaagccaacctgaaggcacgctttggcaacgccggcgtgattaccactgccggcagcaaagccgttgccgtggtcattccgaccaacgaggaattgatgattgcacacgataccgcccgcttgagcggtctgtaa

SEQ ID NO: 55764 - DNA, 897 bp, Neisseria meningitidis
atggagtctgaaaacattatttccgccgccgacaaagcgcgtatccttgccgaagcgctgccttacatccgccggttttccggttcggtcgccgtcatcaagtacggcggcaacgcgatgaccgaacctgccttgaaagaagggtttgcccgcgatgtcgtactgctgaagctggtcggcattcatcccgtcatcgttcacggcggcgggccgcagatcaatgcgatgcttgaaaaagtcggcaaaaagggggagtttgtccaaggaatgcgcgttaccgacaaagaggcgatggatattgtcgaaatggtgttgggtgggcatgtcaataaagaaatcgtgtcgatgattaacacatatggcggacacgcggtcggcgtgagcggacgcgacgatcatttcattaaggcgaagaaacttttgatcgatacgcccgaacagaatggcgtggacatcggacaggtcggtacggtggaaagcattgatacaggtttggttaaagggctgatagaacgtggctgcattcccgtcgtcgcccccgtcggcgtaggtgaaaaaggcgaagcgttcaacatcaacgccgatttggtggcaggcaaattggcggaagaattaaacgctgaaaaactcttgatgatgacgaatatcgccggtgtgatggacaaaacgggcaatctgctgaccaaactcacgccgaaacggattgatgaactgattgccgacggcacgctgtatggcggtatgctgccgaaaatcgcttctgcggtcgaagccgccgtcaacggtgtgaaagccacgcatatcatcgacggcaggttgcccaacgcgcttttgctggaaatctttaccgatgccggtatcggttcgatgattttgggcggtggggaagatgcctga

SEQ ID NO: 55765 - DNA, 1152 bp, Neisseria meningitidis
atgagtagtagagaccaactttttaaagccccgccgtttgaaaaccacagcccgctgacctggtatcaggctgcctcacaactgcccaacttcatccgcgacgacgcgcaggctgccgccatcgaacacctcgatcggctttggaccgaattgatgatgttcaaacgcaaaagaaaccgttttttaggcaggagtttgcgttccccgcaagtccccaaagggctttatttctatggcggggtcggacgcggcaaaagctttctgatggacgcttttttcggctgcctcccttaccgccgcaaacgccgcgtccactttcatgcctttatggcagaaatccaccggcggctgaaaaccctgaaaagcgaaagcaacccgttgaaatccgttgccgccgagattgccaaagaaacccgcgtattgtgttttgacgaatttcatgtcagcgatattgcggatgcaatgattttaggccgtctgctggaaaacctgcttaacgagggcgttgttttggtggcgacttcaaactacgcgccttccgaactctacccgcaaggtcaaaaccggagcagttttcttcccacaatcgcgctcatcgagtccagcctgaccgtcttaaatgttgacggcggtgaagactaccgactgcgtaccctccgccccgccgagattttctttacgcctgccaatgaagaaaatgaggcaaaactggcaaaactgttcaaagaaatgacaggcattaccgatttgaaccccggcatcagcaccatccacggtcgggagattccccacaaagccgagtccggccgtgccatatggtttgatttccgcgcactgtgcttcggcccccgctcacagtccgactacctgtatttggccgaacattatgaaatggtttttatttcaggtttggaacaactctcaccgcaagaaaaggcggaggcacggcggctgacttggctgattgacgtactctacgatttccgtgtcaaactgtgtgccaccggcgcggtagatgtcaaccatatctatacagaaggcgattttgccgaagaatttacccgcaccgccagccggatggtcgaaatgcagtccgaagtttatttggaacagccgcacctgaccctatctcccaaggcttcaggcggataa

SEQ ID NO: 55766 - DNA, 240 bp, Neisseria meningitidis; identical to SEQ ID NO: 44857

SEQ ID NO: 55767 - DNA, 483 bp, Neisseria meningitidis; identical to SEQ ID NO: 38977

SEQ ID NO: 55768 - DNA, 696 bp, Neisseria meningitidis
atgagtgagttgattttgaaatgcgaaggcgtgggcaaacgctaccgtgacggcggtttggacgttcgggtgctgcacggcttggatttggaaatcctcgcgggggaaagtaccggcatcatcggttcttcgggcagcggcaaatcgacgctgctgcatattttgggcgggctggatatgccgtctgaaggcagggtgctgctgatgggcgaggatttgcgtacattaagccagcgacaactgggcatcctgcgcaaccgccatctcggtttcgtgtaccagttccaccatcttctgcctgaattttcggcactggaaaacgtgatgatgccgcttctgatcggcaagaaaaaacgggaagaggcggcagaaacggcaatggcgatgctggaaaaggtcggattgaagcaccgttcggcgcaccgcgcgggcgaactgtccggcggtgagcggcagcgtgccgccattgcacgcgccttggttacgcaacccaaatgcctgcttgccgacgaaccgaccggcaatctcgatcgtgcgaacgccaggaatgttttggatatgatgctggaactgaaaacagaattgggaacggggctggtggtcgtaacgcacgacgacgaactcgccggccgcttcgagcgcgtgatggtcatgaaagacggcagcctgcaccccaaacagggcgcaaacgcctaa

SEQ ID NO: 55769 - DNA, 1371 bp, Neisseria meningitidis; identical to SEQ ID NO: 46684

SEQ ID NO: 55770 - DNA, 1737 bp, Neisseria meningitidis
atgccgtctgaaacagttttcagacggcattgttccgctcaattccactttaaaagaccgatacctatggaaaaaatctggttagacagttacgaacagggcgtgaatgccgaaatcgacatcacgcaatacggttccgtcagcgatgtattttgccaaagtgtcaagaaatttgccggccaacctgcttttcaaaacatgggcaaaacgctgacttatgccgaaaccggcaaactggcgaccgatttcgcctcttatctgcaaaacgtcctcaagctgccgcgcggcgaacgtgttgccattatgatgccgaacgtattgcaatatccgattgcccttttcggtattttgcaggcaggtttggtagcggtgaacaccaatccgctctataccccgcgcgagctggagcatcagttgaaagacagcggcgcggccgccatcatcgttttggaaaatttcgccaacacgctggagctggtgctgccgcgcacgcagatcaaacacgtcatcgtcgcctctgtcggcgaaatgttcgggctgcttaaaggttcgctgatcaatttcatcatccggaaaatcaagaaaatggtgcccgaataccgtattcgggaaaccgtttcctttcagacggcattgaaagaaggggcgaagcacgttttccaacctgtcgcattaaaccgcgaagataccgcgctgttgcaatacacgggcggcacgacaggtgttgccaaaggggcggtgctgagtcacggcaacatctgcgccaatatgcttcaggcaaaagaatggattaaaaaccagttgcgcgagggcaaagaaaccgttatcgccgccctgccgctgtatcatatttttgccttaaccgtgaatctgatgatttttgccaatgccggctcgaaaattgtcctgattaccaacccgcgcgatatgaaaggctttatcggcgaactgaaaaaacagcgggttaatgtatttatcggcgtaaacacgctgtttaacgcgatggttaaccggcccgattttgccgaagtcgatttttcagaattgcggctgactttgggcggcggtatggcgacccaaaaagccgttgccgaaaaatggaaaaaaatcaccggcacgcccatcgtcgaagcctacggtttgaccgaagccagccccggcgtgtgctgcaaccccttaaacatcgaatcatacagcggcagcatcggtttgcccgtctcgtccaccgaagtcgaactgcgcgacgcaaacggcaaagaagtccccgtcgggcagccgggcgaattgtgggtaaaaggccctcaagtgatgcaaggctactggaaccgccccgaagaaaccgccaaagccatagacgcgcgcggcttcttggaaaccggcgatattgccgtcatggacgaaaaaggctggttgaagctggtcgatcgtaagaaagacctcgtcgttgtttccggattcaatgtttatccgaacgaaatcgaggaagtcatcgcgcatcacggcaaagtcatggaagtcgcctgtatcggcgttcccgacgaaaaaaccggcgaggcactcaaagtattcgtcgtcaaaaaagacccgtcattgaccaaagaagaacttatcgccttttgccgcaccgaattaaccgcatataaagtaccgaaaaatatcgaattccgcgacgagttgcccaagtccaacgtcggcaaaatcctgcgccgcgagttgcggcaaagtaccgggaaataa

SEQ ID NO: 55771 - DNA, 480 bp, Neisseria meningitidis; identical to SEQ ID NO: 36216

SEQ ID NO: 55772 - DNA, 864 bp, Neisseria meningitidis
atgagaatcctattgacaggctcgaaaagccaactggcacgctgcctgcgcgaccgtcttccggaagactgggaaaccattgcgacggattccgcatccctagacattaccgatgccgatgccgtctgcaacatggtcaaaagtttccaacccgacgccattgtcaacacggctgcctatactgccgtcgacaaagcggaaggcaatgcggcagcggcatttgccgtcaatgcttccgccgtttacaaccttgccttggcagcacatcgcgcccatgcccgattcatccacatctcaaccgactatatctttgacggtaaagggaaaaggccctatcaggaaagcgactttaccaatccttccaatgtatacggacaatccaaaaccgcaggcgagctgctcgcactgtctgccaatcccgacagccttatcctgcggacttcttggctgtttagcgaatacggggacaactttgtccgcacgatgctgaaccttgcgcgggaacgttccccgctgtccgccgtccacaaccaaatcggctgcccgacctatgccggcgatttagctgccgccatcatccgccttttgcagcaaacgtcgcccgtgcgcggcatttaccactacgccggcggcaaatccgtatcctggtatgaatttgcccaacatattttccaagcggcatcgcaacagcagacatccttccccgttcccgaattgactgccgtttcagacaaggaatatccgaccgccgcccccaggcccgcatacagcattttggactgccgcaaaatcgaaaacgacttcggcatcaaaccgtcagactggcaaaaagcccttgcgcaggtcgtttccaagctgctctga

SEQ ID NO: 55773 - DNA, 217 bp, Neisseria meningitidis
atgaaagaatacaaagtcgtcatttatcaggaaagcctgttgtccagcctgtttttcggcgcggcaaaggtcaaccccgtcaatttcagcgcgttcctcaacaaacaaatcccccgaaggctggcgggtcgtaacgatggaaaaagatttgcgccgtatgctgctgtttttcaaacgcgaggcctacgtcgtcattttggagcgggatcgtgtttaa

SEQ ID NO: 55774 - DNA, 1074 bp, Neisseria meningitidis; identical to SEQ ID NO: 50322

SEQ ID NO: 55775 - DNA, 1509 bp, Neisseria meningitidis; identical to SEQ ID NO: 37636

SEQ ID NO: 55776 - DNA, 840 bp, Neisseria meningitidis
atgaccgccacagccgccgccatagaccgcctgcttccccaaacccaatgccgcgaatgcggctacgacggctgcctgccctacgcacaggcagtcgcaacaggcgaagcgtacaacctctgcgccccgggcggagaagccgtcattcgggacatttccgccctgctcggcaaaccccttgtcgcacctgccaaaacccaagccaaagcactcgcccggatagacgaaaccgcctgtatcggctgcaccgcctgcatccgcgcctgccctgccgatgccattatgggtgcgggcaaacttatgcacaccgtcatcgccgacgaatgcaccggctgcggactctgcgtcgccccctgccccgtcgactgcatccatatgcagcccgttgccgacaccgtcctgccccgcgcgcgccgcttcagcctgtccgccgacagccgttttgccgccgccgaacacgcgcgtgcgcgctacctcaaacgcaacgaacgcaaacagcgcgaagccgacgaacgcaaggccatgcttgccgaacgcgaagccgccgtccgcaacgcgcgtccgcaaacacccgacacaccgaaaaaaccggcgtttaaccctgccgacctcatcgccaaagccatggcaaaagcgcaaacccaacaagaccgcctcgccgccgccgacaaccgcaaagactatcaggcgaaacagatagccgaagcccgcgaacgcgccgagttgcgccgcgcccaacgcgatatgaaatacggcagcgacagcgaaaaagccgccgccctcgaatatctcaaacaatacaaagccaaacaggaagccgcacagaataccgcctcctga

SEQ ID NO: 55777 - DNA, 2247 bp, Neisseria meningitidis
ttgagaaatttcgaccatacgggcgttcagacggcatcccgcaaccttgactgccgtctgaatatcaaagcaggaatcacgcttatgcaacaaaaaatccgtttccaaatcgaaggcatgacctgtcaggcatgtgcttcgcgtattgaaaaagtgttgaacaaaaaagattttgtcgaatcggcgggagtgaacttcgccagcgaggaggcgcaggtagtgtttgacgacagcaaaacctcagtagccgacattgccaaaatcattgagaaaaccggttacggcgcgaaggaaaaaacggaagatacattgccgcaacccgaagcagaacaccatatcggctggcggctgtggctgctgttcaccatcaacgtcccgttccttatcggcatggcggggatgatgatcggcagacacgattggatgattccgccgttgtggcagttcgcattggcgagtgtggtgcagctttggctggcaatcccgttttacaaaagcgcgtgggcgagtattaaaggtggattggcgaatatggacgtgctcgttaccatcggcacggtatcgatttatctgtattccgtctatatgttatttttcagtccgcatgcggcacacggcatggcgcatgtgtattttgaagcaggcgtgatggtgatcggttttgtgtcgctgggcaaatttttggaacaccgtaccaaaaaatccagcctgaacagcttgggcctgcttttgaaacttacaccaacccaagtcaacgtgcaacgcaacggcgaatggaaacagcttcccatcgaccaagtgcaaatcggcgaccttatccgcgccaaccacggcgaacgcattgccgcagacggcatcattgaaagcggcagcggttgggcggacgagagccatcttaccggcgaatccaatcctgaagaaaaaaaggcgggcggcaaagtgttggcgggcgcgttaatgaccgaaggcagtgtggtgtaccgcgccacgcagctcggcagccaaacccagctcggcgacatgatgaacgcgctctctgaagcacaaggcagtaaagcaccgattgcgcgcgtagccgataaagcggctgcggtattcgtgcctgccgtcgtgggcattgcgttgttgacttttattgttacttggctgattaagggcgattggacggttgcgctgatgcacgccgtcgccgttttggtgattgcctgcccgtgtgcgctcggtctggctacacccgccgcgattatggtcggcatggataaagcagtgaaacacggcatttggtttaaagacgcagcggcaatggaagaagccgcccacgtcgatgccgttgtgttggacaaaactggcacgctgaccgaaggcaggccgcaggttgccgccgtttattgtgttcccgacagcggctttgacgaagacgatttgtaccgcatcgccgctgccgtcgaacaaaacgccactcatccgcttgcccgtgccatcgtttccgccgcccaaacgcgcagcttggaaatccctgccgcacaaaacgctcaaaccgttgtcggcgcaggcattgccgccgaagtggaagacgtgggtttggtgaaagcaggcaaagccgaatttgccgaacttaccttgcccgagttttcagacggcgtttgggacattgcaagcattgttgcagtctcggtcgataacaaacccatcggcgcattcgcacttgccgacgcgttgaaagccgataccgccgaagccataggccgtctgaaaaaacacaatatcgatgtctatattatgagcggcgacaaccaaggcacggtcgaatacgtcgccaaacaactgggcatcgcacacgccttcggcaacatgagtccgcgcgataaagctgccgaagtgcaaaaactcaaagccgccggcaaaaccgtggcgatggtcggcgacggcatcaacgacgcgcccgcgcttgccgccgctaacgtcagcttcgccatgaaaggcggagcggacgttgccgaacataccgcatccgccacgctgatgcagcattcggtcaaccaactcgccgatgctctgctggtgtcgcaagccactttgaaaaacatcaagcaaaacctgtttttcgccttcttctacaatatcttgggcattcctctcgccgcgcttggctttttaaatcccgtcatcgctggcgcggcaatggcggcaagctcggtttccgtgttgagcaatgccttgcgcctgaaacgggtaaaaatcgattag

SEQ ID NO: 55778 - DNA, 735 bp, Neisseria meningitidis
gtgaatgaaaagacagatcaaaaagcagtaagtgcgcaacaggctaaagaacaaaccagtttcaacaatcccgagccaatgacaggatttgaacatacggttacatttgattttcagggcaccaaaatggttatcccctatggctatcttgcacggtatacgcaagacaatgccacaaaatggctttctgacacgcccgggcaggatgcttactccattaatttgatagagattagcgtctattacaaaaaaaccgaccaaggctgggttcttgagccatacaaccagcaaaacaaagcacactttatccaatttctacgcgatggtttggatagcgtggacgatattgttatccgaaaagatgcgtgtagtttaagtacgactatgggagaaagattgcttacttacggggttaaaaaaatgccatctgcctatcctgaatatgaagcttatgaagataaaagacatattcctgaaaatccatattttcataaactttactatattaaaaaaggagaaaatccggcgattattactcatcggaataatcgaataaaccaaactgaagaagataattatagcactagcgtaggttcctgtattaacggtttcacggtacggtattacccgtttattcgggaaaagcagcagctcacacagcaggagttggtaggttatcaccaacaagtagagcaattggtacagagttttgtaaacaatccaagtaaaaaataa

SEQ ID NO: 55779 - DNA, 777 bp, Neisseria meningitidis
atgaattttatccgttccgtcggggcgaaaaccctcggccttattcaatccctcggcagtattacgctgtttctgctgaacattctggcgaagtccggtacggctttcgtccgtccgcgcctgagcgtgcgccaagtgtattttgccggcgtgctgtcggtgctgattgttgccgtttcggggctgttcgtcggcatggtcttgggtttgcagggctatacgcagttgtcgaaattcaaatccgccgatattttgggctatatggttgcggcttcgctgttgcgcgaactgggtccggtgttggcggcgattctgtttgccagcagcgcgggcggtgcgatgaccagcgaaatcggtttgatgaaaacgaccgaacagctcgaagcgatgaacgtgatggcggtaaaccccgtcgcccgagtggttgcgccgcgcttttgggcgggcgtgttttccatgccgcttttggcttcgattttcaacgtggcgggtattttcggcgcgtatttggtcggtgtaacctggctgggcttggacagcggtattttctggtcgcaaatgcagaacaatatcacgatacattacgatgtaatcaacggtctgattaaatccgccgcgttcggcgtggcggtaacgctgattgccgtgcatcagggcttccattgcgtcccgacttcggaaggcattttgcgcgccagcacgcgcacggtggtttcgtccgccctgacgattttggcggtcgattttatattgaccgcgtggatgtttacagattga

SEQ ID NO: 55780 - DNA, 669 bp, Neisseria meningitidis
  misc_feature 654, 655, 656, 657, 658: 'n' is a, c, g or t
atgagcaccttctttcaacaaaccgcgcaagccatgattgctaaacacatcgaccgcttcccgctattgaagttggaccgggtgattgattggcagccgatcgaacactacctgaaccgtcaaaaaacccgttaccttagagaccaccgcggccgtcccgcctatcccctgctatccatgttcaaagccgtcctgctcggacaatggcacagcctctccgatcccgaactcgaacacagcctcatcacccgcatcgatttcaacctgttttgccgttttgacgaactaagcatccccgattacagcaccttatgccgctaccgcaattggctggctcaagacaataccctgtccgaattgctcaaactgattaaccgccaactgaccgaaaaaggcctaaaaatagagaaagcatccgccgccgttgttgacgccaccattattcagaccgccggcagcaaacagcgtcaggctatagaagtcgatgaagaaggacaagtcagcggccaaaccacaccgagtaaagacagcgatgcccgttggatcaagaaaagcggcctctacaaactcggttacaaacaacatacccgtaccgatggggaaggctatatcgagaaactgcacatcacccccgccaatgcccatgagtgcaannnnncacacacttaa

SEQ ID NO: 55781 - DNA, 1107 bp, Neisseria meningitidis
atgtctctttatccgatttacaatttttccgccggccctgccgtattgcccgaagccgtgttggaaacggcgcggcaggaaatgttggactacaacggtacgggttttcctgtgatggcgatgagccaccgttcggaaatgtttttgagcatcctgcatcatgcggaacaggatttgaggcagcttttgaaagtgcctgacaactataagatattgtttctgcagggcggagcaacaacccaatttaatatggcagccatgaatctggcacacggtttccgcactgccgacgcggtggtaacgggcaactggagccgtatcgcttatgaacagatgagccgtttgaccgatacggaaatccgtttggcggcgcatggcggcgagcagttcgactatctcgacctgccgcctgtggaaacgtgggatgttgcacccgattcggcgtttgtccattttgccgtcaatgaaacggtcaacgggctgcaataccgtgaagtgccgcgcctttcagaaggcatgccgccgctggtgtgcgatatgtccagcgagattttgtcgcgcgagtttgatgttgccgactacggactgatttacgcaggcgcacagaaaaacatcgggccggcaggggttacggtggtgattgtgcgtgaggatttgctcgagcgttgtccgaacgatattcccgatgtgttcaactaccgttcgcatttgaaccgcgaaggtatgtacaacacgccgtcaacttacgcgatttatatgtcggggctggtgttccgctggctgcaggcgcagggcggtgtgaaaaaaattgaagcggtcaatcggctgaaggcgcaaaccttgtatgagacgatagacggcagcggcggtttctatatcaaccgtatccgtccgaatgcgcgttctaaaatgaatgtcgtgttccaaacgggggatgaggagcttgaccgccgttttgtgctggaagccgaattgcagggcttgtgcctgcttaagggctataaaaccgtcggcggtatgcgtgccagcatttataatgcgatgccgcttgaaggcgtgcgggctttggcggattttatgcgcgatttccaacggcgttacggttga

SEQ ID NO: 55782 - DNA, 3435 bp, Neisseria meningitidis
atgaccgagccgacctacatccccctgcgcctgcataccgagttctcaattaccgacggtatggtgcggattaaaaaactgattgccaaagcgcaggaatacggtttgcctgctttgggcatcagcgatttgatgaacgaattcggtttggtgaaattctataaagcctgccgcggcgcagggattaagcccatcggcgcggcggacgtgtggataggcaatccgaatgcgcccgacaagccgttccgcgctatgctgattatccgcaacgatgcgggctatctgcgtttgagcgagcttttgacagaggcctatgtcggcaaagaccgcaatatccatcatgcggaactcaaccccgaatggctggaaaacggcgacaacagcggcttgatttgtttgagcggcgcgcattacggcgaagtgggcatgaatctgttgaacggcaatgaagacgcggcgcgcgcggcggcgttgaaatatgcggcatggtttcccgatgcgttttatttagagctgcaacgcctgcccgaacgccccgaatgggaggcttgcgtttccggcagcgtgaagctggcggaggaattgggtttgccggtggtggcgacgcatccgacacagtttatgagccgcgacgatttcaacgcgcacgaggcgcgagtgtgtatcgcaggcggctgggtattgacggacaagaaacgtccgcgcgatttcacgccgggccagtttttcattccgccggaaaccatggccgaacgtttcgccgatttgcctgaagccttggaaaacacggtagaaattgccaaacgctgcaacctgcacatcacattgggcaaaaacttcctgccccttttccccacgcccgacggtttatcactcgatgactatctcatcaaactctccaacgagggtttgcaggaacgtatggttcagctttatcccgacgaggcggagcgggcggcgaaaatgccggaatatcaaaaacggctggattttgagctgaacatcattatccagatgaaattccccggctatttccttatcgtacaagactttatcaactgggcgaaaacacacggctgtccggtcgggccgggccgtggttcgggcgcgggttcgctggtggcgtattcattgaagattaccgaccttgatccgctcaaatacgcgctgctgttcgagcgtttcctaaaccccgaacgcgtttctatgcccgacttcgacgtggacttttgccaaagcaaccgcggccgcgtgattgaatatgtgcgcgagaaatacggcgcggaggcggtcagccagattgttaccttcggcacgatgtcgtccaaagcggtcatccgcgacgtcgggcgcgtgttagagctgccgtttatgctgtgcgacaaactgtccaagctgattccgttggaagccaacaaacccctgagtttggaaaaagccatggagaccgagccgcagatccaggaattgatcgaagcggaagaagcggacgaactgattacgctggcgaaaaagctggaagatttaacgcgcggtttgggtatgcacgcaggcggcgtgttgattgcgccgggcaagatttccgattacagccccgtgtatcaggcggacgaatccgcctcgcccgtatccatgtacgacaagggcgacgtggaagatgtgggtttggtgaaattcgactttttgggtctgcgcaacctgaccattatcgaaatggcgcaggacaacatcaaaaacactaccggcgacatcatcgatgtcggcaaaatcccgcttgacgaccaggtcgcctaccaaatcttccgcgatgcgaacaccaccgccgtcttccagttcgagtcgaccggcatgaaaaaaatgctgaaaacggcgcacacgaccaagtttgaagaactcatcgccttcgtatcgctctaccgccccggcccgatggacaacattcccgacttcgtcgcacgtatgaaggggcaagaattccaatacatccatccgctactcgaaggcatcctcgcgccgacctacgggattatggtgtatcaggaacaagtgatgcaggcggcgcaaattatcggcggttactcgctcggcggcgcggacttgttgcgccgcgccatgggtaagaaaaagcccgaagaaatggtgaaacaccgcgaaatcttcgccgaaggcgcggcaaaacaaggcatttcgcgcgaaaaatccgacgaaatcttcaactacatggaaaaattcgccggctacggtttcaacaaatcccacgccgccgcctacgccctgatttcctaccagaccgcatggctcaaagcccactaccccgccgaatttatggcggcgaccatgtcgtccgaattggacaacaccgaccagctcaagcatttctacgacgactgccgtgccaacggcatcgagttcctgccgcccgacatcaacgaatccgactaccgcttcacgccgtatccagacatgaaaatccgctacgcactcggcgcgattaaaggcacgggcgaagccgccgtcgaatccatcatcgccgcgcggcaaagcggcggcaagtttaccggcctcttggacttctgcgagcgcgtcggcaaagaacacatgaaccgccgcaccctcgaggccctgatacgcggcggcgcgttcgacagcatcgaacccaaccgcgccatgctcttggcgaacatcgacctcgctatggacaacgccgaccaaaaagccgccaacgccaatcagggcgggcttttcgacatgatggaagacgccatcgaaccggtgcggctcatcgacgcgccgatgtggagcgaatcggaaaaactcgccgaagaaaaaaccgtcatcggcttttacctgtccggccacccgttcggcccgtatgcccaagaagtccgccaaatcgccccgcagaaactgtcgaaactcaaaccgcaagacagcgtgcgcctcgccggattcgttaccgccgtacgcaccatgatgggcaagcgcggcaaaatcgccttcgtcagccttgaagatttgagcggacaggttgaaatcatggtcggcggtcagacgttggaaaactgcgccgactgcctcaaagccgaccaagtgctgattatcgaatccaaagtcagccgcgacgactacggcggcggcgacgggctgcgtattctggcaaaccaagtcatgaccctgcaaatggcgcgcgaacgctacgcccgaagcctcagcctcgccctcgccccgcatcacgacatcggcaaactggtacaactgctcgccgcccaccaactgcccgacacgccgcgcatcccgctgcaactgtcgtatgccaacgaaaaagcgtcgggcaggcttcaagtgccgccgaaatggacggttacgccgagttccgcattgttcggcgaactggaaacattgctcggcagccggtcggtgcgcgtcaactggtaa

SEQ ID NO: 55783 - DNA, 459 bp, Neisseria meningitidis
atgaatattcaaacccgccttgccgcaaccgccctcgccctattcctttccgcctgcggaaacggcggcgcgcccgcacagcccaaaggtgaaatttccgaaaaccgcaccgccgcgttcaaatctatgatgcccgacttctcgcgtatgggcaaaatggtcaaaggcgaagagccttacgatgtcgaaaaattcaaacaggcgacagcgtcgtttgccgaaagcagcaagaaaccgttcacactttttgagtccgatccgcaaggcaacggccgcgccctgcccgccgtttggtcggatggtgcaaaatttgaagccgaaaaaacaaaattcgccgccgccgtcgaaaaactcaacgccgctgcccaaaccggcaaactggatgaaatcaaagccgcctacggcgaaaccggcgcaagctgcaaatcctgccacgacagtttccgcgcgcccgaataa

SEQ ID NO: 55784 - DNA, 345 bp, Neisseria meningitidis; identical to SEQ ID NO: 42101

SEQ ID NO: 55785 - DNA, 642 bp, Neisseria meningitidis
atgctgaaacccgaaaccatacacatatccggtcctgccggcattttagaaaccatccatatcccgtccgaacaagtactggcacgcggtgttgccgtcatcaatcatcccaaccccctccagggcggaacaaacaccaacaaagttatccaaactgccgccaaagccttaagcaaactcggcttccactgctacctgcccaaccttcgcggcgtaggcggcagcgaaggcacacacgattacggacgcggcgaaacgcaagactgcctcgccgtcatcgactatgcccgcgcccaacatcccgaagcccccgaatttgccttatccggcttctccttcggcggttatgtcgccacatttgccgcacaagcgcgcatacccgatttattgctgctcatgggcgcagcagtctgccactataccgaccgtccggaaccgtcagccgttcccaacgttgccaaaaccctgatgatacacggtgcggaagatgaagtcgtcgaaatcgaaaaagccctgaaatgggcggaaccgcaagatttgcccgtcattaccatcgccggttccacgcatttctttcacggcaaactcatcgtcctgcgcgacaccatcctccgcttcgcgcccgtatgcctgaacggataa

SEQ ID NO: 55786 - DNA, 777 bp, Neisseria meningitidis
atggctaagaaattcgataaagacagcttcagcggcacgctgattgtcgtgttggcggtcagcctgatttgctcggtcatcgttgccggtgcggtcgtcggcttgaaacccatccaagaaaaacaaaaactccaagacaaacaaggctatattttgagcgtggccggtttgatggataaggacaccgacatcggcaaaacctttgccgagcgtatcgagcaacgcgtggtcgatttggcgaccggcgaatatgtgaaagacgcgccaaaagacttcagcgcgcgcatcgcaggcaaagaccccgcgcaaagcatccgaatcaaacccgaagacgatttggcaggcatcaaaagccgtgccaaatacactgaggtttatttggtaaaaggcgaagacggcaaaatcggccaaatcatcctgccgatgcacggtaacggtttgtggtcagtcatgtacggctttgtcgccattcaaccggacggcaacaccatcaacggcattacctactacgaacaaggcgaaaccccgggcttgggcggcgaaatcggcaatccgttgtggcagcaaaaattcgtcggcaaaaaactgtttgacggacaaggcaaactcgccctgcacgtcggcaaaggcgcgggttcggacaaagaacacggcgtagatgccctctccggcgcgtcgctgacttccaaaggcgtgcaaggttcgttcgcctactggtttggcgaaaacggctatatcccctacctgaacaaattgaaatcagtaggagcacaataa

SEQ ID NO: 55787 - DNA, 2604 bp, Neisseria meningitidis
atgagcaaaaccgtccgttatctgaaagattaccaaacgcctgcctaccgcatccttgaaaccgacctgcattttgatattgccgaaccgcaaactgtcgtgaaatcccgtttgacggtcgagccgcagagggtgggggagccgctggtgttggacggttcgacgaaactcttgtccgtcaaaatcaacggcgtggcggcggattatgtgttggaaggcgagactctgacgattgcagacgtgccgtccgaacgcttcaccgtcgaagtggaaaccgagatcctgccggcggaaaacaaatcgctgatggggctgtatgcttccggtggcaatctgtttacccaatgcgagccggagggcttccgcaaaatcacgttctacatcgaccgtccggatgtgatgtccaaattcacgaccaccatcgttgcggacaaaaaacgctatcccgttttgctctccaacggcaacaaaatcgacggcggcgagtgttcagacggccgccattgggtgaaatgggaagacccgtttgccaaaccgagctatctgtttgctttggtcgcgggcgatttggcggtcacggaagactgtttcaccacgatgggcggcagaaacgtcaaaatcgagttttacactgccgaggcggacaagcctaaggtcggctttgccgtggaatccttgaaaaacgcgatgaagtgggacgaaacgcgcttcggtttggaatacgacttggatattttcatggtcgtcgccgtgggcgatttcaatatgggtgcgatggaaaacaaggggctgaacatttttaataccaagttcgtccttgccgacagccgtaccgccaccgataccgattttgaaggcatcgaatccgtggtcggacacgagtatttccacaactggacaggcaaccgcgttacctgccgcgattggttccagctttcgctgaaagaagggttgaccgtgttccgcgaccaagaattttccggcgaccgcgccagccgcgccgtgcgccgcatcgagaacatccgcctgctgcgccagcaccagttccccgaagacgcaggcccgaccgcccatccggtgcgccccgccagctatgaggagatgaacaatttctacaccatgaccgtttatgaaaaaggcgcggaagtggtgcggatgtatcacaccttgctcggcgaagagggcttccaaaaaggcatgaagctctatttccaacgccacgacggccaggcagtgacctgcgacgatttccgcgcggcgatggcggacgcgaacggcatcaatctcgaccagttcgccttgtggtacagtcaggcgggcacgcccgttttggaagcggaaggccgtctgaaaaacaatattttcgagttaaccatcaaacaaaccgtgccgcccacgcccgatatggcggacaagcagccgatgatgattcccgtcaaagtcgggctgctgaaccgcaacggcgaagcggtggcattcgattatcagggcaaacgcgcaaccgaagccgtgttactgctgaccgaagccgaacagaccttccagttcgaaagcgtaaccgaagccgtcgttccctcgctgctgcgcgggttcagcgcgccagtgcatctgaactatccgtacagcaacgacgacctgctgctcctgctcgcccacgacagcgacgccttcacgcgctgggaagccgcccaaacgctctaccgccgtgccgtcgccgccaaccttgccgcactttcagacggtattgaactgccgaaacacgaaaaactgcttgccgccgtcgaaaaagtcatttcagacggcctcttggacaacgccttcaaagccctgcttttgggcgtgccgtctgaagccgagctgtgggacggcgcggaaaacatcgacccgctgcgctaccatcaggcgcgcgaagccttgttggatacgcttgccgtccgcttcctgccgaaatggcacgaattgaaccgtcaggcggcgaagcaggaaaaccaaagctacgaatacagccccgaagccgccggttggcgcacgctgcgcaatgtctgccgcgccttcgtcctgcgcgccgatcccgcgcacatcgaaaccgttgccgagaaatacgccgaaatggcgcaaaacatgacccacgaatggggcatcctgtccgccgtcaacggcaacgaaagcgatacgcgcaaccgcctgctggcgcagtttgccgacaagttttcagacgacgcgctggtgatggacaaatatttcgccctcgtcggctcaagccgccgcagcgacaccctgcaacaggttcaaaccgccttgcagcatccgaagttcagcctcgaaaatcccaacaaagcccgctcgctcatcggcagcttcagccgcaacgtcccgcatttccacgcagaagacggcagcggctaccgcttcatcgccgacaaagtcatcgaaatcgaccgctttaacccgcaggtcgccgcccgcctggtgcaggcgttcaacctctgcaacaagctcgagccgcaccgcaaaaacttggtgaaacaagcattgcagcgcattcgggcgcaggaaggattgtcgaaagacgtgggcgaaatcgtcggcaaaattttggattga

SEQ ID NO: 55788 - DNA, 4476 bp, Neisseria meningitidis
atgcgcttcacacacaccaccccattttgttccgtattgtccaccctcggtctttttgccgtttcccctgcttactcatccattgtccgcaacgatgtcgattaccaatattttcgcgactttgccgaaaataaaggcgcgttcgccgtaggtgcaagcaatatttccatccaagacaagcaaggcaaaatattaggcagggttctcaacggcatccccatgcccgacttccgagtcagcaaccggcaaaccgccatcgccaccctgattcacccccaatacgtcaacagtgtcaaacacaacgtcggctacggttccatacaattcggcaacgacacccaaaatccagaagaacaagcctatacctaccgcctcgtatcacgcaacccgcacccggactacgactaccaccttccccgcctcaacaaactggttaccgaaatctcacctgccgcactcagcagcgtacccttgcttggaaacggccagccaaaggccaatgcctacctcgataccgaccgcttcccatactttgtacgactcggctcaggcacgcaacaagtccgcaaagcagacggcacgcgtacacgaaccgccccggcataccaatacctgaccggcggcacgccgctgaaagtattggggttccaaaaccacggcttactcgtcggcggcagcctgaccgaccaaccccttaacacctacgcaatcgccggagacagcggttcccccctgtttgccttcgacaagcatgaaaaccgctgggtgcttgcgggcgtactcagcacctacgccggcttcgataacttcttcaacaaatacatcgtcacgcaacccgaattcatccgttccaccatccgccaatacgaaacccggctggatgtcgggctgaccaccaacgaactcatatggcgcgacaacggtaatggcgacagcaccctgcaagggctcaacgaacgcatcaccctgcccattgcaaacccttcgcttgccccacaaaacgacagcaggcacatgccgtctgaagatgccggcaaaacgctcatcctatccagcaggttcgacaacaaaacactgatgctggcagacaatatcaaccaaggcgcaggcgcattgcagttcgacagcaacttcaccgtcgtcggtaaaaaccacacatggcaaggtgcaggcgttatcgtagccgacggcaaacgcgtcttctggcaagtcagcaaccccaaaggcgaccggctctccaaactgggcgcaggcacgcttatcgccaacggacaaggcatcaaccagggcgacatcagcatcggggaaggcactgtcgtactcgcccaaaaagctgcttcagacggcagcaaacaagcattcaaccaagtcggcatcaccagcggcaggggcacggccgtcctcgccgacagccagcaaatcaaacccgaaaacctctatttcggcttcaggggcggacggctcgacctcaacggcaacaaccttgcctttacccatatccgccatgcggacggcggcgcgcaaatcgtcaatcacaaccctgaccaagccgcgacactgacgctgaccggcaaccccgtcctcagtcccgagcatgtcgagtgggtgcaatggggcaaccgtccgcaaggcaacgcggcggtttacgaatacatcaacccgcaccgcaaccgtcggaccgactacttcatactcaaacccggcggcaacccgcgcgaatttttcccgttaaatatggaaaactcaacaagctggcaatttatcggcaacaacaggcaacaggccgccaaacaagtcgcccaagccgaaaatgcccgccccgacctaattaccttcggcggatacttgggtgagaacgcgcaaacgggcaaagccgcaccgagttacagcaaaaccaatatcgaatgggtgaatggtccaaacaccccacacaagccctcgccctatacgaatacgccaacccgcacaggggcaggcgtaccgacgattaccgcctcaaagaaggcggcaaccccggcgcctacttcccatggaatgcctacagcacccaagactgggaatttctcggacatgaccggcgaagcagccatagaaaaaacccgccatatcgcaaatgccgccgtatacggccggcccgaataccgttacaacggcgcactcaacctgcactatcgtcccaaacgcaccgacagcacgctgttgctcaacggcggcatgaaccttaacggggaagtcttgattgagggcggcaatatgattgtgtcaggcaggcccgtaccccatgcctacgaccaccaggccaaacgcgaacccgttcttgaaaacgaatggaccgacggcagcttcaaggctgcacggttcaccctgcgaaaccatgcccgactgacggcagggcgcaataccgcgcatctggacggcgacataaccgcatacgatctgtccggcatcgacctcggctttatccaaggcaaaacaccggaatgctaccgctcctaccatagcggcagcacccactgcacacccaacgccgttttaaaagccgaaaactatcgtgcactacctgcaacgcaagtacgcggcgacattacccttaacgaccgttcagagctccgcctgggcaaagcacacctgtacggcagcatccgtgccggcaaagacaccgcagtccgcatggaagcagacagcaactggacactttcccagtccagccacaccggcgcactgacgcttgacggcgcacaaattaccctgaaccccgatttcgccaataatacacacaacaaccgcttcaacacactgaccgtcaacggcacacttgacgggttcggcacattccgattcctgaccggcatcgtccgaaaacaaaatgccccccccctcaaactggaaggggacagccgcggcgcattccaaatccacgtcaaaaacaccggacaagaacctcaaacaaccgaatcgcttgcacttgtgagcctcaatccgaaacacagccaccaagcccgattcaccctccaaaacggctatgccgatttgggtgcctaccgctacatcctccgcaaaaacaacaacggatacagcctgtacaacccgctcaaagaggccgaacttcaaattgaagccacgcgtgcggaacatgagcgcaaccaacaggcatacaaccaattacaggcaaccgacatcagcagacaggttcaacatgactctgacgcgaccaggcaggcactacaggcctggcagaacagtcaaaccgaacttgcccgcatcgacagccaagtccaatatctgtccgcccaattgaaacagacagacccgctgaccggcattctgacgcgtgcccaaaacctgtgtgccgcacaaggatacagtgtcgatatctgccgtcaggttgccaaagccgccgacacgaacgacctgacactcttcgaaaccgaactggatacgtatatagaacgtgtagaaatggccgaatccgaacttgacaaagcacggcaaggcggcgatgcgcaagccgtcgaaacagcccggcacgcctacctgaacgcactcaaccgtctgtcccgacaaatccacagtttgaaaaccggcgttgccggcatccgtatgccgaacctggccgaactgatcagccggtcggccaacaccgccgtttccgaacaggccgcctacaataccggccggcaacaggcgggacgccgcatcgaccgccaccttaccgatccgcagcagcaaaacatctggctggaaaccggtacgcaacaaaccgactaccatagcggcacacaccgtccctaccaacaaactaccaactatgcacatatcagcatccaaaccggcatcaccgaccgtctcagtgtcggtacaattttaaccgatgagcgcacaaacaaccgttttgatgaaggcgtatccgcccgaaaccgcagcaacggcgcacatctgttcgtcaaaggggaaaacggcgcactctttgccgcggcagatttaggctacagcaacagccgtacccgatttaccgattatgacggggctgccgtccgccgccacgcatgggatgcaggcatcaacaccggcatcaaaatcgataccggcatcaacctcagaccctatgccggcatccgtataaaccgcagcaacggcaaccggtacgtactcgacggcgcagagataaacagcccggcgcaaatccaaaccacatggcatgccggcatccgtctcgataaaaccgtcgaactgggtcaagccaagctgacccccgccttcagcagcgattactacgatacccgccaaaacagcggttccgccctcagcgtcaacgaccgtaccttactgcagcaagccgcccacggcacactgcataccctgcaaatcgacgccggatacaaaggctggaacgccaaacttcatgccgcttacggcaaagacagcaacaccgcccgccacaaacaagcaggaatcaaaataggctacaactggtaa

SEQ ID NO: 55789 - DNA, 210 bp, Neisseria meningitidis
atgaaatcaaaatttatgtataagttactggtacttgcaaagtacctgtatattttaatttgtatatcaataccaatcgtttttatttatgaaagctaccaaggagatgatgttgattttatgatttatattcatgcttttattattttttccatattgggtgtattgactcaatattctacgtctaatttttttggaaaggaaaaataa

SEQ ID NO: 55790 - DNA, 645 bp, Neisseria meningitidis
atgaagctcaaacatctgttgccgctgctgctgtcggcagtgttgtccgcgcaggcatatgccctgacggaaggggaagactatcttgtgttggataaacccattcctcaagaacagtcgggtaaaattgaggttttggaatttttcggctatttctgcgtacattgccatcatttcgatcctttgttattgaaactgggcaaggcattgccgtctgatgcctatttgaggacggagcacgtggtctggcagcctgaaatgctcggtctggcaagaatggcggctgccgtcaatttgtcgggtttgaaatatcaggcaaaccctgccgtgtttaaagcagtttacgaacaaaaaatccgcttggaaaacagggctgttgccggaaaatgggctttgtctcaaaaaggctttgacggcaaaaaactgatgcgcgcctatgattcccccgaagctgccgccgccgcattaaaaatgcagaaactgacggaacaataccgcatcgacagcacgccgaccgttgtcgtcggcggaaaataccgcgttatcttcaataacggctttgacggcggcgttcatacgattaaagaattggttgccaaagtcagggcggagcgcaaactgtcaaaccatcctgtgcaaaaataa

SEQ ID NO: 55791 - DNA, 1188 bp, Neisseria meningitidis
atgactgaacactataaaacccttccggaacacgagctgctgattcagaagtctttgatcagcaatctgaatctttgggattgggtatttgccgtgctggtttttgcggctacggttttcgtacagacccgttccggtatgcatatggacatttacgaaacggtcatgttgtgggcgagtgccggtattgccgtgtttttgggttggtttttcaaaccgatgcgctggtttgttcctttaagcgtattgcttgcctatgccgccgtcggtctgtatggcggcaacatcaaatcggcagagattttcctgttgcggtatttcctcagcagccaatcggcgatcatgtggcagtgcgcctttgtctttttcgccctgttcgcttatatttcgggcgcggttttggcaagcgtaaaaaatgtgccgaccaacacgctgttgggtatgggaaccgtgtttgcatgggtgtctgccgtagcaggctttaccggtctgctggtacgttggcacgaaagctatctgctccgtcccgatgcggggcatattccggtttccaacctgtatgaagtgttcatcctgtttttggtgattaccgcgctgatgtatctttattatgaaggtaagttcgccatacagaaattgggcggcttcgtgttcggctttatggcggtcgtggttggatttgtcttgtggtacagcgtgtcccgcgaggcgcataccatccagccgctgattcccgcgctccagtcctggtggatgaaaatccacgttccggcaaactttatcggttacggcgcgttttgcatttccgcgatgctcggtattgccgaactggtttccctgcgtgcggaaggaaaaggcggaaaactgtggctgccgccgtcggcattgatcgacgaggtgatgtataaggcgattgccgtcggctttctgttctttactattgccaccattttgggtgcgctgtgggcggcagatgcttggggacgctattggagttgggatccgaaagagacgtgggcgttcatcgtctggctcaattacgccgtttggctgcacttgcggctggttgccggttggcgcggcaaagtgctggcgtggtgggcgattatcggtttgttcgtaaccgcatttgcctttatcggcgtgaatatgtttttgagcgggctgcattcttacggaacgctttga

SEQ ID NO: 55792 - DNA, 648 bp, Neisseria meningitidis
atgaaagcattatttttaggcgcgccgggcgcgggcaaaggcactcaggcgcaattcatcaccgccgcgttcggcattccgcaaatctctaccggcgacatgctccgcgccgcgattaaggcaggcacgcccttgggtttggaagcgaaaaaaatcattgatgaaggcggcttggtgcgcgacgacatcattatcggcatggtcaaagaacgcatcgcgcaagacgactgcaaaaacggtttcctgtttgacggtttcccgcgcacattggcacaagccgaagcgatggttgaagcaggcgtggatttggatgcagtcgttgaaatcgatgtgcctgacagcgtgattgtcgaccgcatgagcggccgccgcgtgcatttggcttccggccgtacttaccacgttacctacaacccgcccaaagttgaaggcaaagacgacgtaaccggcgaagatttgattcagcgcgacgacgacaaagaagaaaccgtgaaaaaacgccttgccgtttaccacgagcaaaccgaagttttggtcgatttttacagcaaactggaaggcgaacacgcgcctaaatacatcaaagttgacggcactcagccggtagaagccgtgaaagccgaagtattgggcgcattgggcaaataa

SEQ ID NO: 55793 - DNA, 234 bp, Neisseria meningitidis
atgaaattgaccttgatgtttcgtgaatattgcagcttgtgccacaaaatgcgcgacgaactcaaaccttttcaggatgaatacgggttcgggctggaagtggtcgatgtggatgaaaatcctgttttggaagaaaaatacaatgaactggttcccgttttgttggcgggagatgaggaaatctgccactggtttttggatgaggacaggttgaaacagtttctcgaacggtaa

SEQ ID NO: 55794 - DNA, 738 bp, Neisseria meningitidis; identical to SEQ ID NO: 40223

SEQ ID NO: 55795 - DNA, 876 bp, Neisseria meningitidis; identical to SEQ ID NO: 37005

SEQ ID NO: 55796 - DNA, 1392 bp, Neisseria meningitidis
atgcaagtgtttttagacaatctcaaagcctttttcgaaaccgtcagcggctgggtctggggatctgttatgttgatgctgctggtcggcaccggcattgtgctgaccgttatgctgaaaggcttgcagttcactatgttgggctatgcgctgaaacaggcatttgtgccgtcaaagaagtatgaaggcggcgaaggccacgaaggcgatatttcccatttcgcggcgttgatgaccgcgctgtccgccaccatcggtacgggtaacatcgccggcgtggcgactgcggtggtaaccggcggcccgggcgcggtattttggatgtggatgaccgccattttcggcatggccaccaaatacggcgaaggcgtgttggcggtgaaataccgcgtcaacaattccaaaggcgaaatgtccggcggcccgatgtattacatcgaaaaaggcttgggcaaaaactggaaatggatggccgtcgcgtttgcgctgttcggcacattcgcttccttcggtatcggcagctcggtgcagtccaactcggttgcacaggcggtgcaaaccagcttcggtatcgaacctgcctataccggcattacgttgaccgttctgactgccgttgtcgttttaggtggtattaaaggcatcgccaaagccgcttctttcatcgtgcctgctatggcggtgttttatgtgttgggcggtctttccattatcgcgattaattccgatgcactgatgcctgccgtcaagctgattttctccgatgcgttcagcgcgcaggcagtggcgggcggcgctatcggtacggtcatccgctacggcgtggcgcgcggcgtgttctccaatgaggcgggtatgggttctgcgcctattgccgccgcagccgcgaaaaccgaccatcccgtccgtcaggccttggtttctatgaccggtacgtttttggataccatcgtcgtttgctcgattaccggcatcgtgttggtaatgggactgctcggcgcgggcggcgagtttgtcaaacctgaagtgagcggcgcggcactgacaaccgtcacattccaaaaaatgctgcccggcatcggcggctggattgttaccatcggcctgattttctttgcctactcaaccattttgggctggtgctattacggcgaaaaatgcgcggtgtatgttttcggcgagaaatttgccggtttgtaccgcgtgggttatgtttcttccgttatgctgggtaccgtgttgagccttgatttggtgtggctggcttcggacacattcaacggcttgatggcattgcccaacctgattgcacttttattgatggcgaaagtcatcgtcaatgaaacgcgcgacttcaaacaaaaaatcacaaacggcgaattgccgcattaa

SEQ ID NO: 55797 - DNA, 354 bp, Neisseria meningitidis
gtgaacagacaaaccgcttacctccttacctctttcagcctgatcgcactgataatcctgtccctttcctgggaactgtggattgcaccgttgcgcccgggcggctcgtggctcgcgctcaaagccctccccctctgtctgccgctttcaggcatcttgaaaaagaaaatctatacctaccaatacagctccatgctggttctgatttactttgccgaagccgtcatgcgcctgttcgacgcctatcccgcagaacagatttgcgccgcgctttccgcagtattcagcatcatcttcttcatatcctgcctgtcgttcgtcaaacaatacaaggaaacaaacaatgcccgctga

SEQ ID NO: 55798 - DNA, 567 bp, Neisseria meningitidis
atgttattgcaaaacatccttccattcgcccattgccttttgcggaaggcacttcccgaaggcggcaatgctttggacggcaccgccggcaacggacacgacacccttttcctcgcacaaaccgcaggcatccgggggaaagtgtgggcattcgacatccagccgcaagccctgagccgcactcgatgccgtctgaaagaagcgagatacgagaatgtgcaactcatcttagacggacacgaaaacctgaaacaatatgtttcagaaccactaaatgccgccattttcaactttggctggctgcccggcggagataaaagccttaccacccgcacggaaaccagcattgccgccctttctgccaccttatccctactgaaagaaaacggtatgcttattgccgtcctctatccgggacacgaaaacggcaaacaggaggcagaagccgtcggacaatgggcaaaaaacctgcctcaagaacagtttgccgttttacgttacggctttaccaaccggaaaaacagcccaccctatctgttggcatttgaaaaactgcgtcaaaaataa

SEQ ID NO: 55799 - DNA, 1356 bp, Neisseria meningitidis
atgtcggaatatacgcctcaaacagcaaaacaaggtttgcccgcgctggcaaaaagcacgatttggatgttgagcttcggctatctcggcgttcagacggcctttaccctgcaaagctcacaaatgagccgcatttttcaaactttaggcgcagacccgcataatttgggctggttctttatcctgccgccgctggcggggatgctggtgcagccgattgtcggttattactccgaccgcacttggatgccgcgattgggcggccgccgcctgccgtatctgttttacggcacgctgattgcggtcatcgtgatgattttgatgccgaactcgggcagcttcggtttcggctacgcttctttggcggctttgtcgttcggcgcgctgatgattgcgctgctggacgtgtcttccaatatggcgatgcagccgtttaagatgatggtcggcgatatggtcaacgaggagcagaaaagctacgcctacgggattcagagctttttggcgaataccggagcggtcgtggcggcgatcctgccgtttgtgttcgcgtatatcggtttggcgaacaccgccgagaaaggcgttgtgccacaaaccgtggtcgtggcgttttatgtgggtgcggcgttgctggtgattaccagcgcgttcacgattttcaaagtgaaggaatacgatccggaaacctacgcccgttaccacggcatcgatgtcgccgcgaatcaggaaaaagccaactggttcgaactcttaaaaaccgcgcctaaagcgttttggacggttactctggtacagtttttctgctggttcgccttccaatatatgtggacttactcggcaggcgcgattgcggaaaacgtctggcacaccaccgatgcgtcttccgtaggttatcaggaggcgggcaactggtacggcgttttggcggcggtgcagtcggttgcggcggtgatttgttcgtttgtattggcgaaagtgccgaataaatactataaggcgggttatttcggctgtttggctttgggcgcgctcggctttttctccgttttcttcatcggcaaccaatacgcgctggtgttgtcttataccttaatcggcatcgcttgggcgggcattatcacttatccgctgacgattgtgaccaacgccttgtcgggcaagcatatgggcacttacttgggcctgtttaacggctctatctgtatgcctcaaatcgtcgcttcgctgttgagtttcgtgcttttccctatgctgggcggcttgcaggccactatgttcttggtagggggcgtcgtcctgctgctgggcgcgttttccgtgttcctgattaaagaaacacacggcggggtttga

SEQ ID NO: 55800 - DNA, 1083 bp, Neisseria meningitidis
atgccgtctgaagccgcttcagacggcattttgccgctttaccctacccgcactatttttcagaaaccgatcatgcttccattccttccagaaccctccctttcctatacgcaacaaaaccgtaccgccgttttgctgttgaacctcggcacgcccgacgcgccgaccgcgcaggcggtacgaccttatctgaagtcctttctgaccgaccggcgcgtcgtcgaactgcccaaatggctgtggtatcccattctgcatggtctggtactgacgttgcgccccaaaaaaagcgcgcacgcctatgaaaaaatctggtttaaggaaggttcgcccctagaagtttacacagcacgccaagctgccgcgcttgccgaacgtatgcccgacctcatcgtccgccacgccatgacctacggcaatccttcggtggcagacgtattgtcggaactgaaggcgcaaggcgcgggcagactgctggtcatcccgatgtacccgcaatatgccgcttccagcagcggagcggcagtagataaggtgtgcgaacaattactgctgcaacggaaccaaatgagcgtccgcaccgtttcgcgcttttatgacgataccggctacattgatgcgatgaaaaaccacatcctccgatattgggcggaacacggacgtgggaaaaaactgatgttgagttttcacggcgtaccgcagaagcactacgacctcggcgacccctatcccgacgagtgccgccacaccgccaaactgcttgccgaagcactggaactgaccgaagaccaatatgtcgtatcgttccaaagccaattcggcagggcaaaatgggttacaccgagcacgcaggatttgttcggcaaactgcccaaacagggggtaaccgagctggacgtattctgcccgggctttttggcagactgtttggaaaccatggaagaaatcgccctgatggggcgggaacagttttacgaagcaggcggcaaaagctaccgctacatcccctgcctcaacgacaaccccgactggatagacgcactcgtcgcacttgccgaagaaaaccttggcggctggcgttga

SEQ ID NO: 55801 - DNA, 660 bp, Neisseria meningitidis; identical to SEQ ID NO: 44247

SEQ ID NO: 55802 - DNA, 780 bp, Neisseria meningitidis
atgttttttgtcctttcccctgcgaagaaccttaatgaaaaagaccctgcccctgtcagcgagtttacccaacccgacctgctggcagagtccgacattctaatgcagcagttgcgcgagcttgcgccgcaacagattgccgaactgatgcacgtttccgacaaaattgccctcttaaacgcgcagcgcaatgcagaatggcacacgccgtttacgccggaaaacgccaaacaggcggtctttatgttcaacggcgatgtttacgaaggtatggatgcaaacacattggatattggacagatacgctatctgcaaaaccatgtccgcctgctgtccggtctgtacggtcttcttcgcccgttagacctgatacagccctaccgtttggaaatggggacggcatttgccaatttgcgcggcaagaatttgtatgagttttggggcgacatcattaccaaccttttaaatgacacgcttgcccaagcaggcagcaatacgcttgtcaaccttgcctcacaggaatatttcaagtccgtcaacacgaaaaaacttcgggcgcggctgattaccccgatatttaaagacgaaaaaaacggtaaatataaaatcatcagtttctatgccaagcgcgtgcgcggattaatggtgcgctatgcggtagaacatcatattaccgaccctgaaatgctgaaaaattttaattacgaaggctacgcattcaatgacgcggcttcaaatgaaagcgaatgggtttttatgcgttcggaacaaataaaatga

SEQ ID NO: 55803 - DNA, 1278 bp, Neisseria meningitidis
atgcgtagcagcgatattttaattgtagacgacgaaatcggcatccgcgacctgctgtcggaaatcctgcaggacgaaggttattcggtcgcattggcggaaaacgccgaagaggcgcgcaagctgcgccatcaggcgcgtccggcgatggtgctgctggatatttggatgcccgattgcgacggcatcacccttttgaaggagtgggcgaaaaacgggcagcttaatatgccggtcgtcatgatgagcgggcatgccagcattgacacagcagtggaagccaccaaaatcggtgcgctcgactttttggaaaaaccgatctccctgcaaaaactgctgtctgccgtcgaaaacgcgttgaagtacggtgcggcgcaaaccgaaacggggcctgtattcgacaagctgggcaacagtgcggcgattcaggagatgaaccgcgaagtcgaagcggcggcaaagcgcacgtcccctgtatttttgacgggtgaggtgggttcgccgtttgaaaccgtagcgcgctatttccataaaaacggtacgccgtgggtcagtccggcaagggtcgaatatctgatcgatatgccgacggaactgttgcagaaagctgaaggcggtgttttatatgtgggcgatattgcccaatacagccgcaatatccaaaccggcattgcctttatcatcggcaaggcagaacgctgccgcgtcagggtggtcgcatcgggcagcagggcggcaggttcagacggcattgcctgcgaggaaaagctggcggaactgctgtcggaatcggtcgtccgtattccgccgctgcgtatgcagcatgaagacattcccttcctgatacaggggattgcctgcaatgtggcggaaagccaaaagattgcgcctgcctcattcagtgaagaggcacttgccgcattgacccgttacgactggccgggaaatttcgaccaactgcaaagcgtcgttgcaacgctgttgttggaggcggacggacaggaaatcggcgcaggggcggtttcttcccttttggggcagaatgtgcctgccgagggagcggaagatatggtgggcgggtttaatttcaacctgcccctgcgcgaattgagggaggaggtggagcggcgttatttcgagtaccacatcgcccaagaaggtcagaatatgagcaaagtggcgcagaaagtcggtttggaacgcacgcacctttaccgcaaactcaaacagctcggcatcggcgtttcgcgccgggcgggggaaaaaaccgaagaatag

SEQ ID NO: 55804 - DNA, 501 bp, Neisseria meningitidis; identical to SEQ ID NO: 37418

SEQ ID NO: 55805 - DNA, 486 bp, Neisseria meningitidis; identical to SEQ ID NO: 43447

SEQ ID NO: 55806 - DNA, 906 bp, Neisseria meningitidis
atgcttaccttccaacaaatcatcttcaaactgcaaaccttctgggcagacaaaggctgcaccgtcatccaacccttcgacatggaagtcggtgccggcacatcccatcccgccacctgcctgcgcgcgctcgggcccgagccttggtttgccgcctacgtccaacccagccgccgccccaaagacggccgctacggcgacaaccccaaccgcctgcaacactattaccaattccaagtcgccctcaaacccgcccccgccaatatccaagacctttatctcgactccctgcgcgaattgggcatcgaccccaaagtgcacgacatccgctttgtcgaagacgactgggaaaaccccaccctcggtgcgtggggtttgggctgggaagtctggctcaacggtatggaagtaacccagttcacctatttccaacaagtcggcggcatcgactgcacccccgtactcggcgaaatcacctacggcatcgaacgcttggcgatgtacctgcaaggcgtggaaaacgtctacgacctcgtttgggcaaaaacgctcgacggcaacaccgtcacctacggcgacgtgtaccaccaaaacgaagtcgaacaatccacctacaacttcgaatacagcgatgccgattggctgctgcgccagttcaacgactacgaagcgcaagccaaacgcctgcttgccgaagaaaacgccagccttgccttgcctgcctacgagctggtcctcaaagcggggcatacgttcaacctcttggacgcgcgcggcgcgatttccgtaaccgagcgggcaacttatattggacgtattcgtgcattgagccgcgccgtggcgcaaaaatatgttgaaagccgcgaaaaactgggcttccctttaatgaaggcaaatgccgcctaa

SEQ ID NO: 55807 - DNA, 1446 bp, Neisseria meningitidis
atgaactggtctgatttgaatttaatgcccgccatgcccgaaatcgtgctgcttgcgctgctggtgttattgttgctggcggacttgtgggtcagtgatgacaaacgccggtggacgcattacggcgcgttggcaacggtggcggttacggctgtggtgcagcttgccgtttgggaacagggcagcacgtcttcgttcaacggcatgtatattgcagacggtatgtcgcgtttggcaaaaatggttttatatgccttgacgtttgccctgtttgtttatgccaagccctacaaccaagtgcgcggtattttcaaaggcgagttttacaccctgtcgctgtttgccctcttgggtatgggcgtgatggtgagcgcggggcattttttaactgcctatatcggtttggaactcttgtcgcttgccctttacgccctgattgccctgcgccgcgattccggctttgccgccgaagccgccttgaaatattttgttctgggtgcgctggcatccggcctgctgctctacggtatttctatggtttacggcgcaaccggttcgctggaatttgccggcgtgctcgcctcttccttcaatgaagaagcaaacgaatggctgttgaaactgggtctggtgtttatcgtcgtcgccgttgcgttcaaactcggcgcggtgccgttccatatgtgggtgcccgacgtgtatcacggcgcgcccacttctgttaccgccctggtcggcactgccccgaaaatcgccgccgttgttttcgctttccgcatcctcgttaccgggttgggaaccgtgcatcatgactggtctctgatgtttgccctgcttgccgccgcctcgctgctggtcggcaaccttgccgccatcatgcagaccaatatcaaacgtatgctcgcctattccaccgtatcgcatatggggtttatcctgctggcgtttatggcgggcgcggtcggctttgcggcgggtctctattacgccattacctacgcgctgatggcggcggcagggttcggtgtgttgatggtgttgtcggacggggacaacgagtgcgaaaacatcagcgatttggcagggttgaaccaacaccgcgtatggcttgcctttttgatgctgctggttatgttctctatggcgggcattccgccgctgatgggcttttacgccaaattcggcgtgattatggcactcttaaaacaaggctatgtttggttgtccgtatttgccgtcgtgatgtcgctgattggcgcgttctactacctgcgcgtggtcaaagtcatgtattttgacgaatccggccgcgcccgtcccgccgccggcggcaacaatgccgcaaaattcctcttaagcatcaacgcgctgctgttggtgctgtggggcattatgccgcaaaccgttatcgactggtgcgccaaggcgttggagaacacgctgtaa

SEQ ID NO: 55808 - DNA, 387 bp, Neisseria meningitidis
atgagcaacaacatcccggccgaactgaaatacgttgccagccatgaatggctgcgccttgaagaagacggtacgattaccgtcggcattacccaccacgcgcaagagctgttgggcgacatcgtgttcgtcgagctgcccgaagtcggcgcgaaccttgccgctgaagagcaagccggtgtggttgagtctgtaaaagccgcgtccgacgtgtacgcaccgattgcaggcgaagtcgttgccgtcaacgaagatttgccaagtgctccggaaactgccaacagcgattcttacggcgcaggctggttcttcaaaatcaaacctgtcaatcctgccgattacgacggtctgctgactgccgaacaatacgcgggcgaagtggattaa

SEQ ID NO: 55809 - DNA, 312 bp, Neisseria meningitidis
atggcttccatccacgaccaaattaaagaagtagtaacgacacaccgcgtcgtattgtttatgaaaggtacgaagcagtttccgcaatgcggtttctcttcccgcgccgtgcaaatcctgaacgcggcaggctgcaccgattacgttaccgtcaacgtattggaaaatcccgaagtacgccaaggtattaaagaatacagcgactggccgaccatcccccaactttatgtgaacggcgagtttgtcggcggttcggacatcctgatggaaatgtatgaggcaggcgagctgcaagagctgctgaaagcctga

SEQ ID NO: 55810 - DNA, 966 bp, Neisseria meningitidis
atgagctacacgcaactgacccaaggcgaacgataccacatccaatacctgtcccgccactgcaccgttaccgaaatcgccaaacagctgaaccgccacaaaagcaccatcagccgcgaaatcagacggcaccgcacccaagggcagcaatacagcgccgaaaaagcccagcggcaaagccggactatcaaacagcgtaagcgacaaccctataagctcgattcgcagctgattcagcacatcgacccccttatccgccgcaaactcagtcccgaacaagtatgcgcctacctgtgcaaacaccaccagatcacgctccaccacagcaccatttaccgctaccttcgccaagacaaaagcaacggcagcacgttgtggcaacatctcagaatatgcagcaaaccctaccgcaaacgctacggcagcacatggaccagaggcaaagtacccaaccgtgtcggcatagaaaaccgacccgctatcgtcgaccagaaatcccgtatcggcgattgggaagccgacaccattgtcggcaaaggacagaaaagcgcattattgaccttggtcgaacgcgttacccgctacaccatcatctgcaaattggatagcctcaaagccgaagacactgcccgggcagctgttagggcattaaaggcacataaagacagggtgcacaccattaccatggataacggcaaagagttctaccaacacaccaaaataaccaaagcattgaaagcggagacttatttttgtcgcccttaccattcttgggagaaagggctgaatgagaacaccaacggactcatccggcaatacttccccaaacaaaccgatttccgtaacatcagtgatcgggagatacgcagggttcaagatgagttgaaccaccgaccaagaaaaacacttggctacgaaacgccaagtgttttattcttgaatctgttccaaccattaatacactag

SEQ ID NO: 55811 - DNA, 4176 bp, Neisseria meningitidis
atgaatttgttgaacttatttaatccgttgcaaactgccggcatggaagaagagtttgatgccattaaaatcggtattgcctctcccgaaaccatccgctcatggtcttatggcgaagtcaaaaaacctgaaaccatcaactaccgtacgttcaaacctgagcgcgacggtttgttctgtgccaaaatctttggcccggtcaaagactacgaatgcttgtgcggaaaatacaaacgcttgaaatttaaaggcgtaacgtgtgaaaaatgcggcgtggaagtaaccctgtccaaagtgcgccgcgaacgcatgggtcatatcgaattggctgcgcccgtcgcacatatttggttcttaaaatccctgccttcccgcttgggtatggtgttagacatgactttgcgcgacatcgagcgcgtattgtactttgaagcatttgtggtaaccgatcccggtatgactccgctgcaacgccgccaattgctgactgaagacgattactacaacaagctggacgaatacggcgacgatttcgatgccaaaatgggtgcggaaggtatccgcgaattgctgcgtaccctgaatgtagcgggcgaaatcgaaatcctgcgccaagagttggaatcgaccggttccgacaccaaaatcaaaaaaatcgccaaacgcttgaaagtattggaagccttccatcgttccggtatgaaactggaatggatgattatggatgtgctgccggtattgccgcctgatttgcgtccgttggttccattggatggtggtcgttttgccacttccgatttgaacgatttgtaccgccgcgttattaaccgtaacaaccgtctgaaacgtctgttggaactgcatgcgcccgacatcatcgtccgcaacgaaaaacgtatgttgcaagaagcagttgactcgctgttggataacggccgtcgcggtaaagccatgaccggcgccaacaaacgcccgctgaaatcattggcagacatgattaaaggtaaaggcggtcgcttccgtcaaaacctgttgggcaaacgtgtggactactccggccgttccgtgattaccgtaggcccatacctgcgtctgcaccaatgcggtctgccgaaaaaaatggctttggaactgttcaaaccgttcattttccacaaattggaaaaacaaggtctggcttccaccgttaaagcagcgaaaaaattggtagagcaagaagtaccggaagtatgggacatcttggaagaagtcatccgcgaacatccgattatgctgaaccgtgcgccgaccctgcaccgtttgggtattcaagcgtttgaacctatcttgattgaaggtaaagcgattcagttgcacccattggtgtgtgccgcgttcaacgccgactttgacggcgaccaaatggcggtacacgttccattgagcttggaagcacaaatggaagcacgcacgctgatgctggcttcaaacaacgtattgtctcctgccaacggcgaaccgattattgtaccttcccaagatatcgtattgggtctgtactacatgacccgcgaccgtatcaatgccaaaggcgaaggcagcctgtttgccgatgtgaaagaagtgcatcgcgcataccataccaaacaggtcgagctgggtacaaaaatcaccgtacgtctgcgcgaatgggtgaaaaacgaagcaggtgagtttgagcctgtcgttaaccgttacgaaacaaccgtcggccgtgcattgttgagcgaaatcctgccgaaaggcctgccgtttgaatatgtcaacaaagcgttgaagaaaaaagaaatttctaaactgattaacgcatcgttccgcctgtgcggcttgcgcgatacggttatctttgctgaccacctgatgtacaccggtttcggatttgcggcaaaaggcggtatttccattgccgttgacgatatggaaattccaaaagaaaaagcggccttgctggctgaagccaatgccgaggttaaagaaatcgaagaccaataccgtcaaggtttggttaccaacggcgaacgctacaacaaggtggtcgatatttggggtcgtgccggcgataaaatcgctaaggcgatgatggacaacctgtccaaacaaaaagttatcgaccgtgccggcaacgaagtcgatcaagagtcattcaactccatctatatgatggcagactccggtgcccgtggttctgcggctcagattaaacagttgtcaggtatgcgcggtttgatggcgaaacctgacggctcgattattgaaacgccgattacctcaaacttccgcgaaggtctgaccgtattgcaatactttattgcgacccacggtgcgcgtaagggtttggcggataccgcattgaaaaccgcgaactccggttacctgacccgtcgtctggtagacgtaactcaagatttggtcgttgttgaagacgattgcggtacttcagacggctttgttatgaaggcagtggtacaaggcggtgatgtgattgaagcattgcgcgatcgtattttgggccgtgttactgcgtctgacgttgtcgatccgtcaagcggcgagaccttggttgaagccggtacgttgttgactgaaaaactggtggatatgattgaccaatccggtgtcgatgaagtcaaagtccgtacgccgattacttgtaaaacccgccacggtttgtgtgcgcactgttatggtcgcgacttggcacgtggtaagctggtcaatgccggtgaggcagttggtgtgattgccgcccaatcaatcggcgaaccgggtacccagctgactatgcgtacgttccacatcggtggtgcggcatcccgtgcggcagcagccagccaagtggaagccaaatccaacggtacggcacgattcagcagccaaatgcgttatgttgccaacaataaaggcgagttggttgtcatcggccgttcttgtgaagtcgtgattcacgacgatatcggccgtgaacgcgaacgccacaaagtaccttacggtgccatcctgctggtacaagacggtatggccattaaagccggtcaaaccttggcaacctgggatccgcatacccgtccgatgatcaccgaacatgcaggtatggtgaaatttgagaacgtggaagagggtgttaccgttgcgaaacaaactgacgatgtaaccggtttgtccactttggtggtgattgacggtaaacgccgttccagcagcgcgtccaaactgctgcgtccgactgtaaaattgttggatgaaaacggcgtggaaatctgtattcccggtacgtccactccggtttcgatggcattccccgttggtgcggtgattaccgtacgcgaaggtcaggaaatcggtaaaggcgacgtattggcgcgtatcccgcaagcctcttccaaaacccgcgacattaccggtggtctgccgcgcgttgccgaattgtttgaagcacgcgtgccgaaagatgccggtatgttggcggaaattaccggtaccgtttccttcggcaaagagaccaaaggcaagcaacgtctgattgttactgacgtggacggtgtagcatacgagaccttgatttccaaagagaaacaaattctggtacacgacggtcaagtggtaaaccgcggtgaaaccatcgtggacggagctgttgatccgcatgatattctgcgtttgcaaggtatcgaagcactggcacgctacattgtccaagaggtgcaagaggtttaccgtctgcaaggtgtgaagatttctgataaacacatcgaagtcatcatccgtcaaatgttgcgccgtgtgaacattgcggatgccggcgaaaccgggttcattaccggagagcaggtcgaacgcggcgatgtgatggcggccaatgaaaaagctttggaagaaggcaaagagccggcacgttacgaaaacgtattgctgggtattaccaaagcctccctgtccaccgacagtttcatttctgccgcatcgttccaagaaacgacccgtgttctgaccgaagccgcgattatgggcaaacaagacgaactgcgcggtttaaaagagaacgtcatcgtcggccgcctgattcctgccggtaccggtttgacttaccaccgcagccgtcatcaacaatggcaagaggtggaacaggagactgctgaaacccaagtaacggatgaataa

SEQ ID NO: 55812 - DNA, 1815 bp, Neisseria meningitidis
atgagtgaacacgatatgcagaacacaaatccgccattaccgcctctgccgcccgaaatcacgcagctcctgtcggggctggacgcggcacaatgggcgtggctgtccggctacgcttgggcaaaagcaggaaacggggcatctgcaggactgcccgcgcttcagacggcattgccgacggcagaacctttttccgtaaccgtcctttccgcctcgcaaaccggcaatgcgaaatccgttgccgacaaagcggcggacagcctggaagccgccggcatccaagtcagtcgcgccgaactgaaagactataaggcgaaaaacatcgccggcgaacgccgcctgctgctggttacgtccacccaaggcgaaggcgaaccgccggaagaagccgtcgtgctgcacaaactgctgaacggcaaaaaagccccgaaattggacaaactccaatttgccgtactgggtttgggcgacagttcctatccgaatttctgccgggcgggcaaagatttcgacaaacgttttgaagaattgggggcgaaacgcctgctcgaacgcgttgatgcggatttggactttaccgcctccgcaaacgcctggacagacaatatcgccgcactcttaaaagaagaagccgcaaaaaaccgggcaacgcccgcgccgcaggcaacgccccccgccgaccttcagacggcatcggagggcaggtactgcaaggcagccccctttcccgccgccctgctggccaatcagaaaatcaccgcccgccaatccgataaagacgtgcgccacatcgaaatcgatttgagcggttcggatttgcactacctcccgggcgacgcgctcggcgtttggtttgacaacgatccggcactggtcagggaaatcctagacctgctcggcatcgatcaggcaacggaaatacaggcgggcggaaaaaccctgccggttgcctccgcactgttatcccattttgaactcacgcaaaacacccccgcctttgtcaaaggctatgccccgttcgccgatgatgacgaactcgaccgtattgctgccgacaacgccgttttgcaaggctttgtgcaaagcacgccgattgccgatgtgctgcaccgcttccctgcaaaactgacggcggaacaattcgccggcctgctgcgcccgcttgcgccgcgcctgtattcgatttcctcgtcgcaggcggaagtgggggacgaagtgcacctgaccgtcggcgcggtgcgttttgaacacgaagggcgcgccagagcgggcggcgcatcgggtttccttgccgaccggctggaagaggacggcacggtgcgcgtgtttgtggaacgcaacgacggcttcaggctgcccgaagacagccgcaagccgattgtgatgatcggctcgggcaccggcgtcgcaccgttccgcgctttcgtccaacaacgtgccgcagaaaatgcggaaggcaaaaactggctgattttcggcaatccgcattttgccgccgacttcctctatcagaccgaatggcagcagtttgccaaagacggcttcctgcacagatacgatttcgcctggtcgcgcgatcaggaagaaaaaatctatgtgcaggacaaaatccgcgaacaggcggaaggactttggcaatggctgcaggaaggcgcgcatatctatgtgtgcggcgatgcggcaaaaatggcaaaagacgtggaagccgccttgctggatgtgattatcggggcaggacatttggacgaagagggcgcagaagaatatttggatatgctgcgcgaagaaaaacgctatcagcgtgatgtttattga

SEQ ID NO: 55813 - DNA, 2748 bp, Neisseria meningitidis
atgcaacagcaacatttgttccgattaaatattttatgcctgtcgctgatgactgcgctgcctgcttatgcagaaaatgtgcaagccggacaagcacaggaaaaacagttggataccatacaggtaaaagccaaaaaacagaaaacccgccgcgataacgaagtaaccggtctgggcaaattggtcaaaaccgccgacaccctcagcaaggaacaggtactcgatatccgcgacctgacgcgttacgaccccggcatcgccgtggtcgaacaggggcgcggcgcaagttcgggctactcgatacgcggtatggacaaaaaccgcgtttccttgacggtggacggcttggcgcaaatacagtcctacaccgcgcaggcggcattgggcgggacgaggacggcgggcagcagcggcgcaatcaatgaaatcgagtatgaaaacgtcaaagctgtcgaaatcagcaaaggctcaaactcggtcgaacaaggcagcggcgcattggcgggttcggtcgcatttcaaaccaaaaccgccgacgatgttatcggggaaggcaggcagtggggcattcagagtaaaaccgcctattccggcaaaaaccgggggcttacccaatccatcgcgctggcggggcgcatcggcggtgcggaggctttgctgatccacaccgggcggcgcgcgggggaaatccgcgcacacgaagccgccggacgcggcgttcagagctttaacaggctggtgccggttgaggataccaatcagtacgcaaatttcatcgttgaagaagaatgcgaaagcaaaaattacgaaacgtgtaaagcgaatccgaaaaaagatgttgtcggcaaagacgaacgtcaaacggtttctacccgagactacacgggtcccaaccgcttcctcgccgatccgctttcatacgaaagccggtcgtggctgttccgcccgggttttcgttttgagaataagcggcactatatcggcggtatactcgaacgcacgcaacaaactttcgacacgcgcgatatgacggttccggcattcctgaccaaggcggtttttgatgaaaataaaaaacaggcgggttctttgtccggcaacggcaaatacgcgggcgaccacaaatacggcggactgtttaccaacggcgaaaacggtgcgctggtgggcgcggaatacggtacgggcgtgttttacgacgagacgcacaccaaaagccgctacggtttggaatatgtctataccaatgccgataaagacacttgggcggattatgcccgcctctcttacgaccggcagggtatcggtttggacaatcattttcagcagacgcactgttctgccgacggttcggacaaatattgccgtccgagtgccgacaagccgttttcctattacaaatccgaccgcgtgatttatggggaaagccacaggctcttgcaggcggcattcaaaaaatccttcgataccgccaaaatccgccacaacctgagcgtgaatctcgggtttgaccgctttggctctaatctccgccatcaggattattattatcaaaatgccaaccgcgcctattcgtcgaacacgccccctccaaacggcgataaaaaaatcagccccaacggcagcacaagcactccctattgggtcagcataggcgggggaaatgtggttacggggcaaatctgcctctttggcaacaatacttatacggactgcacgccgcgcagcatcaacggcaaaagctattacgcggcagttcgggacaatgtccgtttgggcaggtgggcggatgtcggcgcggggttgcgctacgactaccgcagcacgcattcggacgacggcagcgtttccaccggcacgcaccgcaccctgtcctggaacgcaggcatcgtcctcaaacctgccgactggctggatttgacttaccgcacttcaaccggcttccgcctgccctcgtttgcggaaatgtacggctggcgggcgggtgttcaaagcaaggcggtcaaaatcgatccggaaaaatcgttcaacaaagaagccggcatcgtgtttaaaggcgatttcggcaacttggaggcaagttggttcaacaatgcctaccgcgatttgattgtccggggttatgaagcgcaaattgaaaacggcaaagaaacagccaaaggcgacccggcttacctcaatgcccaaagcgcgcggattaccggcatcaatattttgggcaaaatcgattggaacggcgtatgggataaattgcccgaaggttggtattctacatttgcctataatcgtgtccatgtccgcgacatcaaaaaacgcgcagaccgcaccgatattcaatcacatctgtttgatgccatccaaccctcgcgctatgtcgtcggcttgggctatgaccaaccggaaggcaaatggggtgtgaacggtatgctgacttattccaaagccaaggaaatcacagagttgttgggcagccgggctttgctcaacggcaacagccgcaatacaaaagccaccgcgcgccgtacccgcccttggtatattgtggatgtgtccggttattacacgattaaaaaacacttcaccctccgtgcgggcgtgtacaacctcctcaactaccgctatgttacttgggaaaatgtgcggcaaactgccggcggcgcagtcaaccaacacaaaaatgtcggcgtttacaaccgatatgccgcccccggtcgcaactacacatttagcttggaaatgaagttttaa

SEQ ID NO: 55814 - DNA, 786 bp, Neisseria meningitidis
atgagcagaatccggcaggcttttgccgctttggatggcggaaaggcattgattccctatattacggtgggcgaccccgatattcggacaactttggcattgatgcacggcatggttgcaaacggtgcggatattttggagttgggcgtgccgttttccgatccgatggcggatggaccggttattcagcgtgcggcggagcgggcgttggcaaacgggatttcgctgcgcgatgtcttggatgtcgtcagaaaattccgtgaaaccgacacgcaaacgccggttgttttgatgggatatttgaaccctgtacataagatgggttatcgggagtttgctcaggaagccgcaatggcgggtgtggacggcgtgttgacggtggattcccctgtcgaaaccatcgatccgctctatcgcgagctgaaggataacggggtcgactgtattttcctgattgcgccgacgacgacggaagaccgtattaaaaccattgccgagctggcaggcggatttgtctattatgtttcgctcaagggcgtaacgggcgcggcaagtttggatacggatgaggtttcgcgtaaaatagagtatttgcatcagtatatcgatattcccatcggtgtcggtttcggcatcagcaatgcggaaagcgcgcgcaaaatcggccgggttgccgacgcggtcattgtcggcagccggattgtgaaagagattgaaaacaatgcgggcaacgaggctgcggccgtcggtgctttggtcaaagagttgaaggatgccgtgcgctga

SEQ ID NO: 55815 - DNA, 1929 bp, Neisseria meningitidis
atgtccaaaaaccaaaatcacgaagaataccaagacgatgcccgccccctgacgattgaggaacaacgcgcgcgcctgcgccaactcatcattatgggcaaagaacgcggctacatcacctactccgaaatcaatgacgcactgcccgacgatatgtccgatgccgatcaaatcgacaacatcgtcagtatgatttccggtttgggcatccaagttaccgaacacgcccccgatgcggaagacatattgttaagcgacaatgccgccgttaccgacgatgatgccgtcgaagaagccgaggccgccctttccagcgcagattccgagttcggcaggacgaccgaccccgtccgtatgtatatgcgcgaaatggggcaggtcgacctgctgacccgcgaagacgaaatcatcatcgccaaaaaaatcgaaaacgccctgaaaaatatggttcaggccatctccgcctgcccgggttccattgcggaaatcttagaactcatcgaaaaaatccgcaaagacgaaatccgcgtcgacgaagtcgtagaagccattatcgacccgaatgaagtattgctcaacgaattgggcttggggcacttggaaaccacagcacccgagaaaccttccaacgacaattcggacgaaaacgaagacgacgaagaatcggaagaagatgcggatgaaatctcggcagccaatctcgccgaattgaaacaaaaagtcatcggccactttgcccaaatcgaaaaagactacaaaaaaatgattggccgtttggaaaaacaccacagccggcacaaagactatctcgcctaccgcgacgcgattgccaacaaactgctggaagtccgtttcgccacccggcaaatcgacagcctcagcagcagcctgcgcggaaaagtagaaaacatccgcaaactcgaacgcgaaatccgcgacatctgcctcgaccgcgtccatatggagcgcgactacttcatccaaaacttcctgcccgaaatcaccaatctggaatggattgaagaagaaatcgccaaaggcagggtttggagcgacgcgctcgaccgcttccgccacgccatcctcgaaaaacaaaccgagttggcggatatggaaaaagaaacccgcatttccatcgaagagttgaaagaaatcaacaaaaatatggtgtcgagcgaaaaagaaaccgcagccgccaaacaggaaatgattcaggcaaacttgcgcctcgtgatttccatcgccaaaaaatataccaaccggggcttacaattccttgatctgattcaggaaggcaacatcggtttgatgaaagcggtcgataagttcgaataccgcagaggctataaattctccacctacgcaacctggtggatccgccaggcaatcacccgctcgattgccgatcaagcgcgtaccatccgcattccggtacatatgattgaaaccatcaacaagatgaaccgcatctcgcgccaacaccttcaagaaaccggcgaagaacccgattccgccaaacttgccgaactgatgcagatgcccgaagacaaaatccgcaaaatcatgaaaatcgccaaagagccgatttcgatggaaacccccatcggcgacgacgacgattcgcacttgggcgacttcatcgaagatgccaacaatgttgcgccggccgatgcggcaatgtacaccagcctgcacgaagtaaccaaagaaatcctcgaaagcctgacaccgcgtgaggcaaaagtcctgcgtatgcgtttcggcatcgatatgaacaccgaccacacgctggaagaagtcggcagacagtttgacgtaacgcgcgaacgcatccgccaaattgaagcaaaggcactccgcaaattacgccatccgacaagaagcgaccggctgagaagtttcttggacagcgaagacagcaaactataa

SEQ ID NO: 55816 - DNA, 1041 bp, Neisseria meningitidis
atgaacacacccatccccttctccgaacggctcatccgctggcaaaaacaacacggtcgccaccacctcccttggcaggtcaaaaacccttattgcgtctggctttccgaaatcatgctccagcaaacgcaagtcgccaccgtgttggactactatccgcgcttcttagaaaaattcccgaccgttcagacgcttgccgccgcgccgcaagacgaagtgttgtcgttgtgggcgggcttgggctattacagccgcgcgcgcaacctgcacaaagccgcgcaacaagtcgtcaggcaattcggcggcacgtttccgtcggagcgcaaagacttggaaaccctctgcggcgtaggcagaagcaccgccgccgccatttgcgccttctccttcaaccgccgcgaaaccattttggacggcaacgtcaaacgcgtactctgccgcgtgttcgcccgcgacggcaatccgcaggacaaaaaatttgaaaactcgctctggacacttgccgaaagcctgctgccgtctgaaaacgccgatatgcctgcctatacacaaggtttgatggatttgggcgcgaccgtgtgcaaacggacgaaacccttgtgccaccaatgcccgatggcggacatctgcgaagcgaaaaagcaaaaccgcaccgccgagctgccgcgcaaaaaaaccgccgccgaagtaccgaccctgccgctttactggctgattatccgcaaccggaacggcgcgattttgctggaaaaacgccccgccaaaggcatttggggcgggctgtattgcgtgccgtgttttgaaagtttgaacgggctttccgactttgccgccaaattctccctgaccatggcagatatggacgaacaaaccgccctgacccaccggctgacgcaccggttgctgatgattacgccgtttgaaggacaaatgccgtctgaaagcccttcagacggcatttggataaagccggcgcatttgaaagattacggtttgcccaagcctttggaaatttatttaaacggtaataggttagaataa

SEQ ID NO: 55817 - DNA, 942 bp, Neisseria meningitidis
atgaaaatcctgttcctcctcatccccctcatcctcaccgcctgcggcacactgaccggcattcccgcccacggcggcggcaaacgctttgccgtcgaacaagaactcgtcgccgcatcgtcccgcgccgccgtcaaagaaatggacttgtccgccctgaaaggacgcaaagccgccctttacgtctccgttatgggcgaccaaggttcgggcaacataagcggcggacgctattccatcgacgcactgattcgcggcggctaccaaaacaaccccgacagcgctacccgatacagctatcccacctacgatactactgccactaccaaagccgacgcgctctccagcgtaaccacttccacatcgcttttgaacgcccccgccgccgccctgacgaaaaacagcggacgcaaaggcgaacgctccgccggactgtccgtcaacggcacgggcgactaccgcaacgaaaccctgctcgccaacccccgcgacgtttccttcctgaccaacctcatccaaaccgtcttctacctgcgcggcatcgaagtcgtaccgcccgaatacgccgacaccgacgtattcgtaaccgtcgacgtattcggcaccgtccgcagccgtaccgaactgcacctctacaacgccgaaacccttaaagcccaaaccaagctcgaatatttcgccgtcgaccgcgacagccggaaactgctgattgcccctgaaaccgccgcctacgaatcccaataccaagaacaatacgccctctggatgggaccttacagcgtcggcaaaaccgtcaaagcctcagaccgcctgatggtcgatttctccgacatcaccccctacggcgacacaaccgcccaaaaccgtcccgacttcaaacaaaacaacggtaaaaaacccgatgtcggcaacgaagtcatccgccgccgcaaaggaggataa

SEQ ID NO: 55818 - DNA, 1248 bp, Neisseria meningitidis
atgttttctctagaggcttggataggcttgaggtatctcagggcgaaaaagcgcaacggctttatgtcgtttatcacgatggtttcgattgccggaatcgccttgggcgtaaccgcgctgattgtcgtcttgtcggttatgaacggctttcagaaagaaatacgcgggcagctcctgaatgtcgcgccgcacgccgaaatcggctatatcgacaatacggatacggattggcgcaacctgcttcgatttaccgaaaaccgcaaaggtattttggctgccgcgccctatgtttccaatcaggcattgctggccaatgcgggcgaaatcaggggcgtgcagatgcgcggcattttgccgtctgaagagcgcaaagtggtggaatacggcgacaaaatgccggcaggcaaatttgaagacctgattccgggcgagtttgacattatcctcggtgtcggcttggcggaggctttgggggcggaagtcggcaataaagttaccgtcatcacgccggagggcaatgttacgcccgccggagtcgtaccgaggttgaaacagtttaccgtggtcggtctggttaagacgggtgtttacgaagtggacaactccttggcgatgacgcatatccaagacgcgcgcgtactgtaccgcttggataaggaagttgcggggctgcggctgaaactcgccgacccgcaaaacgcccccgccttgacggcaaagctgattccggaggcgcaaagggatacggtttgggtgcgcgattggacgttcagcaatcgaagctattttgaggcggtcgagttggaaaaacggatgatgttcatcatcctgacgctgattatcgccgtggcggcgttcaaccttgtctcttccttggtgatggcggttacggaaaagcaggcggacattgcgattttacggactttgggtctttcccctgccggcgtgatgaagatttttatggtgcagggcgcgttttcaggctttttcggcacgctggcgggtgtggtctgcggcgtgcttttgggttggaacgtcggcagagtcgtggcgttttttgaaaacctgctcggtgtccaccttatcaattcgcaggtttattttatcgactacctgcccagcgatgtcgatatgggcgacgttgccctgattgcctgcatttctttgggactgtctttcgtggcgacgctctacccgagctggcgcgcgtcaaaaacccaaccggcggaggctttgcgttatgagtga

SEQ ID NO: 55819 - DNA, 1785 bp, Neisseria meningitidis
atggaactgatgactgttttgctgcctttggcggcgttggtgtcgggcgtgttgtttacatggttgctgatgaagggcaggtttcagggcgagtttgccgatttgaacgcgcaactggcggaaaaggcggcaagatgtgattttgtcgaacaggcacacgcagaaattgcatcggaattggccgttttggacgggaaataccgacatttgcaggacgaaaattatgctttgggcaaccgtttttccgcagccgaaaagcagattgcccatttgcaggaaaaagaggcggaatcggttcggctgaagcagtcgtatatcgagttgcaggaaaaggcgcagggtttggcggttgaaaacgaacgtttggcaacccagctcggacaggagcagaaggcgtttgccgatcaatatgccttggaacgccaaatccgccaaagaatcgaaaccgatttggaagaaagccgccaaactgtccgcgacgtgcaaaacgacctttccgatgtcggcaaccgttttgccgcagccgaaaaacagattgcccatttgcaggaaaaagaggcggaagcggagcgtttgaggcagtcgcatatcgatttgcaggaaaaggcacagggtttggcggttgaaaacgaacgtttgacaacgcaaatcgaacaggaacgccttgcttctgaagagaaactgtccttactgggcgaggcgcgcaagagtttgagcgatcagtttcaaaatcttgccaacacgattttggaagaaaaaagccgccgttttaccgagcagaaccgcgagcagcttcatcaggttttgaacccgttaaacgaacgcatccacggtttcggcgagttggtcaggcaaacctatgataaagaatcgcgcgagcggctgactttggaaaacgaattgaaacggcttcaagggttgaacgcgcagcttcacagcgaggcaaaggctttaaccaacgcgctgaccggtacgcagaataaggttcagggaaattggggcgagatgattctggaaacggttttggaaaattccggccttcagaaagggcgcgaatatgtggtgcaggcggcggctgtccgcaaagaagaagacggcggcacgcgccgccttcagcccgacgttttggttaacctgcccgacaacaagcagattgtgattgattccaaggtttcgctgacggcttatgtgcgctatacgcaagcggcggatgcggatacggcggcgcgcgaactggcggcacacgttgccagcatacgcgcgcatatgaaaggcttgtcgctgaaggattacaccgatttggaaggtgtgaacacattggatttcgtctttatgtttatccctgtcgaaccggcctacctgctggcgttgcagaatgacgcgggattgttccaagagtgtttcgacaaacggattatgctggtcggcccgagtaccttgttggcaaccttgcggacggtggcgaatatttggcgcaacgaacagcaaaatcaaaacgcgctggcgattgcggacgaaggcggcaagctgtatgacaagtttgtcggtttcgtacagacgctcgaaagcgtcggcaaaggcatcgatcaggcgcaaaacagctttcagacggcattcaagcaacttgccgaagggcgcgggaatctggtcggccgcgccgagaaactgcgtctgttgggtgtgaaggcaaacaagcagcttgcacgcgatttgaccgaacgtgccaatgaaacaacggcgttgtcggaatctttggaatatgcggcagaagatgaagcagtctga

SEQ ID NO: 55820 - DNA, 1815 bp, Neisseria meningitidis
atgcccgctgaaacgaccgtatccggcgcgcaccccgccgccaaactgccgatttacatcctgccctgcttcctttggataggcatcgtcccctttaccttcgcgctcaaactgaaaccgtcgcccgacttttaccacgatgccgccgccgcagccggactgattgtcctgttgttcctcacggcaggaaaaaaactgtttgatgtcaaaatccccgccatcagcttccttctgtttgcaatggcggcgttttggtatcttcaggcacgcctgatgaacctgatttaccccggtatgaacgacatcgtctcttggattttcatcttgctcgccgtcagcgcgtgggcctgcaagagtttggtcgcacacttcggacaagaacgcatcgtgaccctgtttgcctggtcgctgcttatcggctccctgcttcaatcctgcatcgtcgtcatccagtttgccggctgggaagacacccccctgcttcaaaacctcatcgtttacagcgggcaaggcgtaatcggacacatcggacagcgcaacaacctcggacactacctgatgtggggcatactcgccgccgcctacctcaacggacaacgaaaaatcccgcccgccttgggcgcaatctgcctgattatgcagaccgccgttttaggtttggtcaactcgcgcaccatcttgacctacatagccgccatcgccctcatccttcccttctggtatttccgttcggacaaatccaacaggcggacgatgctcggcatagccgcagccgtactcctaaccgcgctgttccaattttccatgaacaccattctggaaacctttaccggcatccgctacgaaactgccgtcgaacgcgtcgccaacggcggtttcacagacttgccgcgccaaatcgaatggaataaagcccttgccgccttccagtccgccccgatattcgggcacggctggaacagttttgcccaacaaaccttcctcatcaatgccgaacagcacaacatacacgacaacctcctcagcaacttgttcacccattcccacaacatcgtcctccaactccttgcagagatgggaatcagcggcacgcttctagttgccgcaaccctgctgacgggcattgccgggctgctgaaacgccccctgacccccgcatcgcttttcctaatctgcacgcttgccgtcagtatgtgccacagtatgctcgaatatcctttgtggtatgtctatttcctcatccctttcggactgatgctcttcctgtcccccgcagaggcttcagacggcatcgccttcaaaaaagccgccaatctcggcatactgaccgcctccgccgccatattcgcaggattgttgcacttggactggacatacacccggctggttaacgccttttcccccgccactgacgacagtgccaaaaccctcaaccggaaaatcaacgagttgcgctatatttccgcaaacagtccgatgctgtccttttatgccgacttctccctcgtaaacttcgccctgccggaataccccaaaacccagacttgggcggaagaagcaaccctcaaatcactaaaataccgcccccactccgccacctaccgcatcgccctctacctgatgcggcaaggcaaagttgcagaagcaaaacaatggatgcgggcgacacagtcctattacccctacctgatgccccgatacgccgacgaaatccgcaaactgcccgtatgggcgccgctgctacccgaactgctcaaagactgcaaagccttcgccgccgcgcccggtcatccggaagcaaaaccctgcaaatga

SEQ ID NO: 55821 - DNA, 480 bp, Neisseria meningitidis
atgagcaccttctttcagcaaaccgcccaagccatgattgccaaacacatcgaccgtttcccactattgaagttggaccaggtgattgattggcaaccgatcgaacaatacctgaaccgtcaaaaaacccgttacctccgagaccaccgcggtcgtcccgcctacccgctgttgtccatgttcaaagccgttctgctcggacaatggcacagcctctccgatcccgaactcgagcacagcctcatcacccgcatcgacttcaacctgttttgccgctttgacgaactgagcatccccgattacagcaccttatgccgttaccgcaactggctggcgcaagacgacaccctgtccgaattgctcaaactgattaaccgccaactgaccgaaaaaaacctaaaagtagagaaagcatccgctgccgtcgttgacgccaccattattcagaccgccggcagcaaacagcgccaggcccgataa

SEQ ID NO: 55822 - DNA, 594 bp, Neisseria meningitidis
atgacgacattacaagaacgcgttgccgcccattttgccgaaagcatccgtgccaagcaggaagccggaaaagtattggtcgagccgaccgtacaggctgccgagctgatgctgcaatgcctgatgaacgacggcaagattctggcgtgcggcaacggcggttcggctgccgacgcgcagcacttcgccgccgaaatgaccggacgctttgaaaaagagcgcatggaactcgccgccgtcgccctgaccaccgacacatccgcgctgaccgccatcggtaacgactacggcttcaaccacgtcttcagcaaacaggtacgcgccctcggacgcgccggcgacatcctcgtcggcatttccacttccggcaattccgccaacgtcatcgaagccattaaagcggcacacgaacgcgatatgcacgtcatcgccctgaccggccgcgacggcggcaaaatcgccgccatactcaaagacaccgacgttctgctcaacgtcccccatccgcgcaccgcccgcattcaggaaaaccacatcctgctgatacacgccatatgcgactgtatcgactccgtactgctggaaggaatgtaa

SEQ ID NO: 55823 - DNA, 531 bp, Neisseria meningitidis
atgaaattcgtcagcgaccttttgtccgtcatcctgtttttcgccacctataccgttaccaaaaatatgattgccgctacggcggttgccttggttgccggtgtggttcaggcggcttttctgtattggaaatataaaaagctggatacgatgcagtgggtcggactggtgctgattgtcgtattcggcggcgcaaccattgttttgggcgacagccgcttcattatgtggaagccgagcgttttgttttggctgggtgcgctgttcctgtggggcagccacctcgccggtaaaaacggcttgaaggcgagtatcggcagggagattcagcttccggatgccgtatgggcgaaattgacgtatatgtgggtcggtttcctgatttttatgggtatcgccaactggtttgtgtttacccggttcgagtcgcaatgggtcaactataaaatgttcggctcgactgcactgatgcttgttttctttattattcagggtatttatctgagtacctgtctgaaaaaggaggattga

SEQ ID NO: 55824 - DNA, 870 bp, Neisseria meningitidis; identical to SEQ ID NO: 38859

SEQ ID NO: 55825 - DNA, 1017 bp, Neisseria meningitidis
atgaacacacgtcccttttatttcggacttatatttatcgcgattattgctatacttgctaactatttaggaaacactgatttttcccatcattatcatatcagtgctttaattattgctatcttgctgggaatggcaatcggcaataccatttatccgcaattttcaacacaagtggaaaaaggtgttttgtttgccaaaggcgcgcttcttcgcactggcattgtgttgtatggttttcgcctcacttttggcgatattgccgatgtaggattaaatgcggttgtcactgatgcaatcatgctaatttcaaccttcttttttaccgcacttttaggcattcgttatctaaaaatggataaacaattggtttatctcactggggcaggttgcagcatttgcggtgcggcagcggttatggcggcagagtctgttaccaaagcagaatcccataaagtttcagtggcgattgccatagtggtcattttcgggacgcttgctatttttacttaccccttgttctacacgtggtcacaagatttaattaacgcccatcaattcggtatttatgttggttctagtgtacacgaagtggctcaagtgtatgcgattggggaaaatattaatcctatcgtggcgaatactgccgtcatttccaaaatgatccgagtgatgatgctcgccccctttttattaatgctttcttggttattaacacgtagtgatggggtatcagaaaatacctcacacaaaattacaattccttggtttgctgtactttttattggtgttgccatttttaattcttttgatttattaccaaaagaactcgtgaaattattcgttgaaatcgattctttcttattaatttcatcaatggctgcgcttggcttaacgacgcaagcaagcgcaatcaaaaaggcaggattaaaaccgtttgttttaggaatactaacttatttatggctagtggttggtggatttttagtgaactatggaatatcaaaattaatataa

SEQ ID NO: 55826 - DNA, 1449 bp, Neisseria meningitidis
atgaaattgcctattcaaaaattcatgatgctgtttgcagcggcaatatcgttgctgcaaatccccattagtcatgcgaacggtttggatgcccgtttacgcgatgatatgcaggcaaaacactacgaaccgggtggtaaataccatctgtttggtaatgctcgcggcagtgttaaaaatcgggtttacgccgtccagacatttgatgcaactgcggtcggccccatactgcctattacacacgaacggacagggtttgaaggcattatcggttatgaaacccatttttcaggacatggacatgaagtacacagtccgttcgataatcatgattcaaaaagcacttctgatttcagcggcggtgtagacggtggttttactgtttaccaacttcatcggacagggtcggaaattcatccggaggatggatatgacgggccgcaaggcagcgattatccgccccccggaggagcaagggatatatacagctattatgtcaaaggaacttcaacaaaaacaaagactaatattgtccctcaagccccattttcagaccgttggctaaaagaaaatgccggtgccgcctctggttttttcagccgtgcggatgaagcaggaaaactgatatgggaaagcgaccccaataaaaattggtgggctaaccgtatggatgatattcgcggcatcgtccaaggtgcggttaatccttttttaatgggttttcagggattgggagttggggcaattacagacagtgcggtaaacccggtaacctatgcggcagcacggaaaactttacagggtattcacaatttaggaaatttaagtccggaagcacaacttgcggccgcaaccgcattacaagacagtgcttttgcggtaaaagacagtatcaactctgccagacaatgggctgatgcccatccgaacattacagctactgcccaaactgccctttccgtagcagaggccgcaactacggtttggggcggtaaaaaagtagaacttaacccgaccaaatgggattgggttaaaaataccggctataaaaaacctgctgcccgccatatgcagactgtagatggggagatggcaggggggaatagaccgcctaaatctataacgtccaacagcaaagcagatgcttccacacaaccgtctttacaagcgcaactaattggagaacaaattagtagtgggcatgcttataacaagcatgtcataagacaacaagaatttacggatttaaatatcaattcaccagcagattttgctcggcatattgaaaatattgttagccatccaacaaatatgaaagagttacctcgcggtagaactgcgtattgggatgataaaacagggacaatagttatccgagataaaaattctgacgatggaggtacagcatttagaccaacatcaggtaaaaaatattatgatgatttatag

SEQ ID NO: 55827 - DNA, 1728 bp, Neisseria meningitidis
atgcagttatcaggcgcgcaaatcatagtgcagagtctcaaagccgaaggtgtcgagtacgttttcggttatcctggcggtgcggttatcgaaatctacgatgcccttttccaactcaataaattcaagcacattctgacccgtcacgagcaggcggcagtacacgcggcagatgcgtatgcgcgcgtcagcggtaaggtgggcgtggcattggttacatccggcccgggcgttaccaatgcactgaccggtattgctactgcctatacggattcgattccgatggtggtcatcagcgggcaggtaggcaattccctgattggtacggatgcgttccaagaagttgatacggtgggtattacccgtccgtgcgtcaaacacaatttcctggttacggatatcaatgagttggcggaaaccattaaaaaggcgttccaaattgccgcaagcggccgaccagggcctgtggtggttgatgtcccgaaagatgttacgcaggcgatggcgaaattcagctatcctcaggaagacatttttatccgttcgtatcaaccggttgttcaagggcatatcggtcagattaaaaaggccgtgcagatgttggcatctgccaaacgtccggtcgtctattttggcggcggcgtggtgttgggtaatgcttctgaagagctgacccgatttgtccgaatgacgggtgctccgtgcacgggtacgctgatgggcttgggcgcttatccttccggcgaccgccaattcctcggtatgctcggtatgcacggtacttacgaggcaaaccttgccatgcagaatgcggatgtcgttcttgccgtaggtgcgcgttttgacgaccgtgtggtttccgtaccgtccaaatttttcgagaaggcgaagaaggttatccatatcgatgtcgatccttccagcatcgccaaacgcgtgaaggcggacattccgattgtcggcgacgtgaaaaatgttttgtccgagatggttgcgctgtggcaaaaacaagagtccgtgccgtctgaagatgctttgggcaaatggtggaaaaccatagaggaatggcgttcccgagattgcttgtggtttgacaacggcagcgaaattatcaagccacaatatgtgattcagaagcttgccgagattaccggcaattcggcaatcatcacatcggatgtagggcagcatcaaatgtttgcggctcaatattatcccttcgaacgtccgcgccaatggctcaactccggcggtttgggtacgatgggcgtgggtctgccttatgcgattggtgcaaaacttgccgccccggatcaagacgtattctgtattaccggcgacggctcgattcagatgaacatccaagagttgtccacctgtttccaatatcggattccggttaacgtcattacgctgaacaacggttatctcggtatggtacgccagtggcaggaaatatattacggcggccgagagtcggaaacttatttcgattctttgcccgatttcgtcaaacttgccgaggcatacggccatatcggtatccgcgtggacaagaagtctgatgtggaaggtgcgttgttggaagcattgaaccaaaaagacaggctggtgtttatcgacttcctgaccgaccagaaacagaatgtgatgcccatggtcggcaacggcaaaggtttggacgaaatggtacttccgccgcatatgcgtgcggacgaaaaggcgtaa

SEQ ID NO: 55828 - DNA, 798 bp, Neisseria meningitidis
atggcggctgttttttctgtgtgtgcctgttttatgtgttcctgccttgttgtcaaaaataccgttatcggaagcggacgcaccaaaatcgccgtgccgcttgtcgcccgcgatgccgccgtactttccgccgtacttgaccaaatcaaaaacctgcccttcgatatcgtcgagttccgcgccgattttttggaatgcgcgggcagcatcggcgaagtattgcgccacacgcagaccgtccgcgacgcgctgcccgacaaaccgctgctgtttacgttcagacggcatggcgaaggcggctcattcccgtgttcggacgattattattttaaactgctcgacgcgctgatcgaaagtcgcctgcccgacattatcgatattgagctgttttccggcgaaaccgccgtccggtgcgccgtggcaaatgctcaaaaaaacggcatcgccgccctgctctgcaatcatgagtttcaccgcacgccgccgcaagaagaaatcgtatgccgtctgaaacagatggaggactgcggcgcggacatctgcaaaattgcggtgatgccgcaaagcgcggaagatgtgctgactttgctttctgccacgctcaaagcgaaacagcttgtcgccaaaccgattgttacgatgtcgatggggcaaaagggggcggtcagccgccttgccggacaaacgttcggctcaagcatcacattcggttcgggaacgcaaaactccgcaccggggcaaatcggcgtatccgccctccgtgcggcactcgactgtctcgaaagcggcgcagactga

SEQ ID NO: 55829 - DNA, 300 bp, Neisseria meningitidis
atgaagaaaatgttcgtgctgttctgtatgctgttctcctgcgccttctcccttgcggcggtaaacatcaatgcggcttcgctgcaggagttggaggcgctgccaggcataggcccggcgaaggcgaaggccattgcggaataccgtgcgcaaaacggtgcgttcaagtctgtagacgatttgaccaaggtaaagggcatcggccctgcggtgctggcgaagctgaaggatcaggcttccgtcggtgcgcccgcaccaaaaggcccagccaaaccggcaacgaccgcagtgaaaaaatag

SEQ ID NO: 55830 - DNA, 921 bp, Neisseria meningitidis
ttgcaccaaactttccattctttccgtttttcggacggcatcgttaaagtagtccttccttttccttattttcagcattgttttatgttaccgctcaaaacgcccggcgtactgcccggcttcaaactcagccttggtctgaccgtattgtgcctgtcgctgcttgtggtcttgccgtttgcgatgatggcggcgaaggcggcggaaatcggctggggcggcttttggaacacgattgccgagccgaacgtgttggcggcggtgtggctgagtttgcggatgtcgttttatgcgatgctgaccaatgtcgtgttcggcacgctggtggcgtgggtattggtgcgttatgaattcccgggcaagggtctggcgaacgcgctggtcgatttgccgtttgcgctgccgacggcggttacgggtatcgcgttggcaaccctgtatgcgcccaacggttggataggccgttttttcgagcctttgggcatcaaaatcgcgtttacacccgtcggcatttggattgcgctggtcgtcgtcagcctgccctttatcgtccgcgccgtgcagccggtattggaagaattgtcgggcgaatatgaggaagcggcggcaactttgggcgcaagccgttggactacgtttcgccgcgtgctgctgccggaaatcacgccggcactcttgaccggcgcgggaatgatgtttgcgcgggcaacgggggaatacggctcggtgatttttatcgcgggcaatattccgatggtttctgaaatcctgccgctgattattacgggcaagctggaacagttcgacgtgcagggcgcgtcggcggtggcgttgtttatgctgctggtttcgtttgtgattctgtttgcgctgaacgtgatgcagtgggcgttgggcaggcgttcgggcgcgaagggttga

SEQ ID NO: 55831 - DNA, 246 bp, Neisseria meningitidis; identical to SEQ ID NO: 42918

SEQ ID NO: 55832 - DNA, 2298 bp, Neisseria meningitidis
atgcaaccgcacgctccacataccgattccaatacgctgatgctcggccgatacgccgaacgcgcctatctcgaatacgccatgagcgtggtcaaaggccgcgcgctgcctgaagtttcagacggccaaaagcccgttcagcggcgcattttgtttgcgatgcgcgatatgggtttgacggcgggggcgaagccggtgaaatcggcgcgcgtggtcggcgagattttgggtaaataccacccgcacggcgacagttccgcctatgaggcgatggtgcggatggcgcaggattttaccttgcgctatcccttaatcgacggcatcggcaacttcggttcgcgtgacggcgacggggcggcggcgatgcgttacaccgaagcgcggctgacaccgattgcggaattgctgttgtccgaaatcaatcaggggacggtggatttcgtgccgaactacgacggcgcgtttgacgaaccgctgcacctgcccgcccgcctgcctatggtcttgctcaacggtgcgtcaggcattgcggtgggtatggcgaccgaaatcccatcacacaatttgaatgaagtcacacaggcggcgattgcactgttgaagaagccgacgctggaaaccgccgacctgatgcaatacatccctgctcccgattttgccggaggcggtcaaatcatcacgccggcggacgaattgcgccgtatttacgaaaccggcaagggcagcgtgcgcgtgcgtgcgcgttacgaaatcgagaagctggcgcgcggacaatggcgcgtcatcgtaaccgagctgccgccgaacgccaattccgccaaaatccttgctgaaatcgaagaacagaccaacccgaaaccgaaagcaggcaaaaagcagctcaaccaagaccagctcaatactaaaaagctgatgctggatttaatcgaccgcgtgcgcgacgagtcggacggcgaacatcccgtgcgccttgtatttgaaccaaaatccagccgcatcgataccgataccttcatcaacacgctgatggcgcaaacttcgctggaaggcaatgtgtccatgaacttggtgatgatggggctggacaaccgccccgcgcagaaaaacctgaaaacgattttgcaggaatggttggatttccgcaccgttaccgtaacacgccgtctgaaattccgtttgaaccaagtggaaaaacggctgcacatcctcgaaggccgtctgaaagtctttctgcacatcgacgaagtgattaaagtcatccgcgaatcagatgacccgaaagccgatttgatggcggcgttcgggctgaccgaaatccaagccgaagacattttggaaatccgcctgcgccagttggcacgtttggaaggtttcaaactcgaaaaagaattgaacgaattgcgcgaagaacaaggccgtctgaacatccttttgggcgatgaaaacgaaaagcgcaagctgattatcaaagagatgcaggcggatatgaaacaatacggcgatgcacgccgcacgctggtggaagaggccggacgcgccgtgctgacacaaaccaccgccgacgaacccatcacactgattctgtcggaaaaaggctggatacgcagccgtgccggacacaatctcgatttgagccaaaccgcgttcaaagaaggcgaccgcctcaaacaaacccttgaaggcagaacggttttacccgtcgtcatcctcgattcattgggcagaacctatacactcgatgccgccgaaattcccggcggacgcggcgacggcgtgccggtttcatccttgatcgagttgcaaaacggcgcgaaacccgttgcgatgttgacaggattgccggaacaacattatttattatcaagcagcggcggctacggcttcatcgccaagttggctgatatggtcggacgcgtaaaagcgggcaaagtggtgatgaccacagacagtggcgaaaccgtcctgccgccgattgccgtctatgcctcctcgttcatcaaccccgactgcaaaatcattgccgccaccagtcaaaaccgcgccctcgccttccccatcggcgaattgaaaattatggcgaaaggcaaagggctgcaaatcatcggattaaacgccggcgaatcgctgacgcataccgccgtttcttccgagccggaaatcctgattgaaagcgaaggcaggcgcggcgcggcgcacaaagaccgcatccccgtctccctgcttgaggcaaaacgcggcaaaaaaggcaaactattacccatatcgggcagcctgaaacagctttcttcccccaaataa

SEQ ID NO: 55833 - DNA, 753 bp, Neisseria meningitidis; identical to SEQ ID NO: 38815

SEQ ID NO: 55834 - DNA, 1566 bp, Neisseria meningitidis
  misc_feature 6, 7, 8, 9, 10: 'n' is a, c, g or t
gtgtgnnnnntcgatgaaatcatcaagctcatcaaagaatcgcccaacgcagccgaggccaaagacaaactgcttgcgcgtccttggcgcagcagcctcgttgaagaaatgctgacgcgttccggtctggatttggaaatgatgcgtccggaaggattggctgcaaacatcggcttgaaagagcaaggttattacctgagcgagattcaggcagatgctattttacgcatgagcctgcgaaacctgaccggcctcgatcaagaagaaattgtcgaaagctacaaaaacctgatgggtaaaatcatcgactttgtggatatcctctccaaacccgaacgcattacccaaatcatccgcgacgaactggaagaaatcaaaaccaactatggcgacgaacgccgcagcgaaatcaacccgttcggcggcgacattgccgatgaagacctgattccgcaacgcgaaatggtcgttaccctgacacatggcggctatatcaaaacccagccgaccaccgactatcaggcgcagcgtcgcggcgggcgcggcaaacaggcggctgccaccaaagacgaagactttatcgaaaccctgtttgttgccaacacgcatgattatttgatgtgctttaccaatttgggcaagtgtcattggattaaggtttacaaactgcccgaaggcggacgcaacagccgcggccgtccgattaacaacgtcatccagttggaagaaggcgaaaaagtcagcgcgattctggcagtacgcgagttccccgaagaccaatacgtcttcttcgccaccgcgcagggactggtgaaaaaagtccaactttccgcctttaaaaacgtccgcgcccaaggcattaaagccatcgcgctcaaagaaggcgactacctcgtcggcgctgcgcaaacaggcggtgcggacgacatcatgctgttctccaacttaggtaaagccatccgcttcaacgaatactgggaaaaatccggcaacgacgaagcggaagatgccgacatcgaaaccgaaatttcagacggcatcgaagatgaaaccgccgacagcgaaaacgcactgccgagcggcaaacacggtgttcgcccgtccggtcgcggcagcggcggtttgcgcggtatgcgcctgcctgccgacggcaaaatcgtcagcctgattaccttcgcccctgaaaccgaagaaagcggtttgcaagttttaaccgccaccgccaacggatacggaaaacgcaccccgattgccgattacagccgcaaaaacaaaggcgggcaaggcaatattgccattaacaccggcgagcgaaacggcgatttggtcgccgcaaccttggtcggcgaaaccgacgatttgatgctgattaccagcggcggcgtacttatccgcaccaaagtcgaacaaatccgcgaaaccggccgcgccgcagcaggcgtgaaactgattaacttggacgaaggcgaaaccttggtatcgctggaacgtgttgccgaagacgaatccgaactctccgacgcttctgtaatttccaatgtaaccgaaccggaagtcgagaactga

SEQ ID NO: 55835 - DNA, 1335 bp, Neisseria meningitidis
atggcaaaaaaatatttcggcacggacggcgtgcgcggcgaagtggggcaatttccgattacgcccgatttcgtattgaaactcggctatgcggcggggcaggttttggtgcagcacgacaccgaccagaaaccgaccgtcctcatcggcaaagacacgcgcatttccggctatatgctggaagccgctttggtggccggttttacggcggcgggtgtgaatgtggtacagaccggaccgctgcccacgcccggcgtggcttatctgacccgcgcgttgcgcctgtccgccggcgtgatgatttccgcgtcgcacaacgcctattccgacaacggcatcaaattcttcgccgaaggcggcgtgaaactttccgatgaagtcgagttggaaatcgaagccaaaatcgacggcgaaatgaaaacccaaccgtccgcccgtctcggtcgcgcacgccgcatcaacggcgcggacgaccgctatatcgaattttgcaaatccaccttccctacgcattccgatttgcgcgggctgaagctggtcgtcgatgccgccaacggcgcggcttacagcgtcgcacccaaagtgtttcacgaactgggcgcacaagtcgtcagcatcggcgacgaacccaacggctacaacatcaacgaaaaatgcggtgcgacttataccaagacactccaggctgccgttttacagcatgaagccgactacggcatcgccttagacggcgacggagaccgcctgatgatggtcgataaaaacggtaaggtttacgacggcgacagcctgatttacgtcattgctaaagcccgcgccagagaaggtatcaacatcggcggcgtggtcggcacggtcatgaccaatatggcgatggaaatcgccctgaaagagcagggcgtcgatttctgccgcgccaaagtcggcgaccgctatgtgttggaacagctgaaccaacgcggttggctcatcggcggcgaagccagcggccatattttgtgcatggacaaacacaacaccggcgacggcattatttccgcgctgcaagttttggcggcgctgcaaatcctgaaccaagacctcgccaccgtttgcgccgactggcagccgtatccgcaaacgatgattaatgtccgtatcggcaaagggcaaaactggcaggaagcctcaaaagacgtgttggcggaagtggaaaaagaactcgaaggcaaaggaagggttgtgttgcgcgcttcgggaaccgaacccgtcgtgcgcgtgatggtggaggcgcggcaggcggattgggcgcgcgaaggggcggaacgcattgccgccgccatcggcggcatttag

SEQ ID NO: 55836 - DNA, 1023 bp, Neisseria meningitidis
atgctgacaaaaaaggagtttgagaagtttttagacgaggtttgcaccgtattgaggcaagaggcaaaaaacgcacctttcaaatcccaagatatttttgaaaacagagttcgtgcgctgtgcattgcaaaaattcccgcttatgctgacatagttatcaatcctgaacctgtgccgcaaattttccccgatgttccaataggggaatatggcgtagaagtcaaattcacgctaaaagatacttggcgaagcgtagcaaacagtatccaagagaaaaacaaagctgacggtgtacagcatatctatgtgatattcggaaaaatggggggcattcccgatgtgaaatggcaactttacgaagatagcgtaattcatgtccgcacatcgcatgttccgcgctttgaggtagaaatagaatctgatcgaccgtctctgtttgagggtttcggtatttcctatgctgaatttgccgatttggatatgcatgaaaaaatggaatatatccgaaaatatgcccgtaacaggctgaaagaaggcgagcggttatggtggatagaagacattgacgcagtagacagccatgatctgcctttggaagtgcgcctttacacttccctgccgcaggaagaaaaaatccgcctccgagctgaagcagcattagtctccccccgtattgtctgctcaggcagggcgaagcacaaatacgataatgccgtcctgtatctgattacctatcgcggtgtgctttgtcatcaggcgcgggacttattcagtgcgggcagcgttgccaactcggcggaagactaccgtggcggaaactatgtagaaaaatctttaaaattgattgagcatgaaattgaaaaagctgctttggaaatggatgatgctctaattgtcgaatattggggagaaagcgtcccgacagaaaaacgcctagagtattggattaagatgttggatgatttggcagatggctggataccttctgaatcgctattcaatggtaggtataaagccaaataa

SEQ ID NO: 55837 - DNA, 825 bp, Neisseria meningitidis; identical to SEQ ID NO: 50894

SEQ ID NO: 55838 - DNA, 924 bp, Neisseria meningitidis
atgacgaaaaccgaaccgaacaacgcccaactcgactggttggaatccgaatccatccacattatccgcgaagtggcggcagaatgcgaaaaccccgccctgctcttttccggcggcaaagattccgtggtcctgctcgccctcgcctgcaaagccttccggctgggcagcaggccggtaaaactgcccttcccgctggtgcatatcgacacgggacacaattatcccgaagtgattgccttccgcgacgcgcaggcggcaaaactcaatgcccgcctgatagtggggcgcgtggaagactccatcgccaaaggcacagtagttttacgcaaagaaaccgattcgcgcaatgcggcgcaggcggttacgctgttggaaaccatcgaggcaaacggctttgacgcgctgatgggcggcgcgcggcgcgacgaagaaaaagcccgcgccaaagaacggattttctcgttccgcgacgagttcggacaatggaatccgaaggcgcaacgccccgagctgtggtcgctgtacaacaccaggctgcacaaaggcgaaaatatgcgcgtcttcccgatttccaactggacggaactcgacatctggcaatacatcgcccgcgaaaacctcgaactgccgccgatttattacagccacaggcgcgaagtggtcagacgcagggggctgctggtccccgttacgccgcttacgccgaaaatgccgtctgaaacctccgaaatccttgatgtccgcttccgcaccgtcggcgacatcagctgcacctgcccggtagaaagcaccgcgtccacgccgacggagattatcagggaaacggcggttgccgacatttccgaacgcagcgcgacccggctggacgatcaggcaagcgaggcggcaatggaaaaacgcaaaaaagaaggctatttctaa

SEQ ID NO: 55839 - DNA, 507 bp, Neisseria meningitidis
atggctcacccgcaagaaatccgtgaaaagttacgtcggctctatgtgagcggcgagcaaactttggaaacggcggccttgatgtgcgaaatcccgcagaccactgcgcgtgcgtggaaacgtgcggataaggaaaaaggcgacgactgggataagatgcgcgccgcctacactttggccggcggcggtattgaggacttgagccgtgcgatgttggccggttttatggtgcagtacaacagcacgatgacgatgctgcaggattcgagtaccgaagatttgcccccgtccgaccgcgccaagctgttggccagcctggccgatgcgtttacgaaaaccgtatcggccaatgcgcgtgtgatgccggaaacgtcaaaactggcgacggctttggaattgattgagttcttgatggcgtttgtgcaagaaaaacatcccaaacatttgcctgcctttgtggaggtattggagccgtttggggcggaagtggagaagaagtttggttaa

SEQ ID NO: 55840 - DNA, 1389 bp, Neisseria meningitidis
atgtctattaaatttgccgatttgaaccttgataaaaacattttgtccgccgtcagcagcgagggttacgaaagcccgaccccgattcaggcgcaagccattccgtttgctttggaaggccgcgacatcatggcttcggcgcaaaccggctccggcaaaaccgccgcctttctgttaccgactttgcaaaaactgaccaaacgcagcgaaaaaccgggcaaaggcccgcgtgctttggtgttgaccccgacccgcgaactggcggctcaagtcgagaaaaacgcgctggcgtatgccaaaaatatgcgttggttccgcaccgtcagcatcgtcggcggcgcgtctttcggctaccaaacccgtgccctgagcaaaccggtcgatctgattgtcgccacgccgggccgtctgatggacctgatgcaaagcggcaaagttgattttgaacgtttggaagtgctgattttggacgaagccgaccgtatgttggatatgggctttatcgacgacatcgaaaccatcgtggaagcaacgccgagcgaccgtcagactttgttgttctccgccacttgggacggcgcggtcggcaaactggcgcgcaaactgaccaaagaccctgaaatcatcgaagtcgaacgcgtggacgatcaaggcaaaatcgaagaacaactgctgtactgcgacgatatgcgccacaaaaaccgcctgctcgatcatatcttgcgcgatgccaatatcgatcaatgcgtgattttcacgtccaccaaagccatgaccgaagtcattgcggatgaactgtacgaaaaaggtttcgccgcaaactgcctgcacggcgatatgccgcaaggctggcgcaaccgcacgctgatggatttgcgtaaaggccgctgcaaaattttggttgccaccgatgttgccgcacgcggtatcgacgtaccgaccattacccacgttatcaactacgacctgccgaaacaggcggaagactacgtccaccgcatcgggcgcaccggccgcgcaggccgcacgggtattgcgattacgtttgccgaagtgaacgaatacgtcaaagtccacaaaatcgaaaaatacattaaccgaaaactgcccgaactgaccatcgaaggcatggaaccgacccgcaaacgcaaatccgcaggcggcaagccgaaaggcaaaggcggctggggcgatcgtaaatccggcggttggcgcggcgatcataaaccgagcaaagaaggcttcggcggcaaaacgcgcggcgaaggtttcaagaaagaaggctttaagagagacggtttcaaaaaaaccggcgaaggcttcaaaggcaaacgcaaagccggcgattcttttgcaggcaaaggcgaacgccgttacaaagaccgctaa

SEQ ID NO: 55841 - DNA, 1191 bp, Neisseria meningitidis
ttgaagcaccgtctgaaaccttgcgcggacaatccgcctgcgccgaaccgcttaccgccccctgaccgcgattctatgatttatcaaagaaacctcatcaaagaactctcttttaccgccgtcggcattttcgtcgtcctcttggcggtattggtctccacgcaggcaatcaacctgctcggccgtgccgccgacgggcgtgtcgccatcgatgccgtgttggcattggtcggtttctgggtcatcggtatgacgccgcttttgctggtgttgaccgcatttatcagtacgttgaccgtgttgacccgctactggcgcgacagcgaaatgtcggtctggctctcctgcggattggcattgaaacaatggatacgcccagtgatgcagtttgccgtgccgtttgccgttttggttgccgtcatgcagctttgggtgataccgtgggcagagctacgcagccgcgaatacgctgaaatcctgaagcagaagcaggaattgtctttggtggaggcaggcgggttcaacagtttgggcaagcgcaacggcagggtttattttgtcgaaaccttcgataccgaatccggcatcatgaaaaacctgttcctgcgcgaacaggacaaaaacggcggcgacaacatcatcttcgccaaagaaggtaacttctcgctgaacgacaacaaacgcacgctcgaattgcgccacggctaccgttacagcggcacgcccggacgcgccgactacaatcaggtttccttccaaaaactcaacctgattatcagcaccacgccaaaactcatcgaccccgtttcccaccgccgtaccattccgaccgcccaactgattggcagcagcaacccgcaacatcaggcggaattgatgtggcgcatctcgctgaccgtcagcgtcctcctactctgcctgcttgccgtgccgctttcctatttcaacccgcgcagcggacatacctacaatatcttgattgccatcggtttgtttttaatttaccaaaacgggctgaccctgctttttgaagccgtggaagacggcaaaatccatttttggctcggactgctgcctatgcacatcatcatgttcgtcatcgcaatcgtacttctgcgcgtccgcagcatgcccagccagcccttctggcaggcggttggcaaaagtctgacattgaaaggcggaaaatga

SEQ ID NO: 55842 - DNA, 543 bp, Neisseria meningitidis; identical to SEQ ID NO: 42127

SEQ ID NO: 55843 - DNA, 354 bp, Neisseria meningitidis; identical to SEQ ID NO: 39616

SEQ ID NO: 55844 - DNA, 1524 bp, Neisseria meningitidis
atgaccgtcatcaaacaggaagactttatccaaagcatttgcgatgccttccaattcatcagctactaccatcccaaagactacatcgacgcgctctataaagcgtggcagaaagaagaaaaccccgccgccaaagacgcgatgacgcagattttggtcaacagccgcatgtgtgccgaaaacaaccgccccatctgccaagataccggtatcgcgaccgtcttcctcaaagtcggtatggatgtgcagtgggatgcggacatgagcgtcgaagaaatggttaacgaaggcgtgcgccgcgcctacacttgggaaggcaatacgctgcgcgcttccgttctcgccgaccccgccggcaaacgccaaaataccaaagacaacacgcccgccgtcatccatatgagcatcgtgccgggcgacaaagtcgaagtaacctgcgcggcaaaaggcggcggttctgaaaacaaatccaaactcgccatgctcaatccttccgacaacatcgtcgattgggtattgaaaaccatcccgacgatgggcgcgggctggtgtcctcccggcatcttgggcatcggcatcggcggcacgcctgaaaaagccgtgttgatggcaaaagagtccctgatgagccacatcgacatccaagaattgcaggaaaaagccgcgtccggcgcggaattgtccaccaccgaagccctgcgcctcgaactctttgaaaaagtcaacgcgctgggcatcggcgcacaaggtttgggcggtctgaccaccgtgttggacgtgaaaatcctcgattacccgacccacgccgcctccaaaccgattgccatgattccgaactgcgccgccacccgccacgtcgaatttgaattggacggctcaggccctgtcgaactcacgccgccgcgcgtcgaagactggcctgatttgacttacagccccgacaacggcaaacgcgtcgatgtcgacaagctgaccaaagaagaagtggcaagctggaaaaccggcgacgtattgctgttgaacggcaaaatcctcaccggccgcgatgccgcacacaaacgcctcgtcgatatgctcaacaaaggcgaagaattgcccgtcgatttcaccaaccgcctgatttactacgtcggccccgtcgatccggtcggcgatgaagtcgtcggtccggcaggtccgaccacagccacccgcatggacaaattcacccgccaaatgctcgaacaaaccggcctcttgggcatgatcggcaaatccgaacgcggcgcggcggcgtgcgaagccatcgccgacaacaaagccgtgtacctgatggcggtcggcggcgcggcatacctcgtggcaaaagccatcaaatcttccaaagtcttggcgttccccgaattgggtatggaagccatttacgaatttgaagtcaaagatatgcccgtaaccgtcgccgtagacagcaaaggcgaatccatccacgccaccgccccgccccaatggcaggcgaaaatcggcatcatccccgtcaaatcttga

SEQ ID NO: 55845 - DNA, 1101 bp, Neisseria meningitidis
atggaaacacagctttacatcggcatcatgtcgggaaccagtatggatggggcggatgccgtgctggtacggatggacggcggcaaatggctgggcgcggaagggcacgcctttaccccctatcccgacaggctgcgccgccaattgctggatttgcaggacacaggcacagacgaactgcaccgcagcaggattttgtcgcaagaactcagccgcctatatgcgcaaaccgccgccgaactgctgtgcagtcaaaacctcgcgccgtccgacattaccgccctcggctgccacgggcaaaccgtccgacacgcgccggaacacggttacagcatacagcttgccgatttgccgctgctggcagaacggacgcggatttttaccgtcggcgacttccgcagccgcgaccttgcggccggcggacaaggtgcgccgctcgtccccgcctttcacaaagccctgttccgcgacgacagggaaacacgcgcggtactgaacatcggcgggattgccaacatcagcgtactcccccccgacgcacccgccttcggcttcgacacagggccgggcaatatgctgatggacgcgtggatgcaggcacactggcagcttccttacgacaaaaacggtgcaaaggcggcacaaggcaacatattgccgcacctgctcgacaggctgctcgcccacccatatttctcacaaccccacccaaaaagcacggggcgcgaactgtttgccctaaattggctcgaaacctaccttgacggcggcgaaaaccgatacgacgtattgcggacgctttcccgttttaccgcgcaaaccgtttgcgacgcagtctcacacgctgcggcagatacccatcaaatgtatatttgcggcggcggcatccgcaatcccgtcctgacggcggatttggcagactgtttcggcacgcgcgtttccctacgcagcaccgccgaactgaacctcgatccgcaatgggtagaagccgccgcgttcgcatggatggcggcgtgttggattaaccgcattcccggtagtccgcacaaagcaaccggcgcatccaaaccgtgtattctgggcgcgggatattattattga

SEQ ID NO: 55846 - DNA, 798 bp, Neisseria meningitidis
atgaaccgtctttacccccacccgattatcgcccgtgagggctggccgattattggcggcggtttggctttgagcctgctggtgtcgatgtgttgcggctggtggtctttgccgttttgggtgtttaccgtatttgctttgcagtttttccgcgaccctgcgcgtgagattccgcaaaatcctgaagcagtgttgagtccggttgacggccgtatcgtggtggtcgagcgcgcacgcgatccgtatcgtgatgtcgatgctttgaaaatcagtatttttatgaacgtgttcaacgtgcattcgcaaaaatcgcctgccgattgtacggtaacgaaagtggtctataacaaaggcaaattcgtgaatgcggatttggacaaagccagcacggaaaacgaacgtaatgcggtgttggcgactacggcttcaggtcgtgaaattacttttgttcaagtggccggtttggtggcgcgccgtattttgtgctacacccaagcaggtgcgaaactgtctcgcggcgaacgctatggctttatccgcttcggttcgcgcgtggatatgtatctgcctgtcgatgcgcaggcgcaagtggcgattggcgataaagttaccggcgtcagcactgtattggcgcgtttgccgctgactgcgccgcaaatcgaatccgagcctgaatctgagcctgctttacaagctgctccggttgaaacagcggcaaacccatctgccgaacaacggcaaatcgaggcagcggcggctaagattcaagcggctgtgcaagatgtgttgaaagattaa

SEQ ID NO: 55847 - DNA, 1980 bp, Neisseria meningitidis
atgtctcaactggcaaacgcaatccgcttcctctcggccgatgccgttcaaaaagccaattccggccaccccggcgcgcctatgggtatggcggaaatggcggaaacattgtggacgaaattcctcaatcacaatcccgccaaccccaaattctacaaccgcgaccgcttcgtcctctccaacggccacgcgtctatgctgttgtacagcctgctgcacctgaccggctacaacctaagcattgaagacttgaaaaacttccgccaactgcacagcaaaacccccggccaccccgaatacggctacaccgacggcgtggaaaccacgaccggcccgttggggcaagggattgccaacgcggtgggtatggcattggcagaaaaaatccttgccgccgaatttaataaagacggtttgaacatcgtcgatcattacacctacgtcttcatgggcgacggctgcctgatggaaggcgtatcgcacgaagcctgctcactcgccggcactttaggcttgggcaaactgattgttttgtatgacgataacaatatttccattgatggtaaagtggacggctggtttaccgaaaacatcccgcaacgctttgaaagctacggctggcacgtcgttcctaacgtaaacggtcatgacaccgccgccattcaagccgccatcgaagccgcacgtgccgaaaccggcaaaccgtccatcatctgctgcaaaaccttaatcggcaaaggcagtgccaacaaagaaggcagccacaaaacccacggcgcacctttgggcgcggacgaaatcgaagccacgcgcaaacatttgggctggacttaccccgcctttgaaatcccgcaagaaatttacgatgcgtggaatgccaaagaacaaggcgcgaaactggaagccgactggaacgaactgttcgcgcaatatcaagccaaatatcctgccgaagccgcagaatttgtgcgccgtatggataaaaagctgccggacaatttcgatgaatacgttcagacggcattgaaagaagtgtgcgccaaagccgaaaccatcgctacccgcaaagccagccaaaacagcatcgaaatcttggcaaaagagttgcctgaattggtgggcggttcggccgacctgaccccgtccaacctgaccgactggtcaaacagcgtctccgttacccgcgacaaaggcggcaactacatccactacggcgtgcgcgagttcggtatgggtgcgattatgaacggtcttgccctgcacggcggcgtaaaaccctttggcgcgaccttcctgatgtttagcgaatacgaacgcaacgccttgcgcatggcggcactgatgaaaatcaaccctgtatttgtgttcacccacgattccatcggtttgggcgaagacggcccgacccaccagccgattgagcaaaccgccaccctgcgcctgattccgaacatggacgtatggcgtccgtgcgacaccgccgaatctctggtggcttgggcagaagccgtcaaagccgccgatcatccgtcctgcctgattttcagccgtcaaaacctgaaattccaagcgcgcagcgaacaacaactgaacgacatcaaacgcggcggctacatcatcagcgaagcccaaggcaacgcgcaagccgtcatcattgccaccggttccgaagtcgagctggctttggaagcgcaaaaagccctcgccgcgcaaaacatcgccgtacgcgtcgtttccatgccgtccaccaacgtattcgaccgccaagacgccgcctatcaagccaccgtcctgcccgaaggtctgccgcgcgttgccgtagaagccggacacgccgacggctggtacaaatacgtcggtctgaacggcgcagtcgtcggcatcaaccgcttcggcgaatccgcccctgccgacttactcttcaaagcattcggctttaccgtggacaatgtggtcgatacagtgaaatcagtgctgtaa

SEQ ID NO: 55848 - DNA, 1248 bp, Neisseria meningitidis; identical to SEQ ID NO: 44286

SEQ ID NO: 55849 - DNA, 198 bp, Neisseria meningitidis; identical to SEQ ID NO: 36305

SEQ ID NO: 55850 - DNA, 1368 bp, Neisseria meningitidis
atgcctgaccttcataccgaattttcccgactcctgccggcagatgaaattgccgaactttctccgacgcttttaaaagaccagcgcaaccgctttacgtctgcaccagacatcattttgcagccgcgcagcgttgaaagcgtgcaaaccattatgcgtttttgttacgaacaccgcattccggttacgccgcaaggcggcaataccggtttgtgcggcgcggcagtatcggaaaacggcgtattgctgaacctttccaaactcaaccgcatccgcagcatcaatttgtcagacaactgcataaccgtcgaagcaggttccgtactccaaaccgtccaacaggcagccgaagcctcaaacaggctgttcccactcagtctcgccagcgaaggctcctgtcaaatcggcggcaacatcgcctgcaatgccggaggtttgaacgtattgcgttacggcacgatgcgcgacctggttatcggtttggaagtcgtcctccccaacggcgagctggtttcccatctccatcccctgcataaaaacaccaccggctacgacctgcgccatctgtttatcggcagcgaaggcacactgggcatcatcactgccgccacgctcaagctttttgcccgtccctcggacaaggcaacggcatgggtcggcatacccgacatcgaatccgccgtccgcctgctgaccgaaacccaagctcactttgccgaacgcctatgcagttttgagctgatcggccgttttgccgccgagttgtcttccgaattcagcaaattccccctgccgacacattccgaatggcatattttacttgagttgaccgactcattacccgacagcaatcttgatgatcggcttgtcgaatttctttataaaaaaggatttaccgacagcgtattggcacaaagcgaacaagaacgtatccatatgtgggcattgcgcgaaaacatctccgcatcgcaacgcaaactgggcaccagcatcaaacacgatattgccattcctatcggacgcgttgccgactttgtccgccggtgcgccaaagatttggaacagaattttaaaggcatacaaatcgtctgcttcggacatcttggcgacggcagcctgcactacaatactttcctgcccgaaatcctcagcaatgaagtctatcgttacgaaaacgacatcaacgacgcagtttatcgcaacgttcttgcctgcaacggcacgattgccgccgaacacggcataggtatcatcaaaaaacagtggctggacaaagtacgcacgcctgccgaaatcgccctgatgaaaagcatcaaacaacaccttgatccatataacattatgaatccgggcaaactgcttccgtaa

SEQ ID NO: 55851 - DNA, 273 bp, Neisseria meningitidis; identical to SEQ ID NO: 37320

SEQ ID NO: 55852 - DNA, 1413 bp, Neisseria meningitidis
gtgaaaatcctcattttaggcaacggacaggtaggttctaccgtcgcacaaaaccttgccgccatacccaacaacgacgtaaccgttatcgacatcgacgaaaaagcattgcaggaaacaggcagccgcctcgatgtccaaaccgttttcggcaacggcgcatcccccttcacattagaacgcgccggcgcggaagatgccgacttgctgctcgcgctctcccgcagcgacgaaaccaacatcgtcgcctgcaaagttgccgccgacctgttcaacatccccggccgcatcgcgcgcgtccgttccagcgaatacctcgaatacctcagccccaagctcgaaaacaacgaaaacggcagcctttccatattcggcataaccgaaaccatcagccccgaacagctcgttaccgaacagcttgccggcctgatagactgcccgggcgcattgcaggttttacgttttgcagacgaccgcgtgcggatggtcatcatacaggcgcggcgcggcgggttgcttgtcggacgcagcattgccgacatcgcccaagatttgcccgacggggccgactgccaaatctgcgccgtttaccgcaacaaccgcctcatcgtccccgcgccgcaaaccgtcatcatcgaaggcgacgaaatcctatttgccgccgccgccgaaaacatcggcgcggtcatacccgaattgcgccccaaagaaaccagcacccgccgcatcatgattgccggcggcggcaacatcggctaccgtctcgccaagcagctcgaacacgcatacaacgtcaaaatcatcgaatgccggccgcgccgtgccgaatggatagccgaaaacctcgacaacaccctcgtcctgcaaggttcggcaaccgacgaaaccctgctcgacaacgaatacatcgacgaaatcgacgtattctgcgccctgaccaacgacgacgaaagcaacattatgtccgcccttttggcgaaaaacctcggagcgaagcgcgttatcggcatcgtcaaccgctcaagctacgtcgatttgctcgaaggcaacaaaatcgacatcgtcgtctccccccacctcatcaccatcggctcgatactcgcccacatccggcgcggcgacatcgttgccgtccaccccatccggcgcggcacggcggaagccatcgaagtcgtcgcacacggcgacaaaaaaacttccgccatcatcggcaggcgcatcagcggcatcaaatggcccgaaggctgccacattgccgccgtcgtccgcgccgaaaccggcgaaaccattatgggacaccataccgaaaccgtcatccaagacggcgaccacatcatctttttcgtctcgcgccggcgcatcctgaacgaactggaaaaactcatccaggtcaaaatgggctttttcggataa

SEQ ID NO: 55853 - DNA, 120 bp, Neisseria meningitidis; identical to SEQ ID NO: 43584

SEQ ID NO: 55854 - DNA, 1611 bp, Neisseria meningitidis
atgccgtctgaaatgctgtccattatttatcagacggcattttaccctccctctttatggcctcttgccgtgaagaacctatttaccgtgtccaacggacacctgctcgtgttcagttctcccgaacggcacttgacacagaaagacccaataatgaaacccaccatcgcgcttgtcggccgccctaacgtcggcaaatctactttattcaaccgtttgacgcgcaccaaagacgcactcgtacacgacctgcccggcctgacccgcgaccgccattacggacacggcaaagtcggcagcaaaccttatttggtcatcgataccggaggtttcgagccggttgtggacagcggcattttgcacgaaatggcaaaacaaaccttgcaggctgtcgatgaagctgatgcggttgtgtttttggtggacggccgtaccggcctgaccccgcaagacaaaatcattgccgaccgcctgcgccaaagcccgcgccctgtttatctggcggtaaacaaaggcgaaggcggcaacagggccgtgcttgccgccgagttctacgaacttgctttgggcgacccttatgttatttcaggtgcgcacggcgatggcgtgtattatctgattgaagatattttggaaaccttcccagagccggaagccgaagaagccgatgcaaaacatcccgtctttgccgtcatcggccgtccgaacgtcggcaaatccacactggttaacgccatcctcggcgaagagcgcgtgattgctttcgatatggcaggcacgacacgcgacagcatccacatcgatttcgaacgcgaaggcaaaccgtttaccatcatcgataccgcaggcgtgcgccgtcgcggcaaagtggatgaagcagtagaaaaattctccgttatcaaagcgatgcaggcggttgaagcggcaaacgtcgctgttttggtattggacgcgcagcaggacatcgccgaccaagatgcgacgattgccggttttgctttggaagcaggccgcgccttggtggttgccgtcaacaaatgggacggcatcagcgaagagcgtcgcgagcaagtgaaacgcgatatcaaccgcaaactgtatttcctcgattttgccaagttccactttatttccgcattgaaagagcgcggtatagacggtttgtttgacagcattcaggctgcctacaacgcggcgatgattaagatgccgacgccgaaaatcacgcgcgtattacaaagcgcgatcgagcgtcagcaaccgccgcgtgccggcttggtgcgtccgaaaatgcgttatgcccaccaaggcggcatgaaccctcccgtaattgtggtacacggcaattcgctgcacgcgatttccgacagctatacgcgctatctgacccaaacgttccgcaaagccttcaacctgcaaggcacgccgttgcggattcaatacaatgtttcggaaaacccgtatgaaaatgcggaagacaaaccgaagaaaaaaccgctgcgccgcgtcagcctgagcaaccgtattgagaaacgcgaaggccgcaaagaagagaaaaaccgcttcaagaagaaaaccaaagtcagtgtgaaaaaacaattcagcaaataa

SEQ ID NO: 55855 - DNA, 276 bp, Neisseria meningitidis; identical to SEQ ID NO: 53164

SEQ ID NO: 55856 - DNA, 1605 bp, Neisseria meningitidis
gtgccttcagacaaacaaaatatgccgaacaaaaagaaaaaagccgcctttgcgcgtgctgcaacggagaacggtgtgccggacgtgtccaacatcaaaaattcatatgatgatttgatgtatgaatccaaagcattttcccaaaccgccatcaacgccttggaggctcgcgcccgcatgatgggtttgcagcccgcgcccgccgccaatgccaaggtcttggagctgggctgttcgatgggcggcaacatcatcacgcaggctctttattacccggatgcggaatttgtcggtatcgacttgtccggcaggcaggttgcgcagggcaacgccatcattgaaaaaatgggcttgaaaaatgtgcgtctggaagaaaaagatattttgaccgtcgatgagtcattcgggaagtttgactatatcatcgtccacggcatttggtcgtgggtgcctgacgcagttaaagacaaaatcttttcgatttgccggaacaacctgaccgaacagggcattgcctatatttcatacaatgtttacccgggctggaagcggcaggagcagttgcgcgaaattatgtactttgccggcagggatgtgcttgaagaacccttggaagcgcgaacgcggaaaggcttggacgcgctcaaggcgctggcggaaattttagaaaacgacaagggcttggacggcggcggcaaacttccggcgattcaaaaaatattgaatcataatttttattacatcgcacacgaatatatggaggcgtttaacgacccgatttacgtcaacggcttcatcgaatgggctaatcgccacaggctcgcatatatcggggataccgatttgcacgcgtcttttgtttcttggatggcggagcatacgcgggagcggattctggcattggcagggggcgattatattgccaaagaattttacagcgatattttatccgaccgccaattccgccgttcgcttttatgccgtgaggaagtcggggatactgtcaggcgtgatgagtcggttgccgtcgaagtgatagaaagtttgaatttccgcccggcaagaggggaaacgatcgactttgatgaaaacgataccctgctttcgggcatacgcgatgtgatgaaaaccggagagccgtttaaaacggaagatgttgcggaaaacctcgcccgccgatttcccggtctggaatttgaccgcatgaaaatcaattcccagcttttattgcaaaccattctcgggcgtttttctgtttcatcagacaatgcgggcaaacaattttttgaagaccataaaacctatgtgccggcgcgttttacagattatgccgccgcctttgtggaacatggcgcggaagcgtttgtccggcctgccagccgttacaacgaaagcacgccctcattcggatacgggcatttgtacattatgcggcaattatcgcggccgacgagcaaacaggcattgattgaaacggttgccgaaaacttgaacatcgtcagcaccacgcccgacggtttgacattccatccgcctgccgaagtgtatgtggaagaaatattggcagacttggcagacaggcattttctcgtttcggcggattga

SEQ ID NO: 55857 - DNA, 252 bp, Neisseria meningitidis; identical to SEQ ID NO: 51270

SEQ ID NO: 55858 - DNA, 1662 bp, Neisseria meningitidis
atgctgacctacactccgcccgatgcccgcccgcccgccaaaacccacgaaaagccgtggctgctgctgttgatggcgtttgcctggttgtggcccggcgtgttttcccacgatttgtggaatcctgccgaacctgccgtctataccgccgtcgaagcactggcaggcagccccacccctttggttgcccatctgttcggtcaaaccgatttcggcataccgcccgtgtatctttgggttgccgccgcgttcaaacatttgctgtcgccgtgggcagccgacccgtatgatgccgcacgctttgccggcgtgtttttcgccgttgtcggactgacttcctgcggctttgccggtttcaactttttgggcagacaccacgggcgcagcgtcgtcctgattctcatcggctgtatcgggctgattccgaccgtacactttctcaaccccgctgccgccgcctttgccgccgccggactggtgctgcacggttattctttggctcgccggcgcgtgattgccgcctcttttctgctcggtacgggctggacgctgatgtcgttggcagcagcttatccggcagcatttgccctgatgctgcccttgcccgtactgatgtttttccgtccgtggcaaagcaggcgtttgatgttgacggcagtcgcctcacttgcctttgccctgccgcttatgaccgtttacccgctgctcttggcaaaaacgcagcccgcgctgttcgcgcaatggctcgacgatcacgttttcggtacgttcggcggcgtgcggcacgttcagacggcattcagtttgttttactatctgaaaaacctgctttggtttgcattgcccgcgctgccgctggcggtttggacggtttgccgcacgcgcctgttttcgaccgactgggggattttgggcattgtgtggatgcttgccgttttggtgctgcttgccgtcaatccgcagcgttttcaggataacctcgtctggctgcttccgccgcttgccctgttcggcgcggcgcaactggacagcctgaggcgcggcgcggcggcgtttgtcaactggttcggcattatggcgttcggactgtttgccgtgttcctgtggacgggctttttcgccatgaattacggctggcccgccaagcttgccgaacgcgccgcctacttcagcccgtattacgttcccgacatcgatcccattccgatggcggttgccgtactgttcacacccttgtggctgtgggcgattacccgcaaaaacatacgcggcaggcaggcggttaccaactgggcggcaggcgttaccctgacctgggctttgctgatgacgctgttcctgccgtggctggacgcggcgaaaagccacgcgccggtcgtccggagtatggaggcatcgctttccccggaattaaaacgggagctttcagacggcatcgagtgtatcgacataggcggcggcgacctgcacacgcggattgtttggacgcagtacggcacattgccgcaccgcgtcggcgatgtacaatgccgctaccgtatcgtccgcctgccccaaaacgcggatgcgccgcaaggctggcagacggtttggcagggtgcgcgcccgcgcaacaaagacagtaagttcgcactgatacggaaaatcggggaaaatatataa

SEQ ID NO: 55859 - DNA, 1215 bp, Neisseria meningitidis; identical to SEQ ID NO: 38760

SEQ ID NO: 55860 - DNA, 471 bp, Neisseria meningitidis
atgaccgatacggatacccaagccgaccgcttcgaacagatgatgtggcaggcggtggacaaactttttgaacagcatgacggcaaactcgaaagcatggacgggcgggaacaggagctggttttgatttggcggacagaagccgatatcggtaacggcggcatactgcaatttgtctgcaattggggttttcccgccgccgaaaagacttgttccgttctgaaaaaaatcggcgcgatacacagcgcaatgctgatccatcgggcggcagacgcattgagaaaagaaatccgccacctccaatcggaaggtaaaaacctgaaagaaatgtgggatataacaaaacatctcgacaacaaaaccgcctcactgccgaacagtctggatgaacaatattggcaagaccccgacaaactgtatctgccgggatggcaatactattccggcaaccctgttcagacgctgttttaa

SEQ ID NO: 55861 - DNA, 567 bp, Neisseria meningitidis
atgccgtctgaagcctgttggcgtttcagacggcatattccgattgaaaagatgatgatactgaaaaccgccccgctcaaacgccgctttgccgccatgctgtacgaaatgctgctggtcggtgcggcaacctgtttggcagcattgtttgccggtattgccgccatttttctgaatcccgtttctattgcggtttctgcattggtaacgagtatcctgataatgggatcatggtggctttatttccgtgccaactggcacgggcagggacagaccttggcgatgaggacgtggaaaatcggtttgtgcgaccttaacggcatacagccgtctctacacttactccgcctgcgctttatttgggcgtgcatattcatcgtcttcattcctatgcttgcttatgccggattgcgccacttcctcggcattccgcccaagggcgcggccggcgcggcattgatttggctgattttaccgtgggggttcgccctgctgaatcccgatcggcagtttctgtatgattttcttgcaggaacaagattggtggcggtcaaaggaaagccttaa

SEQ ID NO: 55862 - DNA, 1416 bp, Neisseria meningitidis
atgaacctgcatgcaaaggacaaaacccagcatcccgaaaacgtcgagctgctcagtgcgcagaagccgattaccgactttaagggcctgctgaccaccattatttccgccgtcgtctgtttcggcatttaccacatcctgccttacagccccgatgccaataaaggtatcgcgctgctgattttcgttgccgcactttggtttaccgaagccgtccacattaccgtaaccgcactgatggtgccgattctcgccgtcgtactcggtttccccgacatggacatcaaaaaggcgatggctgatttttccaacccgattatctacatttttttcggaggcttcgcgcttgccaccgccctgcatatgcagcggctggaccgtaaaatcgccgtcagcctgttgcgcctgtcgcgcggcaatatgaaagtggcggttttgatgttgttcctcgttaccgcctttctgtccatgtggatcagcaacaccgccaccgccgcgatgatgctgcctctagcaatgggtatgctgagccacctcgaccaggaaaaagaacacaaaacctacgtcttcctcctgctcggcatcgcctattgcgccagcatcggcggcttgggcacgctcgtcggctcgccgcccaacctgattgccgccaaagccctaaatctggacttcgtcggctggatgaagctcggcctgccgatgatgctgttgattctgcccttgatgctgctctccctgtacgtcatcctcaaacctaatttgaacgaacgcgtggaaatcaaagccgaatccatcccttggacgctgcaccgcgtgatcgcgctgttgattttccttgccacagccgccgcgtggatattcagctccaaaatcaaaaccgccttcggcatttccaatcccgacaccgttatcgccctgagtgccgccgtcgccgtcgtcgtcttcggcgtggcgcaatggaaggaagtcgcccgcaataccgactggggcgtgttgatgctcttcggcggcggcatcagcctgagcacgctgttgaaaacatccggcgcgtccgaagccttgggacagcaggttgccgccaccttttccggcgcgcccgcatttttggtgatactcatcgtcgccgccttcattatttttctgaccgagttcaccagcaacaccgcctccgccgcattgcttgtaccgattttctccggcatcgctatgcagatggggctgcccgaacaagtcttggtattcgtcatcggcatcggcgcatcttgtgccttcatgctgccggttgccacaccgcctaacgcgattgtgttcggcacgggcttaatcaagcaacgcgaaatgatgaatgtcggcatactgctgaacatcctctgcgtagtattggttgctctgtgggcttatgctgtactgatgtaa

SEQ ID NO: 55863 - DNA, 1011 bp, Neisseria meningitidis
atgccaatttttaagggtttggacatgaaaaactttctttcccttttcgcctccatattgatgtctgccctgattgccgtgtggttcagccaaaaccccatcaacgcctactggcagcagacctaccaccgcaacagcccgctcgaaccgcttgccgcctacggatggtggcggagcggtgcggcattgcaagaaaacgcctacaccctttcagacggcatcaaagccttcctgtccggcgaaacgccgccgacggctcaagacggcggttcggcagatatgccgcctgaagccgccgcatccgaagccgtccctcaaaccggtgaaatccaagaatggaaacagaacaccgacaccgccgccgtccgtagcggcgacaaagtcttttttgccggcgactcgctgatgcagggcgttgcccccttcgtgcaaaaaagcctgaaacaacaatacggcatcgaatccgtcaacctcagcaaacaaagcacagggctgtcctacccctcattcttcgactggccgaaaacgattgaagaaaccctgcaaaaacatcccgaaatcagcgtgctcgccgtcttcctcggcccgaacgacccgtgggatttccccgtcggcaaacactatctcaaattcgctgccgacgaatgggcgcaagaatacctgaaacgcaccgaccgcatccttgaagccgcccgcgcgcaccacgtccaagtcgtctggctcggcatcccctacatgaaaaaagccaagctcgacgggcagatgcgctacctcgacaaactgctttcggaacacttggaaggcaaaatcatcctgattcccaccgcgcacaccctgagcggcggggaagaccgctacaccgattccgtcaacgtcaacggcaaacccgtccgctaccgcagcaaggacggcatacactttaccgccgaaggacaaaaactgctggcggcaaaaataatggaaaaaatcgtttttgaaccaagtacgcaaccatcaagtacacagccatga

SEQ ID NO: 55864 - DNA, 606 bp, Neisseria meningitidis
ttgaataccctctatttaggttcaaacagcccgcgccgaatggaaatcctgacgcagttgggctaccgcgtcatccaactgcctgccggcatcgacgaatccgttaaagccggcgaaacacctttcgcttacgttcaaaggatggcagaagaaaaaaaccgaaccgccctgaccctcttttgcgaaaccaacggcacaatgcccgatttccccctgattaccgccgacacctgcgtcgtttcagacggcatcatattgggcaaaccccgctcccaagctgaagcggcaacctttctaaacctgctgtcgggaaccgggcataccgtcctgactgctgtctgcattcattatcgcggcaaaacgtcaagccgcgtccaaaccaaccgcgtcgttttcaagcccctgagttcggaagaaatttccgcctatgtccaaagcggcgaaccgatggacaaagccggcgcctacgccgtacaaggcataggcggcatctttatccaatctatcgaaggcagcttcagcggcattatggggctgcccgtttatgaaaccgtttcgatgttacaggatttgggataccgtaccccacctttcatccgagcctaa

SEQ ID NO: 55865 - DNA, 432 bp, Neisseria meningitidis; identical to SEQ ID NO: 45320

SEQ ID NO: 55866 - DNA, 3243 bp, Neisseria meningitidis
atgcaaaatatgaaaaaccaagtacgcggatcaggcatggatgcacgatccaatccggccaatgtttcagacggcctgcaaaacagttcgagccatatcggtaccaacacgcgctaccgcctgaccaagctcggcgaacaaatggcgcgcctgcccatcgacccgaaaatcgcgcgcattttgctggcggcgaagaaacacgactgtatggcggaaatattggtgattgcgtccgcgctgtcgattcaagacccgcgcgagcggccgttggaagcgcgcgatgctgcctccaaggcacacgaacgttttaccgacaagcagtccgatttccttgcctatctgaacatttgggacagcttccagcgtgagcgcgacaaaggtttgtccaacaagcagctggtgcagtggtgccgccaatatttcttgtcgcacctgcggatgcgcgaatggcgcgagctacaccaccagcttgcccaaactgcgattgaaatgggtttgaccaccaaagaagccgctttcagacgttctcccgaagtcaggcagctcacgtcgtctgaaaatgcaggcgaccaagacctatccgccaaactcaaacaaaaacaactggataagaaacaacaccgcgcccaaatccgcgctgccaaagaagcgggctacgaacaaatccaccgcgccctgctcaccggcctcatcgccaacgtcggcatgaaatcacccgacggcaacgactacaccagcacgcgcggcagccgcttccaccttttccccgcctccgccctgttcaaggcgaagcccaaatgggtgatggcggcagaactcgttgaaacgacaaaactttatgcccgcgacgtagccgccatccagcccgaatggatcgagcaggaagcgccgcacctcgtccgctaccactatttcgagccgcattgggaacaaaaacgcggcgaagtcatcgccagcgaacgggtaacgctctacggcctgaccgtcctgccgcgccgccccgtgtcctacggcagaatcgcccccgaagaagcgcgcgaaatctttatccgcggcgcattggtggcacaggaatgcgatttgaaagcggacttttttgtccacaacaaaaagctgattaaagaaattaccgaactcgaacacaaatcgcgcaagcaagacgtgctggtcgatgacgaagccctgtttgcgttttataacgaacgactgcccgaaatggcttggaaagacgcgcaaggcagcgtttggggaagtgaagattccgtacggattattgaatctgacaaagccgagaggtcgtctgaaaatgagcgcaacgagtttcgtaaaaacaagcgtaatgggtctcgccaaaatgaaaatcacggcaacaccgtaggttgggttgaaaacccaacatcagccgcaactgcaaaaactgttgggtttgacaacccaacctacgctactcagcaacccaccccctcccccgagagggagggtcggggagagggcaaaacagttgccgcacaaaccaacttttccgcaaccgcagcaaaccctctcccgcaggagagggaacagagtgcctcagcttcaacgttttcagacgacctgcgtcctgcaaatctgcagcaaaccgccccctcccccgtgggggagggctggggagagagcaaaacagttgccacccaaaccaacttttccgcaacctcaacactttcagacgaccccaaacccaaaaagcagcctgcacctcaaaaaggccgtctgaaacccctacccctcgccgacatccgcaccttccaagcctggctcaaaaccgccgagtgcgacaatccgcgcctgctgttcctcagccgcgacgatctgatgcaacacgccgccgcacacattaccgaagaacagttccccaaattctggcaaaccgcagacggcaaattcaaactttcctaccgcttcgagccgcaccatccgctagacggcgtgaccatgaccgtgccgctgaccgtcctcaaccgcctgcacgcgccatcgctcgaatggctggtgcccggtatgttgcgcgaaaaaatccagctgctgattaaagcactgccgaagcaaatccgccgcatttgtgtgcccgtacccgatttcatcaccaaattcctcgaaagcaatcccgaccgccaagcgaccatcattccccagttggcgcactttatcgccaaaagcgccagcgatatgcggattctcgagcaaatcgaccaagacgcatgggcggcgcaagaattgcccgaacactgctatctgaatctgcgcattatcgacgacggcggacaagagcttgccggcggccgcaaactgcacgaattgcaacaacagctcggccaagccgccgccgtcaccttccgcgacaacacccaagaattcgagcgcgacaacgttaccacatgggacatcggaaccctgcccgaatccatcaaattcgcccgcggcaaacaacagctcaccggctacctcggcctgcaaaaagaaaaagacggccgcatcgccctgcgcctgtttgacaccaccgaagccgccgaacaggcacaccgtcaaggcgtcatcgaattgatgaagctgcaattaaaagagcaggtaaaagacctgaacaaaggcatccaaggcttcacccaagccgccatgctgctcaaacacatcaacgccgacaccctgcgcgacgacctcacccaagccgtctgcgaccgcgcctttatcggcgaagacgagctgccgcgcaacgaaaaagccttcaaagaacaaatcaaacgcgcccgtagccgcctgcccgccgtcaaagaagccctcagccgctacctgcaggaaaccgcagccgcctacgccgaactcaacggcaaactcggcaaacatccattgacccacctcctaagactacgcctgcaaaccctgcttgcccccggcttcgccacccgcaccccgtgggcacaatggccgcgcctccccatctacctcaaagccatgaccctgcgcctcgaaaaatacagcagcaaccccgcccgcgacgcagcccgcgaagccgatatacaggaattggaacaaatgtggcaggaaaaaaacgacggtttggtgaaacaaggacaacccatttcagacaacctagccgcgtttaaatggatgattgaagaattgagagtgtcactgttcgcacaggaattgaagacaccgtatccagtgtcggtgaagaggttgttgaaagagtgggagaaaattttttaa

SEQ ID NO: 55867 - DNA, 672 bp, Neisseria meningitidis
atgactttttccgcgattctgttctatattcttgccgccatcgttttgtacggtgcggttcgtaccgttaccgccaaaaaccctgtccacgccgctttgcatctggtgctgaccttctgcgtgagcgcgatgctttggatgctgatgcaggccgagtttttgggcgtgacgctggtggtggtttacgtcggcgccgtgatggtgttgttcctgttcgttgtgatgatgttgaacatcgacattgaagaaatgcgcgccggtttctggcgtcatgcgccggttgccggtgtggtcggcacattgttggcggttgccctgatcctgattctggtcaacccgaaaaccgacctggccgcatttggtctgatgaaagacattccggccgattacaacaatatccgcgatttgggcagccgtatttataccgactacctgttgccgtttgaattggcggcggtattgctgctgttgggtatggtggcggcgattgcgctggtttaccgtaaaaccaccaatccgaaacgcatggatcctgccgaccaagttaaagtacgcgccgatcaaggccgtatgcgtctggtgaaaatggaagcggtcaaaccgcaagtcgaatctgccgaagagagcgaagtttcagacggcctcaagccggaaggggagggcaaagcatga

SEQ ID NO: 55868 - DNA, 597 bp, Neisseria meningitidis
atgaatatcaatacttccgaaaataaagatgctgttgccgaacacaccggacaatggttggaaaaagccgtcatcggtctgaacctgtgtccctttgccaaagccccccacgttaaaaaccttgtccgcatcgcaatcagcgaagccaaacaccttgacagttttttggaagacttggacgaagaactgcagcgactgggcaatacacccgccaccgaactggaaaccaccctgctggttcacccgaccctattccccgatttcgacgtattcaacgatatgctcgacattgccgatgccgccgttatcgaaaacggcttggaaggcatcgtccaaatcgcaccgttccatccccaattccgctttcagaataccgaacccgacgacatcggcaactacaccaaccgttctccctatccgacgctgcacctcatccgcgaagacagcattgccaaagccgcacaagcctttcccgacgcttcggcaatattcgaacgcaatatcgccctgctggaaaaaatgggacatgaaggctgggcaaaactcggtatcacatcctgcccttatccgcacaataagaaaaatatttcaaaatga

SEQ ID NO: 55869 - DNA, 1773 bp, Neisseria meningitidis
atgattccatccgacttcattgacgagcttttagccaaaaccgatattgtcgatattatcgacgagcaggttccgctgaaaaaaggcggggcgaactatatggcgtgttgcccgttccacaaggaaaaaacgccgtcgttttcggtcagtccaaccaagcagttttaccattgtttcagttgcggggcgcatggttcggcgattggttttgtgatggagcatcaggggctgtcgtttccggaggctgtgcagtttcttgccgaccgtgtgggcatggttgtgcctaaagtgcgtgggcagaacgataatcccgaagtccgtgccgaacgtaagaaaaaacagcagacgctggaagaaacgacggcggcggcggctgatttttacgcgcaacagctaaaattcaatccggcggcaaaagcttatttggacaagcgcggcttgagtgcagaagttatcgcgcattatggtttgggctacgcgcccgacggctggcagcctttggcgcaagtgttccaaccgtatccgaataccgcgttggtggatacggggatggtgattgacaatgaggggcggtattacgaccgcttccgccatcggattatgttccctatccgcaatccgcgcgggcaggtcatcggtttcggcggcagggtgctggacgactccaaacccaaatacctgaactcgcccgatacacctttgtttgacaaagggaaaaacctttacggcttgtatgaggggcgtgccgctgtcaaggaagcggagcggattctggtggtcgaaggctatatggacgtggtcgcgctggcacagttcggcgtgggctacggtgtggcggccttgggcacggcaacaacagctgaacacgtcaaaatcctaatgcgtcaggcagacagtatttatttctgtttcgacggcgacagcgcggggcgaaaagcggcttggcgcgcgctggaaaacgcgttgccgcagttgaaagacgacaaatcgctgcattttttgttcctgcccgaggaacacgaccccgacagttacatccgtgcctacggcaaagcgcaatttgaagacgcgcttctgaatcaaagcaagcctttgtcggagtatttctgggaacacctttcagacggcattcatctcaatacgcaggaaggcaaggcggaattggtaaaaaccagttcgccgcttttggcgcagattaccgcgccggcattggcttatttgttaaaacaacggcttagcgaactggtcggcatcgaccccgacaacctcgcgcaactgctgggacaggaagcgccgaagcggcacgtcaaacaaaaaaactacaaactgccgccgatttccgtcaaacagcccgttatgccgacattggtgcaacggcaaatccgcagcctcttgataaatccggattgggctgcatatatagacctgcccgattatctggcgttggacggcgatttcgcctgccttgccaacctcgccgaaaccattaaaaaccatccttccgtgccggcaaccgcacaggttttggaacatatgcgcggctcgccttacgaagaaacgataacccgaatcttccattcaacgcaccaatcggaagaaatgaacagcagcagtgaagaagattgcgagaatttccaaatcggcatgaaaaaactgctcaatgagttaaaatacagccaaatcgaagcattgaaacaaaaaagcctgcaatccggcttaaatgaaagcgagaaaaaacttttgctgtcgctgctgaccgcaaaacaaaattga

SEQ ID NO: 55870 - DNA, 237 bp, Neisseria meningitidis; identical to SEQ ID NO: 39540

SEQ ID NO: 55871 - DNA, 1311 bp, Neisseria meningitidis
gtgctgactttagatgcgtttgagcaatgcttgaaggattgttttcctcaaggtctgaatggaaaaaaaacagcagtggcattaagcggcggcttggattccgtcgttttgctgcatctgcttgtccgcgccggaaaaaagggcggttttattccggatgcattgcatatccatcacggcttgagtccccgtgccgacgattgggcagatttttgccaaaactattgcgatatgctcggggtggggctggaaacggttaaggtctgcgtggaaaaaaacggtttgggcatcgaggcggcggcgcggcaaaagcgttatgccgcgtttgccgaaaaaggctttgacgttttggcgttggcgcaccacagggacgatcaaatcgaaacctttatgctggcagtcgctcgcggcggcggtttgcgcgctttggcggctatgcccaccgtccgcccttttggggaaaaaggcatcatctggcggcctttgctgcctttttcgcgccaagacatatgggattatgcccaaaaacacggtttgccgaatatcgaggacgaaagcaatagcgatacggcttatttgcgaaaccgcttccggcaccgtattttgcccgaactttcggcgcagattccccatttcgggcggcatgtactgaacaatgtccgcgctttgcaggaagatttggctttgttggacgaaatcatcggtcaggactgccgttgggtctgtgaggaaggcagtttcgatacggtgcgttggcaggcgttttccccacgccggaaaacccatattttgcggtattttttgaaggaaaacggcatccccatgccgaatcagaatgcccttgccgacattgcccgggttttgacggaggcaaaaaccggacgttggaacttgcaaggctttgaattgcatcattatgcaggcaggctgtttgtgttccgactggaaaaaacggataaactgcggtttttgaaagacaggcagataagcggaaatttaagggaaatattgacggggcagggatttgttttaaaacgtcatccgtttgggcttcctgagcatcttttggagcaggacggaattttgaggacggtagcggtatcggatacgttggctgtcggcggcatccataaggatgtgaaaaaaatccttcaggggaaacgggttttgcctgtcctgcgcccaatttggccgcttgttgccgacagcggaaaccgtccattggcgttggcaaactgttgtgcggattttcaaatctcggtttcagacggcattttgcccgtccatcctgactttcccattttattttga

SEQ ID NO: 55872 - DNA, 606 bp, Neisseria meningitidis; identical to SEQ ID NO: 51171

SEQ ID NO: 55873 - DNA, 843 bp, Neisseria meningitidis
atgattcaacacgcaggcttgggctaccgccgcgacttggcggaagactttctctcgctttccgaaaacagcccgatatgctttatcgaagccgcaccggaaaactggctgaaaatgggcggctgggcgcgcaaacagtttgaccgtgtggcggaacggctgccgctggcgttgcacggattgtctatgtcgctgggcgggcaagcaccgctggatactgatttgatagacggcatcaaagaaatgatgcgccgttacgattgcacgtttttctccgaccatttgagctactgccacgacggcggtcatctttacgatttgttgccgctgcccttcaccgaggaaatggtgcatcatacggcgcggcgtatccgtgaagtgcaagaccgtttgggctgccgcatcgccgtggaaaacacgtcctactatctgcattccccgcttgccgagatgaacgaggtcgagttcctcaacgccgtcgcacgtgaggccgattgcggcattcatctggatgtgaacaatatctacgtcaacgccgtcaatcacggcctgttgtcgccggaggcttttttgaaaaacgttgacgcagatcgcgtgtgctatatccatattgccggacatgacgtggaaacgccggaattgttgattgatacacatggcgcggcagttttgccgactgtttgggacttgctcgaacttgcctatgccaagctgccgacgattccgcccaccctgttggaacgcgattttaatttcccgccttttgccgaactcgaagccgaagtcgccaaaatcgccgattatcaaacgcgtgccggaaaggaatgccgccgtgcagcctga

SEQ ID NO: 55874 - DNA, 2187 bp, Neisseria meningitidis
ttgccccgatgcctgaaacaggctgtccgccacgtcatgccgtctgaaaccggcgcagatgccgccaagccttcagacggcattgcctgcccgctccgaccgaacaacaaccatctttgggagaaccttatgcccgaacaaaaccgcatcctctgccgcgaactaagcctgctggcattcaaccgccgcgtgttggcacaggcggaagacaaaaacgtcccccttttggaacgcctgcgcttcctgtgcatcgtgtcgtccaatcttgacgagtttttcgaagtccgcatggcgtggctcaagcgtgaaaacaagctgcacccccggcgcaggctggacaacggcaaaatgccgtctgaaaccatcgccgacgttaccgaagcggcgcgctccctgatacggcaccagtacgacctgttcaacaacgtccttcagcccgagttggcgcgggaaagcatccatttttaccgccgccgcaactggacgggcgcgcagaaaaaatggatcgaagactatttcgaccgcgaactgctgccgatcctgacccccatcggactcgacccgtcccaccccttcccgcgaccgctgaacaaatcgctcaacttcgccgtcgaactcgacggcacggacgcgttcggcaggccttcggggatggcgattgtgcaggcaccgcgcatcctgccgcgcgttgttcccctgccgtccgaactgtgtggaggcggacacggcttcgtcttcctctcctccatcctgcacgcccacgtcggcaaactcttcccgggcatgaacgtcaaaggctgccaccagttccgcctgacgcgcgacagcgacttgaccgttgacgaagaagacctgcaaaacctccgcgccgccattcaaaacgaactgcacgaccgcgaatacggcgacggcgtgcggctcgaagtcgccgacacctgtcccgcctacatccgcgactttctgctcgcgcaattcaaactgaccgccgccgaactctatcaggtcaaaggcccggtcaacctcgtgcgcctcaacgccgtccccgacctagtcaaccgccccgatttgaaatttcccacacacacgccgggcagactgaaagccttgggcaaaaccgcgtccatattcgatttggtgcgccaatcgcccatcctgctgcaccacccctaccaatcgttcgaccccgttgtcgaaatgatgcgcgaagctgccgccgaccccgacgtgcttgccgtcaaaatgacgatttaccgcaccggcacgcgctccgaactcgtccgcgccctgatgaaggcggcactcgccggcaaacaagtaaccgtcgtcgtcgaactgatggcgcgttttgacgaagccaacaacgtcaactgggcgaagcagctcgaagaggcgggcgcgcacgtcgtatacggcgtgttcggctacaaagtacacgccaaaatggcactcatcatccgccgcgaagacggcgtactcaagcgttacgcccacctcggcacgggtaactaccaccaaggcacatcgcgcatctacaccgacttcggcatcattaccgccgacgaacaaatcaccgccgatgtgaacacattgtttatggaaatcacaggcttgggcaaacccgggcggctgaacaaactctaccaaagcccgtttaccctgcacaaaatggttatcgaccgcatcgcacgcgaaaccgaacacgccaaagccggcaaacccgcccgaatcaccgccaagatgaattcgctcatcgaaccgaccgtcatcgaagccctgtatcgggcaagcgcggcaggcgtgcaaatcgatttgattgtgcgcggtatgtgcaccttgcgcccgggtgtaaaaggcttgtccgaaaacatccgcgtccgctccatcatcggcaggcagctcgaacacgcgcgcgtgtattgcttccacaacaacggcgcggacgatacctttatctccagcgcggattggatggggcgcaacttcttccgccgcatcgaaaccgccgcgccgattgccgcgcccgaactcaaaaaacgcgtcatccgcgaaggtttggaaatggcactggcagacaatacgcacgcgtggctgatgcagcccgacggcggctatatccgcgccgcgcctgccgagggcgaaagcgaagccgacctgcaaaacgatttgtggacactgctcggaggctga

SEQ ID NO: 55875 - DNA, 1176 bp, Neisseria meningitidis; identical to SEQ ID NO: 38512

SEQ ID NO: 55876 - DNA, 2028 bp, Neisseria meningitidis
ttgtccctgtctgaatttatagaacgccgaacgtcatttaatccgatggttattttgacgactttgttttttgtgtgtgttttggcggtattggttttaaccgtgccggatcaggtgcagatgtggctcgatcgggcaaaagaagtcatttttaccgagttcggctggttttatgttttaacgttttccatttttctgggtttcctgctgatactctcggtcagcagtttgggaaacatcaggctcggacgggatgaagatgtgccggaattcggcttcctgtcgtggctggcgatgctgtttgcggccgggatgggcgtgggtctgatgtttttcggcgtggcagagccgttgatgcattatttttcggacattacggccggcacgccggaacacaggcagcagcaggcattgctgcacacggtgttccattggggcgttcacgcttggtcggtgtacggtacgattgcattggctttggcttatttcggtttccgctacaagctgccgcttgccctgcgttcttgtttttaccccctgttgaaagaaaaaatttccggaaggttcggcgatgccattgatattatggcgttgcttgctacttttttcggcatcatcaccacattggggttcggggcttcgcaactgggcgccggattgcaggaaatgggctggattgccgaaaacagcttcagcgtgcaggttttgattatcgccgccgtcatgtccctcgccgtcgtttcggcaatatccggcgtggggaagggcgtgaaggtgttgagcgagttgaacctgagccttgcgtttttgctgctgttttttgttttggcggcgggccccactgtttacctgttgtcggcattcggcgacaacatagggaactacctcgaaaatctggtgcgcctcagttttaaaacttatgcgtacgaacgggaacacaagccgtggtttgaatcttggacggtgctttattgggcgtggtggtgttcttgggcgccgtttgtgggtttgtttatcgcgcgtatttcaaaggggcgcaccatccgcgagtttgtcttcggggttttgctcatccccggcctgttcggcgttttgtggtttaccgtcttcggcaatacggcgatttggctgaatgacggggttgcggggggaatgctcgaaaagatgacctcctctccggaaacgctgctttttaaattctttaattacctccccctgcccgaattgacgagcatcgtcagcctgctggtcatttccctgttttttgtaacttctgccgattccgggatttatgtcctgaacaatattacctctcgggacaagggcttgagcgcaccacggtggcaggcggttatgtggggcgtgctgatgtctgccgttgccgttttgctgatgcgctcgggcgggctaggcaacctgcagtctatgaccctgattgtttccctgccgtttgccctgctgatgctgataatgtgtttcagcctgtggaaaggattgagtgcggataagaaatattttgagacccgggttaaccctaccagtgtattttggacgggcggcaagtggaaagaacggctggtgcagataatgagccagacgcaggagcaggatattttaaaattcctcaaacataccgcatcgcccgctatgcacgagttgcaacgggagctttcggaagaatacggcttgagcgtccgggtcgataagatgtttcatcaggacgagcccgcaatcgagttcgtcattcggaaagagacgatgcgcgattttatgtacgggattaagtctgtcgggcaggatgtatccgaccagttgattaacgacggcaagctgccgcatatccggcatcagacaacttacaaaccctacgcttattttttcgacgggcgcgtcgggtacgatgtgcagtatatgaacaaggacgagctgattgccgacattttgaaaaactacgaacgttatttgatgttgttggatgatgtcggtcaggaactgatggcgcacgagcaggtggaattggcagagtaa

SEQ ID NO: 55877 - DNA, 501 bp, Neisseria meningitidis
ttgccacaatgccgtctgaagcctttcagacggcatcgtcctgccaaatgctcaaacaatatgccgaaagccaccttttacacgcacgttgcccaagttccgattttcacctgccgcctgattgcccgtgcgattcgggacggcggcaggatactggtgtggtccgattcgttcgggcagcttcaggaattggacaaaatgctttggcaatacgaggccgagagttttattccgcacgaaatttgggaaatggaagaagccatgccgtctgaaacatccgtcctgcttgcttgcggcggcaatccgccccgaattcccgaaggcatgactgttttgaacctgtccgacggtttttggaacaccgctccggtcttgcccgcgcgcgttttggaaatcgtcggcaacagcttggaagatctcgccgacgcgcgcgaacgctttaccgcctaccgccgaagcggttttgccatcgaacatcacggcatggagggcaaggcataa

SEQ ID NO: 55878 - DNA, 375 bp, Neisseria meningitidis
atgatagtccttcacggcatcccaaattgcgatacggtcaaaaaagccaaaaaccgacttgccggatacggcttggagtttgagtttcgggatttcaaaaaacagatgccgtctgaagcggaaatctgctcgtggctggaacaagtgcctttggaaaccctgctcaacaaacgcgggacaagctggcgcaaactcgatgccgaaacacagcaaaaagccctgtcctcgacagcggaggccgtcaaactgatgtccgaaatgccgagcctgatcaagcgtcccgtattggagtgcggcggcaaggtttacgccggcttcagcgaagaaacctacgacggcatcttcaaccggcaagccccgtgcagacagggataa

SEQ ID NO: 55879 - DNA, 3486 bp, Neisseria meningitidis
atgcgcctgacccacatcaaactctccggcttcaaatcttttaccgacccgaccacgattcatgttccggggcagcttgtcgcggttatcgggccgaacggttgcggcaagtcgaatgtgattgacgcggtgcgctgggtgttgggtgaggcttcggcgaagcagcttcgtggcgagagtatgcaggacgtgatttttaacggtgcggcgacgcgccgtcctgcgccgagggcttcggtggagctggtgtttgacaacagcgaccacagtttgcagggtgcgtggggacagtatgccgaggtgagcatcaagcggcagctgacgcgtcagggcgaatcgacttatttcatcaacaatcagaccgtgcgccgccgcgacattaccgatttatttttgggtacgggcgtgggtgcgcgcggttatgccgttatcgagcaggggatgatttcgcgcatcatcgaagcgcggccggaggagttgcgtgcctatatcgaggaggcggcaggtgtgtccaaatataaggaacgccgcaaggagacggaaggccgtctgaaagacacgcgcgagcatttgcagcgtttgggcgatttgcagaacgaattggcgcgtcaggtggaaaagctggagaaacaggcggaaaccgccgaacgctacaaatccctgaccgcgcagttgaaccggcaacaggatttgctcgattacgcccaatggcagcaatcgcttgccgccgccgacaaggcgaccgagcagcatcagtctttgcaggcgcagcaggacgaaaccgccgcgcaggttcaggcgttaaacgacgaagtacacgccttgcagaccgccgaacagtcgcagcaacaggcggtgcatgaattgagcaacaaacgcggcgtgttgcgcgagcagattgcccgtttggaagaacaaatccgccatcagcaaaacctgcaccaacgcatcgaacgcgacaagcaggcggcgcaggcgcagatgcagcgtattcatcaagagcagcagcaaatccgcgtgcagcttgaagaaaacgagttatacgtcgaagaaaagcaaaccgagctggcggagtgggcgatgcaggttgccgaacacgaagagcgtctgcccgaattggaagaaacccaaaccgcgctcaatgccgccttccaaacccagcaggacgaggcaaaccgcatccgccgcgaactggcgttgaagcagcagcagcttgcccatgccgaacaaaccgttgccaagcacgaagagcgcaaaggccgtctgaaacaggagaaccaagccctgaacctgcccgacgaagcggaaaccgccgccgcgcaggaggccgctgccttgttgcaaagccggcaagagcattacgaagaacaaatcatcgccgccgaagaagccttacacgccgcccgcgaggcgtttcagacggcctcaaaccgcttccaaagcctgaagcagcaacatatcaccttgcaggcgcagcagcaggcgttgtcgcaaatcctgtcgcaacagcaggaagcagccgatttctggcaggcaaccggccacgccgccgcgccgcaactgtggcaacacattaccgcgcctgctgagtggcagcacgccctgtccgtcatccttgccgaacgcctgcacgcccgcgacgtgccgcaaggtttcgtaccgcccgaacctttgccgcaggggcaggcggcgtggctttcagacggtctctccggcggcatcaaaaaatccctgcccgtacaggcattgctgaaccaaatccaagcgcagccgccgtttcagacggcattgcaccactggctcgacggcgtattgtgcgcgcccgatttgagctacgccctcgcgcatcaaagcgatttgggcgcacaccaaatctggctcacgcccgaaggtcatcaggtcgacaaagtcagcgtcctgctctatgccaagcccgcgcaggaaagcctgattacccaaaaagcgcacctcgacggcatcgcgtccgaattggaaaacctcgcccccgaactttccgccgccgaagccgcgttcaaacaggcggaagccgccgtgcgctcgtccgaagtgcaacataaaaacctgatgcagcagcaacagcagcacacgcgccaatacagccaagcgcagcaacgcgccgccgaactcttggcgcgcaccaaccaagggcaaatccgccgcgaacacatcgagcgcgaactggcgcagttggcggaagagcagaccgtgttgcaacacacgtccgacgggctttcagacgacatcgttaccttgcaggaagccgccgccgaactcgaacaccagcagcaaaccaccgcgcacagccgccaagagcagcaaggccgtctgaaacaggcgcagcttgccctgttggaagccaaccgccaatacgggctggccgaagtcgccgttcacaagctcaaccagcaaaaacaaaactaccggcagcaaattgcccagctcgaacagcaaacctttgattggcaggaacgccaacaagagcttgccctcgcctatgaaaccgagttccaaaacgacgagcagcacatcaagcttgaagaattaagcgaagccgtacagaccttggacgaagaatatattgttgtgcaagagaaactcgcgcagattcaggaacagggcagggaacaatacgctaaagtacaaaccctgcaaacccagttgccacagcttcaggcagccacccaaaccgccctgttgcagcagcaggaagccctgattaacgccaaacgctaccatcaaaacctgaccgaacgcgccgccgatttggacgcgctcgaagcgttggcgaaagaatcgccgaaagtattgaacagcagcatcggcagcctttcgcaacaaatcgaagcactcggcgcggtcaacctcgccgccctgcaagaactcgaagaagcgcgcgaacgcgacggctactaccgcagccaaagcgaagacgtgcaggcagccatcacccttttggaagaagccatcgcccaaatcgacgacaaaaccaaagcgcgtttcaaagaaaccttcgatgccgtcaacagcaaagtccaaaccttcttcccgaccctgttcggcggcggcgaagccactctcaaaatgataggcgacgacctactgaccgccggtgtgtccatcatggcgcgtccgcccggcaagaaaaacagcaccatccacctcctctccggcggcgaaaaagccctcaccgccatgagcctcgtgttcgccctgttcagcctcaaccccgcccccttctgccttttggacgaagtcgatgccccgctggacgatgccaacacttcgcgtttctgcaacctggtcaaagaaatgtcggcgcaaacccagtttctctacatctcccacaaccgcctgaccatggaaatggcggagcagctcgtcggtgtaaccatgcaggaaaaaggcgtgtcgcgcgtcgtcgccgtggacatcaaacaggcgttggaaatggcggaagccgtttga

SEQ ID NO: 55880 - DNA, 372 bp, Neisseria meningitidis; identical to SEQ ID NO: 40198

SEQ ID NO: 55881 - DNA, 1296 bp, Neisseria meningitidis
atgagcgtcatccaagacctgcaatcgcgcgaccttatcgcgcaaacgaccgacatcgaagccttagacgctttgttgaacgaacaaaaaatcgccctttactgcggtttcgatccgaccgccgacagcctgcacatcggacacctgctgcccgtattggcattgcgccgtttccaacaggcggggcatacgccgattgctttggtgggcggcgcgaccggtatgatcggcgaccccagcttcaaagccgccgaacgcagcttgaattccgccgaaaccgttgccggctgggtggaaagcatccgcagccaattaacccctttcttgagctttgaaggcggaaacgccgccattatggcgaacaacgccgactggttcggcaaaatgaactgcctcgacttcctgcgcgacatcggcaagcatttctccgtcaacgccatgctgaacaaagaatccgtcaaacagcgcatcgaccgcgacggcgcaggcatttccttcaccgagttcgcctattccctgctgcaaggttacgacttcgccgagttgaacaaacgccacggcgcggttttggaaatcggcggctccgaccaatggggtaacatcactgccggtatcgacctgacccgccgcctgtaccaaaaacaagtgttcggactgactctgcctttggttaccaaatcagacggcaccaaattcggcaaaaccgaaggcggcgcggtgtggctgaacgcgaaaaaaacctcgccctatcagttctaccaattctggctgaaagtcgccgatgccgatgtgtataaattcctgaaatactttaccttcctgtccatcgaagaaatcgacgctatcgaagcgaaagataaagccagcggcagcaagcccgaagcgcaacgcatcctcgccgaagaaatgacccgcctgattcacggcgaagaagcccttgccgccgcgcagcgcatttccgaaagcctgtttgccgaagaccaaagcagcctgaccgaaagcgacttcgagcagctcgccctcgacggcctgcctgcatttgaagtttcagacggcatcaatgtcgtcgaagccttggtaaaaaccggtttggcatcctccaataaagaagcgcgcggctttgtgaacagcaaagcggttttgctcaacggcaaacctgccgaagccaacaaccccaaccacgccgccgaacgccccgacgatgcctgcctgctgaacggcgaacacaaacgtttcggcaaatacactatccttcggcgcggcaaacgcaaccacgcgcttttggtttggaaataa

SEQ ID NO: 55882 - DNA, 366 bp, Neisseria meningitidis; identical to SEQ ID NO: 38043

SEQ ID NO: 55883 - DNA, 822 bp, Neisseria meningitidis
atgacgtttgacgaatggttgggcttgtcaaaactgcctaaaattgaagcaagaatgctgctgcaatatgtttcggaatatacgcgcgtgcagttgttgacgcggggcggggaagaaatgccggacgaagtccgacagcgggcggacaggctggcgcaacgccgtctgaacggcgagccggttgcctatattttaggtgtgcgcgaattttatggcagacgctttacagtcaatccgagcgtgctgattccgcgccccgaaaccgaacacttggtcgaagccgtattggcgcgcctgcccgaaaacgggcgcgtgtgggatttggggacgggcagcggcgcggttgccgtaaccgtcgcactcgaacgccccgatgcgtttgtgcgcgcatccgacatcagcacgcccgcccttgaaacggcgcggaaaaatgcggcagatttgggcgcgcgggtcgaatttgcacacggttcgtggttcgacaccgatatgccgtctgaagggaaatgggacatcatcgtgtccaacccgccctatatcgaaaacggcgataaacatttgttgcaaggcgatttgcggtttgagccgcaaatcgcgctgaccgacttttcagacggcctaagctgcatccgcaccttggcgcaaggcgcgcccgaccgtttggcggaaggcggttttttgttgttggaacacggtttcgatcagggcgcggcggtgcgcggcgtgttggcggagaatggtttttcaggagtggaaaccctgccggacttggcgggtttggacagggttacgctggggaagtatatgaagcatttgaaataa

SEQ ID NO: 55884 - DNA, 867 bp, Neisseria meningitidis
gtgaaaatctttcttttttacgaatacggagtcgaaaatgaatccagccccaaaaaaccttctcttctcttctcttctcttctcttctcttctcttctcttatcttctcttctcttctcttctcttctcttctcttccgcagcgcaggcggcaagtgaagacggcagtcgcagcccgtattatgtgcaggcggatttagcctacgccgccgaacgcattacccacgattatccgcaagcaaccggtgcaaacaacacaagcacagtaagcgattatttcagaaacatccgtgcgcattccatccacccccgggtgtcggtcggctacgactttggcggctggagaatagcggcagattatgcccgttacagaaaatggaacaacaataaatattccgtcaacacaaaaaatgtgcaaaaaaacgacaatggcaacaggcaagacctgaagacggaaaatcaggaaaacggtacattccacgccgtttcttctctcggcttatccgccatttacgatttcaaactcaacgataaattcgataaattcaaaccctatatcggtgtgcgcgtcgcctacggacacgtcagacacagcatcgattcgaccaaaaaaacaacaaatgttgttaccgtcgccggtgctgctaacacagcacctacgatttattatgcaccagagacgcaaaacgcctatcacgaaagccacagcatccgccgcttgggtcttggtgtcatcgccggtgtcggtttcgacatcacgcccaagctgaccctggacaccggataccgttaccacaactggggacgcttggaaaacacccgcttcaaaacccacgaagtctcattgggcatgcgctaccgcttctga

SEQ ID NO: 55885 - DNA, 411 bp, Neisseria meningitidis; identical to SEQ ID NO: 37452

SEQ ID NO: 55886 - DNA, 258 bp, Neisseria meningitidis
atgaaacccagaaatctcttttttgcaggctgcctgctgacttcggcgacgtttgccgaggatatcggcgtacctgtcgaactgattaacgtcggtaatcggattgcgatgccgtctgaaggggaaagcctcgccctcctgccgtttgccgaggatgtaccgccggttcgcgatgcaatgccgtctgaagttcctaaaagcgcggcaggcggcgatgttcggggtgaccggataggaatgccgattaacatcggatga

SEQ ID NO: 55887 - DNA, 2526 bp, Neisseria meningitidis
ttgaaaaacaacagacaaatcaaactgattgccgcctccgtcgcagttgccgcatcctttcaggcacatgctggactgggcggactgaatatccagtccaaccttgacgaacccttttccggcagcattaccgtaaccggcgaagaagccaaagccctgctaggcggcggcagcgttaccgtttccgaaaaaggtctgaccgccaaagtccacaagttgggcgacaaagccgtcattgccgtttcttccgaacaggcagtccgcgatcccgtcctggtattccgcatcggcgcaggcgcacaggtacgcgaatacaccgccatcctcgatcctgtcggctactcgcccaaaaccaaatctgcactttcagacggcaagacacaccgcaaaaccgctccgacagcagagtcccaagaaaatcaaaacgccaaagccctccgcaaaaccgataaaaaagacagcgcgaacgcagccgtcaaaccggcgtacaacggcaaaacccataccgtccgcaaaggcgaaacggtcaaacagattgccgccgccatccgcccgaaacacctgacgctcgaacaggttgccgatgcgctgctgaaggcaaacccaaatgtttccgcacacggcagactgcgtgcgggcagcgtgcttcacattccgaatctgaacaggatcaaagcggaacaacccaaaccgcaaacggcgaaacccaaagccgaaaccgcatccatgccgtccgaaccgtccaaacaggcaacggtagagaaaccggttgaaaaacctgaagcaaaagttgccgcgcccgaagcaaaagcggaaaaaccggccgttcgacccgaacctgtacccgctgcaaatactgccgcatcggaaaccgctgccgaatccgccccccaagaagccgccgcttctgccatcgacacgccgaccgacgaaaccggtaacgccgtttccgaacctgtcgaacaggtttctgccgaagaagaaaccgaaagcggactgtttgacggtctgttcggcggttcgtacaccttgctgcttgccggcggaggcgcggcattaatcgccctgctgctgcttttgcgccttgcccaatccaaacgcgcgcgccgtaccgaagaatccgtccctgaggaagagcctgaccttgacgacgcggcagacgacggcatagaaatcacctttgccgaagtcgaaactccggcaacgcccgaacccgctccgaaaaacgatgtaaacgacacacttgccttagatggggaatctgaagaagagttatcggcaaaacaaacgttcgatgtcgaaaccgatacgccttccaaccgcatcgacttggatttcgacagcctggcagccgcgcaaaacggcattttatccggcgcacttacgcaggatgaagaaacccaaaaacgcgcggatgccgattggaacgccatcgaatccacagacagcgtgtacgagcccgagaccttcaacccgtacaaccctgtcgaaatcgtcatcgacacgcccgaaccggaatctgtcgcccaaactgccgaaaacaaaccggaaaccgtcgataccgatttctccgacaacctgccctcaaacaaccatatcggcacagaagaaacagcttccgcaaaacctgcctcaccctccggactggcaggcttcctgaaggcttcctcgcccgaaaccatcttggaaaaaacagttgccgaagtccaaacaccggaagagttgcacgatttcctgaaagtgtacgaaaccgatgccgtcgcggaaactgcgcctgaaacgcccgatttcaacgccgccgcagacgatttgtccgcattgcttcaacctgccgaagcaccgtccgttgaggaaaatataacggaaaccgttgccgaaacacccgacttcaacgccaccgcagacgatttgtccgcattacttcaaccttctaaagtacctgccgttgaggaaaatgcagcggaaaccgttgccgatgatttgtccgcactgttgcaacctgctgaagcaccggccgttgaggaaaatgtaacggaaaccgttgccgaaacacccgatttcaacgccaccgcagacgatttgtccgcattacttcaaccttctgaagtacctgccgttgaggaaaatgcagcggaaaccgttgccgatgatttgtccgcactgttgcaacctgctgaagcaccggccgttgaggaaaatgcagcggaaatcactttggaaacgcctgattccaacacctctgaggcagacgctttgcccgacttcctgaaagacggcgaggaggaaacggtagattggagcatctacctctcggaagaaaatatcccaaataatgcagataccagtttcccttcggaatctgtaggttctgacgcgccttccgaagcgaaatacgaccttgccgaaatgtatctcgaaatcggcgaccgcgatgccgctgccgagacagtgcagaaattgctggaagaagcggaaggcgacgtactcaaacgtgcccaagcattggcgcaggaattgggtatttga

SEQ ID NO: 55888 - DNA, 306 bp, Neisseria meningitidis; identical to SEQ ID NO: 36883

SEQ ID NO: 55889 - DNA, 1305 bp, Neisseria meningitidis
atgaaaaaacacatatgggcggcatctttgctgccggcatccctatcggcagaacctttaaactggtggaagccttattccgccgtcaattcgggcgataccgcctgggtgatgactgcggctgccttggtactgttgatgacgcttcccgggctggctttattctacggcggtatggtgcggaaaaaaaacctgctctcgacgatgatgcacagcttttccatcgcgacattggtgggcatcctttgggtcgccgtcggctattctttagcgttcacgccgggaaatgcctttatcggcggtttggggcgcgtatttttaagcgggatgcagatagacgctgccgcacagatgctgaccgtgtcgcccaatgcgccgactgttcccgaaccggtatttatgttttttcagatgacgtttgccattatttcgaccgccattattaccggcgcgtttgccgaacggatgaaatattcggcaatgatgctgttttcgggcatatggtttttattggtttatgtgccgggcgcgcattgggtgtggggcggcggctttatgagcaagggcggcgtattggattatgccggcggtacggtggtgcacatcaatgccggtatcgcgggactcgtcgccgccttggttttgggcaggcgcataggctacgggcgcgaggcgatgcctccgcacaatatggcgatgacactgatcggcgcggcaatgttgtggttcggctggttcggctttaacgccggatcggcgcttgcggcagacgcggcggcgggtatggcgatggcggtaacgcaggtgtcggccgtattcggcgcggcaggctggcttgcctgcgaaaaaatagcgggacacaaaccttccgctttggggctggcttccggcgcggtttccggtctggtcggcatcacccctgccgccggctttaccggcccgtcgggcgcggccgccatcggtatattgactgccgccgcgtgctttgtgtccgtcaccgtcgtcaaacacaaattgcgttacgatgattctttggacgctttcggcatacacggattcggcgggctggtgggcggaatattgaccggcatctttttcgacaaccgcattttcggcggggatgcggcagtttggcagcagttgtggatacaggtaaaagacggggtcgttatggcggcatacagcgggctaatgagttgggcgattttgaaggtcgtggggaaaatctgcggcggcctgcgcgtcggcaaggatgtcgaacgcgaaggtttggatctgaatatccacggcgaacgcgtggaataa

SEQ ID NO: 55890 - DNA, 1251 bp, Neisseria meningitidis
  misc_feature 4, 5, 6, 7, 8: 'n' is a, c, g or t
gtgnnnnncggcggctatatcgtcgacattccgaaaggcaatctgaaaaccgaaatcgaaaagctggccaaacagcccgaatacgcctacctgaaacagcttcagacggccaagaacgtcgattggaaacaggtgcagctggcctacgacaaatgggactataaacaggaaggcttgaccggagccggtgcagcgattgtggtgattattgtaaccgctctaacttatggatacggagcggctgcagcgggtagcgtaactgccgcaggaagtagtacagccgcagctgcaacaacgacagcggcagcaactaccactgtttctactgcagctgccatgcaaaccgcagctttagcctccttgtatagccaagcagctgtagccatcatcaataataaaggcgatgtcggcaaagcgttgaaagatctcggcaccagtgatacggtcaagcagattgttacttccgcactgacggcgggtgcattaaaccagatgggagcagatattgcccaattgaacagcaaggtaagaaccgaactgttcagcagtacgggcaatcaaaccattgccaaccttggaggcagattggccaccaacctcagcaatgcaggtatctcagctggtatcaataccgccgttaacggcggcagcttgaaagacaacttaggcaatgccgcattgggagcattggttaatagcttccaaggggaagccgccagcaaaatcaaaacaaccttcagcgacgattatgttgccaaacagttcgcccacgctttggcgggttgtgttagcggactggtacagggaaaatgtaaagatggggcaattggcgcagcagttggggaaatcgtagctgaatccatacttggcggcagaaaccctgctacactcagcgatgcagaaaagcataaagttatcagttactcgaagattattgcgggcagcgtggcggcactcaacggcggcgatgtgaatactgcggcgaatgcggctgaggtagctgtggtgaataatgctttgaattttgacagcacccctaccaatgcgaaaaagcatcaaccgcagaagcccgacaaaaccgcactggaaaaaatcatccaaagtattatgcctgcacatgcggcaggtgcgatgactaatccgcaggataaggatgctgccatttggataagcaatatccgtaatggcatcacaggcccgattgtgattaccagctatggggtttatgctgcagttggacagctccgctga

SEQ ID NO: 55891 - DNA, 960 bp, Neisseria meningitidis
atgaaacctgtttttttggattttgaacaacccatagccgaactgaccaacaaaatcgatgagctgcgtttcgtccaagacgagtctgccgtcgatatttcggacgaaatacaccgtttgcagaaaaaaagcaacgacctgaccaaatcgattttcagcaaacttacgcccgcccaggtttcacaggtttcccggcatccgcagcgtccctatactttggattacattgatgcgctgtttactgattttgaagagctgcacggcgaccgccattttgccgacgatcatgcgattgtcggcggattggcgcgtttcaacggacaaagcgtgatggtcgtcgggcatcagaaagggcgcgacaccaaagaaaaaatccgccgcaacttcggtatgccgcgccccgagggctaccgcaaagccctgcgcctgatgaaaacggctgagaaattcggcttgcccgtcatgacctttatcgatacgccgggcgcgtatcccggcatcggcgcggaagaacgcgggcagtcggaagccatcggcaaaaacctgtacgaactgacgcgcctgcacgtccccgttttgtgtaccgtcatcggcgaagggggctcgggcggtgcgttggcggtcgccgtaggcgattacgtcaatatgctgcaatactcgacctattctgttatctcccccgaaggctgcgcttcgattttgtggaaaaccgccgaaaaggcggcggatgcggctcaggctttgggcattactgctgaccgcctgcaaaagctggacttggtcgataccgtcatcaaagaaccattgggcggcgcgcatcgggatttcgggcaaaccatgaaaaacgtaaaagccgttttggaaaaacaactgcacgaagcgcaaagcatcccgcttgccgatttgctttcgcgccgtttcgaccgcattatggcttacggcaaattttcggaacaataa

SEQ ID NO: 55892 - DNA, 1767 bp, Neisseria meningitidis
ttgtctgaaataataaaacggatattttactataagtgtctgaaaatttgcccgtctgtttcagacggcggggcggttatgttacaatccgaaaattcgaaaaatttaatctcttgttcaataaaggctttaccaatcatgatttctaccaacggcatcaccatgcagttcggcgcgaagccgctatttgaaaacgtatccgtcaaattcggcgaaggcagccgctacggtttgatcggcgccaacggctcaggcaaatccaccttcatgaaaatcctcggcggcgatttggaacagaccgccggtgaagtcgcaattgaaaacggcgtgcgtttgggtaaattgcgccaagaccagtttgcctacgaagacatgcgcgtgctggacgtggtgatgatggggcataccgaaatgtgggcggcgatgaccgaacgtgatgcgatttacgccaatcccgaagccaccgaagacgactacatgaaagccgccgaactggaagccaagttcgccgaatacgacggctacaccgccgaagcgcgtgccgccgaactgttgagcggcgtgggcatttccgaagatttgcacaatgcgaaaatggcggaagtcgccccgggcttcaaactgcgcgtattgctggcgcaagccctgttctccaagccggatgtgctgttgcttgacgaaccgaccaataacttggacatcaacaccatccgctggctggaaggcgtgttgaaccaatacgactccaccatgatcatcatctcgcacgaccgccactttttgaacgaagtctgcacccacatggcggatttggactacaacaccatcaccatctatcctggcaactacgacgactacatgctcgcttccgcccaatcgcgtgagcgcgccctgaaagacaacgccaaagccaaagagaaactgcaagagctgcaagagttcgtcgcacgcttctctgccaacaaatccaaagcccgtcaggcaaccagccgtctgaaacaggccgacaaaatcaaatcggagatggtcgaagtcaaaccttccacccgtcaaaacccgtatatccgttttgaagccgatgaaaaagccaagctgcaccgtcaggctgtggaagttgaaaaactggcgaaacgctttgaaacccagttgtttaaaaacctgaacttcatccttgaagcgggacaacgcctcgccatcatcggcccgaacggcgcgggcaaatccaccctgctgaaactcttggccggcgcgtacaaccccgaatattcagacggcctgttaccggacgaaggcagcatcaaatgggcggaaaaagccagtgtcggctactatccgcaagaccatgaaaacgacttcgacgtcgatatggatttgagcgaatggatgcgccaatgggggcaggaaggcgacgacgaacaagtcatccgcggcactttggggcgtttgctcttcggcagtaacgatgtcgtgaaaaaagtgaaggttctctccggtggtgaaaaaggccgtatgctttacggcaaactgttgctgttgaaacccaatgtcttagtcatggatgaaccgaccaaccacatggacatggaaagcatcgaatccttgaacatggcgctggaaaaatacaacggcacgctgattttcgtctcgcatgaccgtcagtttgtatcttcattggctacccaaatcatcgaattggacggtaaaggcggatatgaacactacttgggcgattacgaaagttacttggagaaaaaaggcgtagcataa

SEQ ID NO: 55893 - DNA, 918 bp, Neisseria meningitidis
atgagcatcatccactacctctcgctgcacgtcgaatccgcgcgcaccgcgctcaaacagcttctgcgccaacctttcggcacactgcttaccctcataatgctcgccgtcgccatgaccctgccgctgtttatgtatttgggcatccaaagcgggcaaagcgtgttgggcaaactcaatgagtcgccgcaaatcacaatctatatggaaaccgccgccgcacaaagcgacagcgataccgtccgcagcctgctggcgcgcgacaaacggctcgacaacatccgcttcataggcaaagaagacggtctggaagaattacagtccaatctcgaccaaaatctgatttccatgcttgacggtaaccccctgccggatgtctttatcgttacccccgacccggcaaccacgcccgcccaaatgcaggcaatctaccgggacattaccaaactgcctatggtcgaatccgccaacatggatacggaatgggtacagacactgtaccaaatcaacgaattcatccgtaaaatcttatggtttctttccctgacgctggggatggcgttcgtccttgtcgcgcacaacaccatccgactgcaaatcctcagccgcaaagaagaaatcgaaatcaccaaactcttgggcgcgcccgcgtcgtttatccgccgcccattcctttatcaagccatgtggcagagcatcctttccgccgccgtcagcttggggctttgcggttggctgctctctgccgtgcgccccttggtcgatgccatcttcaaaccctacggacttaatatcggctggcgtttcttctacccgggagaaatcgcactggtgttcggcttcgtcatcgcgttgggcgtattcggcgcgtggcttgccaccacccagcacctgctcggcttcaaagccaaaaaataa

SEQ ID NO: 55894 - DNA, 687 bp, Neisseria meningitidis; identical to SEQ ID NO: 36558

SEQ ID NO: 55895 - DNA, 963 bp, Neisseria meningitidis
atgcaagcacggctgctgatacctattcttttttcagtttttattttatccgcctgcgggacactgacaggtattccatcgcatggcggaggtaaacgctttgcggtcgaacaagaacttgtggccgcttctgccagagctgccgttaaagacatggatttacaggcattacacggacgaaaagttgcattgtacattgcaactatgggcgaccaaggttcaggcagtttgacagggggtcgctactccattgatgcactgattcgtggcgaatacataaacagccctgccgtccgtaccgattacacctatccacgttacgaaaccaccgctgaaacaacatcaggcggtttgacaggtttaaccacttctttatctacacttaatgcccctgcacgctcgcgcacccaatcagacggtagcggaagtaggagcagtctgggcttaaatattggcgggatgggggattatcgaaatgaaaccttgacgactaacccgcgcgacactgcctttctttcccacttggtacagaccgtatttttcctgcgcggcatagacgttgtttctcctgccaatgccgatacagatgtgtttattaacatcgacgtattcggaacgatacgcaacagaaccgaaatgcacctatacaatgccgaaacactgaaagcccaaacaaaactggaatatttcgcagtagacagaaccaataaaaaattgctcatcaaacccaaaaccaatgcgtttgaagctgcctataaagaaaattacgcattgtggatggggccgtataaagtaagcaaaggaattaaaccgacggaaggattaatggtcgatttctccgatatccgaccatacggcaatcatacgggtaactctgccccatccgtagaggctgataacagtcatgaggggtatggatacagcgatgaagtagtgcgacaacatagacaagggcaaccttga

SEQ ID NO: 55896 - DNA, 966 bp, Neisseria meningitidis; identical to SEQ ID NO: 42827

SEQ ID NO: 55897 - DNA, 2151 bp, Neisseria meningitidis
atgaaaaccccactcctcaagcctctgctcattacctcgcttcccgttttcgccagtgtttttaccgccgcctccatcgtctggcagctaggcgaacccaagctcgccatgcccttcgtactcggcatcatcgccggcggccttgtcgatttggacaaccgcctgaccggacggctgaaaaacatcatcgccaccgtcgccctgtttaccctctcctcgctcacggcacaaagcaccctcggcacagggctgcccttcatcctcgccatgaccctgatgaccttcggcttcaccattttaggcgcggtcgggctgaaataccgcaccttcgccttcggcgcactcgccgtcgccacctacaccacacttacctacacccccgaaacctactggctgaccaaccccttcatgattttatgcggcaccgtactgtacagcaccgccatcctcctgttccaaatcgtcctgccccaccgccccgtccaagaaagcgtcgccaacgcctacgacgcactcggcggctacctcgaagccaaagccgacttcttcgaccccgatgaggcagcctggataggcaaccgccacatcgacctcgccatgagcaacaccggcgtcatcaccgccttcaaccaatgccgttccgccctgttttaccgtttgcgcggcaaacaccgccacccgcgcaccgccaaaatgctgcgctactacttcgccgcccaagacatccacgaacgcatcagctccgcccacgtcgactaccaagagatgtccgaaaaattcaaaaacaccgacatcatcttccgcatccaccgcctgctcgaaatgcagggacaagcctgccgcaataccgcccaagccctgcgcgcaagcaaagactacgtttacagcaaacgcctcggccgcgccatcgaaggctgccgccagtcgctgcgcctcctttcagacagcaacgacaatcccgacatccgccacctgcgccgccttctcgacaacctcggcagcgtcgaccagcagttccgccaactccagcacaacggcctgcaggcagaaaacgaccgcatgggcgacacccgcatcgccgccctcgaaaccggcagcctcaaaaacacctggcaggcaatccgtccgcagctaaacctcgaatcaggcgtattccgccatgccgtccgcctgtcccttgtcgttgccgccgcctgcaccatcgtcgaagccctcaacctcaacctcggctactggatactactgaccgcccttttcgtctgccaacccaactacaccgccaccaaaagccgcgtccgccagcgcatcgccggcaccgtactcggcgtaatcgtcggctcgctcgtcccctactttaccccctccgtcgaaaccaagctttggatcgtcatcgccagtaccaccctctttttcatgacccgcacctacaaatacagcttctcgacatttttcatcaccattcaagccctgaccagcctctccctcgcaggtttggacgtatacgccgccatgcccgtgcgcatcatcgacaccattatcggcgcatcccttgcctgggcggcggtcagctacctatggccagactggaaatacctcacgctcgaacgcaccgccgcccttgccgtatgcagcaacggtgcctatctcgaaaaaatcaccgaacgcctcaaaagcggcgaaaccggcgacgacgtcgaataccgcgccacccgccgccgcgcccacgaacacaccgccgccctcagcagcaccctttccgacatgagcagcgaacccgcaaaattcgccgacagcctgcaacccggctttaccctgctcaaaaccggctacgccctgaccggctacatctccgccctcggcgcataccgtagcgaaatgcatgaagaatgcagccccgactttaccgcacagttccacctcgccgccgaacacaccgcccacatcttccaacacctgcccgaaaccgaacccgacgactttcagacagcactggatacactgcgcggcgaactcgacaccctccgcacccacagcagcggaacacaaagccacatcctcctccaacagctccaactcatcgcccggcagctcgaaccctactaccgcgcctaccgacaaattccgcacaggcagccccaaaacgcagcctga

SEQ ID NO: 55898 - DNA, 924 bp, Neisseria meningitidis
atgccgtccgaacacccgttttcagacggcatttccacacccaaccccaaagaaaccatgaacgacaccgcccaaattaccgccagctacggccgccgctacatcgtgcgcacgcccgacggcacaacctacgaagccagcacgcgcaaaaaacgcgtcgatttcgcctgcggcgaccgtgtccgcatcagccccgtcaacgccgaacaagttgtgattgaagattttttaccgcgccaaagcctgctctaccgccaagacgcgtggaaaaccaaactcattgccgccaacgttacccaactcctcatcgtaaccgccgccgtcccgagtccgagcgtgcggctgctacagcgcgccctgcttgccgccgaagccgccggcatccgcgccgtcatcgtcctgaacaaagccgacctgcccgaaaccgccctttggcgcgaaaaactcaaattctacgaaacgctgggttatcccgtcatcgaaacccgcgcactggaaaacgccggcagcctgcgccccgccctgcaagggcacagcaacatcctgctcgggcagagcggtatgggcaaatccaccctgaccaacgcccttttgggcagccaaaccgcccgcaccggcgacatttccgccgcactcgactcgggaaaacacaccaccacccacgcccggctttatgatttgaacggcgaaacccaactcatcgactccccgggtttgcaagaatttggtttacaccacctccaagccgccgatttgccgcgctatttccccgatttccgccaccttgtcgggcaatgccgcttccacaactgcacccaccgcgccgaacccggctgcgccttcaaagccgccgcgcaaaccggggcggcaagccccgaacgcctcgcctttttgcagggcatcaccgacgaactgcccgggtaa

SEQ ID NO: 55899 - DNA, 1059 bp, Neisseria meningitidis; identical to SEQ ID NO: 51733

SEQ ID NO: 55900 - DNA, 507 bp, Neisseria meningitidis
atgttcagacggcattttcctgtaagggagaaagcattgaacattaccgttttggcagtcggcaccaaaatgccgcgctgggttgatgaggccgtcgccgaatacgccaaacgcttcggacgcgacgtcgcctacgcactcaaagaaatcaaacccgaaaaacgcggcgcgggcgtgaatgccgcccaaggtatggcggcggaagaaaaacgcatccttgaagccgttccgcaaggcgcgttccttgtcgttcttgacgaacgcggcaaagcgccgacctccgtcgagctggcggaacacctcaaaagctggcggcaaaacggcgaacacgtctgcttcgtcatcggcggcgcggacggcatgaccgaccgcctcaaacaacaagcccgcatgatgatgcgcctgtccagcctcaccctgccgcacggcatggtgcgcgtccttctgaccgagcagctctaccgggccgtttccatcctgcacaaccatccttatcatcgggaataa

SEQ ID NO: 55901 - DNA, 1647 bp, Neisseria meningitidis
atgaaacactttcacgacttacccgcatggtcgaaattgtggaaccactttgacgacagcaaaacattgcatatgcgcgaaatgttcgagcaagacccgcagcgtgcggaacgctactggctgcaagtcggcggactgacgctggactactccaaaaaccgcatcaacgacgaaaccatgtcgcttttgttcgagcttgcccgagaagcaggcgtgccggagcggatgcggcagatgttccacggcgaaaaaatcaataccaccgaaaaccgcgccgtcctgcatgtcgcccttcgcaaccgcaccaattcgccgattgtggttgacggtgaagatgtgatgcccaaagtcaaccgcgttttgcaacgtatgggcgaatttgcacacgaagtccgcagcggaagctggctgggctataccaaccaagtcattaccgacgttgtcaacatcggcatcggcggatcggatttgggtccgctgatgatgtgtaccgcgctcaaacctttcggtcatccgcgcctcaatatgcacttcgtctccaacgtggacggctcgcaactgcgcgacgtattgtccaaagtccaccccgaaaccacgttgttcatcatcgcctccaaaacatttaccacgcaggaaacgctgaccaacgcgctgaccgcgcgcgaatggtttttgaatcatgcgggcgacgaagaagccgttgccaaacacttcgccgccgtttccaccaatcaaaaagccgtcgccgaattcggcatcgacaccgccaatatgtttgaattttgggattgggtcggcggtcggtacagcctgtggtccgccatcggattgccgattatgctgtatctcggcgaagaaaacttcatcgaaatgctcaacggcgcgcacctgatggaccaacacttcatcaacacaccgctcgagcgcaacctgcccgtcattctcgccctcatcggcatctggtatatcaactactacggcggcggcagccacgtcatcgcgccttacgaccaacatttgcaccgcctgcccaaattcatccagcagctcgatatggaaagcaacggcaaacaggttacgttggacggcaaagcagtcggacacgaaacctcgccgattatctggggcgaaacgggcattaacggccagcacgccttcttccaactgctgcaccaaggcacgcacattacccccatcgacctgattgcctcgcttgaaaaacgcagcaacctgcccggacaccacgaaatcctgcttgccaacgtcttcgcccaagcagaagcctttatgcgcggcaaaacccccgacgaagtccgtgccgaactcaaagcgcagggtatggatgaggcgcgcatcgaagagctggtcccgcacaaaaccttctccggcaaccgcccgaccaacctcattctcatggacaaggtcaacccgcgcaatatgggcagcctgattgccatgtacgaacacaaaaccttcgtacaaggcatcatttggggcatcaacagcttcgaccagtggggcgtggaactcggcaaacaactggctaaaaccattttgggcgaactgaccggcgaaaccgggccgcaaaagcacgacagttcgaccgaacgcctgatcaacctctacctgcagaccaaccgcaaataa

SEQ ID NO: 55902 - DNA, 2025 bp, Neisseria meningitidis
atgaacgacatgactttatatttgataattgcccttgttccgttggcaggctcgttgattgcgggtttgttcggcaacaaaatcggtcgtgccggtgcgcatactgttacgatactcggtgtggcggtgtctgccgtgctgtcggcttatgtgctgtggggattcctcaatggcagccgtgccaagtttgatgagaacgtctatacctggctgacgatgggcggtttggatttctccgtcggcttcttggtcgatacgatgacggcgatgatgatggtcgtggtaacgggcgtatcgttgatggtgcatatctacaccatcggctatatgcacgatgaaaaagtcggctaccaacgcttcttcagctatatttctttgtttactttcagcatgttgatgctgattatgagcaacaacttcatccagctcttcttcggctgggaggctgtgggcttggtgtcgtatctcttgatcggtttctatttcaaacgtccaagcgcaacatttgccaacctgaaagcctttttgatcaaccgtgtcggcgacttcggctttttgctcggtatcggcttggtgcttgcctatttcggcggcagcctgcgctatcaagatgtattcgcttatctgcccaacgtgcaaaatgccaccatccagcttttccccggtgtggaatggtcgttgattactgtcacctgtttgctcctgtttgtcggtgcgatgggtaaatcggcacaattcccactgcacgtttggctgcctgattcgatggaaggcccgaccccgatttctgcattgattcacgctgcgacgatggttaccgccggtctgtttatggtatcgcgtatgtcgccgatttatgagatgagcagcactgcgctgtctgtcattatggtgatcggtgcgattaccgccctgtttatgggtttcttgggcgtgattcaaaacgacatcaaacgtgtggttgcgtattccaccttgtcgcaactgggctatatgaccgtggctttgggtgcgtctgcctattccgtggcgatgttccatgtgatgacccacgctttctttaaagccttgttgttcttggcggcaggcagcgcgattatcggtatgcaccacgaccaagacatgcgccacatgggcaacctgaaaaaatacatgccgattacttggctgaccatgctgatcggtaacttgtcgctgatcggtacgccgttcttctccggcttctattctaaagattcgattatcgaagcggcgaaatacagcaccctgccgggcagcggctttgcctattttgccgtccttgccagcgtgttcgttaccgcgttctacgcgttccgccaatactttatggtgttccacggcgaagagaaatggcgcagcttgcctgaacatcatgacgatcatcatggcgaagaacatcacagcttgggcaaaaacgacaatccgcacgaaagcccgttggttgttaccctgcctttgattttgcttgccattccgtccgtcatcatcggctacgttgccatcgagcctatgctttacggcgatttcttcaaagatgtgattttcgtcaacgccgacgcgcatccgaccatgcacatcatgaaggaagagttccacggcgcattggcaatggtgtcgcacagcctgcattcgcctgtactctaccttgctatcgcaggcgtgttgagcgcatggcttttgtacgtcaaactgccgcacctgccagcgaaaattgcacagacgttccgtccgatttacgttttgtttgaaaacaaatactacctcgacgccctgtatttcaacgttttcgccaaaggcacacgcgcattgggtactttcttctggaaagtcggcgataccgccattatcgacaacggcatcgtcaacggctctgccaaactggtcggcgcgattgccgcgcaagtgcgtaaagctcaaaccggctttatctatacctacgccgccgctatggtgttcggcgtattggtcttgctcggtatgaccttctggggattgttcagataa

SEQ ID NO: 55903 - DNA, 702 bp, Neisseria meningitidis; identical to SEQ ID NO: 54661

SEQ ID NO: 55904 - DNA, 705 bp, Neisseria meningitidis
atgctgtctgaaggcatttcagacggcatttttcgcggggagatgctacaatttgcaccatttttaccgacacagggaaacaggattatgtttacaggcattgttcaaggattgggaaaactgacggcaatccaccgcccgtcggaggcatttcacacttatgtcgtcgagcttccgcaagaggcggcggacaatctgcaacgcggcgcatcggtcgccaataacggctgctgcctgacgattaccgaaatcgaaggaaaccgcgtcagtttcgatttaatggcggaaactttggcaaaaaccaatttggggctgctgaaggaaggcgattgcgtcaacatcgaacgggcggcgcgtttcggagacgaaatcggcggacacgtcatgagcggacacattatggcaaccgtgcctattgtcgaaatcgaacgggacgggttcaaccgcacggtttggttttcgctcccgcatgaactcaaaccctatatcctgaccaaagggttcgtcggcttggacggttgcagcctgaccataggcaaagtcgaagacggccgtttcaatgtccatctgattcccgaaactttggaacggacgctgttcggcagcagaaaggtcggcgacaggatcaacatcgaaatcgatccgaatacgcaggcaatcgtcgataccgtcgaacggctgatgacgcaaagatatgcaaagtga

SEQ ID NO: 55905 - DNA, 519 bp, Neisseria meningitidis
atgactacgcattttgtcgttatgggcgtatgcggctgcggcaagaccaccgccgcgctgtccctgcagaaacacctcggtcaatgtccctatgccgaaggcgacgagttccacacccaagccaaccgcgacaagatgggcgcgggtattccgctgaccgatgaagaccgctatccgtggttgggcaatctgcgcgactggatgacgaaacaggcgcaaaacggtgcgaaccacaccatcgtaacctgttccgccctcaaacgcggctaccgcgacattctgcgcggagccgaaggcaaagctgccttcatccacctcagtccgccgcaagacatcaacctcgagcgcatgatgtcgcgcaaaggacattatatgaaagcagggatgctcgattcgcaactggaaatcctcgaggaactgggcgaaggcgaatacggggtcaaaatcgccaaccccggcacgcccgaagcggtcgaagccgatattctgaactgggttgcctcggaaaacctgctttga

SEQ ID NO: 55906 - DNA, 2151 bp, Neisseria meningitidis
atgctcaccgatttagaaaaaaacgccatccgcgaccattaccaaaacatcggcaaaaacctgcccggtttccgtccgcgcgcttcgcagcgggaaatgattgcggcggttgccaacgctttttcgcggacgttggcgcgcgaagaaggcggcgagccgcccaagcgcgagggcgagagcatcgccgtaatcgaagggccgaccggcgtgggcaaatcgcttgcctacctgctggcgggcggcatcatggcgcagacgcgcggcaagcggctgattgtgagcagcgcaacggttgccttgcaggagcagttggtagaccgcgacctgccgtttttggtcgaaaaaagcggtttggaactgagcttcgcgcttgccaaagggcgcggccgctatctctgcccctacaaactctatcaactgacgcaaagcaatgcccagcaaaacctgctcggctttgaagcccccgccgtcttgtgggacagcaaacccaagcccgaagaattgaagctgctgcgcgacatcgccgacgaattttccgcccgacggttcaacggcgaccgcgacacttggccggaaaaaatcgatgacgcgatttggctcaaagtgaccaacgaccgccacggctgcctgaaaaccgcctgtcccaaccgtccggaatgtccgttttacctagcacgcgatgtcttggaaaccgtcgatgtcgtcgttgccaaccacgatcttctgcttgccgacatcagtatgggcggcggcgtgattctgcctgcgcccgaaaacagtttctattgcatagacgaagcgcaccacctgcccaaaaaagccctcagccgttttgccgccgaacattcatggaatattgccgtttggacgctggaaaaactgccgcagctgaccggcaaaattgccgcgcttaccgataaagccgaacttgccaacctggccgacgaagccgccgcatccttgctcgacagcctgcacgaatggcagttccatttggcggaagagccgtctttaagtatggggccgtctgaaaacgacagacgaaccaacagcgaaccgacttggctgtgggaagacggcaaaatccccgaaggcctcgaaaccaccgtttccaatacggccattgctgcgcgcagcctgctcaaacacgttgtcgggctgaacgatgcgctttccgccgtgcgccgcgaaaaagaacaggacggcgcgctcctcgaccgcctgaccggcgagttcggcatcttcatcgtccgtatcgaacaaatcagcgcggtttgggatttgctctccaccgtccccctcgaaggcgaagagccgctggcaaaatggataacccgccgtgccgacgacaaaaacgactacattttcaacgccagccccatcagcagcgcatcccaccttgccaacagcctgtggcggcgtgcggcaggcgcggtattgacttccgccaccctgcaatccttgggcaacttcaacctgatgctgcgccaaaccgggctgcaatggctgcccgaaaccaccaccctcgccctcaaaagcccctttgactttgaaaaacagggcgaactctacatcccccccatatacgccagccccaaagaccccgaagcccacaccgccgccgtcatcgaatggctgcccaagcttatttcgcccaccgaagccatcggcacgctcgtcttgttttcctcgcgcaaacaaatgcaggatgtcgccctgcgcctgcccggagactacctgccgctcttgctcgtacaaggcgaattacccaaagccgtcctcctgcaaaaacaccaccgggccatagaagaaggcaaagccagcatcatcttcggactcgacagtttcgccgaaggactcgacctgcccggcaccgcctgcgtgcaagtcatcatcgccaagctgccgtttgcgatgcctgacaaccccatcgaaaaaacccaaaaccgctggatagaacagcgcggcggcaatccttttattgaaatcaccgtccccgaagccggcatcaaactcatccaggccgtcggccgcctcatccgcaccgaacaagactacggccgcgtaaccatcctcgacaaccgcatcaaaacacagcggtacggccaacaattattggccggcctgccgccgtttaaaaggatagggtaa

SEQ ID NO: 55907 - DNA, 786 bp, Neisseria meningitidis
gtgagacacatcagttcgaccaataatgaacacatcagacacctgcaccgcctgttgtcgcaaggaaagttcagacggcaatacgcccaaaccgttttggagggcgtgcacctgcttcaggttttcctgcaatccggcgggatgccggtcggggtatatattcccgagggcaaaatgccgtctgaagaaatccgcaggctgagggcggttgtgccggaaggcaggattttttccgtttcagacggcatattgaaaaaaatcagtagcttgagttgtgcagacgatatacttgcactgattgatatcccattgggcggaaccttgccggacaaaggcgactgtgtggttttggacggcgtgcaagatccgggcaatgtcggcaccgtcttacggagtgcggcggcggcaggggtaggtacggtcgttttgggcaggggttgcgcggacgcgtggtcgcccaaggtattgcgcgcggggatgggcgcgcatttcttgtcgggcatttatccgcaggcggatttggaaatatggttggcgcgctataaaggccgtgtgtttgccaccgccttgcgcgaggaaaagcaggcggttttgtacggcgaagatttgtgcggaccgacagcctgggtgtttggcaacgaaggcgcgggggtcggtaaagcggttttggacagggcggacaagtgtgtcaggattccgatgcacgatgcaaccgagtctttaaatgtcgcgatggcggcgacaatctgcctgtttgaacagatgcggcagcggtcggcgtattga

SEQ ID NO: 55908 - DNA, 669 bp, Neisseria meningitidis
ttgccgtctgcttcagacggcattttgagtcattgggaacggcagactgcaatcatgaaaacctcgaacttttccaagagaacatccgcaatgaaaacttttgccctgatactggccgacggtcaggcgagccgtatgggaggcgaggacaaggggcttgctcttttggggggtaaggcactgatagatcatgtcatcgacagggtcaggccgcaggtcagccatatcgccatcagcaccaaccggaatttggaagaatatgctcgaagaagtccgcatatttttccggacgcacggcagtggcagcatttcggcccgctttcggcattgtgtaccgcagccaacgatttgcagttggcgactgccgactggcttttggttgtgccgtgcgatatgccgtatctgccgggcgatttggtggcgaggtttgaaaccgtgtcgaaacgcacaccgttgtgcaatgcgtattatgtggaaacgccgataacgatgcactacaacattatgtatatccgcccgcagattctgcaaagcgcgattccctatctgttttcgggtatgaaaacattaagaagctggttgcagcagcaaagggcgcggtcggtcagattcgagtttgacgggcattttgccgacttgaacacgcaaatcgatttgcaggagggataa

SEQ ID NO: 55909 - DNA, 867 bp, Neisseria meningitidis
atgaaagcaaaaatcctgacttccgttgcactgcttgcctgttccggcagcctgtttgcccaaacgctggcaaccgtcaacggtcagaaaatcgacagttccgtcatcgatgcgcaggttgccgcattccgtgcggaaaacagccgtgccgaagacacgccgcaactgcgccaatccctgctggaaaacgaagtggtcaacaccgtggtcgcacaggaagtgaaacgcctgaaactcgaccggtcggcagagtttaaaaatgcgcttgccaaattgcgtgccgaagcgaaaaagtcgggcgacgacaagaaaccgtccttcaaaaccgtttggcaggcggtaaaatatggcttgaacggcgaggcatacgcactgcatatcgccaaaacccaaccggtttccgagcaggaagtaaaagccgcatatgacaatatcagcggtttttacaaaggtacgcaggaagtccagttgggcgaaatcctgaccgacaaggaagaaaatgcaaaaaaagcggttgccgacttgaaggcgaaaaaaggtttcgatgccgtcttgaaacaatattccctcaacgaccgtaccaaacagaccggcgcgccggtcggatatgtgccgctgaaagatttggaacagggtgttccgccgctttatcgggcaattaaggacttgaaaaaaggcgaatttacggcaacgccgctgaaaaacggcgatttctacggcgtttattatgtcaacgacagccgcgaggtaaaagtgccttcttttgatgaaatgaaaggacagattgccggcaaccttcaggcggaacggattgaccgtgccgtcggtgcactgttgggcaaggcaaacatcaaacctgcaaaataa

SEQ ID NO: 55910 - DNA, 855 bp, Neisseria meningitidis; identical to SEQ ID NO: 42323

SEQ ID NO: 55911 - DNA, 1545 bp, Neisseria meningitidis
atgtgcggcgtattaggtttggtcagtcatgaacccgtgaaccagtttctgtacgacggcttgcagatgttgcagcacagggggcaggatgcggcgggcattgcaacggcggaaggcggtaccttccatatgcacaaaggcaaaggcatggtgcgcgaagtgttccgcacacgcaatatgcgcgatttgaccggcaacgccggtatcgcccacgtccgttatcctactgcgggcaacgcaggcagcagcgcggaggcgcagcctttctacgtcagctcgccgttcggcatcgttttggcgcacaacggcaacctcaccaacactgccgaactgtatgaaaacgtgtgtaacaaacacctgcgccacgtcaacaccagctccgattccgaagtcttgctcaacgtattcgcgcacgaattacgccgcgaagtctctaaaaacgccgacccgcaccggctcaatgccgacaatattttcaacgccgttgcccaagtccaccgcctggtgcgcggcgcatacggtgtgattgccatgattgcgggctacggtatgctcgccttccgcgacccttacggcatccgcccgctggtattgggttcgcaaaccgacagcgaaggcagaaaatcctatgccgtcgcctccgaatccgtcgccttcaacgcgcttacctacgatttggaacgcgacatccggccgggcgaagcggtatttgtcggctttgacggcacaatgattgcccgccaatgcagcgaccgtgccaaactcagcccctgcctttttgaatatgtttattttgcccgccccgactctgtgattgacggcgtatccgtttaccaatcgcgcttggatatgggcgtgtcgctggcggaaaaaatcaaacgcgagctgcccgtggacggcatcgatgtcgtgatgcccattcccgacaccagccgccccagcgcgatggagcttgccgtccatctcgacaaaccctaccgcgagggtttgattaaaaaccgctatatcggccgcacctttattatgcccggacaggcgacgcgcaaaaaatccgtgcgccaaaaactcagcccgatggaaaccgaatttgcaggcaaaagcgtgttgctggtggacgactccatcgtgcgcgggacgaccagccgcgaaatcgtcgaaatggtacgcgcggcgggcgcgcgcaaagtctatatcgcctccgccgcgcccgaagtgcgctatcccaatgtgtacggcattgatatgcccacgcgcgaagagttgattgccaacgggcgcagcgcggcggaaatcgccgccgaaatcggcgcggacggcatcgtatttcaagacttgggcgatttggaagccgtcgtcaaagcactcaatccgaaaatcgaatccttcgattcgtcctgtttcaacggcatttatcagaccggcgacatcgatgatgcctacctcgaccgcctgtctgccgagaaatccggctgcggcggtctgaaaatccacccgagcaggatggaacacagcatcagcatcagcgatgcgggcgacgaagaataa

SEQ ID NO: 55912 - DNA, 291 bp, Neisseria meningitidis; identical to SEQ ID NO: 38154

SEQ ID NO: 55913 - DNA, 132 bp, Neisseria meningitidis; identical to SEQ ID NO: 38518

SEQ ID NO: 55914 - DNA, 435 bp, Neisseria meningitidis
atgactgagccgaaacacgaaatgccgacggaagagcaggttgccgcgcgcaaaaaagcaaaagccaaaatccgcaccatccgcatttgggcatgggtcattttggcgttgctcgcttcaaccgccctgctctcccaatgcgcgatgtccaaaccgcaggcaaaacagaaaattgtcgagtcttgcgtgaagaatattccgtttgccgaaaaatggcaaaacgatttgcgggcccgcggtttagattcaaacaatacccgccttaccgtcgactactgcaaatgtatgtgggagcagcctttggacagattgagcgagaaacagattagttccttcggcaaactcggcgcacaagaacagcttgacctgctcggcggcgcaaatgcctttgaaacgcgagacaagcagtgtgttgccgatttgaaatcagaataa

SEQ ID NO: 55915 - DNA, 915 bp, Neisseria meningitidis
atgaaacacctcaaactcacccttattgccgcattgctaaccaccgccgcaactgccgccccccttccggttgtaaccagtttcagcattttgggcgacgtagccaaacaaatcggcggagagcgcgtatccatacaaaatttagtcggcgccaaccaagatacgcacgcctatcatatgaccagcggcgacattaaaaaaatccgcagtgcaaaactcgtcctgattaacggcttgggacttgaagctgccgatgtgcaacgcgccgtcaaacaaagcaaagtatcctataccgaagcgaccaaaggcatccaacccctcaaagccgaagaagaaggcggacaccatcacgaccacgatcatgaccacgaaggacaccaccacgaccacggcgaatatgacccccacgtctggaacgaccccgtccttatgtccgcctatgcccaaaacgtcgccgaagccctgataaaggccgaccccgaaggcaaagtttattatcaacaacgcttgggcaactaccaaatgcagctcaaaaaactgcacagcgacgcacaagccgcatttaacgccgtccctgccgccaaacgcaaagtcctgaccgggcacgatgccttttcctatatgggcaaacgttaccatatcgaattcatcgccccgcaaggcgtgagcagcgaagccgagccttcagccaaacaagtcgccgccatcatccgacaaatcaaacgcgaaggcatcaaagccgtatttaccgaaaatatcaaagacacccgcatggttgaccgcatcgccaaagaaaccggcgtcaacgtcagcggcaaactgtattccgacgcactcggcaacgcgcccgcagacacctacatcggcatgtaccgccacaacgtcaaagccttgaccaacgcgatgaagcaataa

SEQ ID NO: 55916 - DNA, 330 bp, Neisseria meningitidis; identical to SEQ ID NO: 46537

SEQ ID NO: 55917 - DNA, 732 bp, Neisseria meningitidis
atggtaaaacttactgcacaacaaatatttgataagttgctgaatgaggaaaaaatcttatcggtcaatggtcaaattagatttttcttgggcgatgtggatattatcgtcaaacaaaaagatgtcgtcggcaacatcattcaggaatggctcggcggatggttgagaaaaagggaaattgaatttgatgtttcaaccaatacccaaatgccccccgatttctttttaaataaaaaagaccgcagtagagaattgttggaagtaaaggcgttcaaccgaaatgccagtccgggttttgatattgcagattttaaaatgtattctgatgaaatcattcataaaccctatatgctggatgtagattatttaatattcggttacgatatggacgacaacggcaatgtaaccatcaaggatttatggcttaaaaaagtatggcaaattacgagaagcatggatgggtgggcaattaatcttcaagtcaaaaaaggcgtggtgcataaaatccgcccgggtgtttggtacagcataaataaaaagaatatgcctatgtttgaatgcttggaagattttgtttccgcaattgaagaaaccgtttatcaaaacccggcaacacggcataacgcatccttatggaaaaagaaatttgaggaagcctataaaaaacactacaaccgatcgatttccatacctcgttggcacgaaattgcacacaaatacaaaaagaaataa

SEQ ID NO: 55918 - DNA, 783 bp, Neisseria meningitidis; identical to SEQ ID NO: 38566

SEQ ID NO: 55919 - DNA, 489 bp, Neisseria meningitidis
atgaccccgttatttagaaaagccgtttggctgctgtttgccgtttcggtctgtgcatttgccggttctttggcggcacagtatgttttgggtatggagccttgcgttttgtgtatcagtcagcggttatgcgttttggcaaccgcattgtgtacggcaattgtcctgatgtgcagaccaagaagaagggcgggcggtttgttcggtgctgtctttatcagcattccggccgttacgggtatttctgttgcggcatatcagttgtggttgcagtcgctgccgccgggtacggctccttcgtgcggtgcgccgtggacgttccgcttgaagggctggtctttgtttgattggttcgagcctgtcgtgcgcgggttcggaaattgtgccgaaccggattatctgttaggggttgctttgcctgtttggagcgcggcgtattttctggcggttgtcctgacggtttggtgggcgtgggcaagggctaaataa

SEQ ID NO: 55920 - DNA, 399 bp, Neisseria meningitidis; identical to SEQ ID NO: 38338

SEQ ID NO: 55921 - DNA, 1245 bp, Neisseria meningitidis
atgaccctgttttgcgaacaagtcccctacccccgccttgccgaagcattcggcacaccgctttatgtgtacagccaatccgcgctgaccgaagcatttgaacactaccaaactgcctttgccgagctctccccgctcgtctgctatgcggttaaagccaatggcaacctgagcatcatcaaacactttgcttctttggggagcggttttgacattgtgtccggcggcgaattggcacgcgttttggcggcaggcggcgacgcgacgaaaacgattttttccggcgtgggcaaaaacgaggcggaaatcgagttcgcgctgaatgcaggcgtgaaatgcttcaatatggaaagcattcccgaaatcgaccgtattcaaaaggttgccgcgcgtttgggcaaaaccgcgtccgtctccctacgcgtcaatcccgatgtcgatgcgaaaacccatccctacatctccacaggtctgaaagccaacaaattcggcattgcctacgccgacgcgctcgaagcctaccgccatgccgcacaacagcccaatttgaaaatcatcggcatcgactgccacatcggttcgcaactgaccgacttaagcccgctggtcgaagcctgcgagcgcattttgattttggttgacgcgcttgccgccgaaggcattgtgttggaacacttggacttgggcggcggcgtcggcattgtttaccaagacgaaaatgtgcctgatttgggcgcgtatgcccaagccgttcaaaaactgatcggcacacgccgtctgaaactcattcttgagcccggccgcagcttggtcggcaacgcaggttcgctgctgacacgcgtcgaattcgtcaaatacggcgaagagaaaaactttgtgatggtcgatgcggcgatgaacgatttgatgcgcccggcgctttatgatgcctatcatcacatcgaggcggtcgaaaccaaagacattgagcctctgaccgccaacatcgtcggtccgatttgcgaaaccggcgacttcctcggcaaagaccgcaccatcgcctgcgaagaaggcgatttgctgcttatccgcagcgcgggcgcatacggagccagtatggcgagcaattacaacgcgcgcaaccgtgcggcagaggtgttggtggacggcaacgaataccgactcatccgccggcgcgaaaccttggaacagcaaatggcaaacgaactcgcctgcctgcaagccgaacatcaaaatgccgtctga

SEQ ID NO: 55922 - DNA, 195 bp, Neisseria meningitidis
atgaacatcatcttaaacggcgaacccgccgaacttcacggcacaagcgttgccgacctcatcgcccaaaccgcgccgcaaaagccctttgccgtggcggtcaacaccgttttcgtccccaaaggcgcgtatgcggaaacggttttaaacgaaaacgacaaaatcgatatcgtgcggccggtggtcggcggctag

SEQ ID NO: 55923 - DNA, 1134 bp, Neisseria meningitidis
atgtcatacagcacctttcccaaaaccaaaaacgacgcgctgaatgagccgatgtttttcggtcagccggttaatgtcgcccgttatgaccagcagaaatacgaggtatttgaaaaactgattgaaaaacaattgtcgtttttttggcggccggaagaaatcgacgtgtcgcgcgaccgtatcgactacgccaacctgcctgaacacgaaaaacatattttcatcagcaatctgaaatatcaaacactgctcgattccatccaagggcgcagtccgaatgttgccttgctgcctttggtttcgattcccgagttggaaacgtggattgaaacgtggagcttcagcgaaaccatacactcgcgcagctatacccacatcatccgcaatattgtgaatgatccgtcggtcgtgtttgatgatattgtcgaaaacgaatacattaccgcccgcgccgaagacattgcctgctattacgatgacttaatcgaatacacccagtattacaacctgttgggcgaagggatgcataatgtcggcggaaaacccattactgtgtctttgcgcgggttgaagaaaaaactctatctctgcctgatgtgcgtcaacgtgttggaagccatccgtttctacgtttcattcgcctgctcgtttgcttttgccgagcgcgagttgatggaaggcaacgccaaaatcatcaaactgattgcccgcgacgaagccctgcacctgaccggcacgcagcatatgcttaatctgatgcgttcgggtgttgatgattctgaaatggcagaaattgctgccgagttgcaggacgaatgtttccaactcttcaaaaaagcggcggaacaggaaaaagaatgggcggcatatttgtttaaagacggttcgatgattggtttgaacaaagaaatcttatcccaatacgtcgaatatattaccaatctgcgtatgcaggcggtggggttgccggccggatttgaaggcgcaaatcaaaacccgattccgtggattaatgcgtggctgtcgtccgacaacgtacaggtcgcgccgcaggaagtggaaatatcctcttatttgatcggtcagatcgattctgaagtgaatacggatgatttgggcgattttgagttgtaa

SEQ ID NO: 55924 - DNA, 480 bp, Neisseria meningitidis
atgccggaaagtattttcaaacagatttcccttgatattttgaaactgcatcgggactctgtttattcgctgcttgccacttccggctgcaactgtcaggtgcatgaagcggcgtatgtcaacatcgacggcaaatattatattgcgctttcatgcgagcccgaggtgggggaagtcaaaacaggcattttgctgattgaggatgaaagccgcagcctgcgtttgagctgggtcggcagtgcgcgggagcttgaccgcaaggatagtgcctacaaacgcgccctgtccgcgttgtctagaaagatggggcggtgtaaagacaagctgcatacggcggttcagccgtttttgttggagctggtgccggagaaaggcaggttttctgtcggcgatgaagaagtttggatttctcgaaacgatttggtgagggctttatatcctgtcggatacagtatgcggcaggcagtgttgcagatttaa

SEQ ID NO: 55925 - DNA, 1251 bp, Neisseria meningitidis
atgaccaaactgacacgaagacaaatcatccgccgcaccgccggcacactgttcgccctaagccccatcgcatccgccgttgccaaaacggtacgcgcaccacaattcactgccgcacggatatggccatcgcacacctacacccgcctgacgctggaaagcacaaccgcgctcaaataccaacacttcacgctcgacaacccgggcaggctggtcgtcgacatacaaaacgcgaacatcaataccgtattgcacggactgtctcagaaagtcatggcagacgacccctttatccgcagcatacgcgcgggtcagaacacgccgaccaccgtccgcctcgtcatcgatttgaaacagccttcctacgcgcaagttttttccctcccccccgtcggcggctttaaaaaccgcctcgtcgtcgatctctatccgcacgggatggatgccgacgatccgatgatggcgctgcttaacggcagcctgaacaaaacccgtcgcggctcccctgaagccgacctcgctcaaaacactcccgcacaaaccgaacgcggcaaaaacgggcgcagacccgtcattatgatcgaccccggacacggcggcgaagaccccggcgccgtcagcccgggcggtttgcaggaaaaacacgtcgtcctctccatcgcccgcgaaaccaaaaaacaattggaagccttgggttacaacgtctttatgacgcgcaacgaagacgtgttcatccccttgggcgtgcgtgtcgccaaagggcgagcacggcgggcggacgtattcgtctccatccacgccgatgccttcaccagcccctccgcgcgcggcacgggggtttatatgttgaacaccaaaggcgcgaccagctctgccgccaaattcttggaacaaacccaaaataatgccgacgcggtcggcggcgtaccgaccagcggcaaccgcaatgtcgataccgccctgctcgatatgacccaaaccgccacgctgcgcgacagccgcaaactcggcaaactggtgcttgaagaattgggcaggctcaaccacttgcacaaaggcagagtggacgaagccaatttcgccgttttgcgcgcgcccgatatgccgtctatcctggtcgaaaccgccttcctgtccaatcctgccgaagagaagctgctgggcagcgaatccttccgtcggcagtgcgcccaatccattgcctcgggcgtccaacgctacatcaatacatccgtattgaagcggggttga

SEQ ID NO: 55926 - DNA, 1104 bp, Neisseria meningitidis; identical to SEQ ID NO: 55122

SEQ ID NO: 55927 - DNA, 840 bp, Neisseria meningitidis
atgctggtcgcttttttaattatgttgcgcgagggtatcgaagccgcgctcatcgtcggcatcgttgccggttttctgaaacagtccggacattccaaactgatgcctaaggtctggttcggggtcgtccttgcttctttgatgtgtttgggcatcggatacggcatccattcggcaacgggcgagattccccagaagcagcaggagttcgtcgtcggcattatcggtttggttgctgtcgcgatgctgacttatatgattttatggatgaaaaaggcggcgcgttcgatgaagcggcagcttcaggattctgtacaggcggctttgaaccgtggcagcggtcaaggatgggccttggtcggtatggcgtttcttgccgtggcgcgcgaaggtctggagagcgtttttttcctgcttgccgtattcaaacagagcccgacgtggcagatgccggccggtgcggtagcggggggtttggctgccgccgtgattggcgcgttgatttatcagggcgggatgcgcctgaatctggcgaagtttttccgttggacgggggcgtttttgattgccgttgccgccggtctgcttgccggctcgctgcgcgcgctgcatgaggcaggtatttggaacgcgcttcaggacattgtgttcgactcatcaaaatatttgcacgaagacagcccgttgggcgtgctgctcggcggatttttcggctataccgaccatccgacgcagggcgaggccttggtttggctgctgtaccttattcccgtcataacttggtttttgtgcggcagcaggccgtctgaaactttaacccgtaaagaggagctgaaatga

SEQ ID NO: 55928 - DNA, 546 bp, Neisseria meningitidis; identical to SEQ ID NO: 37730

SEQ ID NO: 55929 - DNA, 641 bp, Neisseria meningitidis
atgagaaaaagtcgtctaagccggtataaacaaaataaactcattgagctatttgtcgcaggtgtaactgcaagaacggcagcagagttagtaggcgttaataaaaataccgcagcctattattttcatcggttacgattacttatttatcaaaacagtccgcatttggaaatgtttgatggcgaagtagaagcagatgaaagttattttggcggacaacgcaaaggcaaacgcggtcgcggtgctgccggtaaagtcgccgtattcggtcttttgaagcgaaatggtaaggtttatacggttacagtaccgaattcaaaccgctactttatttcctattatccgtgaacaagtgaaacctgacagtattgtttatacggattgttatcgtagctatgatgtattagatgtgagcgaatttagccattttagcttcgctgaaacttcgttttcgtatcaatcacagcacacattttgccgaacgacaaaaccatattaatggaattgagaacttttggaaccaggcaaaacgtcatttacgcaagtttaacggcattcccaaagcgcattttgagctgtatttaaaggagtgcgaatggcgttttaacaacagtgagataaaagttcttgttccattttaa

SEQ ID NO: 55930 - DNA, 411 bp, Neisseria meningitidis
atgacaacttataccattccaaaaaaagattatcaatttctgtatatatatgagggcactctattaaactatactttgaaaaacgatgaattccatatcatcgtccagaatgtggattatccggactttcctcaagagattcctacaccaaattatacagactgggtaaaaattaaattcaagcagttcagctatctgaaatttgtctatggatacgctacaaagagccaagatataaatatcgataatacattggaacttggcgaattaaagcaggatgatgaaatcttggattatggaggtgcgctggaattgataggcggtaggtatgattttccgactgcttttaggatagatatagtttgccgggaaatagagttagaatttttagatcaggagggtttcaattaa

SEQ ID NO: 55931 - DNA, 1260 bp, Neisseria meningitidis
atgcacgtctccgaattacaaaccctgcacatttccaaactcttagaattggcggaagaacacggcatcgaaaacgccaaccgattccgcaaacaagacctcgtatttgccatcgtccgccagatgatgaaaaaaggcgagggtttcacctgctccggcacgcttgaaatcctgcccgacggcttcggcttcctccgcagcgcggacacgtcctatcttgccggtcccgacgacatctatgtctcacccacccaaatccgccgcttcaacctgcatacgggcgacaccatcgaaggaagcgtgcgcgtcccaaaagacaacgaacgctattttgccctggtcaggcttgataccatcaacggcgaccacccggaagtatgccgccataaaatcctgtttgaaaacctgaccccgctgtttccgaccgaacagttgaagctggaacgcgacttaaagtccgaagaaaacctgaccggacgtgctatcgacctgatttcccccatcggcaaaggtcagcgcgccctcttggttgccccgcccaaaagcggtaaaaccgtgatgctgcaaaacattgcccacgccgttaccgcaaactatcccgaagtcgaactcatcgtcctcttgattgacgagcgtcccgaagaagtaaccgaaatgagccgttccgtccgaggcgaagtagtctcctccacctttgacgagccggctcaacgccacgtccaagttgccgaaatggtgcttgaaaaagccaagcgtatggtagaacacaaaaaagatgtggtcatcctgcttgattcgattacccgccttgcccgcgcctacaataccgtcgtgcctacctcgggcaaaatcctgaccggcggtgtcgatgccaacgcgctgcaccgccccaaacgtttcttcggcgcggcgcgcaacgtggaagaaggcggttcgctgaccatcatcgccacagcattggttgaaaccggcagccgtatggacgatgtgatttacgaagaattcaaaggcaccggcaatatggaattgcaccttgaccgccgtatggcggaaaaacgtctcttccccgccatcaacatcaacaaatccggcacgcgccgcgaggagctgcttgtgccgaacgaccagctgcaacgtatgtggctgctgcgcaagttcctgcacccgatggacgaaatcgaggcagccgaatttttaatcggaaaaatcaaagcctctaaaaacaatgatgatttctttgaactgatgcgcggaaaataa

SEQ ID NO: 55932 - DNA, 612 bp, Neisseria meningitidis
atgaaattacaacaattggctgaagaaaaaatcggcgttctgattgtgttcacgctgcttgtagtcagtgtcggtctgttgattgaagttgtgcccttggcctttaccaaggcggcaacacagccggcgccgggcgtgaagccttacaatgccttgcaggttgccggacgcgatatttacatccgtgagggctgttacaactgccactctcaaatgattcgtccgttccgtgcggaaaccgagcgttacggtcattactctgttgccggagagtcggtttacgaccatccgttccaatggggttccaaacgtaccggtcctgatttggcacgtgtgggcggtcgctattccgacgaatggcaccgtatccacctgctgaatccccgtgatgtcgtgcctgagtccaatatgccggcattcccgtggcttgcacgcaataaagtcgatgtcgatgcaaccgttgccaacatgaaggctttgcgtaaagtaggtactccttacagtgatgaggaaattgcgaaagcacctgaggctttggcaaacaaatccgagctggatgctgtagtcgcctatctgcaaggattgggtctggctttgaaaaacgtaaggtaa

SEQ ID NO: 55933 - DNA, 126 bp, Neisseria meningitidis; identical to SEQ ID NO: 39360

SEQ ID NO: 55934 - DNA, 819 bp, Neisseria meningitidis
atgaacaccattttcaaaatcagcgcactgaccctttccgccgctttggcactttccgcctgcggcaaaaaagaagccgcccccgcatctgcatccgaacctgccgccgcttcttccgcgcagggcgacacctcttcgatcggcagcacgatgcagcaggcaagctatgcgatgggcgtggacatcggacgctccctgaagcaaatgaaggaacagggcgcggaaatcgatttgaaagtctttaccgaagccatgcaggcagtgtatgacggcaaagaaatcaaaatgaccgaagagcaggctcaggaagtcatgatgaaattccttcaggaacaacaggctaaagccgtagaaaaacacaaggcggacgcgaaggccaataaagaaaaaggcgaagcctttctgaaagaaaatgccgccaaagacggcgtgaagaccactgcttccggcctgcaatacaaaatcaccaaacagggtgaaggcaaacagccgaccaaagacgacatcgttaccgtggaatacgaaggccgcctgattgacggtacggtattcgacagcagcaaagccaacggcggcccggtcaccttccctttgagccaagtgattccgggttggaccgaaggcgtacagcttctgaaagaaggcggcgaagccacgttctacatcccgtccaaccttgcctaccgcgaacagggtgcgggcgacaaaatcggtccgaacgccactttggtatttgatgtgaaactggtcaaaatcggcgcacccgaaaacgcgcccgccaagcagccggctcaagtcgacatcaaaaaagtaaattaa

SEQ ID NO: 55935 - DNA, 924 bp, Neisseria meningitidis
atggatatgtctgtttataccagtgtttccgatgatgaaatgcgcggctttttggatgattacgatttgggagaatttgtttccctgcagggcatcgcgcaggggattaccaacagcaattattttctgacgacgacttcgggacgttatgtgctgaccgtgtttgaagtgttgaaacaggaagagctgccgttttttctggagcttaaccggcatttgagtatgaagggcgtggcggttgccgcgccggttgcgcgcaaagacggccggcttgattccgttttggcgggcaagcctgcctgcctggttgcctgcctgaaaggttcggatactgcgctgccgacggcggagcagtgcttccataccggtgcgatgttggccaaaatgcaccttgccgccgctgatttccctttggaaatggaaaacccgcgttacgatgcgtggtggacggaggcgtgcgcccggctgctgcccgtcctgtcgcaagacgatgccgcactgctgtgttccgaaatcgatgcgttgaaggacaatctcggcaatcatctgccttcgggcatcatccatgccgatctgtttaaagacaatgtgttgcttgacggcggtcaggtatcgggtttcatcgatttctattatgcctgccggggcaattttatgtatgacttggcgattgcggtcaacgattgggcaaggacggcggacaataagttggatgaggcgttgaaaaaggcgtttatcggcggttatgagggcgtgcgccccttgagtgccgaagaaaaggcgtatttcccgaccgcccaacgtgcaggctgcatccgtttttgggtgtcgcgcctgttggattttcattttccgcaggcgggcgagatgacgtttatcaaagacccgaacgcgttccgcaacctgctgttgagtttgggttga

SEQ ID NO: 55936 - DNA, 798 bp, Neisseria meningitidis
atggataccgcacaaaaacaacgttgggcaataaccctatcctatgacggcagccgcttttacggctggcagaaacaggctgacggcgtaccgaccgttcaggcggcattggaaaccgcgctcgcccaaatcgcaggagaatctgtcgccaccaccgttgctggcaggaccgacaccggcgtgcatgccaccgcccaagtcgtccacttcgacacaactgccgcccgtccccaacaggcatgggtgcgcggcgtaaatgcccacctgcccgaaggcattgccgttttgcacgcccgacaggtcgcccccgaatttcacgcccgcttcgacgcatacggacggcattaccgctacctgctcgaatccgcccccgtccgttcccccctgttgaagcacagggcaggctggacgcatctcaaactcgacatcgggcagatgcggcaggctgccgccttattgatcggcgaacaagacttctccagcttccgcgccgccgaatgccaggcaaaatcccccgtcaaaaccatctaccgcgccgaccttacccaaagcgcaggactcgtccgcctcgatttgcacggcaacgcctttttgcaccatatggtacgcaacatcatgggtgcgctcgtctatgtcggcagcggcagactcagcgtcgaaggcttcgccgcactgattcaagaacgcagccgcctcaaagccccgccgaccttcatgcccgacggactttacctgaccggcgtcgactatcccgaggcatacggcatcatccgcccccaaatccccgaatggctttaa

SEQ ID NO: 55937 - DNA, 438 bp, Neisseria meningitidis; identical to SEQ ID NO: 50946

SEQ ID NO: 55938 - DNA, 915 bp, Neisseria meningitidis
atgcagaattttggcaaagtggccgtattgatgggcggtttttccagcgaacgagaaatctcgctggacagcggcaccgccattttgaatgctttaaaaagcaaaggcatagacgcatatgccttcgatcctaaagaaaccccattgtctgaattgaaggcacaaggttttcagacggcattcaacatccttcacggtacttacggcgaagacggggcggttcagggtgcattggaactgttgggcattccctataccggcagcggtgtcgccgcatccgccatcggcatggacaaataccgctgcaaactgatttggcaggcattgggactgcccgttcccgagttcgccgtcctgcacgacgacactgatttcgatgccgtcgaagaaaaattgggcctgccgatgtttgtgaaaccggcggccgaaggcagcagcgtaggcgtggtaaaagtcaaaggaaaaggccgtctgaaaagcgtttacgaagaattgaaacaccttcagggcgaaatcattgccgaacgttttatcggcggcggcgaatattcctgccccgtcctgaacggcaaagggctgcccggcatacacatcattcccgcaaccgagttttacgactacgaagccaagtacaaccgcgacgacaccatttatcaatgtccttcggaagatttgaccgaagccgaagaaagcctgatgcgcgaactggcggttcgcggcgcgcaggcaatcggtgcggaaggctgcgtgcgcgtcgatttcctcaaagataccgacggcaaactctatctgttggaaatcaacaccctgcccggtatgacgagccatagtttagtaccgaaatccgctgccgttacgggcgtgggttttgccgatttatgtattgaaattttgaagaccgcacatgtgggataa

SEQ ID NO: 55939 - DNA, 1257 bp, Neisseria meningitidis
atgaaagtgcttgttttaggtgcgggtgttgccggcgtgtcttccgcgtggtatctggcagaggccggacatgaagtaacggtcatcgaccgcgccaagggtgtggcgatggaaaccagttttgccaatgcaggccagctttcttacggctataccacgccttgggctgcacccggtattccgaccaaagcactgaaatggctgtttaaaagccatccgcctttgctgtttcgccccgacggcagcctgtatcaaatcgaatggctgtggcggatgctgcaaaactgcacggcagcgcactatcaaaccaataaagagcgcatggtcaggatttccgaatacagccgtgaaatgttccgccgttttgaagcgcaaaccggcatgaattttgaagggcgcaaaaaagggacgttgcagattttccgtcaggctaaagaagttgaagctgcagaacaagacattgccgttttggaacgctacggcgtgccgtaccgccgtctgaagcccgaagaatgcgcagaattcgagcctgcgctggcacgcgttaccgccaaaattgccggcggcctgcacctgcctgcggatgcaaccggcgactgccgcctcttcactgaaaacctatacaaattgtgtcaggaaaagggcgtacggtttcatttcaaccaaaccatcagccgcatcgaccacaacgggctgcgcatcaaaaccgttgaaaccgaaacagggcggtttgaagcagatgccgttgtctgcgcgctcggttgtttcagcaggacggttttggcgcagttggatctcaatctgcccatttatcccgtcaaaggctattccttgaccctgccggtcacaaattccgacggcgcaccggtgtccaccgttttagatgaaagctacaaagtcgccatcacgcgctttgacaacagaatccgcgtcggcggtatggcggaattgtcgggctacgaaatcaaactgcccgaaaaacgccgcgaaaccttggctttggtcgtcaacgacttgttcccggaaggcggcgatttgagccaagcatcgttctggagcggcctcaggccgatgacgcccgacagcacgccgttaatcggtcgcacccgctttgacaacctgtttctgaataccggccacggtactttaggctggaccatgtcgctgggttcggcaaaattaaccgccgatatcgtgagcggcaaagacaccgaaatccgcagcgacgatttgagcctgtcgcgttatcaggcttaa

SEQ ID NO: 55940 - DNA, 642 bp, Neisseria meningitidis
atgagatgttttatgattcaaaatgttgttacttcaataatcctgtattctgggacagccgtagacttacttattatcctaatgttattttttgccaaaagaaaaagcagaaaagacatcattaacatctatttaggacaatttctaggctctgttagcctgatattgctaagtttgctttttgcatttgtcttagattatattcctagtaaagagattttaggtttgctcggcttgattccaattttcctaggcatcaaagttttgctgttaggagattctgatggagaggctattgccaaagagggtttgcgcaaagataataaaaacctgatttttctagtcgctatgattacttttgcaagttgtggtgctgacaatattggtgtctttgtcccatattttactaccttaaatttagcgaatttgatagtggctttacttacctttctagtcatgatttatctcttggttttttctgcccaaaaattagcacaagtcccttctgttggagaaactttggaaaaatatagcagatggtttgttgctgttgtttatttgggattgggggtatatatcctgattgaaaacaacagttttgatatgctatggactgtgtcgggccaggaaaaaatattatga

SEQ ID NO: 55941 - DNA, 687 bp, Neisseria meningitidis
atgacggtgttgcaagaacgttattgtgaggtgtccgaccgtattggaaaattggttctgcaggcgggaaggaagccgcattccgtcagcctgattgccgtcggtaagactttcccttcagacggcatccgcgaagtttacgccgccggacagcgtgatttcggcgagaactatattcaggagtggtacggcaaaacggaagagttggcggatttgaccgacatcgtgtggcacgtcatcggcgatgtgcagtccaacaaaaccaagtttgtcgccgaacgcgcgcattgggtgcataccgtatgccgtctgaaaaccgctgtccggctgagcgggcaacgtccttcctcaatgccgcctttgcaggtgtgtattgaggtgaacattgcgggcgaggcggtgaagcacggtgtcgcgcccgaagaagcagtcgcgcttgctgtggaagtggcgaagctgccgaatatcgtcgtacgcggactgatgtgtgttgccaaagccaacagcagtgaaacggagttgaaggtgcaatttcaaacgatgcggaaactgcttgccgacctcaatacggctggcgttaaggctgacgtgctgtctatggggatgtcggacgatatgcctgccgccattgagtgcggtgcgacacacgtccgtatcggcagcgcgattttcgggaaaaggggctga

SEQ ID NO: 55942 - DNA, 1563 bp, Neisseria meningitidis
ttgtttgaagtgatgaaaaaacctttgatttcggttgcggcagcattgctcggcgttgctttgggcacgccttattatttgggtgtcaaagccgaagaaagcttgacgcagcagcaaaaaatattgcaggaagcgggcttcttgaccgtcgaatcgcaccaatatgagcgcggctggtttacctctacggaaacgacggtcatccgcttgaaaccggagttgctgaataatgcccggaaatacctgccggacaacctgaaaacagtgttggaacagccggttacgctggtaaaccatatcacgcacggccctttcgccggcggattcggcacgcaggcgtacattgaaaccgagttcaaatacgcgcctgaaacggaaaaagttctggaacgcttttttggaaaacaagtcccggtttcccttgccaataccgtttattttaacggcagcggtaaaatggaagtcagtgttcccgccttcgattatgaagagctgtcgggcatcaggctgcactgggaaggattgacgggaaaaacggtttatcaaaaaggtttcaaaagctaccgcaacagctatgatgcgcccttgttcaaaatcaagctggcagacaaaggcgatgccgcgtttgaaaaagcgcatttcgattcggaaacttcagacggcatcaatccgcttgctttgggcagcagcaatctgaccttggaaaaattctccctagaatggaaagagggtgtcgattacaacgtcaagttaaacgaactggtcaatcttgttaccgatttgcagattggcgcgtttatcaatcccaacggcagcatcgcaccttccaaaatcgaagtcggcaaactggctttttcaaccaagaccggggaatcaggctcatttatcaacagtgaagggcagttccgttttgacacgctggtgtacggcaatgaaaaatacggcccgctggacatccatatcgccgccgaacatctcgatgcttctgccttaaccgtattgaaacgtaagtttgcacaaatttccgccaaaaaaatgaccgaggaacaaatccgcaatgatttgattgccgccgtcaaaggcgaggcttccggactgttcaccaacaatcccgtattggacattaaaacttttcgtttcacacagccgtcgggaaaaatcgatgtgggtggaaaaatcatgtttaaagacatgaagaaggaagatttgaaccaattgggtttgatgctgaagaaaaccgaagccgacatcagaatgagtattccccaaaaaatgctggaagacttggcggtcagtcaggcaggcaatattttcagcgtcaatgccgaagatgaggcggaaggcagggcaagtcttgacgacatcaacgagaccttgcgcctgatggtggacagtacggttcagagtatggcaagggaaaaatatctgactttgaacggcgaccagattgatactgccatttctctgaaaaacaatcagttgaaattgaacggtaaaacgttgcaaaacgaaccggagccggattttgatgaaggcggtatggtttcagagccgcagcagtaa

SEQ ID NO: 55943 - DNA, 432 bp, Neisseria meningitidis
atgaaaaccttttcagcgaaaccccacgaggtgaagcgcgaatggttcgtcatcgatgcccaagacaaagtcttgggtcgcgttgcggccgaagtcgccagccgtctgcgtggcaaacacaaacctgaatacaccccccacgtcgataccggcgattacatcattgttatcaatgcggacaaactgcgtgtaaccggtgccaaattcgaagataaaaaatacttccgccattccggtttcccaggcggtatctacgaacgcaccttccgcgaaatgcaagagcaattcccgggccgcgctttggaacaagctgtaaaaggtatgctgcccaaaggtcctctgggttacgccatgattaaaaaactgaaagtgtatgcgggtgcggaacacgcccatgctgcgcaacaacccaaagttttggaactgaaataa

SEQ ID NO: 55944 - DNA, 990 bp, Neisseria meningitidis
atgaaacagcctgtttttgccgttacttccggcgagcctgccggcatcggccccgatatttgtttggacttggcgtttgcacgcctgccctgccgctgcgcggtattgggcgacaaaaacctattgcgcgcgcgcgccgaagccttgggcaaaagcgtcgtcctgcgcgacttcgatccagaatcaggcggcgcggcatacggcgagctggaagtgctgcacatccctgccgtcgaagcggttgaggcgggcaaactcaatcccgccaacgccgcctatgtgctgcaacttttggacaccgcgctcgcaggcatttcagacggcattttcgacggcatcgttaccgcgccgctgcacaaaggcatcatcaacgacgcgcgcgcaagcacaggttttttcagcggacacaccgaatatctggcggaaaaaagcggcacggggcaggtcgtgatgatgcttgccggcaaaggcctgcgcgtcgccctcgtaacgacccacctgccgctgaaagacgttgccgccgccatcacgcaaccgctgattgaaagcgtcgcacgcattttgcatcacgacttaaaacacaaattcggcatcaaaaatcccaaaatccttgtcgccggacttaatccccacgccggcgaaggcggacacctcggacacgaagaaaccgacaccattatccctgcattggaaaacctgcgccgcgaagggataaaccttgccggcccgtatccggcggacacattgttccagccgtttatgctcgaaggtgcggatgccgtattggcgatgtaccacgaccaagggctgcccgtgttgaaataccacagtttcgggcagggcgtgaacatcacgctgggtctgccctttatccgcacctctgtcgatcacggcaccgcgctcgatttggcggcaaccggcagggcggattccggcagcctgataactgccgtggagaccgccgtcgagatggcgcgcggcagcctttaa

SEQ ID NO: 55945 - DNA, 738 bp, Neisseria meningitidis; identical to SEQ ID NO: 43795

SEQ ID NO: 55946 - DNA, 1860 bp, Neisseria meningitidis
atgccggactaccgctccaaaacctccacccacggtcgcaatatggcgggtgcacgcgcattgtggcgcgccaccggcgtgatggaaaccgacttcggcaagcccatcatcgccgttgccaactccttcacccaattcgtgcccggccacgtccacctgcacaatatgggccaactggttgcccgcgagatcgaaaaagccggcgcaatcgccaaagaattcaacaccatcgccatcgacgacggcatcgctatgggacacagcggtatgctctactccctgcccagccgcgatttgattgccgactctatcgaatatatggtcaacgcccactgcgccgacgcgctggtgtgcatttccaactgcgacaaaatcaccccgggcatgctgattgctgccatgcgtctgaatatcccgaccatcttcgtttccggcggcccgatggaagcaggtaaagttatcggcgtggcaaacatccaacccgaacgccgtttggacttgattgacgcgatgattgaatcggcggacgacaatatcagcaaccggcaagttgaagaagtcgaacaaaacgcctgcccgacctgcggttcgtgttcgggtatgtttacggcaaattcaatgaactgcctgaccgaagcactcggtctgtccctgcccggcaacggttcgtatttggcgacccacgccggccgcaaagaattgttcctcgaagccggacgtatgattgtcgaaatcaccaaacgctattacgagcaagacgacgaaaccgtactgccgcgcagcatcgccaccaaaaaagcgtttgaaaacgctatgacgatggacattgcgatgggcggctctaccaacaccatcctgcatttgctcgccgtcgccaacgaagcgggcgtggatttcaaaatggcagacatcgaccgcttaagccgcgttgtgccctgcatctgcaaaaccgcgcccaacaaccacgactactatatggaagacgtgcaccgagccggcggcatcttcgccatcctgaaagaactggacaaagcaggcaaattgcacaccgacgtgtacaccattcacgcgccgacactgaaagacgcgatcgaaaaatgggacgtaactaaccctgaaaacacccgcgccatcgaacgcttcaaagccgcacccggcggcgtgcgcaccacccaagcgttctcgcaaaaccgcatgtggaaaaccctcgacctcgaccgcgaaaaaggctgtatccgcgatgtcgaacacgcctactcgcaagacggcggtttggcggtcttgttcggcaacatcgccgagcgcggttgcgtagtgaaaaccgcaggcgtggacgagagcatcctcaaattcaccggccgcgcccgcgtgtttgaaagccaagaagacgcagtagaaggcattttgggcaaccaaatcgtcgccggcgacatcgtcatcatccgctacgaaggcccgaaaggcggccccggtatgcaggaaatgctgtatccgacttcctacctgaaatctaaaggcctcggcaaagcctgcgctctcttaaccgacggacgcttctccggcggcacatcaggtttgtccatcggacacgcctcgcccgaagcggcggaaggtggcgcgatcggtttggtacacgaaggcgataccgtcgaaatcgacatccccaaccgcagcatccaccttgccatttccgatgaagagcttgccgcacgccgtgccgaaatggaagcgcgcggcagcaaagcatggaagcctaaaaaccgcgaccgctacgtctccgccgcattaagagcttacggcgcgatggcgacttccgccgacaaaggcgcggtgcgcgacgtagcgcaaatcgaaagataa

SEQ ID NO: 55947 - DNA, 462 bp, Neisseria meningitidis
atgcagactttagatggggagatggcaggtgggaataagccaccaaaaccaagtacgcagcaacaccctacacactctgataacaatatcggcttacctgcctcatatgttaaacctgatacatctatttctccgacaggaacaattcaagaccgcatcagatggacaaagtccaagtttcctactgagaaatctttaaatggacatttcaaagctcatggaaaagaatttggcgatataaccattgaagactaccaaaaaatggcgtctgatttgttatcaaaacagacatcggacaagatattaggttatcagacggaacatagacgagtgcgctatgatatcaataacaatatctatgttttggccaatccaaaaacattcaaaatcaaaacaatgtttaaaccaaacttaggaaagaagtattatgatggagaattcaaaaaagacatgggaaattga

SEQ ID NO: 55948 - DNA, 1692 bp, Neisseria meningitidis
atgagcgcatcacaattactgtcaagactgacccaaaccgtaggcgaaaaatacatcattaccgaccccgcgaaaaccgaacaataccgccaaggttaccgcttcggcgagggtaaggcgttggcggtggttcgccccggaagcattctggaaatgtggaaaattctgcaggcgtgcgtcgaagcagacgtgattgtgattacgcaggcggcgaataccggactgaccggcggttcgacccccgacggcaacgattacgaccgcgacatcgtgattgtgaacaccatgcggatgaacatcatccaaaccatcaacaacaacgaacaagtcgtctgcctgcccggctcgaccctgaaccagcttgaattgctgctgaaacccttgggacgcgaaccgcattcggttatcggctcttcctgcatcggtgcgtccgtcttgggcggcgtgtgcaacaactccggcggcgcattggtacagcgcggcccggcctacaccgaaatggcactgttcgcccaaatcaacgaagaaggcaggttggaactggtcaaccacttgggcatagacttgggcgacacgcccgaagaaatcctgaccaacctgcaaggtcatcattatcaaaacaaagacatcaaacaagacgcgggcaaaggacacgaccacgcctattgcgaacacgtccgccaagtggacgaaccgaccgccgcgcgtttcaatgccgaccccgcccgccattacgaagcctcgggctgcgcgggcaaactgatggtttttgccgtccgtttggacaccttcccgcaagaaaaacaaaccgccgtgttctacatcggcacgaacgacatcaacgagctgaccgacatccgccgcgccgccttgggcgaatttgaaagcctgcctgtttccggcgaatacatccaccgccacgctttcgatattgccgacgtgtacggcaaagacacgttttacgtcatcaaaaaattcggtacgcaccaactgccgaaattatttgacttgaaggcgcgcgtggacaggttcggcaaaaaagccagcttcctgcccaaacatttttccgacaaggccatgcagttcgtcagcaaatacctgcccgaccacctgcccaaatccatgcgcgattaccgcgacaaatacgaacaccacctgattctgaaaatgggcgggaaaggcgtggatgaggcgcgcgcgttcttaaaagaatattttgcacaccacagcggcgcgtttttcgagtgcaacgccgaagaaacccaagccgcgatgctgcaccgtttcgccgtcgcctccgccgccatccgctaccgcgccgtgcatgatgacgaagtggaagacttggtcgcgctcgacatcgccctgcgtcgcgacgaccgcgattggtttgaaaaactgccgtcggaaatcgacaataaaatcatccataaactctactatggacatttcatgtgccacgttttccatcaggattacatcatcaaaaaaggcaacgactgcatggcgttggaacacgaaatgctgcatcttttagaccaacgcggcgcgcaatatcccgccgaacacaacgtcggtcatttgtatgaagccaaacccgcgctcaaacagttttaccgcaaacttgacccgaccaacagcttcaacccgggcgtaggcaaaaccagcaaaaagaaaaactgggcggaataa

SEQ ID NO: 55949 - DNA, 1515 bp, Neisseria meningitidis
atgtgttgttctcttagttttgcagaaccagcaagaatagatgatcgaataataaaatttaggccatctaaatcaaagttttttgaatctacaggatatagaaaaatcaataatgaattttctaaattcacagaagcggcaaatgtcgaacatatccccacgggcgcaaaagcccgaatcaacgcaaagataaccgccagcgtatcccgcgccgccgtcttgtcaggagtcggcaaacttgcccgcttaggcgcgaaattcagcacaagggcggttccctatgtcggaacagcccttttagcccacgacgtatacgaaactttcaaagaagacatacaggcacaaggctaccaatacgaccccgaaaccgacaaatttgtaaaaggctacgaatatagtaattgcctttggtacgaagacgaaagacgtattaatagaacctatggctgctacggcgttgacagttcgattatgcgccttatgtccgatgacagcagattccccgaagtcaaagaattgatggaaagccaaatgtataggctggcacgtccgttttggaattggcataaagaagaactgaataaattaagttctttggattggaataattttgttttaaatcgttgcacatttgattggaacggcggagattgtgtggtcaataaaggtgatgattacagaaatggggctaatttttcccttagccgcaatccgaaatacaaagaagaaatggatgccaaaaagctggaagagattttatcgttgaaagtcgatgccaatcccgacaaatacataaaggcaaccggatatcccggttattccgaaaaagtagaagtagcacccggaacaaaagtgaatatggggcctgttacggacaggaacgggaatcccgttcaggttgtcgcaacattcggcagggattcgcaaggcaacaccacagtggatgttcaagtaatcccgcgtcccgacctcacacccggaagcgcggaagcaccgaacgcacagccgctgcccgaagtatcgcccgctgaaaaccccgcaaacaacccggcccccaatgagaaccccggcacgcgtcccaatcccgaacccgaccccgatttgaatcccgatgcaaatcccgatacggacggacagcccggaacaagccccgattccccggccgttccggaccgcccaaacggcagggacggcaaagatggcgggcttttgtgcaaattcttccccgacattctcgcttgcgacaggctgcccgagcccaatccggcagaagatttaaatctgccgtctgaaaccgtcaatgtagagtttaagaaatccggaatctttcaagattccgcacagtgtcccgcccccgttacgttcactataaccgtgcttgattcaagcaagcagttcgcgttcagctttgagaacgcatgtaccatagccgaacggctaaggtacatgcttctcgcccttgcttgggcggttgccgcctttttttgtatccgcacagtatcccgtgaagtctag

SEQ ID NO: 55950 - DNA, 687 bp, Neisseria meningitidis; identical to SEQ ID NO: 39393

SEQ ID NO: 55951 - DNA, 2853 bp, Neisseria meningitidis; identical to SEQ ID NO: 45228

SEQ ID NO: 55952 - DNA, 1977 bp, Neisseria meningitidis
atgtccaaactcaaaaccatcgccctgaccgcgtcaggtctgtccgtttgtccgggtttcctatacgcccaaaacacctcatcacaccaaatcggtttggcgattatgcgcttaaactcttcaatactcgacctgcccccgacaaaacaatatttccaatccggcagcctgtggagcgagctgcgccaaggcttccggatgggcgaagtcaatcccgaactggtacgccgccacgaaagcaaattcatcgcaagccacagctatttcaacagggtcatcaaccggagtagaccctatatgtaccatatcgccaacgaagtcaaaaaacgcaatatgcccgccgaagccgccctgcttcccttcatcgaaagcgcgttcgtcaccaaagccaaatcacacgtcggcgcatcgggcctgtggcagttcatgcccgctaccggcaggcattacggcctggaaaaaacaccggtttacgacggcaggcacgacatttacgccgccaccgatgccgcactcaactatctgcaatacctctatggactgttcggcgactggccgctcgcctttgccgcctacaactggggtgaaggcaacgtcggacgcgccatcaaccgcgcccgcgcccaagggctcgaaccgacctacgaaaacctgcgtatgcccaacgaaacgcgcaactatgtccccaagctgctcgccgtgcgcaacattattgccactccccaatctttcggtatgaatatcagcgacatagacaacaaaccctattttcaggcagtcgaaccggatcgtccgctcgacaacgaagccatcgtccggcttgccggcatcacgcaaagcgagctgctcgccctaaaccccgcattcaacgtccccgcgtttatccccaaaagcaaacgcaaactgctgcttcctgtcgcatccgtccaaaccttccaaagcaactacctcaacgccgcacccgacagcctgttttcatgggaagtctatacgcctgccgccaaaaccagcctgtccgacatctcgacggcaaccggcatgagcattgccgacatcaaacgcctcaacaacctgaacggcaaccttgtcaacgcaggacgcagcatccttgtcgccaagaacggcaaaacccttcagacggcatcggaatccgtcgtttccatcgacatcgacaatacgcccgacacctaccgttccaatatgccggcaggcacggtgaacgtcggcattgcccgaatccgacccgccgccgcacagacagcggacattaccgtcgcacctttgccgcagaaaaccgtccgtacggaacccgatccccttgtccgtattgccgaacctgcccttgcgacagccgcagcgcaacctcaaaccgaaaaacagaccgccatgccgtctgaaacccaaaccgcaacactcgcgcagatcatcccccaaaacgacatgcaggcggcagacgaactcatgcagcttgttgcccgaaacaacctgcgccgacaggctgaagaaaccatctccgccgtcatcggcacgcctgacacagttgccgaacacaacatttcctcatctccgcaacataccgttgccgccgacggcaaacgccgggcacgtttggaaacgcgcgtagccaaagctgccgacggcgaagccgaaatctccccgctccatgccagcatccaccgcgttgtagaaggcgacaccctgttcaacattgccaaacgctacaacgtcagcgtagccgacctgattgtcgccaacaacatcaaaggcaacaccatccaaaaaggacaggtactccgcctggcgcaggcagcccctgcccaaacccgtattgaaaaagtatcctacaccgtgcgcaaaggcgacaccttcaaaagtatcgccgcgcgcttcaatatccatatcgacgacatccgccggctcaatcccaacctgaacaccatcaatccgggacagagggtcaaactgattggaagctga

SEQ ID NO: 55953 - DNA, 1392 bp, Neisseria meningitidis
atgagcggtcagttgggcaaaggtgcggatgcgcctgatttggtgtacggtttggaagacaggccgccgttcggtaatgcgctcttgagcgcggttacccatcttttggcgatttttgtgccgatgattacgcccgcgctgattgtgggcggcgcgctggaattgccggtggagatgacggcgtatctcgtgtcgatggcgatggttgcgtcgggtgtcggcacttatttgcaggtcaaccgcttcgggccggtcggttcggggatgctgtccatccagtcggtgaatttttcgttcgttaccgtgatgattgcgctgggcgcagggatgaaggagggcggtttgactaaggatgcgatgatttcgacgctcttgggtgtatcgtttgtcggcgcgtttttggtgtgtttctcggcgtggcttttgccgtatttgaaaaaagtgattacgccgacggtcagcggcgtggtcgtgatgctcattggcttgagtttggtacacgtcggtattaccgatttcggcggcggcttcggcgcgaaggcggacggcacgttcggctcgatggaaaacttggggctggcttcgctggtgttgctgattgtgttgatattcaactgcatgaaaaacccgctgttgcggatgagcggcatcgcggtcggtctgattgccggttacattgtcgcgctgtttttgggcaaggtggatttttccgcgctgcaaaacctgccgctggttacgctgcccgtaccgtttaaatacggttttgctttcgactggcacgcatttattgtggcgggcgcgattttcctgttgagcgtgtttgaggcggtcggcgatttgacggcgacggcaatggtgtccgatcagccgattgaaggcgaggaatacaccaaacgcctgcgcggcggcgtgttggctgacggcttggtgtcggtgattgcgacggctttgggttcgctgccgctgacgacgtttgcgcaaaacaacggcgtgattcagatgaccggcgtggcttcgcgccatgtgggcaaatatattgccgtgattttggtgctgttgggtctgttccccgttgtcggacgcgcgtttacgacgattccgagtccggtgttgggcggcgcgatggttttgatgttcggcttgattgcgattgcgggcgtgcggattttggtcagccacggcatccgcaggcgcgaagcggtaattgcggcaacgtcggtcggtttgggcttgggtgtcgcgtttgagccggaagtgtttaaaaacctgcctgtcttgttccaaaactctatttccgccggcggcattacggcagtcttgctgaatttggtcttgcccgaagataaaaccgaggcggcggtcaagtttgataccgaccacttggaacactga

SEQ ID NO: 55954 - DNA, 228 bp, Neisseria meningitidis; identical to SEQ ID NO: 44482

SEQ ID NO: 55955 - DNA, 1011 bp, Neisseria meningitidis; identical to SEQ ID NO: 55225

SEQ ID NO: 55956 - DNA, 1188 bp, Neisseria meningitidis; identical to SEQ ID NO: 37286

SEQ ID NO: 55957 - DNA, 1887 bp, Neisseria meningitidis
atgccgtctgaaaccgtttttcaagtaattgatatgaataaagaaacccgttttccggaacacttcgacatcccacttttcctcaaaaacctgcccaacctgccaggcgtataccgttttttcaacgaaagcggcaacgtcttatacgtcggcaaagccgtcaacctcaagcggcgcgtgtccggctatttccagaaaaacgaccattccccgcgcatcgcattgatggtgaaacaggttcaccacatcgaaaccaccatcacccgctccgaatccgaagccctgattctcgaaaacaacttcatcaaagccctgtcgcccaaatacaatattcttttccgcgatgacaaaagctatccttatttgatgctcagcggccatcaatatccgcaaatggcgtattaccgcggcacgctgaaaaagcctaatcaatatttcggcccatatcctaacagcaacgccgtgcgcgacagcatccaagtcctgcaaaaagtcttcatgctgcgcacctgcgaagacagcgtgttcgaacaccgcgaccgcccttgcctgctgtatcaaatcaaacgctgcagcgcaccctgtgtcggccatatcagcgaagaagactaccacgacagcgtgcgcgaggcctcgacttttctcaacggcaagaccgacgaactgacccgcaccctgcaacacaaaatgcagaccgccgccgcgaatttgcagtttgaagaagccgcccgctaccgcgaccaaatccaagcactcggcatcatgcagagtaatcagtttatcgacagtaaaaatccgaacaatcccaacgatatcgacctgctcgcgctggcggtttcagacggcatcgtctgcgtacactgggtcagcatccgcggcggacggcacgtcggcgataaaagttttttccctgacaccaaaaacgatcccgaaccaaacggacaagactacgccgaagccttcgtcgcccaacactatctgggcaaaagcaaacccgacatcatcatcagcaacttccccatgcccgacgcattgaaagaagccctagagagcgaacacggcaaacaaatgcagttcgttaccaaaaccataggcgaacgcaaagtctggttgaaaatggcggagcaaaacgcacaaatggcaattgcccaacgccgcctgcaacaaagcagccagcaacaccgtatcgacgaactcgccaaaatcctcggtatggattcagacggcctcaaccgcctcgaatgtttcgacatcagccacacacaaggcgaggccactattgcgtcctgcgtcgtgtacgatgagcaaaacatccagccttcgcaataccgccgctacaacatcacgaccgccaagcccggcgacgactacgccgccatgcgcgaagtattgatgcgccgttacggcaaaatgcaggaagccgaagccaacggcgagaccgtcaaatggccggatgtcgtattgattgacggcggcaaaggacaaatcggcgtcgccgtatccgtatgggaagaactcggtctgcacattcccttggtcggcatcgccaaaggccctgagcgcaaagccggtatggaagaactcatactgccttttaccggcgaagtcttccgcctgccgcccaacagcccggccttgcatctattgcaaaccgtgcgcgacgaatcacaccgctttgccattacaggccaccgcaaaaaacgcgacaaagcacgcgttacctcctccttaagcgacatccccggcgtaggcagcaaacgccgccaggccctgctcacccgcttcggcggcctgcgcggtgtcgttgccgccagcaaagaagatttggaacaagtcgaaggcatcagcaaggcattggcggaaaccatttacgagcatctgcattag

SEQ ID NO: 55958 - DNA, 1263 bp, Neisseria meningitidis
atgtcaaacacacaaaaacagcttgcccttgccaaagcggcaaaaaaatccgtcaacacggcggatacggaagaaaaaaaccgcgcgctgcttgctatggcggacagtctggaagcggcggcggcagatattttggcggcaaaccgtcaagacttggaagccgcggcaggcaaaattcccgaaagcatgaccgaccgccttttgttggacggcaaacgcatttgcgcgatggcggacggcattagggcggttgccgcactgcccgaccccgtgggcgaaatactggaaacctcgactctgcccaacggcttggaaatcgtcaaaaagcgtgtggcgatgggcgttatcggcattatttacgaaagccgcccgaacgttacgtccgatgcggcggctttggcactgaaaagcggcagcgcggtcgtactccgcagcggcaaagatgcattccaatccgcacgcgccatcgttgccgcactcaaagccggtttggcgcaaacccgcatcgaccccgacgcgctccagttgattgaagacacagggcgtgagggcagttacgaaatgatgagggcgaaagattatctagacctgctgattccgcgcggcggggcggggctgatacgggcggtggttgaaaatgccgtcgtgccggtcattgaaacggggacgggcatcgtccacatttatatcgacaaggacgcggattgggacaaggcgctccgtatcgtgtacaacgccaaaaccagccgtccgtccgtgtgcaactcgatggaagtgctgctggtgcatgaagacattgctgccgacttcctgcccaagctcgaacggctgttggttcgcgaccgcatagaagccggactgccgcccgtccgcttccgtttggatccgcaggcggcgcggcatatcggcggcgaagcggcgggtgcagacgatttcgataccgagtttttagactacatcctcgctgtgaaaaccgtcgcatcggtcgaagaggcggtcgggcacatcgaagcccacggcacacaccattcagacggcatcgttaccgaaaaccgccacgctgcggactatttcacgacccatatcgattctgccgccgtgtatgtcaacgcgtccacgcgctttaccgacggcggcgaattcggcttgggttgcgaaatgggcatctccacgcaaaaactccacgcccggggtccgatgggtttgaaagagctgacgagttacaaatacatcgtacaaggcacgggacaggttagggaataa

SEQ ID NO: 55959 - DNA, 291 bp, Neisseria meningitidis
atgaccatccgtcctttacacgaccgcgtcgtcgtcaaacgcttggaagctgaagaaaaaaccgcatcgggtatcgttttgccgggtgcggccgccgaaaaacccgatatgggcgaagtcatcgccgtgggcgcgggcaaaatcggtaaagacggcgcgcgccgtccgctggatgtcaaagtcggcgacaaaatcatcttcggcaaatacagcggccaaaccgtcaaagccgacggcgaagagctgttggtgatgcgcgaagaagacatcttcggcatcgttgaaaaataa

SEQ ID NO: 55960 - DNA, 360 bp, Neisseria meningitidis; identical to SEQ ID NO: 36598

SEQ ID NO: 55961 - DNA, 225 bp, Neisseria meningitidis
atgaacagcgaaactttagacgtaaccggattgaaatgtcccctgccgattttgcgggcgaaaaaggctttggcgcaaatgcagcagggcgacgtgttgaccgttctggcaaccgacggcggcgcaccgggggattttgaggctttttgccgccaaaccggtcatgtgctgttggatgcttccgaacaggacggcgtgttcacgctggtcgtcaagcacaaataa

SEQ ID NO: 55962 - DNA, 1155 bp, Neisseria meningitidis
atgagcatccatctcgacttcggcattagtcctaaaacgttccgacagacttatctgtatcaaaagcccaagctctttaaaggagcggctcggaatctcgaagccgcatcttggaaagatatcaacgagatataccaacgagcagacccaaccgcaccgctgttttatctgcgtaaaaaaggtgcaattgttcctaaagaagaatacgtcgaaagtttcgacgctttgggcaaaactcgctaccgttttattaaatccgttatctacgaacatatgaagaatggtgcgtcgttagtctataaccatattaacaacgagccgttttcagatcatatttcccgtcaagtcgcccgctttgctggcgcacatactattgtcagtggatatcttgcttttggcagcgacgaatcttataaaaaccattgggacacccgcgatgtgtatgccatccagcttttcggcaagaaacgttggcaacttactgcccctgatttccctatgccattgtatatgcaacagactaaagatactgatatttccattcctgaacatatcgatatggatattatccttgaagcaggtgatgtcctctacatcccgcgcggttggtggcacagacctatcccgctcggctgtgaaaccttccacctcgctgtcggtacctttccgcccaacggctataattacctcgagtggctaatgaagaaattccccacgatagaaagtctgcgccacagtttctcagactgggagcaagataggacgcgtatcaacgatactgccgcacaaattgctgccatgattgccgaccccgtcaattacgaagccttcagtgaagacttcctcggcaaagaacgcaccgataccgcttttcatctcgaacagttcgcgaatcccaacgctactccgctttcagacgacgtcaggttgagactaaatgccaataatttggatacgttggaaaaggggtatttgattgggaatgggatgaagataagcgtagatgaattggggaaaaaagttttagaacacatcggtaagaatgaaccgttattgttgaaaaatctactggttaacttcaatcagggaaaacatgaagaagttaggaagttgatttatcagttgatagagttagattttctggaacttttgtga

SEQ ID NO: 55963 - DNA, 720 bp, Neisseria meningitidis
atgctgaccacgccgccgctcgcccccaaaaccgtcgccgccctacacaggctcggtatccgtacgctcgaagaactgcggcaaaacggcgcggttcaaaccttcttgttattgaaggcatcaggtttgaccctcacgaaaagcacgctgtggcagcttcagtcgctgctggacggcacgccgccgcaagaaatggcgcaacacgataaaacccgcctgcttgccgagttgaaaaaccatccgcccgtcgccgcctttcccccgcaaggcgaaatggcgcatttcatgggtttggcattggaacaggcgaaactgtccgcattaatgggcgaaatacccgtcggggcagtcatcgtttcagacggcaaaatcatcgcatcggcacacaacacctgcattgccgactgcaatgtcagccggcacgccgaaatcaacgccttggcacaggcaggcagcgaaatgcaaaactaccgccttgacggatgcgacatctacatcaccctcgaaccctgcgccatgtgcgcgtccgcactgatacaggcacgaatcaggcgcgtgatctacggtgcggcagaacccaaaaccggcgcggcaggaagcatcgtcaacctgtttgccgacaaacgcctcaatacgcacaccgccatacggggcggaatcctgcaagaagaatgccgcgccgtattaagccgttttttccaaaacaaaagaaaaggttga

SEQ ID NO: 55964 - DNA, 780 bp, Neisseria meningitidis
atgcttaaaatcatttccgccaacgtcaacggcatccgctccgcctacaaaaaaggtttttacgaatatatcgccgcatcgggcgcggacattgtctgcgtgcaggaactcaaagcgcaggaggctgatttgtctgccgatatgaaaaatccgcacgggatgcacggctattggcattgcgccgagaagcgtggttacagcggcgtggcggtgtacagcaaacgcaaacccgacaatgtgcaaatcggtatgggcattgaagaattcgacagggaagggcggtttgtgcgttgcgatttcggcaggttgagcgttatttcgctttatttgcccagcggcagcagcgcagaagaacgccagcaggtgaaataccgtttcctcgatgcgttttaccctatgctcgaagcgatgaaaaacgaagggcgcgacattgtcgtctgcggcgactggaacatcgcccaccaaaacatcgacctgaaaaactggaagggcaatcagaaaaattcgggcttcctgcccgaagagcgcgagtggataggcaaggtcatccatacgctgggctggacggatatgtggcgcacgctttatcccgacaatccgggctacacttggtggagcaaccgcggacaggcgtatgcgaaagatgtcgggtggcgcatcgattatcagatggttacgcccgaacttgccgccaaagccgtgtccgcacatgtttataaagacgaaaaattttccgaccatgcgccgctggtcgtggagtatgactatgctgccgaataa

SEQ ID NO: 55965 - DNA, 1266 bp, Neisseria meningitidis
atgtcccacttattccgaaaagaagtctttgtagcccaacaaaataagtggacaggtcaggttatcttgacccgtccattctcttttttatttctgactttttgcgcttttctcattgctctgtgtatcattatctttttgatttttggtagctataccaataaaacaaccgttgaaggtcaattacttccaactatgggggtggttcgtgtttactcttccgatatcggcacgattacgcataaatttgttgaagatggtaactttgtcaaagctggcgaaccattgttcaaactttccacatcgcgttttggcgaaaaaggaaacgtacaagccaaattggcagcagaagccaaccttaaaaaaactttggcattacaagaattggaacgtttaaagcgcattcatcaaaatgagcaaaaaaatgttcataacaacattcatcgtttaaacaatcaattagagaatattaaacagcaaattacagggcaaaatcgtcaaattcgtttagcggaaaaaacccttaacaagaacaagtttttagccagtcaaggcgcagtatcccaacaagataagatgaccgccgaaagccatttattggaacaacgctcacgtttggagagcctaaaacttgaacaaaataatgcaatcagggaacttgatgaacagaaaattacattaagcagcctgcctgaacgccataaaaccgaattgagccaactcaaccgtgcgattacggaaatgaaccaagaaattttggattttgatttgaaatccgaacaaaccatacgagctagtaaatcaggttatatatcaacaattaatgttgatatagggcaacaagttgaaccgtctaaattgctgttaagcattgtccctgaacaaactgaattggtcgccaatctttacatacccagtaaagctgttggttttattaaaccgaaagataaagttgttttacgttaccaagcgtacccttaccaaaaatttggacatgccacaggagaaattatttcagttgccagaactgctctcggtaaacaagagctatcaggtttaggtatcattttcactaacccaaccttattaaatgaacctgcctatcttgtgaaagttaaattggaaaaacaaacgattaaagcatacggagaaaacaagccgcttcaaattggcatgattttagaagcagatattctccatgaacgaaaaaaattgtacgaatgggtacttgacccactttacagcatttcaggaaaaatcaattaa

SEQ ID NO: 55966 - DNA, 2691 bp, Neisseria meningitidis
atgtccgacaaccgcctcgacaccgcccgccgccattccctcttcctcgcccgccagctcgacaacggcaaactcaagcccgaaattttcctgccgatgttggacaaggtgttgaccgaagcggatttccaagcctttgccgactgggacaaaatccgtgcggaagaaaacgaggaagaattggcgcggcagttgcgcgggttgcgccgttatgtggtgtcgcagattatcgtgcgcgatatcaaccgcatcagcgatttgaacgaagtaacccgcacgattacgctgtttgccgattttgctgtgaataccgcattggatttttcatacgcctattatcaggatatgtacggcacgccgatcgggcgttataccaaatcgccgcagcatttgagcgtggtggcgatgggcaaggcgggcggctatgagttgaacgtgtcttccgacatcgatttaatttttatctaccccgaatcgggcgataccgacggtaggcgcgaacgcggcaatcaggaatttttcaccaaagtcgggcagaaactgattgcgttgctgaatgacattaccgccgacgggcaggtgttccgcgtcgatatgcggctgcggccggacggcgattcgggcgcgctggtattgagcgaaaccgcgctggagcaatatttgattacgcaggggcgcgaatgggaacgctacgcgtggtgcaaaggccgcgtggtcacgccgtatccgaacgacatcaaatcgctggtgcgccccttcgtgttccgcaaatatctggattacggcgcgtatgaggcgatgcgtaagctgcaccgccaaatccacagcgaagtcggcaaaaaagggatggcggacaacatcaaactcggcgcgggcggcatccgcgaagtcgaatttatcgcccagattttccagatgatacgcggcgggcaaatgcgcgcgctgcaactgaaaggcacgcgggaaacgctggaaaaactcgccgaatcgggcattatgccgtctgaaaacgtcgaaaccctgcttgccgcctaccgctttttgcgcgatgtcgaacatcgtttgcaatattgggacgaccggcaaacccaaaccctgccggcttcgcccgaacagcggcaactgcttgccgaaagtatgggatttgatgattacgccgattttttgaatgctttaaatcaacatcggaaccaagtcaatcggttgttcaacgaaattctgagcgaacccgaagaacaaacgcaaagcaacagcgaatggcaatgggtttggcaggacaagcccgacgaagaagaacggcaaggccgtctgaaagaacacgggtttgatgccgaaaccattgccacgcggctcgaccaaatccgccacagccataaataccgccacctctccgcacacgcccagccgcgtttcgatgcggttgtgccgctgttcgtacaggcggcggcagcgcaaagcaacccgaccgatacattgatgcggctgttggattttctcgaaaacatcagccgccgatccgcctatctcgccttcctcaacgaacatccgcaaaccttggcgcaactggcgcagattatgggccaaagttcttgggtggcggcgtatctgaacaaatatccgattttgttggacgaactcatcagcgcgcagcttttggataccgcgtttgattggcaggcgctcgccgccgccctttcagacgacctcaaagcctgcggcggcgatactgaagcgcaaatggacaccctgcgccatttccaacacgcccaagtcttccgcctcgccgttcaagacctcgccggactgtggacggtagaatccctctccgaccagctctccgcccttgccgacaccatcctcgccgccgccctgctgtgcgcgtgggcggacatgcccaaaaaacaccgcgacaccccgcaatttgccgtcgtcggctacggcaagctcggcggcaaagaactcggctacgcctccgacctcgacttggtctatctttacgacgatccccatcccgaagcaggcgacgtgtacagccgcctcgcccgccgcctgaccaactggctttccaccgccaccggcgcaggcagcctctacgaaaccgacctgcgcctgcgccccaacggcgacgcaggtttcctcgcgcacagcatcgccgcctttgaaaaataccagcgcgaaaacgcgtggacgtgggaacaccagtcccttacccgcgcccgcttcatctgcggcacacccgaaattcagacggcattcgaccgcatccgcaccgaaatccttaccgccgaacgcgaccaaaccgccttggcagacgaaatcatcgaaatgcgcgaaaaaatgttccccactcatcccccagccgacagcaacgtcaaatacgcacgcggcggcgtggttgatgtcgaatttatcgtccaatatctgatacttgcccacgcccgaaaatatccgcaactcttggacaactacggcaacatcgccctcttgaacatcgccaccgactgtggcctcatcgacaaaacccttgcagaacaaagccgcaccgcctaccgcttctaccgccggcagcaacacaataccaaactgcgcgacgcagaaaaaaccgaagtaagcggcgaattgctggcacattacggcaatgtcaggaaattgtggcgggaagtgttcggcgaagaagcggcaaccgcctga

SEQ ID NO: 55967 - DNA, 873 bp, Neisseria meningitidis
ttgtcggatgaaggcaggcataaacctacttccgccccaaaccgcgtttttatgatgaaaggtatggataaattgagataccaacaggattttttaaatatccgccccatttttacagccggcgaacaagaatacctgaccgaattgtccgatcggcttcctttatctgttttaacggactccgtgcgtaatattgaagaaatcggtatcgattttgtgtacagttctgccaaattggaaggaaacacttataatcaatacgatacgcaggcattgcttaaactcgggcaaaccgcaggcgggaagttatattcggatgccgtaatgttaatcaacctgagggaaagttaccggcacctgctgtccggtttggacagccccgatccgtttgactggttggatttcttaaaaaccacccacagcctgatttcggaaaacttactggaaaaaggctccggcggcgtagtccgccgcgacagcgttactataagcgggacagactacacgcctttatccaacccgcaaagtttggatacggaattaaaatggttgcttcaagaagctcccaaaatagaaaatcctttcgaccgcgccgtttatctccataataatttggcgtatcttcaatattttaaagattgcaataaacgtactgccagaaactgcatgaccttgtcgctgatgcgctccggtttttttccttgcgtattctcccccgacagttatcccgcctatgccgaggctgtcgtagcctattacgaaaccggcgattacggtttattcaagaaatattttatttcggcatacgaaaataccgtaaataagtacggcccacagcctgatatggatattttccgcaacttctccctttaa

SEQ ID NO: 55968 - DNA, 2838 bp, Neisseria meningitidis
atgttagacaaatactcccccgccgaaatcgaatccaagcactatcaaaactgggaaagccaaggctatttccaacctgatatggatttgaccaaaccgtctttttccatccaactgccgccgcccaatgtaaccggcacgctgcacatgggtcatgccttcaaccaaaccattatggacggcctgacccgctactaccgtatgaaaggctgcaacaccgcctggattcccggcaccgaccacgcgggcatcgccacgcaaatcgtggtcgagcgtcagcttgccgcgcaaaacgtgtcccgtcataacttggatcgtgaaaaattcttggaaaaagtgtgggaatggaaagaagtttccggcggcacgattacgcagcagatgcgccgtgtgggctgttctgccgactggacgcgcgagtatttcacaatggacgatgtacgcgccgaaaccgtaaccgaagtgttcgtacgcctgtatgaacagggcttgatttatcgcggcaaacgcttggtgaactgggatccggtattgggtaccgcagtgtctgatttggaagtggaaagcgtggaagaacaaggctctatgtggcacatccgctatccgctggcggacaatcctgccgaagccgtcatcgtcgccaccacccgtcccgaaacgctgttgggcgacgttgccgttgccgtcaatcccgaagacgaacgttatacccacttaatcggcaaagaattaatcctgccgctgaccggccgcaccattcccgtgattgccgacgaatacgttgaaaaagacttcggcaccggctgcgtgaaaatcacgcctgcgcacgacttcaacgactacgaagtcggcaaacgccacgatacgcgcttggttaatgtgttcgacttggaagccaaagtattggcaaacgccgaagtgttcaacttcaaaggcgaagcgcaaccaagctttgccatgcctgaaaaatacgcaggcttggaccgctttgccgcgcgcaaacaaatggttgccgatttgcaggaacaaggtttcttggtcgaaatcaaagcgcacacgctgatgacgccgaaaggcgaccgaacaggctcagtgattgagccgatgctgaccagccaatggtttgtcgccatgtccgctacgccaaacggcggcgagcctgacagcgaattcaaaggcttgagcctcgccgacaaagccaaaaaagccgtcgacagcggcgcggtacgctttatccccgaaaactgggtcaacacctacaaccaatggatgaacaacatccaagactggtgcatctcgcgccaactgtggtgggggcatcaaatccccgcgtggtacgacgaagcaggcaatgtttacgtcgcccgcaatcaggtggaagccgaaaaacaagccggcaaaacaggcttgacccgcgaagaagacgtattggacacttggttctcctccgcgctcgtgccgttctccacgctcggctggccgtctgaaaccgacgaactcaaagccttcctgccgtccaacgtcttggttaccggctacgaaatcatcttcttctgggtggcgcgtatgattatgatgaccacccacttcaccggcaaagtaccgtttaaagacgtgtatatccacggcatcgtgcgcgaccacgaaggcaaaaaaatgtccaaatccgaaggcaacgtcattgaccctgtggatttgatcgacggcatcggcttggaaaaactgctggtaaaacgcaccaccggcctgcgcaaacccgaaaccgcgccgaaagtggaagaagccacgaaaaaactcttccccgaaggcattccgagtatgggcgcggacgctttgcgcttcactatggcgagctacgccagcttggggcgttcggtcaacttcgacttcaaacgcgccgaaggctaccgcaacttctgcaacaaaatctggaacgccaccaacttcgtcttgatgaacaccgaaaaccaagactgcggttacggcgcaaccgctgccgaaccgcgcggctactccttccccgatatgtggattgtaggccgtctgaatcagaccatcgagcaagtaacgcaagcctacgaaacctaccgctttgatttggcggcggaaaccctgtacagcttcgtgtggaacgactattgcgactggtatctggaacttgccaaagtgcagctccaaaccggctgcgccagccgccaacgcgccacacgccataccttattgcgcgtactcgaagccgccctgcgcctgctgcacccgattatcccgttcatcaccgaagaactgtggcaaaccgtcgcccctatgtgcgacgcgaaaaccgccgacagcatcatgctcgcccgcttccccgaagccgacggcggcgatattgttcagacggcattcgggcaaatgaccgtgttacaggatttgattggcgcagtccgcaacctgcgcggcgaaatgggcatccagcccaacgtgaaagccccgctgtttgtcgaaagcgcagacgacttggcggactacctcaaatacctgccgatgatgacccgcctgaccgaagcgcagcaagtcgccgccctacccgaaagcgaagacgcgcccgtcgccgtctgcaacggcgcgcgcctgatgctgaaagtcgagatcgacaaggccgccgagaccgcccgcttgggcaaagaagccgagaagctgcaaaaagccttggacaaactcaatgccaaactctccaaacccggctacaccgaaaaagccccggcgcatttggtggaaaaagacaaagccgatttggcggaattggaagacaaaatggcaaaagtgcaaactcagttgtcgaagttgaaagactga

SEQ ID NO: 55969 - DNA, 477 bp, Neisseria meningitidis
atgctggcagtctgccaatccggcagcgcacctaaaaacgcgcacacggcatccgccggcacaccggccggagaatcatgcaaagtcatccgggacgacaccgcaggaagcggcaaaaacatcatttaccgttgctgcaacggtcaggcggcaataaatgcagccattgcagacggcgtattggaatcagggattcccgtcagcttcggcggcgggggcgtaccggttgcaaacggcaggaatctggttacacggcaagcagcaaacggcgttggcaaatccgactccgaggcctgcgaacacgccctaatcaatgccgcccgcaaattccagcagaccgccggcaaactcggcgggcgcggcgttaccggcttccacagctacttcgacaagcagccgctgcaaggcggacaatacgactgtcaggcaggctcgttccacgtccgtgtggtcatgcgcgccaatgtcgtccgttaa

SEQ ID NO: 55970 - DNA, 1575 bp, Neisseria meningitidis
atgttcagacggtatcttccgaacagacagatgaatatggtttccaaactggacaaatactggcagcaccccgccctctactggcctttgctcatcctttttgccgccgccaccccctttaccttcgcaccctactaccacttttggctgatgcccttgattttcggtgccttcgtccgcctcatcgaactgcgtccgcgttttgctgtctcttccgcctacctgttcggcctgaccgcatacacgacacagttctactggatacacaccgccctgcacgacgtttccggcctgcccgacctctatgccgtaccgctgaccttcctactccccgcctaccttgccctttatccggcactgtgtttctggctgtggaaaaaatttaccctgcctcggggcataaaaatcggtttggtactgcccatcctgtggacgctgaccgagtttgcccgcgagcgtttcctgaccggattcggctggggcgcaatcggctactcccaaatcaccccggacagcccgctcgccggctttgccccattgggcggcatccacatggttacactggcaaccgcctttctcggtgtctggctggttttggcgagtgataacaccgcacgttcgggcaaacgcctgcttccaattatcctgattgccgccctgcttgccgcaggctacaccgcccgacaaaccgacttcacccgccccgacggcagccgcagcaccgtcgccctgcttcaaggcaacatcgaccaaaccctcaaatggcgtgaagaccaagtcatcccgaccatacagaaatattacgaacaggtcggcaaaaccactgccgacatcgtcatcctgcccgaaaccgccatccccgttatgcgccaaaacctgccggaaaacatactggcaaaatttgccgaacaggcgcaaaacaacggcagcgcgctcgccgtcggcatcagccaatacacttcggacggcaacggttacgaaaacgccgtcatcaacctgaccggttatcaggaaaacaatcaggacggcatcccctactacgccaaaaaccacctcgtccccttcggcgaatacaaaccgctgcccttcctgaccacgccgctttacaaaatgatgaatatgcccctttccgacttccgcaaaggcggcggtaagcaatccgccctgctgatgaaaaaccaaaaaatcgccttcaacatctgttacgaagacggattcggcgacgaactgattgccgccgccaaagatgccaccctgcttgccaatgccagcaatatggcgtggtacggaaaatccaacgccatgtaccagcacctccaacaatcgcaggcacgggctatggaactcggacgctatatggtccgtgccaccaacaccggcgcaaccgccatcatctcccccaaaggcaacatcatcgcccaagcccaacccgatacggaaaccgtattggaaggacacatcaaaggctatgtcggcgaaacaccctatatgaaaaccggcagttcatggtggttgatgggcatattgaccctagccgcactgattcttttcatcttccgaaacaaagaacactga

SEQ ID NO: 55971 - DNA, 330 bp, Neisseria meningitidis; identical to SEQ ID NO: 46161

SEQ ID NO: 55972 - DNA, 432 bp, Neisseria meningitidis
atgatggcgttcgaaaaagttgaacatttattgccggataccgtgttggacattgtggatgtcatcggactggcagcgacggaacagctggtcaaggcgattggcggggcgcggtttaaatttggtaagggcaaggtggacaccgagcgtttggcaattttggtcgaagccatcggcgaagtgaaaacacatgagctgttgcaggtatatggtggcgaggaattgtatgtcccacggtgcggcaaggcgttaatacagttgagaaaccataggttttatcaggagtttgtcaaattgcgcgatattgataaggagagcgggcttatggcgatgacgaagctatgccctaaatacggtatctcttcacgaacaggatatacgattatcaatgaaatgagccgacctgcggcacagcaggcagctttattttag

SEQ ID NO: 55973 - DNA, 993 bp, Neisseria meningitidis
atgccgtctgaaacagtttgtccgttttcagacggcatttccgttacacacccatccccttatacagtacgaccctattccgaaggtctgttaagaaagcccgctatgccctaccaacaaatcaccgtcaacgtcaacgatgccgtcgccgaacgcctcgccgacgcgctgatggaacacggcgcactctccgccgccatcgaagatgcctacgccggcaccgaaaacgaacaagccatctttggcgaacccggtatgccgaccgaacaaatctggcagcagagcaaagtcatcgccctgttcggcgaacacgacgaagccgccgccatcatccaaaccgccgcacaagaatgcgggttaaaagacttggcatacaccggcgaaaccctcgaagaccaagactgggtacgcctgacccaagcgcaattcgaccccatccgaatttccgaacgcctgtggattaccccctcttggcacgaagcccccgaaggcactgccgtcaacctacgcctcgatcccggcctcgccttcggcaccggcagccacccgaccacgcgcctctgcctcaaatggctggatacgcaactcaaaaacggcgaaagcgtcctcgactacggctgcggttcgggcatcctgaccatcgccgccctcaaactcggcgcaggttctgccgtcggcgtggatattgacgaacaagccgtccgcgccggcaaggacaacgccgaacagaacaacgtcgatgcacaattcttcctgcccgacggtctgcctcaagggcaattcgacgtagttgtcgccaacatcctcgccaaccctttacgtatgctcggcgaaatgctcgccgcccgcaccaaacaaggcggccgcatcgtgttatccggtttgttggacgaacaagccgaagaactcggcggcatttacagccaatggttcgatctcgacccggcggaaaccgaagaaagctgggcgcgcttgagcgggacaaaacgctga

SEQ ID NO: 55974 - DNA, 939 bp, Neisseria meningitidis
atgcttgaactgaacggactctgcaaacgcttcggcggcaaaacggttgccgacgatatctgcctgactgtcgggcgcggcaaaatactcgccgttttggggcggtcgggctgcggaaaatcaacactgctgaatatgattgcggggattatccgtccggacggcggcgaaattcggctgaacggggaaaacattacccgtatgccgcccgaaaaacgccgtatttcgctgatgtttcaagattacgcgctgtttccccatatgagtgcgctggaaaatgcggcattcggtttgaaaatgcaaaaaatgccgaaagccgaagccgaacgccttgccatggcggcacttgccgaagtcggactggaaaacgaggtgcaccgcaagcctgaaaaactttccgggggcgagaagcaacggttggcactggcgcgcgctttggttgtccgcccttccctgctgctgttggacgaatcgttttccagtttggacacgcatttgcgcgaccggctgcgccgcatgactgccgaacgtatccgaaacggcggcatccctgccgttttggtaacgcattcgcccgaagaagcctgtacgacggcagacgaaatcgccgtgatgcatgaagggaggattctacaatacggcacacccgaaaccttggttcaaacgcctgccggcgtgcaggtcgcccgtctgatggggctgcccaacaccgacgatgaccgccatatcccgcaaaatgcggtgcgtttcgaccaagacggcatggagtgccgcgtattatcccgtacctgtttgcccgaatcgttcagcctgtccgtcctccatccggaacacggcatcctgtggctgaacctcgatatgcggcacgccggggcggtatcgggcaaggatacggtacgcatccatatcgaagaacgggaaatcgtccgcttccgctga

SEQ ID NO: 55975 - DNA, 876 bp, Neisseria meningitidis
atgaacctctacgacctgctccttgccccctttgcagaattcgacttcatgcgctacgccctcgcatccgtcttctgcctgtccctcagtgccgcacccgtcggcgtattcctcgtcatgcgccgtatgagcctgataggcgacgcattgagccacgccgtcttgcccggtgccgccgtcggctacatgtttgccggcttgagcctgcccgccatgggtttgggcggcgtagccgcaggcatgctgatggcactgcttgccggacttgttagccgcttcaccaccctgaaagaagatgccaactttgccgccttttatctcagcagcctcgccatcggtgtagtcctcgtcagcaaaaacggcagcagcgtcgatttgctgcatctgcttttcggctctgtacttgccgtcgatattcctgccctgcaactcatcgccgccgtatccaccctcacactgcttacccttgccgtcatctaccgcccgctcgtactcgaaagcatcgaccccctgttcctcaaatccgtcggcggcaaaggcgggctttggcacgtcctctttctcgtcctggtcgtcatgaacctcgtatccggctttcaagccctcggaacactcatgtccgtcggactcatgatgctgccagccattaccgcccgcctgtgggcgaagcacatgggcgcactcatcctcctatccgttctgacagccctgctgtgcggcttgagcggactgcttatttcctaccacatcgaaattccctccggtcccgccatcatcctctgttgcagcgtcctttatctcttttccgtcatactcggcaaagaaggcggcattctgaccaaatggctcaaaaaccaccgccaccacaccacctga

SEQ ID NO: 55976 - DNA, 279 bp, Neisseria meningitidis; identical to SEQ ID NO: 55063

SEQ ID NO: 55977 - DNA, 297 bp, Neisseria meningitidis; identical to SEQ ID NO: 39905

SEQ ID NO: 55978 - DNA, 564 bp, Neisseria meningitidis
atgaccgatttagaaaccaaacgccttgaaacacaggcgatgcttgaaaacgccgatcttttgttcgaccaaggccaatgccgtgccgcactgcaaaaagtggcggacgagattacgcgcgatttgggcggcaaatatccgctgctgctgcccgtgatgggcggcgcggtggtgtttacgaggcagttgctgccgctgttgcgttttcccttagattttgattatgttcacgtttcccgttacggcgacaagctggagggcggcgcgttcaactggaagcgtatgcccgatgcggaacaaatccggggcaggcacgtcgtcgtgctggacgatattttggacgaagggcatacgatgtccgccattcaagccaaacttttggaaatgggtgcggcaagctgccgtgcggcggtgttcgccaacaagctgattgacaaacccaagcctatccgagccgattatgtcggactggatgtgccgaaccgttatgttttcggttacggcatggatgcggcgggctgctggcgcaatctgggcgagatttacgcattggacggaaaataa

SEQ ID NO: 55979 - DNA, 270 bp, Neisseria meningitidis
atgctcaaacaatccatcgaaatcatcaacaaactcggacttcacgcccgtgcctccagcaaattcacccaaaccgcgtctcagtttcaaagcgaagtctgggtaacgaaaaacggcagccgcgtcaacggcaaaagcatcatggggctgatgatgctcgccgccgccaagggtacggtcatcgagctggagacggacggcgcggacgaggcggaagcgatgcgcgccctgaccgacttaatcaacggctacttcggcgagggcgaataa

SEQ ID NO: 55980 - DNA, 861 bp, Neisseria meningitidis
atggcaaaagtaaaaggcggattggggcgcggtttggattcgctgctcgccaacggcgcagacaacagcagcggcgaccgattgaccacggttgcggttaaagatatccggcccggccgctatcaggcgcgtgttcaaatcgatgacgaagccttgcaggagctggcggattcgattaaggcgcaaggcgtgatacagcccgtcatcgtgcgcgaacacggactgtcccgatacgaactgattgcgggcgaacgccgttggcgcgccgcacagattgccggcctgaccgaaatccccgccgttatcaaaaccatcagcgacgaaaccgcattggcaatgggtttgatcgaaaacctccagcgcgaaaacctcaaccccatcgaagaagcacaaggcttgaaacgccttgccgacgagttcggactgacccacgaaaccatcgcccaggccgtcggtaaaagccgaagcgcgatttccaacagcctgcgccttttaagcctgcccgaacccgtgcaggaaatgctttaccaacgccgcctcgaaatgggacacgcccgcgcattgctgaccctgcccgtcgtcgaacagctcgagttggcgcaaaaggccgtcaaaaacggctggtcggtgcgcgaagtcgagcgccgcagccaagccgcccttcaaaacaaacgtcccgagcccaaaaagactgccgccgccgacatcggccgcctgaatgatttgctgactgaaaaactgggtgtcaacgccgaaatcaaaaccgccaaccataaaaaaggcagaatcatcctgcatttcgacacgcccgaaaccttcgaccatatcttgaagcagttgggcatagattaccgaccttaa

SEQ ID NO: 55981 - DNA, 219 bp, Neisseria meningitidis; identical to SEQ ID NO: 40879

SEQ ID NO: 55982 - DNA, 567 bp, Neisseria meningitidis
atggctaagaaaatcagtattttggtgggcagcctgcgccgtgcttcttttgcgcgcaaagtggcattgaatgcggcggagatgttccccgaaggctggcaggcggaaatcgtcgaaatcggacatctgccgctttacaatttcgattatgacgaccctgcggtggaagatgtgccgctgcccgaaagctacacggctttccgcgaaacgattaaggcttcggacggcattttgttcgttacgtccgaaaataaccgcaccattcccgcctgtttgaaaaatgcggtggacatcggttctaaaccgaatgccgatgtggcttggaaaaacaaaccggccggcatcatcagccattccgtcggcaagatggggggatacagttcgcaaaaaaacctgcgccttgcgctgtcttatttcgatatgcccgtaaccggacagccggaagtgtttttgggcaattcgccgacactgtttgatgaaaacggcaaattgattgactcggcaagggattttgttcagtcatatattaatcagtttgtcggtttgattgaaagaaatgccaaataa

SEQ ID NO: 55983 - DNA, 174 bp, Neisseria meningitidis
atgcgaatccgccgtgcgctgaaattcgaccagttgatactcgaatttcccgagcgcggggacggcgcatgggtacacatcggtttccgacgcaacagcccgcaacgcaaccagatactgaccgcaaccaagaaaaacggcaaaaccgtgtatctgcccgggctgcatccttga

SEQ ID NO: 55984 - DNA, 282 bp, Neisseria meningitidis; identical to SEQ ID NO: 38986

SEQ ID NO: 55985 - DNA, 2121 bp, Neisseria meningitidis
atgttcgacaaacacgttaaaactttccaatacggcaaccacaccgttactttggaaaccggcgaaattgcccgccaagccgccgctgccgttaaagtctctatgggcgacaccgtggttttggttgccgttaccaccaacaaagaagtgaaagaaggccaagacttcttccctctgactgtcgattacctcgagcgcacttacgccgcaggcaaaattcccggcggtttcttcaaacgcgaaggcaaacaaagcgaaaaagaaatcctgaccagccgtctgatcgaccgtccgattcgtccgctgttccctgaaggtttctaccacgacatccaaatcgtagcgatggtcgtgtccgtcgatcctgaaatcgattctgatattcctgcaatgttgggcgcgtctgccgcgctggtgttgagcggcgtaccgtttgccggcccgatcggcgcggcacgcgtcggttatgtaaacggcgtgtacgttttgaacccgactaaagccgaattggcgaaatcgcaattggacttggtggtcgccggtacttccaaagccgtgttgatggtggaatccgaagccaaaatcctgcccgaagacgtgatgctgggcgcggtggtttacggccacgatcaaatgcaggttgccatcaatgcaatcaatgaatttgccgacgaagtcaatccggaactttgggattggaaagcacctgaaaccaatgaggaactggttgccaaagtccgcgggattgccggcgaaaccattaaagaagcgttcaaaatccgtcaaaaacaagcgcgttctgccaaattggacgaagcttggagtgcggtaaaagaagccttgattaccgaagaaaccgacacgctggcagccaacgaaatcaaaggcattttcaaacacttggaagccgatgtcgtccgcagccaaattttggacggccaaccgcgcatcgacggccgcgacacccgcaccgtccgtccgctgaacatccaaaccggcgtattgccgcgcacgcacggttccgcattgtttacccgtggcgaaacccaagcccttgccgtagcgactttgggtacttcgcgcgacgagcaaatcatcgacgcgctgtccggcgaatacaccgaccgctttatgctgcactacaactttccgccgtactctaccggcgaagtgggccgcatgggcgcgccgaaacgccgtgaaatcggtcacggccgtttggctaaacgtgcattgttggccgtattgccgaaacctgaagatttcagctacaccatgcgcgtggtctccgaaattaccgaatctaacggctcttcctctatggcttccgtctgcggcggctgtttgagcctgctgtctgccggcgtgcctttgaaagcacacgttgccggtatcgcgatgggtctgattctggaaggcaacaaatttgccgtcctgaccgacattttgggcgacgaagaccacttgggcgatatggactttaaagtggccggtacgaccgaaggcgttaccgcgctgcaaatggacatcaaaatccaaggcattaccaaagaaattatgcaaatcgctttggcacaggccaaagaagcgcgtctgcacatcttggatcagatgaaagccgccgttgcgggcccgcaagagttgtccgcacacgcgccgcgtttgtttacgatgaaaatcaaccaagacaaaatccgcgaagttatcggtaagggcggtgaaaccatccgtgcgattaccgctgaaaccggtacggaaatcaatattgccgaagacggtacgattaccattgccgcgaccactcaagaagccggcgatgcggcgaaaaaacgcatcgagcagattactgccgaagtggaagtgggcaaagtgtatgaaggcactgtggtgaaaatcctcgacaacaacgtcggcgcgattgtcagcgtgatgccgggcaaagacggtttggtacacatcagccaaatcgcccacgagcgcgtacgcaatgtcggcgactacctgcaagtcggtcaggtggtgaacgtgaaagcattggaagtggacgacagaggccgtgtccgtctgtccatcaaagccctgctggacgcgcctgcccgtgaggaaaatgccgccgagtaa

SEQ ID NO: 55986 - DNA, 885 bp, Neisseria meningitidis
atgagcagcggaaatatccacatccacagcatgaccggatttgccaacgcagcggcagagtgcggcagcaaacgcatcaatctcgacctgcgtgcggtcaaccaccgttttctagatattcaaatcaggatgcccgacgatttgcgctatttggaaagcggtatccgcgagaaaatttcatcccatatcgcacgcggcaaagtcgaatgcaaaatccaaattcaagatgcggaaaacggcaatcagtctttggaactgaatcgcgatctggtcggacagcttgccgaaatcaacaaagacctccgcaagcattatgatttggcaaaactgggcgttgccgatattttgcgctttccgggcgtattggcaagtcaaagggaaaatgcggacgcattggcaaaggttattgccgatttgaccgattcggcactgaaggactttaccgccgcacgccggcgcgaagggaaaaaattgggcgagcacctgttacaacgcctcgaaagcatggaagaaatcatagatgcattaagcgaactctttcctaccctgttggaaacacataaagaaaaaatccgcgcccgccttgccgaagcggtcggcagcatcgacaacgaccgcctgcaacaggaatttgccctctttatccaaaaatccgacatcgacgaagagttcagccgcctacgcacccacattgccgaagtgcgccgtatcgttaccgaacacaaaggcagcagcggcaaacggctggacttcctgatgcaggaattaaaccgcgaagccaacactttgggcagcaaatccatcgctaccgaatgcacccaagcctcggtcgagctgaaagtcctgatcgaacagatgcgcgaacaggtgcagaatatcgaataa

SEQ ID NO: 55987 - DNA, 1041 bp, Neisseria meningitidis; identical to SEQ ID NO: 55816

SEQ ID NO: 55988 - DNA, 660 bp, Neisseria meningitidis
atgaccacgcccaaactcatcatcttcgactgggacggcacgcttgccgatacgacccaacccatcatcgacaccatgcgccgcagcttcgccgaatgcggttttccgccgcccgaagcggaacgcgtccgcagcctgattggctacagcctgcccgaaatcatccgcgacctgctcgaaatgccgtctgaaaccgccattgccgacatcacacgcacttattccgcacattacctcaatcccaacaaccgcaatatgacgctctttcccgatgccctgccctgtctggacaagctcaaagcacaaggatactggcttgccgtcgccacgggcaaagggcgggcgggcttggacaacgccatcagccaaaccgccaccggcggctattggctcgccaccgcctgcgcgggggaatatccctccaaaccctcgcccgaaatggtattcggaatctgcggcgaactggggttcgacccgaaagaggcattggtcgtcggcgatacggcgcatgacctgcatatggcggcaaacgcaggcgcggcggcagtcggcgttgccaccggcgcacattcgcgcgaacagctccttagcgcaccgcatctcgccgtattggacggtttgtccgaactgcccggttttcttgcacagcattacgcctga

SEQ ID NO: 55989 - DNA, 771 bp, Neisseria meningitidis
gtgtccgaaacacaaaacgaacaaaccgtccaaccgcttgtcgagcatctcatcgagctgcgccgccgcctaatgtggacggttgtcggcatcttagtctgctttttcggcatgatgccgtttgcccaacaactctatacttttatcgccgacccgctgatggcaaacctgcccaaagacaccagcatgattgccaccgatgtcatcgcaccatttttcgtgccggtcaaagttaccctgatggcggcatttttaatttcgctgccgcatacgctctaccaaatctgggcatttgtcgcgcccgcactctaccaaaacgaaaaacgcctgattacgccgctcgtcctctccagcgtcagcctgtttttcatcggcatggcatttgcctactttttggttttccccgtcattttcaaattccttgccagcgttacccctgtcggtgtcaatatggcgacagacatcgacaaatacctgtcttttatcttaggcatgtttgttgcgttcggcacaacctttgaagtccccattgtcgttatcctgttaaccaaaattggtgtggtaacaaccgaacagctcaaacgcgcccgcccctatgtgattgtcggcgcatttgtcattgccgccatcatcacgccgcccgatgtgatttcacaaaccctgcttgccattccgctgattctcttatacgaagcaggtatttggttcggacgctttttcacgccacgttcagaacaggatggcgacatacagccgcctgcaacaacctga

SEQ ID NO: 55990 - DNA, 483 bp, Neisseria meningitidis; identical to SEQ ID NO: 42582

SEQ ID NO: 55991 - DNA, 129 bp, Neisseria meningitidis; identical to SEQ ID NO: 43085

SEQ ID NO: 55992 - DNA, 387 bp, Neisseria meningitidis; identical to SEQ ID NO: 55079

SEQ ID NO: 55993 - DNA, 1059 bp, Neisseria meningitidis; identical to SEQ ID NO: 42848

SEQ ID NO: 55994 - DNA, 792 bp, Neisseria meningitidis
  misc_feature 8, 9, 10, 11, 12: 'n' is a, c, g or t
gtgtgtgnnnnncttctcttctcttctcttctcttctcttctcttatcttatcttctcttctcttctcttccgcagcgcaggcggcaagtgaagacggcagccgcagcccgtattatgtgcaggcggatttagcttatgccgccgaacgcattacccacgattatccgaaagcaaccggtgcaaacaacacaagcacagtaagcgattatttcagaaacatccgtgcgcattccatccacccccgggtgtcggtcggctacgacttcggcggctggagaatagcggcagattatgccagttacagaaaatggaaagaaagtaattcttctactaatgcagaaaatagagatagtatacaaaactacgtaaagattgaaacaaaacatcaaggaaacggcagcttccacgccgtttcttctctcggcttatccgccatttacgatttcaaactcaacgataaattcaaaccctatatcggcgcgcgcgtcgcctacggacacgttagacatcaggttcattcggtggaaagcaaaaacacgattattacctctaaaccaacgggcaacactccagcgggaggtcctgtcccaacaggttttgtccccaaatctgcctatcacgaaagccacagcatcagcagcttgggtcttggcgttatcgccggtgtcggtttcgacatcacgcccaagctgaccttggacaccggataccgctaccacaactggggacgcttggaaaacacccgcttcaaaacccacgaagtctcattgggcatgcgctaccgcttctga

SEQ ID NO: 55995 - DNA, 1446 bp, Neisseria meningitidis
atgccgtctgaaatgctttcccccttcagcgttcccgcaccttttttttacggacgggttgccggaaccacaggaacagtcatcatgctgaaaaaagttttaatcgccaaccgaggcgaaatcgcattacgcgtactccgtgcctgccgcgaaatgggcattgccaccgtcgccgtgcattccgaggccgacaaagacagcctgcacgtcaaactcgccgacgaatccgtgtgcatcggccctgccgcttccgcgcaaagctaccttaacgtccccgccattatcgccgccgccgaagtaagctgcgcggacgctgtccatccgggctacggtttccttgccgaaaacgccgatttcgccgaacaggtcgagcagtccggctttacctttatcggcccgaaacccgacaccatccgcctgatgggcgacaaagtctccgccaaacacgcgatgatagcggcaggcgtaccctgcgtccccggttctgacggcgcattgccggacgacggcgaagaaatcctcaaaatcgccgataaagtcggttatcccgtcattatcaaagcctccggtggcggcggcggtcgcggtatgcgcgttgtcgagaaaaaagaagacctcctccagtctgtcgaaatgaccaaagccgaagcaggcgcggcattcggcaacccgatggtttacatggagcgctacctgcagcgtccgcgccacgtcgaaatccaagtgattgccgacgaacacggcaacgccatctacctcgccgagcgcgactgctccatgcagcgccgccaccaaaaagtcatcgaggaagcaccggctccgttcatcactgaaaaagaacgcgccaaaatcggcaacgcctgtgccgacgcctgcaaacgcatcggctatcgtggcgcaggtacgtttgaattcctgtacgaagacggcgaatttttctttatcgagatgaatacgcgcgttcaggttgagcatccggttaccgagctgattaccggcgtggacatcgtgcaggagcaactccgcatcgccgccggcctgcctttgcaatacaaacaaaaggatattcaagtcgaaggccacgcgtttgagtgccgtatcaacgccgaagacccgtacaacttcatccccagcccgggcccgattgaaagctgccacctgcccggtggcttcggtatccgcgtggacagccacatttaccaaggctaccgcatcccaccgtactacgacagcctgatcggcaaaatctgcgtacacggcaaaacgcgtgaacaggcaatggcgaaaatgcgcgtcgcactcgccgagctggcggtaaccggcatcaaaaccaatacgccgcttcaccgcgacctgttcgccgatgcgggtttccaaaaaggcggcgtcagcatccactatttggaacactggctggaagatcgcaaagccaaacaggacaaataa

SEQ ID NO: 55996 - DNA, 189 bp, Neisseria meningitidis; identical to SEQ ID NO: 42129

SEQ ID NO: 55997 - DNA, 585 bp, Neisseria meningitidis; identical to SEQ ID NO: 38668

SEQ ID NO: 55998 - DNA, 582 bp, Neisseria meningitidis
atggataatcaagaaatcaacaacggccgccgccgtttcctgacactcgcgacctgcggcgcgggcggagtggcagcattgggtgtggcaacgccgtttgtggccagttttttcccttcggaaaaagccaaggccgccggtgctgccgtcgaggtggatgtcagtaaaatcgaagcgggtcagttgctgaccgccgagtggcaaggcaaaccgatttgggtgctcaaccgtacagatcagcagcttaaagacctgaaaggcctgaacggcgaacttaccgatcccaattccgatgcggaacagcagccggagtatgctaaaaacgagacccgttcgattaagccgaacatccttgtcgccatcggtatctgcacccatttgggctgctcgcccaccttccgtcccgacattgcccctgccgatttgggtgcagactggaaaggcggcttcttctgcccctgccacggttcgaaattcgacttggccggccgcgtatataaaggtgttcctgccccgaccaacctggttgtcccgccatataaatacttgagcgacacaactatcttggtgggcgaagactaa

SEQ ID NO: 55999 - DNA, 1596 bp, Neisseria meningitidis
atgttccaagaaatcctcgaccaagtgcgccgccgccgcacgtttgccatcatctcccaccctgacgcaggtaaaaccacgctgactgaaaaactcttgctgttttcaggtgcgattcaaagcgcgggtacggtaaaaggcaagaaaaccggcaaattcgccacttccgactggatggacatcgagaagcagcgcggcatttccgtggcgtcaagcgtgatgcagttcgactacaaagaccacaccgtcaaccttttggacacgccgggacaccaagacttctccgaagacacctaccgcgttttaaccgccgtggacagcgccttgatggtcatcgacgcggcaaaaggcgtggaagcgcaaaccatcaaactcttgaacgtctgccgcctgcgcaatacgccgattgttacgttcatgaacaaatacgaccgcgaagtgcgcgattccctggaattgctggacgaagtggaaaacatcctgcaaatccgctgcgcgcccgtcacctggccaatcggcatgggcaaaaacttcaaaggcgtgtaccacatcctgaacgacgaaatctatctctttgaagcgggcggcgaacgcttgccgcacgagttcgacatcatcaaaggcatcgataatcccgaattggaacaacgctttccgttagaaatacagcagttgcgcgacgaaatcgaattggtacaggcggcttccaacgagttcaatctcgacgaatttctcgccggcgaactcacgcccgtgttcttcggttcggcgattaacaacttcggtattcaggaaatcctcaattcattgattgaatgggcgcctgcaccgaaaccgcgcgacgcgaccgtgcgcatggtcgagccggacgagccgaaattctccggatttatcttcaaaatccaagccaatatggatccgaaacaccgcgaccgcatcgccttcttgcgcgtctgctccggtaaattcgagcgcggcatgaagatgaaacacctgcgcatcaaccgcgaaatcgccgcctccagcgtggttacattcatgtcgcacgaccgcgagctggtggaagaagcctacgcaggcgacatcatcggcatcccgaaccacggcaacatccaaatcggcgacagcttctccgaaggcgaacaactggcgttcaccggcatcccattcttcgcgcccgaactgttccgcagcgtccgcatcaaaaacccgctgaaaatcaagcaactgcaaaaaggtttgcaacagcttggcgaagaaggcgcggtacaggtgttcaaaccgatgagcggcgcggatttgattttgggtgcggtcggcgtgttgcagtttgaagtcgtaacctcgcgcctcgccaacgaatacggcgtagaagccgtgttcgacagcgcatccatctggtcggcgcgctgggtatcgtgcgaagacaagaaaaagctggctgaatttgaaaaagccaacgcgggcaacctcgccatcgacgcgggcggcaacctcgcctacctcgcccccaaccgcgtgaatttggggttgacgcaagaacgttggccagacatcgtgttccacgaaacgcgcgaacattcggtcaaactttag

SEQ ID NO: 56000 - DNA, 1848 bp, Neisseria meningitidis
atgcacgacacccgtaccatgatgatcaaaccgaccgccctgctcctgccggctttatttttctttccgcacgcatacgcgcctgccgccgacctttccgaaaacaaggcggcgggtttcgcattgttcaaaaacaaaagccccgacaccgaatcagtcaaattaaaacccaaattccccgtccgcatcgacacgcaggacagtgaaatcaaagatatggtcgaagaacacctgccgctcatcacgcagcagcaggaagaagtattggacaaggaacagacaggcttcctcgccgaagaagcaccggacaacgttaaaacgatgctccgcagcaaaggttatttcagcagcaaagtcagcctgacggaaaaaggcggggcttatacggtgcacatcacaccggggccgcgcaccaaaatcaccaacgtcggcgtcaccatcctcggcgacatcctttcagacggcaacctcgccgaatactaccgcaacgcgctggaaaactggcagcagccggtaggcagcgatttcgatcaggacagttgggaaaacagcaaaacttccgtcctcggcgcggtaacgcgcaaagcctacccgcttgccaagctcggcaacacccgggcggccgtcaaccccgataccgccaccgccgatttgaacgtcgtcgtggacagcggccgccccatcgccttcggcgactttgaaatcaccggcacacagcgttaccccgaacaaatcgtctccggcctggcgcgcttccaaccgggcacgccctacgacctcgacctgctgctcgacttccaacaggcgctcgaacaaaacgggcattattccggcgcgtccgtacaagccgacttcgaccgcctccaaggcgaccgcgtccccgtcaaagtcagcgtaaccgaggtcaaacgccacaaactcgaaaccggcatccgcctcgattcggaatacggtttgggcggcaaaatcgcctacgactattacaacctcttcaacaaaggctatatcggttcggtcgtctgggatatggacaaatacgaaaccacgcttgccgccggcatcagccagccgcgcaactatcggggcaactactggacaagcaacgtctcctacaaccgttcgaccacccaaaacctcgaaaaacgcgccttctccggcggcatctggtatgtgcgcgaccgcgcgggcatcgatgccaggctgggggcggagtttctcgcagaaggccggaaaatccccggcgcggatgtcgatttgggcaacagccacgccacgatgctgaccgcctcttggaaacgccagctgctcaacaacgtgctgcatcccgaaaacggccattacctcgacggcaaaatcggtacgactttgggcacattcctgtcctccaccgcgctgatccgcacctctgcccgcgcaggttatttcttcacgcccgaaaacaaaaaactcggcacgttcatcatacgcggacaagcaggttacaccgttgcccgcgacaatgccgacgttccttcggggttgatgttccgcagcggcggcgcgtcttccgtgcgcggttacgaactcgacagcatcgggcttgccggcccgaacggatcggtcctgcccgaacgcgccctcttgacgggcagcctggaataccaactgccgtttacgcgcaccctttccggcgcggtattccacgatatgggcgatgccgccgccaatttcaaacgtatggagctgaaacacggttcgggactgggcgtgcgctggttcagcccgctcgcgccgttttccttcgacatcgcctacgggcacagcgataagaaaatccgctggcacatcagcttgggaacacgcttctaa

SEQ ID NO: 56001 - DNA, 843 bp, Neisseria meningitidis
atgcaaaaccacgttatcagcttagcttccaccaaagagcgcagggcgcacattgccgataccttcggcgcgcgcggcatcccgtttcagtttttcgacgcactgatgccgtctgaaaggctggaacaggcaatggcggaactcgtacccggtttgtcggcgcacccctatttgagcgaagtggaaaaagcctgctttatgagccacgccgtattgtggaaacaggcattggatgaaggtctgccctatgttgccgtatttgaggatgatgtcctgcttggcaaagacgcagaaaagttccttgccgaagatacttggttggaagagcgttttgataaggattctgcctttatcgttcgtttggaaacgatgtttgcgaaagttattgtcagaccggataaagtcctgaattatgagaaccggtcatttcctttgctggagagcgaacattgggggacggctggctatatcatttcgcgtgaggcgatgcggtttttcttggaaaggtttgccgttttgccggcagagtggattaaagcggtagattggatgatgtttacttatttctttgataaggaggggatgcctgtttatcaggttaatcccgccttatgtacccaagaattgcattatgccaagttcctcagtaaaaatagtatgttgggtagcgatttggaaaaagatagggaacaaggaagaagacaccgccgttcgttgaaggtgatgtttgacttgaagcgtgctttgggtaaattcggtagggaaaagaagaaaagaatggagcgtcaaaggcaggcggagcttgagaaagcttacggcaggcgggtcatatcgttcaaatag

SEQ ID NO: 56002 - DNA, 438 bp, Neisseria meningitidis; identical to SEQ ID NO: 43498

SEQ ID NO: 56003 - DNA, 279 bp, Neisseria meningitidis
atgtctcgaaacctgcttgtccgttggcttgccgtctgcctcatcccgttggcgacgcttgccgttttcgccgccaatccgcccgaagacaaactccagcatctgatcaacggcatcatccttgcctgcgaagcgacgtttttgtttaaattcgtccttttcgacaccatcaagcatcatttgaaacaagagtttgatttgaaacgtcaaactatgttgctgtttattccgattattttgctgattgtgtatttgttccactatttcggcgcgttttag

SEQ ID NO: 56004 - DNA, 177 bp, Neisseria meningitidis; identical to SEQ ID NO: 38352

SEQ ID NO: 56005 - DNA, 2664 bp, Neisseria meningitidis
atgtccacccaattacacgatgttgaccctatcgaaacccaagagtggctggacgcgttaagctccgtcctcgaatatgaaggcggcgaacgcgcgcaatacctcttggaaaacctggtcaaatactgccgcgacaagggcgtacgtatgccacacggcacgaccaccccgtatttgaataccgtttcggttgaaaacgaaaaaggcattccgggcgaccaaaacatcgaacaccgcatccgcgcattcgtgcgctggaacgccgccgccatcgtattgcgcgccggcaagaaagatttggaactgggtgggcacatcgcatctttccaatctgccgccaccatgtacgaagtcggtttcaaccacttttggaaagccaaaggcgaaggcgaagaaggcgatttggtcttcttccaaggtcacgtcgccccgggcatctatgcacgcgcattcgtcgagggccgtctgaccgaagaccagctgaacaacttccgccaagaagtggacggacacggtctgccttcctatccgcacccccacctcttgcccgacttttggcagttcccgaccgtatccatgggcttggggcccatcatggcgatttatcaggcgcgtttcctgaaatacttggaatcgcgtggtttggcaaaaaccaaaggccgtaaagtatggtgtttctgcggcgacggcgaaatggacgaacccgaatctcaaggtgcaatcgcactggctgcacgcgaaggcttggacaacctgattttcgtcatcaactgcaatctgcaacgcttggacggtccggtacgcggcaacggcaaaatcatccaagaattggaaggcaactttgccggcgccggctggaatgtcgtcaaagtcatttggggccgccgctgggaccgcctcttggcgaaagacaaagacggtatcctgcgccaacgtatggaagaatgtttggacggcgactaccaaacttacaaatccaaagacggcgcgtatgtgcgcgaacacttcttcaatacgcccgaactgaaagcattggttgccgatatgaccgatgagcaactctgggcattgaaccgcggcggccacgacccgcaaaaagtgtacaacgcctacgaccgcgcagcgaaccatgccgacggcaaacctaccgtcatcttggcgaaaaccattaaaggttacggtatgggcgcatccggcgaaggtcagaacgttgcccaccaagccaaaaaaatggacaaagcgtccctgaaacaattccgcgaccgctttgacattccggttaccgacgaacaaatcgaaagcggcgatctgccttacctgacttttgcccccgatacggaagaatacaaatacctgcacgcacgccgcgatgctttgggcggctacctgccgcaacgcaaaccgacgcaggaagtattggaagtgcccgagctgtcagcattcgacgcacaactcaaatccagcggtgaacgcgagttctcgaccacgatggcattcgtccgcatcctgtccactttgctgaaagacaaaaaaatcggcaaacgcgtcgtacctatcgttcccgacgaaagccgtactttcggcatggaaggtatgttccgccaatacggtatttggaatccgaaaggtcagcaatatacccctcaagacaaagaccaactgatgttctataaagaatccgttgacggtcaaatcttgcaagaaggtattaacgaaccgggcgcgatggccgactggattgcggctgcaaccagctacgccaacagcaacttcgccatgattccgttctacatttactattctatgttcggtttccaacgtatcggcgacttggcttgggcggcgggcgatatgcacgcgcgcggcttcctgctgggcggtactgccggccgtacgacgctgaacggcgaaggcctgcaacacgaagacggccacagccacatccaggccgacctgattccgaactgcgtatcttatgacccgactttccaatacgaagtcgccgtcatcgtacaagacggtctgcgccgtatgtatgccaataatgaagacgtgttctactacatcaccctgatgaacgagaactacacccatccggatatgcccgaaggtgcggaacaagacatcttgaaaggtatgtacctgctgaaagccggcggcaaaggcgacaagaaagtccaactgatgggttccggtacgattttgcaagaagtgattgccggtgccgaactgctgaaagccgacttcggcgtggaagcagacatttggtcttgcccatccttcaacctgctgcaccgcgacgctgtcgaggtagaacgcttcaaccgcctgcatccgctggaagccgaaaaagtacctttcgttacttccaaattgcaaggtcatgacggtccggttattgccgctaccgactatatccgcagctatgctgaccgtatccgcgcctacatcccgaacgactaccacgtcttgggtactgacggcttcggccgctccgacagccgcgccaacctgcgccgcttctttgaagtggatcgctacaacgttgccgtggccgcattggccgcattggcggaacaaggcaaagtcagcaaagaaaccgttcaacaagccattgagaaatacggcatcaaagccgattcagctcctagctggaaacgctga

SEQ ID NO: 56006 - DNA, 423 bp, Neisseria meningitidis; identical to SEQ ID NO: 36840

SEQ ID NO: 56007 - DNA, 1056 bp, Neisseria meningitidis
atgaaaacctacgcaccggcactctataccgcagccctgctcaccgcctgcagccccgcagccgattcaaaccatccgtccggacaaaatgccccggccaataccgaatccgacggaaaaaacattaccctgctcaacgcctcatacgatgtggcacgggatttttacaaagaatacaaccccttatttatcaaaacataccaatccgaacaccccggcacatccgtcagcatccaacagtcccacggcggctccagcaaacaggcattatccgtagccaacggccttcaagccgatgtcgtaaccatgaaccaatcctccgacatcgacctgctcgaaaaaaaaggactggtagaaaaaggctggcaacaagccctccccgaccacgccgcgccctacaccagcactatggttttccttgtccgaaaaaacaaccccaaacagatccgcgattggaacgaccttgccaaagacggcgttaacatcgtcatcgccaatcccaaaacctcgggcaacggacgctacgccttcctcggcgcatacggttacggtctgaaagccaccaacggcaacgaacaggaagcccaaaaactcgtcgcatccatcctcaaaaacacccccgtttttgaaaacggcggacgcgccgccaccaccaccttcacacaacgcaacatcggcgacgtactcatcacttttgaaaacgaagccaactacgtcagcaaaaaactgacccaaggacagtttgaaatcgtctatccgagctacaccatttccgccgaaagccccgtcgccgtcgtcaacagcgtcgtcgcgaaaaaaggcacgcaaaaaaccgcccgcgcctatctcgaatacctttggagcgaaccggcgcaagaactcgccgcctcactctacctgcgcccccgcaaccccgaagtattggcaagacacaaagccgacttcccagacttagacaccttctctcccgaaaaaaaattcggcggatgggacaacatcatgaaaacctacttcgccgacggcggcatattcgaccgcctgaccgcacaaaaatga

SEQ ID NO: 56008 - DNA, 3921 bp, Neisseria meningitidis
ttgaactacattatcgccttttcaaactcgcctgaaaccgaattttcagacggcattcaaataaaaactgccaagcacggacacaccatgaccacgactactgcccctcagcgtattcgagaaattccctataactatacttcttataccgaccgcgaaatcgtcatccgcctgctgggcgacgaagcgtggcagattctgcaagacttgcgcggacagcgtaaaaccggacgttcggcacggatgctgtttgaagtgttgggcgatatttgggtagttgtgcgcaatccatatctggtcgatgacttgttggagcacccgaaacgccgcgccgcgctggtgcgggaaatgcgccaccgtttgaacgaaatccgcaaacgccgcgacgataatcggcaagtggatgtattggttgcggcagcggaaaaggcagtcgagcgttttgatagcagttttgatgaaaccagccaaaaacgccatcaaattttggaacgcttaagcaaaattaccaagccgcacaatattatgttcgacgggctggcgcgggtaacgcatgttaccgatgcaaccgactggcgcgtcgaatatccgtttgtcgtcgtcaatcccgacacggaggcggaagtcgcgcctttggtgcgcgccttaattgagttggacttggttattatcccgcgcggcggcggtacgggttataccggcggcgcgattcctttggacgcaatgagcgcggtcatcaatacggaaaagctggacaaacatcgcggcgtggaatttgtcgaactggcgggcttggatggcagacatccgattatccggtgcggcgcgggcgtggttacgcggcgagtggaagaaaccgcgcatcaggcaggtttggtgttcgccgtcgatccgacttctgccgacgcgtcctgcgtgggcggtaatgtagcgatgaacgcgggcggtaaaaaagccgtgctgtgggggacggcgttggacaacctcgcctactggcaaatggtcaaccctcaaggcgaatggctgcgtatcgaacgcgtgcgccacaatttcggcaaaatccacgacgaagaaaccgcaatatttgacgttcacacactggattcagacggcctcaatgtcgtcaaaaccgaacgcttggaaattcccggtcacaaattccgcaaagtcggtttgggcaaagacgttaccgacaaattcttgagcggcctgcccggcgtgcagaaagaaggcacggacggcatcatcaccagcgttgccttcgtgttgcataaaatgccgaaatacacgcgcaccgtgtgtatggagtttttcggcacggttgccaccgccacgccatctattgtcgaaatccgcgactttttgcttgcccatgaaagcgtacggctggcaggtttggaacatttggactggcgttatgtccgcgccgtcggctacgccaccaaagcggcgggcaagggacggccgaaaatggttttgctggcggacgtggtttcagacgacgaagccgccgtagaggcagccgccgaacacatctgcgaacttgcccgcgcccgcgacggcgaaggctttatcgccatatctcccgaagcccgcaaaaccttctggctcgaccgcagccgcaccgccgccatcgccaaacacaccaacgcctttaaaatcaacgaagacgtggtcatcccactcgaaaggctcggcgagtattcagacggcatcgaacgcatcaacattgagctttccattcaaaacaaactcaaactctgtgccgccttggagcaatatctgtccggcaaactccccatcgacaaaatgggaaccgacctgccgaccgccgaactgttgggcgaacgcggcaaacacgccctggcccacgtttccgccgtcaaagcgcgttgggactggttgctcgccaatctcgacacgccgcttgccgactacaaggcccgctacggcgcagccgtccacgccgcgcccgaagccaaagacaatgaaagctgctttatcgcattccgcgatttccgcctgcgcgtgtctgtcaaagcagacgtaatgaagccgctttctgaaatcttcagcggcaaaaccgacaccaaaatcatcgaaggcttgggcaaaatccacgccaaaaccgtgcgcggcagagtctttgtcgccctgcatatgcacgccggcgacggcaatgtccacaccaatatccccgtcaattcagacgatgccgaaatgcttcagacggcataccgttctgtggaacgcattatgaaaatcgcccgttcgcttaacggcgtgatttccggcgaacacggcatcggcattaccaagctcgaatttttaagcgacgaagaaatgcagccgttttgggactacaaaaaccaagtcgatcccaaacacaccttcaaccgccacaaactgatgaaaggctcggacctgcgcaacgcctatacgccgtctttcgagcttttgggcgcggaatcgctgattatggaaaaatcagacctcggcacgattgccgattccgtcaaagactgcctgcgctgcggcaaatgcaaacccgtctgctccacccacgttccgcgtgccaacctgctgtacagcccgcgcaacaaaatcctcggcgtggggctcttgaccgaagcctttttatacgaagaacaaacccgtcgcggcgtttccgtcaaacattttgaagaactggcagacatcggcgaccactgcaccgtgtgccaccgctgcgtcaaaccctgccccgtcaatatcgacttcggcgacgtaaccgtagccgtccgcaactaccttgccgattccggccacaaacgctttgcgccggcagcttcaatgggtatggcattcctaaacgcgaccggcccgaaaaccattaaaaccctacgtgccgcgatgatacaaaccggcttccccgcgcagaatttcgcctacaaaatcggcaaactgctgcccgtcggcacgaaaaagcaaaaagccgaacccaaggcaaccgtcggcaaagccccgattaaagaacaaattatccacttcatcaaccgtccgctgcccaaaaacgtgcctgccaaaacaccgcgctccttattgggcatcgaagacgacaaaagcatccccatcatccgcaatccggcttctccggaagatgccgaagccgtgttttactttcccggctgtggttcggaacgcctgttcagccaaatcggactcgccgtccaagccatgctctggcacgtcggcgtgcaaaccgtcctgccgcccggctatatgtgttgcggctatccgcaggacgccggcggcaataaggcaaaagccgaagaaatgagcaccaacaaccgcgtggctttccgccgtatggcaaacaccctcaactacctcgacatcaaaaccgtcgtcgtcagttgcggtacctgctacgaccagctcgaaaaataccgcttcgaagaaatcttccccggctgccgcatcatcgacatccacgaatacctgctcgaaaaaggcgtgaaactgaacggcgtgaaaggtcagcaatacctctaccacgacccctgccacacgcccatcaaaaccatgaacgccacccaaatggccagcagcctgatggggcagaaagtcgtcttaagcgaccgctgctgcggcgaatccggcatgtttgccgtcaaacgccccgacatcgccacccaagtcaaattccgcaaacaagaggaaattgagaaaaacctcaaagagctgccgcagggcgaacccgtcaaaatgctgacctcctgtccggcgtgtctgcaaggcttgagccgctacgccgacgacaacaatatgcccaccgactacatcgttatcgaaatggcgaaacacatcctcggcgaaaactggctagacgagtttgtgaaaaaagccaataacggcggcgtggaaaaagtattgctgtaa

SEQ ID NO: 56009 - DNA, 1437 bp, Neisseria meningitidis
atgccgcttctgtctgtcgagttcgcactgttctttctcgccttcctgccgatttactggggcttggcgaaatacccgtccgtccaaaacctgctgcttttggctgccggtatgggctggctctaccatatcggccccgtatttgcggcaatcgtcgtcctttattcctcctgcgtgtaccttttgggcgaactgctccgttccgatcgcgaaaatacgcgccgcttttggctggggtgcggcattgccgtctcgctgaccgtcttgggctttttcaaatatttcgactttttccgcccgctgattgcacaatatgccggacaaggcggcgcaatcgacatcctgatgccgctggggctttcgtattacaccttccagtcaatcgcctatttggtttactgcttccgtgcgccgcacgccgcgcgtttcgagtggcacgaactgctgctgcacctgagttttttccccaccgttacctccggcccgattatccgcgccgccgcattcaaaagcgcggacggcgagcaggcgggcgcattggcgcaaatccgtacccaccaaccacgctcacccgtccgccccgcactcgccgtttccctgattctgctgggtattgccaaaaaatggtggctggcggggatgctcgcagaaaactgggtatcgcccgtatttgaaaatcccgcccaattcgacggctggggcgtattggcgggcgtgtacggctataccttccaactctttttagacttttccggatattccgacttggttatcggaatggcaatgctgctgggcttccggctgcccaaaaacttctccgcaccgcttcgtgccgcgaatatccgcgcattttgggacaaatggcacatcagcctttccacctggatacgcgactacatctacatccccttgggcggcagcaaaaaaggctttttgcggacacagttcaacctgatggcggcaatggtgctctcaggcatctggcacggctacggctggaacttcctcatttggggtgcactacacggcacggcgctggtgctgctcaacacgggcgaccgctatttcggacgcaacgcactatgccgtctgaaataccttgcgccgctctcgtggctcatcaccttccattttgtctgcctgaccttcgtcgtcttcaataccgcaaaccccgacgatgcaggcgcagttttcaatgccctctttgccaatgccaacggctggaatgcgccgcaacaggcggatatgctgctgcttgcctcgtttgcatccgtgatgctgctctacccttacctgcaacgcgctttcgacggcgcggtcaaaggtttggaaaaaatcccgatgtggctgtggtttatccccgtttccgccgtcctgctgctgattatcgtattggccccctcggggatacccggctttatttatgccaatttttaa

SEQ ID NO: 56010 - DNA, 1041 bp, Neisseria meningitidis
atgcaacccatccgataccgaaccgaccttaccccctacaacactttcggcctgcgcgcccaagcccgagcctttattgcgcttgaacacgccgacgggttgcgcgacatcgtccgactgcccgagttcgaccgcgatactgttttatggctgggcggcggcagcaatatcgttttgatgcaggattacgccggactggtcgtccatatggaaaacaaaggcatacgcgagattgcgcgttcagacggcatggttctgattgaagcgcaggcgggcgaaatctggcacgattttgtcctgcacaccgtcgcgctgggtttgagcggtttggaaaacctgagcctgattccgggtacggtcggcgcgtcgcccgtgcagaacatcggcgcatacggcgtagaggcgaaagatgtgattcacagcgtgcgctgcttcgatttggatacggaaacctttgtaaccctttccaatgccgactgccgcttcgcctaccgcgaaagcctgttcaagcaggaaggcaaagggcgttatgtgattgtttcggtcgtatttgcattaaaaacgcattttgtgccgaacttgggctacggcgatttggcggcgaaggttgccgaattgagtgcaggcagggaggcgacggcaaaagacgtttccgatgcagtgtgtgcaatccgcaacagtaaacttcctaatcctaacgtgcttggcaatgtcggcagtttctttaaaaaccccgtcgtcggcgcgggaaaagccgccgccctgttgcagcagcatcccgatatgccgcattatccacagccggacggttcggtcaaactcgccgccggctggctgatcgaccaatgtcgtctgaaaggctttcaaatcggcggcgcggcggtacatgacaggcaggcattggttttggtaaacaaaaacaacgcctcggcaaacgatgtccggcagttggcgcaacacatcaaatttacagtatttgctcggtttcaggtagaattgcacgccgaacccaattggctgcctgcttcgttcagcctgtaa

SEQ ID NO: 56011 - DNA, 696 bp, Neisseria meningitidis
atgaaagcgatgatactggcggcaggacgcggcgagcgtatgcgccctttgaccgataccactccgaagccgctgcttgatgtggcgggtaagcctctaatcggttggcacctatgccgtctgaagcaggcggggtttaccgaaatcgtcatcaaccacgcttggctgggtcggcagatagaagatgctttgggcgacggctcggcttatggcgtgaacatcgcctattcgcccgaacccgcaggcggcttggaaacggcaggcggcatcgcacgggcattgccgctgttgggcgatgccccgtttttggtggtcaacggcgacgtgttgaccgacatcgattttaccgccgcgtttcaggcggcatcgtccctgcccgagcacatttccgcccatctgtggctggtggaaaatcccccgcaccatcctgacggcgatttttccctgctgcccgacggcagcgtgcggccggaagtaaatggcggcaacggattgacatttagcggcgtgggtatttaccgtcctgaaatgtttgacggaatcgaagcgggcagtgtggcgaaactcgcgcccgtattgcggaacgaaatgcggcaaaaccgcgtgagcggtcagaagcatacgggcttgtggctggatgtcggcacggtatgccgtctgaaagaggctcaagcccttgcaggggcttggaagtga

SEQ ID NO: 56012 - DNA, 2016 bp, Neisseria meningitidis
atgatgaaactcaatccccaacagctcgaagccgtccgctacctcggcggcccactgctcgtccttgccggtgcaggcagcggcaaaaccggcgtgattactcaaaaaattaagcatttgattgtcaatgtcggctacctgccgcataccgttgccgcaattacctttaccaacaaagccgctgcggaaatgcaggagcgcgttgccaaaatgctgcccaaaccgcaaacgcgcgggctgacgatttgcacgttccactctttgggcatgaagattctgcgcgaagaggcgaaccatatcggttacaaaaaaaacttctccattctcgattctaccgacagcgcgaaaatcatcggcgaactcttaggcggtacgggcaaagaagccgtattcaaggcgcagcaccagatttccttgtggaaaaacgatttaaaaacgcctgaagatgtcgttcagacggcctctaatgcgtgggaacaacaaaccgcacgcgtgtatgcgagctatcaggaaaccttacaaagctatcaggcagtggacttcgacgacttaatccgcctgcctgccgtgctgttgcagcaaaacagcgaggtgcgcaacaaatggcagcggcggctgcgttatctgctggttgacgaatgccaagatacgaatacctgccaatttacgttgatgaaacttctgaccggcgcggaaggtatgtttaccgccgtcggcgacgacgaccagtccatctacgcatggcgcggcgcaaacatggaaaatctgcgcaaaatgcaggaaaactatccacagatgaaggtcatcaaactggagcaaaactaccgctccaccgcgcggattctcaaaatcgccaacaaagtcatcgaaaacaaccccaagctgtttaccaaaaaactttggtcgcaattgggcgaaggcgatcccgtcaaagtcgttgcctgccaaaacgagcagcacgaagccgactgggtcgtcagccaaatcgtcaaacaaaaactcatcggcggcgacaaaacccaatacgccgatttcgccgtgttataccgcggaaagcatcaggcgaggattttcgaggaagcattgcgcggcgcgcgcatcccctaccgtctctccggcggacaaagctttttcgataaagccgaaatcaaagacgtgttgtcttatgtgcggctgcttgccaaccccaacgacgatcccgcctttctgcgtgccgttaccacgcccaaacgcggcatcggcgatgtcacgctgggcaagctcaacacttacgcgcacgaacacgaatgcagcctgtatgaagccgcacaaaacgaagaagcccttgccacgctgaacaataccaaccgccaacacctgcaagcctttatggatatgttcggcagctaccgcgccaaagcggaaaccggcgaagcaggcgagttcatcaacaacctgcttaaagaaatcgactacgaaaaccatctgcttgccagtgaagaaagcaaagcaggcgaaatcaaatggcgcaacgtcggcgatttggtatcatggtttgcgcgaaaaggcggggaagacggcaaaaacgtcatcgaactcgcccaaaccgtcgccttgatgacgcttttggaaggaaaagacgaagaagaaaccgatgctgtctcgctatccacgctacacgccgccaaaggtttggagtatccgtatgttttccttgtcggttgcgaagaaggtgttttgccgcacaacgacagcatcgaagagggcaacgtcgaagaagaacgccgcctgatgtacgtcggcatcacccgcgccaaacgccagcttacgctgacccactgcgtcaaacgcaaaaaacaaggcatatggcagttccccgaacccagccgattcatagacgaaatgccgcaggaagatttgaaaatcctggggcgcaaaggcggcgaaccgattgtcagcaaagaagaaggcagacgcaaccttgccgatataatcggaaggctcgacagcatgaaaaaaggcggtccggaggattaa

SEQ ID NO: 56013 - DNA, 1593 bp, Neisseria meningitidis; identical to SEQ ID NO: 42823

SEQ ID NO: 56014 - DNA, 2385 bp, Neisseria meningitidis
atggccgacaactacgtaatttggtttgaaaacctgcgtatgacagatgttgaacgcgtgggcggtaaaaacgcctcgctgggcgaaatgatcagtcagctgaccgaaaaaggcgttcgcgtccccggcggctttgccaccacagccgaagcctaccgcgcattcctcgcacacaacggtctgagcgaacgcatttccgccgcactggcaaaattggatgtcgaagacgttgccgaactggcacgcgtcggcaaagaaatccgccaatggattttggacacacccttccccgaacagctcgatgccgaaatcgaagcggcatggaacaaaatggttgccgatgccggcggcgcggacatttccgttgccgtacgctcttccgcaaccgccgaagacctgcccgacgcatcatttgccggccaacaggaaaccttcttgaacatcaacggattggaaaacgttaaagaagcgatgcaccatgtattcgcctccctgtacaacgaccgcgccatttcctaccgtgtccacaaaggcttcgaacacgatatcgtcgccctttccgccggcgttcaacgcatggtgcgttccgacagcggcgcatcaggtgtgatgttcaccctcgacaccgaatccggctacgatcaagtcgtctttgttacctcctcttacggtctgggcgaaaacgtcgtacaaggtgcggtcaacccggacgaattttatgtgttcaaacccacgctcaaagcgggcaagcccgccatcctgcgtaaaaccatgggttcgaaacacatcaaaatgatttttaccgacaaagccgaagccggcaaatcggtaaccaacgtcgatgtccccgaagaagaccgcaaccgcttctccattaccgacgaagaaatcaccgagttggcgcattacgcactgaccatcgaaaaacactacggccgcccgatggacatcgagtggggacgcgacggcttggacggcaaactctacatcctgcaagcccgccccgaaaccgtcaaatcccaggaagaaggcagccgcaacctgcgccgcttcgccatcaacggcgataaaaccgtattatgcgaaggccgtgccatcggtcagaaagtcggtcagggcaaggtacgcctgattaaagatgcttccgagatggattccgtcgaagccggcgacgtactcgttaccgatatgaccgacccggattgggaaccggtgatgaaacgtgcttccgccatcgtgaccaaccgcggcggccgtacctgccacgccgccatcatcgcgcgcgaactgggtattcctgccgtcgtcggctgcggcaatgcgaccgaactcttggaaaacggtcaggaagtgaccgtatcctgcgccgaaggcgataccggcttcatctatgccggcctgttggacgtacagatcaccgatgtcgccttggacaatatgcccaaagcacccgtcaaagtcatgatgaacgtcggcaaccccgaactcgcattcagcttcgccaacctgcccagcgaaggcatcggcttggcgcgtatggaatttatcatcaaccgccaaatcggtatccacccgaaagccttgttggaatttgacaaacaagacgacgaattaaaagcggaaattacccgccgtatcgccggttacgcgtcccctgtcgacttctacgtcgataaaatcgccgaaggcgtggcgacattggccgcatcggtttatccgcgtaaaaccatcgtccgtatgtccgacttcaaatccaacgaatacgccaacctggtcggcggcaacgtatacgaaccgcatgaagaaaacccgatgttgggcttccggggcgcggcgcgttatgtcgccgacaacttcaaagactgtttcgccttggaatgcaaagccttgaaacgcgtccgcgatgaaatgggtctgaccaacgttgaaatcatgattccgttcgtccgcactttgggcgaagccgaagccgttgtcaaagccctgaaagaaaacggcttggaacgcggcaaaaacggcctgcgcctgattatgatgtgcgagctgccgagcaacgcggtattggcggaacaattcctgcaatacttcgacggcttctccatcggctcgaacgacatgacccaactgaccctcggtctcgaccgcgacagcggcttggtatccgaatcgtttgacgaacgcaaccctgccgtcaaagtgatgctgcaccttgccatctccgcctgccgcaagcagaacaaatatgtcggcatctgcggtcaaggcccgtccgaccatccggacttcgccaaatggctggttgaggaaggtatcgaaagcgtttccctgaacccggataccgtcatcgaaacttggctgtatttggcgaatgaattgaacaaataa

SEQ ID NO: 56015 - DNA, 1071 bp, Neisseria meningitidis
atgaccaaacatatcgccatcctccgaggtgacggcatcggtcccgaaatcgtcgccgaaaccgtccgcgtactcgacaaactcatcgcccaaggtttggatgccggctacgaatacgccccattgggcggcgaagcctatgacgaatacggtcatccttatcccgaatttacgcaaaacctctgccgcaaagccgatgccgtcctgcttggtgcagtcggttctcctcaatacgacaacctcgaccgtccgttgcgccctgagcgcggcctgttggcaatccgtaaggatttgaacctgtttgccaatttgcgtcctgctgttttatatcccgaattagccaacgcctccacgctgaagcctgaaatcgttgccggtttggatattttgattgtgcgcgaactcaccggcgacatctatttcggcgaaccgcgcggcatccgcgttctggaaaacggcgaacgcgaaggctacaacaccatgaaatacagcgaaagcgaaatccgccgtattgcccatgttgccttccaatccgcccaaaaacgcagcaaaaaagtctgttccgtaggcaaagccaacgttttggaaaccaccgaattgtggcgcgaaatctttgaagaaatcggcaaagagtaccctgatgtcgagctttcccatatgtacgtcgacaacgccgccatgcagctcgtgcgtgcgcccaaacaattcgacgtcattgccaccggcaacatcttcggcgacattctctccgacgaagcctccatgctgaccggctccatcggtatgctgccttccgcctcgctggacgaaaacggcaaaggcctgtacgaaccgtctcacggctccgcccccgacatcgccggacaaaacaaagccaacccgctggccaccatcctctcgctcgcaatgttgctgcgttacagcctgaacgacgaagcgcgcgcgcaacaagttgaaaacgccgtccaaaaagtgctgcaacaaggcttgcgtaccagcgacatttacgaagaaggcacaaaactcgtttcctgctccgaaatgggcgatgcggtactcgccgccttgtaa

SEQ ID NO: 56016 - DNA, 1314 bp, Neisseria meningitidis
atgctgacgtttatcggactgctgattatcggggtcatcgtatggttgctgctgacggaaaaagtgtcgcccatcatcgcattaatcttggtgccgctgtttggggcgttgctggcggggtttgatgtatcccaattaaaagaattttattcgggcggcaccaaatcggtgatgcagattgtgattatgtttatgttttccattttgttttttggaatcatgaacgatgtggggctgttccgtccgatgataggcggtttgattaagctgactcggggtaatatcgtggcagtgagtgtggggacggtcttggtgtcggtggtggcgcagttggacggggcgggtgcgacgacgtttttattggtcgtccccgcccttttgccgctttacaagcgtctgcatatgaatccttacctgctgtttttgctgctgacttccagtgcgggattgattaaccttctgccgtggggcgggccgactgggcgggttgcaagcgtgttgggcgcagatgtgggcgaattgtataaacctttgttgacggtgcaaattatcggtgtagtgtttatccttgcgctgtccctgcttttgggtgtgcgtgaaaaaaggcggattgtccgggagttgggcgcgttgcccgccgtggcggatttgataaagccggtgcctttgtcggaagaagaacaaaaattggcgcgtccgaaactgttttggtggaatgtcctgctgtttttggcggcgatgagcctgcttttttcgggcatcttcccgccgggttatgtatttatgctggctgcaacggcggcgttgcttttgaattaccgcagcccgcaggaacagatggagcggatttatgcccacgccggcggcgcggtgatgatggcgtccattattttggcggcaggtacgtttttggggattttgaagggtgcggggatgttggacgcgatttccaaagacattgtgcatatcctgccagacgcgctgctgccttatctgcatattgccatcggtgtgttgggcattccgcttgagttggttttgagtacggacgcttattatttcggactgtttccgattgtggagcagattacctcgcaggcgggcgtggcgcccgaagcagcaggttatgcgatgttgatcggcagtatcgtcggcacttttgttacgccgctttcgccggctttgtggatgggcttgggtttggcgaaattgtcgatgggcaaacacatccgttattcgtttttttgggcgtggggtttgtcgctggcgatattggccagttcgatagcggcaggaatcgtgcctctgccgtaa

SEQ ID NO: 56017 - DNA, 1398 bp, Neisseria meningitidis
atgagccaaggcaaaatcgtacaaattatcggtgcggttgttgacgtggaatttccacgcgacatgattccgcgcgtttacgacgctttgaaattagacgaaaacggtctgactttggaagtccaacagcttttgggcgacggcgtagtccgtaccattgcgatgggcagctcggacggtttgaaacgcggcatgactgtgaacaataccggtgcgcccattactgtgccggtaggtaaaggtacgttgggacgcattgtcgatgtattgggaacgcctgttgacgaagcaggtccgatcgataccgacaagagctgtgccatccaccaagccgcccctaagtttgacgaactgtcttccacaaccgaattgctcgaaacgggcattaaagtgattgacttgctgtgtccgtttgccaaaggcggtaaagtaggtctgttcggcggtgccggtgtgggtaaaaccgtgaacatgatggaattgatcaacaacatcgccaaagcgcacagcggcttgtccgtgttcgcaggcgtgggtgagcgtacccgcgaaggtaacgacttctaccacgagatgaaagattccaacgtattggataaagtggcaatggtttacggtcagatgaacgaacctccgggcaaccgtttgcgcgtcgcattgaccggtttgaccatggcggaatacttccgtgacgaaaaagacgaaaacggcaaaggccgcgacgtattgttcttcgtggacaacatctaccgttacactctagctggtaccgaagtatccgcattgttgggccgtatgccgtctgcagtgggctaccaaccgacattggcagaagaaatgggtcgtttgcaggagcgtattacctctacccaaaccggttctattacttctatccaagccgtatatgtacctgcggacgacttgaccgacccgtctccggcaacaacgttcgcccacttggacgcaaccgtcgtattgagccgcgatattgcctctttgggtatttacccggcagtcgatccgcttgattccacttcgcgccaactggatccgatggtcttgggtcaagagcactacgacgtggcgcgcggcgtacagtccaccctgcagaaatacaaagaattgcgcgacatcatcgccatcttgggtatggacgaattgtctgacgaagacaaactgaccgtaatgcgtgcgcgtaaaatccaacgcttcctgtcccaaccgttccacgttgccgaagtgtttacgggttctccgggtaaatatgtcgccctgcgcgataccattgccggcttcaaagccatcttgaacggcgaatacgatcatctgcccgagcaggcattctatatggtcggcagcattgaagaagcggttgagaaagcgaaaaccttaaactga

SEQ ID NO: 56018 - DNA, 1503 bp, Neisseria meningitidis
atggcaaaagtactcatcgtacccgtatctgccggactggacgcctccgccgccgcacaagcctttgcaaaagcactggacgcacaaattttccaagccgttgacgcaaccgccgaaaccctgctcgcgcaaggcaaaagcgacgactggttcgacgcactggtcggcaaagttgccgcactcgatgccgccaacctcgtcatcgaaggcatcgcgcccgatgccgacaaaatctacctcgcaggcaaaaacgtcgaactggcattgtcccttgacgcggcagccgtcttcgccgtccgttccgacaacgccgatgccgacgaactggcaaatcggctgaaccttgccaaacagttcttcgccgccgcgccgggcgtattggaaggttttgtcgtggacggcgcggcagcctccgttgccgaagcggcagccgaaaaaaccggcctgaccttcttcggttcgagcgacgcgctgaaagacgtatccgtattggcaggccgcgaagcaaaacgcctgtcgccggcgcaattccgctacaacctgatcgacttcgcccgccaagccgacaaacgcatcgtcctgcctgagggcgcagaaccccgcaccgtccaagccgccgccatctgccacgaaaaaggcattgcccgctgcgtcctgcttgccaaacgcgaagaagtcgaagccgttgccaaagaacgcggcatcagcctgcccgactctttggaaatcatcgatcccgcctcattggtcgaacaatacgtcgagccgatgtgcgaactgcgcaaatccaaaggcctgacacccgaagacgcgcgcaagcaactgcaagacaccgtggtactcggtacgatgatgatggcgcaaaatgatgtggacggtttggtatccggtgcggttcacaccaccgccaacaccatccgccccgctttgcaactgattaaaaccgcaccgggcgcaagcctcgtgtccagcgtattctttatgctgctgcccaaccaagtcctcgtcttcggcgactgcgcggttaatccgaacccgaccgcgcaacagcttgccgacatcgccatccagtctgccgattccgcaaaagccttcggcatcgacccgaaagtggcgatgatttcctactccaccgtcaactccggcagcggccccgatgtcgataccgtcatcgaagcaaccaaacttgcccgggaaaaacgccccgacctcgccatcgacggcccgctgcaatatgatgcggcaaccgtgccgggcgtgggcaaatccaaagctccgggcagcccggtggcaggacaggcaaccgttttggtcttccccgacctgaacaccggcaactgcacctataaagccgtccaacgcagtgccaacgtcttaagcgtcggcccgctgctgcaaggcctgcgcaaaccggtcaacgacctgtcgcgcggcgcgctggtggaagacatcgtgttcaccatcgccctaactgccgttcaggcaaaacaaatggaaggctga

SEQ ID NO: 56019 - DNA, 774 bp, Neisseria meningitidis; identical to SEQ ID NO: 40828

SEQ ID NO: 56020 - DNA, 324 bp, Neisseria meningitidis
atgataattgacgaaaaatctacttcagatgtactgaaacaatatcaagaactagggtttgatttgacaaaatcgatgataatagagttttttatagagggttctcaaaaaaatctgcaatcaatagaaagccaactcatttcttatcggcaagattttcaaatcagtattgaacaagatgaattcggagaaatgtggacttgctattgttccgtcaatatcgtcccttcccttgaaaacattttagctattgaaactacgttatttgatattgcacaaaaaaatgattgtaattatgaaggttttggttcgtatgggaactaa

SEQ ID NO: 56021 - DNA, 1152 bp, Neisseria meningitidis; identical to SEQ ID NO: 46888

SEQ ID NO: 56022 - DNA, 804 bp, Neisseria meningitidis
  misc_feature 4, 5, 6, 7, 8: 'n' is a, c, g or t
gtgnnnnncgccgtattcaggcgttataccgatttaatcgaacccttgtcgctggacgaagcctatcttgacgttacccgtaatttcaaaaacatcccttacgccagtgaagttgccaaagaaatccgtgccgccatttttgcggaaacaggtttgactgcatccgcaggcatcgcgccgaacaaatttctggcgaaaatcgcgtcggactggcgcaagccgaacgggcagtttgtgttgccgccgcacaaagtcatggcatttttggaaaccctgcctttgggcaaaatccccggcgtgggcaaggtaacgctgaaaaaaatgcagtcgctgggtatgcggacggcgggcgacttgcgccgtttcgagcgcggcgaactcttaaaccatttcggacgctacggataccgcctctatgatttggtgcgcggtacggacgaacgccccgtcaaagccgaacgcgaacgcctccaaatctccacagaaattaccctgcccgaagacctgccgctcgagcaggctgccggacacctcccccatcttgccgaagacttgtggcggcaaatcacgcgcaaaaacgtcgaagcccaaagcgtaacgctcaagctgaagacctacgatttccgcatcatcacgcgcacactgacttattcctccgtattgcccgactgcgcagctctgctgcaggctgcgcaaatgttgatggcgcgcgtcccgccgcagacggaagacgcgttccgccttatcggtatcggcgtggggcatcttgtgccgaaaaaccagcagcaggatttgtgggcgtaa

SEQ ID NO: 56023 - DNA, 1266 bp, Neisseria meningitidis
atgttcagcttcttccgtcgcaagaaaaaacaggaaacgccggctcccgaggaggctcaagttcaggaaactgcagcaaaagcagaatccgaagttactcaaatagttgaaaatattaaagaagaagtcgaatctttaacggaaagcgtcaaagggcaggtcgaatcggctgttgaaaccgtcagcggtgcggttgaacaagtaaaggaagccgttgccgagatgctgtctgaagcagaggaagcggcggaaaaagcagcggaacaagtcgaagcggcaaaagaagccattgccgaaaccgtcggcgaggctgtcgggcaagttcaagaagccgttgcgacaactgaagaacacaagctcggttgggcggcgcgtttgaaacaaggcctgaccaaatcgcgcgacaaaatggcgaaatcgctggcgggcgtgttcggcggcggacaaatcgacgaagatttgtacgaagagctggaaaccgtgctaattaccagcgacatgggcatggaagccaccgaatacctgatgaaagacgtgcgcgaccgcgtcagcctcaaagggctgaaagacggcaacgaattgcgcggcgcgttgaaagaagccttgtacgacctgattaagcctctggaaaaaccattggtcttgcccgaaaccaaagagccgtttgtcatcatgcttgccggcatcaacggcgcgggcaaaaccacgtctatcggcaaactcgccaaatatttccaagcgcagggcaaatccgtattgctggcggcaggcgacactttccgcgccgccgcccgtgagcagcttcaggcatggggcgaacgcaacaacgttaccgtgatttcgcaaaccacgggcgattccgccgccgtgtgcttcgatgccgtccaagccgccaaagcgcgcggcatcgacattgtgctggccgacaccgccggccgcctgcccacgcagcttcatttgatggaagaaatcaaaaaagtgaaacgcgtgctgcaaaaagccatgcccgacgcgccacacgaaatcatcgtcgtgcttgatgccaacatcgggcaaaacgccgtcaaccaagtcaaagcctttgacgacgcattagggctgaccggtttaatcgtgaccaaactcgacggcacggcaaaaggcggcatcctcgccgcgcttgcctccgaccgccccgtccccgtccgctatatcggcgtgggcgaaggcatagacgacctgcgcccgtttgacgcgcgcgcgtttgtggacgcactgctggattga

SEQ ID NO: 56024 - DNA, 1893 bp, Neisseria meningitidis
atgcggttctcaaggtttgagcccaaaggtcgtctgaaacaacaaatacggtttcagacgacctttctttcaacaagccaccacggcaatcagacaaaagcagcacatcgccacatccatgtcggcagtacggccggcacaaccaccatccgcagcggcggggataccaccctcaaaggtgcgcagctcatcggcaaaggcatacaggcagatacgcgcaacctgcatatagaaagtgttcaagatactgaaacctatcaaagcaaacaacaaaacgccagtgcacaagtgaccgtaggttatggcttcagtgccagtggcgattacagccaaagcaaaatccgagccgaccatgcttcggtaaccgagcaaagcggtatttatgccggagaagacggctatcaaatcaaggtcggaaaccatacagacctcaaaggcggcatcatcaccagcagccaaagcgcagaagacaagggtaaaaaccgctttcagacggccacccttactgccagcgacattcaaaaccacagccaatacaaaggcgaaagttttggattgggcgcaagtgcgtccataagcggcaaaacactgggacagggcgcacaaaataaacctcaaaacaaacacctgacaagcgtagccgataaaaacagcgcaagttcatcagtgggttatggcagcgacagcgacagtcaaagcagcatcacgaaaagcggcatcaacacccgcaacatacacatcaccgacgaagcgggacaacttgcccgaacaggcaggactgccaaagaaaccgaagcgcgtatctacaccggcatcgacaccgaaactgcggatcaacacacaggccgtctgaaaaacagcttcgacaaagacgcggtcgccaaagagatcaacctgcaaagggaagtaacgaaggagttcggcagaaacgccgcccaagccgtagcggccgttgccgacaaactcggcaatacccaaagttacgaacggtatcaggaagcccgaaccctgctggaggccgaactgcaaaacacggacagcgaagccgaaaaagccgccatccgcgcatccctcggccaagtaaacgcctaccttgccgaaaaccaaagccgctacgacacctggaaagaaggcggcataggcaggagcatactgcacggggcggcaggcggactgacgaccggcagtctcggcggcatactggccggcagcggcacttcccttgctgcaccgtatttggacaaagcggcggaaaacctcggtccggcgggcaaagcggcggtcaacgcactgggcggtgcggccatcggctatgcaactggtggtagtggtggtgctgtggtgggtgcgaatgtagattggaacaataggcagctgcatccgagtgaatataaattagcagaacaatatgcagatatagtggcttctcgtctaaacatttcaaaagaagaagcacttgggcgaattattcggcatatgcaacgaaccgtagattacgcaacggctaaagcggataatttccgtactgatgacgccattatttcaattttaggagcaaacaatttacccaagcaagatcaacattacactaatccgaactacaacaaacaatacattcaaaattatgttcgtgatttcaatttagccaataaatacaattattttgggaaaactcctactcaatcaagggattataaagttggagttgttacagatattggtaaggctgcattaaatagcggtataggtatatttgaatcggctgcgaatttagcgacaggggagatagatccgaactcatgggcttatgtacacatggggcgtataggttatacacatcctgaatatggaaatgcttggattcggatttcaagtgcaacactagtgtattaa

SEQ ID NO: 56025 - DNA, 405 bp, Neisseria meningitidis
atgagaaaaagtcgtctaagccagtataaacaaaataaactcattgaactgtttgtcgcaggtgtaactgcaagaacagcagcagagttagtaggcgttaataaaaataccgcagcctattattttcatcgtttacgattacttatttatcaaaacagtccgcatttggaaatgtttgacggcaaagtagaagcagatgaaagttattttgctgaacgacaaaaccatatcaatggaattgggaacttttgaaaccgggcaaaacgtcatttacgcaagtttgacggcattcccaaagcgcattttgagctgtatttaaaggggtacgaacgacgttttaacaacagtgagataaaagttcaaatttccattttaaaacaattagtaaaatcgagtttatcctag

SEQ ID NO: 56026 - DNA, 747 bp, Neisseria meningitidis
atgaaaagcagcacgcaggccgttttggaacacaccgccattcccaagcatatcgccgtgattatggacggcaacggccgttgggcgaaaaaacgtttcctcccgcgcataatgggacacaaacgcggtttggacgcattggaaaatatggtgaagcattgcgccaaactgggtgtgcaatatctgaccgtgtttgccttttcaaccgaaaactggcgccgccccgaagacgaagtttcgttcctgatggggctgtttttacaggctttgcaaaaacaggtacgccgcctgcacgaaaacaatatgcgcctgaaaatactgggcagccgcgaacgcttcagccgtcaaatcctgaagggcatcgaagaggcggaggcgttgacggcaaacaataccggtctgaccctgagcattgccgccgattacggcggcagatgggatattttgcaggcggcaaacaaactgattgccgaaggcgtatccaagattacggaagacacgctggcgaaacacttgatgctgggcaatgcaccggaaccggatttgttcatccgcaccggcggagaaacgcgcatcagcaatttcctgctctggcagatggcgtatgcagaactgtatttcaccgacatcctgtggcctgatttcgacgaaaccgccttagatgccgccgtcgcttcgttccaaaaacgcgaacggcggttcggacgcacctccgagcaactgcctatcgaacagcaaaggaactga

SEQ ID NO: 56027 - DNA, 2396 bp, Neisseria meningitidis
atgattaaaaagattttaacgacttgttttggtttggtttttgggttttgtgtatttggagtgggtttggttgccattgctattttggtaacgtatccgaaactgccgtctttggattctttgcagcattaccagcctaaaatgccgttgactatttattcggcggatggggaagtcatcggtatgtatggggagcagcggcgcgaatttacaaaaatcggcgatttcccagaggtgttgcggaatgcggttatcgccgccgaggataaacgcttttaccggcattggggggtggatgtttggggtgttgcccgcgctgccgtcggcaatgtcgtgtccggcagcgtgcagtcgggtgcgagtacgattacgcagcaggtggcgaaaaatttttatttgagcagtgaaaaaacgttcacacgcaaattcaatgaggtgttgcttgcctataaaatcgagcagtctttaagcaaagacaaaatcctcgagttgtatttcaatcagatttacctcggtcagcgcgcctatggttttgcatctgccgcgcaaatctatttcaataagaatgtccgagatttgactttggcggaagccgccatgcttgcgggactgcccaaggctccgtctgcctataatccgattgttaatccagaacgtgccaagttgcgccagaagtatattttgaacaatatgctcgaggagaagatgattaccgtgcaacagcgcgatcaggcgttgaatgaggaactgcattacgagcggtttgttcggaaaatcgatcagagtgctttatatgtggcggaaatggtgcgtcaggaactgtatgagaaatacggtgaagatgcctatacgcagggttttaaggtttataccacggtccgcgccgatcatcagaaggtggcaaccgaggcattgcgcaaggctctacggaatttcgatcgcggcagcagctaccgcggtgcggaaaactatatcgatttgagtaagagtgaagatgtcgaggagactgtcagccagtatctgtcgggactctataccgtcgataaaatggttcccgccgttgtgttggatgtgactaaaaagaaaaatgtcgtcatacagctgcccggcggcaggcgggttacgcttgataggcgcgccttgggctttgcggcccgcgcggtcaataatgaaaaaatgggggaggaccgtatccgcaggggcgcggtcatccgtgtcaaaaacaacggcgggcgttgggcggtggttcaagagccgttgctgcagggggctttggtttcgctggatgcaaaaaccggagctgtgcgcgcgctggtcggcggttatgattttcacagcaaaacattcaatcgtgccgttcaggcaatgcggcagccgggttcgacctttaagccgtttgtctattcggcggcattatctaaggggatgaccgcgtccacagtggttaacgatgcgccgatttccctgccggggaaagggccgaacggttcggtctggacacctaaaaattcagacggcagatattccggctacattactttgagacaggctctgacggcttccaagaatatggtttccatccgtattttgatgtctatcggtgtcggttacgcgcaacagtatatccggcgtttcggcttcaggtcgtccgagctgccggcaagcctgtctatggctttaggtacgggcgagacaacgccgttgaaagtggcggaggcatatagcgtatttgcgaacggcggatatagggtttcttcgcacgtaatcgataagatttatgacagagacggcaggttgcgcgcccaaatgcaacctttggtggccgggcaaaatgcgcctcaggcaatcgatccgcgcaatgcctatattatgtataagattatgcaggatgtggtccgtgttggtacggcaaggggggcagctgcgttgggaagaacggatattgccggtaaaacgggtacgaccaatgacaataaggatgcgtggtttgtcggttttaaccctgatgtggttactgccgtatatatcggcttcgacaaacctaagagtatggggcgtgtcggctacggcggtacgattgcggtgccggtttgggtggactatatgcgttttgcgttgaaaggaaagcagggcaaggggatgaaaatgcctgaaggtgtggtcagcagcaatggcgaatactatatgaaggaacgtatggtaaccgatccgggcttgacgctggacaacagcggtattgcgccgcaaccttcccgacgggcaaaagaagatgacggggcgcggcagaaggcggacggcaggcggcggatgacgaagtccgccaagatatgcaggaaacgccggtgcttccgagtaatactggttccaaacagcagcagttggattctctgttttaa

SEQ ID NO: 56028 - DNA, 1059 bp, Neisseria meningitidis
atgtcttcacgcaaaatcatccacatcgacatggacgcgttctacgcatcggtagagctgcgcgaacagccgcatttgaaagggcggccggtggtcgtcgcgtgggagggcgcgcgttcggtgatttgcgccgcatcgtatgaggcacggcagttcgggctgcattccgcgatgtcggtggcaacggcgaaaaggctgtgtccgcaagcggtgtatgtgccgccgcatttcgatttgtaccgtcaggtttccgcgcagattcacgccgtattcaggcgttataccgatttaatcgaacccttgtcgctggacgaagcctatcttgacgttacccgtaatttcaaaaacatcccttacgccagtgaagttgccaaagaaatccgtgccgccatttttgcggaaacaggtttgactgcatccgcaggcatcgcgccgaacaaatttctggcgaaaatcgcgtcggactggcgcaagccgaacgggcagtttgtgttgccgccgcacaaagtcatggcatttttggaaaccctgcctttgggcaaaatccccggcgtgggcaaggtaacgctgaaaaaaatgcagtcgctgggtatgcggacggcgggcgacttgcgccgtttcgagcgcggcgaactcttaaaccatttcggacgctacggataccgcctctatgatttggtgcgcggtacggacgaacgccccgtcaaagccgaacgcgaacgcctccaaatctccacagaaattaccctgcccgaagacctgccgctcgagcaggctgccggacacctcccccatcttgccgaagacttgtggcggcaaatcacgcgcaaaaacgtcgaagcccaaagcgtaacgctcaagctgaagacctacgatttccgcatcatcacgcgcacactgacttattcctccgtattgcccgactgcgcagctctgctgcaggctgcgcaaatgttgatggcgcgcgtcccgccgcagacggaagacgcgttccgccttatcggtatcggcgtggggcatcttgtgccgaaaaaccagcagcaggatttgtgggcgtaa

SEQ ID NO: 56029 - DNA, 1911 bp, Neisseria meningitidis
atgaatatattatctgtagaaaacgcttcttttgccatcggtcacgttgccttgctcgacaaaacttcttttcaactcgacagcggcgaaaaagtcggcttaatcggacgcaacggcgcaggcaagtcttcgtttttaaaaatcctcgccggtttgcaaaagctcgacgacgggcagattattgttcaaaacaacctcaaaatcgtttatgtaccacaggaatccttttttgataaggacgcaaccgtatttgataccgttgccgaaggtttgggtaaaattcgcgatttattgcgccgttaccaccgcgtcggtcatgagttggaaaacggttcgggtgaggctttgttgaaagaactcaacgaattacaacttgaaatcgaagcgaaggatggctggaagctggatgcggcagtcaagcagactttgggcgaactcggtttgccggaaaacgaaaaaatcggcaacctttccggcggtcagaaaaagcgtgtcgccttggcgcaggcttgggtgcagaagcccgacgtattgctgctggacgaaccgaccaaccatttggatattgacgcgattatctggttggaaaacctgctcaaggcgtttgaaggcagcttggttgtgattacccacgaccgccgttttttggacaatatcgccacgcggattgtcgaactcgatcgcggtattttgcgttcctatcccggctcgttctccaaatatagcgagaaaaaagcgcaagagttggcagtcgaagcggaacacaaccgcctcttcgacaaattccacgcgcaggaagaagcgtggatacgcaaaggcatcgaagcgcgccgtacccgcaacgaaggccgcgtgcgccgtttggaagaactgcgccgccagcgtgccgaacgccgcaacgtacaagggcaggtcaatttcaagctcgacagcggcgagaaaagcggcaaaatcatcgccgagctggaacacgcctcgtttgcttatggcgacaaagtcattatggacaaattctccgccatcttgcagcgcggcgacaaaatcggcttaatcggtccaaacggcatcggcaaaaccacatttttaaaactgattttgggcgaattgcagccgacctacggcagaatccgtatcggcagcaagcaggaagtcgcctatttcgaccagttccgcagcgcgttgaatgaaaacgacaccgtgttttacacgctcggacagggcaatgattacgttgaagtcggcggtaagaaaaagcatgtgatgagctatttggaagatttcctgttcccccctgcccgcgcgcaaagtcctgtttcttcactctccggcggcgaacgcaaccgccttttgctggcaaaactctttacccgtcccgccaatattttggtcttggacgaaccgaccaatgacttggacatcgacacccaagagctgctcgaagacctgttgcgcgattatcaaggcacggtattccttgtctcgcacgaccgtatgttcctcgataacgtgattacccaaagccttgtttttgaaggaaatggaaggttaaaagaatatatcggcggctatcaggactacatcgacgcaaaatcacgcgaagcgaagattcagacggaatccgcacccaaaacagccgatgccgaaccggtgaaagaaaaacccaaagccaaccgcacggtcaaactgtcctacaaagaacagcgagaactcgatgccctgcccgacgaaatcgccgccttggaagccgaacaggcagaaatcaacgcgcagctttccgatcccgaaatcttcaaagattacgaaaaagccggcgcactgcaaagccgcgccgaagaaatcgaaatgctgcttttggaaaagctggaacgctgggagctgctggaaaccaaacagaacggcaatgccgtctga

SEQ ID NO: 56030 - DNA, 2229 bp, Neisseria meningitidis; identical to SEQ ID NO: 55283

SEQ ID NO: 56031 - DNA, 279 bp, Neisseria meningitidis
  misc_feature 256, 257, 258, 259, 260: 'n' is a, c, g or t
ttggctgaaggtcaaaaatcagccgtcacagagtattacctgaatcacggcgaatggcccggcaacaacagtgatgccggcgtggcatcctcaaccgacatcaaaggcaaatatgttcaaagcgttgaagtcaaaaacggcgtcgttaccgccacaatggcttcaagcaacgtaaacaacgaaatcaaaggcaaaaaactctccctgtgggccaagcgtcaagacggttcggtaaaatggttctgcggacagccgnnnnncacacacttaattaattaa

SEQ ID NO: 56032 - DNA, 1005 bp, Neisseria meningitidis
atgcaacggcaaaccgaactgaaaaattggcttcagaccatctatcccgaacgggacttcgatctgtccttcgcggcggcggatgctgatttccgccgctatttccgtgcaacgttttcagacggcagcagtgtcgtctgcatggatgcaccgcccgacaagatgagtgtcgcaccttatttgaaagtgcagaaactgtttgacatggtcaatgtaccgcaggtattgcacgcggacacggatttggggtttgtggtattgaacgacttgggcaatacgacgtttttgaccgcgatgcttcaggagcagggcgaaacggcgcacaaagccctgcttttggaggcaatcggcgagttggtcgaattgcagaaggcgagccgtgaaggggttttgcccgaatatgaccgtgaaacgatgttgcgcgaaatcaacctgttcccggaatggtttgtcgcaaaagaattggggcgcgaattaacattcaaacaacgccaactttggcagcaaaccgtcgatacgctgctgccgcccctgttggcgcagcccaaagtctatgtgcaccgcgactttatcgtccgcaacctgatgctgacgcgcggcaggccgggcgttttagacttccaagacgcgctttacggcccgatttcctacgatttggtgtcgctgttgcgcgatgcctttatcgaatgggaagaagaatttgtcttggacttggttatccgctactgggaaaaggcgcgggctgccggcctgcccgtccccgaagcgtttgacgagttttaccgctggttcgaatggatgggcgtgcagcggcacttgaaggttgcaggcatcttcgcacgcctgtactaccgcgacggcaaagacaaataccgtcccgaaatcccgcgtttcctcaattacctgcgccgcgtatcgcgccgttatgccgaactcgccccgctctacgcgctcttggtcgaactggtcggcgatgaagaactggaaacgggctttacgttttaa

SEQ ID NO: 56033 - DNA, 498 bp, Neisseria meningitidis
atgactgcgcttacccttccggaagacatcctccaacaagaaccatccgttctgctctataccctcgtttccgcctacctcgaacacaccgcccaaaccggcgacgaatccctctcctgcctgtccgacgaccagcacacgctgaccgcattctgctacctcgacagccaagtcgaagaaggcggcttcgtgcaactcatcgcctccggttacggcgaatatattttccgcaacccgcttgccgacagcctgcgccgctggaaaatcaaagccgtgccgaaagtcttggacaaagccaaagccctctacgaacaacacggcgaaaccatcgaaacgcttgccgacgaagggcgggacatcccttccctgcgcaaacagttccccgactttgaagaatgggacggcgcatactacgaagccgccgaacaagacctgcccctgcttgcagaacacatacggtcaaactgggaaaccttcgcccatatcgggcaggcgtga

SEQ ID NO: 56034 - DNA, 1002 bp, Neisseria meningitidis
atgcagtttccttaccgcaatgttccggcttcgcgtatgcgccgtatgcgcagggacgatttttcacgccgcctgatgcgcgaacacacgctgaccgccgatgatttgatttatccggtgttcgtattggaggggtcggcgcgcgaggaggatgtgccttctatgccgggtgtgaagcgtcaaagtttggacaggctgctgtttacggcggaagaggcggtaaagctcggtattccgatgttggcactgttccccgtggttacggcaaacaaaaccgagcgtgcgcaggaggcgtacaatcccgaaggactcgtgccgtcaactgtccgcgccttgcgcgagaggtttcccgaactgggcattatgacggatgtcgcgctcgatccttatacggttcacggtcaggacgggctgacggacgaaaacggttatgtgatgaacgatgaaaccgtagaggttttggtcaagcaggctttgtgccacgctgaagcgggcgcgcaggtggttgccccttccgatatgatggacgggcgtatcggtgcgattcgcgaggcgttggaggatgccgggcatatccacacgcggattatggcgtattccgccaaatatgcttcggcgttttacgggccgttccgcgatgcggtgggcagttcgggcaatttgggcaaggcggacaagaaaacctaccagatggatccggcaaataccgatgaggcgctgaatgaagtggcgctcgatattcgggaaggtgcggatatggtgatggtgaagcccggtttaccgtatttggacgttgtccgccgcgtgaaggacgagttcggcgtaccgacttatgcctatcaggtttcgggagaatacgcgatgttgcaggcagcgattgccaacggctggctggacggcggcaaagtggttttggaaagcctgctggcattcaaacgtgcgggtgcggacgggattttgacctattacgctattgaggcggcaaagatgttgaagcgttga

SEQ ID NO: 56035 - DNA, 2940 bp, Neisseria meningitidis
atgagtggttttaattacgagaaaaaccagccgcaccaaatgcgggcggtttcggcggttttgggcgtgtttgacggggcaacgcccaaatatcgggcggcagacgaaaatcccgaacttttgtttgctgcaaaacaatacgcagacaatatcctgaaagtgcaaagccaaaacggcatagacggccgattccccgaccgttcggacgaccaaaatatccttgatatttccatggaaacgggcacgggcaaaacctatacctacacacaaaccatgttcgagctgcaccgttggctgggcgtgttcaaatttatcgtggtcgtgccgactttgtccattaaggcgggaacgcggcagtttttgcaaagcaaggctttggcagagcattttgaacaggatttcggcggcgattatgaaggcgtgcgcctgaaaacctatgtggtggaaagcgcgaaaaagaataagggcaaaaagtccaatgcgcccataacgattgagcaatttgccaaagcggaaaacaaaaaggaaatccatgtgctgctgattaacgcgggcatggttaattcgtcgtccatgaacgatacgggcgacaaggcattgaaagatttgtttgacaatcccgttgatgcattggccgccgtgcgcccgtttgtgattgtggacgaaccgcataaattcccgacccgggagagcgcgaaaacgtggggcaatatcaaacgcttaaaaccgcaatatattttgcgctacggtgcgacatttaacgatgaatattacaacttgctttaccgtttgacggcagtagacgcgtttaacgacgggctggtcaaaggcgtgcgcgtgtttcaggaagaaatgcagggcggcatggatgcggcggtaaaactggtgtcgtcgggcggcaaagaagcgaaatttgaattaaacgaaaaggacaaaaagcagacgttcaaactggcaaaaggcgaagatttggcgaaaatccatcctgctgtttcagatttgaaaatcgacaaaatgaataaaaccgtggtggtgttaagcaacggcttggagttgaaaacgggcgccgtcatcaacccttattcctattcgcaaacggtgcaggatgcgatgatgcagagggcggttgccgaacatttcaagctggaacgcgcacttttggcagaacgcgcgccacagcccaaaatcaagccgctgacgctgttttttattgatgatattgcgggctaccgcagcggcaacgagctttcaggcagcctgaaagataaatttgaaagctggattcacgcggaagcggcacgccgcctgaaaacggaaagcgacccgttttaccgcgattacctgcaaaagacgttggacgatgtatccgcctgccacggcggttatttttccaaagacaatacagacagcgacgatagaatcgagcaggaaatcaatgaaatcctgcacgataaggaaaaactgttgtctttggacaacccgcgccgctttattttttccaaatggacgctgcgcgaaggctgggacaatcccaacgttttccagatttgcaaactgcgttccagcggcagcacgacttccaagctgcaagaagtcggacgcggcctgcgcctgccggtaaacgagctgatggcgcgggtgcgcgatgtgccgtacaaactgaattattttgtcgatagcagcgaaaaagactttgtgaagcagcttgtcggcgaaatcaacgataattcttttcaggaagaaatctcaaaaaagtttaccgaagagctgaaacaaaaaatattgcaaaaataccccgatatcaaacctctgggattgttaaacaaactgttttcagacggcatcattgacgacaatgaaaactttaccgaagacggctatgacaaattaaaagccgcctatcccgaagccttccccaaaggtttggacaaaggcaaagtcagcaacgccaaagacgaaggcaaagacaccatcatcatgcgcgaaggcaaatatgaagaactcaaagccttgtgggagctgattcaccataaagccgttttgcagtacaaaatcaaagatgaagccgaatttgtcgatttatttactgcctatttgcgtgaaaacgccgccaaattcccgcaggcaggcatacgcacggcggtaaacgaagcttatatcaacaacgggcttatgctttcccgccgcatagacagctttgaagatgaagattttatccgtttcaacacaatgacttaccgtgagcttctggaaaaactggcacaaacggcaaaaatccgcatgcagactttgcatcaggcgttttaccgcgtccgcaacgaactgaacattggcgattttttgaatatgcagaccatcgcccaaatcaaaaacggcttcaaccggtttttgcttcatcattccttccataaattcgaactggattaccagcttgtcggcagcaaaatccatccgaccaaatttaccgataaagacggcaaaccgcgcgcggtgaaaaaagcagatttgggaagatttgaagatacggagcaccggcctgccgccggctatctcttcgacgagattttctacgattcggatatagaacatgaaaatgtcgccaacaaccaaattgaaggcgtaaccgtattcactaaaataccgagaaactccatcaaaatccccgttgccggcggcggcacgtattcgcccgattttgcctatatcgtgaaaacccaaagcggcgagattctgaactttgtgattgaagccaaagggactgacggggcggaagatttgcgaaaaagcgaagagcggaaaatcaaacatgccgaaaagctgtttgccgagatttccaaagaaatcaaggtggtgttcaaaacgcagtttgacggcgagaggatagccgaactgatcgggcaaaatatgcccgcaggcgggcattctgaaaacggacactga

SEQ ID NO: 56036 - DNA, 384 bp, Neisseria meningitidis; identical to SEQ ID NO: 38324

SEQ ID NO: 56037 - DNA, 633 bp, Neisseria meningitidis
atgacggtatgggtcggactgaccggcggaatcggcagcggcaaatcggcagccgcgcaatgttttgccgatttgggcgtgccgcgcatcgatgcggacgcggcggcgcactcgctgacggcttcagacggcatcgccctgccggaaatcaggcggctgttcggcgacaccgttttcgacacacagggtttgttgcggcgcgacatattgcgtaaagaagtctttgcctccccatcgcaaaaagccttgctcgaatccgtgatgttgccgctgattttctcagaaatcaaaaagcagcaagaaacctttaccgatgcggcttacggcattgtcgaaattccgctgctgacggaaaagcgtcaatttatcagcctgatacggcgtgtcctgaccataagcgcacctttggaaaaacgtatcggcagggtgatggcccgcagcgggctgacgcgcggcgaagtggcggacatcatcagccatcaggcatccgaatccgaacgcctgctgcttgcagacgatgtgctgctcaatgacggcagcctcaaaaacctacgtgagaaaacaatgcgcctgcacgcgttttattcagggattttcgcctcaaaaccaacacaaggaaaacacaatggctga

SEQ ID NO: 56038 - DNA, 1044 bp, Neisseria meningitidis
atgaataagaaatatccgaaaattaactatatcggtaataaagagaaaatagcttcctggatttgtgaccagcctccgtctgatgtagatacagttgcagatgtatttagtggaggctgttcctttgcctatgaagccaaaaaacgcggctatcgtgtgattactaacgatattttggcaattaattaccaaattgctttagcattaatagaaaacaaccatgaaacattaaatgacgatgatgtcgcaatgattttttcaggcagcccgcatgccggttttatgagtcagcgttatgccgaaaaattctattttcacgatgaatgccaacaacttgatttgtaccgtaaaaatatagggaaactggataaccagtataaacgcgctttggcgtttactttaatgcgtcgcgccatgatacgtaaaatgccctatacggaagatatgcgcccgggcgataccgctaatccttatggcgcgtccaaagcgatggtggaacggatgttaaccgacatccaaaaagccgatccgcgttggagcgtgattttgttgcgttatttcaacccgatcggcgcgcatgaaagcggcttgatcggcgaacagcccaacggcattcccaacaaccttttgccctatatctgccaagtggcttcgggcaggctgccgcaactgtcggtattcggcggcgattatccgacccccgacggcaccggtatgcgcgactatattcatgtgatggatttggcagaagggcatatcgcggcaatgaaggcgaaaggcggtgttgccggcgtacatttgttcaacttgggttcggggcgcgcctattccgttttggaaatcatccgtgcctttgaagccgcatccggcttaaatattccctatcaaatccaaccccgtcgcgccggcgacttggcgtgttcctttgccgacccgtcccataccaaacaacaaaccggctgggaaaccaaacgcggtttgaaacaaatgatggaggattcgtggcgttgggtcagccgcaaccccaacggatatggggattaa

SEQ ID NO: 56039 - DNA, 216 bp, Neisseria meningitidis
gtgtttaagctcggcgtttatgcctgtctcggactgtttgccggctgggtgctgctgctgattgtgcaactctggttttcttttctcaaagcggaattgtttttcaaaatcactctgactatggcgggactgtttgtcatcatcctcgctgccctgctggtattcggccagtatttttccgaaaagaaaatgaaagacgacgggtttatcaactga

SEQ ID NO: 56040 - DNA, 291 bp, Neisseria meningitidis; identical to SEQ ID NO: 42259

SEQ ID NO: 56041 - DNA, 924 bp, Neisseria meningitidis
atgaatacaggcaaaccccaaaaacgtgccgtcaacggtgttttgctcttggacaaacccgaaggcctttccagcaacaccgcgctgcaaaaagcgcggcgtttgtttcatgccgaaaaagccggacataccggcgtgctcgaccctttggcaaccggacttttgcccgtctgcttcggtgaagcgaccaagttcgcccaatacctgctggatgccgacaaagcctacaccgccacgctgaaactcggcgaagccagcagcacgggtgatgccgaaggcgaaatcattgccaccgcccgcgccgatatttccttagccgaatttcagacggcctgccaagcactgacaggcaacatccgccaagtgccgccaatgttttccgcgctcaagcacgaaggcaaaccgctgtacgaatacgcccgcaaaggcatcgtcatcgaacgcaaagcgcgcgacattaccgtttacgccatcgatattgccgaatttgacgcgcccaaagccgtcatcgacgtacgttgcagcaaaggcacctacatccgcaccctcagcgaagacatcgccaaacacatcggcacgttcgcccacctgaccgccctgcgccgcactgaaaccgccggctttaccatcgcccaaagccacacgcttgaggccttggcaaatttgaacgaaacagaacgcgacagcttgctgctaccctgcgacgtattggtttcacactttccccaaaccgttttaaacgattatgccgtccatatgctccactgcggacaacgtccgcgtttcgaagaagacctgccttccgacacgccggtacgcgtttacacggaaaacggccgctttgtcggtctggcggaatatcaaaaagaaatatgccgtctgaaagccttgcgcctgatgaacacggcggcatccgccgcctga

SEQ ID NO: 56042 - DNA, 435 bp, Neisseria meningitidis
atggaaaaattcaacaatattgcacaactgaaagacagcggtctgaaggttaccggcccgcgtttgaagattttggatttgttcgagacgcatgcggaagagcatttgagtgcggaagatgtgtaccgcattttgttggaagagggtgtggaaatcggtgtggcgacgatttaccgtgtgctgacccagtttgagcaggcgggtattctgcaacgccatcattttgaaacgggcaaggcggtttatgagttggacaaaggcgaccaccatgaccatatcgtctgcgtgaagtgcggcgaggtaacggaattccacaatcccgaaatcgaagccctgcaagacaaaatcgccgaggaaaacggctaccgcatcgtcgatcacgcgctttatatgtacggcgtgtgcagcgactgtcaggccaagggcaaacgttaa

SEQ ID NO: 56043 - DNA, 876 bp, Neisseria meningitidis
atgccgaccgtccgttttaccgaatccgtcagcaaacacgaccttgatgccctgttcgagtgggcaaaagcaagttacggtgcagaaagttgctggaaaacgctgtatctgaaccgtctgcctttgggcaatctgtcgccggaatgggcggagcgcgtcaaaaaagactgggaggcaggctgctcggagtcttcagacggcattttcctgaatgcggacggctggccagatatgggcagacgcttgcagcacctcgcccgcacatggaacaaggcggggctgcttcacggatggcgcaacgagtgtttcgacctgaccgacggcggcggcaatatcttgttctcactcgaacgcgccgctttccgtccgttcggactgctcagccgcgccgtccatctcaacggtctgactgaatcggatggcagatggcatttttggataggcaggcgcagtccgcacaaagcagtcgatcccgacaaactcgacaatattgccgccggcggtgtttccagcggtgaattgccgtctgaagccgtgtgtcgcgaaagcagcgaagaagcgggtttggatcaaacgctgtttccgctcatccgcccggtatcgcagctgcacagcctgcgccccgtcagccggggtgtgcacaatgaaatcctgtatgtgttcgatgccgtcctgcccgaaaccttcctgcctgaaaatcaggacggcgaggttacgtgttttgagaaaatggacatcggcagcctggttgccgccatgttgtcggaaaacatgatgcacgacgcgcaactggttacgctggacgcgttttgccgttacggtctgattgatgtcgcccatccgctgtccgagtggctggacggcatacgtttatag

SEQ ID NO: 56044 - DNA, 258 bp, Neisseria meningitidis
atggtattgttattaattgtaaataaatattggaaggtaaatgatatgaaaaatgaaattcaaaaaattatggacaaatatgatccatggcatgaagatgattttgagtcgtatgaaaacattgccagagatgtatcgttgatgacagataaaacgttcattgaacattatttgttagaagtttattcagaagaaaacggacattttgaccaagagaatgtccatgcaatgatagaagaaattaaaaatgcaatttag

SEQ ID NO: 56045 - DNA, 285 bp, Neisseria meningitidis; identical to SEQ ID NO: 38872

SEQ ID NO: 56046 - DNA, 324 bp, Neisseria meningitidis; identical to SEQ ID NO: 37971

SEQ ID NO: 56047 - DNA, 339 bp, Neisseria meningitidis; identical to SEQ ID NO: 39659

SEQ ID NO: 56048 - DNA, 390 bp, Neisseria meningitidis
atgaacccgcacgagaaactcttgaccaccgacaaccccatcttgcgccaacgcgccaaagccatgcgccaagaaatgagcggggcggaagcaaaattgtggcagcacctgcgggcaggccgtctgaacggctataaattccgccgccagcagccgatggggaattatattgttgattttatgtgcgtaacgcccaagctgattgtcgaagcagacggcgggcagcacgcggaacaagccgtatacgaccacgcgcggacggcatatctcaacagcctgggctttaccgtgctgcgtttttggaatcacgaaattttgcagcagacaaacgatgtgctgacagaaatcctgctcgtgttgcaagaattagaaaagcaagctgcacgatag

SEQ ID NO: 56049 - DNA, 417 bp, Neisseria meningitidis; identical to SEQ ID NO: 39888

SEQ ID NO: 56050 - DNA, 402 bp, Neisseria meningitidis; identical to SEQ ID NO: 38334

SEQ ID NO: 56051 - DNA, 1272 bp, Neisseria meningitidis
atgttccaatggctttatgatgtattgtggctgcttgcgccgatatggatacggcgttatttggacaaacgctccggaagtgccccggcatatcgggcgcatcgggacgagcgtttcggcaagccgtatccgaatcccgttaccggagcggtttggatacacgccgtttcggtcggagaaacgcgtgccgcccagcccttgatacgcgagttgcggcagcgttttcccgatgcgccgctgctgatgacgcagatgaccccgacgggacgggaaaccgcgcaagttctgtttcctgatgcacaatgccgttatcttccgtatgacaaaaaaacgtgggtacggcagtttttgcgcgaacaccgcccgatgttcggcattttgatggaaaccgaaatctggcccaacctgatgacggagtgccggaaatcgggcgttccgctgtttttggcgaatgcgcggctgtcggaaaaatcgctaaacggttatctgaaagtccgccgcctgatccgtcctgccgccgcttcgctgacgggttgtctggcgcagacggaggcggatgcggcgcggttggcgaaattgggcgcggcatccgtgcaggtgtgcggcaataccaaatacgacctaatgccgtcggaacagatgaaaacgctggcggggcagtttgaaaaacgcatcggaggcaggccggttgccgtgtgcggcagcacgcgcgtttatcggggtgaagacgaggcggaaaaactgctggcggcgtggcaacaatatcgcggcgatgcgctgctggtcgtcgtgccgcgccatcccgagcattttcagacggtatttgaaacggcaaaacgcttcgggtttaaggttcagcggcgcagcgacggtttgccggtcgaacctgatacgcaggtgtggataggcgacagtatgggcgagctgtatgcgtattacctgtgcgccgatgtcgcttttgtcggcggcagtctggtcgattcgggctgtcagaacattatcgaaccgctttcctgcggcgttccgacgatattcggcttttcaacctacaatttttccgaagcctgccggcacgccttggcatcgggggcggcggttcgggttgagtcggcggacgcgtggcgggaagccgttgaaaaaaccttatcgtccgaggggggcggaatgcagatgcaggcgcacgtggacggctttatcgcacaacatcgcggagcgggcgcgagaatcgccgaggcggtacgggaagcggtatgcggacatcggggacgatag

SEQ ID NO: 56052 - DNA, 2058 bp, Neisseria meningitidis
atgacacgcaaaatcttagttacctccgccctgccctatgccaacggcagcatccacctcggccacatggtcgaacacatccaaaccgacgtttgggtgcgcttccaaaaactgcgcggcaacgaatgctactactgctgcgccgacgacacccacggcacgcccgtgatgcttgccgcgcaaaaacaaggcatcgcgcccgaagacatgattgccaaagtgcgcgaagaacacctcgccgactttaccggtttcaacatcggctacgacaattattacagcacccattcccctgaaaacaaacagttttcccaagatatttaccgcgcgctgaaagccaacggcaagattgagagccgcgtcatcgagcagcttttcgaccccgaaaaacaaatgttcctgcccgaccgcttcgttaaaggcgaatgcccgaaatgccacgcccaagaccaatacggcgacaactgcgaagtctgcggcacgacctattccccgaccgaactgattaacccgtattccgccgtttccggcgcgaaacccgaattgcgcgaatccgaacacttcttcttcaaactgggcgaatgcgccgacttcctcaaagcatggacttccggcaacaacccgcacgacggcaaaccccatctgcaaccagaagccctcaacaaaatgaaagaatggctgggcgaaggcgaagaaaccaccctgtccgactgggacatttcccgcgacgcgccgtatttcggttttgaaatccccgacgcgccgggcaaatacttctacgtctggctggacgcgcccgtcggctacatggcatcgtttaaaaacctgtgcgaccgcatcggcatcgatttcgacgaatacttcaaagccggcagccaaaccgagatgtaccacttcatcggcaaagacatcctctatttccacgccctgttctggcccgccatgctgcatttctccggccaccgcgccccgaccggcgtgtacgcacacggctttttgaccgtggacggacaaaaaatgtccaaatcgcgcggcacgtttattaccgccaaatcctatctggaacaaggcctaaaccccgagtggatgcgctactacatcgccgccaaactcaacagcaaaatcgaagacatcgatttgaacctgcaagactttatctcgcgcgtcaacagcgacctcgtcggcaaatacgtcaacatcgccgcccgcgcgtcaggtttcatcgccaaacgctttgaaggaaaactcaaagacgtttccgacagcgcattgctggcaaaactgactgcgcaaagcgaagccattgccgaatgctacgaaaaccgcgaatacgcccgcgccctgcgcgacatcatggcattggcagacattgttaatgaatacgttgatgccaacaaaccttgggaactcgccaaacaagaaggccaagacgaacgcctgcacgaagtatgcagcgaactcatcaacgcctttacgatgctgaccgcctacctcgcccccgtattgccgcaaaccgccaccaatgccgcgcgtttcctcaatctggacgcgattacttggacgaacacaagggtaaccttgggcaaacacgccatcaacaaatacaaacatttaatgcaacgagtggagcaaaaacaagtggacgatttaatcgaagccaacaaacaaagcatcgccgccgcagccgcacctgccgccgaagagagcaaatacgaaaaagtcgccgaacaggccagcttcgacgactttatgaaaattgatatgcgcgtcgccaaagtcttgaactgcgaagccgtcgagggcagcaccaaacttttgaaattcgacctcgatttcggttttgaaaaacgcatcatcttctccggtatcgccgcgtcttatcccaaccctgccgagttaaacggaagaatggtcatcgccgtcgccaacttcgccccgcgcaaaatggcaaaattcggcgtatccgaaggtatgattttgagtgccgccacggcagagggcaaactgaagctcttggatgtggatgcaggcgcacaaccgggcgacaaagtcggttaa

SEQ ID NO: 56053 - DNA, 525 bp, Neisseria meningitidis
atggaaatgaaacaaatgcttttagccgtcggcgtggcggcggtgttggcgggctgcggcaaggatgccggcggttacgagggttattggcgcgaaaaatcggacaaaaaagagggtatgattgccgtcaaaaaagaaaaaggcaattacttccttaataaaatcaacgtggttacaggtaaggaagaatctatgcttttgtctgaaaaagacggcgagctttcgataaacacggggataggggaaatcccgatcaaactttccgacgacgggaaagagctgtatgtcgaacgcaggcagtatgtcaaaaccgatgcggcgatgaaggacaaaatcatcgcccatcagaaaaagtgcggacaaacggcacaggcatatctcgacgcgcgaaatgcgttgccgtcaaaccaaacgtatcagcagcgtcaggcggcgatcgagcaattgaaacggcggtttgaagccgagtttgacgaattggaaaaagaaatcaaatgcaacggcaaactgacattgttgttttag

SEQ ID NO: 56054 - DNA, 318 bp, Neisseria meningitidis; identical to SEQ ID NO: 41968

SEQ ID NO: 56055 - DNA, 1293 bp, Neisseria meningitidis; identical to SEQ ID NO: 38975

SEQ ID NO: 56056 - DNA, 1185 bp, Neisseria meningitidis
atgagtttacacagcgacatcctcgtcgtcggcgcaggcccggcgggtttaagttttgcagccgaacttgccggcagcggtttgaaagttaccctgatcgaacgcagcccactgactgttctgcaaaatcctccatatgacggacgcgaaatcgccctgacccatttttcccgcgaaatcatgcagcgtttgggtatgtgggacaaaattcccgaaaacgaaatctaccctttgcgcgatgccaaagtgctgaacggacgttccgactaccagctccactttccccaaccgactgaagcgcgcggcgaacctgccgactgtttgggctatctgatttccaaccacaatatccgccgcgccgcctatgaagtcgtatcacaactcgacaatgtcagcattctgaccgatacggttgtcaaagaagtcaaaacatctgacaacgaagcacaagtcattttggaaaacggcaaaatcctgactgcacgcctgcttttggcggcagacagccgcttctcgcaaacccgtcgacaactcggtatctcctccgatatgcacgattacagccgaaccatgttcgtctgccgtatgaaacataccctttccaaccaacataccgcttacgaatgcttccattacggacgcaccatcgcactgctgccgctggaagagcacctgaccaataccgtcattaccgtcgataccgataaaatcaacagcgttcaaaacctttcgcccgaagaattggcggcaagcgtaaaagaacaactcaagggtaggcttggcgacatggaactggtcagcagcatccaccattacccccttgtcggtatgattgccaaacgtttctacggcaaacgcagcgcgctgatcggcgatgcggctgtcggtatgcaccccgttaccgcacacggtttcaacttgggtctgtccagcgcagatattttggcaaaactgatactcgaagccgagcagcgcggtcaggacatcggcgcggcttccttgttggaaaaatacagcagcaaacatatgctgcacgcccatccgctttatcacgggaccaatatgatgctgaaactgtttaccaacgaaaccgcgccggcaaaactgctgcgcggtttggtattgcgtgccggcaacaacttcccgccgctgaaaaagctgattaccaaacaactgaccggttga

SEQ ID NO: 56057 - DNA, 981 bp, Neisseria meningitidis
atggcaatggcagaaaacggaaaatatctcgattgggcgcgcgaagtgttgcacaccgaagcggaaggcttgcgcgaaattgcggcggatttggacgaaaacttcgcccttgcggcggacgcgttgttgcactgcaaaggcagggtcgttatcacgggcatgggcaagtcgggacatatcgggcgcaaaatggcggcaaccatggcctcgaccggcacgcctgcgtttttcgtccaccctgcggaagcggcacacggcgatttgggtatgattgtggacaacgacgtggtcgtcgcgatttccaattccggtgaaagcgatgaaatcgccgccatcattcccgcactcaaacgcaaagacattaccctcgtctgcatcaccgcccgccccgattcaaccatggcgcgccatgccgacatccacatcacggcgtcggtttccaaagaagcctgcccgctggggcttgccccgaccaccagcaccaccgccgtcatggctttgggcgatgcgttggcggtcgttctgttgcgcgcgcgcgcgttcacgcccgacgacttcgccttgagccaccctgccggcagcctcggcaaacgcctacttttgcgcgttgccgacattatgcacaaaggcggcggcctgcctgccgtccgactcagcacgcccttgaaagaagccatcgtcagcatgagtgaaaaagggctgggcatgttggcggtaacggacgggcaaggccgtctgaaaggcgtattcaccgacggcgatttgcgccgcctgtttcaagaatgcgacaattttaccggtctttcgatagacgaagtcatgcatacgcatcctaaaaccatctccgccgaacgtctcgccaccgaagccctgaaagtcatgcaggcaaaccatgtgaacgggcttctggttaccgatgcagatggcgtgctgatcggcgcgctgaatatgcacgacctgctggcggcacggattgtataa

SEQ ID NO: 56058 - DNA, 624 bp, Neisseria meningitidis
atgatgaaaccgcacaacctgttccaatttctcgccgtttgctccctgaccgtctccgtcgcttccgcacaggcgggcgcggtggacgcgctcaagcaattcaacaacgatgccgacggtatcagcggcagcttcacccaaaccgtccaaagcaaaaagaaaacccaaaccgcgcacggcacgttcaaaatcctgcgcccgggcctcttcaaatgggaatacacttcgccctacaaacagactattgtcggcgacggtcaaaccgtttggctctacgatgtcgatttggcacaagtgaccaagtcgtcccaagaccaggccataggcggcagccccgccgccatcctgtcgaacaaaaccgccctcgaaagcagctacacgctgaaagaggacggttcgtccaacggcatcgattatgtgctggcaacgcccaaacgcaacaacgccggctaccaatacatccgcatcggcttcaaaggcggcaacctcgccgccatgcagcttaaagacagcttcggcaaccaaacctccatcagtttcggcggtttgaataccaatccccaactctcgcgcggcgcgttcaagtttaccccgcccaaaggcgtggacgtgttgagcaactga

SEQ ID NO: 56059 - DNA, 909 bp, Neisseria meningitidis
atgaacacgccccaatccgccatcattcccgaccacgcccaagccggcatctttatcgaagccgacttcgccgccaaccgcctcaacgatattaaagccgcctgccgcgcttcgctcgacgcgttaactgccttgaaagcccgctttccggacgatattttgggtctgaccatcgccttcggcagcaaagcctgggcaacattcggacatacggacgaaggcagtgaaatcaaacccttctccgaaatgggcaacgggcttgcgccgtccacgcagcacgatatgtccatccacatccaatccttccgccaaaacgccgcctacgcgcttgcccaatccgttttaggcgcgttcggcgacagcatatgcgtcgcgtccgaagaacacggtttgcgcctgtatcaggatcgcggactggacggtttcgtcgacggcacggaaaacccgcagggcgatgaaaatgtccgcgaagtcgccatcatccccgaaggaaaacccgatgcgggcggcagctatgtcctgctgcaaaaatacctgcacgatttgaaaaaatgggatgccgtccccgtcgccgaacaggaggcctcggtcggacgcggcaaggaaaccgacgacgaattcggccgcgatgtccgcctgcccgattcgcacctcggccgcgtcaacctgaaagaaaacggagtcggcctgaaaatcgtccgccgcagcctgcccttcggcaaaatcagcggcgaacacggtttgatgtttaccgcatactgccgcacgctgcacaatatcgaagcgcaattattgagtatgttcggcgacacggatggcaaaaccgacctgctgctccggcacctctccgccgccgtttcgggcggatactactacgcgccgtctgtcgaacgcctgcaaaacctctaa

SEQ ID NO: 56060 - DNA, 303 bp, Neisseria meningitidis; identical to SEQ ID NO: 37853

SEQ ID NO: 56061 - DNA, 318 bp, Neisseria meningitidis; identical to SEQ ID NO: 37733

SEQ ID NO: 56062 - DNA, 375 bp, Neisseria meningitidis
atgaaacttctgaccaccgcaatcctgtcttccgcaatcgcgctcagcagtatggctgctgctgccggcacgaacaaccccaccgttgccaaaaaaaccgtcagctacgtctgccagcaaggtaaaaaagtcaaagtaacctacggcttcaacaaacagggcctgaccacatacgcttccgccgtcatcaacggcaaacgcgtgcaaatgcctgtcaatttggacaaatccgacaatgtggaaacattctacggcaaagaaggcggttatgttttgggtaccggcgtgatggatggtaaatcctaccgcaaacagcccattatgattaccgcacctgacaaccaaatcgtcttcaaagactgttccccacgttaa

SEQ ID NO: 56063 - DNA, 1134 bp, Neisseria meningitidis; identical to SEQ ID NO: 38916

SEQ ID NO: 56064 - DNA, 1164 bp, Neisseria meningitidis; identical to SEQ ID NO: 45977

SEQ ID NO: 56065 - DNA, 603 bp, Neisseria meningitidis
atgatgcaaaaacacaaatgtctaatagattttattttgactgttgccagccaaattgcttatgctgacttacctttaagtttggaagaattattgactgacaagggtaaattcaaactagaaagcagtattagctacatcaacactgaacgcaatcaaagcgaatttgctaatcctatttatgtgcaaaccagcgcaacgaaaattgcaactgtaatggctatgatgattacacctgtaatggcgcaaaatttagacagccaagtttttgacagccaaaatgtgaaagcaattcaattatcacaggctgaaatgaaagaaacacaaggtgaatttgttcccattattgcagccgctgcttttggcggtgcattaggtacatgggggtatcatggtgctaatttgtataatcatggtaaattaggaactgcgcaaggcgcggctactgcggcaggaatcggtgcggcaacaggagtagcggcaacagggctggctgctgctgccggaggcggattggctgggaatttggcatggagaccgggtattcatgcactaggttttggtgccaatgctgctaataatgcagtcaattctcgaaaataa

SEQ ID NO: 56066 - DNA, 666 bp, Neisseria meningitidis
atgatgatgcacgcttctgtccaaagccgtttcgcaccgatactttatgttttgattttctttgccggttttttgaccgcgcaaatctggttcaatcagaaagcctatactgaagagctgcctccgcttctgtccgcattgtccgctgtcgcgctggtgtggctggcgtgggcgttcgtgtcggcgcgttcaaaggctaaggcggaaaagttctaccgcgaaaaaatgatacagaacgaaagcatacaccccgtcctgcacgcttctttgcaacacttggaacacaagccgcaaatgctcgccctgctggtcaaaaaccacggcaaagggatggcggaacaggtcaggttcaaggcggaagtgctgcccgacgacgaagacgcgcgcacgattgccgccgagttggcaaaaatggatatgtttgcattggggacggacgcggtcgcctcgggcgaaacctatggacgcgtgttcgccgatattttcgagttgtcggcggctttggaagggcgcgcgttcaaaggaatgttgaaactgacggcggaatataaaaacatcttcggcgatgcctgccgttcggaaacggcgttggagttgggcgcgctcaatcaggcgttgcaggagatttcaaaaacatcggaaaagtccaaacggatattttattga

SEQ ID NO: 56067 - DNA, 1218 bp, Neisseria meningitidis
atgcaacgtcgtattataaccctgctctgcgcggcaggtatggcattctcaacacaaactttggcggcaaatttggaggtgcgcccgaacgcgccggaacgctacacggtcaaacagggcgacaccctgtggggcatttcgggcaaatacctgtacagcccgtggcaatggagccgcctgtgggacgcgaaccgggatcaaatccacaatcccgacctgatttatccggaccaggtattggtgttgcgccacgttgacggcgaaccgcgcctcggcttggaacagacagacggcatccccgtcgtcaaaatgagtccggataaggaagtgtccggatacggtattcccgccatcgatgtcaacttctaccgcatctttatgcggcatccgcaaatcgtttcccgcaaagaaaccgctgccgcgccgcgcctgctctcgggcccggaaggcaggctgctgtacaccaaaggcaccagggtttacaccaaaggcctgaaagagccgggccgctacctgacctaccgaatcaataaaaacatcaccgatccggatacgggtaaattcctcgggcaggaagtcgcattcagcggcatcgtgcgctccctcgactataccgactccgccctcgaacaacgctcgaaacaggctggagaacggctgaaagacaacgaataccatacccgcacccatcctttgattaccccgctgcgcaccccttcgatacagccgctggtggtcgaaaccgccatttccgaaatacagcagggcgactacctgatgaaaatgccggaagacaccgaccgcttcaacatgatgccgcacgaaccgtcccgcccggttcaggctaaaatcgtttccgtgtttgaaggcacaaggattgccggccagtttcaaaccatcaccatcgacaaaggcgaggcggacggtttggacaaaggcacggttttgagcctctacaaacgcaagaaaacgatgcaggtcgacctctccaacaatttcaaaagcagggataccgtcgagctgatttccactcctgccgaagaagtgggcttggcaatggtttaccgcacctccgaacacctgtcgtccgccatcattttggaaaacatctccgatatttccgtaggcgacaccgccgccaatccgggacgcgatttggacaatataccggatcagggccgcagccgcgtgaagtttggcttcaaccgctccgaataa

SEQ ID NO: 56068 - DNA, 927 bp, Neisseria meningitidis
atgaaagtcatctttgccggcacgcccgattttgccgccgccgccttaaaagccgttgccgccgccggttttgaaatcccgctggtgctgacccagcccgaccgtccgaaagggcgcggtatgcaactgaccgccccgcccgtcaaacaagccgcgctggaactcggtttgcgcgtggcacagcccgaaaaactgcgtaacaacgccgaagccctgcaaatgctcaaagaggtcgaggcagacgtaatggtggttgccgcctacggtttgattctgccgcaggaagtgttggatacgccgaaacacggctgcctcaacatccacgcttcgctgttaccccgttggcgtggcgcggcgccgattcaacgcgcgattgaagccggcgatgccgagacaggcgtgtgtattatgcagatggacatcggtttggacaccggcgatgtggtcagcgaacaccgctacgccatccaaccgaccgataccgccaacgaagtccacgacgcgctgatggaaatcggtgcggcggcggttgttgccgatttgcaacagcttcaaagcaaaggccgtctgaacgcggtcaaacagcccgaagaaggtgttacttacgcccaaaaactaagcaaagaagaggcgcgtatcgattggagcgaaagcgcggcggttatcgaacgcaaaatccgcgccttcaaccccgtgcctgccgcgtgggttgagtatcagggcaagccgatgaaaatccggcgggcggaagtggtggcgcaacaaggcgcggcaggcgaagtgttgtcctgttcggcggacggtttggtcgttgcctgcggcgaaaacgcgctgaagattaccgaattgcagcctgccggcggcaggcgtatgaatatcgcggcgtttgcggcgggacggcatatcgaagcagggacgaagctgtaa

SEQ ID NO: 56069 - DNA, 321 bp, Neisseria meningitidis
atgggtatgaatcaacaacgtttgactcaagtgattttggcacctatcgtttctgaaaaaagcaacgtattggctgaaaaacgcaaccaaatgacgtttaaggttttggcaaatgcaaccaaacctgaaatcaaagctgctgttgagctgctgtttggtgttcaagttgcttctgtaactaccgttacaactaaaggcaaaactaagcgttttggtcgtactttgggccgccgcagcgatgttaaaaaagcttatgtaagcttggctgccggtcaagagttggatttggaagccgctgctgcagctgcagataaggaataa

SEQ ID NO: 56070 - DNA, 714 bp, Neisseria meningitidis; identical to SEQ ID NO: 41313

SEQ ID NO: 56071 - DNA, 501 bp, Neisseria meningitidis; identical to SEQ ID NO: 39468

SEQ ID NO: 56072 - DNA, 1185 bp, Neisseria meningitidis
atgacaccacaagtcctgaccatattaggcagtaccggcagcataggcgaaagcacgctggacgttgtctcccgccaccccgaaaaattccgcgtattcgcgctggcagggcataagcaggtcgagaaactggcggtgcaatgccggacgttccgccccgaatatgccgtcgttgccgatgccgaacacgccgcccggcttgaagctttgttgaaaggcgacggcacggcgacgcaggttttacacggcgcgcaggcattggttgacgttgcctctgccgacgaagtcagcggtgtcatgtgcgccatcgtcggggcggtggggctgccttccgcgctcgcagcggcgcaaaaaggcaaaaccatttatctggcgaacaaagagacgctggtggtttccggcgcgttgtttatggaaaccgcccgtgcaaacggcgcggcagtgctgcccgtcgacagcgaacacaacgccattttccaagttttgccgcgcgattacgccggccgtctgaacgaacacggcatcgcttcgattatcctgaccgcttccggcggcccgtttctgaccgccgatttaaacacgttcgacagcattacgcccgcccaagcggtcaaacaccccaattggagcatggggcgcaaaatctccgtcgattccgccaccatgatgaacaaaggtttggagctgattgaagcgcattggctgttcaactgtccgcctgacaagctcgaagtcgtcatccatccgcaatccgtgatacacagcatggtgcgctaccgcgacggctccgtgttggcgcaactgggcaatcccgatatgcgtacgcccattgcttattgtttgggtttgcccgagcgcatcgattcgggtgtcggcgacctggatttcgacgcattgtccgcgctgaccttccaaaagcccgactttgaccgcttcccctgcctgaagctcgcctatgaagccatgaacgcaggcggagccgcgccctgcgtattgaacgccgccaacgaagccgccgtcgccgcctttttggacggacagattaagtttaccgacattgccaaaaccgtcgcccattgtctttcacaagacttttcagacggcataggcgacataggggggctcttggcgcaagatgcccggacacgcgcacaagcgcgggcatttatcggcacactgcgctga

SEQ ID NO: 56073 - DNA, 1128 bp, Neisseria meningitidis
atgaacacctcgcaacgcaaccgcctcgtcagccgctggctcaactcctacgaacgctaccgctaccgccgcctcatccacgccgtccggctcggcggggccgtcctgttcgccaccgcctccgcccggctgctccacctccaacacggcgagtggatagggatgaccgtcttcgtcgtcctcggcatgctccagtttcaaggggcgatttactccaaggcggtggaacgtatgctcggcacggtcatcgggctgggcgcgggtttgggcgttttatggctgaaccagcattatttccacggcaacctcctcttctacctcaccgtcggcacggcaagcgcactagccggctgggcggcggtcggcaaaaacggctacgtccctatgctggcggggctgacgatgtgcatgctcatcggcgacaacggcagcgaatggttcgacagcggcctgatgcgcgcgatgaacgtcctcatcggcgcggccatcgccatcgccgccgccaaactgctgccgctgaaatccacactgatgtggcgtttcatgcttgccgacaacctgaccgactgcagcaaaatgattgccgaaatcagcaacggcaggcgcatgacccgcgaacgcctcgaagagaacatggcgaaaatgcgccaaatcaacgcacgcatggtcaaaagccgcagccacctcgccgccacatcgggcgaaagccgcatcagccccgccatgatggaagccatgcagcacgcccaccgtaaaattgtcaacaccaccgagctgctcctgaccactgccgccaagctgcaatctcccaaactcaacggcagcgaaatccggctgctcgaccgccacttcacactgctccaaaccgacctgcaacaaaccgtcgcccttatcaacggcagacacgcccgccgcatccgcatcgacaccgctatcaaccccgaactggaagccctcgccgaacacctccactaccaatggcagggcttcctctggctcagcaccaatatgcgtcaggaaatttctgccctcgtcatcctgctgcaacgcacccgccgcaaatggctgaatgcccacgaacgccaacacctgcgccaaagcctgcttgaaacacgggaacacggctga

SEQ ID NO: 56074 - DNA, 558 bp, Neisseria meningitidis
atgatcaacgatattcaaaaaacagccgaaggcaagatgcagcgttcggtcgaagtactgaaagaaaatctggcgaaagtgcgtaccggccgcgcgcataccggcctgctcgaccaagtggaagtcgaatactggggcagcatggtccccgtcagccaagttgccaacgtaacgcttctggacgcgcgcaccatcggcgtgaaaccgtttgagggcaatatggcggccaaagtcgagaaagccatccgcgattcaaacttgggactgaacccggcagctgtcggcgacctgatccgcgtgccgatgcccatgctgaccgaggaacgccgcaaagacctgattaaagtcgtacgcggcgaagcggaagaaggccgcgtctctatccgcaacgtgcgccgcgatgccaacgaccacatcaaaaaactcctcaaagacaaagaaatttccgaagacgaggcacgtcgcggcgaagaagcggttcaaaaactgaccgacaaatacattaccgaagccgacaaactcctgactaccaaagaagaagatttgatggcaatttaa

SEQ ID NO: 56075 - DNA, 483 bp, Neisseria meningitidis; identical to SEQ ID NO: 39984

SEQ ID NO: 56076 - DNA, 585 bp, Neisseria meningitidis
atgcacatactgaccgccggcgtggacgaggcagggcgcgggcctttagtcggcagcgtgtttgccgccgccgtcatccttccggaaatattcgacctgcccggactgaccgactccaaaaaactcagcgagaaaaaacgcgacgcgcttgccgaaatgataaaaaatcaggcggttgcgtggcacgttgccgccgcctcgcccgaagaaatcgccagcctcaacatcctgcacgccaccatgctcgcgatgaaacgcgccgttgacggtttggctgtgcgtcccgaaagaatattcatcgacggcaaccgcattcccgaacatttgaacatccctgccgaagccgtcgtcaaaggcgacagcaaaatcatcgaaatctccgccgcatccgttttggcaaagaccgcacgcgatgcggaaatgtacgcactggcgcaacgccatccccaatacggtttcgacaaacacaaaggttacggcacgaagcagcatctggaagccctcaaacaatacggcgtgctgcccgaacatcgccgcgacttcgcccccgtcagaaacctgctcgcgcagcagacgctgttttaa

SEQ ID NO: 56077 - DNA, 1887 bp, Neisseria meningitidis
atgatttaccccaaaacctacgacgttatcgtcgtcggcggcggacacgccggcacagaagccgcgctcgccgccgcccgtatgggcgcgcagacgcttttgctcacacacaatattgaaacgctcggacaaatgtcgtgcaacccttccatcggcggcatcggcaaagggcatttggtgcgcgaactcgacgcgctcggcggcgcgatggcgttggcaaccgacaaatccggcatccagttccgccgtctgaacgccagcaaaggcgcggcagtacgggccacgcgcgcgcaggcggatcgtatcctatataaagccgccatccgcgaaatgttggaaaaccaagaaaacctcgaccttttccaacaagccgtcgaagacgtaacgctcgatggcgaccgcatttcaggcgtaatcaccgcgatgggcgtggagtttaaagcacgcgccgtggtgttgaccgcaggcacgtttttgtccggcaaaatccacatcggtttggaaaactacgagggcggacgcgccggcgaccccgccgccaaatcgctgggcggacgtttgcgcgaattgaacctgccgcaaggccgtctgaaaaccggcacgccgccgcgcatcgacggacgcacgattgacttctcccaactgaccgaacagcccggcgacacgcccgttcccgtcatgtccgtacgcggcaacgccgaaatgcacccgcgccaagtgtcctgctggattacgcataccaacacgcaaacccacgacatcatccgctcaggcttcgaccgcagcccgatgtttaccggcaaaatcgaaggcgtgggcccgcgttattgtccgtctatcgaagacaaaatcaaccgcttcgccgacaaagacagccaccagattttcctagaacccgaaggcctgactacgcacgaatactaccccaacggtatctccaccagcctgccgttcgacatccaaatcgcgctcgtccgcagtatgaaaggtttggaaaacgcccatatcctgcgccccggctacgccatcgaatacgactacttcgatccgcgcaacctcaaagcaagcctcgaaaccaaaaccattgccggattgtttttcgccgggcaaatcaacggtacgacaggttatgaagaagccgccgcgcaaggactgctggcaggcgcgaacgccgtgcaatacgtccgcgaacaagacccgctcctgctgcgccgcgaacaagcctatctcggcgtattggtggacgacctcatcaccaaaggcgtgaacgaaccctaccgaatgttcaccagccgtgccgaataccgcctgcaactcagggaagacaacgccgatatgcgcctgaccgaagacggctacaaaatcggcttggtgggtgaagcgcaatggcgcatgttcaacgaaaaacgcgaagccatcgaacgcgaaatccaacgtttgaaaacaacgtggtacacgccgcaaaaactcgccgaagacgaacaaatccgcgtattcgggcaaaagctcagccgcgaagccaacctgcacgacctcctgcgccgcccgaacctcgactacgccgcgctgatgacgctcgaaggcgcgatgccgtctgaacgcctctccgccgaagtggtcgaacaagtcgaaatccaagtcaaataccaaggctatatcgaccgccaaaacgaagaaatcgacagccgccgcgacatcgaaaccttaaagctgcccgaggatatcgattacagcaaagttaaaggtttgtcggcagaagtgcagcaaaagctcaaccagcacaaacccgaaaccgtcgggcaggcaagccgcatttccggcgtaacccctgcggcagtggcattgctgatggtgcatttgaagcgcgggtttaaagacgcgaaataa

SEQ ID NO: 56078 - DNA, 2760 bp, Neisseria meningitidis
atgaaaagaatgttatttaacgcaacgcaggccgaagagctgcgcgttgccatcgtcgacggacaaaacctgctggatttggacatcgaaacgctgggcaaagaacagcgcaaaggcaatatctacaaaggcatcattacccgcatcgagccgtcgctggaagcgtgtttcgtggattacggaaccgaccgccacggcttcttgccgtttaaagaagtctcccgctcatacttccaagactacgaaggcggacgcgcgcgcatccaagacgtgctcaaagaaggcatggaagtcatcgtccaagtcgaaaaagacgagcgcggcaacaaaggcgccgcgctgaccaccttcatcagcctcgccggacgctatctggtattgatgccgaacaacccgcgcggcggcggcgtatcccgccgtatcgaaggtgaagagcgtcaagagttgaaagccgccatggcggaactcgacattccgaacggcatgagcatcatcgcccgtaccgccggcatcggccgcagcgcggaagagttggaatgggacttgaactacctcaaacaactctggcaggcgattgaagaagcaggaaaagcgcatcacgacccctacctgctctttatggaaagctcgctgctgatccgagccatccgcgactatttccgccccgacatcggcgagattttggtggacaatcaagaagtttacgaccaagttgccgagttcatgagctacgtcatgccgggcaatataggccgtctgaaactctacgaagaccacacgccgctgttttcccgcttccaaatcgaacaccaaatcgaaagcgcgttttcgcgcagcgtcagcctgccctccggcggcgcgatcgtcatcgaccataccgaagccctcgtctccatcgacgtgaactccgcacgcgccactcgcggcgcagacattgaagacaccgcgttcaaaaccaatatggaagccgccgaagaagtcgcccgacaaatgcgcctgcgcgacttgggcggcttggtcgtcatcgacttcatcgacatggaaaaccccaaacaccagcgcgatgtggaaaacgtcctgcgcgacgcgctcaaaaaagaccgcgcccgcgtgcagatgggcaaactctcccgtttcggacttttagaattgagccgccaacgtttgaaaccggctttgggcgaaagcagccacgtcgcctgtccgcgctgcgccggcaccggcgtgattcggggcatcgaatccaccgccctgcacgttttacgcatcattcaagaagaagcgatgaaggacaacaccggagaagtgcgcgcacaagtgcccgtcgatgtcgccaccttcctgctgaacgaaaaacgcgccgagctgtttgcgatggaagagcgtttggatgtcaacgtcgtcctgattccgaacatccacctcgaaaatccgcactacgaaatcaaccgcatccgcaccgacgacgtagaagaagacggcgaaccgagctacaaacgcgtcgccgagccggaagaagacgaatccgccaaaccgttcggcggcgaaaaagccaaagccgcccgtcccgaacccgccgtcaaaggcgtgcgccacaccagccccgccccgactgccgcccccgagaaaaaaacctcttggtgggacagcttcaaagcatggctcaaacgcattttcggcggcagcgaaacccaagccgcgcccgctgccgaaacctccgaaaaacgcagcacggcaaaccgcagcggcagccgcgccaacaaccgccgccaaaacccgcgccgcagcaaacgcgaaggcagcaaagtagaagtccgcgaagtggcaggcaaaactgccggacaggaagcgcgtgccgacaaagccgaaacgcgcaacaacggcaaccgccgccgcaacgaacgcggcgaccgtgccgccgaacgcgccaacgaagcggaaatccaaagccgcaacgtacagcctgccgcaaccgttgcagatgccgcaccgtccgaaaccgaaatgcaaaccggcaaacgccgccgcaacggcagccgcagcgaacgcagccaaaccgcgccggaaaccgccgccgttgccgaaacagccgttcagacagcggaaaacacgccgtccgaaccgcataccgcagaagacaaaggcagcaagcccaaatccgaacgcaaccgccgcgaacgcgacagccgcgacgccaaagaacgccgcgagcgcaacaatcagcgcgaccgccgtcaaaacggcaaaaaacgcaatatcccgtctgccgccaaaatcgagcagtacctgaatattcacgacaccgccgacaaagtccgttccgccgccgcgcacgttttcggcgaaaccgacgcaaacgcgccgattaccgtcagcattgccgatccggttgcagaaagggatcttccgacagcatctcccgccgtttcaaacggcgacgcaccggtttatgatgcggcggaaaaaatccgccgtgccaccgccgccatcctgcccgaaggcgcgacaccgaaagccgaagcacaggaaatgccgtctgaaaccgcaacctttacggctgcggcggaacaggcacgggaaaccgcacaaaccggcggactcgtcctgatcgaaaccgaccctgccgcattgaaggcatgggcggcacaacccgaagtccaaaccggacgcggtttgcgccgttccgaacagcccaagccgtctgaagtcgcaaccgtccctgccgaagaaatgatccaagtcgaaacccggcaaggctga

SEQ ID NO: 56079 - DNA, 1977 bp, Neisseria meningitidis
atgaacgaattttcgcttgcccctattgtggttgttttgctggtgtcggtcattacggtgatcctgtgccgcaagttcaacattccctccatgctgggctacctgctggtgggctttttggcggggcccggtatgctcagcctgattccgaaaagccatgcgacggattatttgggtgaaatcgggattgtgttcctgatgttcagcattggtttggagttctcgctgcccaagttgagggcgatgaggcggctggtattcgggctgggcggtttgcaggtcggcgttacgatgctgtcggtaatgggcatactgatgctgacgggcgtgccgttcaattgggcgtttgccgtgtcgggcgcgttggcgatgtcgtccacggcgattgtgagccggattttgtcggaaaagacggaattggggcagccgcacggtcagatggcgatgggcgtgctgctgatgcaggacatcgccgtcgtgccgctgatgattctgattcccgcgctggcgggcggaggggacggaaatatttgggcggccttgggtttggcgtttgcaaaaatgctgctgacgctggggctgctgtttttcgtcggcagcaaaattatgtcgcgatggttcaggatggtggcaaaacgcaaatcgtccgaactctttatgatcaatgtgctgctggtaaccttgggtgtggcttatctgactgagctggaaggtttgtctatggcgttgggcgcgtttgtggcggggatgctgctttcggaaacggaataccgtttccaagtcgaagacgacatccgcccgttccgcgatattttgctcggctttttctttatcacggtcggcatgaagctggacattcaggcattgatcggcggctggcggcaggtattgatgctgttggcaatgctgctggtgttgaaggcactggttgtgtttgccattgccttcaaaatgaaacattcggtcggcgacagcctcaaaacggctttgtatctcgcacaaggcggcgagttcggcttcgtgatgctggccattgccgggcagcttgatatggtttcgccagaatgggaacaggcggcgacggcggcggtgctgctgtcgatgattatcgcgcccttcctcttgggcggcagcgatgcgctggtcgggcgtttggtcaagtcaagctgggacatgaagtcgctcgatctgcacagtatgctggtagaaaccatgagcaagtccgaccatgtgctgattgtcggcttcggcaggggcgggcagacggtcggacgcgtccttgcccaagaggatattccgtatttcgcgctcgacttggacattgcgcgggtgcaggttgccagaagtgcgggcgaaccggtgtcgttcggcgatgcgaaacgcagggaagtattggaagccgccggtttggggcgggcgaaaatggtggtgctgacgctcaacaatatgcacgaaacgcaacacgttttagacaatgtgctgtccatgtatcccaatatgcccgtatatgtgcgcgccaccaacgacgattatgtgaaaacgtttaccgatataggtgcggaagaagccgtgtcggacaccaaagaaaccggactcgtgctggcaggctatgcgatgttaggcaacggcgcgtcgtaccggcacgtctatcagacgatggcaaatatccgccacagccgttatgccgcgttggagggtttgtttgtcggtagtgatgatgaggcaggattcggcgaaaatggcgaaaccgtccgccacgcctttcctttggctgcagaagcatacgccgtcggcaaaacagtcggcacgcttccgatggcggcttacggcatcaaactcttgttcgtccgccgccgcacaggccggattgaaaacccggatgcctcgtttacattggaaggcggtgacgtgttggtggtcgcaggcaaaaaagaagaaattatctcttttgaaaactggagtttgcagggaatataa

SEQ ID NO: 56080 - DNA, 1386 bp, Neisseria meningitidis
atggtcagcatttttgatattttcaaaatcggtatcgggccttccagttcgcatacggtcggcccgatgaaggcagccgccgcctttgcggcaggtttggatgcacaggctgttcgcatcgtcatcgacatttacggctcgctcgccctgaccggatacggacacggtacatttgacgcactgatgctcggtttggaaggcagcctgccgcacgacatcccgcttgtcggcattcccgaacgcctcgaacgcatccgcacgcagcacatcctccggctcaacgggcaagaaatccgcttcatccccgaccgcgacctgaacatactcggcaatcaagtgctgcccaaacaccccaacggcctgcgttttaccgcctatgcttcagacggcacggtattgaatgaacaggtttattattcggtcggcggcggctttgtcgttaccgaagaagattttgaccggcaggcggaaacggaaaaagccgttccctatccctataccagttgcgccgaactgcttgcccgatgccgtctgaaccggctcgacatctccgaagtcgtgttggcaaacgaagccgcgcttgccggatgcggcgaagccgaaatccgccgccgcgccgctgccgttgccgaggttatggaaggctgcatcaaacgcggcttgggtgcggacggcgaactgcccggcggattgaacgtccgccgccgcgccccgcagcttgccgccaagctcaaagtcctgcgcgaaaccgaaatcgtcaacacccagctctggccgatggtgtacgccatggcggtcaacgaagaaaacgccgccggcggacgcgtcgttaccgcaccgaccaacggcgcggcaggcatcattcccgccgtattgcactatttccgcaagttcaatccgcacgccacacaggaacgcgtcgaaaacttcctgctcaccgcaggcgcaatcggcatcctctacaagaccaacgcctccatttccggtgcggatgtcggctgtcagggcgaagtcggcgtagcgtgttcgatggcggcgggcgcatacgccgaagtcatcggcggcacgcccaaacaagtggaaaacgccgccgaaatggcgatggaacaccatttggggctgacttgcgaccccgtcggcggactggtgcaaatcccctgcatcgagcgcaacggcatcgccgccgaaaaagccctcaaactcggcacgctcgcgcttttggaagacggcacggacaaaaaagtctcgctcgacgaagtcatccgaaccatgctgcaaaccggccgggatatgaaggcgacctacaaagaaacctcgcttgccggactcgccgccacgctccggaaaaaagccgtccccgtatccgtgcgcgtggtcgagtgctga

SEQ ID NO: 56081 - DNA, 873 bp, Neisseria meningitidis; identical to SEQ ID NO: 37718

SEQ ID NO: 56082 - DNA, 852 bp, Neisseria meningitidis
atgaccttactcggaataaagctcaaacagacccagcagctcaaccagcggctgcaacaatctttgcgcgtattgcagatgtcgggtatcgaacttgaacgcgaggtcgaaaactggctgtcggacaaccccctgctcgaacgcaaagacacggatgaattttccgatgccgagttcagccattacactgcgcctgcccgtcaaatcggcggagacgaaggcgaagatatgctgtccaacatcgccggcgagcaggatttcaagcaatacctgcacgcgcaagtatgcgaacacccgctttccgaccaagaatccgcctgtgtccacatcctcatcgatttccttgacgagcaaggttatctgaccgacagcatcgaagacatcctcgaccatacgcccttggagtggatgttggatgaagcaatgctgaaacaagccctgaccgcattgaaaaaattcgacccggcaggcgtggccgccgccgatttgaacgaatcgctgatactgcagatagaaagatcgggcgaatgtgctgccaaaccctccgccctgcatatcgtccgaaacgccctcgacagcattgacggcaaccgcagccaaaccctcgcgcgaataaaaaaacgcctgccccaaaccgacagcggcacactcgaagccgcactcgacctcattgcttcgctcaatccctttcccgccgccggttttgcctcgtccacgcccacgccgtattctgacgaggcgctcgccaacctgctggctttccgcggcatggaggtttctcgccgcaccattgccaaatacagagaatcctttgagattccggcagcacacaaacgcaaaaccgcagaataa

SEQ ID NO: 56083 - DNA, 438 bp, Neisseria meningitidis
atgggaaatttcttatatagaggcattagttgccaacaagatgagcaaaataatggacagttaaaacctaaaggtaataaagctgaagttgcaattcgttatgatggtaagtttaaatatgatggtaaagctacacatggtccaagtgtgaagaatgcagtttacgcccatcaaattgaaacaggtctatatgacggatgttatatatctacgacaacagacaaggaaattgccaagaaatttgcaacaagttccggcatcgaaaatggctatatatatgttttaaatagggatttgtttggtcaatattctatttttgaatatgaggttgaacatccagaaaacccaaatgagaaggaagtaacaatcagagctgaagattgtggctgtattcctgaagaagtgattattgctaaagagttgatagaaattaactaa

SEQ ID NO: 56084 - DNA, 621 bp, Neisseria meningitidis; identical to SEQ ID NO: 37903

SEQ ID NO: 56085 - DNA, 1452 bp, Neisseria meningitidis; identical to SEQ ID NO: 45985

SEQ ID NO: 56086 - DNA, 1857 bp, Neisseria meningitidis
atgttgaacaaaatattttcctggttcgagtcccgaatcgacccttatcccgaagccgccccgaaaacgccagaaaaaggcttgtggcggtttgtctggagcagcatggccggcgtgcggaaatggatagccgccctggctgcgctgaccgccggcatcggcattatggaagccctggtttttcaatttatgggcaaaatcgtggagtggctcggcaaatacgcgcccgccgaactgtttgccgaaaaaggttgggaactggcggcaatggcggcgatgatggtattttcggttgcgtgggcgtttgccgcgtccaacgtgcgcctgcaaacccttcagggcgtgttccccatgcgcctgcgctggaacttccaccgcctgatgctgaaccaaagcctcggtttttatcaggacgaatttgccggacgcgtgtccgccaaagtcatgcagaccgcgctggcgttgcgcgacgcggtgatgacggttgccgatatggtcgtttatgtgtcggtgtatttcattacctccggcgtgattctcgcctcgctcgactcatggctgctgctgccctttatcggctggattgtcggtttcgcttcggtgatgcgcctgctgattcccaaattggggcaaaccgccgcatggcaggcggatgcccgctcgctgatgaccggccgcattaccgatgcctattccaatatcgccaccgtcaaactcttctcccacggcgcgcgtgaagccgcctatgccaagcagtcgatggaagaatttatggttacggtgcgcgcccaaatgcggctggcgacgctgctgcattcgtgcagcttcatcgtcaacacctccctgaccctctccaccgccgcactgggcatctggctttggcacaacggacaggtcggcgtgggcgcggtcgccaccgccaccgcgatggcgttgcgcgtcaacggtttgtcgcaatacatcatgtgggaatccgcgcggctgtttgaaaacatcggcaccgtcaacgacggtatggcaaccctgtccaaaccgcacaccatcctcgacaagccccgggcactgccgctgaacgtgccgcaaggcgcaatcaaatttgaacacatcgatttctgctacgaagcgggcaaaccgctgctcaacggcttcaacctcaccatccgcccgggcgaaaaagtcggcttgatcggacgcagcggcgcgggcaaatccaccatcgtcaacctgcttttgcgcttctacgaaccgcaaagcggcacggtttcgatcgacgggcaggacataagcggcgttacccaagaatctttacgcgcccaaatcggtttggtcacgcaagatacctcgctgctgcaccgttccgtgcgcgacaacattatttacggccgccccgacgcgaccgatgccgaaatggtttctgccgccgaacgcgccgaagccgccggcttcatccccgacctttccgatgccaaagggcggcgcggctacgacgcacacgtcggcgaacgcggcgtgaaactctccggcggtcaacgccagcgcatcgccatcgcccgcgtgatgctcaaagacgcaccgattcttcttttggacgaagccaccagcgcgctcgattccgaagtcgaagccgccatccaagaaagcctcgacaaaatgatggacggcaaaaccgtcatcgccatcgcccaccgcctctccaccatcgccgcaatggacaggctcgtcgtcctcgacaaaggccgcatcatcgaagaaggcacgcacgccgaactcctcgaaaaacgcgggctttacgccaaactctgggcgcaccagagcggcggcttcctcaacgaacacgtcgagtggcagcacgactga

SEQ ID NO: 56087 - DNA, 1083 bp, Neisseria meningitidis
atgatgaaaatcaaagccctgatgattgccgccgcattgctggcagcagccgatgtccacgccgcaccgcaaaaggcaaaaaccgcatccgccaaagttgccaaagttgccaaagttgccaaagttgccaaagttgccaaagttgccaaagttgccaaagttgccaaagttgccaaagttgccaaagttgccgccacggcgcaaaaagaagccgcacccgcacaacagcagggcggtatccgcttttcagacggcattgccgccgttgccgacaacgaagtcatcacgcgccgccggcttgccgaagccgttgccgaagccaaagccaacctgcccaaagaggcgcagataagcgaatccgagctgtcccgacaggtgctgatgcagcttgtcaaccaatccctgattgtacaggcgggcaaacgccgcaacattcaagcaagcgaagcggaaatcgatgccgtcgtcgcaaaaaattccgccctcaaaaacctcagccccgcccaacgccgcgattttgccgacaacatcattgccgaaaaagtccgccagcaggcagtgatgcagaacagccgcgtgagcgaagctgaaatcgatgccttcctcgagcaggcgcaaaaacaaggcatcaccctgcccgaaggcgcaccgttgcgccaataccgcgcccaacacatcctgattaaagccgacagcgaaaacgccgccgtcggcgcggaaagcaccatccgcaaaatctacggagaggcccgcagcggcacagacttttccagcctagcgcgccaatattcgcaagacgcgagcgcgggcaacggcggagatttgggctggtttgccgacggcgtgatggttcccgcctttgaagaagccgtccacgcgctcaaacccggacaggtcggcgcgcccgtccgcacccaattcggctggcatatcatcaaattgaacgaagtgcgcgatgccggcacacctcaggaacgtatccgcaattccgtgcggcaatacatcttccaacaaaaagccgaacaggcaaccgtcaacctgttgcgtgacctgcattccggcgcgtatgtcgacatccgctaa

SEQ ID NO: 56088 - DNA, 2379 bp, Neisseria meningitidis
gtgctggcattgggcttctgtttcggcacgcattgcgccgccgccgatgccgttgcggcggaggaaacggacaatccgaccgccggaggaagcgttcggagcgtgtccgaacccatacagcctaccagcctgagcctcggttcgacctgcctgttttgcagtaacgaaagcggcagccccgagagaaccgaagccgccgtccgaggcagcggcgaagcatccatccacgaagactatacgcgcattgttgccgacaaggtggaaggacagtcgcaggtgcaggtgcgtgccgaaggcaacgtcgtcgtcgaacgcaaccggacgaccctcaataccgattgggcggattacgaccagtcgggcgacaccgttaccgcaggcgaccggttcgccctccaacaggacggtacgctgattcggggcgaaaccctgacctacaatctcgagcagcagaccggggaagcgcacaacgtccgtatggaaaccgaacacggcggacggcggctgcaaagcgtcagccgcaccgccgaaatgttgggcgaagggcattacaaactgacggaaacccaattcaacacctgttccgccggcgatgccggctggtatgtcaaggccgcttccgtcgaagccgatcgggaaaaaggcataggcgttgccaaacacgccgccttcgtgttcggcggcgttcccattttctacaccccttgggcggacttcccgcttgacggcaaccgcaaaagcggcctgcttgttccctcactgtccgccggttcggacggcgtttccctttccgttccctattatttcaaccttgcccccaatctcgatgccacgttcgcgcccagcgtgatcggcgaacgcggcgcggtctttgacgggcaggtacgctacctgcggccggattatgccggccagtccgacctgacctggctgccgcacgacaagaaaagcggcaggaataaccgctatcaggcgaaatggcagcatcggcacgacatttccgacacgcttcaggcgggtgtcgatttcaaccaagtctccgacagcggctactaccgcgacttttacggcaacaaagaaatcgccggcaacgtcaacctcaaccgccgtgtatggctggattatggcggcagggcggcgggcggcagcctgaatgccggcctttcggttctgaaataccagacgctggcaaaccaaagcggctacaaagacaaaccgtatgccctgatgccgcgcctttccgccgattggcgcaaaaacaccggcagggcgcaaatcggcgtgtccgcacaatttacccgcttcagccacgacagccgccaagacggcagccgcctcgtcgtctatcccgacatcaaatgggatttcagcaacagctggggttacgtccgtcccaaactcggactgcacgccacctattacagcctcaaccgcttcggcagccaagaagcccgacgcgtcagccgcactctgcccattgtcaacatcgacagcggcgcaacttttgagcggaatacgcggatgttcggcggcggagtcctgcaaaccctcgagctgcgcctgttctacaactatattcctgccaaatcccaaaacgacctgcccaatttcgattcgtcggaaagcagcttcggctacgggcagctctttcgcgaaaacctctattacggcaacgacaggattaacaccgcaaacagcctttccgccgccgtgcaaagccgtattttggacggcgcgacgggggaagagcgtttccgcgccggcatcggtcagaaattctatttcaaggatgatgcggtgatgcttgacggcagcgtcggcaaaaaaccgcgcaaccgttccgactgggtggcatttgcctccggcagcatcggcagccgcttcatcctcgacagcagcatccactacaaccaaaacgacaaacgcgccgagaactacgccgtcggtgcaagctaccgtcccgcacagggcaaagtgctgaacgcccgctacaaatacgggcgcaacgaaaaaatctacctgaagtccgacggttcctatttttacgacaaactcagccagctcgacctgtccgcacaatggccgctgacgcgcaacctgtcggccgtcgtccgttacaactacggttttgaagccaaaaaaccgatagaggtgctggcgggtgcggaatacaaaagcagttgcggctgctggggcgcgggcgtgtacgcccaacgctacgttaccggcgaaaacacctacaaaaacgctgtctttttctcacttcagttgaaagacctcagcagtgtcggcagaaaccccgcagacaggatggatgtcgccgttcccggctacatccccgcccactctctttccgccggacgtaacaaacgaccctga

SEQ ID NO: 56089 - DNA, 195 bp, Neisseria meningitidis; identical to SEQ ID NO: 40091

SEQ ID NO: 56090 - DNA, 651 bp, Neisseria meningitidis; identical to SEQ ID NO: 43953

SEQ ID NO: 56091 - DNA, 1422 bp, Neisseria meningitidis
atgaccaccatctacaacacccttacccgccaaaaagaaccctttgcccccatcgaccctgaaaacgtgcgtatgtacgtttgcggcatgactgtttacgactattgccacttaggccatgcccgtgtgatggtggtgttcgacatgattgcccgttggttgcgcgagtgcggttatccgctcacttatgtgcgcaatatcaccgacatcgacgacaaaatcatcgcccgtgcggctgaaaacggcgaaaccatcggcgagctgactgcgcgtttcattcaggctatgcacgaagatgccgatgctttgggtgtgttgcgtccggatattgagccgaaggcaacagaaaacattccgcagatgattgccatgattgagaccctgattcaaaacggcaaagcctatcctgccgcaaacggcgacgtttactacgccgtgcgcgagttttcggcttacggacaattatcgggcaaatcattggacgacctgcgcgcgggcgagcgcgtggaagtggacggtttcaaacgcgatccgcttgattttgtattgtggaaagcggcgaaagcaggcgaaccggcgtgggaaagcccgtggggcaacggccgtccgggttggcacattgaatgctctgccatgagtgaaaacctgttcggcgataccttcgacatccacggcggcggcgcggatttgcagtttccgcaccacgaaaacgaaattgcccaaagcgtcggcgcgacggggcatacctgcggtcatcatcacgcgcaaacccaccacgggcaaagcatcgccagccacgtcaaatattggctgcacaacggctttatccgcgtggacggcgaaaaaatgtccaaatcactgggcaacttcttcaccatccgcgaagtgttgaaacaatacgaccccgaagtcgtgcgcttcttcatcctgcgcgcccactaccgcagcccgttgaactattccgacgcgcatttggacgatgcaaaaggtgcgctgacccgtctgtacaccaccttgaaaaacacgccggcggctgagtttgatttatccgaaaacgccaacggctacacccgccgcttctacgccgccatgaacgacgatttcggtacggtcgaagcggttgccgtgttgttcgaactggcaggcgaagtgaacaaaaccaatgacgcacagctcgccggctgcctgaaagccttgggcggcatcatcggactgctgcaacgcgatccgattgagttcctgcaaggaggcgcggcttcagacggcctctccaacgaagaaatcgaagacttaatcgcacggcgcaaacaagcgcgcgcggataaaaactgggcagagtccgaccgcatccgcgaccttctgaacgaacacaaaatcattctggaagacaacgccggcggtacgacttggcggcgcggttga

SEQ ID NO: 56092 - DNA, 1100 bp, Neisseria meningitidis
atgagcaccttctttcagcaaaccgcacaagccatgattgccaaacacatcgaccgtttcccactattgaagttggatcaagtgattgattggcagccgatcgaacagtacctgaaccgtcaaaaaacccgttaccttagagaccaccgcggccgtcccgcctatcccctgttgtccatgttcaaagccgtcctgctcggacaatggcacagcctctccgatcccgaactcgaacacagcctcatcacccgcatcgatttcaacctgttttgccgttttgacgaactgagcatccccgattacagcaccttatgccgctaccgcaactggctggcgcaagacgacaccctgtccgaattgctcaaactgattaaccgacaactgaccgaaaaaggtttaaaaatagagaaagcatccgccgccgtcattgacgccaccattattcagaccgctggcagcaaacagcgccaggccatagaagttgacgaagaaggacaaatcagcggccaaaccacaccgagtaaagacaaagatgcccgttggatctctacaaactcggttacaaacaacatacccgtaccgatgcggaaggctatatcgagaaactgcacattacccccgccaatgccaatgagtgcaaacacctgtcgccgttgttggaaggactgcccgaaggtacgaccgtctatgccgacaaaggctatgacagtgcggaaaaccggcaacatctggaagagcgtcagttgttagacggcattatgcgcaaagcctgccgcaaccgtccgctgtcggaaacgcaaaccaaacgcaaccggtatttgtcgaagacccgttatagtggattaaatttaaatcacgacaaggcgacgaagccgcagacagtacaaatagtacggcaaggcgaggcaacgccgtactggtttaaatttaatccactatatgtggtcgaacagagcttcggtacgctgcaccgcaaattccgctatgcgcgggcagcctatttcgggctgctcaaagtgagtgcgcaaagccacctgaaagcgatgtgtttgaacctgttgaaagcggccaacaggctaagtgcgcccgctgccgcctaa

SEQ ID NO: 56093 - DNA, 1395 bp, Neisseria meningitidis
atgaccgtcaaaacccgtttcgcccccagccccaccggctacctgcacattggcggcgttcgcaccgccttgttttcatgggcgtttgcccgccatcacaaaggcgagttcctattgcgtatcgaagacaccgacttggcgcgttccaccgccgaatccgtcaacatcatcctcgacggcatgaaatgggtcggtctcgattacgataacgccgacaacgtggtgtaccaaacccgccgcttcgaacgctataaagaagtcatcgccgaactcttggcaaaaggcgatgcctactactgctattgcagcaaagaagagctggaagcgatgcgcgagaaagccgaaaaagaaggcacggcgacttacgaccgccgctggcggccggaagcaggcaaaaccctgcccgaaatccctgccggcgtgcaacccgtcgtccgcttcaaaacgcctttggatggcgtaaccaagtggacggacctggtcaaaggcgaaatttccatccccaacgaagccctcgacgacctgattattgcacgcgccgacggcacaccgacctacaacttctgcgttgtcgtagacgactacgacatgggcgttacccacgttatccgcggcgacgaccatgtgaacaacaccccgaaacaaatcaacatcttaaaagccatcggcgcaaacctgcccgaatacggtcatctgcccatgattcttaacgaacaaggcaaaaaaatctccaaacgcagcggcgatactgttgccattaccgatttcggcgcgatgggtatcctgcccgaagccatgctcaactatctggcgcgcttgggctgggcgcacggcgacgacgagttctttacgatggaacaattcatcgaatggtttgatttgaaagacgtttccccgtccccaagccgtatggatttgaaaaagctctattggatcaacggcgaacacatcaaaatcacgcccaacgagaaactcgccgaactcgtcaaaccgcgtctcgctctgcgcgatatccatgaaaccgaaaaacctgcgttggaagacgtgttggcacaggttaaagaccgcgcccaagatttgaacgccttggcagacgaatgtctgtatttctacaaaaaacaagtccctgccgaagccgatgttgccaaacactgggacgacgaagccgccgctcgtatgctgcgctttgccgaacgcctcgagggtttggaagactggaatgccgaagccatccacgacctcttcaaacctttctgcgacgaagaaggcatcaaaatgggtaaactcggtatgcccctgcgcctcgccgtctgcggtacggcgaaaaccccaagcgtcgatgctgtgttggcattaatcggcaaagaagaagtgttgaaacgcatccgcgcttaa

SEQ ID NO: 56094 - DNA, 219 bp, Neisseria meningitidis; identical to SEQ ID NO: 46127

SEQ ID NO: 56095 - DNA, 1326 bp, Neisseria meningitidis
atgaaaaaatacctgttccgcgccgccctgtgcggcatcgccgccgccatcctcgccgcctgccaaagcaagagcatccaaacctttccgcaacccgacacatccgtcatcaacggcccgggccggccggtcggcatccccgaccccgccggaacgacggtcggaggcggaggggccgtctataccgttgtaccgcacctgtccctaccccactgggcggcgcaggatttcgccaaaagcctgcaatccttccgcctcggctgcgccaatttgaaaaaccgccaaggctggcaggatgtgtgcgcccaagcctttcaaacccccgtccattcctttcaggcaaaacagttttttgaacgctatttcacgccgtggcaggttgcaggcaacggaagccttgccggcacggttaccggctattacgagccggtgctgaagggcgacgacaggcggacggcacaagcccgcttcccgatttacggtattcccgacgattttatctccgtccccctgcctgccggtttgcggagcggaaaagcccttgtccgcatcaggcagacaggaaaaaacagcggcacaatcgacaataccggcggcacacataccgccgacctctcccaattccccatcactgcgcgcacaacggcaatcaaaggcaggtttgaaggaagccgcttcctcccctaccacacgcgcaaccaaatcaacggcggcgcgcttgacggcaaagcaccgatactcggttacgccgaagaccctgtcgaacttttttttatgcacatacaaggctcgggccgtctgaaaaccccgtccggcaaatacatccgcatcggctatgccgacaaaaacgagcatccctatgtttccatcggaaaatacatggcggataagggctacctcaaactcggacaaacctccatgcagggcattaagtcttatatgcggcaaaatccgcaacgcctcgccgaagttttgggtcaaaaccccagctatatctttttccgagagcttaccggaagcagcaatgacggccctgtcggcgcactgggcacgccgctgatgggcgagtacgccggcgcagtcgaccggcactacattaccttgggcgcgcccttatttgtcgccaccgcccatccggttacccgcaaagccctcaaccgcctgattatggcgcaggataccggcagcgcgattaaaggcgcggtgcgcgtggattatttttggggatacggcgacgaagccggcgaacttgccggcaaacagaaaaccacgggatatgtctggcagcttctgcccaacggtatgaagcccgaataccgcccgtaa

SEQ ID NO: 56096 - DNA, 1371 bp, Neisseria meningitidis
atgccgcaaaacactttaaacatcgtcatcctcgccgccggcaaaggcacgcgcatgtattccaaaatgcccaaggttttgcacgaaatcggcggcgaaacaatgctcgggcgcgttatcggcaccgccgccgcgctgaatccgcaaaacatctgcgtcgtcgtcggccacggcaaagagcaagttttagacaccgtcaaacgcgatgtcgtctgggttgaacaaaccgaacagctcggcaccggccacgccgtcaaaaccgccctgccccaccttgccgccgaaggccgcacgctggtgttgtacggcgacgttcctttaattgacgttgaaaccctcgaaaccctgctcgaagccgcaggcaacgaagtcgggctgttgaccgacgtgcccgccgacccgtcaggtttggggcgcatcatccgcgacggcagcggcagcgtaaccgccattgtcgaagaaaaagacgccgataccgcccaaaaagccgtgaaagaaaccaacaccggcatcctcgtcctgcccaacgccaaactggaaaactggctgaacagcctttccagcaacaatgcccaaggcgaatactacctgaccgacctcatcgccaaagccgttgccgacggtattaaagttcatcccgtccaagtccgcgcctcccacctcgccgccggcgtgaacaacaaacgccagctcgccgaactcgaacgcatcttccaaaccggacaggcgcaagaattgctcaaagcaggcgttaccctgcacgacccggcacgtttcgatttacgaggccgtctgaaacacggacaggatgtcgtaattgatgtgaactgtatctttgaaggcgaagtcgaaatcggcgacaacgtcgaaatcggcgcaaactgcgtcatcaaaaacgccaaaatcggtgcaaacagcaaaatcgcccccttctcccacctcgaagactgcgaagtcggcgaaaacaaccgaatcggcccgtacgcccgcctgcgtccgcaagcccgccttgcagacgacgtacacgtcggcaacttcgtcgaaatcaaaaacgccgccatcggcaaaggcaccaaagccaaccaccttacctacatcggcgatgccgaagtcggcagcaaaaccaacttcggcgccggtacgattattgccaactacgacggcgtgcacaaacacaaaaccgtcatcggcgacgaagtgcgcatcggttcaaactgcgtcctagtcgcccccgttaccctcggcaacaaagtaaccacaggcgcgggcagcacgattacccgcaatgtcgaagacaacaaactcgccctcgcccgcgcccgccaaaccgtcatcgaaggctgggtgcgtcctgaaaaagacaaacaataa

SEQ ID NO: 56097 - DNA, 558 bp, Neisseria meningitidis
atgaacatcattgataccgccattcctgacgtaaaactgcttgagccccaagtcttcggcgacgcgcgcggcttttttatggaaaccttccgcgacgggtggttcaaagaaaatattgccgactgttcctttgttcaggaaaaccactccaaatccggcaaaggcgtattgcgcggcctgcactaccaaaccgaaaacacacaaggcaaactcgtacgcgtagttgtcggcgaagtgttcgacgtggccgtcgatatgcgcgaaggttcgccgactttcggcaaatgggcgggcgcaaccctgtccgcgcaaaaccaatgccagctttggatacccgaaggcttcgcgcacgggttttacgttttgagcgacacgaccgaacttacctacaaatgcacggactattacaagcctgaagccgaacaggttttaatatggaacgacccggcaatcggcataggctggccgcttcaaaccgcgccgctgctgtcgcccaaagaccttgccggcaaaacgtgggcgcaagccgaaaagctccgccttacactttcccgataa

SEQ ID NO: 56098 - DNA, 867 bp, Neisseria meningitidis
atgaaaggcatcatactggcaggcggcagcggcacgcgcctctaccccatcacgcgcggcgtatccaaacagctcctgcccgtgtacgacaaaccgatgatttattaccccttgtcggttttgatgctggcaggaatccgcgatattttggtgattaccgcgcctgaagacaacgcctctttcaaacgcctgcttggcgacggcagcgatttcggcatttccatcagttatgccgtgcaacccactccggacggcttggcacaggcatttatcatcggcgaagaatttatcggcaacgacaatgtttgcttggttttgggcgacaatattttttacggtcagtcgtttacgcaaacattgaaacaggcggcagcgcaaatgcacggcgcaaccgtgtttgcttatcaggtcaaaaaccccgaacgtttcggcgtggttgaatttaacgaaaacttccgcgccgtttccatcgaagaaaaaccgcaacggcccaaatccgattgggcggtaaccggcttgtatttctacgacaaccgcgccgtcgagttcgccaaacagctcaaaccgtccgcacgcggcgaattggaaatttccgacctcaaccaaatgtatttggaagacggttcattgtccgtccaaatattaggacgcggtttcgcatggttggacaccggcacgcacgaaagcctgcacgaagccgcttcattcgtccaaaccgtgcaaaatatccaaaacctgcacatcgcctgcctggaagaaatcgcttggcgcaacggttggctttccgatgaaaaactggaagaattggcgcgcccgatggcgaaaaaccaatacggccaatatttgctgcgcctgttgaaaaaataa

SEQ ID NO: 56099 - DNA, 291 bp, Neisseria meningitidis; identical to SEQ ID NO: 45422

SEQ ID NO: 56100 - DNA, 204 bp, Neisseria meningitidis
atgtttgatggagcaaaggttgtacgaaggatggaaggcaacctgtgggtgtttggtatggtcgcgcttgaaaaaacgtgttttaagggacaaatgccgtctgaaaatcggtttcagacggcattttctgtttatttaaagcaaacaggaaaaggcagcaatattctgcagtcttcctattcacacaagcgttttatagttaat

SEQ ID NO: 56101 - DNA, 177 bp, Neisseria meningitidis
atgttctgtatcgttgtttaccgcttccgcacctttgtccgccttaaagcaggtagacaccgcaatgaatcgacgcaaagaaaatgccgtctgaacatgcgttcgggcggcgttttgttggggggtatcggagcggaacgtctgaaaaagggtttcaggcggtctttgggcgtgtgg

SEQ ID NO: 56102 - DNA, 378 bp, Neisseria meningitidis
atgtgtgagttaaaaaacttcagaagaaatattacttgttttgagggatatgacgaaaattcatttattggcaaatggtatgatgacggggtgtgggatgatgaagaatattggaaattggagaatgatttaatcgaggttagaaaaaaatatccttatccgatggatataccaagatatgttgtcattggaatcggtaccattattgatttcttaatggttccaaattggaaactttttgaaattaaagcttccccttggctacctgatagcgtaggaattaatgaacgttatgaaaggcttaaaacaatgctccgttatatttttaccgagaaagacatagtcaacgtgcgatttgattattacaacaaaaaatag

SEQ ID NO: 56103 - DNA, 546 bp, Neisseria meningitidis
atgattatagttgaacatttagaacattatttgggtgaaatcgaaagcggtataaaatgcttggatcgacgttatcatctcagcgtttccgtcttcccatcacaaccatataaaggggtaactactttttctactttaggcttgaatcgatatgacttgaactataagagtaggtttgaattaatttttacctgttctgaagaatggaataaagaaaatattgcagcttttctatcaggagtagccgaatatttgattgacaatagacaacctattttaagaggtgaaattattcaattacctagggtaattatcgaaggtagcaaaatggacgcactgtatgtttccgccccattttatttcgacgatgattttcaggtctgttatggcgaacactacaatatcgttttccctttgcttgtcccgttgtataaacaggaagcagaattggtggaaaagaaaggttggaatgcttttgagcagttcttgctggataatgaagttggcaacctttcggatatgaatcggaaaccgtttgtttggtaa

SEQ ID NO: 56104 - DNA, 270 bp, Neisseria meningitidis
atgagtgtaaaagaattattcaaagttatcttagataaaaataaagattttcctattagaacgattcatcgcacgccaatagggatacttcccaaacctgttgctttaagtattgttcaatatgaagatgaccaaggattttatttgttttatttggatgagaccggtcaggaacaaacggatacttatcatgacacattagattcggcatttgaacaggtggagtttgaatttggaattagcaaagaagaatggatgcaaagcccttag

SEQ ID NO: 56105 - DNA, 1107 bp, Neisseria meningitidis
atgtccttgacccgcctaatcttgaaattctatgcactgttgcgcctttttttgggcaaaaacgcccgcaccgcatggatttcgcatcccgcctgtgccgggcacgaacccggcgcaaaccatcccgattcgcccgaccgcatcctctgcatcgagcaggcattgcgccgcgccggtatttggcagcacctccaaaccatagaggcggaagaaatcagcgatacgcgcctcgcacttgtccactcgagcaaatatctgaaccgtttggaatcttgcctgccccaaaaaggcaagatttcccgcctggataacgacactgcaatcagcacaggctcgctgtctgccgcacgctttgccgccggttcggcagttcaggcagtcgacatggtcatgaaccgtaaagcatggcatgccttttgcgccgcccgcccgcccggacaccatgcgggcagcggcaaagccggcggattctgcctgctgaacaacgttgccgccggcgtcatgcatgccattgccgaataccgcctgaaacgcattgccgtcatcgatttcgatgtccactacggcgacggtacggcagaaatattcaaagacgatccgcgcatcctgtttttcaacctgtttgaaaccgaccttttccccttccccgaaaacaacgatatgcccgacggcggcaatatggtgcacctgcccttgccgccgggaacgggcagccgcacattccgcgaagccgtccgcaggcagtggctgccccgacttgccgcattcaaacccgaactggtgctgctgtcggcaggattcgacgcacaccgtctagacgaatcgggcaggctcaacctgcacgaggcggattttgcctggctgacacacaaaatcattcagacggcatcgggctgccccggcaaaatcgtatccgtactcgaaggcggctacacccttgaacctctggcacaatctgctgccgagcatatccgcgtgctggcagggctgggcaaatccgatgccgcaaccgcctatcagaaaacactggacccaacaaaaaaacggtttgccaaaccgaaaaccggacaggtgcgccaacctacccaatccgaccgttacgacata

SEQ ID NO: 56106 - DNA, 573 bp, Neisseria meningitidis
atgatggtacggcgtttgataatcggcatcagtggggcgagcggtttccaatacggcgtgaaggctttggaacttttacgcgcgcaagatatcgaaacgcaccttgtggtatcgaaaggtgcggagatggcgcgcgcttcggaaacggcttatgcgagagatgaggtatatgccttggcggacttcgtgcatccgatcggcaatatcggggcgtgcattgccagcggtacgtttaaaacggacgggatgctggtcgccccctgttcgatgcagacgcttgcctcggtcgcgcacggcttcggcgacaacctcttgacgcgtgcggcggatgtggttttgaaggaaaggcggcggctggtgctgatggtgcgcgaaacgccgctgaaccttgcccatttggacaatatgaagcgggtaacggaaatgggcggcgtggtgtttccccctgttcctgcgatgtaccgcaaaccgcagacggcggacgacatagtggcgcacagtgttgcacacgctttgtcgctgttcggaatcgatacgccggattcggcggaatggcagggaatggcggattaa

SEQ ID NO: 56107 - DNA, 543 bp, Neisseria meningitidis; identical to SEQ ID NO: 40003

SEQ ID NO: 56108 - DNA, 432 bp, Neisseria meningitidis; identical to SEQ ID NO: 40005

SEQ ID NO: 56109 - DNA, 819 bp, Neisseria meningitidis
ttgttaatccactatactttatgccgctaccgcaaccggctggcgcaagacgacaccctgtccgaattgctcaaactgattaactgccaactgaccgaaaaaggcctaaaagtagagaaagcatccgccgccgtcgttgacgccaccattattcagaccgccggcagcaaacagcgtcaggctatagaagtcgataacaaaggacaagtcagcggccaaaccacaccgagtaaggacagcgatgcccgttggatcaagaaaaacggcctctacaaactcggttacaaacaacatacccgtaccgatgcggaaggctatatcgagaaactgcacattacccccgccaatgcccatgagtgcaaacacctgccgccgttgttggaaggactgcccaaaggtacgaccgtctatgccgacaaaggctatgacagtgcggaaaaccggcaacatctggaagaacatcagttgcaggacggcattatgcgcaaagcctgccgcaaccgtccgctgacggaggcacaaaccaaacgcaaccgatatttgtcgaagacccgttatagtggattaaatttaaatcaggacaaggcgacgaagccgcagacagtacaaatagtacggcaaggcgaggcaacgccgtactggtttaaatttaatccactatatgtggtcgaacagagcttcggtacgctgcaccgcaaattccgctatgcgcgggcagcctatttcggactgattaaagtgagtgcgcaaagccacctgaaggcgatgtgtttgaacctgttgaaagcggccaacaggctaagtgcgcccgctgccgcc

SEQ ID NO: 56110 - DNA, 393 bp, Neisseria meningitidis; identical to SEQ ID NO: 43975

SEQ ID NO: 56111 - DNA, 705 bp, Neisseria meningitidis
ttgtctgtaacaggtataaggttctgctataatcaacctatggaaaatattgaagaatacgcactgctgtctcccgaagccctgctggaacgcctggataccgttttgagtatcagaatcggcggcaagggttgggaatccagtatgaccgccaactttgcacagacgctggtcgaaatacaggacagtctgtacagggttgtgtcaaccgtccaatacggggatgacaacctcaagcggttgacagcggacaaacggaagcagtatgagttgaacttcaagatttccgagggttctacgcgtgtagagtccgactttaaagagactttggttcggttcggtagagatatgcttcaagatatgccccctaaaatccgttcggcaacgctggtagcgttgacgaccctgcttgtcggaggggcgttgggttacggttatttggaatacctgaagcaggttgcttcggaagggtatcagaccgagcgtctgtataatgccgtcgaccgtcttgcagaatcccaagaacggataacgtccgccatcctgaagggtgctagaggtgccgatttcgtgcaaatcggcagacgttcctacagtagggaggatatatcggaggcaaatagacgtgcagagcgtgtcccgtatggcgcagagttggtttcagacggcaattttaccgctgttttatctgatataggggattaa

SEQ ID NO: 56112 - DNA, 321 bp, Neisseria meningitidis
ttgttgatgtgtgtactattgcataggcggttaagccatgcaggagatgaaagtgtatatttcgcgcaaagcccattagccgcaagcgaggggcggggtgcgcgagagagaggggggcaggtgctaagtcattggttatctccttactatctatctaactacgggtgcattatgcgcctatgcctgttgcttgtcaaacactatacagttaaaatgtgtaaagatttagtaaggacatatacccttttctttacatttagctccatcggataccagtgcgttcagagaaaatttgaaaatttctatattttggttgtataa

SEQ ID NO: 56113 - DNA, 1197 bp, Neisseria meningitidis
ttgtccacttttccgaaccacaccatgcacaccatttcctttccaaaccgcacccggctcaccgccctgccgcccctgtcactctatatccacatcccgtggtgcatcaaaaaatgcccgtattgcgactttaattcccacagcctgaaaaacggattgcccgaagccgcctatatcgacgcgctgctgaccgacttgcagcttgaattgcccaatatttggggcaggccggtggaaacgatctttttcggaggcggtacgcccagcctgtttcaggcggaatcgattgaccgtttgttgagcggcgtgcgttcactgttgcgcttgcagccggaggcggaaattacgttggaagccaatccaggcacctttgaaatcgagaagtttcaaggatttaaagacgcaggtattacgcggctttctattggcgtgcagagtttcaacaacgatatgctctcaaggctggggcgcgtccacaacggcaaagaagccttaaccgccatcgacaccgccttgaaattatttgataaagtcaatatcgacttgatgtatgccctgccgaaccagaccgttcagacggcattggacgacgtgcaaaccgccatcgctacgggtgcgacccacatcagcgcgtatcatctgacgatggagccgaacacgccgttcggtcatacgccgccgaaaggtttgccgcaagacgaagcggcgctcgacatcgaagacgcggtacacggtgcgctggaaggcgcgggttttgtccactacgaaacatcggcttttgcgaaaccagccatgcagtgccgccacaatttgaactactggcagttcggcgattatttaggcataggcgcgggcgctcacggcaaaatttcctatcccgaccgcatcgagcgcaccgtccgccgccgccaccccaacgactacctcgccttaatgcaaagccaaccgagtgaagccgtcgaacgcaaaaccgttgccgccgaagatttgccgttcgagtttatgatgaacgccctgcgcctgaccgacggcgtacccgccgcgatgttgcaggagcgcacgggcgtaccgagtgccaaaatcatggcgcaaatcgaaacggcaaggcaaaaaggcctgctggaaaccgaccccgccgtattccgcccgaccgaaaaaggacgcttgtttttaaacgatttgctgcaatgtttttta

SEQ ID NO: 56114 - DNA, 390 bp, Neisseria meningitidis
atgtggaaaattagtaaagaaaattgtgaagatttaggatttgcaatagtctgtatgttctatgatgctattaatctttctgaatttaaattatggttggatatagttgtcagagatattcctattgatacaattccattgtatatttttgatttgattgattttgataagagtataggggaaatttatgatgtaattggagtcgttaattatggttacatttcaaatgatcaaaaaaatgcattaacgggcattgccttcttaagggggatagatgtctatgatccgcctatttcaaaagaaaaagcattaaaagccttagagaaatatcctgaaatttatcagaggtttcagcatttctttccttttgtagagcttccgcttctttaa

SEQ ID NO: 56115 - DNA, 378 bp, Neisseria meningitidis
atgtgtgagttcaaggatattataagaaacgttccttattttgaggggtatgacgaaaattcatttattggcaaatggtatgatgacggggtgtgggatgatgaagaatattggaagttggagaataatttaatcgaggttagaaaaaaatatccttatccgatggacataccaagatatgttgtcattggaatcggtaccattattgatttcttaatggttccaaattggaaactttttgaaattaaagcttccccttggctacctgatagcgtgggaattcatgaacgttatgaaagattcacaacaatgctccgttatatttttaccgagaaagacatagtcaacgtgcgatttgattattacaacaaaaaatag

SEQ ID NO: 56116 - DNA, 399 bp, Neisseria meningitidis; identical to SEQ ID NO: 46943

SEQ ID NO: 56117 - DNA, 264 bp, Neisseria meningitidis
atgtccaagtggcggggtttcaaccgaaaaggaaacacgatgaagaaaaacgccccgaaatcgtttgaagaagccttgtcgcgccttgaatcgctgacacaagctatgcagggcgaaatgcccttggaagacgcgcttgccgcctatcaggaaggcaacgagctggtcagatactgccaaaccaagctggcgcaagtcgaacagaaattacaggttttggacgcggacgggccgaaggagttgaaccttgaatccgacgaatga

SEQ ID NO: 56118 - DNA, 354 bp, Neisseria meningitidis
atgaaaaattgcgaatttttttatgacccgacaagggcaatctatgatagcggtgcagattacttaactagggaaaaacatagattagtcgtaattgcaaatagtgcttgggggctattacttaatttatcttgttattatgacgaggttttggaaaagcggaaaataccgttcggcaaacaggaaattgatgacgatatggacaaagtgtccgcccttaagcggaagtttaaagatatttctgaaatcaaagtaggggatggttgggaatacccgttcaattatgagcagggaatgaaagaattagatgaagtgctattgaaatacattcccttttttgaagaagaacgataa

SEQ ID NO: 56119 - DNA, 276 bp, Neisseria meningitidis
atgcaatggagtatagaaaccgaagggctgggcttgaacgtcatctcgcacaagatactcggcaaagaccacgcccaagtcgaatttgaagcctacttccgagacggacaacaccgatccgcgcatcacgaactgtccggcttcgtcaacatcggcggacaatggtattttatcgatcctaccgttccgcatcctgcgatgaaacaaccctgcatttgcggatcgggcaaaaaattcaaagcctgctgcggcaaatatctgaaacctgtcgcataa

SEQ ID NO: 56120 - DNA, 936 bp, Neisseria meningitidis
atgaacccgaaaaaactcgttatcgccagtcgcgaaagcctgcttgccatgtggcaggcaaagcatatccaaggccgtctgaaagccctgtatcccgattgcgaagtcgagattttgggcatgaccacgcgcggcgaccagattttggacaaaactttgtcaaaagtcggcggtaagggcttgtttgtcaaagagttggaacaggctttatatgacgggcgcgctgacttggccgtgcattcgattaaagatgtgccgatggatttgcctgaaggtttcgcgcttgcagccatcggcgaacgcgccaatccgtttgacgcgtttgtgtccaaccaatacgcgcgtttggaagaaatgcccaaaggcgccgtcgtaggcacatccagcctgcgccgcgaagcccagttgcgtgcgcgctatccgcatttgcttatcaaacctttgcgcggcaatgtgcaaacccgtttgtctaaactcgataacggcgaatacgacgcaattatcttggctgccgccggtttgcagcgtctggaattggacggacgcatccgcatgattttgtcggaatccgacagcctgcctgccgccggacaaggcgcattgggtatcgaaattgccgcgcaccgcgaagatttgtatgaggttttaaaaccgctaaaccacgataccacacacgcctgcgttacggccgaacgcgctttggcgcgcgctttgggcggaagctgccaagtgcctttggccgcatattgcacggaagaaaacggcttgctgaccttgcgcggactggtcggacaccccgacggttcggtcattttgcaggcggacgcgcaagcccctgccgaatatgccgacgcgctcggacgcgctgtcgctaagaaattggcggacgacggtgcgcgggaattgattggagcagtattgaatacggaaaattga

SEQ ID NO: 56121 - DNA, 429 bp, Neisseria meningitidis
atggccattctgaaacttgacgaacacctctatatttctccgcaactgaccaaagccgatgcggaacaaatcgcgcaactgggcatcaaaaccgtcatctgcaaccgccccgaccgcgaagaagaatcgcaacccgacttcgcccaaatcaaacagtggctggaacaagcaggcgttactggattccatcaccaacccgttaccgcacgcgacatccaaaaacacgatgtcgaaaccttccgccaactcatcggacaagccgaatatcccgtccttgcctattgccggaccggtacgcgctgctccctcctgtggggcttccgccgggcggcagaaggtatgccggttgacgaaatcatccgccgcgcccaagcggcaggcgtaaatttggaaaatttcagagagcggctggacaacgcccgcgtctga

SEQ ID NO: 56122 - DNA, 216 bp, Neisseria meningitidis; identical to SEQ ID NO: 37963

SEQ ID NO: 56123 - DNA, 1356 bp, Neisseria meningitidis
atgtctgattttttccattctgacgtgttgtccgtttccgagttgaacgcatttgccaaaagtattttggaaaaccaccttgccggtctgtggattgcgggcgaagtgtccaacctgacccgtgccgccagcgggcattattatttctcgctcaaagacagccgcgcgcaggtgcgttgcgcgatgttcaagggtgcggcggcgcgtttggcgaaacctttgaaagaaggcgaccatatcgaagtggcgggcaaaatcagtatttatgaaacgcggggcgaatttcagattaccgtgaacgaagtgcggctcaaaggtttggggcagctttacgaagcctatgagcggttgaaggcgcagttgcaggcggaaggcgcgtttgcggaggaacgcaaaaaaccgttgcccgtccgccctcaatgtatcggcatcgtaaccagtttggcggcggcggcattgcgcgatgttgtaaccaccttgaaacgccgcgcgcccgaaattcccgttatcgtttatccgacacctgttcaaggcacaggcagcgagtttcagattgcccaagcgattaaaaccgcatcgcaacgcgccgaatgcgacgtgttgattgtctgtcgcggtggcggcagcattgaagatttgtgggcgtttaacgaagaaccggtcgtacgcgcaatcgaagcctgcacggttcccgtcgtcagtggcgtgggacacgaaaccgatttcacgcttgccgattttgtcgccgacgtgcgcgcgcccacgccgaccggcgcggcggaactggtcagccccaaccgccaagaatcgctacatcgtctcgcccaggcgcaaggccgtctgaaaaccgttttggaacaacgctatttcgatgccagccaaaaactcgactggcttgcgcggcaaatccgtcatccgcgccaaaaacttgatgagcagcgcgcttcaatcggcaagctggcgcaaacgctgtcttactctatgaagcaaaacctccgtgcccacaccgcccgttttgaacgccaaacccaagccctgcaacattaccgtcctgatgtttccgtttgcaaaaacaacatcgtccgccttcagacggcattgcccgccgccttcagccaactgcttacccaccgccgccaaagcctgaccgcccaagccgcattgctcgaagccgtttcgccgcagcacattttggaacgcggcttttccgtcgtcaaagatacacgcggacaagtcatccgcaacgccgatgttttgaagcaggggcagaagctgcacattaccttcgccgacggcgaaaccgacgtgcgcgtaagcaaagaacaagggcagcaggatttgttcgattgcatttaa

SEQ ID NO: 56124 - DNA, 354 bp, Neisseria meningitidis
gtgattacattgcgcatcgtgtgggcagttgccaaccgcgccaagcgtccgcaaagcgacagcaaggctgcggcggcaggacacggcattctgtatctgctcatgcttgctgttcccgttatcggcatgatccgccaatacggcagcggccgcggcccgttgaaagtgttcggcgttgaagtgatgcagggttcgccggaaaaaatcgagtggatggcaaacttgggcaacacgttccacggcaatttgggctggctgctgtttgccgccgtcgccggacacgtcgccatggtcgtcacccaccgtgttcagggtagagatgttctgtgccgcatgacggggcgtgtccgctga

SEQ ID NO: 56125 - DNA, 111 bp, Neisseria meningitidis; identical to SEQ ID NO: 40033

SEQ ID NO: 56126 - DNA, 3606 bp, Neisseria meningitidis
atgtttcattttgcatttccggcacaaactgccctgcgccaagcgataaccgatgcctaccgccgtaatgaaatcgaagccgtacaggatatgttgcaacgtgcacagatgagcgacgaagagcgcaacgccgcctccgagcttgcccgccgtttggttacccaagtccgcgccggccgcaccaaagccggcggcgtggatgcgctgatgcacgagttttcactctccagcgaagaaggcatcgcgctgatgtgtctggcagaagccctgctgcgtatccccgacaacgccacgcgcgaccgcctgattgccgacaagatttcagacggcaactggaaaagccatttgaacaacagcccttccctcttcgtcaacgccgccgcctggggcctgctgattaccggcaaactgaccgccacaaacgacagacaaatgagttccgcactcagccgcctgatcagcaaaggcggcgcaccgctcatccgccaaggcgtaaattacgccatgcgcctgttgggcaaacagttcgtaaccggacaaaccattgaagaagccctgcaaaacggcaaagaacgcgaaaaaatgggctaccgcttctccttcgatatgttgggcgaagccgcctacacccaagccgatgccgaccgctactaccgcgactatgtcgaagccatccacgccatcggcaaagatgcggcaggacaaggcgtttacgaaggcaacggcatttccgtcaaactctccgccatacatccgcgctactcgcgcgcccaacacggccgtgtgatgggcgaactgttgccgcgcctgaaagagctgttccttttgggtaaaaaatacgatatcggtatcaacatcgatgccgaagaagccaaccgtctggagctgtctttggatttgatggaggcactcgtttccgatcccgatttggcaggctacaaaggcatcggtttcgttgttcaagcctaccaaaaacgttgtccgttcgttatcgactacctgatcgaccttgcccgccgcaacaaccaaaaactaatgatccgcctcgtcaaaggcgcgtattgggacagcgaaatcaaatgggcgcaagtggacggcttgaacggctatccgacctacacccgcaaagtccacaccgacatctcctacctcgcctgcgcgcgcaaactgctttccgcgcaagacgcggtatttccgcaattcgccacccacaacgcctacaccttgggcgcaatctaccaaatgggcaaaggcaaagactttgaacaccaatgtctgcacggcatgggcgaaaccctgtacgaccaagtcgtcggcccgcaaaacttaggccgccgcgtgcgcgtgtacgccccggtcggcacacacgaaaccctgctcgcctacttggtgcgccgcctgttggaaaacggcgcgaactcgtctttcgtcaaccaaatcgtcgatgaaaacatcagcatcgacacgctcatccgcagcccgttcgacaccatcgccgaacaaggcatccacctgcacaacgccctgccgctgccgcgcgatttgtacggcaaatgccgtctgaactcgcaaggcgtggacttgagcaacgaaaacgtattgcagcagcttcaagaacagatgaacaaagccgccgcgcaagacttccatgccgcatccatcgtcaacggcaaagcccgcgatgtcggcgaagcgcaaccgattaaaaaccctgccgaccacgacgacatcgtcggcacagtcagctttgccgatgccgcgcttgcccaagaagcggttggtgcagccgttgccgcgttccccgaatggagtgcgacacctgccgccgaacgcgccgcctgcctgcgccgtttcgccgacctgctcgaacagcacacccccgcgctgatgatgcttgccgtgcgcgaagcgggcaaaacgctgaacaacgccattgccgaagtgcgcgaagccgtcgatttctgccgctactacgcaaacgaagccgaacacaccctgcccaaagatgccgaagccgtcggcgcgattgtcgccatcagcccgtggaacttcccgctcgccatctttaccggcgaagtcgtttccgcattggcggcaggcaacaccgtcatcgccaaacccgccgaacaaaccagcctgattgccggttatgccgtttccctcatgcacgaagccggcatcccgacttccgccctgcaactcgtcctcggcgcaggcgacgtgggtgcggcattgaccaacgatgcccgcatcggcggcgtgattttcaccggctcgaccgaagtggcgcgcctgatcaacaaagcccttgccaaacgcggcgacaatcccgtcctgattgccgaaaccggcggacaaaacgccatgattgtcgattccaccgcacttgccgaacaagtctgcgccgacgtattgaactccgccttcgacagcgcgggacaacgctgctccgccctgcgtatcttgtgcgtccaagaagacgttgccgaccgtatgctcgacatgatcaaaggcgcgatggacgaactcgtcgtcggcaaaccgattcagctcactaccgatgtcggccccgtcatcgatgccgaagcacagcaaaacctgttgaaccacatcaacaaaatgaaaggcgttgccaagtcttaccacgaagtcaaaaccgctgccgatgtcgattccgaaaaatccacgttcgtccgccccatcctgtttgaattgaacaacctcaacgaactgcaacgcgaagtcttcggccccgtcctgcacgtcgtccgctaccgcgccgacgaactcgacaacgtcatcgaccaaatcaacagcaaaggctacgccctgacccacggcgtacacagccgcatcgaaggcacggtacgccacatccgcagccgcatcgaagccggcaacgtttacgtcaaccgcaacatcgtcggcgcagtcgtcggcgtacagcccttcggcggacacggtctgtccggcacaggccccaaagcaggcggttcgttctacctgcaaaaactgacccgcgccggcgaatgggttgccccgaccctgagccaaatcggacaggcggacgaagccgcactcaaacgcctcgaagcactggttcacaaactgccgttcaacgccgaagagaaaaaagccgcagcggccgctttgggacacgcccgcatccgcaccctgcgccgtgccgaaaccgtccttaccggaccgaccggcgagcgcaacagcatctcatggcacgcgccaaaacgagtttggatacacggcggcagcacggttcaagcctttgccgcactgaccgaacttgccgcctccggcgtacaggcagtggtcgaacccgacagcccgctggcttcctacaccgccgacttggaaggtctgctgctggtcaacggcaaacccgaaaccgtcggcatcagccacgttgccgccctgtcgcctttggacagcgcgcgcaaacaggaacttgccgcccacgacggcgcactcatccgcgtcctcccttcggaaaacggactcgacatcctgcaagtttttgaagaaatctcttgcagcgtcaacaccacagccgccggcggcaacgccagcctgatggcggttgccgactga

SEQ ID NO: 56127 - DNA, 411 bp, Neisseria meningitidis; identical to SEQ ID NO: 43989

SEQ ID NO: 56128 - DNA, 2237 bp, Neisseria meningitidis
gtgatcgacgttaccgacttcaacgacgaagacaaactgggtaaaggtaaggagatgatcgaccgtttgagcaggcttgtcggcatttttaaaaagctcaacctttcttccaaccaagccgaagacgacgatttgttaggtgatgcctacgaatacctgatgcgccattttgcgaccgagtcaggcaaatccaaagggcagttttacacgcctgccgaagtctcccgcattatggcgaagattatcggaatcagcgcagattgccgtccagcaccagcgtttatgacccgacctgcggctcgggttcgctgttgctcaaagccgccgcccaagccggcagccaaatcagcctttacggtcaggaaaaagatgtggcaaccgcgtcccttgcccgtatgaatatgattttgcacaacaacgaaaccgccgaaatcaacaccgggaacaccttgtccgattcgtctttccgtgatgaaaacgacgggcttaagaccttcgattttgccgttgccaatccgccttatcccgcccgaaaaaaacggcgattacgcctttttgctgcatctgctcaaaagcctgaaaccaagcggcaaaggtgcgattattcttccgcacggtgtgctgtttcgcggcaatgccgaagcgcgtattcgcacggaattgcttaaccttgaccttattaaaggcattatcgggctgcctgccaacctgttttacggcacgggcattcctgcctgcatcatcgtcatcgacaaagaacacgcccaaaccgcccaatttgccgaagagggaacaaaccaagttatcagcggcggcagcgtgtttatgattgacgcatcgcgcggcttcattaaagacggcaacaaaaaccgtctgcgtgagcaagacattcacaaaatcatcgacactttcacaaacctcgttacagccgtatggtgcatttaagcgaaatcgcagcacaagattacaaccttaatctgcctcgctatatcgacagcggagaagtcgaagacctgcaaaatctcgccgcctatctatctttatggcggcatacctgcgcacgatatggacgcattggaagcctattggcaagttttaggccgtatgaaaaacgagttgtttgccgaacacgatggccactttaccactatacaacggaatcgattgcaaatctttcccactctcaacagcttaaaatcctgcgggattggtgtggaatttagggctaatctagtacagccccaaatttaatccactataaaatcgaaagcagccaaatcaaagcccatatattggcgcaccccgattacgccgccttcaaagccggacacctggcaaagtttgccgcgtggcacactcaaaacgaccttgccgccatccaaccgggcaggcttatccggaaatggagcgaaagcctgctggacgcgttcaaacccggcagcctgattgaagaatacgatttctaccaaatcctgacggactactgggcggaaaccctgcaagacgatgtttatctcatcgcccaagatggctggaaggcggttaaaaacctggccgaaatcaccaaagaaagcgatgaagccgcgaacctgaccgtcgtctttgaggaaaccgaaaccgacaaaaaaggcaaagccaaaaccaagcgcatcagcaaaaaataccgcagcgaagtcatcgcccccgagctggttgcccgccgctacttttcagacggcatcgccaagctggaagaaaaacaaagcgagctggaacgcctaagccaagaattggaaaaccacatagaagaacacggcggcgaagagggtgcgctgaacgacgtattggatgcaaaaggcaaactttccgccaaacttctgaaaaccgcattggaagaaagcggcatagaagaaggcgaacgggctgttttacaaaccacccaaacactgatgacgcaggaaaaagccgcgaaagacgcagtcaaaacccaaatcgaagccctgaaccttgccgtattcaaacaattcggccgactttccgaagccgaaatcaagcagcttgccgttcaagacaaatggcttgccgatttacaaagtcgaatcgaaaatcgcttggaaaacagtattcagcagcttatcagccgcttgaacacgctggaagaccgctaccgcagcccgatggccgagcttgcccgagaagtggaaaagtggcaaagcaaagtcaatgcccaccttgaaaatatgggttttggaggctga

SEQ ID NO: 56129 - DNA, 369 bp, Neisseria meningitidis; identical to SEQ ID NO: 52043

SEQ ID NO: 56130 - DNA, 822 bp, Neisseria meningitidis
gtgaaccgaactgccttctgctgcctttctttgaccgccgccctgattctgaccgcctgcagcagcggaggcggcggtgtcgccgccgacatcggcgcggggcttgccgatgcactaaccgcaccgctcgaccataaagacaaaagtttgcagtctttgacgctggatcagtccgtcaggaaaaacgagaaactgaagctggcggcacaaggtgcggaaaaaacttatggaaacggcgacagcctcaatacgggcaaattgaagaacgacaaggtcagccgcttcgactttatccgtcaaatcgaagtggacgggcagctcattaccttggagagcggagagttccaaatatacaaacaggaccactccgccgtcgttgccctacagattgaaaaaatcaacaaccccgacaaaatcgacagcctgataaaccaacgctccttccttgtcagcggtttgggtggagaacataccgccttcaaccaactgcccagcggcaaagccgagtatcacggcaaagcattcagcttcgacgatgctggcggaaaactgacctataccatagatttcgccgccaaacagggacacggcaaaatcgaacacttgaaaacacccgagcaaaatgtcgagcttgcctccgccgaactcaaagcagatgaaaaatcacacgccgtcattttgggcgacacgcgctacggcggcgaagaaaaaggcacttaccacctcgcccttttcggcgaccgcgcccaagaaatcgccggctcggcaaccgtgaagataagggaaaaggttcacgaaatcggcatcgccggcaaacagtag

SEQ ID NO: 56131 - DNA, 1242 bp, Neisseria meningitidis
atgcagaaatggcaaaccgagctttattccacaccgctttggcttttacagactctcttgatagtttccgccgcttcggcggtgattctgtttttgacacggaaaacgcgtttcgggcgcgagtttgcctatatcctgcgcctttgtctgacaccgaaaagcgcggtcaaagtcttgctgctgattacggagatgattacgctggtgttaaccgaaatgcggctgaatgtgttgagtacctttatgtccaaagggctttacgactcgatgcaggatttaaatgcttcggcattttggatgtttgccgcaatgaacgcgggcgtggtgctgatacgggcgtttaacaacgtcgtcaacgacttcctcaatcaaggcttggcgattaaatggtcggagcggctcaacgaagtgctgacagcacgctggcttgccgacaaaaactactaccgcctgcaaatgcgccgccacgcgccggacaacatcgaccaacgtatccaacaggacgcacaggatttcatcgcctcgaccatcgaatttgtgcgcggcatggtcaattcggtcgttacctcgctggagtttgccgttgttttgtggggcttggcgggcatcctgaccgtgtttggctttgacattcctcgcggcattgtttggttcgtctttatctttgtaattttggcgacctttatcgccatgtggataggcaacccattgattcgttacaactatgaaaacgaaaagctcaacggcgactaccgttattccctcatccgcgtgcgcgaccacgccgaaagcgtggcgttttacagcggcgaaaaacacgaacacgaccagctttctgaccgttttaaagccattatccgcaaccgctggcgtattgcgcgacaaagcgtctgcctgagcggctttaatgatatgttcaccaacggcatcaagctcttccccattattttgcaagcgccgcgcctgtttgccggacaaatcaaaatcggcgacatccagcagaccgtccaagccttcgcgcgactgcaaaacgcgctttctttcttccggatgttctacaacaaattcaccgcctaccgcgcccgattggagcgtctgtacggctttttgctgagtaccgaagaacaacacagcgcgcggcaacccgagattagcgaagtttcagacggcattgcactggaatgtaaggcggcggcagcttttgcacgaattggcggcagcttttgcaccgccgaagcgtag

SEQ ID NO: 56132 - DNA, 1392 bp, Neisseria meningitidis
atgtttcccgatttctcccaaaccctctccaaagaccgccacttcctacgttccgccttcaaaaatcccaacaaatacggcgggttgtccaaagtcgaagaaaaataccgaaaatcgcacgaaatctttttgaaacgtttggcagccttgcccaaacccgaattcgacaacaccctgcccgttcacgaaaaacttgacgaaatcaaaaaaaccgttgccgaacatcaggtaacgattatttgcggcgaaaccggttcgggcaagaccactcagttgcccaagatttgtctggaactcgggcgcggggcggcgggtttgatcgggcatacccagccgcgccgtttggcggcgcgttccgtagcagagcggattgccgaagagctgaaatccgaaatcggcagcgcggtcggctataaagtgcgcttcaccgaccacacctcgcgcgatgcctgcgtcaagctgatgaccgacggcatcctgctggcggaaacccagaccgaccgttatctcgccgcctacgacacgattatcatcgacgaagcgcacgagcgcagcctgaacatcgacttccttttgggctatttgaaacaactcctgccgcgccgccccgatttgaaagtcatcatcacctcggcaacgatagacgcagaacgcttttcccaacacttcaacggcgcgcccgtgctggaagtgagcggacgcacctatcccgtcgaaatcctctaccgaccgctgatcggcaaagacgaagacgacgcggaaatagaattgaccgacgcgattgtcgatgcggcggacgaattggcgcgatatggcgaaggcgatattttggtattcctgccgggcgaacgcgaaatccgcgaagccgccgaagccctgcgcaaatccacgctacgccgcaacgacgaaatcctgcccctgttcgcacgcctgtcgcacgccgagcagcacaaaatctttcacccctccggagcgaaacgccgcatcgtgctggcaaccaacgtcgccgaaacctcgcttaccgtgccgggcatcaaatacgtcatcgacaccggcctcgcgcgcgtcaaacgctattccgcacgggcgaaagtggagcagcttcatatcgaaaaaatctcccaagccgccgcccgccaacgctccggccgctgcggacgcgtctccgcaggcgtatgtatccgattgttttcagaagaaaatttcaacaaccgccccgaatttaccgaccccgaaatcgcccgcagcaacctcgccgccgtcatcctgcgcatggcatcgctgaaactcggcgacgtagcggcattcccatttttagaaatgcccgattcgaggtatattaatgatgggtttcaggtgttgctggaattaggggcagtggaggccgcctga

SEQ ID NO: 56133 - DNA, 1116 bp, Neisseria meningitidis
atgggcttgaaaaaggcttgtttgaccgtgttgtgcctgattgttttttgtttcgggatattttatacatttgaccgggtaaatcagggggaaaggaatgcggtttccctgctgaaggacaaactcttcaatgaagagggggaaccggtcaatctgattttctgctataccatattgcagatgaaggtggcggaaaggattatggcgcagcatccgggggagcggttttatgtggtgctgatgtctgagaacaggaatgaaaaatacgattattatttcaatcagataaaggataaggcggagcgggcgtattttttccacctgccctacggtttgaacaaatcgtttaatttcattccgacgatggcggagctgaaggtgaaggcaatgctgctgccgaaggtcaagcggatttatttggcaagtttggaaaaagtcagcattgccgcctttttgagcacttacccggatgcggaaatcaaaacctttgacgacgggacaatcaatttaattcaaagcagcagctatttgggtgatgagttttctgtaaacgggacgatcaagcggaattttgcccggatgatgatcggagattggagcatcgccaaaacccgtaatgcttccgacgagcattacacgatattcaagggtttgaaaaacattatggacgacggccgccgcaagatgacttacctgccgctgttcgatgcgtccgaactgaaggcgggggacgaaacgggcggcacggtgcggatacttttgggttcgcccgacaaggagatgaaggaaatttcggaaaaggcggcaaaaaacttcaacatacaatatgtcgcaccgcacccccgccaaacctacgggctttccggcgtaaccacattaaattcgccctatgtcatcgaagactatattttgcgcgaaattaagaaaaacccgcatacgaggtatgaaatttatacctttttcagcggtgcggcgttgacgatgaaggattttcccaatgtgcacgtttacgcattgaaaccggcttcccttccggaagattattggctcaagccggtgtatgccctgtttacccaatccggcatcccgattttgacatttgacgataaagattaa

SEQ ID NO: 56134 - DNA, 1332 bp, Neisseria meningitidis
atgaacacaacatcccaatttactagtaatttctggaatatatatattgcagttattgtcttactgagctttatcgctttggcttggctgctgctgtctcaaaatgttgtcaaacgtccgaagaagggcgaagaagtacaaactacgggtcatgagtgggacggcattgccgaatacgacaatccgctgccccgctggtggttttggctgtgtgttttgacgtggctgttcggtatcggttatttggttatgtatccgggtgtcggcgactacaaaggtctgctgaaatggaccagccataaccaatatgaaaaagaggtcaaaaaagccgatgagcaatacggcaaactgtatgccaagtttgcggatatgccgattgaaaaagtggcaaaagaccctcaagccaagcaaatcgcccaaaacctgtttaacacttattgtatccagtgccacggctctgatgctaaaggctctaaaggttttccgaatctgaccgatagcgattggttgtggggcggtgatcccgataaaattcacgagaccatcgaaaaaggccgtgttgcgactatgcctgcctggggccctgctttgggcgaagaaggcgtgaaagacgttgcccattatgtgatgtccctttcaaaacccgaaggtcagtatgatgaggaacgtgccgcgcgcggacaagccttgttcagcggtccgcctgccaactgtttcacttgccacggcgataagggacaaggtatccaaggtttgggtccgaacctgactgatgacgtgtggttgtggggcggtacgcaaaaatccattatcgaaaccattaccaacggtcgcagcagccaaatgcccgcttggggacatttcttggataaagacaaactgcatattatgactgcttatgtatggggtctttccgataaagacggtaaagctctggtgaaaaaagccgagcctgcaccgactcccgcaccggcggcagaacccgcagcctctgctcctgcagaagcagcacaagccgcgtccgaagccaaacctgccgcagcagaacctaaagccgaggaaaaagccgcacctgctgccaaagcggacggcaaataggtttatgaaaccgtttgtgccgcctgccatggcaatgcggttccgggtattccccatgtaggcatcaaagccgattgggccgaccgcatcaaaaaaggcaaggacacgttgcacaaacacgcgatcgaaggtttcaatacgatgcccgcaaaaggcggtcgcggcgatttgagcgatgatgaagtgaaagctgcggttgactatatggtcaaccagtcaggcggcaaattctaa

SEQ ID NO: 56135 - DNA, 998 bp, Neisseria meningitidis
atgcacacaccacttacctatattgaccttttctcaggagcaggaggcctatccttgggttttgaacaagccggattccaacaattgctttctgttgaaatggagtctgattattgtcagacttaccgtaccaacttcccccatcatcaattactgcaaaaagatttaaccacactaaccgaacaagatttaatcaattgtcttaacggacaagcagttgatttgattattggaggaccaccttgtcaaggttttagtatggcaggaaagattggacggacatttacagatgacccacgcaaccatttatttaaagagtttgtccgaatagttaaaattgtccaaccatatttttttgttatggaaaatgtagcgcgactctatacacacaattcaggtaaaacacgtattgagattattcaagcatttcagaatatcggttattcggtggaatgtaagatactgagtgcagccgatttcggtgttcctcagatacgtagccgagtgatatttatcgggaggagggataaaggcaaaatttcctttcccgaacctttgcagatttcccatcagactgttggatcagcaataggacattttccaaaactggctgctggcgaaagcaatccacacgttgcaaatcatgaagctatgaatcattcggcacaaatgttagaaaaaatggcatttgttaaaaatggaggtaaccgtaacgatattcctgaaccattacgtccgaaaacaggtgatatccgtaaatacatccgttacaacagcaacaaaccagccgtttgtattacaggagatatgcgcaaagtttttcactatgaacagaatcgggctttaaccgttcgtgaattagctgccttacaatctgtccctgataattttatttttgtggcagcaaaattgcccagcagcagcaggttggtaacgccgtaccgcctttattggcaaaagctattgctgaaagtattttaaaaatgagtgaaaatgaa

SEQ ID NO: 56136 - DNA, 1071 bp, Neisseria meningitidis
atgaaaatcgttttgaccacatctatggcaggcttgggcggcacggaaaccgccaccgtccgcctcgggcggctgctcaaacggcgcgggcacgacatcatccttgcttcttcggacgggccttttgtcggagaggcgcaagcatcgggcatccgttggcagccggttgatttttaccggggcgggcttgccggctacctcaaaagcacctttgcctacgcccggatgctgcgccgcgaacaacccgacatcatcgactgccaaatggcgcgcgttgttccagcctgcgcccttgccgccaaaatcgtttcgccgaaaaccaaaatcatctaccactcgcacggtttggacgcggcaacctaccccaaaatcgccaaactcttcgacaagctgggcgtgtacatcatcggtaactgcaaacacgagcgcgaaaaactcatccgccacggcttccccgccggccggattgcctacgcctacaacgctcccccccccccggaatttcatttccggaaaaccgaaaaagaatgcgccgtactcggcacgctttcccgtttggacaccgtccgcgccgtgcatctgatgttggatattttgaagaaaatggttgaccgcggtatgcccgtccgcctcaacatagcgggcataggagaagaaatggacaatttgaaaacgcaggcgaagcatctgggcattgaagacaaagttaccttcctcggcggcatacgcgatttgaccgcctacttcaaagacgtggatattttagtgaacacgccccactgcatcggcgaccacggcgcaggtgtgggcaacaacatcttggaagccggactttacgacacgcccgtcgttacctacgatatggctggcatttccgaaatggtcgtcaacggagaaacgggttactgcatccccttcggcgacgaagaagcctttatcgccgccgtagacacgctcgtcagacaaccggagttgcgcggtcaaatgggcaaagccctgcacaaacacgtcgaaaccttatgctccgacgacgaaatctaccgtaccacaatggctgcgtacgaaatgtaa

SEQ ID NO: 56137 - DNA, 777 bp, Neisseria meningitidis
atgaatagacccaagcaacctttcttccgccctgaagtcacagttgcccggcaaaccagcctgacgggtaaagtgattctgacacgaccgttgtcattttccctatggacgacatttgcatcgatatctgcgttactgattatcctgtttttgatatttggtaactatacgcgaaagacaacagtggagggacaaattttacctgcatcgggcgtaatcagggtgtatgcaccggatacggggacaattacaacgaaattcgtggaagatggagaaaaggtcaaggctggcgacaagctatttgcgctttcgacctcacgtttcggcgcaggaggtagcgtgcagcagcagttgaaaacggaggcagttttgaagaaaacgttggcagaacaggaactgggtcgtctgaagctgatacacgagaatgaaacgcgcagccttaaagcaactgtcgaacgtttggaaaaccagaaactccatattttgcaacagatagacggtcagaaaaggcgcattagacttgcggaagcagtggcaaaaacggcactgggcagacaggaattgtcgggattgggcatggtatcctccgatttggcgaagagcagcgaacctgtttatcttgtgaaaataaaacccgacaaatcaaccatcactgcatacggtgaggaaaaaccgctgcaaatcggcatgacgttggaagcagacatcctgcacgagaaacggcgattgtacgaatgggtattggagctgatttatagtatgtcgggcaaactgtaa

SEQ ID NO: 56138 - DNA, 879 bp, Neisseria meningitidis
atggcaagaaggtcaaaaacatttgaagaagctgctgctgaggttgaggaacgtttcggtcatcgtggcattaagttggtcgagtttgagggtacagccaagccgtgtgtaatcaactgccctaaacatggaaaccaaacctgttcgaggtactccaatatgttcataggaagtagctggggttgcccctcttgtggtaatgagcaagctgcaaaagccggtatagcgacccttaggaagaatcacatagcgttagaaatgctgaaacaggctgtaacaggtatgaccaagcaagagcgcatcacgacgcaagcctacaatgagatgaccaaatccgtggcaggttcaaacagcatagtccttaacgatgtccaaggcgatacgaccatcaacaaccatcatacgcatacgcacaaccacagcgatgccgacggcaaagcactgtcgatgaggctcacaccacgccccctgttgtcagaccgtcaggcggcggctttcgcccgtacaggcaaactcacaggcagtttcgacttgtttgcttcggtggtcgccccctcgcagtacacgtttgccgttgccatgcccgacacgtccatgtcgccggttatcgaaaaaggggatttggtggtggtcgagccgcgtatgcgccctgcggacgaggacatcgtgctgattgaactgtccgacaagcggctggtcgtcgcgcaccttgttatcgatattgcgggcaggatgctgatttatcagacgggcaggccgtctgaagcctttgacctgcccgaaggcagcacgattttaggtgtggtgctggaggtcaaaaaacggtttatgtccgccgcacaggcgagaaggcgtgttgattcggattaccacccctga

SEQ ID NO: 56139 - DNA, 903 bp, Neisseria meningitidis
atgaatccggcaatgattgagcgtcttaaggcagtcgagaatcaggcggaagcaatggaacgcggcgcacgctctgcatatcttaagcagcaggcgcaggaattgggcatcagccttgccacgctataccgcaagctggaggcggtcagcgtcaagccgacgcgcaaacggcgcagcgatgcgggcaagacggagcttaaaccggaagaagccaaattgatttcggcggttttggtggaggcgatgaggcgcaacggcaagcggttgatgtcggtgcggcaggcggtggaaatgctgcgcgccaacggaaaaatcgaggcggcgcggattgatggggaaaccggggaagtcatcccgtccctccgcactgctttccgcccgctggcaagacatcgacctcaccgcccggttatggcacatccccgccgccgacatgaagaccaaacacccctttaccgtcccactgtcggactgggcggtagaaatactccgagagctgcacacacagaccggcgacaacatccaccttttccccggcatccgcccacggcgcaaacccgcccccctcccgaccacatcagcatcaaattcgcccacaacgccatccgacgactgggctatgacggcagcacccccggcaaatccaaacacacaatgcacggattccgccacctcttcaccaacatcagcctgaccgccggaaaagacaccctcacaacagacctcgccctcggccacatcagccgcgccgccctccaacgcgccggcttctcaagcctgcaccactacctgaccgccgacagctaccgcctccaagagcggcgcgaactcgccgaatggtacagccgccgccaccgccaagcatacgaagccgccgcccaaaacacttgcaataaaacctaa

SEQ ID NO: 56140 - DNA, 684 bp, Neisseria meningitidis
atgtttgcccttttggaagccttttttgtcgaatacggctatgcggccgtgtttttcgttttggtcatctgcggtttcggcgtgccgattcccgaggatttgaccttggtaacaggcggcgtgatttcgggtatgggttataccaatccgcatattatgtttgcagtcggtatgctcggcgtattggtcggggacggcatcatgttcgccgccggacgaatttgggggcagaaaatcctaaggttcaaaccgattgcgcgcatcatgacgccgaaacgttatgagcaggttcaggaaaaattcgacaaatacggtaactgggtcttatttgtcgcccgtttcctgcccggtttgagaacggccgtatttgttacagccggtatcagccgcaaggtttcatacttgcgttttatcattatggatggactggccgcactgatttccgtccctatttggatttatctgggcgaatacggtgcgcacaacatcgattggctgatggcgaaaatgcacagcctgcaatcgggtatttttgttatcttgggtataggtgcgaccgttgtcgcttggatttggtggaaaaaacgccaacgtatccagttttaccgcagcaaattgaaagaaaagcgggcgcaacgcaaagccgccaaggcagccaaaaaagccgcgcaaagcaaacaataa

SEQ ID NO: 56141 - DNA, 1410 bp, Neisseria meningitidis
atgaatttccccaaaacagcggcctccctgctgctgcttctcgcctccctcgccgcacacgcgctcgatacgggtcgcattccgcaaaacgaaatcgccgtatatgtccaagagcttgacagcggaaaagtcatcattgaccaccgctcggatgtccccgtcaaccccgcctccacaatgaaactcgttaccgcgtttgccgccttcaaaaccttcggcagcaattaccgctgggcgaccgagtttaaaagcaacggtacggtaaacgacggcacgcttgacggaaacctgtattgggcgggcagcggcgaccccgttttcaatcaggaaaacctgcttgccgtccaacgccagttgcgcgaacaaggcatacgcaatatcacgggacacctgatgctcgaccacagcctgtggggcgaagtcggcagccccgacgatttcgaagccgacagcggttcgccgtttatgacgccccccaatccaactatgctgtctgccggtatggttatggtgcgcgccgaacgcaatgccgccgacagtaccgacatcctcaccgatccgcctttgtcgcatattttcgcccaaaacaacttgaaaattaccgcctcccaagctgcctgcccttcgatcaaaaaactgatgcgtgcatctttttcggacaatacgctgaaattgcgcggcaatattcccgagagctgtttgggcaagcctgtcggtgtccggatgttcgcgcttgacgaactgatccggcaaagttttaccaaccactggctgctcggcggcggacggatttcagacggtatcggcatagccgacacgccggaaggcgcgcagacgcttgccgttgcacacgccaaaccgatgaaggaaattttgacggacatgaacaagcgttcggacaatctaattgcgcgttccgtcttcctcaaactcggcggcaacggcaaactgcccgccgtttccgaacaggcagcgtctgccgtccggcgtgaacttgccgtgtcgggcatcgatgttgcggatttggttttggaaaacggttcaggtctgtctagaaaagaaagggtaacggcgagaatgatggcgcaaatgttggaaacggcttatttcagcccgtttgcacaagatttcatcgatacgctgcccatcgccggcacagacgggactttacgcaaccgcttcaaacaaagcggcgggctgttgcgcttaaaaaccggcacgctcaacaatgtccgcgcccttgcaggttattggctgggcgacaaaccgatggcggtggtcgtcatcatcaacagcggccgcgccgtttccctgctgcccgacttggacaacttcgttgccaacaacatcatctccggcggcgatggctggctggatgcgaaactgatgtgcaaagaacgccgagcctga

SEQ ID NO: 56142 - DNA, 1197 bp, Neisseria meningitidis
atgtggacgggatttttttcaaaatcaggcactggcattgcagaggaaaggcatcaaaaccgccgtgcttgcaccgatgttccgctacttgcggaaagaaacagcaagcatcctgaccggccttacggttttgcaaaatatcggcaaagcggtttggacatctatgcatggcacggcatatatttcttcccccgctttccgttcatcgacatcgactgcatccgctgggtgtgtgcgggtttgaaagctttcaaacactacatccgcgaaaacgggctgcccgacctgattcacgcccactgtatgaactatgccggcatacttgccttcaagatttcccaaaaatacggcatcccctatgtcgtcacgaaacacagcagcaccatcacgcgcggtctgatccgtccccaccaatggcagcctatgaaaaatgcggcggcgcacgccgccgcacgtctcgccatcagccgccatttcgcacacgtcctgcaacacaaatacggctgcgaatggcagtacctccccaacatactgggcggaatattcaaccgaccgtttgaacaaagagaaaaaaacaacaaaccgcatttcgtgttctgcaccgtctcgcaccttcgccgtctcaaaggacacgatgtcctgctcactgcctttgcccgggcgttggcacaatgcccgcaactgcgtctaaacatcggcggcagcggacaggaagaacagcggctgaaacagcaggcggcagacttgggcattacccatgccgttacatttttgggcgcattgcagcccgaagcagtcttggatttgatgaggaacagcgacgcattcgtccttgccagccgcaccgaaaccttcggcgtggtctatatcgaagcactgtcccaaggattgcccgtcattgcaacacgctgcggcggtgcggaatctattgtttcagacggcaacggatatttggttcctgttgacgacgacgatgcccttgccgacgcactcatcaaaatgtatgaacaccactctgattttgaacctgcccgacttagggaaaactgtctgaacgaatttggcgaaaatgccgttataggcaggttgatcggcattttccgacaggcaatcgcagaatacggtaagaaaataccggtgaaatatagtggattaacaaaaatcaggacaaggcgacgaagccgcagacagtacaaa

SEQ ID NO: 56143 - DNA, 1575 bp, Neisseria meningitidis
atgaaaaaatcccttttcgttctctttctctattcatctctacttaccgccagcgaaatcgcctatcgctttgtattcggaattgaaaccttaccggctgcaaaaatggcagaaacgtttgcgctgacatttgtgattgctgcgctgtatctgtttgcgcgttataaaacttcgcggctgctgattgcgctgtttttcgcgttcagcattattgccaacaatgtacattatgcggtttatcaaagttggatgacgggtattaactattggctgatgctgaaagaggttaccgaagtcggcagtgcgggcgcgtcgatgttggataagttgtggctgcctgcgttgtggggcgtggcggaagtcgtgctgttttgtagccttgccaagttccgccataagacgcatttttctgccgatatattgtttgccttcctaatgctgatgattttcgtgcgttcgttcgacacgaaacaagagcacggtatttcgcccaaaccgacatacagccgcatcaaagccaattatttcagcttcggttattttgtcggacgcgtgttgccgtatcagttgtttgatttaagcaagattcctgtgttcaaacagcctgctccaagcagaatcgggcaaggcagtattcaaaatatcgtcctgattatgggcgaaagcgaaagcgcggcgcatttgaaattgtttggctacgggcgcgaaacttcgccgtttttaacccggctttcgcaagccgattttaagccgattgtgaaacaaagttattccgcaggctttatgacggcagtatccctgcccagtttctttaacgtcataccgcatgccaacggcttggaacaaatcagcggcggcgataccaatatgttccgcctcgccaaagagcagggctatgaaacgtatttttacagcgctcaggctgaaaaccaaatggcaattttgaacttaatcggtaagaaatggatagaccatctgattcagccgacgcagcttggctacggcaacggcgacaatatgcccgatgagaagctgctgccgctgttcgacaaaatcaatttgcagcagggcaggcattttatcgtgttgcaccaacgcggttcgcacgccccatacggcgcattgttgcagcctcaagataaagtattcggcgaagccgatattgtggataagtacgacaacaccatccacaaaaccgaccaaatgattcaaaccgtattcgagcagctgcaaaagcagcctgacggcaactggctgtttgcctatacctccgatcatggccagtatgttcgccaagatatctacaatcaaggcacggtgcagcccgacagctatctcgtgccgctagtgttgtacagcccggataaggccgtgcaacaggctgccaaccaggcttttgcaccttgcgagattgccttccatcagcagctttcaacgttcctgattcacacgttgggctacgatatgccggtttcaggttgtcgcgaaggctcggtaacgggcaacctgattacgggtgatgcaggcagcttgaacattcgcgacggcaaggcggaatatgtttatccgcaatga

SEQ ID NO: 56144 - DNA, 2178 bp, Neisseria meningitidis
atgaagacagacattcaaaccgaattaacccaagccctactaccacacgaaaaagtatgggcgaacgaagaaaaaaccattttagccaaaaacattctgttggatttggtggaaaaaaccgacccgaccattatcggtttgttattgaataatgatgagttaaaacgccatttctttgtggaagtgaatggtgttttggtgtttaaattgcaggatttacgttttttcttggacaaacacagcgtcaataattcctacacaaaatacgccaaccgcattggtttgacggacggcaaccgctttttgaaagacaattcggatattgtgttggattttccgtttaaagattgcgtattgaatggcggacaaagcaccgaagaaggcgaagagatttattttaaacgcagtaatagccagccagccagccagccagccagccagccagccagccagccagccagccagccagaattatacactaaattaacccgaaaaagacaagaaatcttttttaatcaaacgcttgcttttgatgaaatcgatcggctttttgacgcaaaagcattctcaaaattctctcgctataccgcagacggcaaacaagcggttggcgaaatcaaacgtcattcagacggcacacccgccgaaaatctcattatcaaaggcaataatctgatagccctacattcgcttgccaaacagtttaaaggcaaagtgaagttgatttatattgatccgccttattattttgttaaaaagaaacaacaagatagttttggttataacactaactttaaattatctacttggcttacatttatgaaaaatcgtttatcaattgccaaagaattattaactgatgatgggattattgttatttccattgatgatgacggaaatgcttatttaaagattttgttagatgaaatttttggatttgaaaattttatcggaaatttacccactattatgaatttaaaaggtaataatgatgaatatgcttttgcaggcactcacgaatacacactagtctttgctaaaaataaagataaatctactttttatgaatttccaatagatgaagataattttttagagaaatgggaagaagatgaaattgggttttataaaaaaggagctccaatgcgagcaacaggaaccgaagataaaagagaagatagacctgaaatgttctatccttttttggtaaaaaataacacagttagtacaattacagatgaagaattttctcaaatctataataaagatttagaagtattcaatgatgattttattcaaaaactaaaagagaaatacgaaaatcttggatacaattttattttacctattgctgataaacaatgggggcgttggcgttgggggtattcaataaagaataaggcaaggctgcagacggatattattgttagccaatctaaaaatggaatttccttgtataaaaaacaaagacctgaattagatgatttacctacaaaaaaacctaaaactattttttataaacctgaatacagtagtggtaatggaactgaacagatgaaaaatctttttggtgaaaaggcatttaaaaatcctaaaccagaagaacttatccaagattttattaccatcacaaccaacgaatccgacatcgtcttagactaccatcttggtagtggcacaaccgccgccgttgcccacaaaatgaaccgacaatatatcggtattgaacaaatggattatattgaaacgcttgccgttgaacgcttgaaaaaagtgattgatggcgagcaaggcggtatttccaaagccgtgaattggcaaggtggtggcgagtttgtttatgccgaacttgccccatttaacgaaaccgcaaaacaacaaattttggcttgcgaagattcagacggcatcaaaacgctgtttgaaggtttatgcgaacgctatttcttgaaatacaacgtcagcgtaaatgaatttagtcaaatcattcaagagcctgaatttcaatctttgccattagacgaacaaaaacaaatggtgcttgaaatgttagatttaaatcaaatgtatgtttcattatccgaaatggacgacgagcaatttgcagattgcctgaacgatgacgataaagcggtaagccgtgcgttctatcaagcggagaaaaaaaatggcgaataa

SEQ ID NO: 56145 - DNA, 984 bp, Neisseria meningitidis
atggctgcgtacgacagtttgatggtatttacaggcaatgccaatcccgaattggcacaacgtgttgtcaggcatttggacatttctttgggcaatgcttccgtatccaagttttcagacggcgaagttgccgtcgaactgttggaaaacgtacgcgggcgcgatgttttcatccttcagccgacctgtgcgccgaccaatgacaacctgatggaaatcctgacgatggcggatgcactgaagcgtgcttcggcaggtcgtattaccacagccattccgtatttcggctatgcgcgccaagaccgccgtccgcgttccgtccgcgttccgatttctgccaaactggtggcaaatatgctgtattcggcagggatcgaccgtgttttgactgtcgatttgcatgccgaccagattcaaggtttcttcgatattccggtggacaatatttatgccaccccgattctgttgaacgacatcaaacaacagcggattgaaaatctgaccgtcgtcagcccggacatcggcggtgtcgtccgcgcccgcgccgtggcaaaatccttgaatgccgacttggcaatcatcgataaacgccgcccgaaagccaatgtggcggaagtcatgaacatcatcggcgatattcaaggcagaacctgtctgattgtggacgatatgattgacaccgcgaataccttgtgtaaagctgccgtcgccctgaaagagcgcggtgcggaacgtgtcttggcatatgccagccatgcagtattctccggagaggcggtcagccgtatcgcctcatccgaaatcgaccaggtggtcgtaaccgataccattcctttgtctgaagcggctaaaaactgcgaccgtatccgtcaggtaacgattgccggtctgttggccgaaaccgtccgccgcatcagcaatgaagaatccgtctcatatcttttcaatgaagaagtgatgacaggcagcatgttgttgccgtaa

SEQ ID NO: 56146 - DNA, 489 bp, Neisseria meningitidis; identical to SEQ ID NO: 44020

SEQ ID NO: 56147 - DNA, 1527 bp, Neisseria meningitidis
atggattatccaccgcttaagggtgcggcattggcgtgggttacgctgtctttggggcttgccgtatttatggaagttttagatacgactatcgccaatgtcgccgttcccgtcatcgccggcaacctcggtgcggcaaccacgcaggggacgtgggtcattacttcttttgctgtggcaaacgccgtttccgtgccgttaacgggctttttggcaaaacgtatcggcgaggtcaaattgtttaccgccgccgctgtcggtttcgtcatcacatcgtggctgtgcggtattgcccccaaccttcagtcgctggttgttttccgcatcttgcagggctttatcgccgggccgctgattcccttgtcgcaaagcctgttaatggcatcctatccgcccgcaaaacggacgctggcactggcattgtgggcaatgaccgtcgttgtcgcccctgttctcgggccgatactcggcggctggatttccggaaactggcattggggttggattttcttcattaatatccctatcggtatcatatcggcatggattacatggaaacatttgaaatgtcgggaaacggaaaccgttaaaatgccgaccgactatgtcgggcttacattgatggtagtcggtatcggcgcgttacagatgatgttggacaggggtaaggaactcgactggttcgcctctggagaaatcattaccttgggcgtagtcgcactggtgtgcttgtcgtattttattgtttgggaattgggagaaaaatatccgattgtcgatttatcgctgtttaaagatcggaattttaccgtcggcatcattgccacatcattgggttttatggtgtatatggggacgctgaccctgctgccgttagtgttgcagaccaacctgggctatacctccacgtgggcggggcttgccgccgcgcccgtcggcatcctgcccgtcttcctgtctccgttaatcggcaggttcggcaataaaatcgatatgcgcctgctcgtaaccgccagcttcctgacctttgcctttactttctattggcgcaccgatttttatgccgacatggatatcggcaacgtcatctggccgcagttttggcagggggcaggcgttgccatgttcttcctgccgctgaccaccatcacactgtcgcacatgaagggcggacagattgccgccgcaggcagcctgtcgaatttcttgcgcgtgctgatgggcggtgtcggcgtatccgtcgtcagcaccctgtgggaacggcgcgaagcgttgcaccatacacgctttgccgaacacatcacgccctattccgcaacattgcacgaaacggccgctcatttgtcccagcacggcgtttccgacattcaaaccctaggcatcatcaacaataccattacccagcagggttttattatcggctcgaacgaaatctttatggcgggcagcttgttattcattatcatgatacccgtcatatggctggcaaaaccgccgttccacaacggcggcggcggtggacattga

SEQ ID NO: 56148 - DNA, 1644 bp, Neisseria meningitidis
atgaatgcttttacccgtgcatggtatgcgctcgaacgccattatcaggatacgcgtcatgtccttttgcgcgaccgctttgcctgcgaacccgaccgttttgagcgtatgcatgagcgtttggacgggatgttgttcgattacagcaaaaaccgtttgggcgaagatacgctgcaactgctctgccgtcttgcggagacggcggatttggaagggaaaatgcgtgctttgcggacgggtgcgaaagtcaacggcagcgaggggcgtgccgcgctgcatacggctttgcgcctacccgacggtgcggatgccgtttatgcggacggcagggacgtgttgcccgaaatccgccgcgagttaaatcgtgcgttggagtttgcacacagtttggacgacggttcgtatcaggggacaaccggaaaacggattacggattttgtccacatcggcataggcggatccgacctcgggccggcaatgtgcgtgcaggcacttgagccgttcagacggcatatcaccgtccattttgccgccaacgccgatcctgcctgcctggatgcggttttatgccgtctgaaccccgaaacgacagtgttttgcgttgccagcaagtccttcaaaacaccggaaaccctgctcaatgcacaggcagtcaaggcgtggtatcgcggtgcggggttctcggaatccgaaacggcgtgccatttttgcgcggtgtctgccgacactgcggcagctgcggcttttggtatcgcggcggaacgcgtgtttgcgatgtacgactgggtgggcggacgctattccgtctggtcgcccgtcggtttgcccgtgatggttgcggtcggcggggcgcgtttccgcgagttgttggcgggggcgcacgcgatggacagccattttttccacacgccgccgcgccgcaacattcccgttctgatggcactgattgccgtgtggtataacaatttccagcacgcggacgggcagaccgccgttccgtacagccacaacctgcgcctgctgccggcgtggctgaaccagctcgatatggagagtttgggcaaaagccgcgcttcagacggcagtcccgccgtgtgcaaaacgggcggcatcgtgttcggcggtgaaggggtcaactgccagcacgcctatttccaactgcttcatcaaggcacgcgcctgattccctgcgactttatcgtcccgatgacggcgcagggcgtggaggaaggacgcagccgttttaccgttgccaacgcctttgcacaggctgaagccctgatgaaaggcaaaaccttggacgaagcacgcgccgaattggcagatttgcccgaagcggaacgcgaacgcctcgcgccgcacaaagagttccccggcaaccgccccagcaacagcatcctgctcgaccgcctcacgccctacaatctgggtatgctgatggcggcttacgaacacaaaacctttgtgcagggtgtaatttgggacatcaaccccttcgatcagtggggggtggaatacggcaaacagttggcaaaaaccatcatcggcgaactggaaggcggcacgtccgtacacgatgcctcgaccgaagggctgatggcgttttaccgcgaatgccgtctgaaaggcggcggcgcggcataa

SEQ ID NO: 56149 - DNA, 1170 bp, Neisseria meningitidis
atggacaatgaattgtggattatcctgctgccgattatccttttgcccgttttcttcgcgatgggctggtttgccgcccgtgtggatatgaagactgtattaaagcaggcaaaaagcataccgtcgggattttataaaagtctggatgccttggttgaccgcaacagcggacgtgccgccagggaattggcagaggtcattgatcagcagcctcagtcatacgacctaaacctcaccctaggcaagctttaccgtcagcgtggcgaaaacgacaaagccatcaacatacaccggacaatgctcgattctcccgatacggtcggcgaaaagcgcgcgcgcgtcctgtttgaattggcgcaaaactaccaaagtgcggggttggtcgatcgtgccgaacagatttttttggggctgcaagacggtaaaatggcgcgtgaagccagacagcacctgctcaatatctaccaacaggacagggattgggaaaaagcggttgaaaccgcccggctgctcagccatgacgatcagacctatcagtttgaaatcgcccagttttattgcgaacttgcccaagccgcgctgttcaagtccaatttcgatgtcgcgcgtttcaatgtcggcaaggcactcgaagccaacaaaaaatgcacccgtgccaacatgattttgggcgacatcgaacaccgacaaggcaatttccctgccgccgtcgaagcctatgccgccatcgagcagcaaaaccatgcatacttgagcatggtcggcgagaagctttacgaagcctatgccgcgcagggaaaacctgaagaaggcttgaaccgtctgacaggatatatgcagacgtttcccgaacttgacctgatcaatgtcgtgtacgagaaatccctgctgcttaagtgcgagaaagaagccgcgcaaaccgccgtcgagcttgtccgccgcaagcccgacctcaacggcgtgtaccgcctgcttggtttgaaactcagcgatttggatccggcttggaaagccgatgccgatatgatgcgttcggttatcggacggcagctacagcgcagcgtgatgtaccggtgccgaaactgccacttcaaatcacaagtctttttctggcactgccccgcctgcaacaaatggcagacgtttaccccgaataaaatcgaagtttaa

SEQ ID NO: 56150 - DNA, 1533 bp, Neisseria meningitidis
atggtgatttccaacccccgcgaacttgaaaaactcaaagaccggattcccaatctgatcaacatcatccgcgtcgccatcgtttttccgctgatgattatgcacatcctcgggctggaaaccggcagccgtgcgaacctgcacgcttcgtggacggcgtgggcgttttatgtttggctcgccattgcctgctggctgattttcttttccatcatccatccgcattggcaatggcagtcgctgaaaatgccgcgtttcagcgcggtggcggacatcacgatgatcggcgtgctgacctacctgtttggcggcatcgattccggcttcggcatcctgatcctgcccttcgtcgtctgctcctgcctgctcagctacgggcgttaccccctgctctattccagctacgccgccatcctgctgatattcaacgccattgccgacggcgatatcggcaaatacccgctcatatcggatgcccgaaccgcctcggtaaccttcatccttgtcgccgcctcctatctttccgccatcttcacctcactgtcggtcagatacatcgacagcgccggccggctggcacgcgacaaccacctcgcctaccggcgcatcaaaggcttgagccaaaccgtactcaaccgcgttcaggaagcggtcgtcgtcatcaacgtcgagcatcagaccatactgttcaataaaaaggcaaaagacctgctacccatgcttgaaatcggacagcatactgccctgttcgaccctattaccgttttatgggacaaggcctcttcgcgtactttcgaacgcaatatcgacacgcccggcctgaacgccggcatccgcgccgttccggtcaacaaagggccggacaagctgctcatcctctacatccgcccgcaaagcgaaattcaggcagaagccctgtccgtcaaacttgccgcgctcggacaactgaccgccaacctcgcccacgaaatccgcaacccgatgtccgccatccgccacgccaacgacctgctgcgcgaaaatatggaagcgggggcggcagatccgttcaacgccaaattgtgcaaaatcatcgacggcaacgtctgccgtatcgacaaaatgctcgaagatatttcctcgccaacaagcgcaacaaaaccgaacgcgaaaccatcggcctgataccgttttgggaagaattcaaacaagagttcctgctcggccatcccgatgccgccggctgcatccgcctagatatgcagggcaatcacctgactgcctatttcgatcctgcccacctgcggcaaattatgtggaacctcgccaacaacgcgtggcggcacagcagcaaacgtaacggctcgattgccgtcgtcgcccgtcctgcacaaaaaaacaccatcagcatcctgtttgccgacgacggcggcggcgttccgcccgaagtgcaggaacacttgttcgaacccttttacaccacagcaaaaaacggaaccggcttgggactgtatgtcgcccgcgaactggcacacgccaatttcggcgatttga

SEQ ID NO: 56151 - DNA, 720 bp, Neisseria meningitidis
atggatacttttttagataggctcaaatttctttggcctcatggggctaagccatctgacatctataacaaaatagaaatgtcggcttctggatttaatagagtttggaaagagggagctatcccaacagccgattacctagtaaaaattcaagaagttaccggttgtgatttaaactggctgctgaccggaaaaggcttgccgtatctcgataaagccaggccggaaaacgccggagcattctctgtaagtagaaattctgatggaatcaccgacactatgggcaatcctgtcgacctgtccgagtttgtattcgtgccgcgctacaacgtagccgcagcagcagggtatggcgcaccagtcttcggcgaagaacctttattctgcttggctttccggaaatattggattgacaactatgtgaccaaacagccggaaaaactgtctgtaattaccgttaaaggcgattcaatggagggcgtgctcaatcatggggattccattctcatcaaccacgccgaaactgacccgcgtgacggcctatatgtcttgcgtataggcaatgacctctttgtcaaacgtgtgcaacgtataccgggcaaactgcttgtaacgtctgaaaatccacgttacgcaccgtttgaaatagatttgagcaatgcccaagacgacatcgccatcataggccgtgttgagtggtatggccggagtattgattaa

SEQ ID NO: 56152 - DNA, 2109 bp, Neisseria meningitidis
atgaaaatatcatttcatttagctttattacccacgctgattattgcttccttccctgttgctgccgccgatacgcaggacaatggtgaacattacaccgccacgctacctaccgtttccgtggtcggacagtccgacaccagcgtactcaaaggctacatcaactacgacgaagccgccgttacccgcaacggacagctcatcaaagaaacgccgcaaaccatcgatacgctcaatatccagaaaaacaaaaattacggtacgaacgatttgagttccatcctcgaaggcaatgccggcatcgacgctgcctacgatatgcgcggcgaaagcattttcctgcgcggttttcaagccgacgcatccgatatttaccgcgacggcgtgcgcgaaagcggacaagtgcgccgcagtactgccaacatcgagcgcgtggaaatcctgaaaggcccgtcttccgtgctttacggccgcaccaacggcggcggcgtcatcaacatggtcagcaaatacgccaacttcaaacaaagccgcaacatcggtgcggtttacggttcgtgggcaaaccgcagcctgaatatggacattaacgaagtgttgaacaaaaacgtcgccatccgtctcaccggcgaagtcgggcgcgccaattcgttccgcagcggcatagacagcaaaaatgtcatggtttcgcccagcattaccgtcaaactcgacaacggcttgaagtgcgggcaatacacctacgacaatgtggagcgcacgcccgaccgcagtccgaccaagtccgtgtacgaccgcttcggactgccttaccgcatggggttcgcccaccggaacgattttgtcaaagacaagctgcaagtttggcgttccgaccttgaatacgccttcaacgacaaatggcgtgcccaatggcagctcgcccaccgcacggcggcgcaggattttgatcatttctatgcaggcagcgaaaacggcagcctaattaaacgcaactacgcttggcagcagaccgacaacaaaaccctgtcgtccaacttcacgctcaacggcgactacaccatcggccgttttgaaaaccatctgaccgtaggcctggattacagccgcgaacaccgcaacccgacattaggttacaaccgcccctttaccgcctccatcaacccctacgaccgcgcaagctggccggcttcgggcaggctgcaacccgtcttcacccaaaaccgccacaaagccgactcctacggcattttcgtgcaaaacatcttctccgccacgcccgacttgaaattcgtcctcggcggtcgttacgacaaatacacctttaattccgaaaacaaactcaccggcaacagccgccagtacagcggccactcgttcagccccaacatcggcgcagtgtggaacatcaaccccgttcacacactttacgcctcgtataacaaaggtttcgcgccttatggcggacgcggcggctatttgagcatcgatacgtcatcttctgccgtgtttaacgccgaccccgagtacacccgccaatacgaaaccggcgtcaaaagcagttggctggacaatcgtttggacaccacattgtccgcctaccaaatcgaacgcttcaatatccgctaccgccccgacgcggaaaataatccctacacttgggcagtcggcggcaaacaccgttcgcgtggcgtggaattgtccgccatcgggcaaatcatccccaaaaaactctatctgcgcggttcgttgggcgtgatgcaggcgaaagtcgttgaagacaaaaaaaatcccgaccgagtgggcatccatttgaataataccagcaacgttaccggcaacctgtttttccgttatacaccgaccgaaaacctctacggcgaaatcggcgtaaccggtacaggcaaacgctacggttacaactcaagaaataaagaagtgactacgcttccaggctttgcccgagttgatgccatgcttggctggaaccataaaaatgttaacgttacctttgccgcagccaatctgttcaatcaaaaatattggcgttcggactctatgccgggtaatccgcgcggctatactgcccgggtaaattaccgtttctga

SEQ ID NO: 56153 - DNA, 630 bp, Neisseria meningitidis
atgagtgaaaccgaaaatcaagcattgacatttgccaaacgcttgaaggcggataccacggcggttcacgacagcgtggataacctcgttatgtctgtccaaccgtttgtcagcaaagaaaactacatcaaatttttgaaactccaatccgttttccacaaggctgtcgaccacatctataaagatgccgaattaaacaaagccattcccgagctggaatacatggcgcgatacgatgccgtaacgcaagaccttgcagatttgggtgacaaaccttacgaatacggcaaaccgctgccgcatgaaaccggcaacaaagcaatcggctggctttattgcgccgaaggatccaatttgggcgcggcgtttttgttcaaacacgcccaaaaactcgattacaacggcgaacacggcgcgcgccacctcgctccgcatcccgacgggcgcggcaaacactggcgtgccttcgtcgagcatctgaacgctttgaacctgactcccgaagccgaagcggaagccatccaaggcgcgcgcgaagcctttgcattctacaaagtcgtgttgcgcgaaaccttcggtttggcagccgatgccgaagcaccggaaggaatgatgccgcacaggcactaa

SEQ ID NO: 56154 - DNA, 1143 bp, Neisseria meningitidis
atgaaaaaatccgtattagccgttttggccgcgctgtctctggcagcctgcggcggcagcgaaaaaaacgccgtgcaacctcaagcagacgctgcgtctgctgccaatgccgaagccgctgccaccgatactctgaacatctacaactggtcgaactatgttgacgagagtacggtcgaagactttaaaaaagccaacaatctgaagctcacttacgacttgtacgaaaacaatgaaacgctggaagccaaaatgctgaccggcaaatccggttacgatttggttgtgccgggcatcgccttcctgccgcgccaaatcgaggcgggcgcgtatcaaaaagtcaacaaagacctgattcccaactataaaaacatcgatcccgaactcttgaaaatgctggaaaccgccgacccgggcaaccagtatgccgtcccctatttctccggcgtgaacacgattgcgattacggcgaaaggcaaagagcttttaggcggcaagctgcccgaaaacggctgggatttgctgttcaaacccgaatacacccacaagctgaaatcctgcggcatcgccctgtgggacaccccgagcgaaatgttcccgattttgctgaactacttgggcaaagaccccaaaggttcgaatcctgaagatttgaaggcagcggcggaagtgttgaagtctatccgtccggatgtcaaacgtttcagcccgtccatcatcgacgagctggcgcgcggcgacatctgcctggcggcaggcaacggcggcgatttgaacttggcgaaagcacgttccgaagaagtgaaaaacaacgtcggcatcgaagtgctgaatccgaaaggcatgggcttctggattgagtcttggctgattcccgccgatgcgaaaaacgtcgccaatgcccacaaatacatcaactacacgctcgaccccgaaatcgcggcgaaaaacggcatcgccgtaaccttcgcccccgccagcaaaccggcgcgcgaaaaaatgcctgccgagctggtgaacacccgttccatcttcccgaacgagcaggatatgaaagacggttttgtgatgccgcaaatgagtacggatgcgaaaaaactgtctgtcagcctgtggcagaaaatcaaagtcggcaccaactga

SEQ ID NO: 56155 - DNA, 1368 bp, Neisseria meningitidis
atgtcttccccttcaaataccaatcgtcaaacctgatccagccgattaacctatatcctgactgttgccggcgcgactgtcggcttcggcgcgacgtggcgtttcccgtatttggtcggtgaaaacggcggcggcgcgtatgtgtttttattctgtatcgccatgctcgttatcggcatcccgatgattttggtggaaaacgtcatcggacggcgcaaaggcgtgaacgcgctggatgcgttcggcggtccgatgaacggcaaacccattgctaaaatttggaaactggtcggctggatggggctgctcggcgcgttcggcatcatggcttattacatggcactcggcggctgggtaatcagctatatcgttaatattattggaggaaatttgaatatttccagccccatcgacggtgtggttacaaaaggcttctttgccgaacacattgacagcccttgggaaattgcgttttatacgctgctttttgtcgccgtgaaccaatggattttggtcaaaggcgttatcggcggcattgaaaaagcggcaaaatagctgatgccgctgctgtttttgttcctaatcgcgatggtcgtccgcaacgttacccttccgggcgcaatggaaggggttgctttctatctgaaacctgatttcagcaagattaccgccgaactgttcgtcttcgttttggggcaggtattttttgccctgagcctgggtttcggcgtgatgattaccttgtccagctatttggataaaaacgaaaatctggttcagacggcagttatcacggcaattaccaataccatcatcgccatacttgcgggctttatgattttcccgtcgctcttcagcttcggcgttgcccccgattccggcccgactttggtattccaaagtttgccgattgtgttctcgcatatgtgggcaggatctgtgttcgccgtcattttcttctcgctgctcctgattgccgcgttgacaacttcgctgaccatttatgaagtgttgattacgaccattcaggaaaaaaccaaaatccgccgtaccgccgcgattacgattgtattggctgccatcttcattttcggcaacatcccgtccattctgagctatggtccgtggaaagacgtttccgtgttcggcaaaaatattttcgatgccttcgactacatcagcggcaacatcttgtttatgctgaccgcgctcggttccgcgctgtttgccggttttgtgatgaaggacgaagcgaaggacgaattgctttataaaggcaaccatacgacggtcaatatttggtttgcttatgtgaaatatcttgtgccgctggtgattctgctgattttcgtcagcaacctgttctaa

SEQ ID NO: 56156 - DNA, 507 bp, Neisseria meningitidis
atgggatcaaaattctttttcctgctgctgcgttttgccggttcggtgttgccgccgtcgcatatgcgcggcatcgtcggcagacgggtacgcggttttttggcgcggcgggtttctccgcatattggacgcggggtcaatatcgaacgcggggcgtatgtgtttccggatacggttttgggcgacggctcgggcatcggggcaaactgtgaaatctgccgtgggccggtggtcggcaaaaatgtgatgatggagccggaatgtctgttttattcaaataaccacaagtttgaccgcaaaaaacgctttgagggctacacggaaatccgtccgattacgttggaggacgatgtctggccggggcgcagggtgattgtaatggcgggcgtaaccgtcggacgcggttcggtcgtgggcgcaggcgcggtggttacaaaagacattccgccctactctttggcggcaggcaatccggcagtggtgaaaaagaatctgccggaaggttga

SEQ ID NO: 56157 - DNA, 1866 bp, Neisseria meningitidis
atgagccaagccttaccctaccgcccggacatcgacacattgcgcgccgccgccgttttgtccgtcatcgtgttccatatcgaaaaaaattggctgccgggcggatttctcggtgtcgatatattctttgtgatttcaggctttttgatgacggcgatcctccttcgcgaaatgtggggggggaggttttccctgaaggcattttatatccgccgcatcaaacggattttgcccgcatttttcgccgtattggcggcaacgctgataggcggcttctttttattcaccaaagatgatttctttcttttatggaaatccgcgctgaccgccttgggtttcgcatccaacctgtattttgcaaggggcaaggactatttcgctcccgcgcaggaagaaaagcccctgctgcacatttggtctttgtcggtcgaagaacaattttactttgtctttccgatattgctgttgcttgtcgtccgcaaaagcctgcgcgtccaagccggcttcctcgccgcactgtgcgcgttaagccttgccacttcctttataccttccgcgttcgataaatattacctgccccacctgcgcgcctgcgaaatgctggtcggatcgctgaccgccgtgtggatgcgctgccggcaacctgccgtcggcagacgctgtgccgccgccggcgcattgtttgccgtgtgcatattgtcaacctgcctgttttcctattcggaacaaaccgcctatttcccgggccccgccgctttgattccctgtctggctgttgccgcgctgatttatttcaaccattacgaacacccgcttaaaaaatttttccaatggaaaatcaccgttgccgccggtttgatttcctattcgctttatctgtggcattggccgatattggcctttatgcgctatatcggcccggacaacctgccgccttattcgccggcggcggcaatcgtcctgactctggcgttttccctgatttcttatcactgcatcgaaaagccgtttaaaaaatggcaaggttcgttcgcacaatccgttttatggatttatgccttgcctatgctcattttgggggcgggctcattttttgcgatgaggctgccgtttatggcgcaatacgaccgcttggggctgacgcgttccaacacctcctgccacaacaataccggcaaacaatgcctatggggggatacggaaaaacagccggaactgctcattttgggcgactcccacgccgaccattacaaaacattcttcgatgccgtgggcaaaaaagaaaaatggtccgccactatggtttccgccgacgcttgcgcctatgtggaaggctacgcgtcccgtgtgttccaaaactgggcagcctgccgcgccgtttatcgctatgccgaagaacacctgccccggtattcaaaagtggttttggcgatgcgctggggcagccaaatgcccgaaaacagccgctcccttgcctatgatgccggttttttccaaaaattcgaccgtatgctgcacaaactctcatccgaaaaacaagccgtttacctgatggcggacaaccttgcctcgtcttacaacgtccagcgcgcctatatcttgtcttcacgcataccgggttaccgccaaaccctgcgcccggacgacgaaagcaccctgaaagccaatgcacgcatcagggaattggcagccaaataccccaacgtctatattattgatgccgccgcctatatccccgcagattttcaaatcggcggattgccggtttactcggacacagaccacatcaacccttacggcggcacggaattggcaaagcgtttttccgaaaaacaacggtttctcaatacgcgccataaccattga

SEQ ID NO: 56158 - DNA, 1251 bp, Neisseria meningitidis
atgtttgttccgctggcaatgcttgcaggtatgttttcctactacgaaaccttccacgaaacggaagcgttgcaggacgacctgctccgtcaggcggcattgtacgtcgcccccgattccaaacccgaaactttgcccgagggcgacggcgatacgcgtattttggtacagatgccgcagcaggaagaccctgttgtcagcctgcctgcgcatctggcggacggtctgcacacgcttcaggcggacggggacgacgattattaccgcgtctatatccgcacgacggagcgggggcggattgccgtgatgcaggaaagcgaataccgggaagatttggcggcggatgcggcacggcaaagcgtgttgcccctgctggcggcactgccgctgatgatactgctgaccgtgtggattacgcacaaagccatgcgccccgtccgcaaattgtcgcaaagtctcgaacaacgccgaatcaatgacctgtctgccttgagtgtggacaatattcccagtgaaatcagagggttcgtaaccgccatcaacttgcttttgaaacgtgcggatgaagacatccgccaccgtcagcggtttgtcgccgacgcggcacacgaattgcgtacgccgatgacagccctttcccttcaggcggaacggctcaacaatatgtctctgccacccgatgcggcgcggcagtctgccgttttgcagcaaagcatacggcgcaacaaacacctgctcgagcagcttttggcactggcgcgttcgcagtcggacgaaacccctttggcgaaaacgacattcggtctgcaaagccgtttccgccaagtgttgcaggaactgatgccgcttgccttggaaaaacgtcaggacattggtgtggcggtcggaggtgatgtcgaaatatttgccgatgaaactgaaatctataccttggttaaaacgtttgttgataacgcaatacgttataccccgtccgaaggcaggatagatttgggtttcacagacgaagggaaatatcttgccgtgtgggtggaagataacgggaacggcattccggaatccgaacgcgtccgcgtcctcgatccgttttaccgtattttgggaacggagcagcaggggacggggctggggctgtcgattgccgacacgctagccaaaaaatacggcggatatttggaactgaccgacagccgcaggttcggacacggtctgctgatacgcgccttgttggacaaggaaaccctgaaatag

SEQ ID NO: 56159 - DNA, 978 bp, Neisseria meningitidis
atgcaagaaaacccgaccgtgtggctgttcgacctcgacaacacgctgcacaatgccgacgcaggcatcttcacactcatcaaccgcgctatgacacgctatatggcacgccgcctcaaactctccgaatccgccgcgtccgacctgcgtcaggaatattggcaccgctacggcgcaacgctcgccggactgcaaatccaccatcccgaaatcgacatcgccgaatttttacgcgaaagccatccgatcgatgcaatcctgaccaagctgcacggcatggcggatacggaacacaccctatgccgtctgaacgggcgcaaggcggttttttccaacggtccgtcgttttacgtccgtgccgttgtcggcgcactcggtttggaaaaccgtttcgacgcactgttcggcacggatgatttcggactgctgtacaaacccaatccgcaagcgtatctcaatgtctgccgccttttggacgtaccgcccgaatgctgcattatggtggacgacagcgcggacaacctgcatcaggcaaaagcattgggcatgaaaaccgtctggttcggtgcaaaatcccacgcgctgtcctttatcgacgcctgcgcacgcgatatggcgcaactggctcggtatgcagaaactttgtcagaacaccgccaaactcattacaataccctctaaatcctgaaaatacgaaagaaaaccatgcgtaaaaccttccttatcctgatgaccaccgccgcccttttgtcgggctgcgcgtgggaaacttatcaagacggcaacggcaagaccgccgtccgtcaaaaatatcccgccggcacgcccgtttattaccaagacggcagctactcgaaaaatatgaactacaaccaataccgtcccgaacgccatgccgtgttacccaaccaaaccggcaacaacgccgacgaagagcatcgccaacactggcaaaagcccaaatttcaaaaccgataa

SEQ ID NO: 56160 - DNA, 1119 bp, Neisseria meningitidis; identical to SEQ ID NO: 39438

SEQ ID NO: 56161 - DNA, 879 bp, Neisseria meningitidis
atgtgtatcgagatgaaatttatattttttgtactgtatgttttgcagtttctgccgtttgcgctgctgcacaaacttgccgacctgacgggtttgctcgcctaccttttggtcaaaccccgccgccgtatcggcgaaatcaatttggcaaaatgctttcccgagtgggacggaaaaaagcgcgaaaccgtattgaagcagcatttcaaacatatggcgaaactgatgcttgaatacggcttatattggtatgcgcctgccaaacgcctgaaatcgctggtgcgttaccgcaataagcattatttggacgacgcgctggccggggaaaaagtcatcatcctgtatccgcactttaccgcgttcgagatggcggtgtacgcgcttaatcaggatgttccgctaattagtatgtattcccaccaaaaaaacaagatattggacgaacagattttgaaaggccgcaaccgttatcacaacgttttccttatcgggcgcaccgaagggctgcgcgccctcgtcaaacagttccgcaaaggcagcgcgccgtttctgtatctgcccgatcaggatttcggacgcaacgattcggtttttgtggattttttcggtattcagacggcaacgattaccggattgagccgcattgccgcgcttgcaaatgcaaaagtgatacccgccattcccgtcagggaggaggacaatacggttacattgcatttctaccctgcttgggaatcctttccgagtgaagatgcgcaagccgacgcgcagcgtatgaaccgttttatcgaggaacgcgtgcgcgaacatcccgagcagtatttttggctgcacaagcgtttcaaaacccgtccggaaggcagccccgatttttactga

SEQ ID NO: 56162 - DNA, 1041 bp, Neisseria meningitidis; identical to SEQ ID NO: 46051

SEQ ID NO: 56163 - DNA, 1041 bp, Neisseria meningitidis; identical to SEQ ID NO: 46051

SEQ ID NO: 56164 - DNA, 1086 bp, Neisseria meningitidis
atgaccgtcccccatattccgcgcggccccgtcatggcagacattgccgccttccgcctgaccggagaagaaaggcaacgcctgctcgaccccgcaatcggcggcatcatcctcttccgccgcaacttccaaaacatcgaacaactcaaaacactcaccgccgaaatcaaagccctgcgcacacccgaactcattatcgccgtcgatcacgaaggcggcagggtgcaacgtttcatcgaaggcttcacccgcctgcccgcaatgagtacgctcggcgagatttgggacaaagacggcgcgtccgccgccgaaaccgccgccggacaagtcggccgggttttggcaaccgagctttccgcctgcggcatcgatttgtccttcacgcccgtcttagatttggactggggaaactgccccgtcatcggcaaccgcagtttccaccacaatcccgaagcggtcgcccacctcgccctcgcccttcaaaaaggtttggcaaaaggcggtatgaaatcctgcggcaaacattttcccggacacggatttgtcgaaggagacagccatctggtcttgccggaagacaggcgcagcctgtccgaactcgaagccgccgacctcgcccccttccacattatgagccgcgaaggtatggcggcggttatgcccgcccacgtcgtttatccacaagtggacacaaagcccgcagggttttccgaaatctggctcaaacaaattttgcgccgcgacatcgggtttaaaggcgtaattttctcggatgatttgactatggagggcgcgtgcggggcaggcggcatcaaagaacgcgcccgcatttcctttgaggcaggttgcgacatcgtcctcgtctgcaaccgtcccgaccttgtggacgaactgcgcgaagatttccgcattcctgacaatcccgctttggcgcaacgttggcaatacatggccaacacgctcggcagtgccgccgcgcaagccgttatgcagacggcggatttccaagaggcgcaagcctttgttgccggccttgcctcgccgcaagacacggcgggcggcgtaaaagtcggcgaagccttttaa

SEQ ID NO: 56165 - DNA, 630 bp, Neisseria meningitidis
atgaacagacacatccgccaagaaattttcgaacgcttccgcgccgccaacccccatccgaccacagaactcaacttcaactcccctttcgagcttttaatcgccgttttactgtcggcacaggcaaccgacgtcggcgtaaacaaagcgacggcgaagctgtttccggttgccgatacgccgcaggcgatgctggatttgggtttggacggcgtgatggaatatacgaaaaccatcgggttgtataaaaccaagtccaagcacatcatgcagacctgccgcatcctgctggaaaaatacaatggcgaagtgccggaagaccgcgaggctttggaatcgttgccgggcgtggggcgcaaaacggcaaacgtggtattgaacacagcgttcggacaccccgttatggcggtcgatacgcatattttccgcgtgtccaaccgaaccaaaatcgcccccgggaaagatgtgcgcgaagtcgaagacaaactgatgcgcttcattcctaaagaatttctgatggacgcgcaccactggctgattttgcacggacgctacacctgcaaggcactcaaaccgcaatgccaaacctgcatcatcaacgatttgtgcgaatatcccgccaaagcctga

SEQ ID NO: 56166 - DNA, 423 bp, Neisseria meningitidis; identical to SEQ ID NO: 44041

SEQ ID NO: 56167 - DNA, 1518 bp, Neisseria meningitidis
atgttgtatttcagatacggctttttggttgtttggtgtgcggcaggtgtttctgccgcctatggggcggatgcgcccgcgattttggatgacaaggcattgttgcaggtgcagcggtcggtgtcggataagtgggcggaatcggattggaaagttgaaaatgatgccccgcgcgtggttgacggggattttttgttggcgcacccgaaaatgttggaacatagtttgcgcgacgcgctcaacggcaatcaggcggatttaatcgcttcgttggcggatttgtatgccaagctgccggattatgatgcagttttgtacggcagggcgcaggctttgctggcgaaattggcgggaaggccggcggaggcggtggcgcggtatcggaagctgcacggggaaaatgcggcagacgagcggattttgctggatttggcggcggcggagtttgacgatttccggctgaagtcggcagaaaggcattttgcggaggcggcaaaattggatttgccggcgccggttttggaaaatgtggggcgttttcggaaaaaaacggaggggctgacgggctggcgtttttcgggcggcatcagcccggcggtcaatagaaatgccaataatgccgcgccgcagtattgccggcaaaacggaggccggcagatatgcagtgtcagccgggcggagcgggcggcagggttgaattatgaaatcgaggcggaaaaactgacggcgttggcagataatcattatttgttgttccgttccaatatcggcggcacgagctattatttcagtaaaaaatcagcttatgatgacgggttcggcagggcgtatttgggttggcagtataaaaatgcgcggcagacggcggggattttgccgttttatcaggtgcagttgtcgggcagcgacggctttgatgcgaaaacaaaacgggtaaacaaccgccgcctgtcgccgtatatgctggcgcacggagtcggcgtgcagctgtcccatacttaccgcccaaacccgggatggcaattttcggtcgcgctggaacattaccgccaacgctaccgcgaacaggatagggcggaatacaataacggcaggcaggacgggttttatgtttcgtcggcaaaacgtttgggcgaatcggcaactgtgttcggcggctggcagtttgtgcggtttgtgccgaaacgcgaaacggtgggcggcgcggtcaataatgccgcctaccggcgcaacggtgtttatgccggttgggcgcaggagtggcggcagttgggcggtttgaatagtcgggtttccgcgtcttatgcccgccgcaactataagggcgttgcggctttctcgacagaggcgcaacgcaaccgcgaatggaatgtctcgctggctttgagccacgacaagttgtcgtacaaaggtatcgtaccggcgttgaattatcgtttcggcaggacggaaagtaatgtgccgtatgcgaaacgccgcaacagcgaggtgtttgtgtcggcggattggcggttttga

SEQ ID NO: 56168 - DNA, 294 bp, Neisseria meningitidis
ttgcacaaacaagtgcaacatattactacaaagctattttatttcaaaataactgatatatcttttttcatagattttaaatttcatatttttaatattttaggaattttattccaaagaaaaagaaacagattgataaaaacaatacccgccattcattcggacaaaaccgcacggaacatccgttttcccgtttccacgacaatccggtacaggacaccccgctgccgattccgcctgcacatccggcaaaatttcatacgcaaggaaaatgttgaaaacaaaaagaactaa

SEQ ID NO: 56169 - DNA, 375 bp, Neisseria meningitidis; identical to SEQ ID NO: 40077

SEQ ID NO: 56170 - DNA, 237 bp, Neisseria meningitidis; identical to SEQ ID NO: 40080

SEQ ID NO: 56171 - DNA, 225 bp, Neisseria meningitidis; identical to SEQ ID NO: 40174

SEQ ID NO: 56172 - DNA, 1059 bp, Neisseria meningitidis
atgtcaggctatacaggcggcctcgttgtttcaggtggcatatcattaattgacagacttgatattatggaaaatgtaaaccgcatcgttgcagaaggcattgccgcagtagaagctgcgcaagacttcaacgctctagaacaaatcaaagcccgttatcttggcaaaaccggcgagttgaccggacttctgaaaactttggggcaaatgtcgcctgaagagcgcaaaaccataggtgcgcatatcaatgaatgcaaaaaccggtttcagacggcttttaatgccaaacgcgatgccctcaacgaagccaagctgcaagcccgacttgccgccgaagccctcgacattaccctgcccggacgcgctcaggaaggcggcagcctgcatcccgtaaccctgaccttgcaacgtgtggtcgaactctttcacggaatgggtttcgaagtggcggacgggcctgaaatcgaagacgattttcacaatttccaagccctgaacatccctgcaaaccatcctgcccgtgcgatgcaggatacgttttacgttgaaaacggtgatgttttgcgtacgcacacttccccgattcaaatccgctatatgctcgataaaaaagagccgcccatccgcattatcgcccccggccgcgtttaccgtgtggacagcgatgccacgcactcgcctatgttccatcaggcggaaggtttgtgggtagaagagggcgtaacttttgccgatttgaaagcagtgttcacggattttatccgtcgcttctttgaacgcgatgatttgcaagtacgtttccgcccgtctttcttcccgttcaccgaaccgtctgccgaaatcgacattatgggcgaaaacggcaaatggctggaagtcggcggctgcggcatggtgcatcccaacgtgttgaaaaatgtgaatatcgattctgaaaaatacaccggtttcgctttcggtatcggtctcgaccgtttcgcgatgctgcgttacaacgtgaacgatttgcgcttgttttttgataacgatttgaattttttgaagcagtttgtaaaatga

SEQ ID NO: 56173 - DNA, 198 bp, Neisseria meningitidis; identical to SEQ ID NO: 40083

SEQ ID NO: 56174 - DNA, 195 bp, Neisseria meningitidis
ttgaggcaggcatttcagacggcattccttaaatgcgtgtaccggtggtgttccaaaaggtcgtctgaaagtgcagcttctgcgaagctaaagcgcggtatcaacgaagttaaaatttgcctgaaccttaaaggcagcctgcaccccaatcccctctccccgtgggagagggctaggacgaggctggcaaactga

SEQ ID NO: 56175 - DNA, 462 bp, Neisseria meningitidis
atgttacatatacccccaacggaacctgatcgatatgttagcagtattgtagccttaaacgtgcatagttctaacggtacaggcgattggcacagtgcagcagcccttaatgatgatgcttacccccaagatttctatatttatggcaaagatcaaacacgtagcacgttacatttgcttggtaacgttggtgtgattgatggaacaaaccgcttcaatgagatgggctattatcctgaaaacatcccagtttggctcgcagatcacccccgtgcttgcgtggattatctttacacagcagtgttacaaactggctcaatcggtcgggtgattttagatgattggtttccaagcgatgaagacaagcaatcagtttatgacttacttaaccaaatcgaaccgcacttgaatactcaagaatgggagaatttacagctatggaaacgcaaaaacccaataatg

SEQ ID NO: 56176 - DNA, 261 bp, Neisseria meningitidis
ttggaaaggaaaaataacatcattgaactatccattgagaatctggagctaatttatggcggaggcttaggggagagaatccttgaaggaggagcaaatggtgcacaaataggaggatcaattggtgcaggtattggtctgggtgtcggtatagtttctggtggtattcctgccggaccggctattattctcggtggcacagttggtgctgctgttggtgctgtaactggtatgggtgttgcagcatatgagtattactaa

SEQ ID NO: 56177 - DNA, 243 bp, Neisseria meningitidis; identical to SEQ ID NO: 44059

SEQ ID NO: 56178 - DNA, 237 bp, Neisseria meningitidis; identical to SEQ ID NO: 45833

SEQ ID NO: 56179 - DNA, 312 bp, Neisseria meningitidis
atgtttaatcaaactcaaactgtaacttatcctgcaacttttttgggagtcaaaaaattcaaaggtgaaattgatggctctaacattgacacttgttccgtattggttgcaacacctttaccggcacagtcgggtaatgctgttggatttacggcagcacaaatgaagttcggggatagtaagaatttctcaaggttagagaatctcaaatatccgtgcgaagttatggtaatggttgaaatgacttcgacaggtaaaggcatggttccgtcattaattgattttcaggtggcggaaaagccgaaaggttga

SEQ ID NO: 56180 - DNA, 210 bp, Neisseria meningitidis
atggatatgaccctgaagcataaagccgaagcccttttgggcgagccgcttttagacgaacccgtccgacccgagtcgtgggaatgctgcggcagcgactgcggcgaggcgtgcattcagacgatttactgggcggataaggcacgctacgacgcgcaacggcggaagttgaaagaagcgggttgggcggaagacgaaaatgccgtctga

SEQ ID NO: 56181 - DNA, 207 bp, Neisseria meningitidis; identical to SEQ ID NO: 44064

SEQ ID NO: 56182 - DNA, 195 bp, Neisseria meningitidis
gtgaagcataagctcgcgtcttggtggaaaaccatcaagctgacggcaaacttgatggcaggcgtgcctgattatgaaaactacgttgcacagcagcgcaaacataatcccaacgcccccgtgatgaccaagctgcaatttcaagactactgccgcaagcgccgttgcggcgcaaacggcggacgctgctgttag

SEQ ID NO: 56183 - DNA, 441 bp, Neisseria meningitidis
atgaagtggttattaaatatgataatgagacctattaaatttattatggtaaatacgttattatttattgttatatgtagttcattttttgatctgctcgttcaattatgtacaattttatttcatagccaaaaaatatactttattacattatttttattatttatttttaattttgttacaaaatctatctatatggcaattatttatcctattttatatttttttacgataaaaaaatattatccttactctaggaaagtgataattctattattattagcattatctatatattttagttttatggacttttactttttttccatatattcagataaccttagctatgaaacggagcctttacatttatacatccctattattattaattttttctcacttttagtttctaattttattttatcttttatcaacaag

SEQ ID NO: 56184 - DNA, 129 bp, Neisseria meningitidis; identical to SEQ ID NO: 52097

SEQ ID NO: 56185 - DNA, 813 bp, Neisseria meningitidis
atggcagacatcctaccatccgacaagcggcggcaaccgccaaaaacgaaaggaagtacgatgaacataatcgaacaagaaatgaaacactccagtctgagaaaagtagatgccgaaatcgccaaaatcattgcagacgcgcacaaaatcaacgccgaatccgtaaaaatagcccaagaatcccgatggtatcccatgatggcggccaccgggctggttaccgccatcgccgccgtgttggcactgatattcaaatttgcctgaccacaagccccgcgaggggctttatcccccgaacaacccgaacaaaatgaacagagccgcactattcaaccgctaccccgaatggattatcgggcaagacggcgcaagccgtttcattacccattgccgctatccccgcctgattgccaaaatccacaggcagacagacagcgaatgcccgggcgggcattaccgccattccgaaaacggcatcaccctttacgattttatttttttcgacggaaaaccggcagacgaagcccgatttgccgccgtccttaccgaaacctgccgccgggcagtcaaaaaaatatgcgaaacaaaataaaccgcaacgacatggaactcggctacacgccttacaaccttcgcaccctgcgcaaccgctgcaaactgacacaggccgagttggcgcaaatcgtcggggtgaagcactacatacaggtaggccgctgggaagccgaacccgataccgaaacgcggcgggccgatatgccgctggaaaaatggcggcagttcctcgattggacagaaaaaacaaacgccgtc

SEQ ID NO: 56186 - DNA, 393 bp, Neisseria meningitidis; identical to SEQ ID NO: 54872

SEQ ID NO: 56187 - DNA, 198 bp, Neisseria meningitidis; identical to SEQ ID NO: 46017

SEQ ID NO: 56188 - DNA, 192 bp, Neisseria meningitidis
ttggcaaagcgtagaaaatggcgtacatttcgctacatggaattacacgacaggcaggaaatgccgtctgaaaggattttccggtcaatcttgcgattggtcggggtttcatcggaaacggtgaaacaaaagtttgccggcgtagagttgagctacgcgggcaaagccgcaggcgaaagcctgtattgtttg

SEQ ID NO: 56189 - DNA, 123 bp, Neisseria meningitidis; identical to SEQ ID NO: 38799

SEQ ID NO: 56190 - DNA, 267 bp, Neisseria meningitidis; identical to SEQ ID NO: 40064

SEQ ID NO: 56191 - DNA, 303 bp, Neisseria meningitidis
ttgtccgccgtttttattgcaccttacctgacggcatttcacgaacaagaaaaaacattcgaatatgcggaattgaccgttaccgcccccaaccgcagcggacgggcaatcaaactggatgcagacgggcagcattaccggctttcctgctatgggttcgacggtttgtgcgcggaaggcaatatcggcagaaccatcagggcggagcaggttagagccgttttaagcgaaaccgtcggcaaaggttttttaaacggcgttctgttggaataccgcaacagtggcagtgtctataagcaataa

SEQ ID NO: 56192 - DNA, 303 bp, Neisseria meningitidis; identical to SEQ ID NO: 40093

SEQ ID NO: 56193 - DNA, 219 bp, Neisseria meningitidis; identical to SEQ ID NO: 44074

SEQ ID NO: 56194 - DNA, 216 bp, Neisseria meningitidis; identical to SEQ ID NO: 44075

SEQ ID NO: 56195 - DNA, 276 bp, Neisseria meningitidis
atgaccgctatgccgtctgaaccgcctttcagacggcatttcacacatcaaaacagaaaaaccgcgcccaaaatcatcatcacaaaacacaacggcaaaccggatacaaaacccaacaccgccgccaaaatgccgtctgaagccgtcggcgcaaccatccttatctggggcataactttccttaaccatccttttgacagccaaataaacagtgcttttgcctgtcagaaacaaaaccaatattttgcggttcgtatcggaacatttatagtggat

SEQ ID NO: 56196 - DNA, 201 bp, Neisseria meningitidis
atgccgtctgaagcatgtttggttttcagacggcatttccttcgcttaaaacagcgtatcggcaaccccgccctgcctatccacggcaatctgcatctgaaaaccatctgtatcccaaaccacacccccatccctgtttccgtcatttgcaccctgtccgtattgggcaatcatcggtttttcgcttacaatagccgaatc

SEQ ID NO: 56197 - DNA, 807 bp, Neisseria meningitidis; identical to SEQ ID NO: 52106

SEQ ID NO: 56198 - DNA, 177 bp, Neisseria meningitidis
atgccgtctgaacgcacgttttgccgttcagacggcattttcatttcctttttccgcctgccgccccttgaaaatcccttacgcgccgccctgtttgaaacaaagcaaacgcccgccgcgaaccggacaatcttgatacgcagccaaagcaagtccggcggtaagttgttaaatata

SEQ ID NO: 56199 - DNA, 183 bp, Neisseria meningitidis
gtgccggaacaggcacgcgcccgcccgattcaaaccgcgatgacgctttgccgccggttcggggcaggatggcggcacacgcgccgtctgccgcgtttcatttcacaccgctcttccgaaacccgaaacccgcccggtccgacgtgcggtatgaaacgcttaagctggcgcgaagtcttttac

SEQ ID NO: 56200 - DNA, 657 bp, Neisseria meningitidis
atgggcaggcatttcgggcgcaggcgttttttgacagttgccgccgttgcggcggcgggcgcggcggtttcttttttgccgaatccttttgccgccgatgatgaaaaacgcaataaagatgaaaaacacaatgaaaatgtgtttttctggaaaggtgtcgcgctgggttccggtgcggagctgcgtctgttcggcgtggacgacagacaggcggcggatttggtcaataaggttttggcggaagtggcgcgtttggaaaaaatgttcagcctttaccgtgaagacagcctgatcagccgcctgaaccgtgacggttatctgacttcgccgtcggcggattttttggaactgttgagcctgtgccgcgatattcacgcgctgacggaaggcgcgttcgatccgacggttcaggttttgtggaaactgtatgccgattatttttccgcccatcccgatgcggaaacgccgccgccggagaatagcgtgaaggaagccctgaagcgggtcggcttcggcaaagtctcgtttgacgaccgtgaaatccgttttaccgaaaagggtatgggtttgtccttgaacggcatcgcgcaaggctatagtggattaacaaaaaccagtacggcgttgcctcggcttagctcaaagagaacgattctc

SEQ ID NO: 56201 - DNA, 222 bp, Neisseria meningitidis
atgaatcaaaagtatattttatctgcaaacaataatagtttgatagaagaaattcacaatacagtacagcgtattggttattgtattgttcgcggtcttaatctaaaccatcttgatgacagccggagaaacaagaaattatttgactttctatctcaattaggaatgctgacaaaccacaaaggcgatggttttaaatctatattttgggatattaaatat

SEQ ID NO: 56202 - DNA, 2076 bp, Neisseria meningitidis
atgggcaaagccaacgcctttaccgcgccgattaccgtcgtcaactacgacgaacaagccctcaacaacaccgaagcgcgtactttggtggatgccgtagcgaaaaaagacgcttccgtttggcagttcggcggagaaagcaacacgctgactggactgtatttcagaggttatcagcttgatgcgcgccaattcagcgtcaacggtttggcaggtatgtacggcacgcaaggcacggccagcgtgcaagtcggctccgcacaactgattaaaggcgcgtccaccgccgtaaacggcatgaaccctgaaggtgcggtatccggttccgtcaatatcgaaaccaaaaaagccgccgatgaaggcaaccgcaaaatcggtttgggccggtttagcaacaaccgcgcccaaggtacgttcgatttgggtcaacgcttcggcgaaaacaaagcattcggcgtacgcgccaacggcaaactgcgccacggcgacactccgcgccacggttacagcgaagacaacaaagaatttgcggtaaatgccgactatcgcggcgaaacactgcgcgtagcgttcgattccatctacgcaaaacgcaaaaccaacggcggtcgcgcgcgtatgcaggacattcaaaacgccggcggacgcttgtttggcgcgcccgatggtaaaaccaacctgctgccttcttggaactggcaaaataccgccggccaaaccaatatgcttacgtttgaatgggatgcgtttgataatgcacagattacaggcggtatcggctacaacaaggcacgctattacggcacgctgatttccccgaccgtatgtttgaatgctaccagcacttgtaccgatatgcaaaacacaaacgccagcggcaaagtaacggcacgcaactatgactacaataccggtactgcgcgcctgaccgaccaatacttccgcactttaagcatgaacctgtctgcgcgaggcgaatttgaaaccggcccggtaacacataactggagtacggctttcgaccgcgttatccgccagcggaaaaccataaacggcagcgggaacggcaacagcaagatagaagtgaaggcaaacgaaaatattgcgaatcaattggcatcgtttacagccgactatcccaattcttgggagaactctgccaacttggatgccaatatcaaagtcaacagcctggctttgtccgacaccttgggcttcgtggataacaaataccgcctgactttgggcgaacgtttccaaacagtcgaatataccgacaaaaaatcacagagcggcgatgccaaacgtttcagcccgatgctgatggcggcgtgggtgccgcaacctgatttggttgtgtacggcaactatatggaagacttggagcctgccgacattaaaaccgatgattccggtgaaacgacaatggcgaaaccgcgcgtcagccgccagtttgaagtgggcgttcgtaaaaactggggcgactttgttacgacgttgaacgcgtttcaaatcaaacgcccgggctactggcgcggcaataccaaaaaaggtactgattttgcagcatataaagcagcaggaggcgcagacggagatgaacaaggcatggaacgcagccgcggtatcgaattcaatgcctatgccaacctgttaaacaaaaccctgcgcccgactttcggcctgatgtacctgcaatcgaccgtgaaagactacccaaattcacgcgatatgctggttaacggcgtacaagtcgccaatccgcgcgtaattgccaaggcaggtttggaatgggatacaccgtttgccaaaggcttgactttaaacagcaatgtttcgtatttcggcaagtcttaccaagacacgcaaaaacaatacgccttcccatcctataccttggttgatgtaggcgcgcgctacaaaaccaagctcggcaaaaatacgttgaccgtcagcagctcggtggaaaatctgttcaacaaaaactactggcaggtacagcgcggccaatacgaccgcagcttcgccgtcgtcggtctgccgcgtacttactggctgaaggcggaattggatttc

SEQ ID NO: 56203 - DNA, 1230 bp, Neisseria meningitidis
atgccttctgcccattatcctgaaatgagcgaaaaactgatggcggttttgatggcgatgctggttacgctgatgccgttttccatcgatgcctacctgcccgcgattcccgaaatggcgcaatcgctgaacgcggatgttcaccgcatcgaacagagtttgagtttgtttatgttcggcacggcgttcggacaggtggtcggcggttcggtgtccgacatcaaagggcgcaaacccgtcgcgctgaccggactggccgtctactgccttgccgttgccgccatcgtatttgcttcgagtgccgaacagctcctcaacctgcgcgtcgtgcaggcattcggtgcgggcatgactgtggtcatcgtcggcgcaatggtgcgcgattattattccggacgcaaagccgcccagatgtttgcccttatcggcatcattttgatggttgtgccgctggtcgcacccatggtcggcgcattgttgcagggcttgggtggctggcaggcgatttttgtttttctggcggcgtattcgctggtgctgctcggtttggtacagtatttcctgcccaagcccgccgtcggcggcaaaatcggacgggacgtgttcgggctggtggcggggcggttcaagcgcgtattgaaaacccgtgccgcgatgggttatctgttttttcaggcattcagcttcggttcgatgttcgcctttctgaccgaatcttccttcgtgtaccagcagctctaccgtgttacgcctcatcaatacgcttgggcgtttgcactaaacatcatcacgatgatgtttttcaaccgcgttaccgcgtggcggctcaaaaccggcgtgcatccgcaaagcatcctgctatgggggattgtcgtccagtttgccgccaacctgtcccaactcgccgccgtgctgtttttcgggttgcccccgttttggctgctggtcgcgtgcgtgatgttttccgtcggtacgcagggcttggtcggtgcaaacacgcaggcgtgttttatgtcctatttcaaagaagagggcggcagcgcaaacgccgtattgggtgtattccaatctttaatcggcgcgggggtgggtatggcggcgaccttcttgcacgacggttcggcaaccgtgatggcggcaacgatgaccgcgtccacctcttgcggcattgcgcttctgtggctctgctcgcatcgtgcgtggaaagaaaacgggcaaagcgaatacctt

SEQ ID NO: 56204 - DNA, 399 bp, Neisseria meningitidis
ttgtttgtatgctttgaaaaatgtttgtttccggattttgccattcccatccggttttgcgctgtacgatgtgttttagcgcggacttgctcaaaatcggatgtggttccggtatttgaggctttgattagggatgcggactttcaatatatttttctcagctacaacaacgaaggcttgatgtctgtcgggcaggtaagggagatttttgagtgtttcggcaaatataatttggttcaaacggaataccggcgttttaaggcagataagacagaaaaccgtaatcataaggcaaattcgatattcgaatatctgcatattttagaaaagaccttttatagtggattaacaaaaaccagtacagcgttgcctcgccttagctcaaagagaacgattctc

SEQ ID NO: 56205 - DNA, 297 bp, Neisseria meningitidis; identical to SEQ ID NO: 44086

SEQ ID NO: 56206 - DNA, 288 bp, Neisseria meningitidis
ttgccgagcgataaagaagcgcgggcagggtgcttatctttgcctgccaataacggtataattcgggcgttattaccgccttttaccggtataaacatcagactttttgccgccttgggtctcctgtccctttccggcgcggcggcgcaagcctccgtataccattgcaactcaaatggcaaaagcgtatatacatcagccccagcaggatcgtgcgccgatgcggatttacctaaaatcagcagccatcagggaggcggataccgcctgaaaattaaaaaactcagt

SEQ ID NO: 56207 - DNA, 204 bp, Neisseria meningitidis; identical to SEQ ID NO: 40102

SEQ ID NO: 56208 - DNA, 162 bp, Neisseria meningitidis; identical to SEQ ID NO: 38087

SEQ ID NO: 56209 - DNA, 1128 bp, Neisseria meningitidis
atgaaaatcgtttttatcacaacagtcgcatccagcatttacggtttccgcgcccccgtcattaaaaaattaatcggcaaaaaccatcaggtgtatgcctttgtatcggagttttccgataatgaattggatattatcagggaaatgggggttacacccgttacctaccgttcaaaccgcagcgggctgaacccgttttccgatataaaatccaccttcctcatctttaaagaactcaaaaaaatatcgccggatttggttttcccttatttcgcaaaacccgtgattttcggcacttttgccgcaaaactggcaggcgtgcccagaatcgtcgggatgctggaaggtttgggattcgcatttaccccgcagccggaaggcataccgttaaaaacaaaaatcataaaggggatcttgattgccttataccgcattgccctgccgatgttggaaagcctgattgtattaaaccccgacgacaaagacgaactgacggacaaatacggcatcaaaataaaaaacatccatattttgggcggaatcggtctggattcgcggcaatatccttattccgaggcggatattcccgatgaaaaagaacccgtaaaattcctctttatcggcagatttctgaaagaaaaggggattgatgattttattcgggcggcggaacaggttaaggacaaataccccgatacggtttttaccgctttgggcgcaatcgacaaatcacgcgggggggggcatttggaacggcttgccgcccgcgatattatccgtttccccggttttgtgaacaatgtttccgaagtgataaaagaacatcatatattcgtattgccgtcttattatagggaaggcgttccccgaagcactcaggaggcaatggccgtcggcagggcagtgattacgacggatgtccccggatacagggaaacggtcgccgacaaggtcaacggcttcctgatcgaaccttggaatccccgcatcttggccgaaaaaatgatttattttatcgaaaacagggaagccgtccgcctgatggggaatgcaagttatgcgattgccaaagataaattcgatgccgaaaaagtcgatttgaaattgctcgatattttgaaggcgtaa

SEQ ID NO: 56210 - DNA, 1002 bp, Neisseria meningitidis
atgcgcccgtttttcgtcggcgcgacagtgcttgccatactcggcgcgttggtgtttttcatcagccccggtgccgtcgtcctgcaccgccaaatcttcttagaactcatgctgcctgcagcatatggtggtttcctgactgcggctttgttggactggacgggtttttcgggtaacctgaaacctgtcgcgactttgatggcggcattattgctcgccgcatccgctatactgcccttttcgccgcaaactgcctcgtttttcgtcgccgcctattggctggtgttgctgctgttctgcgcccggctgatttggctagaccgaaacaccgacaacttcgccctcttaatgctgcttgccgcgttcactgtttttcagacggcatacgctgcaaccggcgatttgaacctgttgcgcgcgcaagtgcatttgaatatggcggcggtcatgttcgtatccgtccgcgtcagtgtccttctgggcgcggaagccctcaaaaaatgccgtctgaaagaccctgtattcatccccaacgttgtctataaaaacatcgccatcaccttcctgctgctgcacgccgccgccgaactttggctgcccgcgcaaaccgccggttttaccgcgctcgccgtcggcttcatcttgctcgccaagctgcgcgaactgcaccatcacgaactcttacgcaaacactacgtccgcacttattacctgctccaactttttgccgccgcaggctatttgtggacaggcgcggcgaaattgcaaaacctgcctgcctccgcgcccctgcacctgattaccctcggcggcatgatgggcggcgtgatgatggtgtggctgactgccggactgtggcacagcggctttaccaagctcgactacccgaaactctgccgcatcgccgtccccatccttttcgccgccgccgtgttcgtgctttacctgctgacattcgtaccgatctttcgggcgaacgcgtttacagacgatccggaataa

SEQ ID NO: 56211 - DNA, 1011 bp, Neisseria meningitidis
atgattttctccatcatcgtccctatttacaatgtggaaaaatacctccgctgctgcgtggattccgtgcttgccgaaaattttgccgattatgaaatgattttggtcgatgacggttcgccggacggctgcgggaagatttgcgacgaatatgcaggcaaatatccgcatataaaagtgattcatcaagaaaacggcgggctgtcggatgcccgcaacgccggtatccgggcggcaaaaggcgattacctaatctttttggacagcgacgattattgggccgataccaaccgttcaaaaaacgcgggggggattctctttgatttacaacaacttgcagacaaaaaggttgatttgatcctgcatccctcgtccttcaattaccgcgacatccccaaaggggcggacttttcggataatgattttgtccgccattttgaaacgctggtggaggggcggtactatatcgccaacgcgtggacaaaaatcgtcaggcgggaaataatcatcaaaaacaatctgtttttcccaaaaggatacattcacgaggatttcccgtacagtttgcaattggcgcgttttatcaagacttttgccttttacgataaccctttttaccagtaccgcgttctcggcggctctatcagccacaacatcaaatacaaaaatttcagcgatgtgctgacgcatctcgaccggggtgtggattttttagtcgaaaacaaaaattcccccatctacggcggtttgcaaaaatttgtcttcgacaatatcggctatctgaggtctatattggtaaggctttatttttccaaaaacattatcctcatctaccggaaatatttttcatttaaagaaaaatgcagaaagatattcggcgcgaagacaatccgtccggtttttatcgggaagaccgcattcatcataggattgccgatattgcgcctgctcgtaccgcctatgctgtacccggcaatcaaggccgtttatcagaaatttttttcggaataa

SEQ ID NO: 56212 - DNA, 657 bp, Neisseria meningitidis
atgataaaaaatctttataaattgataaattatgcggctttgattggtttcgccccaaatatagtttttgcttggcctatgtttgttgaccccccgccttaccaaaacatccatgtacgaagttggaaagcacggcgagattccggcatagtaaaacaagatttggatttttcttgcggcgcggcttcgattgccacgttactgaataatttttatggcagacattattctgaagcggaaatcttagacaaaatggataaaacccaaatgcgtgcttcttttgatgatatgcaacgcataatgcccgaactgggttttgaagcacaaggttatgctttgccatttgaacagttggtacaactaaaaattcctgtaattgtgtatttaaaataccgtaaaaacaaccatttttcggtattgaacggtattaacggagaaactgttttgctggctgatccatcgctggggcacgtctcaatgagcaaatcacaattcttgagcgcatggaaaacacgtgatggcgaaatggaaggaaaaattttagccatcgtgccaaaaaatactgattttgttagaaatcagatgttttttaataagaatcccgttcgtcaaacacgttttacggtagaacaaatccaaatgcggcaaaaacgataa

SEQ ID NO: 56213 - DNA, 1119 bp, Neisseria meningitidis
atggatttaagtatcgtagttcctatttataatgtcgaaagttatttggaagcgtgtttaagttccatagaatctatattaagtaatgaaaatgtcgaacttatccttgtgaatgacgggtcaaaagacggaagtgaagatatatgttataaatatatagataaaacaacaaacaacaaacaacaaacaacaaacaacaaacaacaaacaacaaacaacaaacaacaaacaacaaacaacaaacaacaaacaacaaacaacaaacaacaaacaacaaacaacaaacaacaaacaacaaacaacaaacaacaccgataccgaacaccaaacatcaaatatatatatcaggataaccaaggattatcggaggcgagaaataccggaataaaaaattcaaacggaaaatatatagcatttattgattcggatgattttattaattgtcaggtcttgctggattttcttggtaaagatgatagtgatatgccggatgtggtttttttaaatgcggttaaatatgattagggaagtgtttcatattttggcgaagattatcagcctgaaaaaatactcaatcaatccaaagtcgaagttttgaaaggattatgccgatttagaaaatttccgggttcggcgtggaataagattataaaaagagaattgattattagagaaaaactgttttttgaaaggggaatttattctgaagatatcgaatggtcaatgaggttatttaatgcggcaacaactttttcttatttggacggttgttattactattatcggcagggaagaaaagattctattacgggaactgtttcggaaaaaagtataaagtcattattatatattttggagaaaaatgcggaaatggaatttaatagggatatatcgagttatctttattcttttctttcctacgaatatctcgttttgctttttatcatgacgagtaaaaatatagagtgtgatgctgatataaaaagaagggcgtatcatttaaggtttatgctgttaaagtctaataagttgatatataagctgatattcccgataatcacattattcggggttgatattacaggcaggattttaaaagcaatcagggggaatatttaa

SEQ ID NO: 56214 - DNA, 732 bp, Neisseria meningitidis
gtgtcgcgcgaaatcaatgcgggcgggcatcatttcctctacggcggcatcagcggcggcggcgtgcattattgggataacaaagatttcagcgaacagtgcctgcgcctgtcgctcggctataaaaatcgttcggtaacgcgctcgttcggcatcgtgccgtttatcgggcaaaacctcttaggcggcagccgatacaatttcgtcggcggcttcaatgccgatttctcccgacgcttgagcgaacgctggcggctgacgctgaacgtgggcaatatgtggaagcgttatcaggaagaccgcaccgccgcccgatacgacagccatatgccgctggcgggcgcgacgctgatgtattccgcgccgaaagactggctgctttacggcggtgcggactggtcgcacaacatgacgaaagaggcggaacaggcttccgtccgcaagggtttgcgtgtcggcgcagtcaaaacgttcgacggcgggcttgggttgcgggcaaacctgcgctatacccgcaggatgtttgacgcacccgggaccattgtgtaccgcttcccgcgcaaagaccacgaatatcaggcaaacctgtcgttgtggcacgacaaaatctcttggaagggctttacgccgcaactcaatttccgctatctgaaaatcgacagcaatatgaaaagtttttacacacgcaaaaacacgcagattttcatgagcgtggaaaaggatttcaaataa

SEQ ID NO: 56215 - DNA, 3201 bp, Neisseria meningitidis
atgcgaacgaccccaaccttccctacaaaaactttcaaaccggctgccatggcgttagctgttgcaacaacactttctgcctgcttaggcggcggcggcggcacttctgcgcccgacttcaatgcaggcggcaccggtatcggcagcaacagcagagcaacaacagcgaaatcagcagcagtatcttacgccggtatcaagaacgaaatgtgcaaagacagaagcatgctctgtgccggtcgggatgacgttgcggttacagacagggatgccaaaatcaagccccccccgaatctgcataccggagactttacaaacccaaatgacgcatacaagaatttgatcaacctcaaacctgcaattgaagcaggctatacaggacgcggggtagaggtaggtatcgtcgatacaggcgaatccgtcggcagcatatcctttcccgaactgtatggcagaaaagaacacggctataacgaaaattacaaaaactatacggcgtatatgcggaaggaagcgcctgaagacggaggcggtaaagacattgaagcttctttcgacgatgaggccgttatagagactgaagcaaagccgacggatatccgccacgtaaaagaaatcggacacatcgatgtggtctcccatattattggcgggcgttccgtggacggcagacctgcaggcggtattgcgcccgatgcgacgctacacataatgaatacgcatgatggaaccaagaacgaaataatgtctgcagccatccgcaatgcatgggtcaagctgggcgaacgtggcgtgcgcatcgtcaataacagttttggaacaacatcgagggcaggcactgccgaccatttccaaatagccaattcggaggagcagtaccgccaagcgttgctcgcctattccggcggtgataaaacagacgagggtatccgcctgatgcaacagagcgattacggcaacttgtcctaccacatccgtaataaaaacatgcttttcattttttcggcaagcaatgacgcacaagctcagcccaacacactgaccctattgccattttatgaaaaagatgctcaaaaaggcattatcacagtcgcaggcgtagaccgcagtggagaaaagttcaatggctccaaccattgcggaattactgccatgtggtgcctatcggcaccctatgaagcaagcgtccgtttcacccgtacaaacccgattcaaattgccggaacatccttttccgcacccatcgtaaccggcacggcggctctgctgctgcagaaatacccgtggatgagcaacgacaacctgcgtaccacgctgctgacaacggctcaggacatcggtgcagtcggcgtggacagcaagttcggctggggactgctggatgcgggtaaggccatgaacggacccgcgtcctttccgttcggcgactttaccgccgatacgaaaggtacatccgatattgcctactccttccgtaacgacatttcaggcacgggcggcctgatcaaaaaaggcggcagccaactgcaactgcacggcaacaacacctatacgggcaaaaccattatcgaaggcggttcgctggtgttgtacggcaacaacaaatcggatatgcgcgtcgaaaccaaaggtgcgctgatttataacggggcggcatccggcggtagcctgaacagcgacggcattgtctatctggcagataccgaccgatccggcgcaaacgaaaccgtgcacatcaaaggcgatctgcagctgggcggcgaaggtacgctgtacacacgtttgggcaaactgctgaaagtggacggtacggcgatgaccggcggcaagctgtacatgtcggcacgcggcaaaggggcaggctatctcaaccgtaccggacaacgtgttcccttcctgagtgccgccaaaatcgggcgggattattctttcttcacaaacatcgaaaccgacggtggtctgctggcttccctcgacagcgtcgaaaaaacagcgggcagtgaaggcgacacgctgtcctattatgtccgtcgcggcaatgcggcacggactgcttcggcagcggcacattccgcgcccgccggtctgaaacacgccgtagaacagggcggcagcaatctggaaaacctgatggtcgaactggatgcctccgaatcatccgcaacacccgagacggttgaaactgcggccgccgaccgcacagatatgccgggcatccgcccctacggcgcaactttccgcgcagcggcagccgtacagcatgcgaatgccgccgacggtgtacgcatcttcaacagtctcgccgctaccgtctatgccgacagtaccgccgcccatgccgatatgcagggacgccggctgaaagccgtatcggacgggttggaccacaacgctacgggtctgcgcgtcatcgcgcaaacccaacaggacggtggaacgtgggaacagggcggtgttgaaggcaaaatgcgcggcagtacccaaaccgtcggcattgccgcgaaaaccggcgaaaatacgacagcagccgccacactgggcatgggacacagcacatggagcgaaaacagtgcaaatgcaaaaaccgacagcattagtctgtttgcaggcatacggcacgatgcgggcgatatcggctatctcaaaggcctgttctcctacggacgctacaaaaacagcatcagccgcagcaccggtgcggacgaacatgcggaaggcagcgtcaacggcacgctgatgcagctgggcgcactgggcggtgtcaacgttccgtttgccgcaacgggagatttgacggtcgaaggcggtctgcgctacgacctgctcaaacaggatgcattcgccgaaaaaggcagtgctttgggctggagcggcaacagcctcactgaaggcacactggtcggactcgcgggtctgaagctgtcgcaacccttgagcgataaagccgtcctgtttgcaacggcgggcgtggaacgcgacctgaacggacgcgactacacggtaacgggcggctttaccggcgcgactgcagcaaccggcaagacgggggcacgcaatatgccgcacacccgcctggttgccggtctgggcgcggatgtcgaattcggcaacggctggaacggcttggcacgttacagctacgccggttccaaacagtacggcaaccacagcggacgagtcggcgtaggctaccggttctga

SEQ ID NO: 56216 - DNA, 1164 bp, Neisseria meningitidis
atggatatacaaagtaaagcgaaaaaattgattgagatgattcagacggcaccggtggagtggaagccgttgggggaagtggcaagtataggaaagggaaagcagcttaataaatcactacttagagaaaaagataagtatcccgtaatcaatggcggtattaatccatcaggttattggcatgaatacaataacgaagctggcacgattgttattagccaaggaggagcaagtgcggggtttgttaattggatggatatccctttttttgcaggagctcacgcatatactattaaagcgaacgaagacaaactattgcaacggtttgcatatttttttaaaaatgaagcaaattacattcatgcaatgtcaatacggagcagtataccagcacttgctaaaagtgaattgcaaaacttacttattcccatcccgcccctagaaacccaacaaaaaattgtaaaaatacttgacaaattcaccgagctggaagcggaattagccctgcgcaaacgccaataccggtattaccgcgactttcttttagattttgacaatcaaatcgggggggtagctgatggctatcaatgccgtctgaaagatgtggtttggaagacgttgggggagattgccgaatattcaaaaaaccgtatttgttcggataaactgaacgaacataattacgtgggcgtggataatctcttacaaaatagagaaggtaaaaagttatccggttatgttccaagtgagggaaaaatgacagaatatattgccaatgacatcttgattggaaatattcgtccgtatttgaaaaaaatctggcaggcagactgcacgggcggaacaaacggtgatgttttggttatccgggtaacagatgaaaaggttaatccaaaatatctgtatcaggtattggccgatgataaattttttgcctttaatatgaagcacgccaaaggtgcaaaaatgccgcgtggcagcaaagcagcgattatgcaatataaaatccccatcccaccactccccgaacaggaaaaaatcgtcgccatcctagacaaattcgacaccctgacccactccgtcagcgaaggcctgccgtacgaaatcgccctgcgccgcaaacaatacgaatattaccgtgaacagctgcttgcctttcggtag

SEQ ID NO: 56217 - DNA, 1164 bp, Neisseria meningitidis
atgaacatcaccatagtcgccccctactgctcgctgccgtccgaaccgtatttcaaccgcttttggtatctggcagaacgattgtcgcaatcgcacgacgtgttgctgattaccagccgtttccgccactacgacaaatccttcagacggcatgaagatgccgaggccgcctcgcaaggccgtctgaaagtcatgctgttggaagaaagcggctacggcaaaaacgtgtctttagaacgtgttgccagccattaccgcttcgtcaaaaattttgagcaatggctgaaaaactgccggccgggcgaacaagacatcgtctattccgcctatccgctgattgccaccaacctgctgttgggcaaacacaaagcgcgtttgggctacaaactgattgtcgacgtacaggacgtatggccggagtctttctcctcggtcgtaccgtttttgaaaaaagtaccgcacaagctgctgccctttgcttcacgcgccaaccgtgcctaccgctgcgccgacgcgctggttgccgtatcgcagacttatctcgaccgcgccaaagaagccaatccgaacgtacccggcgaagccgtctatatcggtacggattttgccgccatcgcccccccgcgattccgctccaaaaccgtccgccttttctacttgggcacgctcagttacagctatgacgtggaaaccgtgtgcaaaggtgttcgcaagctgttggacgacggcgaaaacgtcgaattgcacgttatgggcggaggacccgatttggagaaactcaaacaatatgaaaatcgcgccatcaagttttacggttatttaccctattctgaaatgatgtcgattgccaaagcgtgcgacattgccgtcaacgccatccatagccacgccatgcagtcggttaccaacaaactctccgactatatggccttgcaaaaaccgattctgaacagccagaccaatgccgaagtcctcgacctcatgaatctgctgccacacgaaaactaccgttccggcgatgtggacggtttcgttcaagccgccaaaaatattttgaaacgcaaaaacgattctgttcagtccgacgaaatcgtccgccgcttcaggcgcgatgttgcctatcaaaaaatcgtcaacctgattgaaagattagcccatgagtaa

SEQ ID NO: 56218 - DNA, 357 bp, Neisseria meningitidis; identical to SEQ ID NO: 46100

SEQ ID NO: 56219 - DNA, 192 bp, Neisseria meningitidis; identical to SEQ ID NO: 48097

SEQ ID NO: 56220 - DNA, 4086 bp, Neisseria meningitidis
  misc_feature 4067, 4068, 4069, 4070, 4071: 'n' is a, c, g or t
atgaataaaggtttacatcgcattatctttagtaaaaagcacagcaccatggttgcagtagccgaaactgccaacagccagggcaaaggtaaacaggcaggcagttcggtttctgtttcactgaaaacttcaggcgacctttgcggcaaactcaaaaccacccttaaaactttggtctgctctttggtttccctgagtatggtattgcctgcccatgcccaaattaccaccgacaaatcagcacctaaaaaccagcaggtcgttatccttaaaaccaacactggtgcccccttggtgaatatccaaactccgaatggacgcggattgagccacaaccgctatacgcagtttgatgttgacaacaaaggggcagtgttaaacaacgaccgtaacaataatccgtttgtggtcaaaggcagtgcgcaattgattttgaacgaggtacgcggtacggctagcaaactcaacggtatcgttaccgtaggcggtcaaaaggccgacgtgattattgccaaccccaacggcattaccgttaatggcggcggctttaaaaatgtcggtcggggcatcttaactaccggtgcgccccaaatcggcaaagacggtgcactgacaggatttgatgtgcgtcaaggcacattgaccgtaggagcagcaggttggaatgataaaggcgaagccgactacaccggggtacttgctcgtgcagttgctttgcaggggaaattacagggtaaaaacctggcggtttctaccggtcctcagaaagtagattacgccagcggcgaaatcagtgcaggtacggcagcgggtacgaaaccgactattgcccttgatactgccgcactgggcggtatgtacgccgacagcatcacactgattgccaatgaaaaaggcgtaggcgtcaaaaatgccggcacactcgaagcggccaagcaattgattgtgacttcgtcaggccgcattgaaaacagcggccgcatcgccaccactgccgacggcaccgaagcttcaccgacttatctctccatcgaaaccaccgaaaaaggagcggcaggcacatttatctccaatgatggtcggatcgagagcaaaggcttattggttattgataccggggaggacatcggtttgcgtaacggagcggtcgttcaaaacaacggcaaccgccctgctgctacggtattaaatgccggccgtaatttggttatcgaaagcaaagcaaatgtgaacaatgctaaaggttcgaccaatctgtcgaccggcggccgtaccgtcatcaaggaggccagtattcagactggcactaccgtatacagttccagcaaaggcaacgccgaattaggcaataacacacgcattaccggggcagatgttaccgtattatccaacggcaccatcagcagttccgccgtaatagatgccaaagacaccgcacacatcgaagcaggcaaaccgctttctttggaagcttcaacagttacctccgatatccgcttaaacggaggcagtatcaagggcggcaagcagcttgctttactggcagacgataacattactgccaaaactaccaatctgaatactcccggcaatctgtatgttcatacaggtaaagatctgaatttgaatgttgataaagatttgtctgccgccagcatccatttgaaatcggataacgctgcccatattaccggcaccagtaaaaccctcactgcctcaaaagacatgggtgtggaggcaggctcgctgaatgttaccaataccaatctgcgtaccaactcgggtaatctgcacattcaggcagccaaaggcaatattcagcttcgcaataccaagctgaacgcagccaaggctctcgaaaccaccgcattgcagggcaatatcgtttcagacggccttcatgctgtttctgcagacggtcatgtatccttattggccaacggtaatgccgactttaccggtcacaataccctgacagccaaggccgatgtcaatgcaggatcggttggtaaaggccgtctgaaagcagacaataccaatatcacttcatcttcaggagatattacgttggttgccggcaacggtattcagcttggtgacggaaaacaacgcaattcaatcaacggaaaacacatcagcatcaaaaacaacggtggtaatgccgacttaaaaaaccttaacgtccatgccaaaagcggggcattgaacattcattccgaccgggcattgagcatagaaaataccaagctggagtctacccataatacgcatcttaatgcacaacacgagcgggtaacgctcaaccaagtagatgcctacgcacaccgtcatctaagcattaccggcagccagatttggcaaaacgacaaactgccttctgccaacaagctggtggctaacggtgtattggcactcaatgcgcgctattcccaaattgccgacaacaccacgctgagagcgggtgcaatcaaccttactgccggtaccgccctagtcaagcgcggcaacatcaattggagtaccgtttcgaccaaaactttggaagataatgccgaattaaaaccattggccggacggctgaatattgaagcaggtagcggcacattaaccatcgaacctgccaaccgcatcagtgcgcataccgacctgagcatcaaaacaggcggaaaattgctgttgtctgtaaaaggaggaaatgcaggtgcgcctagtgctcaagtttcctcattggaagcaaaaggcaatatccgtctggttacaggagaaacagatttaagaggttctaaaattacagccggtaaaaacttggttgtcgccaccaccaaaggcaagttgaatatcgaagccgtaaacaactcattcagcaattattttcctacacaaaaagcggctgaactcaaccaaaaatccaaagaattggaacagcagattgcgcagttgaaaaaaagctcgcctaaaagcaagctgattccaaccctgcaagaagaacgcgaccgtctcgctttctatattcaagccatcaacaaggaagttaaaggtaaaaaacccaaaggcaaagaatatctgcaagccaagctttctgcacaaaatattgacttgatttccgcacaaggcatcgaaatcagcggttccgatattaccgcttccaaaaaactgaacctttacgccgcaggcgtattgccaaaggcagcagattcagaggcggctgctattctgattgacggcataaccgaccaatatgaaattggcaagcccacctacaagagtcactacgacaaagctgctctgaacaagccttcacgtttgaccggacgtacgggggtaagtattcatgcagctgcggcactcgatgatgcacgtattattatcggtgcatccgaaatcaaagctccctcaggcagcatagacatcaaagcccatagtgatattgtactggaggctggacaaaacgatgcctataccttcttaaaaaccaaaggtaaaagcggcaaaatcatcagaaaaaccaagtttaccagcacccgcgaccacctgattatgccagcccccgtcgagctgaccgccaacggtatcacgcttcaggcaggcggcaacatcgaagctaataccacccgcttcaatgcccctgcaggtaaagttaccctggttgcgggtgaagagctgcaactgctggcagaagaaggcatccacaagcacgagttggatgtccaaaaaagccgccgctttatcggcatcaaggtaggtaagagcaattacagtaaaaacgaactgaacgaaaccaaattgcctgtccgcgtcgtcgcccaaactgcagccacccgttcaggctgggataccgtgctcgaaggtaccgaattcaaaaccacgctggccggtgccgacattcaggcaggtgtaggcgaaaaagcccgtgtcgatgcgaaaattatcctcaaaggcattgtgaaccgtatccagtcggaagaaaaattagaaaccaactcaaccgtatggcagaaacaggccggacgcggcagcactatcgaaacgctaaaactgcccagcttcgaaagccctactccgcccannnnncacacacttaattaa

SEQ ID NO: 56221 - DNA, 612 bp, Neisseria meningitidis; identical to SEQ ID NO: 48102

SEQ ID NO: 56222 - DNA, 2268 bp, Neisseria meningitidis
atgaaactcgaagcaagcaagcacaagcagaagtttaaaaaatcatttattgtaagtctatttttttctattctttatacctctccgcttttggctgttgattacgtttacgacaaaaccaagctcactgatgatgaaattacccgcttagaaaaactccgcgatagaaatagtgaatattggaaagatgatttgttcaggcttgatttgccaaatggctcggtaaaatattgggaagacaaacctatgctccgtcttctccgtaatgacattgagggggcggcaaaaggggatttcttatatccaattttaactttttctagaaagacttataacgagactattaatcctgacgaaaaaatctcttttttcgacagcccttatacgccaggctatacggctgctttcgtgcagggatttggcgttaaagaaagaaatggcgatacggaagaacaggctaaacaatatatcgataaagttagaacaggattgaaaagaaatgttaatattgtagccataccgctcgacaattatgaaccagataagacatacaccgacacctttatctttcagtataattactattacaacagtattttcaatactcatagatccttaaaacatagcaatattaacagtgaaattcttgctgttggtaatgttgcagatttgtattataaacactacataagaagcttaccaccggctcttagcaactttactatatacgatctctcttttcctaaattaaccgttaccgaaaattcccatgtcattggacaagttattcatctttacgaattaaaactagaaaattctctttgggaaccccgttggaattcagatgttagttatttaaatttattcaatagccatattcgttttaataccaaaaatgaaagccttgttgtaggcgaaagtcgcattagaccaacccccgataatgccttggagaccgaaaaatattttaaaagcaaatttagcaatataggttattatagttacccgcacgccatttgtcgtaataactcgggagactgtgatctaggttattcaagtattcactttgcttatgatttaagcgaaagagaggctgacaagcccgtattaacgttaaaaagcaaggtaagagggaaaacggctattgtttttgaagaaaaagccttaaacaatttaaaaaacctgacttaccgacagctcatcaaaacagaaaccgatgttgaaccagatgcgttttttcttttagaagaatataaaaaaggcagatatcgtttatttttacgacaatgtccaaacggtttttgtatcggtgtagaaaaactcgccattccgactcatcttgtcgcctcctatgcacaacaggctcaagccgccaataccttattcgccttgcgtttgaacgacaaaaacagcgatatttttgaccgcactttaccacgcaaaagcttgtggttgcgtgtgattgacggacattccaaccaatgggtgcaaggtaaaaccacgccagtagagggaaatcgaaaaggtgtgcaactcggcggcgaagtattcacatggcaaaacgaaagtaatcaactttctattggcttaatgggcggacaggcagaacaacgcagtactttccgcaacccagatacagacaatcttacaacgggaaatgtgaaaggctttggtgcaggcgtttacgccacttggcaccaacttcaggacaaacagacaggtgcgtatgcggatagctgggtacaatatcaacgtttccgccaccgcattaacactgaagatggtacagaacgttttacttcaaaaggtattactgcctcaattgaagcgggttacaatgctttattggcggaacacttcactaaaaagggcaacagccttcgtgtttacctacaaccacaggcacaattgacttatttgggggtaaacggaaaattcagcgatagcgaaaatgcccacgtgaatttacttggctcccgccaattacaaagccgagtgggcgttcaagctaaagctcaattttcactctataaaaatatcgctattgaacctttcgccgctgtgaacgcgctttaccacaacaaacctttcggtgtggaaatggacggagagcgtcgagtgataaacaataagacggcaattgaaagccaattaggtgtagcagtgaaaatcaaatctcacttaaccttgcaagcaacattcaatcgccaaacaagcaaacatcatcaggctaaacaaggcgcgctgaatttacagtggacgttttaa

SEQ ID NO: 56223 - DNA, 2130 bp, Neisseria meningitidis
atgacactgaaagcaagcaagcaagcaagcaagcaagcaagcaagcaagcaagcaagcaagcaagcaagcaagcaagcaagcaagcaagcaagcaagcaagcaagcaagcaagcaagcaagcaagcggtcgggttaatctattaacattatctgttttatcgctgttttgcacgccatatgtttgaggttcggatgcgtacgatcccgtcaaagaagccgagattaaaaacaaatttattttagaagcggcggaagacagaaattcccacgtttggcgcggcccgtgcagcatatcttttgattgcttcggtatgttcagagctcagcttggttcaaatactcgttctaccaaaatcggcgacgatgccgatttttcattttcagacaagccggcaaacggcgtttcccattatttttccagcggtaaaaccgatccaaattcatctgaagccttgtatgacgaaatcaatatcacgggtaaaaactacaatagcggcatcctcgccgtcgataatatgcccgttgttaagaaatatgttacagagaattacggagctgatttaaagcaggcggttaaggatcaattaaaggatttatataaaacaagacccgaagattggggaaaaaataaaaaaatagttgaggaagcgataataaaacaatatggaatacctagaaataaaattaataaatttagaaaagttattgatccaattatagaagaagctgtactcactcctcatagtaatacaacaccgaccaatctcgacaacatcttcaataaaaaattacacgtcaaaatcgaaaacaaatcccacgtcgctggacaggtgttggaactgaccaagatgacgctgaaagattccctttgggaaccgcgccgccattccgacatccatacgctggaaacttccgataatgcccgcatccgcctgaacacgaaagatgaaaaactgaccgtccataaggattatgcgggcggcgcggatttcctgttcggctacgacgtgcgggagtcggacgaacccgccctgacctttgaagacaaagtcagcggacaatccggcgtggttttggaacgccggccggaaaatctgaaaacgctcgacgggcgcaaactgattgcggcaaaaacggcggattccggttcgtttgcgtttaaacaaaattaccggcagggactgtacgaattattgctcaagcaatgcgaaggcggattttgcttgggcgtgcagcgtttggctatccccgaggcggaagcggttttatatgcccaacaggcttatgcggcaaatactttgtttgggctgcgtgccgccgacaggggcgacgacgtgtatgccgccgatccgtcccgtcaaaatatacggggtggcgcggctgcggacgggcggcgcaaaggcgtgcaaatcggcggcgaggtgtttgtacggcaaaatgaaggcagccggctggcaatcggcgtgatgggcggcagggtcggccagcacgcatcagttaacagcaaaggcggtgcggcaggcagtgatttgcatggttatggcgggggtgtttatgctgcgtggcatcagttgcgcgataaacaaacgggtgcgtatttggacggctggttgcaataccaacgtttcaaacaccgcatcaatgatgaaaaccgtgcggaacgctacaaaaccaaaggttggacggcttctgtcgaaggcggctacaacacgcttgtggcggaaggcgttgtcggaaaaggcaataatgtgcggttttacctgcaaccgcaggcgcagtttacctacttgggcgtaaacggcggctttaccgacagcgaggggacgggggtcggactgctcggcagcggtcagtggcaaagccgcgccggcattcgggcaaaaaaccgttttgctttgcgtaatggtgtcaatcttcagccttttgccgcttttaatgttttgcacaggtcaaaatctttcggcgtggaaatggacggcgaaaaacagacgctggcaggcaggacggcgctcgaagggcggttcggcattgaagccggttggaaaggtcatatgtccgcacgcatcggatacggcaaaaggacggacggcgacaaagaagccgcattgtcgctcaaatggctgttttga

SEQ ID NO: 56224 - DNA, 2064 bp, Neisseria meningitidis
atgctgccaacccaacccaacccaacccaacccaacccaacccaacccaacccaacccaacccaacccaagccctgatctaagcgacacagccggggcgaacactgaggcaatctacacttcagacggcattaccgccaactctacccaactcgaacagctcaaaaaactgtttcccgcctgttttgacgcagacggaaatttccttatcgacagattacaagccgaaattgcgccacagaccgacatcggacgcgaattttacgaaatgaactggctgggcaaatcatatgcccgcctgcttcgcaacctgccgcccgaaaccctgataagtgaagacaaaacgcacaacgccaagcccgaaaatgcaggcagccaaaatctgctgattcgcggcgataatctggaagtgttgaaacacttaaaaaacgcctacgcaaacagcgtgaagatgatttacatcgacccgccctacaacaccggatcggacggctttgtctatcaggacgaccgcaaattcacacccgccgaacttgccctcctggcgaatattgacgaagacgaagccgcgcggattttagatttcaccgacaaaggctcaaactcgcacagcgcgtggctgacctttatgtatccgcgcctgtatatcgcccgcgaactgttaaaggacgacggcgtgatttttatctcgattgacgataacgaagcggcgcagttgaaattgttgtgtgatgaagtgtttggggaagggaattttgttgcacaattgccttggcgaaaaagaacagctaaatcagatgtgccttttggtatttcgcaggattatgaatggatatttgtattcgcaaaatcttgccaatttattgcagcaactaaaggcaaggaacgacgctattatgagactgatgatttccccgatcgtccttggcgtacccacgacttaacgaaacaaacaactgcggcggaaaggccaaatagttttttcacaatggttgatcccaagacaggaaaaaaatatccagcaaatccaaatgcaacttggcgtgtaaccaaagatacatttcaagattattataataaaggaaaaatcgttttccctgatgattatgatttcttaaatatcagcaatccagttatgcgttactttaaagatgacgacatgaaaaaagctggcgaggattttggcaaagtagctgtaagcagtagattacctgaaaatgttggtacattagccgatgcagtagccgaatatttggctatttttagtaggacgctacctgaaaatatcggaatgactaaagaaggcacaaaagaaatcacagatttatttggtagcaaaatatttaccttccccaagcctagtcaattgattaaatttttagtttcaataagttcaaagagtaatgacctaatcctagacttcttcgcaggcagcggcacaaccgcccacgccgtgatgcagcttaacgccgaaggacaaaacggtaaccgccgctatatctgtgtacagcttcccgaaaaaaccgctgaaaaatccgaagcccgtaaagcaggctacccgaccatcttcgacatcaccaaagcccgcatagaaaaagccgccgccaaaatccgcgtcgaacatcccgattacacgggcgattcgggcttcaaaatctttcaaacggcagacaatttcaggcagcatccggacaaggatttttcgcccgaacaaccggatttgccgcttaacgatgaattaagcgaagaacagctgcaaacgcttctgaccacttggacactgtatgacggggcggcactgaccacgccggttgagcctgtgcggttaggggattacacggcgtatttgtgcgaaaagcggctgtatctgcttaacaagggttttacttccgtcgatttgttggcgtttatccgcaagctggacgacgatgcggctttcaatcccaaccgcgtgattgtattcggcagcaatatggcaagcgccatgcagcacgaacttgaccaggcggttcgcggttatgccaataaaaaagaaattgagttaaacgtgattatcagggtttga

SEQ ID NO: 56225 - DNA, 324 bp, Neisseria meningitidis
  misc_feature 301, 302, 303, 304, 305: 'n' is a, c, g or t
atgctttcacaatcccaatggctggatgccgtcaaagggcggttacgggtgcgttccgattacgcgctttccaaaagatgggcggttacgccgtccgaggtgtcccaatatcggcgcaaccggttgcggtttccttttgccgtcgtcttggatattgccgacgtgatggatatagatccgattgaaattattgcaggtttggaatataggcggtgcagggaaaaggacatggagcgcgtcaaaggggcgtatttcaaagcccattgcgcgcattttgtctatccgaacaatccgggctttnnnnncacacacttaattaattaa

SEQ ID NO: 56226 - DNA, 231 bp, Neisseria meningitidis; identical to SEQ ID NO: 39550

SEQ ID NO: 56227 - DNA, 171 bp, Neisseria meningitidis; identical to SEQ ID NO: 45116

SEQ ID NO: 56228 - DNA, 360 bp, Neisseria meningitidis; identical to SEQ ID NO: 39361

SEQ ID NO: 56229 - DNA, 1527 bp, Neisseria meningitidis; identical to SEQ ID NO: 39669

SEQ ID NO: 56230 - DNA, 453 bp, Neisseria meningitidis; identical to SEQ ID NO: 42167

SEQ ID NO: 56231 - DNA, 975 bp, Neisseria meningitidis
atgattgccaaacacatcgaccgcttcccactattgaagctagatcaagtgattgattggcaaccgatcgaacaatacctgaaccgtcaaaaaacccgttaccttagagaccaccgcggccgtcccgcctatcccctgttgtccatgttcaaagccgtcctgctcggacaatggaacagcctctccgatcccgaactcgaacacagcctcatcacccgcatcgacttcaacctgttttgccgttttgacgaactgagcatccccgattacagcaccttatgccgctaccgcaactggctggcgcaagacgacaccctgtccgaattgctcaaactgattaaccgccaactgaccgaaaaaggcttaaaaatagagaaagcatccgctgccgtcgttgacgccaccattattcagaccgccggcagcaaacagcgccaggctatagaagtcgataacaaaggacaagtcagcggccaaaccacaccgagtaaggacagcgatgcccgttggatcaagaaaaacggcctctacaaactcggttacaaacaacatacccgtaccgatgcagaaggctatatcgagaaactgcacattacccccgccaatgcccatgagtgcaaacacctgccgcctttgctggaagggatagccgaaggtacgaccgtctatgccgataaaggctatgacagtgcggaaaaccggcaacatctgaaagaacatcagttgttggacggcattatgcgcaaagcctgccgcaaccgtccgctgacggaaacgcaaaccaaacgtaaccgatatttgtcgaagatccgttatgtggtcgaacaaagcttcggtacgctgcaccgcaaattccgctatgcgcgggcagcctatttcgggctgattaaagtgagtgcgcaaagccatctgaaggcgatgtgtttgaacctgttgaaagcggccaacaggctaagtgcgcccgctgccgcctaa

SEQ ID NO: 56232 - DNA, 1776 bp, Neisseria meningitidis; identical to SEQ ID NO: 39929

SEQ ID NO: 56233 - DNA, 1104 bp, Neisseria meningitidis; identical to SEQ ID NO: 44755

SEQ ID NO: 56234 - DNA, 735 bp, Neisseria meningitidis; identical to SEQ ID NO: 44160

SEQ ID NO: 56235 - DNA, 624 bp, Neisseria meningitidis; identical to SEQ ID NO: 44918

SEQ ID NO: 56236 - DNA, 828 bp, Neisseria meningitidis; identical to SEQ ID NO: 38675

SEQ ID NO: 56237 - DNA, 594 bp, Neisseria meningitidis; identical to SEQ ID NO: 45285

SEQ ID NO: 56238 - DNA, 1980 bp, Neisseria meningitidis; identical to SEQ ID NO: 47729

SEQ ID NO: 56239 - DNA, 528 bp, Neisseria meningitidis; identical to SEQ ID NO: 43499

SEQ ID NO: 56240 - DNA, 654 bp, Neisseria meningitidis; identical to SEQ ID NO: 47925

SEQ ID NO: 56241 - DNA, 1245 bp, Neisseria meningitidis; identical to SEQ ID NO: 44992

SEQ ID NO: 56242 - DNA, 780 bp, Neisseria meningitidis; identical to SEQ ID NO: 39421

SEQ ID NO: 56243 - DNA, 843 bp, Neisseria meningitidis; identical to SEQ ID NO: 39439

SEQ ID NO: 56244 - DNA, 750 bp, Neisseria meningitidis; identical to SEQ ID NO: 38184

SEQ ID NO: 56245 - DNA, 795 bp, Neisseria meningitidis; identical to SEQ ID NO: 45782

SEQ ID NO: 56246 - DNA, 198 bp, Neisseria meningitidis; identical to SEQ ID NO: 36305

SEQ ID NO: 56247 - DNA, 633 bp, Neisseria meningitidis; identical to SEQ ID NO: 45242

SEQ ID NO: 56248 - DNA, 702 bp, Neisseria meningitidis
ttgaatccgacctacaacctgtcccatcttaataaaataccccatcccacccggagaaccgaaatgtccaaactgaccccccgcgaaatcctgaccgccggcgcagttgtaccggtaatggcgattgacgacttgagtactgccgtcgatttgtcccacgcccttgtcgaaggcggcatccccaccctcgaaatcaccctgcgcacccctgtcggcctcgatgccatccgcctgattgccaaagaagtgcccaacgccatcgtcggcgcgggtacggttaccaaccctgaacagctcaaagccgtcgaagacgcaggcgcggttttcgccatcagcccgggtttgcacgaatccctcgccaaagccggccacaacagcggcatccccctgattcccggtgttgccaccccgggcgaaatccaactggctttggaacacggcatcgacaccctcaaactcttccctgccgaagtcgttggcggcaaagccatgctcaaagccctgtacggcccttacgccgatgttcgcttctgcccgacaggcggcatcagcctcgccaccgcgcccgattacttggcactgcccaacgtcctgtgcgtcggcggctcatggctgacgccgaaagaagccgtgaaaaacaaagactgggacaccatcacccgtctcgccaaagaagcggcggcattgaaacccaaagcctga

SEQ ID NO: 56249 - DNA, 228 bp, Neisseria meningitidis; identical to SEQ ID NO: 45011

SEQ ID NO: 56250 - DNA, 114 bp, Neisseria meningitidis; identical to SEQ ID NO: 42949

SEQ ID NO: 56251 - DNA, 312 bp, Neisseria meningitidis; identical to SEQ ID NO: 39058

SEQ ID NO: 56252 - DNA, 1008 bp, Neisseria meningitidis
atgagcaccttcttccagcaaaccgcccaagccatgattgccaaacacatcaaccgcttcccgctattgaagttggaccaggtgattgattggcagccgatcgaacagtacctgaaccgtcaaaaaacccgttaccttcgagaccaccgcggccgtcccgcctacccgctgttgtccatgttcaaagccgtcctgctcggacaatggcacagcctttccgatcccgaactcgaacacagcctcatcacccgcatcgatttcaacctgttttgtcgttttgacgaactgagcatccccgattacagcaccttatgccgctaccgtaactggctggcgcaagacaacaccctgtccgaattgctggaactgattaaccgacaactgaccgaaaaaaacctaaaaatagagaaagcatccgccgccgtcattgacgccaccattattcagaccgccggcagcaaacagcgtcaggctatagaagtcgatgaagaaggaaaagtcagcggccaaaccacaccgagtaaagataaagatgcccgccggacaaagaaaaacggcctctacagactcagttacaaacaacatacccgtaccgatgaggaaggctatatcgagaaactgcacatcactcccgccaatacccatgagtgcaaccacctgtcgcctttgttggagggcattgccgaagatacgaccgtctatgccgacaaaggctacgacagtaaggaaaaccggcaacacctgaaagaacatcggttgctggacggcattatgcgcaaagcccagcgtaaccgtccgctgacggaagcgcaaaccaaacgtaaccgatatttgtcgaaaacccgttatgtggtcgaacaaagcttcggtacgctgcaccgtaaattccgctacgcccgggcagcctatttcgggctgattaaagtgagtgcgcaaagccatctgaaggcgatgtgtttaaacctgttgaaagcagctaacaggctaagtgtgcctgttgccgcctaa

SEQ ID NO: 56253 - DNA, 1233 bp, Neisseria meningitidis; identical to SEQ ID NO: 45452

SEQ ID NO: 56254 - DNA, 1410 bp, Neisseria meningitidis; identical to SEQ ID NO: 44904

SEQ ID NO: 56255 - DNA, 486 bp, Neisseria meningitidis; identical to SEQ ID NO: 45693

SEQ ID NO: 56256 - DNA, 2664 bp, Neisseria meningitidis; identical to SEQ ID NO: 44229

SEQ ID NO: 56257 - DNA, 1005 bp, Neisseria meningitidis; identical to SEQ ID NO: 38175

SEQ ID NO: 56258 - DNA, 1803 bp, Neisseria meningitidis
ttggaatgccgtgaaggattatcatttggaaaccttttgtctgaaataataaaacggatattttactataagtgtctgaaaatttgcccgtctgtttcagacggcggggcggttatgttacaatccgaaaattcgaaaaatttaatctcttgttcaataaaggctttaccaatcatgatttctaccaacggcatcaccatgcagttcggcgcgaagccgctgtttgaaaacgtatccgtaaaattcggagaaggcaaccgttacggcctgatcggcgcgaacggttcaggcaaatccaccttcatgaaaatcctcggcggcgatttggaacagacggccggcgaagtggcgattgaaaacggcgtgcgtttgggtaaattgcgccaagaccagtttgcctacgaagacatgcgcgtgctggacgtggtgatgatggggcataccgaaatgtgggcggcgatgaccgaacgtgatgcgatttacgccaatcccgaagccaccgaagacgactacatgaaagccgccgaactggaagccaagttcgccgaatacgacggctacaccgccgaagcgcgtgccgccgaactgttgagcggcgtgggcatttccgaagatttgcacaatgcgaaaatggcggaagtcgccccgggcttcaaactgcgcgtattgctggcgcaggcgctgttctccaagccggatgtattgctcttggacgaaccgaccaataacttggacattaataccatccgctggttggaaggcgtgttgaaccaatacgactccacgatgattatcatcagccacgaccgccactttttgaacgaagtctgcacacacatggcggatttggactacaacaccatcaccatctatccgggcaactacgacgactacatgctcgcttctgcccaatcgcgtgagcgcgccctgaaagacaatgccaaggcgaaagaaaaattgcaggaattgcaagaatttgtggcgcggttcagtgccaacaaatccaaagcccgtcaggcaaccagtcgtctgaagcaggcagacaaaatcaaatcggaaatggtcgaagtcaaaccctctacccgtcaaaacccgtatatccgttttgaagccgatgaaaaagccaagctgcaccgtcaggctgtggaagttgaaaaactggcgaaacgctttgaaacccagttgtttaaaaacctgaacttcatccttgaagcgggacaacgcctcgccatcatcggcccgaacggcgcgggcaaatccaccctgctgaaactcttggccggcgcgtacaaccccgaatattcagacggtctgctgccggacgaaggcagcatcaaatgggcggaaaaagccagcgtcggctactatccgcaagatcacgaaaacgacttcgatgtcgatatggatttgagcgaatggatgcgccaatgggggcaggacggcgacgacgaacaagtcatccgcggcactttggggcgtttgctcttcggcagtaacgatgtcgtgaaaaaagtgaaggttctctccggcggcgaaaaaggccgtatgctttacggcaaactgttgctgttgaaacccaatgtcttagtcatggacgaaccgaccaaccacatggatatggaaagcatcgaatccttgaacatggcgctggaaaaatacaacggcacgctgattttcgtctcccacgaccgtcagttcgtttcttccctggcaacccaaatcatcgaactggacggcaaaggcggatatgaacactacttgggcgattacgaaagttacttggagaaaaaaggcgtagcataa

SEQ ID NO: 56259 - DNA, 540 bp, Neisseria meningitidis; identical to SEQ ID NO: 44661

SEQ ID NO: 56260 - DNA, 579 bp, Neisseria meningitidis; identical to SEQ ID NO: 45076

SEQ ID NO: 56261 - DNA, 690 bp, Neisseria meningitidis; identical to SEQ ID NO: 45134

SEQ ID NO: 56262 - DNA, 582 bp, Neisseria meningitidis
atgaaacacaccgtatccgcatcggtcatcctgcttttgaccgcttgtgcgcaattacctcaaaataacgaaaacctgtggcagccgtccgaacacatcagcagttttgcagcagaagggcggttggcagtgaaagcggaagggaaaggttcgtatgcaaatttcgattggacataccaaccgctcgtggaaaccatcaatatcaatacccctttgggcagtacgctcgggcagttgtgtcaagacagggacggcgcattggcagtggacggcaaaggaaatgtctatcaggcggaaagtgcggaagaattgagcaggcagctggtcggtttcaaactgccaatccaatatctgcatatctgggcagatggcaggcgtgtggcgggcgcgccttaccgcatcctgccggacggcatattggaacaatacggttggactgtcggcagaaccgccgacagtggggggcaagtccgaacgttgcaactgaataacggaaatttgaacatcaggctggttttcaccgaaatcggtattccgtctgaaaccgaaaccccggaacgctgtgcggcgcgcacgagataa

SEQ ID NO: 56263 - DNA, 198 bp, Neisseria meningitidis; identical to SEQ ID NO: 39472

SEQ ID NO: 56264 - DNA, 183 bp, Neisseria meningitidis; identical to SEQ ID NO: 38667

SEQ ID NO: 56265 - DNA, 462 bp, Neisseria meningitidis; identical to SEQ ID NO: 45873

SEQ ID NO: 56266 - DNA, 999 bp, Neisseria meningitidis; identical to SEQ ID NO: 45992

SEQ ID NO: 56267 - DNA, 717 bp, Neisseria meningitidis; identical to SEQ ID NO: 39244

SEQ ID NO: 56268 - DNA, 810 bp, Neisseria meningitidis; identical to SEQ ID NO: 39637

SEQ ID NO: 56269 - DNA, 1566 bp, Neisseria meningitidis; identical to SEQ ID NO: 38156

SEQ ID NO: 56270 - DNA, 1434 bp, Neisseria meningitidis; identical to SEQ ID NO: 39392

SEQ ID NO: 56271 - DNA, 1008 bp, Neisseria meningitidis
atgagcaccttcttccagcaaaccgcccaagccatgattgccaaacacatcgaccgtttcccgctattgaagttggatcaggtaattgattggcagccgatcgaacagtacctgaatcgtcaaaaaacccgttacctcagagaccaccgcggccgtcctgcctatcccctgttgtccatgttcaaagccgtcctgctcggacaatggcacagcctctccgatcccgaactcgaacacagcctcatcacccgcatcgatttcaacctgttttgccgttttgacgaactaagcatccccgattacagcaccttatgccgttaccgcaaccggctggcgcaagacgacaccctgtccgaattattggaactgatcaaccgacaactgaccgaaaaaggcctaaaagtagagaaagcatccgccgccgttgttgacgccaccattattcagaccgccgacagcaaacagcgccaggctatagaagtcgatgaagaaggacaaatcaacggccaaaccacaccgagtaaggacagcgatgcccgttggataaagaaaaacggcctctacaaactcggttacaaacaacatacccgtaccgatgcggaaggctatatcgagaaactgcacatcacccccgccaatgcccatgagtgcaaacacctgccgccgttgttggaaggactgcccaaaggtacgaccgtctatgccgacaaaggctatgacagtgcggaaaaccggcaacatctggaagagcgtcagttgttagacggcattatgcgcaaagcctgccgcaaccgtccgctgacggaaacgcaaaccaaacataaccgatatttgtcgaagatccgttatgtggtcgaacaaagcttcggtacgctgcaccgcaaattccgctatgcgcgggcagcctatttcgggctgattaaagtgagtgcgcaaagccatctgaaggcgatgtgtttgaacctgttgaaagcggccaacaggctaagtgcgcccgctgccgcctaa

SEQ ID NO: 56272 - DNA, 2364 bp, Neisseria meningitidis; identical to SEQ ID NO: 44458

SEQ ID NO: 56273 - DNA, 2211 bp, Neisseria meningitidis
atgaaggcagacattcaaaccgaattaacccaagccctgctatcacacgaaaaagtatgggcgaacgaagaaaaaaccattttagccaaaaacattctgttggatttggtggaaaaaaccgacccggccattatcggtttgttattggggaatgatgagttaaaacgccatttttttgtggaagtgaatggtgttttggtgtttaaattgcaggattttcgttttttcttggacaaacacagcgtcaataattcctacacaaaatacgccaaccgcattggtttgacggacggcaaccgctttttgaaagacagttcggatattgtgttggattttccgtttaaagattgcgtattgaatggcgggcaaagcagcgaagaaggcgaagagatttattttaaacacagtaatagccagccagccagccagccagccagccagccagccagccagccagccagccagccagccagccagccagccagccaattatacactaaattaacccgaaaaagacaagaaatcttttttaatcaaacgcttgcttttgatgaaattgaccggctttttgacgcaaaagcattctcaaaattctctcgccacaccgcagacggcaaacaagcggttggcgaaatcaaacgacattcagacggcacaccagccgaaaatctcattatcaaaggcaataatctgattgccctgcattcgcttgccacgcagtttaaaggtaaagtgaagctgatttatattgatccgccttattattttgttaaaaagaaacaacaagatagttttggttataacactaactttaaattatctacttggcttacatttatgaaaaatcgtttatcaattgccaaagaattattaactgatgatgggattattgttatttccattgatgatgacggaaatgcttatttaaagattttgttagatgaaatttttggatttgaaaattttatcggaaatttacccactattatgaatttaaaaggtaataatgatgaatatgcttttgcaggcactcacgaatacacactagtctttgctaaaaataaagataaatctactttttatgaatttccaatagatgaagataattttttagagaaatgggaagaagatgaaattgggttttataaaaaaggagctccaatgcgagcaacaggaaccgaagataaaagagaagatagacctgaaatgttctatccttttttggtaaaaaataacacagttagtacaattacagatgaagaattttctcaaatctataataaagatttagaagtattcaatgatgattttattcaaaaactaaaagagaaatacgaaaatcttggatacaattttattttacctattgctgataaacaatgggggcgttggcgttgggggtattcaataaagaataaggcaaggctgcagacggatattattgttagccaatctaaaaatggaatttccttgtataaaaaacaaagacctgaattagatgatttacctacaaaaaaacctaaaactattttttataaacctgaatacagtagtggtaatggaactgaacagatgaaaaatctttttggtgaaaaggcatttaaaaatcctaaaccagaagaacttatccaagattttattaccatcacaaccaacgaatccgacatcgtcttagactaccatcttggtagtggcacaaccgccgccgttgcccacaaaatgaaccgacaatatatcggtattgaacaaatggattatattgaaacgcttgccgttgaacgcttgaaaaaagtgattgatggcgagcaaggcggtatttccaaagccgtgaattggcaaggtggtggcgagtttgtttatgccgaacttgccccatttaacgaaaccgcaaaacaacaaattttggcttgcgaagattcagacggcatcaaaacgctgtttgaaggtttatgcgaacgctatttcttgaaatacaacgtcagcgtaaatgaatttagtcaaatcattcaagagcctgaatttcaatccttggcattagacgaacaaaaacaaatggtgcttgaaatgttggatttaaatcaaatgtatgtttcattatccgaaatggatgatgagcaatttgcaggttgcttaaatgatgacgataaagcgttaagccgtgaattctatcaatcagcaaaaaatcaagcggagaaaaaagatggcgaataa

SEQ ID NO: 56274 - DNA, 297 bp, Neisseria meningitidis; identical to SEQ ID NO: 45711

SEQ ID NO: 56275 - DNA, 492 bp, Neisseria meningitidis; identical to SEQ ID NO: 45366

SEQ ID NO: 56276 - DNA, 1257 bp, Neisseria meningitidis; identical to SEQ ID NO: 38146

SEQ ID NO: 56277 - DNA, 1335 bp, Neisseria meningitidis
atggcaaaaaaatatttcggcacggacggcgtgcgcggcgaagtggggcaatttccgattacgcccgatttcgtattgaaactcggctatgcggcggggcaggttttggtgcagcacgacaccgaccagaaaccgaccgtcctcatcggcaaagacacgcgcatttccggctatatgctggaagccgctttggtggccggttttacggcggcgggtgtgaatgtggtacagaccggaccgctgcccacgcccggcgtggcttatctgacccgcgcgttgcgcctgtccgccggcgtgatgatttccgcgtcgcacaacgcctattccgacaacggcatcaaattctttgccgagggcggcgtgaaactgagcgatgaaatcgagttggaaatcgaagccaaaatcgacgaagaaatgaaaacccagccttctgcacgcctcggtcgcgcacgccgcatcagtggtgcggacgaccgctatatcgaattttgcaaatctacctttcccagccattccgaccttcggggtttgaagttggttatcgatactgccaacggcgcggggtacggtgtcgcacccaaggtgtttcacgaactgggcgcacaagtcgtcagcatcggcgacgaacccaacggctacaatatcaatgaaaaatgcggtgcgacttataccaagacactccaggcagccgttttacagcatgaagccgactacggcatcgccttagacggcgacggagaccgcctgatgatggtcgataaaaacggtaaggtttacgacggcgacagcctgatttacgtcattgctaaagcccgcgcccgagaaggtatcaacatcggcggcgtggtcggcacggtcatgaccaatatggcgatggaaatcgccctgaaagagcagggcgtggatttctgccgcgccaaagtcggcgaccgctatgtgttggcacagctgaaccaacgcagctggctcatcggcggcgaagccagcggccatattttgtgcatggacaaacacaacaccggcgacggcattatttccgcgctgcaagttttggcggcactgcaaacgctgaaccaagacctcgccaccgtttgcgccgattggcagccgtatccgcaaacgatgattaacgtgcgcatccaaaaaggtcagaaatggcaggaagcctcaaaagacgtgttggcggaagtggaaaaagaactcgaaggcaaagggcgtgtcgtgttgcgcgcttcgggaaccgaacccgtcgtgcgtgtgatggtggaggcgcggcaggcggattgggcgcgcgacggtgcggaacgtattgcttccgccatcggcagcctttag

SEQ ID NO: 56278 - DNA, 2259 bp, Neisseria meningitidis; identical to SEQ ID NO: 38664

SEQ ID NO: 56279 - DNA, 846 bp, Neisseria meningitidis
atgaatattgcggacggacggcaggcgtttcccgcacctgcaaaactgaatctcgatttgaggattaccggcaggcgggaagacggttatcacaatatcgaaagcatattctgcttgatagatttgcaggataccgtatatttgaaaccgagggacgacggcaaaatcatcctgcacaatccggttgatggcatgccgcaggaagccgatttgagctaccgtgccgcatcgttgctgcaaaaatatgcgcgcaaccccgccggcgtggaaatatggctggacaaaaaaatcccgacaggggcgggtttgggcggcggaagctcggatgcggcaaccgttttgctggtgttgaaccgttggtggcagtgttcccgaacgacgcagcagctgattgacttgggcgcaactttgggtgcggacgtaccattttttattttcggaaaaaatgcttttgcaagcgggataggtgaaaaactgataggaatggatattccgaaacagtggtatgtcatcgtcaaaccgcccgtccacgtttccactgcaaaaattttcacacacgaaggcttgacacgaaattccgcctcaagcataatgccgactttccaaaacctgcaaccgtttagaaatgatatgcaggcagttgtatttaaagaataccctgaagtttggaaagcctattccgaattgtcccgatatggatttgccttaatgacaggttctggtgcgtgtgtattcacggcgtgtcaagatagggatagcgcatacaatatataccgacaagtttcaggtttgtacgaggcatatttggcagagggtctttcaaaacatcctttgttgtccgtataa

SEQ ID NO: 56280 - DNA, 612 bp, Neisseria meningitidis; identical to SEQ ID NO: 45466

SEQ ID NO: 56281 - DNA, 789 bp, Neisseria meningitidis; identical to SEQ ID NO: 44945

SEQ ID NO: 56282 - DNA, 309 bp, Neisseria meningitidis; identical to SEQ ID NO: 39572

SEQ ID NO: 56283 - DNA, 669 bp, Neisseria meningitidis; identical to SEQ ID NO: 44164

SEQ ID NO: 56284 - DNA, 777 bp, Neisseria meningitidis
atgaattttatccgttccgtcggggcgaaaaccctcggccttattcaatccctcggcagtattacgctgtttctgctgaacattctggcgaagtccggtacggctttcgtccgtccgcgcctgagcgtgcgccaagtgtattttgccggcgtgctgtcggtgctgattgttgccgtttcggggctgtttgtcggtatggtcttgggtttgcagggctatacgcagttgtcgaaattcaaatccgccgatattttgggctatatggttgcggcttcgctgttgcgcgaactgggtccggtgttggcggcgattctgtttgccagcagcgctggcggtgcgatgaccagcgaaatcggtttgatgaaaacgaccgaacagctcgaagcgatgaacgtgatggcggtaaaccctgtcgcccgcgtggttgcgccgcgcttttgggcgggcgtgttttccatgccgcttttggcttcgattttcaacgtggcgggtattttcggcgcgtatttggtcggtgtaagctggctgagcttggacagcggcattttctggtcgcaaatgcagaacaacatcacgatacattacgatgtaatcaacggtctgattaaatccgccgcgttcggcgtggcggtaacgctgattgccgtgcatcagggcttccattgcgtcccgacttcggaaggcattttgcgcgccagcacgcgcacggtggtttcgtccgccctgacgattttggcggtcgattttatattgaccgcgtggatgtttacagattga

SEQ ID NO: 56285 - DNA, 1065 bp, Neisseria meningitidis; identical to SEQ ID NO: 39469

SEQ ID NO: 56286 - DNA, 717 bp, Neisseria meningitidis
  misc_feature 694, 695, 696, 697, 698: 'n' is a, c, g or t
atgtgttgttctcttagttttgcagaaccagcaagaatagatgatcgaataataaaatttaggccatctaaatcaaagttttttgaatctacaggatatagaaaaatcaataatgaattttctaaattcacagaagcggcaaatgtcgaacatatccccacgggcgcaaaagcccgaatcaacgcaaagataaccgccagcgtatcccgcgccgccgtcttgtcaggagtcggcaaacttgtccgccaaggcgcgaaattcagcacaagggcagtcccttatgtagggacagcccttttagcccacgacgtatacgaaactttcaaagaagacatacaggcacgaggctaccaatacgacaccgaaaccgacaaatttgtaaaaggctacgaatatagtaattgcctttggtacgaagacgaaagacgtattaatagaacctatggctgctacggcgttgacagttccattatgcgccttatgtccgattacagcagattccccgaagtcaaagaattgatggaaagccaaatggaaaggcttgcccgtccgtattgggaaaagttaaggaatcgtcctgatatgtattattttaaaaactacaattttaaacgttgttatttcggattgaacggcggagattgtttagttgctaaaggtgatgatggtagaacttttatcagtttctcacttnnnnncacacacttaattaattaa

SEQ ID NO: 56287 - DNA, 747 bp, Neisseria meningitidis; identical to SEQ ID NO: 44685

SEQ ID NO: 56288 - DNA, 687 bp, Neisseria meningitidis; identical to SEQ ID NO: 45298

SEQ ID NO: 56289 - DNA, 564 bp, Neisseria meningitidis; identical to SEQ ID NO: 39293

SEQ ID NO: 56290 - DNA, 1095 bp, Neisseria meningitidis; identical to SEQ ID NO: 38108

SEQ ID NO: 56291 - DNA, 645 bp, Neisseria meningitidis; identical to SEQ ID NO: 39035

SEQ ID NO: 56292 - DNA, 2631 bp, Neisseria meningitidis; identical to SEQ ID NO: 38629

SEQ ID NO: 56293 - DNA, 1248 bp, Neisseria meningitidis; identical to SEQ ID NO: 39122

SEQ ID NO: 56294 - DNA, 2376 bp, Neisseria meningitidis; identical to SEQ ID NO: 45064

SEQ ID NO: 56295 - DNA, 1302 bp, Neisseria meningitidis
atggctatttaccaatcaggcgtgatttttgaccaagtggataccgccaatcccgattgctggacattggacgaatacgtcaaacgtggcggttataccgccctgcgtaaaatcctgtccgaaaacatctcgcaaaccgatgtgattgacgaagtcaaaacctccggcttgcgcggtcgtggcggtgcgggcttcccgaccggtttgaaatggagctttatgccccgttctttccccggcgaaaagtacgtcgtttgcaacaccgacgaaggcgagccgggtacatttaaagaccgcgacattattatgttcaacccccatgccctgattgaaggcatgattatcgccggttacgcgatgggcgcgaaagccggttacaactatatccacggcgaaatttttgaaggctaccaacgctttgaggccgctttggagcaggcgcgtgccgcaggctttttgggtaaaaatattttgggttcggattttgaattcgaactcttcgcccaccacggctacggtgcatacatctgcggcgaagaaaccgcattgcttgaatcgctggaaggcaaaaaaggccagccgcgctttaaaccgccattccctgcttcgttcggcctgtacggcaaaccgactaccatcaacaataccgaaactttctcctccgtttcattcattatccgtgacggcggacaggcatttgccgataaaggtattccgaatgcaggcggtaccaaattattctgtatttccggccatgtcgagcgtccgggcaactatgaagtgccattgggcacaccgtttgccgaagtcttgaaaatggcaggcggtatgcgcggcggcaaaaaactcaaagccgtcattcccggcggttcgtccgcgcccgtattgcctgccgacatcatgatgcagacaaatatggactacgactcgatttccaaagcaggctcgatgctgggttctggcgcgattatcgtcatggacgaagacgtgtgcatggtgaaagcccttgagcgcctgagctacttctactacgacgagtcttgcggccaatgtacgccttgccgagaaagcaccggctggctttaccgcatcgtccaccgcatcgtagaaggcaaaggtaaaatggaagatttggatttgctggattctgtcggcaaccaaatggcaggccgcaccatctgcgcccttgccgatgccgccgtcttccccgtccgaagctttaccaagcatttccgtgatgagtttgtgcattacatcgaacacggcggaccgatgaaagagcataagtggggagggtggtaa

SEQ ID NO: 56296 - DNA, 1557 bp, Neisseria meningitidis; identical to SEQ ID NO: 45565

SEQ ID NO: 56297 - DNA, 252 bp, Neisseria meningitidis; identical to SEQ ID NO: 37103

SEQ ID NO: 56298 - DNA, 1023 bp, Neisseria meningitidis; identical to SEQ ID NO: 44766

SEQ ID NO: 56299 - DNA, 642 bp, Neisseria meningitidis; identical to SEQ ID NO: 44690

SEQ ID NO: 56300 - DNA, 522 bp, Neisseria meningitidis; identical to SEQ ID NO: 47947

SEQ ID NO: 56301 - DNA, 900 bp, Neisseria meningitidis; identical to SEQ ID NO: 39788

SEQ ID NO: 56302 - DNA, 747 bp, Neisseria meningitidis; identical to SEQ ID NO: 44728

SEQ ID NO: 56303 - DNA, 1344 bp, Neisseria meningitidis
atggaagataagcaagggatgacaaaggcggttgccggcgtgatgacggacgcgtcatcggacggcaggaagccggcaaccgcttcaaatcttccccccttatctaacagggggggtacagaaaccgaaacggcgggcagggttcaagaagtcttcgagtgttatgaaaagtacataacagacggcaaaggaaaccttttaggcgttccgcttcgtcgcggtgtatctgattcggcgttcatcgatcaaattagcttttcatttcatgaaaaaacctttttcgataaatacggcgttcgtgtaagtcttttggaagacgaagattttattcgcgccgcgtccatgctcgccgaagaagttttcggtttctgtatctacaaagaatccaaaggctcgggcggtcgtttctatgagcgctgttggttgatgggttcggaagacgtcctatacggtcgcgtccattttggcggacaaaacaataccatccttttcgaactgaccggcaccggttgcggcgtcgcaaaagaaggctgggaatcacgacttttcgcattcctgactaatgcaatccgcccaaaaatcacacgcgttgacatcgcaaaagactttttcaacggcgaatacagcccgaaccaagcccgtgaagaccgaaataaaggtatgtttacctgtcatcacgtcaaaccaaaaggcgaatgtttggggtcagattgggaagaagacgatgaagccaaaatgaccaaaggcaagacctatggtatcggctcccgtgaatcgtccaaatatgtccgcgtctatgaaaaaggcaagcagttgggcgataaaacaagcacatggacgcgctttgaaattgaattcaaagcaaaagacatcgttatccctttcgaagttttgcagaatccgggcgaatatttcggcggcgcatatccgatttgcgaacgattcgcccaaaaggcaacgcgcatacacgcggttaaggaagataaggtcatttcagccgaccgctaccttgaatgggtaaaaaaacagttcggacgtgcggcaaacggtctgaaattcatttttcccgaattggacaaagccaaactgtttgaactgattgagccgagtcatcacaagctgcccaagtctttggctcccgaagcctacgactgcgcctttttgaaagctcaagccattcatgaacagcccgcattcaaaccgtacaaagacccttactatatgtacgaatattacgagaatcttgaaaaacagcttgaacagcaaaaacacgtcaacaatgaagaaagctataacaacttcatttacgacaaattcgcaagactaccgatttcatgggcttaa

SEQ ID NO: 56304 - DNA, 1137 bp, Neisseria meningitidis; identical to SEQ ID NO: 47902

SEQ ID NO: 56305 - DNA, 876 bp, Neisseria meningitidis; identical to SEQ ID NO: 44815

SEQ ID NO: 56306 - DNA, 1014 bp, Neisseria meningitidis
atgattttctccatcatcgtccctatttacaatgtggaaaaatacctccgctgctgcgtggattccgtgcttgccgaaaattttgccgattatgaaatgattttggtcgatgacggttcgccggacggctgcgggaagatttgcgacgaatatgcaggcaaatatccgcatataaaagtgattcatcaagaaaacggcgggctgtcggatgcccgcaacgccggtatccgggcggcaaaaggcgattacctaatctttttggacagcgacgactattgggccgacaccaatcgttcaaaaaacgcgcggggggggattctctttgatttacaacaacttgcagacaaaaaggttgatttgatcctgcatccctcgtccttcaattaccgcgacatccccaaaggggcggacttttcggataatgattttgtccgccattttgaaacgctggtggaggggcggtactatatcgccaacgcgtggacaaaaatcgtcaggcgggaaataatcatcaaaaacaatctgtttttcccaaaaggatacattcacgaggatttcccgtacagtttgcaattggcgcgttttatcaagacttttgccttttacgataaccctttttaccagtaccgcgttctcggcggctctatcagccacaacatcaaatacaaaaatttcagcgatgtgctgacgcatctcgaccggggtgtggattttttagtcgaaaacaaaaattcccccatctacggcggtttgcaaaaatttgtcttcgacaatatcggctatctgaggtctatattggtaaggctttatttttccaaaaacattatcctcatctaccggaaatatttttcatttaaagaaaaatgcagaaagatattcggcgcgaaggcaatccgtccggtttttatcgggaagaccgcattcatcataggattgccgatattgcgcctgctcgtaccgcctatgctgtacccggcaatcaaggccgtttatcagaaatttttttcggaataa

SEQ ID NO: 56307 - DNA, 501 bp, Neisseria meningitidis; identical to SEQ ID NO: 45835

SEQ ID NO: 56308 - DNA, 435 bp, Neisseria meningitidis; identical to SEQ ID NO: 38925

SEQ ID NO: 56309 - DNA, 1947 bp, Neisseria meningitidis; identical to SEQ ID NO: 47138

SEQ ID NO: 56310 - DNA, 330 bp, Neisseria meningitidis; identical to SEQ ID NO: 40782

SEQ ID NO: 56311 - DNA, 1893 bp, Neisseria meningitidis; identical to SEQ ID NO: 38453

SEQ ID NO: 56312 - DNA, 375 bp, Neisseria meningitidis; identical to SEQ ID NO: 38650

SEQ ID NO: 56313 - DNA, 312 bp, Neisseria meningitidis
atgtttaatcaaactcaaactgtaacttatcccgcaacttttttaggagctaaaaaattcaaaggcgaaattgatggctctaatatcgacacttgttccgtattggttgcaacatctttaccggcacagtcgggaaatgctgtcggatttacggcagcgcaaatgaaattcggcgatagcagtaattttgcacgattggaaaatctcaaatacccgtgcggagttatggtaacggttgaaatgacttcgactggtaaaggcatggttccttcattaattgattttcaggtggcagaaaagccgaaaggttga

SEQ ID NO: 56314 - DNA, 750 bp, Neisseria meningitidis; identical to SEQ ID NO: 45151

SEQ ID NO: 56315 - DNA, 171 bp, Neisseria meningitidis; identical to SEQ ID NO: 36504

SEQ ID NO: 56316 - DNA, 966 bp, Neisseria meningitidis; identical to SEQ ID NO: 38346

SEQ ID NO: 56317 - DNA, 132 bp, Neisseria meningitidis; identical to SEQ ID NO: 41520

SEQ ID NO: 56318 - DNA, 1068 bp, Neisseria meningitidis
atgagaaaaatccttgttaccggcggcgcgggctttatcggttctgccgttgtccgtcatattatccgaaacacccaagattccgtcgtcaacctcgacaaactgacctacgcgggcaatctcgaatcgctgaccgacattgccgataatccccgctatgctttcgagcaagtggacatttgcgaccgcgccgaactcgaccgcgtattcgcacaacaccggcccgatgccgtgatgcacttggcggcggaaagccatgtcgaccgctctatcggttcggcaggcgagtttatccaaaccaatatcgtcggcacattcaatctgcttgaagcagcccgcgcctactggcaacaaatgccgtctgaacagcacgaagccttccgtttccaccatatttcgactgatgaagtgtatggcgatttaggcggcacagacgatttgtttaccgaaaccacgccctacgcgccgtccagcccctactctgcctctaaagcgtccagcgaccacctcgtccgcgcgtggcagcggacttacggtttgccgaccattgtaaccaactgctccaacaactacggtccttaccattttccggaaaaactcattcctttgatgattctgaacgcgcttgacggcaaaccgctgcctgtgtacggcgacggtatgcaaatccgcgactggctgtttgtcgaagaccacgcgcgcgcactgtatcaggttgttaccgaaggtgttgtcggcgaaacctacaatatcggcggccacaatgaaaaagccaatattgaagtcgtcaaaaccatctgcgccctgctggaagagcttgttcctgaaaaaccggccggtgtggcgcgttatgaagatttgattactttcgtacaagaccgccccggccatgacgtacgctacgccgtcgacgcagccaaaatcaggcgggatttgggctggctgcctttggaaaccttcgagtccggcctccgcaaaaccgtgcaatggtatctggacaacaaaacctggtggcaaaatgtattgaacggcagctatcgtttggaacgtttaggtactggaaaatag

SEQ ID NO: 56319 - DNA, 228 bp, Neisseria meningitidis; identical to SEQ ID NO: 39542

SEQ ID NO: 56320 - DNA, 612 bp, Neisseria meningitidis; identical to SEQ ID NO: 46033

SEQ ID NO: 56321 - DNA, 1203 bp, Neisseria meningitidis; identical to SEQ ID NO: 44234

SEQ ID NO: 56322 - DNA, 216 bp, Neisseria meningitidis; identical to SEQ ID NO: 38246

SEQ ID NO: 56323 - DNA, 753 bp, Neisseria meningitidis; identical to SEQ ID NO: 44216

SEQ ID NO: 56324 - DNA, 237 bp, Neisseria meningitidis; identical to SEQ ID NO: 37424

SEQ ID NO: 56325 - DNA, 1788 bp, Neisseria meningitidis; identical to SEQ ID NO: 44498

SEQ ID NO: 56326 - DNA, 1098 bp, Neisseria meningitidis
atgaaatccgtccgctccttcatccgcgacgacatacaagctatgtcggcatatcagattgccgacgttccgcccggctttgccaaactcgattcgatggaaagtcccgtccacccttttgccggacatgaaacgctgttgcaggaatggcaggcacggcttgccgccgcgcccatccatctttaccccaatccctccggcagcggtttacaggaagcattacgttcggcgttcgacattcccgactgcgccgacatcgcgctgggcaacggctcggacgagctgatacagttcatcacgatgctgaccgccaaaccgggcgcggcaatgttggcagccgaacccagtttcgtcatgtaccgccacaacgccgcgctgtacggcatggattatgtcggcgttccactgaacggagatttcaccctcaacctgcccgccgtcctcgaagccgtcaggaagcaccgccctgccctgacctttatcgcctaccccaacaaccccaccggcgtatgtttcacgcgtgccgaaatcgaagccgtcatcgaagcttcagacggcatcgtcgtcgtcgacgaagcctacggcgcattcaacggcgacagcttcctgccgcaggcgggcagcattcccaacctcatcgtcatgcgtaccgtcagcaaaatcggttttgccggactgcgtatcggctatgcggcaggctgtcccgaagtcatcggcgaactgcaaaaaatcctgccgccctacaatatgaaccaactgagcctgaccaccgccaaactcgccctgcaacactacggcatcatctctgccaacatcgacagcctgaaaaacgaacgcgaacggatgttcgccgaattgggcaaaatatgccgtctgaacacctttccaagtcaggcaaacttcattaccatacgcgtacccgatgccgatttgttgtttgacacgctcaaacaaaaccgcatcttggttaaaaaactgcatggcgcacacccgcttttggaacactgcctgcgcattaccgtaggcagccccgcacaaaacgatgccgttctcaacatcattcgccaactttactgccaaccaacggatttcctatga

SEQ ID NO: 56327 - DNA, 1596 bp, Neisseria meningitidis; identical to SEQ ID NO: 44847

SEQ ID NO: 56328 - DNA, 735 bp, Neisseria meningitidis
gtgaatgaaaagacagatcaaaaagcagtaagtgcgcaacaggctaaagaacaaaccagtttcaacaatcccgagccaatgacaggatttgaacatacggttacatttgattttcagggcaccaaaatggttatcccctatggctatcttgcacggtatacgcaagacaatgccacaaaatggctttctgacacgcccgggcaggatgcttactccattaatttgatagagattagcgtctattacaaaaaaaccgaccaaggctgggttcttgagccatacaaccagcaaaacaaagcacactttatccaatttctacgcgatggtttggatagcgtggacgatattgttatccgaaaagatgcgtgtagtttaagtacgactatgggagaaagattgcttacttacggggttaaaaaaatgccatctgcctatcctgaatatgaagcttatgaagataaaagacatattcctgaaaatccatattttcatgaattttactatattaaaaaaggagaaaatccggcgattattactcatcggaataatcgaataaaccaaactgaagaagatagttatagcactagcgtaggttcctgtattaacggtttcacggtacagtattacccgtttattcgggaaaagcagcagctcacacagcaggagttggtaggttatcaccaacaagtagagcaattggtacagagttttgtaaacaattcaaataaaaaataa

SEQ ID NO: 56329 - DNA, 643 bp, Neisseria meningitidis
atgagaaaaagtcgtctaagccagtataaacaaaataaactcattgaactgtttgtcacaggtgtaactgcaagaacggcagcagagttagtaggcgttaataaaaataccgcagcctattattttcatcgtttacgattacttatttatcaaaacagtccgcatttggaaatgtttgatggcgaagtagaagcagatgaaagttattttggcggacaacgcaaaggcaaacgcggtcgcggtgctgccggtaaagtcgccgtattcggtcttttgaagcgaaatggtaaggtttatacggttacagtaccgaatactcaaaccgctactttatttcctattatccgtgaacaagtgaaacctgacagtattgtttatacggattgttatcgtagctatgatgtattagatgtgcgcgaatttagccattttagcttcgctgaaacttcgttttcgtatcaatcacagcacacattttgctgaacgacaaaaccatattaatggaattgagaacttttggaaccaggcaaaacgtcatttacgcaagtttaacggcattcccaaagcgcattttgagctgtatttaaaggagtgcgaacgacgttttaacaacagtgagataaaagttcttgttccattttaa

SEQ ID NO: 56330 - DNA, 2310 bp, Neisseria meningitidis; identical to SEQ ID NO: 45075

SEQ ID NO: 56331 - DNA, 876 bp, Neisseria meningitidis; identical to SEQ ID NO: 38422

SEQ ID NO: 56332 - DNA, 1407 bp, Neisseria meningitidis
atgaaactgttccaacgcattttcgccacattttgcgcagttatcgtctgtgcaatctttgtggcgagtttttctttttggctggtgcagaacacccttgccgaaaaccagttcaaccaacgccgcaccatcgaaaccactttgatgggcagcatcatttccgcattccgggcacgcggggacgcgggcgcgcgcgaaatcctgacggaatggaaagacagccccgtctcatcgggcgtgtacgttatacagggcgacgagaaaaaagatatcctgaaccggtatatcgacagctacaccatcgaacgcgcccggcttttcgccgccggacacccgcattccaacctcgtccatatcgaatacgaccgcttcggcgaagaatacctgttcttcaccaaagactgggacaaactccaagcccgccgcctgcccagccccctgttgatccccggcctgccgctcgccccgatttggcacgaactcatcatattgtccttcatcatcgtcgtcggactgctgatggcgtacatcctcgccggcaatatcgccaaacccatcagaatcttaggcaacggcatggacagggtggcaaacggagaacttgaaacccgtatctcccaacaggtcgacgaccgcgacgacgaattgtcccatcttgccatccaattcgacaaaatggtgaaaaaactcgaaaaactcgttgccaaagaacgccacctgctccaccacgtttcccacgaaatgcgctccccgcttgcccgtatgcaggcgattgtcggactgattcaggcgcagccccaaaaacaggaacaatatctcaaacggctggaaggcgaactgacccgcatggatacgctggccggggaactgttaaccctgtcccgtctcgaaacttccaatatggctttggaaaaagaaagcctgaaactcctgcccttcctgggcaacctggtagaagacaatcaaagcattgcccagaaaaacggacaaacggttaccctgtctgccgacggaaaaatccccgaaaacacaaccatccttgccaacgaaagctacctgtaccgcgccttcgacaacgtcatccgcaacgccgtcaactacagtcccgaaggcagcaccatcctgatcaacatcggacaagaccacaaacactggataatcgacgttaccgacaacggccccggcgtggacgaaatgcagctcccgcacatcttcaccgctttctaccgtgcagactccagtgccaacaaacccggaacaggactggggcttgcattgacccaacatattattgaacagcactgcggcaaaatcatcgccgaaaacatcaaaccgaacgggctgcggatgcgcttcatcctacccaagaaaaaaaccggttccaaaacagaaaaaagtgcgaactga

SEQ ID NO: 56333 - DNA, 1563 bp, Neisseria meningitidis
ttgtttgaagtgatgaaaaaacctttgatttcggttgcggcagcattgctcggcgttgctttgggtacaccttattatttgggtgtcaaagccgaagaaagcctgacgcagcagcaaaaaatattgcaggaaacgggcttcttgaccgtcgaatcgcaccaatatgagcgcggctggtttacctctatggaaacgacggtcatccgtctgaaacccgagttgctgaataatgcccgaaaatacctgccggataacctgaaaacagtgttggaacagccggttacgctggttaaccatatcacgcacggcccttttgccggcggatttggcacgcaggcgcacattgaaaccgagttcaaatacgcgcctgaaacggaaaaagttttggaacgcttttttgggaaacaagctccggtttcccttgccaataccgtttattttaacggcagcggtaaaatggaagtcagtgttcccgccttcgattatgaagagctgtcgggcatcaggctgcattgggaaggattgacgggaaaaacggtttatcaaaaaggtttcaaaagctaccgcaacagctatgatgcgcccttgttcaaaatcaagctggcagacaaaggcgatgccgcgtttgaaaaagcgcatttcgattcggaaacttcagacggtatcaatccgcttgctttgggcagcagcaatctgaccttggaaaaattctccctagaatggaaagagggtgtcgattacaacgtcaagttaaacgaactggtcaatcttgttaccgatttgcagattggcgcgtttatcaatcccaacggcagcatcgcaccttccaaaatcgaagtcggcaaactggctttttcaaccaagaccggggaatcaggctcatttatcaacagtgaagggcagttccgttttgacacgctggtgtacggcaatgaaaaatacggcccgctggacatccatatcgccgccgaacatctcgatgcttctgccttaaccgtattgaaacgtaagtttgcacaaatttccgccaaaaaaatgaccgaggaacaaatccgcaatgatttgattgccgccgtcaaaggcgaggcttccggactgttcaccaacaatcccgtattggacattaaaacttttcgtttcacacagccgtcgggaaaaatcgatgtgggtggaaaaatcatgtttaaagacatgaagaaggaagatttgaaccaattgggtttgatgctgaagaaaaccgaggcagacatcagaatgagtattcctcaaaaaatgttggaagacttggcggtcagtcaggcaggcaatattttcagcgtcaatgccgaagatgaggcggaaggcagggcaagtcttgacgacatcaacgagaccttgcgcctgatggtggacagtacggttcagagtatggcaagggaaaaatatctgactttgaacggcgaccagattgatactgccatttctctgaaaaacaatcagttgaaattgaacggtaaaacgttgcaaaacgaaccggagccggattttgatgaagccggtatggtttcagagccgcagcagtaa

SEQ ID NO: 56334 - DNA, 633 bp, Neisseria meningitidis; identical to SEQ ID NO: 44637

SEQ ID NO: 56335 - DNA, 2586 bp, Neisseria meningitidis; identical to SEQ ID NO: 44378

SEQ ID NO: 56336 - DNA, 360 bp, Neisseria meningitidis; identical to SEQ ID NO: 45472

SEQ ID NO: 56337 - DNA, 183 bp, Neisseria meningitidis
atgccgacaccgcctgccgcattgatggtcgcgccggtgcgcccgaatccgccgaaagacggcaagacggccacgctgttggaacacgccgccgagtttggcggctatgttgccgaactggaaaatcaaaatcaggcttggcgcgactgggcgggcaatcactcccgcaaagtcggaaactga

SEQ ID NO: 56338 - DNA, 297 bp, Neisseria meningitidis; identical to SEQ ID NO: 45238

SEQ ID NO: 56339 - DNA, 846 bp, Neisseria meningitidis; identical to SEQ ID NO: 39931

SEQ ID NO: 56340 - DNA, 4365 bp, Neisseria meningitidis; identical to SEQ ID NO: 44666

SEQ ID NO: 56341 - DNA, 666 bp, Neisseria meningitidis; identical to SEQ ID NO: 42538

SEQ ID NO: 56342 - DNA, 705 bp, Neisseria meningitidis; identical to SEQ ID NO: 38732

SEQ ID NO: 56343 - DNA, 141 bp, Neisseria meningitidis; identical to SEQ ID NO: 49273

SEQ ID NO: 56344 - DNA, 462 bp, Neisseria meningitidis
atgaccgaagtcatcgcctacctcatcgaacatttccaagatttcgatacctgtccgccgcccgaagacttgggtatgctgcttgaagaagcgggtttcgatacgatggaaatcggcaacaccctgatgatgatggaagtattgctcaacagctccgaattttccaccgaacccgccgacagcggcgcattgcgcgtgtacagcaaagaagaaaccgataacctgccgcaggaagtgatggggctgatgcagtatctgattgaagaaaaagccgtcagctgcgaacagcgggaaatcatcatccacgcgctcatgcacattccgggcgatgaaattaccgtagataccgccaaagtgctgaccctgctgcttttatgggcaaacaagagcgagctgcccgtgttggtcggcgacgagctgatgagcgcgcttttactcgacaacaaacccacgatgaactga

SEQ ID NO: 56345 - DNA, 1020 bp, Neisseria meningitidis
atgaaaaaaattctcgttaccggcggcaccggttttatcggctcgcataccgttgtttctttgctgaaaagcggccatcaagtcgtgattttggataacctatgcaattccagcatcaatatcctgccacgcttgaaaacgattaccggccaagagattccgttttatcaaggcgatatccgcgatcgtgagattttgcgccgtatttttgcggaaaaccgcattgattcggtgattcattttgccggcttgaaagcggtgggtgaaagtgtggccgagccgatgaaatattatgataataatgtttccggcagcttggtgttggcggaagaaatggcgcgtgcgggcgtgtttagcattgtgttcagttcttcggcgacggtttatggcgatccgggcaaagtgccttataccgaggatatgccactgggcgataccaccagcccttacggcacatcgaaatcaatggttgagcgcattctcactgacattcaaaaagccgatccgcgctggagcatgattttgttgcgttatttcaatccaattggcgcgcatgaaagcggcttgattggcgagcagccaaacggtatcccaaataatttgttgccttatatctgccaagtggcggcaggcaaactgccgcaattagcggtattcggcgatgactaccctacccctgatggcacgggtatgcgcgactatattcatgtgatggacttggctgaaggccatgtcgccgccatgcaggcgaaaagcaatgtagcaggcacgcatttgttgaacttaggttccggtcgcgcttcttcggtattggaaatcatccgcgcatttgaagcggcttcgggtttgacgattccgtatgaagtcaaaccgcgccgtgccggtgatttggcgtgcttctatgccgacccttcctatacaaaggcgcaaatcggctggcaaacccagcgtgatttggcgcagatgatggaagactcatggcgttgggtcagcaacaacccaaatggctacgacgattaa

SEQ ID NO: 56346 - DNA, 552 bp, Neisseria meningitidis; identical to SEQ ID NO: 37351

SEQ ID NO: 56347 - DNA, 891 bp, Neisseria meningitidis; identical to SEQ ID NO: 44540

SEQ ID NO: 56348 - DNA, 255 bp, Neisseria meningitidis; identical to SEQ ID NO: 40075

SEQ ID NO: 56349 - DNA, 1638 bp, Neisseria meningitidis; identical to SEQ ID NO: 45007

SEQ ID NO: 56350 - DNA, 630 bp, Neisseria meningitidis; identical to SEQ ID NO: 40769

SEQ ID NO: 56351 - DNA, 900 bp, Neisseria meningitidis; identical to SEQ ID NO: 44438

SEQ ID NO: 56352 - DNA, 291 bp, Neisseria meningitidis; identical to SEQ ID NO: 45911

SEQ ID NO: 56353 - DNA, 2580 bp, Neisseria meningitidis; identical to SEQ ID NO: 45323

SEQ ID NO: 56354 - DNA, 300 bp, Neisseria meningitidis
atgaagaaaatgttcgtgctgttctgtatgctgttctcctgcgccttctcccttgcggcggtaaacatcaatgcggcttcgcagcaggagttggaggcgctgccgggcataggccctgcgaaggcgaaggccattgcggaataccgtgcgcaaaacggtgcgttcaagtctgtggacgatttgaccaaggtaaagggcatcggccctgcggtgctggcgaagctgaaggaccaggcttcggtcggcgcgcccgcaccaaaagccccagccaaaccggctctgcccgcagctaaaaaatag

SEQ ID NO: 56355 - DNA, 1104 bp, Neisseria meningitidis; identical to SEQ ID NO: 44993

SEQ ID NO: 56356 - DNA, 999 bp, Neisseria meningitidis; identical to SEQ ID NO: 45060

SEQ ID NO: 56357 - DNA, 1056 bp, Neisseria meningitidis
atgaaaacctacgcaccggcactctataccgcagccctgctcaccgcctgcagccccgcagccgattcaaaccatccgtccggacaaaatgccccggccaataccgaatccgacggaaaaaacattaccctgctcaacgcctcatacgatgtggcacgggatttttacaaagaatacaaccccttatttatcaaaacataccaatccgaacaccctggcacatccgtcagcatccaacagtcccacggcggctccagcaaacaggcattatccgtagccaacggccttcaagccgatgtcgtaaccatgaaccaatcctccgacatcgacctgctcgaaaaaaaaggactggtagaaaaaggctggcaacaagccctccccgaccacgctgcgccctacaccagcactatggttttccttgtccgaaaaaacaaccccaaacagatccgcgattggaacgaccttgccaaagacggcgttaacatcgtcatcgccaatcccaaaacctcgggcaacggacgctacgccttcctcggcgcatacggttacggtctgaaaaccaccaacggcaacgaacaggaagcccaaaaactcgtcgcatccatcctcaaaaacacccccgtttttgaaaacggcggacgcgccgccaccaccaccttcacacaacgcaacatcggcgacgtactcattacttttgaaaacgaagccaactacgtcagcaaaaaactgacccaaggacagtttgaaatcgtctatccgagctacaccatttccgccgaaagccccgtcgccgtcgtcaacagcgtcgtcgcgaaaaaaggcacgcaaaaaaccgcccgcgcctatctcgaatacctttggagcgaaccggcgcaagaactcgccgcctcactctacctgcgcccccgcaaccccgaagtattggcaagacacaaagccgacttcccagacttagactcattctctcccgaagaaaaattcggcggatgggacaacatcatgaaaacctacttcgccgacggcggcatattcgaccgcctgaccgcacaaaaatga

SEQ ID NO: 56358 - DNA, 210 bp, Neisseria meningitidis; identical to SEQ ID NO: 44386

SEQ ID NO: 56359 - DNA, 747 bp, Neisseria meningitidis; identical to SEQ ID NO: 45799

SEQ ID NO: 56360 - DNA, 678 bp, Neisseria meningitidis; identical to SEQ ID NO: 47922

SEQ ID NO: 56361 - DNA, 642 bp, Neisseria meningitidis; identical to SEQ ID NO: 38943

SEQ ID NO: 56362 - DNA, 873 bp, Neisseria meningitidis; identical to SEQ ID NO: 44513

SEQ ID NO: 56363 - DNA, 873 bp, Neisseria meningitidis; identical to SEQ ID NO: 44946

SEQ ID NO: 56364 - DNA, 330 bp, Neisseria meningitidis
atgagaaaaagtcgtctaagccggtataaacaaaataaactcattgaactgtttgtcgcaggtgtaactgcaagaacagcagcagagttagtaggcattaataaaaataccgcagcctattattttcatcgtttacgattacttatttatcaaaacagtccgcatttggaaatgtttgacggcgaagtagaagcagatgaaagttattttggcggacaacgcaaaggcaaacgcggtcgcggtgctgccggtaaagtcgccgtattcggtcttttgaagcgaaatggtaaggtttatacggttacagtaccgaatactcaaaccgcttaa

SEQ ID NO: 56365 - DNA, 867 bp, Neisseria meningitidis; identical to SEQ ID NO: 44884

SEQ ID NO: 56366 - DNA, 942 bp, Neisseria meningitidis; identical to SEQ ID NO: 45367

SEQ ID NO: 56367 - DNA, 333 bp, Neisseria meningitidis; identical to SEQ ID NO: 44638

SEQ ID NO: 56368 - DNA, 315 bp, Neisseria meningitidis; identical to SEQ ID NO: 37950

SEQ ID NO: 56369 - DNA, 621 bp, Neisseria meningitidis; identical to SEQ ID NO: 44726

SEQ ID NO: 56370 - DNA, 1302 bp, Neisseria meningitidis; identical to SEQ ID NO: 38582

SEQ ID NO: 56371 - DNA, 852 bp, Neisseria meningitidis; identical to SEQ ID NO: 45281

SEQ ID NO: 56372 - DNA, 459 bp, Neisseria meningitidis; identical to SEQ ID NO: 39773

SEQ ID NO: 56373 - DNA, 498 bp, Neisseria meningitidis; identical to SEQ ID NO: 45177

SEQ ID NO: 56374 - DNA, 954 bp, Neisseria meningitidis; identical to SEQ ID NO: 54685

SEQ ID NO: 56375 - DNA, 303 bp, Neisseria meningitidis; identical to SEQ ID NO: 51203

SEQ ID NO: 56376 - DNA, 177 bp, Neisseria meningitidis; identical to SEQ ID NO: 38772

SEQ ID NO: 56377 - DNA, 2106 bp, Neisseria meningitidis; identical to SEQ ID NO: 44972

SEQ ID NO: 56378 - DNA, 537 bp, Neisseria meningitidis; identical to SEQ ID NO: 37832

SEQ ID NO: 56379 - DNA, 477 bp, Neisseria meningitidis; identical to SEQ ID NO: 45221

SEQ ID NO: 56380 - DNA, 3216 bp, Neisseria meningitidis; identical to SEQ ID NO: 36551

SEQ ID NO: 56381 - DNA, 1113 bp, Neisseria meningitidis
atgagcaccttctttcaacaaaccgcccaagccatgattgccaaacacatcgaccgtttcccgctattgaagttggaccaggtgattgattggcagccgatcgagcagtacctgaaccgtcaaaaaaaccgttaccttagagaccaccgcggccgtcccgcctacccgctgttgtccatgttcaaagccgttctgctcggacaatggcacagcctctccgatcccgaactcgaacacagcctcattacccgcatcgacttcaacctgttttgccgttttgacgaactgagcatccccgattacagcaccttatgccgctaccgcaactggctggcgcaagacgacaccctgtccgaactgttggaactgattaactgccaactgaccgaaaaaggcttaaaaatagagaaagcatccgccgccgtcattgacgccaccattattcagaccgccggcagcgaacagcgtcaggccatagaagtcgatgaagagggacaagtcagcggtcaaaccacactgagtaaggacaaaaatgcccgttggacaaagaaaaacagcctctacaaactcggttacaaacaacatacccgtaccgatgcggaaggctatatcgagaaactgtacatcactcccaccaatgcccatgagtgcacacacctgtcgccgttgttggaaggactgcccaaaggtacgaccgtctatgccgacaaaggctacgacagcaaggaaaaccggcaacatctgaaagaacatcggttgcagaacggcattatgcgcaaagcctgccgcaaccgtccgctgacggaaacgcaaaccaaacgtaaccgatatttatcgaagacccgttatagtggattaaatttaaatcaggacaaggcgacgaagccgcagacagtacaaatagtacggcaaggcgaggcaacgccgtactggtttaaatttaatccactatatgtggtcgaacagagcttcggtacgctgcaccgtaaattccgctatgcgcgggcagcctatttcgggctgattaaagtgagtgcgcaaagccacctgaaggcgatgtgtttgaacctgttgaaagcggccaacaggctaagtgcgcccgctgccgcctaa

SEQ ID NO: 56382 - DNA, 486 bp, Neisseria meningitidis; identical to SEQ ID NO: 41484

SEQ ID NO: 56383 - DNA, 450 bp, Neisseria meningitidis; identical to SEQ ID NO: 39994

SEQ ID NO: 56384 - DNA, 1050 bp, Neisseria meningitidis; identical to SEQ ID NO: 38313

SEQ ID NO: 56385 - DNA, 2427 bp, Neisseria meningitidis
atgtccatccccttcaaacccgtattggctgccgccgccatcgcccaagcgtttcccgcctttgcggcagaccccgcgccgcagtccgcccaaacgctgaacgaaatcaccgttaccggcacgcacaaaacccaaaaactcggcgaagaaaaaatccgccgcaaaaccttagacaagctcttggtcaacgacgaacacgacctggtgcgctacgaccccggcatttccgtcgtcgaaggcggcagggcgggttctaacggctttaccatacgcggcgtggacaaagaccgcgtcgccatcaacgttgacgggctggcgcaggcggaaagccgctcttccgaagccttccaagaattgttcggcgcgtacggcaacttcaacgccaaccgcaacacttccgagccggaaaacttttccgaagtaaccatcaccaaaggcgcggactcgctcaaatccggcagcggcgcattgggcggcgcagtcaattaccaaaccaaatccgcaagcgattatgtttccgaagacaagccctaccatttggggataaagggcggcagcgtcggcaaaaacagccaaaagttcagcagcatcaccgccgccggcaggctctttggtttggatgccttattggtttatacccgccgcttcggcaaagaaaccaaaaaccgctcgaccgagggcgatgtcaaaattgaaaacaagggatatgttttcagcccaacccaatcattcagcaagtaccagacctacgtagccacaggggttgcgcgctcccaacccgacccgcaagaatgggtaaacaaaagcaccttgttcaagctgggctacaatttcaacgaccgcaaccgcatcggctggatttttgaagactcccgcaccgaccgttttaccaacgagctgtctaatttgtggacgggtacaatttactctcccgcaacgggcgactaccgccaccgccaagacgtgagctaccgccgccgctccggcgtcgaatacaaaaacgaattggaacacggcccgtgggacagcctcaagctgcgctacgacaagcagcgcatcgatatgaacacttggacttgggacatcccgaaaaattacgatttgcgcggcatcaacagtgaagtttaccattcgttccggcatatccgccaaaacaccgcgcaatggactgccgattttgaaaaacaactcgacttttccaaagccgtttgggcggcgcaatacggcttgggcggcggcagaggggacaatgccaactcggattacagctatttcgtaaaactgtacgaccccaaaatcttcacttccaaccaagccaaaatcacgatgctgatcgaaagccggtcgaaatataaatttgcctattggaacaatgcgtttcacttgggcggcaacgaccgcttccgcctgaatgcgggcatacgctacgacaaaaacagcagcagcgcgaaagacgatccgaaatacaccaccgccatccgggggcagattccccatttgggttcggaacgcgcgcacgcgggcttcagctacggcacggggttcgactggcggtttaccaagcatctgcacttgttggcaaaatacagcaccggcttccgcgcaccgacttcggacgaaacctggctattgttcccgcatcctgacttttaccttaaagcaaaccccaacctgaaggcagaaaccgccaaaaacttcgagctgggacttgccggcagcggcaaagcaggaaactttaaattctccggtttccaaacccgctaccgtaattttatcgaactgacctacatgggcgtatcctcagacaagcctaacagccctaattatgcgccgatttccgacggtactgcattggtcagctcgcccgtttggcaaaaccaaaaccgctcctcggcatgggtgaaaggtttggaatttaacggcacatggaacctcgacagcatcggtttgccgcaaggcacgcacgcaggtgtcaatgtcagctacatcaaaggcaaggccaaacaaaccaacggacaggaaacccctattaacgccctttcgccatggagtgcggtttacaatctgggctacgacgctccttccaaacgttggggcatcaacgcctacgccacgcgcaccgccgccaaaaagccgtccgacaccgtccacagcaacgacgacttgaacaacccgtggccttatgccaaacacagcaaggcctatacgctgttcgacctttccgcctacctcaacatcggcaaacaggttacgctccgcgccgccgcgtacaacattaccaacaagcagtactacacttgggaatctttacgcagcatccgcgagttcggcacggtcaaccgcgttgacaacaaaacccacgccggcatccaacgctttacctcgccgggcaggagctacaatttcaccatcgaagcgaagttctaa

SEQ ID NO: 56386 - DNA, 2307 bp, Neisseria meningitidis
atggcgaaaaacctattaatcgtcgaatccccgtccaaagccaaaaccctgaaaaaatatttgggcggcgattttgaaatccttgcatcctacggacacgtccgcgacctcgtccccaaaagcggcgcggtcgatcccgacaacggctttgcgatgaaataccaactcatcagccgcaacggcaaacacgtcgatgccatcgtcgccggagccaaagaagccgaaaacatctacctcgccaccgacccggatagggaaggcgaagcgatttcttggcatcttttggaaatcctcaaatccaaacgcggcctgaaaaacatcaagccgcagcgtgtcgtgttccacgaaatcaccaaaaacgccgtgctcgatgccgttgcccatccgcgcgaaatcgaaatggacttggtcgatgcgcaacaagcccgtcgcgctttggactatttggtcggctttaacctttcgccattgttatggaaaaaaatccgccgcggtttgagcgcgggtcgtgtgcaaagtcccgctttgcgcctgatttgtgagcgtgaaaacgaaatccgcgcgtttgaagcgcaggaatattggacggtgcatctcgacagccacaaaggccgcagcaagtttaccgccaaactcgcccaatacaacggcgcgaaactcgaacaattcgacctgccgaacgaagccgcgcaagccgacgtgttgaaagaactcgaaggcaaagaggcagtcgttaccgccatcgaaaagaaaaagcgcagccgcaatcccgccgcgccgttcaccacttctaccatgcagcaggatgccgtgcgcaaactcggcttcaccaccgaccgcaccatgcgtaccgcccaacagctttatgaaggtatagacgtagggcagggcgcgatcggtctgattacctatatgcgtaccgacagcgtgaatttggcggatgaagcgttaaccgaaatccgccattacattgaaaacaaaatcggcaaagaatatctgccgagtgccgccaaacaatacaaaaccaaatccaaaaacgcccaagaagcccacgaagccatccgcccgacttccgtgtaccgcacgcccgaaagcgtcaaacccttcctgagcgccgaccagttcaaactctatcaaatgatttggcagcgcaccgtcgcctgtcagatgacgcccgccaaattcgaccaaaccaccgtcgatattaccgtcggcaaaggcgtattccgcgtaaccggacaagtgcaaaccttcgcaggcttcctcagcgtttacgaagaaagcagcgacgatgaagaaggagaagacagcaaaaaactgcccgaaatgagcgaaggcgacaaattgcccgtggacaaactctacggcgaacaacactttaccactccgccgccacgctacaacgaagccacgctggttaaagccctcgaagaatacggcatcggccgcccctcgacctacgccagcatcatctccacgctcaaagaccgcgaatacgttacccttgagcaaaaacgcttcatgcccaccgacacaggcgacatcgtcaacaaattcctgaccgaacacttcgcccaatacgtcgattaccactttaccgccaaactcgaagaccagcttgacgaaatcgccggcggcaaacgccaatggattcccttgatggacaaattctggaaaccgttcatcaaacaagtggaagaaaaagaaggcatcgaacgcgccaaatttaccacgcaggaacttgatgaaacctgcccgaaatgcggcgaacacaaactgcaaatcaagttcggcaaaatgggccgtttcgttgcgtgtgccggctatcccgagtgcagctacacgcgcaatgtcaacgaaaccgccgaagaggccgccgagcgcatcgccaaagccgaagccgaacaggccgaactcgacggacgcgagtgcccgaaatgtggcggtcgcctagtgtacaaatacagccgcaccggcagcaaattcatcggctgcgccaactatccgaaatgcaaacacgtcgagccgctggaaaaaccgaaagataccggcgtccagtgtccgcaatgcaaaaaaggcaacctcgtcgagcgcaaatcccgctacggcaaactgttttacagttgcagcacctatcccgactgcaactacgccacttggaacccgcccgttgccgaagaatgcccgaactgccattggccggtcttgaccatcaaaaccaccaaacgctggggtgtggaaaaagtctgcccgcaaaaagaatgcggctggaaagaacagatcgaaccgcctgcaccgaaagagtga

SEQ ID NO: 56387 - DNA, 126 bp, Neisseria meningitidis; identical to SEQ ID NO: 45386

SEQ ID NO: 56388 - DNA, 1518 bp, Neisseria meningitidis; identical to SEQ ID NO: 45446

SEQ ID NO: 56389 - DNA, 369 bp, Neisseria meningitidis; identical to SEQ ID NO: 39395

SEQ ID NO: 56390 - DNA, 324 bp, Neisseria meningitidis; identical to SEQ ID NO: 39252

SEQ ID NO: 56391 - DNA, 2847 bp, Neisseria meningitidis; identical to SEQ ID NO: 38622

SEQ ID NO: 56392 - DNA, 474 bp, Neisseria meningitidis; identical to SEQ ID NO: 45390

SEQ ID NO: 56393 - DNA, 1341 bp, Neisseria meningitidis; identical to SEQ ID NO: 44263

SEQ ID NO: 56394 - DNA, 435 bp, Neisseria meningitidis; identical to SEQ ID NO: 40438

SEQ ID NO: 56395 - DNA, 516 bp, Neisseria meningitidis; identical to SEQ ID NO: 46758

SEQ ID NO: 56396 - DNA, 1215 bp, Neisseria meningitidis
atggaatgggaattcaacagttattacacactgattgccgccacgctcgtgttgctggttggtaaatttctggttcaaaaaatcaaattcttacgagacttcaatattcccgagccggtcgctggcggtttggttgccgcgattatcctgtttgcgctgcacgaggcgtacggcgtgagcttcaaatttgagaaaccgctgcaaaatgcgtttatgctgattttcttcacgtccatcggcttgagcgcggatttttcccgtttgaaggcgggcggtttgccgctggtggtttttaccgcgattgtgggcggatttatcttggtgcaaaactttgtcggggtcggactggctacggctttgggtttggacccgctcatcggtctgattaccggttcggtgtcgctgacgggcggacacggtacgtcaggtgcgtggggacctaattttgaaacgcaatacggcttggtcggcgcaaccggtttgggtattgcatcggctactttcgggctggtgttcggcggcctgatcggcgggccggttgcgcgccgcctgatcaacaaaatgggccgcaaaccggttgaaaacaaaaaacaggatcaggacgacaacgcggacgacgtgttcgagcaggcaaaacgcacccgcctgattacggcggaatctgccgttgaaacgcttgccatgtttgccgcgtgtttggcgtttgccgagattatggacggcttcgacaaagaatatctgttcgacctgcccaaattcgtgtggtgtctgtttggcggcgtggtcatccgcaacatcctcaccgccgcattcaaggtcaatatgttcgaccgcgccatcgatgtgttcggcaatgcttcgctttcgcttttcttggcaatggcgttgctgaatttgaaactgtgggagctgaccggtttggcggggcctgtaaccgtgattcttgccgtacaaaccgtggtgatggttttgtacgcgacttttgttacctatgtctttatggggcgcgactatgatgcggcagtattggctgccggccattgcggtttcggcttgggtgcaacgccgacggcggtggcaaatatgcagtccgtcacgcatactttcggcgcgtcgcataaggcgtttttgattgtgcctatggtcggcgcgttcttcgtcgatttgattaatgccgcgattctcaccggttttgtgaatttctttaaaggctga

SEQ ID NO: 56397 - DNA, 510 bp, Neisseria meningitidis; identical to SEQ ID NO: 44287

SEQ ID NO: 56398 - DNA, 519 bp, Neisseria meningitidis; identical to SEQ ID NO: 44928

SEQ ID NO: 56399 - DNA, 1770 bp, Neisseria meningitidis; identical to SEQ ID NO: 42202

SEQ ID NO: 56400 - DNA, 195 bp, Neisseria meningitidis; identical to SEQ ID NO: 38181

SEQ ID NO: 56401 - DNA, 120 bp, Neisseria meningitidis; identical to SEQ ID NO: 44826

SEQ ID NO: 56402 - DNA, 246 bp, Neisseria meningitidis; identical to SEQ ID NO: 43892

SEQ ID NO: 56403 - DNA, 378 bp, Neisseria meningitidis; identical to SEQ ID NO: 39350

SEQ ID NO: 56404 - DNA, 1515 bp, Neisseria meningitidis; identical to SEQ ID NO: 45460

SEQ ID NO: 56405 - DNA, 1101 bp, Neisseria meningitidis; identical to SEQ ID NO: 45109

SEQ ID NO: 56406 - DNA, 423 bp, Neisseria meningitidis; identical to SEQ ID NO: 39423

SEQ ID NO: 56407 - DNA, 171 bp, Neisseria meningitidis; identical to SEQ ID NO: 39871

SEQ ID NO: 56408 - DNA, 606 bp, Neisseria meningitidis; identical to SEQ ID NO: 38535

SEQ ID NO: 56409 - DNA, 1848 bp, Neisseria meningitidis; identical to SEQ ID NO: 41875

SEQ ID NO: 56410 - DNA, 1794 bp, Neisseria meningitidis
atgcaattagatatagaccgcttggttgcttatttcggcggcgtgaacgcgcttgccgaagcgttgaaacagcacgatcccgaaaatgccgcgacgaccgccgccatctataaatggcgcacgcgcgggtcgctgcctttggcgcaactgcaaaagctgaccgcgcttgccgaatcgcaaggcaggccgctggatttgaatgcttttttacaaaaaaacgaatctctggagagaacagaaatgacacaggccaaccgcgttatcattttcgacaccaccctgcgcgacggcgaacaatcgcccggcgccgctatgaccaaagaggaaaaaatccgcgtcgcccgccagctggaaaaattgggtgtggacatcatcgaagcgggttttgccgctgccagcccgggcgatttcgaggcggtcaatgcgattgcgaaaaccattaccaaatcaacggtctgttcattgtcccgtgccatcgagcgggacatccgtcaggcgggtgaggccgttgcgcccgcgccgaaaaaacgcatccacaccttcatcgccaccagccccatccatatggagtacaaattgaagatgaagccgaagcaggtgattgaggcggcggtcaaagcggtgaaaatcgctcgtgaatacaccgacgatgtggaattttcctgcgaagacgcgttgcgttcggaaatcgatttccttgccgaaatctgcggcgcggtaattgaagcgggcgcgaccaccatcaatattcccgataccgtcggctattccatcccgtacaaaaccgaagaatttttccgcgaactgattgtcaaaacgcccaacggcggcaaagtcgtttggtcggcacactgccacaacgatttgggcttggcggttgccaattcgcttgccgcattaaaaggcggtgcgcgtcaggtggaatgtactgtcaacggcttgggcgaacgtgcaggcaatgcttcggttgaagaaatcgtgatggcgttgaaagtgcgccacgacttgttcggcttggaaaccggcatcgataccacgcaaatcgtgccttcgtccaaactggtgtccaccattacgggctatcccgtgcagcccaacaaagccattgtcggtgccaatgcctttttgcatgaatcgggcatccatcaggacggggtgctgaaacaccgcgaaacttacgagattatgtccgccgaatcggtcggctgggcaacaaaccgtttgagcttgggcaaattgtccggccgcaacgccttcaaaaccaagctggcggatttgggcatcgagttggaaagcgaagaggcactgaacgccgcgtttgcccgcttcaaagaactcgccgacaaaaaacgcgaaatcttcgatgaagacctgcacgcactggtatccgacgaaatgggcagcatgaatgccgagagctacaaattcatctcccaaaaaatcagcaccgaaaccggcgaagagccgcgcgccgacatcgtgttcagcatcaaaggcgaagaaaaacgcgcttccgcaaccggttccggtccggttgatgcaattttcaaagcgattgaaagcgtggcgcaaagcggcgcgactttgcagatttattccgtcaacgccgtcacgcaaggtacggaaagccaaggcgaaaccagcgtccgtctggcacgcggcaaccgcgtcgtcaacggtcagggcgcggataccgacgttttggttgccactgccaaagcctacctttccgctttgagcaaactggaatttagtgccgccaaaccgaaagcgcaaggcagcggtacgatttga

SEQ ID NO: 56411 - DNA, 192 bp, Neisseria meningitidis; identical to SEQ ID NO: 42043

SEQ ID NO: 56412 - DNA, 1029 bp, Neisseria meningitidis; identical to SEQ ID NO: 44733

SEQ ID NO: 56413 - DNA, 855 bp, Neisseria meningitidis; identical to SEQ ID NO: 38135

SEQ ID NO: 56414 - DNA, 999 bp, Neisseria meningitidis; identical to SEQ ID NO: 45517

SEQ ID NO: 56415 - DNA, 807 bp, Neisseria meningitidis; identical to SEQ ID NO: 45706

SEQ ID NO: 56416 - DNA, 273 bp, Neisseria meningitidis; identical to SEQ ID NO: 45144

SEQ ID NO: 56417 - DNA, 183 bp, Neisseria meningitidis; identical to SEQ ID NO: 38466

SEQ ID NO: 56418 - DNA, 2889 bp, Neisseria meningitidis; identical to SEQ ID NO: 45492

SEQ ID NO: 56419 - DNA, 1674 bp, Neisseria meningitidis; identical to SEQ ID NO: 44924

SEQ ID NO: 56420 - DNA, 372 bp, Neisseria meningitidis; identical to SEQ ID NO: 45376

SEQ ID NO: 56421 - DNA, 1773 bp, Neisseria meningitidis; identical to SEQ ID NO: 46989

SEQ ID NO: 56422 - DNA, 753 bp, Neisseria meningitidis
atgattaccctgccttccttaaacaatctgccgtcaaaatgggatgaaatccgccattgcctcgaaacccgggtttttgagtgcggcgttatgccgcatcccaatctgacggaatgcgaagccgggcagttcgatcgggatttttgggacaataccggctgcgcgcctgaagaatatgtccgtatccgccgagccatccgtctgttggaagtgcgttatcccgacagcttgaacgagctggtgtgtgccgccattgccacgcctttgggcgagatgctggcggtgttcggaaataagggattgtgtctgctggagtttgtcggacagaagcatttggaacaggaaattgccgccgtccaaaaagccttgcgcggacggtttgtgtttcgggaggatgagcggacgcaacttttgcggcaggaattggacttatacttcaagggtcgtctgaaaacctttgccacgcctttggagcagattggcaccgagtttcaaaagcaggcatgggacgcgctcttggcgattccttacggcgaaacgcgcagctacaaggagcaggcgcagcgtttgggcaaccccaaagccgtccgcgccgttgccgccgccaacgggcagaacaaagtatctatcctgattccctgccaccgcgtcatcggcagcgacggcaaactgaccggctacgcgggcgggttgaaccgcaaacagtttttactggctttggaacgcggcgaagttcagacggcattgttttaa

SEQ ID NO: 56423 - DNA, 2208 bp, Neisseria meningitidis; identical to SEQ ID NO: 44834

SEQ ID NO: 56424 - DNA, 576 bp, Neisseria meningitidis; identical to SEQ ID NO: 36297

SEQ ID NO: 56425 - DNA, 462 bp, Neisseria meningitidis
  misc_feature 443, 444, 445, 446, 447: 'n' is a, c, g or t
atgtgtaaaccgaattatggcggcattgtcttgttgcccttacttttggcatcttgtattggcggcaatttcggcgtgcagcctgttgtcgaatcaacgccgaccgcgtaccccgtcactttcaagtctaaggacgttcccacttcgccccctgccaaaccttctatagaaaccacgccggtcaatcaacctgccgtcggtgcggcaatgcggctgccaaggcggaatatcgcaacttttgataaaaatggtaatgaaattcccgatagtaagcaggcagaggagtatctgccgctcaaagaggaggatatcctgtttttagacggtacgccgcaagaacaggccgacaaacttaaaaagaaaatcaacgaacggtatcctgatgtgaaggttatcacatcgacaaatgaagatgcaaaatataattatcggtttgtccgtgnnnnncacacacttaattaa

SEQ ID NO: 56426 - DNA, 561 bp, Neisseria meningitidis; identical to SEQ ID NO: 37658

SEQ ID NO: 56427 - DNA, 126 bp, Neisseria meningitidis; identical to SEQ ID NO: 38379

SEQ ID NO: 56428 - DNA, 1428 bp, Neisseria meningitidis; identical to SEQ ID NO: 44654

SEQ ID NO: 56429 - DNA, 411 bp, Neisseria meningitidis; identical to SEQ ID NO: 39860

SEQ ID NO: 56430 - DNA, 1188 bp, Neisseria meningitidis; identical to SEQ ID NO: 49497

SEQ ID NO: 56431 - DNA, 915 bp, Neisseria meningitidis; identical to SEQ ID NO: 39317

SEQ ID NO: 56432 - DNA, 525 bp, Neisseria meningitidis; identical to SEQ ID NO: 45655

SEQ ID NO: 56433 - DNA, 744 bp, Neisseria meningitidis; identical to SEQ ID NO: 45966

SEQ ID NO: 56434 - DNA, 456 bp, Neisseria meningitidis; identical to SEQ ID NO: 45608

SEQ ID NO: 56435 - DNA, 1356 bp, Neisseria meningitidis; identical to SEQ ID NO: 38710

SEQ ID NO: 56436 - DNA, 1071 bp, Neisseria meningitidis; identical to SEQ ID NO: 45374

SEQ ID NO: 56437 - DNA, 864 bp, Neisseria meningitidis; identical to SEQ ID NO: 39488

SEQ ID NO: 56438 - DNA, 177 bp, Neisseria meningitidis; identical to SEQ ID NO: 38352

SEQ ID NO: 56439 - DNA, 615 bp, Neisseria meningitidis
atgacgcaatgccgtctgaaaggacaggctttcagacggcatacgacaccccagcacgcggcgcaacatcgggcgcggcgcgtgccgccccgtccgaagcctgataaacaaaccgaaaaggaaaaaggaaatacgatgaaacacatactccccctgattgccgcatccgcactctgcatttcaaccgcttcggcacatcctgccagcgaaccgcaaacccaaaacgaaaccgctatgaccacgcataccctcacctcaaaatacagttttgacgaaaccgtcagccgccttgaaaccgccataaaaagcaaagggatggacatttttgccgtcatcgaccatcaggaagccgcccaccgaaacggcttaacgatgcagccggcaaaagtcatcgtcttcggcacgcccaaagccggcacgccgctgatggtcaaagaccccgccttcgccctgcaactgcccctgcgcgtcctcgttaccgaaacagacggcaaagtacgcgccgcctataccgatacgcgcgccctcatcgccggcagccgcatcggttttgacgaagtggcaaacactttggcaaacgccgaaaaactgatacaaaaaaccgtaggcgaataa

SEQ ID NO: 56440 - DNA, 318 bp, Neisseria meningitidis; identical to SEQ ID NO: 46008

SEQ ID NO: 56441 - DNA, 2163 bp, Neisseria meningitidis; identical to SEQ ID NO: 45078

SEQ ID NO: 56442 - DNA, 735 bp, Neisseria meningitidis; identical to SEQ ID NO: 44963

SEQ ID NO: 56443 - DNA, 726 bp, Neisseria meningitidis; identical to SEQ ID NO: 39096

SEQ ID NO: 56444 - DNA, 1188 bp, Neisseria meningitidis; identical to SEQ ID NO: 45497

SEQ ID NO: 56445 - DNA, 435 bp, Neisseria meningitidis; identical to SEQ ID NO: 42997

SEQ ID NO: 56446 - DNA, 636 bp, Neisseria meningitidis; identical to SEQ ID NO: 44518

SEQ ID NO: 56447 - DNA, 540 bp, Neisseria meningitidis; identical to SEQ ID NO: 44661

SEQ ID NO: 56448 - DNA, 312 bp, Neisseria meningitidis; identical to SEQ ID NO: 39282

SEQ ID NO: 56449 - DNA, 309 bp, Neisseria meningitidis; identical to SEQ ID NO: 36432

SEQ ID NO: 56450 - DNA, 888 bp, Neisseria meningitidis; identical to SEQ ID NO: 47276

SEQ ID NO: 56451 - DNA, 768 bp, Neisseria meningitidis; identical to SEQ ID NO: 39411

SEQ ID NO: 56452 - DNA, 1662 bp, Neisseria meningitidis; identical to SEQ ID NO: 45069

SEQ ID NO: 56453 - DNA, 717 bp, Neisseria meningitidis; identical to SEQ ID NO: 44750

SEQ ID NO: 56454 - DNA, 1008 bp, Neisseria meningitidis; identical to SEQ ID NO: 45245

SEQ ID NO: 56455 - DNA, 2229 bp, Neisseria meningitidis; identical to SEQ ID NO: 46196

SEQ ID NO: 56456 - DNA, 435 bp, Neisseria meningitidis; identical to SEQ ID NO: 40019

SEQ ID NO: 56457 - DNA, 465 bp, Neisseria meningitidis; identical to SEQ ID NO: 45733

SEQ ID NO: 56458 - DNA, 720 bp, Neisseria meningitidis; identical to SEQ ID NO: 47489

SEQ ID NO: 56459 - DNA, 1041 bp, Neisseria meningitidis
atgaacacacccatccccttctccgaacggctcatccgctggcaaaaacaacacggtcgccaccacctcccttggcaggtcaaaaacccttattgcgtctggctttccgaaatcatgctccagcaaacgcaagtcgccaccgtgttggactactatccgcgcttcttagaaaaattcccgaccgttcagacgcttgccgccgcgccgcaagacgaagtgttgtcgttgtgggcgggcttgggctattacagccgcgcgcgcaacctgcacaaagccgcgcaacaagtcgtcaggcaattcggcggcacgtttccgtcggagcgcaaagacttggaaaccctctgcggcgtaggcagaagcaccgccgccgccatttctgccttctccttcaaccgccgcgaaaccattttggacggcaacgtcaaacgcgtactctgccgcgtgttcgcccgcgacggcaatccgcaggacaaaaaatttgaaaactcgctctggacacttgccgaaagcctgctgccgtctgaaaacgccgatatgcctgcctatacacaaggtttgatggatttgggcgcgaccgtgtgcaaacggacgaaacccttgtgccaccaatgcccgatggcggacatctgcgaagcaaaaaagcaaaaccgcaccgccgagctgccgcgcaaaaaaaccgccgccgaagtaccgaccctgccgctttactggctgattgtccgcaaccgggacggcgcgattttgctggaaaaacgccccgccaaaggcatttggggcgggctgtattgcgtgccgtgttttgaaagtttgaacgggctttccgactttgccgccaaattctccctgaccatggcagatatggacgaacaaaccgccctgacccaccgtctgacgcaccggctgctgatgattacgccgtttgaaggacaaatgccgtctgaaagcccttcagacggcatttggataaagccggcgcatttgaaagattacggcctgcccaagcctttggaaatttatttaaacggtaataggttagaataa

SEQ ID NO: 56460 - DNA, 1104 bp, Neisseria meningitidis; identical to SEQ ID NO: 44519

SEQ ID NO: 56461 - DNA, 156 bp, Neisseria meningitidis; identical to SEQ ID NO: 44824

SEQ ID NO: 56462 - DNA, 2607 bp, Neisseria meningitidis; identical to SEQ ID NO: 45044

SEQ ID NO: 56463 - DNA, 1125 bp, Neisseria meningitidis; identical to SEQ ID NO: 44526

SEQ ID NO: 56464 - DNA, 369 bp, Neisseria meningitidis
atgcgtcattacgagatcgtgtttatcgttcatcctgatcaaagcgagcaagtgcctgctatggttgaacgttacaaaaccatgattgccgaagcaaacggtaagattcaccgtttggaagattggggtcgccgccaactggcttacccgattaacaaaatccataaagcccattacgttttgatgaacatcgaaaccactcccgaagtggttgaagagctggaaaccgcattccgcttcaatgatgccgtattgcgccatctaaccatcaaaaccaaacacgccgttactgaagcatcccctatgttgggtggtgaaaaggctaagaacctgttgatcggtgcgtctgaagaagcggtcgcccaataa

SEQ ID NO: 56465 - DNA, 1134 bp, Neisseria meningitidis; identical to SEQ ID NO: 38916

SEQ ID NO: 56466 - DNA, 516 bp, Neisseria meningitidis; identical to SEQ ID NO: 39413

SEQ ID NO: 56467 - DNA, 918 bp, Neisseria meningitidis; identical to SEQ ID NO: 37376

SEQ ID NO: 56468 - DNA, 903 bp, Neisseria meningitidis; identical to SEQ ID NO: 38685

SEQ ID NO: 56469 - DNA, 564 bp, Neisseria meningitidis; identical to SEQ ID NO: 36962

SEQ ID NO: 56470 - DNA, 3210 bp, Neisseria meningitidis; identical to SEQ ID NO: 46855

SEQ ID NO: 56471 - DNA, 435 bp, Neisseria meningitidis; identical to SEQ ID NO: 46786

SEQ ID NO: 56472 - DNA, 1344 bp, Neisseria meningitidis
atggaagataagcaagggatgaaaaaggcggttgccggcgtgatgacggacgcgtcatcggacggcaggaagccggcaaccgcttcaaatcttccccccttatctaacagggggggtacagaaaccgaaacggcgggcagggttcaagaagtcttcgagtgttatgaaaagtacataacagacggcaaaggaaaccttttaggcgttccgcttcgtcgcggtgtatctgattcggcgttcatcgatcaaattagcttttcatttcatgaaaaaacctttttcgataaatacggcgttcgtgtaagtcttttggaagacgaagattttattcgcgccgcgtccatgctcgccgaagaagttttcggtttctgtatctacaaagaatccaaaggctcgggcggtcgtttctatgagcgctgttggttgatgggttcggaagacgtcctatacggtcgcgtccattttggcggacaaaacaataccatccttttcgaactgaccggcaccggttgcggcgtcgcaaaagaaggctgggaatcacgacttttcgcattcctgactaatgcaatccgcccaaaaatcacacgcgttgacatcgcaaaagactttttcaacggcgaatacagcccgaaccaagcccgtgaagaccgaaataaaggtatgtttacctgtcatcacgtcaaaccaaaaggcgaatgtttggggtcagattgggaagaagacgatgaagccaaaatgaccaaaggcaagacctatggtatcggctcccgtgaatcgtccaaatatgtccgcgtctatgaaaaaggcaagcagttgggcgataaaacaagcacatggacgcgctttgaaattgaattcaaagcaaaagacatcgttatccctttcgaagttttgcagaatccgggcgaatatttcggcggcgcatatccgatttgcgaacgattcgcccaaaaggcaacgcgcatacacgcggttaaggaagataaggtcatttcagccgaccgctaccttgaatgggtaaaaaaacagttcggacgtgcggcaaacggtctgaaattcatttttcccgaattggacaaagccaaactgtttgaactgattgagccgagtcatcacaagctgcccaagtctttggctcccgaagcctacgactgcgcctttttgaaagctcaagccattcatgaacagcccgcattcaaaccgtacaaagacccttactatatgtacgaatattacgagaatcttgaaaaacagcttgaacagcaaaaacacgtcaacaatgaagaaagctataacaacttcatttacgacaaattcgcaagactaccgatttcatgggcttaa

SEQ ID NO: 56473 - DNA, 657 bp, Neisseria meningitidis; identical to SEQ ID NO: 45111

SEQ ID NO: 56474 - DNA, 240 bp, Neisseria meningitidis; identical to SEQ ID NO: 39921

SEQ ID NO: 56475 - DNA, 1134 bp, Neisseria meningitidis; identical to SEQ ID NO: 44509

SEQ ID NO: 56476 - DNA, 2130 bp, Neisseria meningitidis; identical to SEQ ID NO: 45199

SEQ ID NO: 56477 - DNA, 723 bp, Neisseria meningitidis; identical to SEQ ID NO: 44871

SEQ ID NO: 56478 - DNA, 267 bp, Neisseria meningitidis; identical to SEQ ID NO: 39635

SEQ ID NO: 56479 - DNA, 393 bp, Neisseria meningitidis; identical to SEQ ID NO: 45925

SEQ ID NO: 56480 - DNA, 723 bp, Neisseria meningitidis; identical to SEQ ID NO: 38771

SEQ ID NO: 56481 - DNA, 840 bp, Neisseria meningitidis; identical to SEQ ID NO: 45353

SEQ ID NO: 56482 - DNA, 687 bp, Neisseria meningitidis
atgagatggattcttagttttagcagcaaaaaaaccgataagaaacagcatactgatttggaaggcatcggggaatacgccctatttcttttgataattgtttgtattttaaatagaaaatttgtcatgccgacagcttttgcatacaatgcacgcatcccgaatagcgacacagatgctgttcagacataccgaaaaccaagttacagaaagagagatattatgcaaggcaatcaagctgttgttgattatatgaacgaattgctgtctggcgagctggcggcacgcgaccaatactttatccactcccgcctctactccgaatggggctacaccaaactttttgaacgtctcaaccacgagatggaagaagaaaccacacacgccgaagacttcatccgccgcatcctgatgctgggcggtacgccgaaaatggcacgcgccgaactgaatatcggcacggacgtggtttcctgcctcaaagccgacctgcaaaccgaatatgaagtacgtgatgcgttgaaaaaaggcatcaaactgtgcgaagaggctcaagactatgttacgcgcgacctgatggttgcccaactgaaagataccgaagaagaccacgcccactggctggaacagcagctgcgcctgatcgagctgattggcgaaggcaactactaccaaagccaactgtaa

SEQ ID NO: 56483 - DNA, 585 bp, Neisseria meningitidis; identical to SEQ ID NO: 45519

SEQ ID NO: 56484 - DNA, 210 bp, Neisseria meningitidis; identical to SEQ ID NO: 43366

SEQ ID NO: 56485 - DNA, 390 bp, Neisseria meningitidis; identical to SEQ ID NO: 44937

SEQ ID NO: 56486 - DNA, 1413 bp, Neisseria meningitidis; identical to SEQ ID NO: 45127

SEQ ID NO: 56487 - DNA, 324 bp, Neisseria meningitidis; identical to SEQ ID NO: 38148

SEQ ID NO: 56488 - DNA, 273 bp, Neisseria meningitidis; identical to SEQ ID NO: 45468

SEQ ID NO: 56489 - DNA, 441 bp, Neisseria meningitidis; identical to SEQ ID NO: 47081

SEQ ID NO: 56490 - DNA, 120 bp, Neisseria meningitidis; identical to SEQ ID NO: 39028

SEQ ID NO: 56491 - DNA, 558 bp, Neisseria meningitidis; identical to SEQ ID NO: 45261

SEQ ID NO: 56492 - DNA, 1914 bp, Neisseria meningitidis; identical to SEQ ID NO: 44200

SEQ ID NO: 56493 - DNA, 2451 bp, Neisseria meningitidis; identical to SEQ ID NO: 45869

SEQ ID NO: 56494 - DNA, 648 bp, Neisseria meningitidis; identical to SEQ ID NO: 44828

SEQ ID NO: 56495 - DNA, 363 bp, Neisseria meningitidis; identical to SEQ ID NO: 45230

SEQ ID NO: 56496 - DNA, 792 bp, Neisseria meningitidis
atgaatgtttattttctcggcggcggcaatatggcggctgccgttgcgggcggattggtcaaacaaggcggttaccgcatctatatagccaatcggggtgcggaaaaacgcgaacgtttggaaaaagagttgggggtcgaaacttcggcaaccctgccggagcttcattccgacgatgttttaatccttgccgtcaaaccgcaggatatggaagccgcgtgcaaaaatatctgcaccaacggcgcattggtgctttctgttgcagctggattgtcggttgatacgctcagccgttacctcgggggaagccgccgcattgtccgggttatgccgaatacacccgggaaaataggactgggtgtctccggtatgtatgccgaagcggaagtatcggaaacagactgcaagattgccgatcgaatcatgaaatctgtcggtttgaccgtttggttggaagatgaagtgcaaatgcacagcatcaccggcatcagcggcagcgggccggcttatgtgttttatctgctggatgctttgcaaaatgccgccatccgacaagggtttgatatggcagaagcacgcgcgctcagtctggcaacgtttaaaggagcggttgcccttgccgagcagacgggtgaagatttcgagaagcttcaaaaaaatgtaacgtcaaaaggcgggacaacccacgaagccgtggaagccttcaggcggcatcgtgtcgccgaagccataagtgagggcgtttgtgcctgtgtgcgccgttcgcaggaaatggaacggcaatatcaataa

SEQ ID NO: 56497 - DNA, 369 bp, Neisseria meningitidis; identical to SEQ ID NO: 45568

SEQ ID NO: 56498 - DNA, 966 bp, Neisseria meningitidis; identical to SEQ ID NO: 46197

SEQ ID NO: 56499 - DNA, 1512 bp, Neisseria meningitidis; identical to SEQ ID NO: 44859

SEQ ID NO: 56500 - DNA, 960 bp, Neisseria meningitidis
atgtccaaaaaaaccaaacaagaactcgaaaacaacaaactcagcaaacgcctgcgccacgccgtcggcgacgcgattaacgatttcaatatgatcgagccggacgacaaaatcatggtctgcctctccggcggcaaagacagctatgccctgttagacatcctgcgccagctccaagccagcgcgccgattgattttgaactggtcgccgtcaatctcgaccaaaagcagccgggtttccccgaagaagtattgccgacctatctcgaaagcataggcgtgccgtacaaaatcgtcgaagaagacacctactccaccgtcaaacgcgtattagacgaaggcaaaacgacttgttcgctgtgcagccgcctgcgccgcggcatcctctaccgcaccgcaaaagaattgggctgcaccaaaatcgccttaggacaccaccgtgacgacatccttgccaccatgtttttaaatatgttttacggtggaaaactcaaagccatgccgcccaagctggtgagcgacaacggcgcacacatcgtcatccgtccgctggcgtatgtaaaagaaaaagacttaatcaaatacgccgaattaaaacaattccccatcatcccgtgcaacctctgcggctcgcaacccaacctgcaacgccaagtcatcggcgatatgctgcgcgattgggacaaacgctttcccggccgcatcgaatcgatgttctccgccctgcaaaacgtcgtcccttcccaccttgccgataccgaactcttcgactttgccggattggaacgcggtcaaaccctgaaacacggcggcgatttggcgtttgacagcgaaaaaatgcccgaacgtttttcagacggcagcgaagaagacgaaagcgaaatcaaaatcgcgccgcaaaaagccgaacgcaaagtcatcaacattctggcgaacaagccgaaaacctgcggcgcgtaa

SEQ ID NO: 56501 - DNA, 1215 bp, Neisseria meningitidis
atgagtgaagttgaatatttctcacactttatatcggacggaaaagggaagcttttagaaattccgcagcgaagaggtaagcaagacggggtttttgttgattggatttcattcacattccatgaagatactttactgaaagtttccggttgccctttattttctgatgctgaatacatgtatgtattaagcagaaagctggaagaaattctaggttttggcataacgcgcaaatgcaaatcaaggggcaacaaattctatgaatccatgtataggttaggttcggatgatgttgattatggagaggtgcatttcggaggtcagcgcaatactgttttagttgagttgaaaggtactggttgcagcgttgcaagtccgggttgggagttgaggctaaagcagtttctcgatgattcgataaggacaagaataacgcgaattgacctagcacttgatttttttgatggagagtacacgccggatcaggcgttgttagatcacgataatggtttttttgataacagcaatcaaaggccgaaatctgaaacgatcggtacggcttggcggaatgaggacgggagcggcaagacattttatgtaggtcgcaagaaaaattctcgttttgttcgtgtttatgagaaaggcaggcagcttggagataaagaaagcaaatgggtaaggttcgagatccagtttaattatggagatatagaaatacccttggatattttaataaatcagggttcgtatttctgtggagcttttccaatttgtagaaaatttaaaaatatgccggttcccgaaaggtttgatcagagaaagaaaacgcttaatttaactttcgagcataaattgcattacgcgaaaaacgcggttggaaaactggtcaatttcatgattgaaatgggttttgataatagcgaaattgtggaatctttaaaggcagattcgggatttcccaaaggattagaacctgaaaaatatgctctggaaatgttaagggacggtttgaaacacggttttattcatgaacagccggatattgatttggaaattgaacttgatgaattgggggttattgcttttaaaaattctgacaaattcgatagggaaaaaaggctttttagtcctgattatgatgccgagaaagaaaggaaatatcaggattatctagatgaagtttatcatcaaaatgtaaattatgattatttttaa

SEQ ID NO: 56502 - DNA, 204 bp, Neisseria meningitidis; identical to SEQ ID NO: 38753

SEQ ID NO: 56503 - DNA, 1362 bp, Neisseria meningitidis; identical to SEQ ID NO: 45822

SEQ ID NO: 56504 - DNA, 354 bp, Neisseria meningitidis; identical to SEQ ID NO: 45508

SEQ ID NO: 56505 - DNA, 729 bp, Neisseria meningitidis; identical to SEQ ID NO: 44242

SEQ ID NO: 56506 - DNA, 531 bp, Neisseria meningitidis; identical to SEQ ID NO: 38478

SEQ ID NO: 56507 - DNA, 1218 bp, Neisseria meningitidis
atgatgaaaatcaaagccctgatgattgccgccgcattgctggcagcagccgatgtccacgccgcaccgcaaaaggcaaaaaccgcatccgccaaagctgccaaagctgccaaagctgccaaagctgccaaagctgccaaagctgccaaagttgccaaagttgccaaagttgccaaagttgccaaagttgccaaagttgccaaagttgccaaagttgccaaagttgccaaagttgccaaagttgccaaagttgccaaagttgccaaagttgccaaagttgccaaagttgccaaagttgccaaagttgccaaagttgccaaagttgccgccacggcgcaaaaagaagccgcacccgcacaacagcagggcggtatccgcttttcagacggcattgccgccgttgccgacaacgaagtcatcacgcgccgccggcttgccgaagccgtttccgaagccaaagccaacctgcccaaagacgcgcagataagcgaatccgagctgtcccgacaggtgctgatgcagcttgtcaaccaatccctgattgtacaggcgggcaaacgccgcaacattcaagcaagcgaagcggaaatcgatgccgtcgtcgcaaaaaatcccgccctcaaaaacctcagccccgcccaacgccgcgattttgccgacaacatcattgccgaaaaagtccgccagcaggcagtgatgcagaacagccgcgtgagcgaagctgaaatcgatgccttcctcgagcaggcgcaaaaacaaggcatcaccctgcccgaaggcgcaccgttgcgccaataccgcgcccaacacatcctgattaaagctgacagcgaaaacgccgccgtcggcgcggaaagcaccatccgcaaaatctacggagaggcccgcagcggcacagacttttccagcctggcgcgccaatattcgcaagacgcgagcgcgggcaacggcggagatttgggctggtttgccgacggcgtgatggttcccgcctttgaagaagccgtccacgcgctcaaacccggacaggtcggcgcgcccgtccgcacccaattcggctggcatatcatcaaattgaacgaagtgcgcgatgccggcacacctcaggaacgtatccgcaattccgtgcggcaatacatcttccaacaaaaagccgaacaggcaaccgtcaacctgttgcgtgacctgcattccggcgcgtatgtcgacatccgctaa

SEQ ID NO: 56508 - DNA, 951 bp, Neisseria meningitidis; identical to SEQ ID NO: 44968

SEQ ID NO: 56509 - DNA, 456 bp, Neisseria meningitidis; identical to SEQ ID NO: 47629

SEQ ID NO: 56510 - DNA, 642 bp, Neisseria meningitidis; identical to SEQ ID NO: 38780

SEQ ID NO: 56511 - DNA, 843 bp, Neisseria meningitidis; identical to SEQ ID NO: 37164

SEQ ID NO: 56512 - DNA, 2190 bp, Neisseria meningitidis; identical to SEQ ID NO: 47011

SEQ ID NO: 56513 - DNA, 1224 bp, Neisseria meningitidis; identical to SEQ ID NO: 45084

SEQ ID NO: 56514 - DNA, 1386 bp, Neisseria meningitidis
atggacggctggacacagacgctgtccgcgcaaaccctgttgggcatttcggcggcggcaatcatcctcattctgattttaatcgtcaaattccgcatccacgcgctgctgacactggtcatcgtcagcctgctgacggctttggcaaccggtttgcccacaggcagcattgtcaacgacgtactggtcaaaaacttcggcggcacgctcggcggcgtggcgcttctggtcggcctgggcgcgatgctcggacgtttggtcgaaacatccggcggcgcacagtcgctggcggacgcgctgatccggatgttcggcgaaaaacgcgcaccgttcgcgctgggcgttgcctcgctgattttcggcttcccgattttcttcgatgccggactaatcgtcatgctgcccatcgtgttcgccaccgcacggcgcatgaaacaggacgtactgcccttcgcgcttgcctccatcggcgcattttccgtcatgcacgtcttcctgccgccccatccgggcccgattgccgcttccgaattttacggcgcgaacatcggccaagttttgattttgggtctgccgaccgccttcatcacatggtatttcagcggctatatgctcggcaaagtgttggggcgcaccatccatgttcccgttcccgaactgctcagcggcggcacgcaagacaacgacctgccgaaagaacctgccaaagcaggaacggtcgtcgccatcatgctgattcccatgctgctgattttcctgaataccggcgtatcggccctcatcagcgaaaaactcgtaagtgcagacgaaacctgggttcagacggcaaaaataatcggttcaacaccgatcgcccttctgatttccgtattggtcgcactgtttgtcttgggacgcaaacgcggcgaaagcggcagcgcgttggaaaaaaccgtggacggcgcactcgcccccgtctgttccgtgattctgattaccggcgcgggcggtatgttcggcggcgttttgcgcgcttccggcatcggcaaggcactcgccgacagcatggcggatttgggcattcccgtccttttgggctgtttccttgtcgccttggcactgcgtatcgcgcaaggttcggcaaccgtcgccctgaccaccgctgccgcgctgatggctcctgccgttgccgccgccggctttaccgactggcagctcgcctgtatcgtattggcaacggcggcaggttcggtcggttgcagccacttcaacgactccggcttctggctggtcggccgcctcttggacatggacgtaccgaccacgctgaaaacctggacggtcaaccaaaccctcatcgcactcatcggctttgccttgtccgcactgctgttcgccatcgtctga

SEQ ID NO: 56515 - DNA, 159 bp, Neisseria meningitidis
atgataggggcggtttcgtttgaatcggcgcaccgggatgaatgcccccgcgccgtcccgataccggtttgccggttgttccgtatcggttgccgccgtgaaatgacggacggatacaggaatggcggcaggcgtaaatgggaggaaatgaccgattga

SEQ ID NO: 56516 - DNA, 300 bp, Neisseria meningitidis
atgaccgcatccatgtacatccttttgctgcttgccttgatttttgccaacgcccccttcctcacgaccaggctgttcggcatcgtaccgctcaagcgcaaacatttcgggcaccacttgatcgagctggcggcaggtttcgcgctgaccgccgttcttgcctacatcctcgaatcccgtgcgggagcggtacacgatcagggttgggagttttacgccaccgtagtctgcctgtacctgatttttgcgtttccctgtttcgtgtggcggtatttttggcacacgcgcaacagggaatag

SEQ ID NO: 56517 - DNA, 1488 bp, Neisseria meningitidis; identical to SEQ ID NO: 39015

SEQ ID NO: 56518 - DNA, 567 bp, Neisseria meningitidis; identical to SEQ ID NO: 45719

SEQ ID NO: 56519 - DNA, 438 bp, Neisseria meningitidis; identical to SEQ ID NO: 39862

SEQ ID NO: 56520 - DNA, 1911 bp, Neisseria meningitidis; identical to SEQ ID NO: 45163

SEQ ID NO: 56521 - DNA, 345 bp, Neisseria meningitidis
  misc_feature 8, 9, 10, 11, 12: 'n' is a, c, g or t
gtgtgtgnnnnnacggggcgcggagaaggcagcggtaaaggtagcggcggtgtcaaaggcgaacacggggaaggagccggcagcagcaaaggcaatcctttacgcgccaacggcagcattccgcgcccggcttatcccacgctttctatggagaatgacgagcagggtacggttgttttgagcgttttggtttctccgggcggtcatgtcgagtccgttaaaatcgtgaaaagcagtggtttttctcggttggacaatgcggcacgcaaggcggcgcaaaacgggcattttcaagccaatgcctggacggagtttaaagtccccgtcaagtttgaattgaattag

SEQ ID NO: 56522 - DNA, 795 bp, Neisseria meningitidis; identical to SEQ ID NO: 45641

SEQ ID NO: 56523 - DNA, 2604 bp, Neisseria meningitidis; identical to SEQ ID NO: 44767

SEQ ID NO: 56524 - DNA, 375 bp, Neisseria meningitidis; identical to SEQ ID NO: 45132

SEQ ID NO: 56525 - DNA, 447 bp, Neisseria meningitidis; identical to SEQ ID NO: 44373

SEQ ID NO: 56526 - DNA, 339 bp, Neisseria meningitidis; identical to SEQ ID NO: 46582

SEQ ID NO: 56527 - DNA, 1035 bp, Neisseria meningitidis; identical to SEQ ID NO: 44819

SEQ ID NO: 56528 - DNA, 717 bp, Neisseria meningitidis; identical to SEQ ID NO: 45129

SEQ ID NO: 56529 - DNA, 747 bp, Neisseria meningitidis; identical to SEQ ID NO: 44746

SEQ ID NO: 56530 - DNA, 642 bp, Neisseria meningitidis; identical to SEQ ID NO: 45998

SEQ ID NO: 56531 - DNA, 684 bp, Neisseria meningitidis; identical to SEQ ID NO: 38600

SEQ ID NO: 56532 - DNA, 335 bp, Neisseria meningitidis; identical to SEQ ID NO: 49909

SEQ ID NO: 56533 - DNA, 480 bp, Neisseria meningitidis
atgaaacactttccatccaaagtactgaccacagccatccttgccactttctgtagcggcgcactggcagccacaaacgacgacgatgttaaaaaagctgccactgtggccattgctgctgcctacaacaatggccaagaaatcaacggtttcaaagctggagagaccatctacgacattgatgaagacggcacaattaccaaaaaagacgcaactgcagccgatgttgaagccgacgactttaaaggtctgggtctgaaaaaagtcgtgactaacctgaccaaaaccgtcaatgaaaacaaacaaaacgtcgatgccaaagtaaaagctgcagaatctgaaatagaaaagttaacaaccaagttagcagacactgatgccgctctggatgcaaccaccaacgccttgaataaattgggagaaaatataacgacatttgctgaagagactagggcgtgtcctcaatttaacttagcatga

SEQ ID NO: 56534 - DNA, 918 bp, Neisseria meningitidis; identical to SEQ ID NO: 44688

SEQ ID NO: 56535 - DNA, 1338 bp, Neisseria meningitidis; identical to SEQ ID NO: 44441

SEQ ID NO: 56536 - DNA, 1980 bp, Neisseria meningitidis; identical to SEQ ID NO: 45797

SEQ ID NO: 56537 - DNA, 1008 bp, Neisseria meningitidis; identical to SEQ ID NO: 46762

SEQ ID NO: 56538 - DNA, 1065 bp, Neisseria meningitidis; identical to SEQ ID NO: 39464

SEQ ID NO: 56539 - DNA, 1110 bp, Neisseria meningitidis; identical to SEQ ID NO: 44734

SEQ ID NO: 56540 - DNA, 306 bp, Neisseria meningitidis; identical to SEQ ID NO: 46018

SEQ ID NO: 56541 - DNA, 1101 bp, Neisseria meningitidis; identical to SEQ ID NO: 37731

SEQ ID NO: 56542 - DNA, 1164 bp, Neisseria meningitidis
ttgccgtatttgttggaacaggatatgagtcaaaatgcctcggtgggcattgtaacgccccaaaaaattccgtttgaaatgccgctggttttggaaaacggtaaaactttgccgcgtttcgatctgatgattgaaacctacggcgagctgaatgccgaaaaaaataatgcggttttaatctgtcatgcgctgtcaggcaaccatcatgttgcgggcaggcattcggcggaggataaatatacgggctggtgggacaatatggtaggacccggcaaaccgattgatacggaacgttttttcgtggtcggtttgaacaatctgggcggctgtgacggcagcagcggacctttgtcgatcaatcctgaaacgggtagggaatacggcgcggattttccggtggttacggtgaaggactgggtaaaatcacaagccgcgcttgccgactatctcggcatcgggcaatgggcggcggttgtcggcggcagtttgggcggtatgcaggctttgcagtgggcgatttcctatcccgaacgcgtgcgccatgccttagtgattgcgtctgcgccgaaactgtccacgcaaaatatcgcgttcaacgatgtggcgcgtcaggcgattttgaccgaccccgatttcaacgaaggacattaccgcagccataataccgttcctgcacggggcttgcggattgcccgcatgatggggcacattacctatcttgccgaagacggtttgggcaaaaaattcggacgcgatttgcgttccaacggctatcaatacggttatggcgttgaatttgaagtagaatcctatctgcgctatcagggcgacaaattcgtcgggcggtttgatgccaacacctatttgctgatgaccaaagctttggactatttcgatccggcggcggatttcggcaacagcctgacccgcgccgtgcaggatgtgcaggcaaaattctttgtcgccagcttcagcaccgattggcgtttcgcgcccgaacgttcgcacgaactggtcaaggccctgattgccgcccaaaaatccgtgcagtatatcgaagtcaaatccgcacacgggcacgatgcctttttaatggaagacgaagcctatatgcgtgcggtcgccgcctatatgaacaacgtttataaggaatgtcagcaatga

SEQ ID NO: 56543 - DNA, 885 bp, Neisseria meningitidis; identical to SEQ ID NO: 44343

SEQ ID NO: 56544 - DNA, 693 bp, Neisseria meningitidis; identical to SEQ ID NO: 42313

SEQ ID NO: 56545 - DNA, 441 bp, Neisseria meningitidis; identical to SEQ ID NO: 38543

SEQ ID NO: 56546 - DNA, 444 bp, Neisseria meningitidis; identical to SEQ ID NO: 45783

SEQ ID NO: 56547 - DNA, 1224 bp, Neisseria meningitidis; identical to SEQ ID NO: 39212

SEQ ID NO: 56548 - DNA, 726 bp, Neisseria meningitidis; identical to SEQ ID NO: 43300

SEQ ID NO: 56549 - DNA, 480 bp, Neisseria meningitidis; identical to SEQ ID NO: 46449

SEQ ID NO: 56550 - DNA, 777 bp, Neisseria meningitidis; identical to SEQ ID NO: 44372

SEQ ID NO: 56551 - DNA, 210 bp, Neisseria meningitidis; identical to SEQ ID NO: 44278

SEQ ID NO: 56552 - DNA, 1260 bp, Neisseria meningitidis; identical to SEQ ID NO: 38128

SEQ ID NO: 56553 - DNA, 336 bp, Neisseria meningitidis; identical to SEQ ID NO: 44858

SEQ ID NO: 56554 - DNA, 1344 bp, Neisseria meningitidis; identical to SEQ ID NO: 39032

SEQ ID NO: 56555 - DNA, 2388 bp, Neisseria meningitidis; identical to SEQ ID NO: 45510

SEQ ID NO: 56556 - DNA, 225 bp, Neisseria meningitidis; identical to SEQ ID NO: 45725

SEQ ID NO: 56557 - DNA, 507 bp, Neisseria meningitidis; identical to SEQ ID NO: 55900

SEQ ID NO: 56558 - DNA, 660 bp, Neisseria meningitidis; identical to SEQ ID NO: 44402

SEQ ID NO: 56559 - DNA, 522 bp, Neisseria meningitidis; identical to SEQ ID NO: 39913

SEQ ID NO: 56560 - DNA, 780 bp, Neisseria meningitidis; identical to SEQ ID NO: 39113

SEQ ID NO: 56561 - DNA, 174 bp, Neisseria meningitidis; identical to SEQ ID NO: 38579

SEQ ID NO: 56562 - DNA, 207 bp, Neisseria meningitidis; identical to SEQ ID NO: 39619

SEQ ID NO: 56563 - DNA, 876 bp, Neisseria meningitidis; identical to SEQ ID NO: 44554

SEQ ID NO: 56564 - DNA, 159 bp, Neisseria meningitidis; identical to SEQ ID NO: 44687

SEQ ID NO: 56565 - DNA, 330 bp, Neisseria meningitidis; identical to SEQ ID NO: 44406

SEQ ID NO: 56566 - DNA, 1254 bp, Neisseria meningitidis; identical to SEQ ID NO: 38589

SEQ ID NO: 56567 - DNA, 489 bp, Neisseria meningitidis; identical to SEQ ID NO: 45541

SEQ ID NO: 56568 - DNA, 1377 bp, Neisseria meningitidis; identical to SEQ ID NO: 45407

SEQ ID NO: 56569 - DNA, 423 bp, Neisseria meningitidis; identical to SEQ ID NO: 44835

SEQ ID NO: 56570 - DNA, 456 bp, Neisseria meningitidis; identical to SEQ ID NO: 45645

SEQ ID NO: 56571 - DNA, 798 bp, Neisseria meningitidis; identical to SEQ ID NO: 38316

SEQ ID NO: 56572 - DNA, 2751 bp, Neisseria meningitidis; identical to SEQ ID NO: 45512

SEQ ID NO: 56573 - DNA, 813 bp, Neisseria meningitidis
gtgccgtctgaaaccgtttcagacggcacggacaaaccgcccccactcaatcctgccgtgttagcgtgtataatcaggcattctatccgaaattcacaacaggtcagcaatatgtctttgaaaacagtagccgttatcggcgcaatggaacaagaaatcgagcttttgcgcgagatgatggaaaatgtcaaagccgtctctttcggcaagtttaccgcctatgaaggcgaattagcgggaaaacgcatggtgcttgcattgagcggcatcggcaaggtcaacgcggcggttgcaacggcttggattatccgtgaattcgcagcggactgcgtcatcaacaccggcagcgcgggcggtttgggcaagggtttgaaagtcggcgacgtggtgattggcacggaaaccgcacaccacgatgtcgatgtaaccgcattcggctatgtttggggacaagtgccgcaactgcccgccgtattcgtttcagacgacctcttggtcggcaaggcaaaacgggcggcgcggacgtttgaaggcgcggcggtagaacaaggtctgattgtcagcggcgaccgcttcgtccacagcagcgaaggcgtggcggaaatccgcaagcacttccccgaagttaaggcggtagaaatggaagcggcggcaatcgcccaaacctgtcatcagttggaaacgcctttcgtcatcatccgcgcggtttccgattcggcagatgaaaaagcagacatcagctttgacgaatttttgaaaacggcggcggcaagttctgcaaaaatggtggcagaaatcgtcaaatctttataa

SEQ ID NO: 56574 - DNA, 1116 bp, Neisseria meningitidis; identical to SEQ ID NO: 44900

SEQ ID NO: 56575 - DNA, 465 bp, Neisseria meningitidis; identical to SEQ ID NO: 38372

SEQ ID NO: 56576 - DNA, 1470 bp, Neisseria meningitidis; identical to SEQ ID NO: 51067

SEQ ID NO: 56577 - DNA, 1671 bp, Neisseria meningitidis; identical to SEQ ID NO: 44650

SEQ ID NO: 56578 - DNA, 561 bp, Neisseria meningitidis; identical to SEQ ID NO: 38271

SEQ ID NO: 56579 - DNA, 858 bp, Neisseria meningitidis; identical to SEQ ID NO: 38769

SEQ ID NO: 56580 - DNA, 567 bp, Neisseria meningitidis; identical to SEQ ID NO: 44975

SEQ ID NO: 56581 - DNA, 1812 bp, Neisseria meningitidis; identical to SEQ ID NO: 45089

SEQ ID NO: 56582 - DNA, 1302 bp, Neisseria meningitidis; identical to SEQ ID NO: 44938

SEQ ID NO: 56583 - DNA, 426 bp, Neisseria meningitidis; identical to SEQ ID NO: 39901

SEQ ID NO: 56584 - DNA, 915 bp, Neisseria meningitidis; identical to SEQ ID NO: 44950

SEQ ID NO: 56585 - DNA, 279 bp, Neisseria meningitidis; identical to SEQ ID NO: 36688

SEQ ID NO: 56586 - DNA, 774 bp, Neisseria meningitidis; identical to SEQ ID NO: 44346

SEQ ID NO: 56587 - DNA, 558 bp, Neisseria meningitidis; identical to SEQ ID NO: 41264

SEQ ID NO: 56588 - DNA, 672 bp, Neisseria meningitidis; identical to SEQ ID NO: 45461

SEQ ID NO: 56589 - DNA, 231 bp, Neisseria meningitidis
atgaacaagccgtttatcacgcaggcgcagttggcactttataaatatcagccgtccagcaagtattttgggcagtcgatggcattaattgcgtctaaggaatttgaagagtttgtaagaaatgtaaaagaatacgacgtaatagaatgtttctcttattttttaaataagagggtaacgcataatatttggaaaatttatttttctgatgagtctagggcgtgtccctaa

SEQ ID NO: 56590 - DNA, 966 bp, Neisseria meningitidis; identical to SEQ ID NO: 44673

SEQ ID NO: 56591 - DNA, 270 bp, Neisseria meningitidis; identical to SEQ ID NO: 36672

SEQ ID NO: 56592 - DNA, 864 bp, Neisseria meningitidis; identical to SEQ ID NO: 37982

SEQ ID NO: 56593 - DNA, 1131 bp, Neisseria meningitidis; identical to SEQ ID NO: 39043

SEQ ID NO: 56594 - DNA, 1113 bp, Neisseria meningitidis; identical to SEQ ID NO: 45010

SEQ ID NO: 56595 - DNA, 3921 bp, Neisseria meningitidis; identical to SEQ ID NO: 46903

SEQ ID NO: 56596 - DNA, 738 bp, Neisseria meningitidis; identical to SEQ ID NO: 45337

SEQ ID NO: 56597 - DNA, 495 bp, Neisseria meningitidis; identical to SEQ ID NO: 45730

SEQ ID NO: 56598 - DNA, 1341 bp, Neisseria meningitidis; identical to SEQ ID NO: 45444

SEQ ID NO: 56599 - DNA, 1923 bp, Neisseria meningitidis; identical to SEQ ID NO: 45754

SEQ ID NO: 56600 - DNA, 954 bp, Neisseria meningitidis; identical to SEQ ID NO: 45814

SEQ ID NO: 56601 - DNA, 1104 bp, Neisseria meningitidis; identical to SEQ ID NO: 47727

SEQ ID NO: 56602 - DNA, 786 bp, Neisseria meningitidis
atgtttccgggcaggcggcgttccgtctgcttagacaatcgtcctttaaaacaggtagaatccgccccaacgggaaacacatccttcagacggcaaaacccataccccaaaccatcaggaatcccccttatgaacagacaaaaagtcatcgccatcgacggcccgggcgcatcgggcaaaggcacggttgccgcccgcgttgccgccgcattgggatacgattatctcgataccggcgcactctaccgcctgactgccctatatgcacaaaaacaaggcgtgggatggcacgatgaagaaaacgtttccgaactggcaaaaaaactgcccgccgtattttcaggcagccgcatcctgctcggcggcgaagacgtttcagacggcatccggacagaagccatcggcatgggcgcatccgcagtcgcacagttgcctaaagtccgcgccgccctgctgcaacgccaacgcgattttctgaccgaaaaaggactggttgccgacggacgggacaccggatcggtcgtcttcccccaagccgaacttaaaatcttcctgacggcagaatccaaaatccgtgccgaacgccgcgccaaacaaatcggcatcccctgcgaaggtttggcattcgagcgcatcctgtccgacatcgaagccagagacgaggcagaccgaaaccgcaaagttgcccccctgaaacaacagcccgatgccctgcttttggacacaagccgcctgactatagaagaaactgtaaaaaaagtgcttgattggtatcgtgaagtttaa

SEQ ID NO: 56603 - DNA, 2118 bp, Neisseria meningitidis
atgcgccgttttctaccgatcgcagccatatgcgccgtcgtcctgttgtacggactgacggcggcaaccggcagcaccagttcgctggcggattatttctggtggatagttgcgttcagcgcaatgctgctgctggtgttgtccgccgttttggcacgttatgtcatattgctgttgaaagacaggcgcgacggcgtattcggttcgcagattgccaaacgcctttctgggatgtttacgctggttgccgtactgcccggcgtgtttctgttcggcgtttccgcacagttcatcaacggtacgattaattcgtggttcggcaacgatacccacgaggcgcttgaacgcagcctcaatttgagcaagtccgcattgaatctggcggcagacaacgcccttggcaacgccatccccgtgcagatagacctcatcagcaccgcctccctatccggcaatatgggcagggtgctggaacattatgccaacgggtttacacagttgtccctttacaatgccgcaagcggcaaaatcgaaaaaagcatcaacccgcacaagctcgatcagccgtttccaggtaaggcgcgttgggaaaaaatccaacaggcgggttcggtcagggatttggaaagcataggcggcgtattgtacgcgcagggctggctgctggtgggtacatacaacggacgcgattacgcgctgttttttcgtcagcccattcccaaaggcgtggcagaggatgccgtcttaatcgaaaaggcaagggcgaaatatgctgagttgagttacagcaaaaaaggtttgcagacctttttcctggcaaccctgctgattgcctcgctgctgtcgatttttcttgcactggtcatggcactgtatttcgcccgccgtttcgtcgaacccgtcctatcgcttgccgagggggcaaaggcggtggcgcaaggcgatttcagccagacgcgccccgtgttgcgcaacgacgagttcggacgcttgaccaagttgttcaaccacatgaccgagcagctttccatcgccaaagaagcagacgagcgcaacaggaggcgcgaagaagccgccagacattatcttgaatgcgtgttggaggggctgaccacgggcgtggtggtgtttgacgaacaaggctgtctgaaaaccttcaacaaagcggcggaacagattttggggatgccgcttatccccctgtggggcagcagccggcacggttggcacggcgtttcggcgcagcagtccctgcttgccgaagtgtttgccgccatcggcgcggcggcaggtacggacaaaccggtccatgtgaaatatgccgcgccggacgatgccaaaatcctgctgggcaaggcaaccgtcctgcccgaagacaacggcaacggcgtggtaatggtgattgacgacatcaccgttttgatacacgcgcaaaaagaagccgcgtggggcgaagtggccaaacggctggcacacgaaatccgcaatccgctcacgcccatccagctttccgccgaacggctggcgtggaaattgggcgggaagctggatgagcaggatgcgcaaatcctgacgcgttcgaccgacaccatcgtcaaacaggtggcggcattgaaggaaatggtcgaagcattccgcaattatgcgcgttccccttcgctcaaattggaaaatcaggatttgaacgccttaatcggcgatgtgttggcattgtatgaagccggtccgtgccggtttgcggcggagcttgccggcgaaccgctgatggtggcggcggatacgaccgccatgcggcaggtgctgcacaatattttcaaaaatgccgccgaagcggcggaagaagccgatgtacccgaagtcagggtaaaatcggaagcggggcaggacggtcggattgtcctgacggtttgcgacaacggcaaagggttcggcagggaaatgctgcacaacgccttcgagccgtatgtaacggacaaaccggcgggaacgggattgggtctgcctgtggtgaaaaaaatcattgaagaacacggtggccgcatcagcctgagcaatcaggatgcgggtggggcgtgtgtcagaatcatcttgccaaaaacggtaaaaacttatgcgtag

SEQ ID NO: 56604 - DNA, 1248 bp, Neisseria meningitidis; identical to SEQ ID NO: 44286

SEQ ID NO: 56605 - DNA, 735 bp, Neisseria meningitidis; identical to SEQ ID NO: 44379

SEQ ID NO: 56606 - DNA, 795 bp, Neisseria meningitidis; identical to SEQ ID NO: 45478

SEQ ID NO: 56607 - DNA, 1191 bp, Neisseria meningitidis
ttgaagcaccgtctgaaaccttgcgcggacaatccgcctgcgccgaaccgcttaccgccccctgaccgcgattctatgatttatcaaagaaacctcatcaaagaactctcttttaccgccgtcggcattttcgtcgtcctcttggcggtattggtctccacgcaggcaatcaacctgctcggccgtgccgccgacgggcgtgtcgccatcgatgccgtgttggcattggtcggcttctgggtcatcggtatgacgccgcttttgctggtgttgaccgcatttatcagtacgttgaccgtgttgacccgctactggcgcgacagcgaaatgtcggtctggctatcctgcggattggcattgaaacaatggatacgcccggtgatgcagtttgccgtgccgtttgccgttttggttgccgtcatgcagctttgggtgataccgtgggcagagctacgcagccgcgaatacgctgaaatcctgaagcagaagcaggaattgtctttggtggaggcaggcgagttcaacagtttgggcaagcgcaacggcagggtttattttgtcgaaaccttcgataccgaatccggcatcatgaaaaacctgttcctgcgcgaacaggacaaaaacggcggcgacaacatcatcttcgccaaagaaggtaacttctcgctgaacgacaacaaacgcacgctcgaattgcgccacggctaccgttacagcggcacgcccggacgcgccgactacaatcaggtttccttccaaaaactcaacctgattatcagcaccacgcccaaactcatcgaccccgtttcccaccgccgtaccattccgaccgcccaactgattggcagcagcaacccgcaacatcaggcggaattgatgtggcgcatctcgctgaccgtcagcgtcctcctactctgcctgcttgccgtgccgctttcctatttcaacccgcgcagcggacatacctacaatatcttgattgccatcggtttgtttttaatttaccaaaacgggctgaccctgctttttgaagccgtggaagacggcaaaatccatttttggctcggactgctgcctatgcacatcatcatgttcgtcatcgcaatcgtacttctgcgcgtccgcagcatgcccagccagcccttctggcaggcggttggcaaaagtctgacattgaaaggcggaaaatga

SEQ ID NO: 56608 - DNA, 276 bp, Neisseria meningitidis; identical to SEQ ID NO: 44656

SEQ ID NO: 56609 - DNA, 123 bp, Neisseria meningitidis; identical to SEQ ID NO: 38480

SEQ ID NO: 56610 - DNA, 285 bp, Neisseria meningitidis; identical to SEQ ID NO: 44271

SEQ ID NO: 56611 - DNA, 588 bp, Neisseria meningitidis; identical to SEQ ID NO: 39526

SEQ ID NO: 56612 - DNA, 717 bp, Neisseria meningitidis; identical to SEQ ID NO: 40339

SEQ ID NO: 56613 - DNA, 546 bp, Neisseria meningitidis
atgggcaaaaccgtaacctttacctctggacacagcaacaccgacccgggtgcggtcaacggcagcgaccgtgaggcggacttggcgcaggatatgtgcaatatcgtggctgctattttgcgcgatgactacggtttgactgttaaaaccgacggcacgggcaaaggcaatatgccgctgcgtgaagcggtcaagctgattcgcggctcggatgtggcgattgagtttcacaccaacgctgccgtcagcaaagcggcgacaggcatcgaagccttgagtaccgttaaaaacaaacgctggtgtcaggtgttgagcaaagccgttgccaagaaaaccggctggaaactgcgcggcgaagacggctttaaacccgacaatgcgggccagcattcgcgcctggcttatgcacaagccggcggcattgtgtttgagccttttttcatcagcaacgacactgatttggccttgtttaagacgactaaatggggcatctgccgcgcgattgcggacgcgattgcgatggaattgggggcggcaagagtatga

SEQ ID NO: 56614 - DNA, 708 bp, Neisseria meningitidis; identical to SEQ ID NO: 44711

SEQ ID NO: 56615 - DNA, 618 bp, Neisseria meningitidis; identical to SEQ ID NO: 38819

SEQ ID NO: 56616 - DNA, 1122 bp, Neisseria meningitidis
atgagtaatcaagatttttatgcgacgctgggtgtggcaagaacagctaccgatgatgagattaaaaaagcctaccgtaaattggcgatgaaataccatcccgaccgcaatcctgacaacaaagatgcggaagagaagtttaaagaagtacaaaaggcgtatgaaactttgtccgacaaggaaaagcgcgctatgtacgaccagtatgggcatgcggcgtttgaaggcggcggacaggggggcttcggagggtttggcggatttggcggtgcgcagggttttgactttggggatattttcagccaaatgtttggaggcggttcggggcgcgcccagcctgattatcagggtgaggacgttcaagtcggtatcgaaatcacgcttgaagaagccgcaaaaggtgtgaagaaacgcatcaatattccgacttatgaagcgtgtgatgtctgtaacggcagtggcgcgaaaccggggacatccccggaaacctgcccgacttgcaaaggttcgggtacggtgcacatccagcaggcgattttccgtatgcagcagacttgtccgacctgccacggtgcgggcaaacacattaaagaaccttgcgtcaaatgccgtggcgcggggcggaataaggcggtcaagacggtggaagtcaatattcccgccggtatcgatgacgggcagcgtatccgtttgagcggcgaaggcggaccgggtatgcacggtgcgcctgccggcgacctgtatgtaaccgttcgcattcgggcgcataagattttccaacgcgacggtctggacttgcattgcgaactgccgatcagttttgccacggctgctttgggcggggagttggaagtgccgaccttggacggaaaggtcaagctcaccgtccccaaagaaacccaaaccggcaggaggatgcgcgtgaagggtaagggtgtcaaatctttacgcagcagcgcgaccggcgatttgtactgccatattgttgtcgaaacgcctgtcaatttgaccgaccgtcaaaaagagcttttggaagaatttgagcggatttctaccggcttggaaaaccaaacaccgcgcaagaaatcgtttttagacaagctgcgcgatttgtttgattga

SEQ ID NO: 56617 - DNA, 696 bp, Neisseria meningitidis; identical to SEQ ID NO: 38171

SEQ ID NO: 56618 - DNA, 480 bp, Neisseria meningitidis; identical to SEQ ID NO: 39570

SEQ ID NO: 56619 - DNA, 621 bp, Neisseria meningitidis
  misc_feature 602, 603, 604, 605, 606: 'n' is a, c, g or t
atgaaaaccgtttccaccgccgttgtccttgccgccgctgccgtttcactgaccggctgtgcgaccgaatcctcacgcagtctcgaggtagagaaagtcgcctcctacaatacgcaatatcacggtgttcgtaccccgatttccgtcggaacattcgacaaccgctccagcttccaaaaaggcattttctccgacggggaagaccgtttgggcagccaggcaaaaaccattctagtaacgcacctgcaacagaccaaccgcttcaacgtactgaaccgcaccaatttgaacgcattaaaacaggaatccggcatttccggcaaagcgcataacctgaaaggcgcagattatgtcgttaccggcgatgtaaccgaattcggacgcagagatgtcggcgatcatcagctcttcggcattttgggtcgcggcaaatcgcaaatcgcctatgcaaaagtggctctgaatatcgtcaacgtcaatacttccgaaatcgtctattccgcacagggcgcgggcgaatacgcactttccaaccgtgaaatcatcggtttcggcggcacttccggctacgatgcgactttgaacggcaaagttttagactnnnnncacacacttaattaa

SEQ ID NO: 56620 - DNA, 297 bp, Neisseria meningitidis; identical to SEQ ID NO: 39905

SEQ ID NO: 56621 - DNA, 177 bp, Neisseria meningitidis; identical to SEQ ID NO: 37349

SEQ ID NO: 56622 - DNA, 966 bp, Neisseria meningitidis; identical to SEQ ID NO: 39688

SEQ ID NO: 56623 - DNA, 1977 bp, Neisseria meningitidis; identical to SEQ ID NO: 45611

SEQ ID NO: 56624 - DNA, 792 bp, Neisseria meningitidis
atggcaagacatccctaccgccgcctgcgtcctgcaaaatccagctttcccgaagtcggcatttccgaagaaggcaatatccgttcgcttcacttgggcagcgacaccatccaaagctcaatgaacctcgaccacccgtccgagctggtactctcttacagccgtgccatgatgggatggctgctgtttaccgacgctcttccgcagcatatcacccaaatcggcttgggcggcggttcgtttgcacgctggatagacacctacctgcccgacacgcgccaaaccgccgtggacatcaacccgcaggttatcgccattgcccgcaacctgtttgagttgcctttcgagggcgagaaatttgaaattattgaagcagacggtgcggaatatatcaaagtcttccgccacaacaccgatatcatcttggtggacgggttcgacggcgaacaaatcatcgatgcgctggttgaagaaccgtttttccgagactgccgaaacgcactctcttcagacggcatattcgtaaccaactggtggagcggcgacaaacgctaccaacgcttcatcgaacgcctgttaaacgtctttgaagggcgcgtcttggaacttcctgccgaaagtcacggcaatgtcgcggtaatggcattccaaagcagccccaaagagcaaaacatagacaaactcaagaaacgcgccgacaaactgagcaacacatacggattggacttccaccgtatgctcgccggcctgaaagcatccaaccccaacaacggcaagcatttccacctttaa

SEQ ID NO: 56625 - DNA, 1281 bp, Neisseria meningitidis; identical to SEQ ID NO: 44811

SEQ ID NO: 56626 - DNA, 1458 bp, Neisseria meningitidis
atgccgtctgaagccgttttcctgcaatttcgacagacgagaaaaatcatgaaatacatcagcacgcgcggcgaaaccgcacacaaaccgttcagcgaagttttattgatggggcttgcacccgacggcggcctgatgctgccggaacattatccgcaaatcgggcgggaagccttggacaaatggcgcggtttggcttatcccgaattggcgtttgaaattatgcgcctgttcgttaccgacattccggaggacgatttgcgcgatattctgaaccgtacttacacggaagcggcgttcggtactaaggaaatcacccccgtccgcacgctttcagacggcatcaaaatccaagccttgtccaacggcccgacgctggcgttcaaagatatggcgatgcagtttttgggcaatgcgtttgaatatgttttaaacaaagaaggcaaaaaactcaatatcttgggcgcaaccagcggcgatacgggttcggctgcggaatatgccttgcgcggcaaaaaaggtgtgaatgtatttatgctgtcgcccgatggcaaaatgagcgcgttccaacgtgcgcagatgtacagcctgcaagacgggaatatccacaatatcgccgtgaagggtatgtttgacgactgtcaggatattgtgaaggcggtgcaaaacgatgccgcgttcaaggaaaaataccatatcggtacggtcaattcgattaactggggacgcatcgtcgcgcaagtggtttattactttgccggctatttcaaagcgacgcaaagcaatgacgagcaagtcagcttttgcgtgccgagcggcaacttcggcaacgtttgcgcgggacatattgccaaacagatgggcttgcccatccgccgcctgattgtcgcgaccaatgaaaacgatgtgttggacgagtttttcaaaatcggcgcgtaccgcccgcgcaacagcgcgcatacttatgttacctccagcccatctatggacatttccaaagcgtccaatttcgagcgtttcgtgttcgacctgatggatcgcgatcctcaggaaatcaatacgctgtggacggaagtcgcggcgggcaagggctttgacttgcagtttgccttagacaaagtcggcggcaaatacggctttacctccagcaagtccacccacgccgaccgcctcgccaccatcaaacaggtttacgagcaagaccaagaactcatcgacccgcacactgccgacggcgtaaaagtcgcccgcgaagtgcgcgaagaaggggaaacggtggtttgtttggaaaccgcgttggcagcgaaattcgatgcgaccatacgcgaagccgtcggcgatgccgccattccgcgccctgccgcgctggaaggtttggaaaacctgccgcagcgcgtgcaaaccgtgccgaacagtgcggatgcggtaaaaggcatcatcgaacaaacccttgcctga

SEQ ID NO: 56627 - DNA, 294 bp, Neisseria meningitidis; identical to SEQ ID NO: 38053

SEQ ID NO: 56628 - DNA, 786 bp, Neisseria meningitidis; identical to SEQ ID NO: 44144

SEQ ID NO: 56629 - DNA, 1635 bp, Neisseria meningitidis; identical to SEQ ID NO: 45125

SEQ ID NO: 56630 - DNA, 441 bp, Neisseria meningitidis; identical to SEQ ID NO: 39177

SEQ ID NO: 56631 - DNA, 807 bp, Neisseria meningitidis; identical to SEQ ID NO: 45749

SEQ ID NO: 56632 - DNA, 2187 bp, Neisseria meningitidis
ttgccccgatgcctgaaacagactgtccgccacgtcatgccgtctgaaaccggcgcagatgccgccaagccttcagacggcattgcctgcccgctccgaccgaacaacaaccatctttgggagaaccttatgcccgaacaaaaccgcatcctctgccgcgaactaagcctgctggcattcaaccgccgcgtgttggcacaggcggaagacaaaaacgtcccccttttggaacgcctgcgcttcctgtgcatcgtgtcgtccaatcttgacgagtttttcgaagtccgcatggcgtggctcaagcgtgaaaacaagctgcacccccggcgcaggctggacaacggcaaaatgccgtctgaaaccatcgccgacgttaccgaagcggcgcgctccctgatacggcatcagtacgacctgttcaacaacgtccttcagcccgagttggcgcgggaaagcatccatttttaccgccgccgcaactggacgggcacgcagaaaaaatggatcgaagactatttcgaccgcgaactgctgccgatcctgacccccatcggactcgacccgtcccaccccttcccgcgaccgctgaacaaatcgctcaacttcgccgtcgaactcgacggcacggacgcattcggcaggccttcggggatggcgattgtgcaggcaccgcgcatcctgccgcgcgtcgttcccctgccgtccgaactgtgtggcggcggacacggcttcgtcttcctgtcgtccatcctccacgcccacgtcggcaaactcttcccgggcatgaacgtcaaaggctgccaccagttccgcctgacgcgcgacagcgacttgaccgttgacgaagaagacctgcaaaacctccgcgccgccatccaaaacgaactgcacgaccgcgaatacggcgacggcgtgcggctcgaagtcgccgacacctgtcccgcctacatccgcgactttctgctcgcgcaattcaaactgaccgccgccgaactctatcaggtcaaaggcccggtcaacctcgtgcgcctcaacgccgtccccgacctagtcaaccgccccgatttgaaatttcccacacacacgccgggcagactgaaagccttgggcaaaaccgcgtccatattcgatttggtgcgccaatcgcccatcctgctgcaccacccctaccaatcgttcgaccccgttgtcgaaatgatgcgcgaagctgccgccgaccccgacgtgcttgccgtcaaaatgacgatttaccgcaccggcacgcgttccgaactcgtccgcgccctgatgaaggcggcactcgccggcaaacaagtaaccgtcgtcgtcgaactgatggcgcgttttgacgaagccaacaacgtcaactgggcgaagcagctcgaagaggcgggcgcgcacgtcgtgtacggcgtgttcggctacaaagtccacgccaagatggcactggtcatccgccgcgaagacggcgtactcaagcgttacgcccacctcggcacgggtaactaccaccaaggcacatcgcgcatctacaccgacttcggcatcattaccgccgacgaacaaatcaccgccgatgtgaacacattgtttatggaaatcacaggcttgggcaaacccgggcggctgaacaaactctaccaaagcccgtttaccctgcacaaaatggttatcgaccgcatcgcacgcgaaaccgaacacgcaaaagccggcaaaccggcgcggattaccgccaagatgaattcgctcatcgaaccgaccgtcatcgaagccctgtatcgggcaagcgcggcaggcgtacaaatcgatttgattgtgcgcggtatgtgcaccttgcgcccgggtgtaaaaggcttgtccgaaaacatccgcgtccgctccatcatcggcaggcagctcgaacacgcgcgcgtgtattgcttccacaacaacggcgcggacgatacctttatctccagcgcggattggatggggcgcaacttcttccgccgcatcgaaaccgccgcgccgattgccgcgcccgaactcaaaaaacgcgtcatccgcgaaggtttggaaatggcactggcagacaatacgcacgcgtggctgatgcagcccgacggcggctatatccgcgccgcgcctgccgagggcgaaagcgaagccgacctgcaaaacgatttgtggacactgctcggaggctga

SEQ ID NO: 56633 - DNA, 867 bp, Neisseria meningitidis
atgaaagcaaaaatcctgacttccgttgcactgcttgcctgttccggcagcctgtttgcccaaacgctggcaaccgtcaacggtcagaaaatcgacagttccgtcatcgatgcgcaggttgccgcattccgtgcggaaaacagccgtgccgaagacacgccgcaactgcgccaatccctgctggaaaacgaagtggtcaacaccgtggtcgcacaggaagtgaaacgcctgaaactcgaccggtcggcagagtttaaaaatgcgcttgccaaattgcgtgccgaagcgaaaaagtcgggcgacgacaagaaaccgtccttcaaaaccgtttggcaggcggtaaaatatggcttgaacggcgaggcatacgcgctgcatatcgccaaaacccaaccggtttccgagcaggaagtaaaagccgcatatgacaatatcagcggtttttacaaaggtacgcaggaagtccagttgggcgaaatcctgaccgacaaggaagaaaatgcaaaaaaagcggttgccgacttgagggcgaaaaaaggtttcgatgccgtcttgaaacaatattccctcaacgaccgtaccaaacagaccggcgcgccggtcggatatgtgccgctgaaagatttggaacagggtgttccgccgctttatcaggcaattaaggacttgaaaaaaggcgaatttacggcaacgccgctgaaaaacggcgatttctacggcgtttattatgtcaacgacagccgcgaggtgaaagtgccttcttttgatgaaatgaaaggacagattgccggcaaccttcaggcggaacggattgaccgtgccgtcggtgcactgttgggcaaggcaaacatcaaacctgcaaaataa

SEQ ID NO: 56634 - DNA, 1185 bp, Neisseria meningitidis; identical to SEQ ID NO: 37431

SEQ ID NO: 56635 - DNA, 2298 bp, Neisseria meningitidis; identical to SEQ ID NO: 44265

SEQ ID NO: 56636 - DNA, 855 bp, Neisseria meningitidis; identical to SEQ ID NO: 44941

SEQ ID NO: 56637 - DNA, 192 bp, Neisseria meningitidis; identical to SEQ ID NO: 37158

SEQ ID NO: 56638 - DNA, 762 bp, Neisseria meningitidis; identical to SEQ ID NO: 44538

SEQ ID NO: 56639 - DNA, 366 bp, Neisseria meningitidis; identical to SEQ ID NO: 44602

SEQ ID NO: 56640 - DNA, 2283 bp, Neisseria meningitidis
atgacggtttttcggatttgctttattatccgtttatttttgaaatatctggggtggggagacgtgttccgtcgttggtttttgccgtgttgggttgtcggcgcggcggcttcgtttgcgctgccggtcgtgccgcattggctgttttggctggcggcttttgcggtttttgctgtgtttgcaaggcgttttgcgtttgccggtctgatgctgtgcgtgttggcgggcgcggcttacggcgtattcagaacggaagcggcactgtcttcgcaatggcgggcggaggcggtttcaggtgtgccgttgacggtggaagtggcggatatgccgaggtcggacgggcggcgcgtgcagtttgcggcaaaggctgtggacagcggtggtcggacgtttgatttgctgctgtcggactacaaacggcgcgaatgggcggtcgggagcagatggcggataacggcacgtgtgcaccccgtcgtcggcgaattgaacctgcgcggtttgaaccgtgaggcgtgggcattatccaacgggataggcggcgcggggacggtcggtgcggacagggttttgctgcatggcggaagcggttgggggattgcggtttggcgcagccgcatcagccgtaattggcagcaggcggatgcggacggcgggctttcagacggcatcgggctgatgcgcgcgttgagcgtgggcgaacagtcggcattgcgccccgaattgtggcaggcgttccggccgttggggctgacgcatttggtcagtatttcgggtttgcacgttacgatggtggcggtaatgtttgcgtggctggcgaagcggctgcttgcctgttccccgcgccttcctgcccggccgcgcgcgtgggttttggcggcggggtgtgcaggcgcgctgttttacgcgctgcttgccggtttttccgtgccgacgcagcgcagcgttttgatgttggcggcgtttgcgtgggcttggcgcaggggaagattgtcggcgtgggcgacgtggtggcaggcgttggcggcggtgctgctgttcgacccgtcggcggtcttgggtgtggggacttggctgtctttcggtttggtggcggccctgatatgggcgtgttcggggcgtttgcacgaagggaaacggcaaaccgccgtgcgcgggcagtgggcggcttcggtgttgtcgctggttttgctcggttatctgtttgcttcgctgcctttaatcagccctttggtcaatgcggtggcgattccgtggttttcttgggtattgacgccgctggcgttgctgggttcggtcgtgccgtttgcgcctttgcaacagttgggggcatttttggcggaatatactttgcggtttttggtgtggcttgccgatgtgtcgcccgagtttgccgttgccgccgcacctttgccgctgttggtgttggcggtgtgtgccgctttgctgttgctgctgccgcgcggcttgggtttgcgtccgtgggcggtgttgctgttggcagggtttgtgttttaccgttcacccggcgtgccggaaaatgaggttgcggttacggtttgggatgcggggcagggtttgtcggtgtcggttcagacggcaaatcatcatcttttgtttgacaccggaacggcagcggcggcgcagatggggattgtgccgagtttgaatgcggcgggtgtccgccgtttggacaagctggttctgtcgcatcacgacagcgaccacgacggcggttttcaggcagtcggcaagataccgaacggcgggatttatgccgggcagccggaattttatgagggggcgcggcattgtgcggaacagcgttggcaatgggacggcgtggattttgagtttttgatgccgtctgaacgcaaaaacatcgatgataatgggaaaagttgtgttttgcgtgttgtggcgggcggtgcggcactgctggtaacgggcgatttggatacgaagggcgaggaaagcctggtcggcaagtatggaggcaacctgtacagccaggttttggttttgggacatcacggcagcaatacgtcctcgtcgggcgtgttcctcaatgccgtctcgcccgaatatgccgttgcttcaagcggttatgccaacgcctacaaacatccgaccgaagcggtgcaaaaccgtatccgtgcacacggcatcaaattgttgcgtaccgatttgtcgggcgcgctgcaattcggcttggggcgcggcggcgtgaaggctcaacgtttgagagggtataaattctattggcagaaaaaaccgtttgaatga

SEQ ID NO: 56641 - DNA, 984 bp, Neisseria meningitidis; identical to SEQ ID NO: 40864

SEQ ID NO: 56642 - DNA, 1005 bp, Neisseria meningitidis
atgagcaccttctttcaacaaaccgcgcaagccatgattgctaaacacatcgaccgtttccctctattgaagttggatcaagtgattgattggcagccgatcgaacaatacctgaatcgtcaaaaaacccgttaccttcgagaccaccgcggccgtcctgcctatcccctgctgtccatgttcaaagccatcctgcccggacaatggcacagcctctccgatcccgaactcgaacacagcctcattacccgcatcgatttcaacctgttttgccgttttgacgaactaagcatccccgattacagcaccttatgccgttaccgcaactggctggcgcaagacgacaccctgtccgaattgctggaactgattaaccgccaactgaccgaaaaaggcctaaaaatagagaaagcatccgccgtcgttggcgccaccattattcaaaccgccggcagcaaacagcgccaggccatagaagtcgatgaagaaggacaagtcagcggccaaaccacaccgagtaaggacagcgatgcccgttggataaagaaaaacggcctctacaaactcggttacaaacaacatacccgtaccgatgcggaaggctatatcgagaaactgcacatcacccccgccaatgcccatgagtgcaaacacctgccgccgttgttagaagggatagctgaaggtacgaccgtctatgccgacaaaggctatgacagtgcggaaaaccggcaacatctggaagaacatcagttgcaggacggcattatgcgcaaagcctgccgcaaccgtccgctgtcggaaacgcaaaccaaacgcaaccggtatttatcgaagacccgttatgtggtcgaacaaagcttcggtacgctgcaccgtaaattccgctatgcgcggtcaacctatttcggactgattaaagtgagtgcgcaaagccatctgaaggcgatgtgtttgaacctgttgaaagccgccaacaggctaagtgcgcccgctgccgcctaa

SEQ ID NO: 56643 - DNA, 606 bp, Neisseria meningitidis; identical to SEQ ID NO: 45264

SEQ ID NO: 56644 - DNA, 441 bp, Neisseria meningitidis; identical to SEQ ID NO: 45265

SEQ ID NO: 56645 - DNA, 1092 bp, Neisseria meningitidis; identical to SEQ ID NO: 38959

SEQ ID NO: 56646 - DNA, 765 bp, Neisseria meningitidis; identical to SEQ ID NO: 47047

SEQ ID NO: 56647 - DNA, 219 bp, Neisseria meningitidis; identical to SEQ ID NO: 37472

SEQ ID NO: 56648 - DNA, 507 bp, Neisseria meningitidis; identical to SEQ ID NO: 45448

SEQ ID NO: 56649 - DNA, 210 bp, Neisseria meningitidis; identical to SEQ ID NO: 41321

SEQ ID NO: 56650 - DNA, 213 bp, Neisseria meningitidis; identical to SEQ ID NO: 39705

SEQ ID NO: 56651 - DNA, 180 bp, Neisseria meningitidis; identical to SEQ ID NO: 42055

SEQ ID NO: 56652 - DNA, 1770 bp, Neisseria meningitidis; identical to SEQ ID NO: 45705

SEQ ID NO: 56653 - DNA, 129 bp, Neisseria meningitidis; identical to SEQ ID NO: 43085

SEQ ID NO: 56654 - DNA, 2853 bp, Neisseria meningitidis; identical to SEQ ID NO: 47293

SEQ ID NO: 56655 - DNA, 687 bp, Neisseria meningitidis
atggaaaaacaaaatattgcggttatacttgcgcgccaaaactccaaaggattgccattaaaaaatctccggaaaatgaatggcatatcattacttggtcatacaattaatgctgctatatcatcaaagtgttttgaccgcataattgtttcgactgatggcgggttaattgcagaagaagctaaaaatttcggtgtcgaagtcgtcctacgccctgcagagctggcctccgatacagccagctctatttcaggtgtaatacatgctttagaaacaattggcagtaattccggcacagtaaccctattacaaccaaccagtccattacgcataggggctcatattcgtgaagctttttctctatttgatgagaaaataaaaggatccgttgtctctgcatgcccaatggagcatcatccactaaaaaccctgcttcaaatcaataatggcgaatatgcccccatgcgccatctaagcgatttggagcagcctcgccaacaattacctcaggcatttaggcctaatggtgcaatttacattaatgatactgcttcactaattgcaaataattgtttttttatcgccccaaccaaactttatattatgtctcatcaagactctatcgatattgatactgagcttgatttacaacaggcagaaaacattcttaatcacaaggaaagctaa

SEQ ID NO: 56656 - DNA, 480 bp, Neisseria meningitidis; identical to SEQ ID NO: 45212

SEQ ID NO: 56657 - DNA, 906 bp, Neisseria meningitidis; identical to SEQ ID NO: 45408

SEQ ID NO: 56658 - DNA, 711 bp, Neisseria meningitidis; identical to SEQ ID NO: 39348

SEQ ID NO: 56659 - DNA, 762 bp, Neisseria meningitidis; identical to SEQ ID NO: 38716

SEQ ID NO: 56660 - DNA, 468 bp, Neisseria meningitidis
gtgcgtttaatcagtgagtcaggcgaacagcttggtgtcgtttcagttcgtgaagctttggctatggccgaagggcaggatgtcgatttggtagagatttccccaactgctaaaccgcctgtgtgcaaactgatggattacggtaaatacaaataccaacaagccaagaagcgcgacgaagccaagaaaaatcaaaagcaggtgcaaatcaaggaaatcaaattccgtccgggtacggatgagggcgattatcaaatcaagatgcgcaacattaaccgcttccttgccgacggcgataaagtcaaagtgacattgcgttttcgcggccgtgaaatggctcaccagcaactcggcgcgcaacttttggaacgtgtaaaagaagatttggctgaagtggcgcaaatcgagtcctttcccaaaatggaaggtcgccaaatggtgatgatgattgcgccgaagaaaaaataa

SEQ ID NO: 56661 - DNA, 384 bp, Neisseria meningitidis; identical to SEQ ID NO: 38324

SEQ ID NO: 56662 - DNA, 435 bp, Neisseria meningitidis; identical to SEQ ID NO: 45778

SEQ ID NO: 56663 - DNA, 780 bp, Neisseria meningitidis; identical to SEQ ID NO: 45214

SEQ ID NO: 56664 - DNA, 621 bp, Neisseria meningitidis; identical to SEQ ID NO: 44700

SEQ ID NO: 56665 - DNA, 648 bp, Neisseria meningitidis; identical to SEQ ID NO: 36887

SEQ ID NO: 56666 - DNA, 1887 bp, Neisseria meningitidis; identical to SEQ ID NO: 44803

SEQ ID NO: 56667 - DNA, 723 bp, Neisseria meningitidis; identical to SEQ ID NO: 45345

SEQ ID NO: 56668 - DNA, 1014 bp, Neisseria meningitidis; identical to SEQ ID NO: 44478

SEQ ID NO: 56669 - DNA, 2016 bp, Neisseria meningitidis; identical to SEQ ID NO: 45080

SEQ ID NO: 56670 - DNA, 513 bp, Neisseria meningitidis
atgaagatgtttgaacaagaagacgaatgggtcagcaaaacccaaatgaaaaagcagatgaacggtttgcaggatttgggtatggagctgaccaagctctcaagcgacacgttgaaaaaaatcggcttggacgaagatttgtacgaagccgtcgttacctataaaaaaatcacatccaacggcgcgctcaagcggcaggcgcaatttatcggcagactgatgcgcgataccgatcccgcgcccatcgaggcatttcttgccaagctgcgcggcgacgatgcggcgcacaacgcctttttgcaacgtgtggagcggacgcggatggagctgctggcagacgacggcgcgttgacgcagtttatgtcggattttccgcatgcggacgcgggcaagctgaggacactcatccgcaataccaaaaaagagcaggagcaaaacaaaccaccaaaaaatttccgcgccctgtttcaagagttgaaaaccgtgatggaaaacggggacgcggaaatttag

SEQ ID NO: 56671 - DNA, 2151 bp, Neisseria meningitidis
ttgggtagcgattgggtttcagacggcatacattcaggatttcaccgccttatgccgtctgaaagacgtttccgacccatccctactacacgctttgtccgcaaacgcatcacaggcaagattatggaagtcatccgataccccgattcccctttcaaactccaccaacccttcccgcccgcaggcgaccagcctaccgctattgccggcttgctcgaagggctttcagacggccttgcctaccaaaccctgctcggcgtaaccggttcgggcaaaacctacaccatggcgaacgtcatcgcccaaagcggccgacccgccatcatcatggcgcacaacaaaacccttgccgcccagctttatgccgaaatgcgcgagtttttccctgaaaacgcggtggaatatttcgtctcctactacgactattaccaacccgaagcctatgtgcccagccgcgacctgttcattgaaaaagacagcgcgatcaacgaacatatcgagcagatgcgcctttccgccaccaagaacctgatgacgcgcgacgacgtgattatcgtcgccaccgtgtccgccatctacggtatcggcgacccgaccgagtatcagcaaatggtgttgtccgttaaagaaggcgacaccattgagcagcgcgacatcatcgccacgctcgtttccatgcagtacgagcgcggcgatttggactttaaacgcggcagcttccgcgtgcgtggcgacgtgattgacgtgtaccccgccgaaagctccgaaaacgccttgcgcatcagcctgtttgacgacgaaatcgaccgcctcgatatgttcgacccgctttcaggcagccttatccagcgcgtcggccgctacaccgtcttcccgtccagccattacgttaccccgcgcgataccgtcttgcgcgcctgcgagtccatcaaagaagaattacgtgaacgcattgatttctttaccaaagaaaaccgtcccgtcgaacaacaacgcatcgaacagcgcacccgctttgacctcgaaatgctctacgaaatgggcttctgcaaaggcatcgaaaattactcccggcacttctccagcaaaaaagaaggcgaaccgccgcccacgctgatggactacctgcctgacaacgccatcatgttcatcgacgaaagccacgttaccgtcacccaaatcggcggcatgtacaaaggcgacgcatcgcgcaagcaaaacctcgtcgactacggcttccgcctgccttccgcccgcgacaaccgcccgctcaaattccatgaatttgaaaaagtcatgccgcaaactgtcttcgtttccgccactccagccaaatacgaagaagaacacgccggacaagtggtcgaacaagtcgtccgccccacagggctggtcgacccccaaatcatcatccgccccgtcgccacccaagtcgacgacttaatgagcgaaatcaacgaccgcatccaaaaaggcgaacgcgttctcgttaccaccctcaccaaacgcatggcggagcaactcaccgactattacagcgaactcggcatcaaagtgcgctacctgcacagcgacattgataccgtagagcgcgttgaaatcattagagatttacggctcggcctgtttgacgtactcgtcggcatcaacctcttgcgcgaaggcctcgatatccccgaagtctccctcgtcgccatcctcgacgccgacaaagaaggcttcctgcgctcacaccgcagcctgattcaaaccataggccgcgccgcgcgcaacgtgaacggcgtcgcgattctgtacgccgacaaaatcaccgactctatgaaagccgccatcgacgaaaccgaacgccgccgtgaaaaacaaattaaattcaacgaagaacacggcatcgtgccgcaacagattaaaaaacaggtcaaagacatcattgacggcgtgtaccacgaagaagacggtggtaaaggccgtagacaaggcaaaaacaaggttaaagtcagcgaaattcacaacgaagaagacgcggttaaagaaatcgccaaactggaaaaagccatgcagcaggcagctagggatttgcagtttgaagaggcggctgtactgagggataggatacgggggattaaggaagggttgttgtttgggagtgagtaa

SEQ ID NO: 56672 - DNA, 852 bp, Neisseria meningitidis; identical to SEQ ID NO: 45401

SEQ ID NO: 56673 - DNA, 708 bp, Neisseria meningitidis
atggaaaaaatgagttttgaaatttaccgttacaacccggatgttgatgccaagccttatatgcagcgttacgagttggaattggaaccgaccgacgtgaaacttttggatgctttggtacgcctgaaagcacaagacgataccttgtctttccgccgctcctgccgcgaaggcatttgcggatcggacggtatgaacatcaacggcaaaaacggcttggcgtgtttgaccgatctgcgtggcttgaaacagccggttaaaatccgtcctctgccaggtctgcctgttatccgcgacctgattgtggatatgacccagttcttcaaacaataccattccgtcaaaccttatgttgtcaacgataatccgattgatgcggacaaagagcgtctgcaaactcaggaagagcgtaaagagttggacggtttgtacgagtgtattttgtgcgcctgctgttcgactgcctgcccgtcattttggtggaaccctgataaattcgttggtccgtccggtttgctgaatgcttaccgtttcattgcggacagccgtgataccatcactaatgagcgtttggataatctgaacgacccataccgtttgttccgttgccacaccattatgaactgcgtagacgtatgtcctaaacacttgaatccgacccgagccatcggtaagattaaagagattatgttgaaacgggccgtttaa

SEQ ID NO: 56674 - DNA, 1104 bp, Neisseria meningitidis; identical to SEQ ID NO: 47310

SEQ ID NO: 56675 - DNA, 300 bp, Neisseria meningitidis
atgggctatcgtgtcggcataaattgttttgatacaagattgcaggcagacgactatttattgtcgtcctttcctcctactgttacccaggacggaaaaatcatcaggccggaaagggtgggcgataaatggattttgaacggaaagccggtcacgctgtcttatccgaaatgttcgaattacgaacaagttaaatccggagcttatctcgggtctatggttttaattctgtttgtcgttatttacggcttcaggctgctgattaatttcttaaaagacataggcaaagtaggggcgtga

SEQ ID NO: 56676 - DNA, 606 bp, Neisseria meningitidis; identical to SEQ ID NO: 44284

SEQ ID NO: 56677 - DNA, 1263 bp, Neisseria meningitidis; identical to SEQ ID NO: 45801

SEQ ID NO: 56678 - DNA, 1383 bp, Neisseria meningitidis; identical to SEQ ID NO: 44527

SEQ ID NO: 56679 - DNA, 1248 bp, Neisseria meningitidis
atggcggattgggcgatgactatctgtacttgtgccgacggggatgacctgctgaatggtgatgcaggcaacgacagtatctacagtggcaatggcaatgatacgctcgatggaggagaaggcaacgacgccctgtacggctataatggtaacgatgtactgaatggtggcgaaggcaatgatcatttgaacggcgaagacggtaacgacactctgatcggcggtgcaggcaatgattacttggagggcagcagcggttcggatacttatgtcttcggcaaaggcttcggtcaggatacggtctataattacgactacgctaccggacgcaaagacatcatccgctttaccgacggtattacagccgatatgctgacttttacccgagagggcaaccatcttcttatcaaggcaaaagacggcagtggacaagtgactgttcagtcctatttccagaacgatggctcaggtgcttaccgtatcgatgagattcatttcgataacggcaaagtactggatgttgccactgtcaaaaaactggtacagcaatccaccgacggttcggacagattgtatgcctaccaatccggaagtaccttaaatggcggattgggcgatgactatctgtacggtgccgacggggatgacctgctgaatggtgatgcaggcaacgacagtatctacagtggcaatggcaatgatacgctcgatggaggagaaggcaacgacgccctgtacggctataatggtaacgatgtactgaatggtggcgaaggcaatgatcatttgaacggcgaagacggtaacgacactctgatcggcggtgccggtaatgattacttggagggcggcagcggttcggatacttatgtcttcggcaaaggcttcggtcaggatacggtctataattaccatgtggataaaaactctgacactatgcactttaaaggatttaaagcagcagatgttcattttatccgttccggaagtgatttggtgcttagcgcttctgaacaagacaacgtacgtatttccggattcttctatggtgaaaaccatcgtgtagatacatttgtctttgatgatgcagctatcagtaatccagattttgccaagtatattaatgctggcaataatttggtacagtctatgtctgtgttcggttctaatactgcggcgacaggaggaaatgtggatgccaatacacaatccgtacagcagccgttattggtaacgccatctgcataa

SEQ ID NO: 56680 - DNA, 1296 bp, Neisseria meningitidis; identical to SEQ ID NO: 44273

SEQ ID NO: 56681 - DNA, 1074 bp, Neisseria meningitidis; identical to SEQ ID NO: 39216

SEQ ID NO: 56682 - DNA, 1413 bp, Neisseria meningitidis
atgctgctgctgcctttattggcaagtgcggcatatgccgaagaaacaccgcgcgaaccggatttgagaagccgtcccgagttcaggcttcatgaagcggaggtcaaaccaatcgacagggagaaggtaccggggcaggtgcgggaaaaaggaaaagttttgcagattgacggagaaaccctgctgaaaagtcccgaattgttgtcccgcgcgatgtattccgcagtggtctcaaacaatattgccggtatccgcgttattttgccgatttacctacaacaggcgcagcaggataagatgttggcactttatgcacaagggattttggcgcaggcagacggtagggtgaaggaggcgatttcccattaccgggaattgattgccgcccaacccgacgcgcccgccgtccgtatgcgtttggcggcggcattgtttgacaacaggcagaacgaggcggcggcagaccagttcgaccgcctgaaggcggaaaacctgccgccgcagctgatggagcaggtcgagctgtaccgcaaggcattgcgcgaacgcgatgcgtggaaggtaaatggcggcttcagcgttacccgcgaacacaatatcaaccaagccccgaaacggcagcagtacggcaaatggactttcccgaaacaggtggacggcacggcggtcaattaccggctcggcgcggagaaaaaatggtcgctgaaaaacggctggtacacgacggcgggcggcgacgtgtccggcagggtttatccggggaataagaaattcaacgatatgacggcaggcgtttccggcggcatcggttttgccgaccggcgcaaagatgccgggctggcagtgttccacgaacgccgcacctacggcaacgacgcttattcttacaccaacggcgcacgcctttatttcaaccgttggcaaaccccgaaatggcaaacgttgtcttcggcggagtgggggcgtttgaagaatacgcgccgggcgcgttccgacaatacccatttgcaaatttccaattcgctggtgttttaccggaatgcgcgccaatattggatgggcggtttggatttttaccgcgagcgcaaccccgccgaccggggcgacaatttcaaccgttacggcctgcgctttgcctgggggcaggaatggggcggcagcggcctgtcttcgctgttgcgcctcggcgcggcgaaacggcattatgaaaaacccggctttttcagcggttttaaaggggaaaggcgcagggataaagaattgaacacatccttgagcctttggcaccgggcattgcatttcaaaggcatcacgccgcgcctgacgttgtcgcaccgcgaaacgcggagtaacgatgtgttcaacgaatacgagaaaaatcgggcgtttgtcgagtttaataaaacgttctga

SEQ ID NO: 56683 - DNA, 363 bp, Neisseria meningitidis; identical to SEQ ID NO: 38839

SEQ ID NO: 56684 - DNA, 999 bp, Neisseria meningitidis
  misc_feature 984, 985, 986, 987, 988: 'n' is a, c, g or t
atgggcatcaaagtcgccatcaacggctacggacgcatcggccgccaggttttgcgcgccatctacgattatcagattcaagaccaactccaaatcgtcgccgtcaacgccagcggtagccttgaaaccaacgcccacctcaccaaattcgacaccgtgcacggacgctttgaagccgacgtatcccacgacggcggcaacctcatcgtcaacggcgacaaaatccccttcttctcgacccgcaaccctgccgaactgccgtggaaagaactcggtgtcgatttggtcatggaatgcaccggcgcgtttaccagcaaagaaaaagccaaaatccacctcgaaagcggcgcgaaaaaagtcctcatttccgcaccgggcggcgacgatgtcgatgcaaccgtcgtgtacggcgtgaacgacagcgtcctgaccgccgacatgaccgtcgtttccaacgcttcctgcaccaccaactgcctctcgccggttgccaaagtgttgagcgaaagcgtcggcatcgtcaaaggcgcgatgaccaccatccacgcgctgaccaacgaccaaaccgttaccgacgtgcgccacaaagacctgcgccgcgcccgcagcggcgtggaaaacatgattccgaccaaaaccggcgcggcaaaagccgtcggtttggtactgcccgaattgaaaggcaggctcgacgggcttgccatccgcgtgccgaccgtcaacgtatcattggtagatttgagcttccaagccgcgcgcgacacgacagtcgaagaaatcaacgcactgatgaaagccgcctcggaagcaggcgcgctcaaaggcgttttaggctacaacaccctgcccttggtttccatggacttcaaccacactaccgaagccagccacttcgacgcaacactgaccaaagtcgttgacggcaacatgattaaagtcttcgcatggtatgacaacgaatggggcttcagctgccaaatgctnnnnncacacacttaa

SEQ ID NO: 56685 - DNA, 780 bp, Neisseria meningitidis; identical to SEQ ID NO: 45496

SEQ ID NO: 56686 - DNA, 957 bp, Neisseria meningitidis; identical to SEQ ID NO: 45099

SEQ ID NO: 56687 - DNA, 300 bp, Neisseria meningitidis
atgaagaaaatgttcgtgctgttctgtatgctgttctcctgcgccttctcccttgcggcggtaaacatcaatgcggcttcgcagcaggagttggaggcgctgccgggcataggcccggcgaaggcgaaggccattgcggaataccgtgcgcaaaacggtgcgttcaagtctgtagacgatttgaccaaggtaaagggcatcggccctgcggtgctggcgaagctgaaggaccaggcttcggtcggcgcgcccgcaccaaaaggcccagccaaaccagtgctgcccgcggataaaaaataa

SEQ ID NO: 56688 - DNA, 366 bp, Neisseria meningitidis; identical to SEQ ID NO: 37025

SEQ ID NO: 56689 - DNA, 597 bp, Neisseria meningitidis; identical to SEQ ID NO: 45815

SEQ ID NO: 56690 - DNA, 282 bp, Neisseria meningitidis; identical to SEQ ID NO: 38303

SEQ ID NO: 56691 - DNA, 768 bp, Neisseria meningitidis; identical to SEQ ID NO: 39902

SEQ ID NO: 56692 - DNA, 957 bp, Neisseria meningitidis; identical to SEQ ID NO: 39251

SEQ ID NO: 56693 - DNA, 1557 bp, Neisseria meningitidis; identical to SEQ ID NO: 44681

SEQ ID NO: 56694 - DNA, 207 bp, Neisseria meningitidis; identical to SEQ ID NO: 45170

SEQ ID NO: 56695 - DNA, 582 bp, Neisseria meningitidis; identical to SEQ ID NO: 37778

SEQ ID NO: 56696 - DNA, 1929 bp, Neisseria meningitidis; identical to SEQ ID NO: 45887

SEQ ID NO: 56697 - DNA, 390 bp, Neisseria meningitidis; identical to SEQ ID NO: 39791

SEQ ID NO: 56698 - DNA, 285 bp, Neisseria meningitidis
atgaaatttaaaagaatggcggtcgcttttgtgatgtccgctttttttgttcctgctttttcggaagatattgagattcatcgtgttgaagaaggttttaaaaagttaaatatgactgggaaattgtatgaatctgtttcaaatgctccttttggcactgttttcccgatgagaagtagggacggcgaaatacaatacacaatgcataagttaggatgtttttttaatacatgttattttaatgtgaataaagtacctgataatttaaaaaaaaagaagacatga

SEQ ID NO: 56699 - DNA, 2397 bp, Neisseria meningitidis
atgattaaaaagattttaacgacttgttttggtttggtttttgggttttgtgtatttggagtgggtttggttgccattgctattttggtaacgtatccgaaactgccgtctttggattctttgcagcattaccagcctaaaatgccgttgactatttattcggcggatggggaagtcatcggtatgtatggggagcagcggcgcgaatttacaaaaatcggcgatttcccagaggtgttgcggaatgcggttatcgccgccgaggataaacgcttttaccggcattggggggtggatgtttggggtgttgcccgcgctgccgtcggcaatgtcgtgtctggcagcgtgcagtcgggtgcgagtacgattacgcagcaggtggcgaaaaatttttatttgagcagtgaaaaaacgttcacacgcaaattcaatgaggtgttgcttgcctataaaatcgagcagtctttaagcaaagacaaaatcctcgagttgtatttcaatcagatttacctcggtcagcgcgcctatggttttgcatctgccgcgcaaatctatttcaataagaatgtccgagatttgactttggcggaagccgccatgcttgcgggactgcccaaggctccgtctgcctataatccgattgttaatccggaacgtgccaagttgcgccagaagtatattttgaacaatatgctcgaggagaagatgattaccgtgcaacagcgcgatcaggcgttgaatgaggaactgcattacgagcggtttgttcagaaaatcgatcagagtgctttatatgtggcggaaatggtgcgtcaggaactgtatgagaaatacggtgaagatgcctatacgcagggttttaaggtttataccacggtccgcgctgatcatcagaaggtggcaaccgaggcattgcgcaaggctctacggaatttcgatcgcggcagcagctaccgcggtgcggaaaactatatcgatttgagtaagagtgaagatgtcgaggagactgtcagccagtatctgtcgggactctataccgtcgataaaatggttcccgccgttgtgttggatgtgactaaaaagaaaaatgtcgtcatacagctgcccggcggcaggcgggttacgcttgacaggcgcgccttgggttttgcggcccgcgcggtcaataatgaaaaaatgggggaggaccgtatccgcaggggcgcggtcatccgtgtcaaaaacaacggcgggcgttgggcggtggttcaagagccgttgctgcagggggctttggtttcgctggatgcaaaaaccggagctgtgcgcgcgctggtcggcggttatgattttcacagcaaaacattcaatcgtgccgttcaggcaatgcggcagccgggttcgacctttaagccgtttgtctattcggcggcattatctaaggggatgaccgcgtccacagtggttaacgatgcgccgatttccctgccggggaaagggccgaacggttcggtttggacacctaaaaattcagacggcagatattccggctacattactttgagacaggctctgacggcttccaagaatatggtttccatccgtattttgatgtctatcggtgtcggttacgcgcaacagtatatccggcgtttcggcttcaggtcgtccgagctgccggcaagcctgtctatggctttaggtacgggcgagacaacgccgttgaaagtggcggaggcatatagcgtatttgcgaacggcggatatagggtttcttcgcacgtaatcgataagatttatgacagagacggcaggttgcgcgcccaaatgcaacctttggaggccgggcaaaatgcgcctcaggcaatcgatccgcgcaatgcctatattatgtataagattatgcaggatgtggtccgtgtcggtacggcaaggggggcagctgcgttgggaagaacggatattgccggtaaaacgggtacgaccaatgacaataaggatgcgtggtttgtcggttttaaccctgatgtggttactgccgtatatatcggcttcgacaaacctaagagtatggggcgtgtcggctacggcggtacgattgcggtgccggtttgggtggactatatgcgttttgcgttgaaaggaaagcagggcaaggggatgaaaatgcctgaaggtgtggtcagcagcaatggcgaatactatatgaaggaacgtatggtaaccgatccgggcttgacgctggacaacagcggtattgcgccgcaaccttcccgacgggcaaaagaagatgacgggggcgcggcagaaggcggacggcaggcggcggatgacgaagtccgccaagatatgcaggaaacgccggtgcttccgagtaatactggttccaaacagcagcagttggattctctgttttaa

SEQ ID NO: 56700 - DNA, 666 bp, Neisseria meningitidis; identical to SEQ ID NO: 38448

SEQ ID NO: 56701 - DNA, 1098 bp, Neisseria meningitidis; identical to SEQ ID NO: 44280

SEQ ID NO: 56702 - DNA, 2502 bp, Neisseria meningitidis; identical to SEQ ID NO: 45456

SEQ ID NO: 56703 - DNA, 1497 bp, Neisseria meningitidis; identical to SEQ ID NO: 45087

SEQ ID NO: 56704 - DNA, 282 bp, Neisseria meningitidis; identical to SEQ ID NO: 39646

SEQ ID NO: 56705 - DNA, 165 bp, Neisseria meningitidis; identical to SEQ ID NO: 38385

SEQ ID NO: 56706 - DNA, 573 bp, Neisseria meningitidis; identical to SEQ ID NO: 46418

SEQ ID NO: 56707 - DNA, 486 bp, Neisseria meningitidis; identical to SEQ ID NO: 37367

SEQ ID NO: 56708 - DNA, 453 bp, Neisseria meningitidis; identical to SEQ ID NO: 44422

SEQ ID NO: 56709 - DNA, 1185 bp, Neisseria meningitidis; identical to SEQ ID NO: 45260

SEQ ID NO: 56710 - DNA, 939 bp, Neisseria meningitidis; identical to SEQ ID NO: 44742

SEQ ID NO: 56711 - DNA, 963 bp, Neisseria meningitidis; identical to SEQ ID NO: 44668

SEQ ID NO: 56712 - DNA, 1410 bp, Neisseria meningitidis; identical to SEQ ID NO: 47125

SEQ ID NO: 56713 - DNA, 540 bp, Neisseria meningitidis; identical to SEQ ID NO: 44661

SEQ ID NO: 56714 - DNA, 3615 bp, Neisseria meningitidis; identical to SEQ ID NO: 45166

SEQ ID NO: 56715 - DNA, 279 bp, Neisseria meningitidis; identical to SEQ ID NO: 44294

SEQ ID NO: 56716 - DNA, 1260 bp, Neisseria meningitidis
atgaaacagaccgtcctcaaaaataacctgcaaaacctgcttgaaagcgcagaaaatatcctgctgcttcaaggccctgtcggcgatttttttctgcgccttgccgactggctgactgcaaacggcaaaaccgtacataaattcaactttaatgcaggcgacgactatttttatccgcccactcaagcgcataccgttgtttttaacgacaactacgatgcctttcctgagtttttgcaagaatacatcactcaacatcacatccaggccgttgtctgctttggcgacacacgcccttatcacgtcattgcaaaacgcattgcaaacgaaaaccaagccagtttctgggcgtttgaagaaggctatttccgcccctactacatcaccttagaaaaagacggcgtcaacgcattttccccgttgccgcgccgtgccgacttttttcttgaacaattccctaagcttgcccagcaagaatataaagcgccaacgccggtacacggcggttttacgcccatggcaaaaaacgctatccgttactatatcgagttgttccgcaatccacgcaaataccccgactacatccaccaccgcgcacccaatgccggccattacctcaaaccgtggtcgctctccatcctcaagcgtttgaactactatattgaagacatccaaatcgccaaacgtgtggaagcaggcaaatacggcaagttttttattgttcccttacaggtattcaacgacagccaagtccgtatccattgcgactttcccagcgtccgcagcttcctgctccatgttttgagttcatttgccgagcacgcgcctgccgataccaacatcatcatcaagcatcatcctatggaccgcggctttatcgactactggcgcgacattaaacgctttatcaaagaaccccccgaactcaaaggccgtgtgatttatgtccatgatgtccccctgcccgttttcctgcgccacggtctcggcatggttaccatcaacagcaccagcggcctgtccggactgattcacaatatgccagttaaggttctcggccgtgcctattatgatattcccggcattactgaccaaaataccttggcagaattttggaatcatccgacaccgcctgacaaagagctgttccatgcctaccgaatgtaccacctcaacgtgacccaaattaacggcaacttctacagtcaggtcttttttcctaacaaaaacacatccgactcttccacaccaacaacctaa

SEQ ID NO: 56717 - DNA, 822 bp, Neisseria meningitidis; identical to SEQ ID NO: 44760

SEQ ID NO: 56718 - DNA, 588 bp, Neisseria meningitidis; identical to SEQ ID NO: 45304

SEQ ID NO: 56719 - DNA, 1008 bp, Neisseria meningitidis
atgagcaccttcttccggcaaaccgcccaagccatgattgccaaacacatcgaccgtttcccgctattgaagttggaccaggtgattgattggcagccgatcgaacaatacctgaaccgtcaaaaaacccgttaccttagagaccaccgcggccgtcccgcctatcccctgttgtccatgttcaaagccgtcctgctcggacaatggaacagcctctccgatcccgaactcgaacacagcctcatcacccgcatcgatttcaacctgttttgccgttttgacgaactgagcatccccgattacagcaccttatgccgctaccgcaactggctggcgcaagacgacaccctgtccgaattgctcaaactgattaaccgacaactgaccgaaaaaggcctaaaaatagagaaagcatccgccgccgtcgttgatgccaccattatccagaccgccggcagcaaacagcgtcaggccatagaagttgacgaagaaggacaaatcagcggtcaaaccacaccgagtaaggacagcgatgcccgttggataaagaaaaacggcctctacaaactcggttacaaacaacatacacgtaccgatgcggaaggctatatcgagaaactgcacatcacccccgccaatgcccatgagtgcaaacacctgtcgccgttgttggaagggttacccgaaggtacgaccgtctatgccgacaaaggctacgacagtgcggaaaaccggcaacatctggaagaacatcagttgttggacggcattatgcgcaaagcctgccgcaaccgcccgctgtcggaagtgcaaaccaaacgcaaccgatatttgtcgaagacccgttatgtggttgaacagagcttcggtacgctgcaccgtaaattccgctacgctcgggcagcctatttcggactgattaaagtgagtgcgcaaagccacctgaaggcgatgtgtttgaacctgttgaaagccgccaacaggctaagtgcgcccgctgccgcctaa

SEQ ID NO: 56720 - DNA, 633 bp, Neisseria meningitidis; identical to SEQ ID NO: 36226

SEQ ID NO: 56721 - DNA, 549 bp, Neisseria meningitidis; identical to SEQ ID NO: 36303

SEQ ID NO: 56722 - DNA, 1548 bp, Neisseria meningitidis; identical to SEQ ID NO: 45082

SEQ ID NO: 56723 - DNA, 699 bp, Neisseria meningitidis; identical to SEQ ID NO: 45382

SEQ ID NO: 56724 - DNA, 1575 bp, Neisseria meningitidis; identical to SEQ ID NO: 38934

SEQ ID NO: 56725 - DNA, 1215 bp, Neisseria meningitidis; identical to SEQ ID NO: 45657

SEQ ID NO: 56726 - DNA, 2178 bp, Neisseria meningitidis; identical to SEQ ID NO: 45090

SEQ ID NO: 56727 - DNA, 642 bp, Neisseria meningitidis; identical to SEQ ID NO: 44331

SEQ ID NO: 56728 - DNA, 1296 bp, Neisseria meningitidis
gtgattgccatgatttacatcgtactgtttctagctgtcgtcctcgccgttgtcgcctacaacatgtatcaggaaaaccaataccgcaaaaaagtgcgcgaccagttcggacactccgacaaagatgccctgctcaacagcaaaaccagccatgtccgcgacggcaaaccgtccggcgggtcagtcatgatgccgaaaccccaaccggcggtcaaaaaaacggcaaaaccccaagaccccgccatgcgcaacctgcaagaacaggatgccgtctacatcgccaagcagaaacaggcaaaagcctccccgttcaaaaccgaaatcgaaaccgccttggaagaaagcggcattatcggcaactccgcccacaccgtttccgaaccccaaaccggacattccgcaccgaaacctgccgacgcgccggcaaaacctgcacccgttccgcaaacacctgcaaaaccgctgattacgctcaaagaactgtcaaaagtcgaattaccctggtttgacgtgcgcttcgacttcatctcctatatcgcgctgaccgaagccaaagaactgcacgcactgccgcgcctttccaaccgctgccgctaccagattgtcggctgcaccatggacgaccatttccagattgccgaacccatcccgggcatccgctatcaggcatttatcgtgggtattcaggcagtcagccgcaacggacttgcctcgcaggaagaactctccgcattcaaccgccaggtggacgcattcgcacaaagcatgggcggtcagacgctgcacaccgaccttgccgcctttatcgaagtggcttccgcactggacgcattctgcgcgcgcgtcgaccagaccatcgccatccatttggtttccccgaccagcatcagcggcgtagaactgcgttccgccgtaacgggcgtgggtttcgttttggaagacgacggcgcgttccactataccgacacgtcgggctcgaccatgttctccatctgctcgctcaacaacgagccgtttaccaatgcccttttggacaaccagtcctacaaaggcttcagtatgctgctcgacatcccgcactctccggcaggcgaaaaaaccttcgacgatttgtttatggatttggcggtacgcctgtccggccagttgaacctgaatctggtcaacgacaaaatggaagaagtttcgacccaatggctcaaagacgtgcgcacttatgtattggctcgtcagtccgagatgctcaaagtcggtatcgaaccgggcggcaaaaccgcattgcgcctgttctcctaa

SEQ ID NO: 56729 - DNA, 477 bp, Neisseria meningitidis
  misc_feature 6, 7, 8, 9, 10: 'n' is a, c, g or t
gtgtgnnnnngcatcatctcctacggtacgtccagctacggctacgacatccgctgcgcaaacgaatttaaaatcttcaccaacatcaacagcaccatcgtcgatcccaaaaacttcgacccgaaaaacttcgttaccgttgaagacgactgctgcatcatcccgcccaattccttcgcactggcgcgcacggtcgaatatttccgcatcccgcgcaacgtcctgaccgtctgcttgggcaaatccacctacgcccgctgcggcattatcgtcaacgttaccccgttcgaaccggaatgggaaggctacgttaccctcgaattttccaacaccacccccctgcccgccaaaatctacgcaggcgaaggtgtggcgcaagtcctcttcttcgagagcgacgaaatctgcgaaacctcatacaaagaccgcaacggcaaatatatggggcaaaccggcgttaccctgcccaaagcctga

SEQ ID NO: 56730 - DNA, 375 bp, Neisseria meningitidis; identical to SEQ ID NO: 38891

SEQ ID NO: 56731 - DNA, 225 bp, Neisseria meningitidis; identical to SEQ ID NO: 44387

SEQ ID NO: 56732 - DNA, 693 bp, Neisseria meningitidis; identical to SEQ ID NO: 39213

SEQ ID NO: 56733 - DNA, 1968 bp, Neisseria meningitidis; identical to SEQ ID NO: 45886

SEQ ID NO: 56734 - DNA, 1293 bp, Neisseria meningitidis; identical to SEQ ID NO: 44784

SEQ ID NO: 56735 - DNA, 1581 bp, Neisseria meningitidis
atgccttccatcaaacgcgccctgatcagcctgtccgacaagacgggcgcagtcgaatttgcccaaaccctgaccaagctcggtgtcgaaatcctctctaccggcggcacggcgaagctgcttgccgatgcgggcgttcccgtgattgaagttgccgactacaccggtttccccgaaatgctcgacggccgcgtgaaaaccctgcatccgaaaatccacggcggtattttgggccggtgcgatttggacgaacacgtcgccaagatggaagaacacggcatcggcaacatcgacctcgtgtgtgtcaacctctaccccttcgccgccaccatcgccaaaccaaactgcacgctggaagacgcgattgaaaacatcgacatcggcggcccgaccatggtgcgctccgccgcgaaaaactggaaacacgtcgccatcgttaccgacacagccgatttcccggccatcgccgccgaactcgaagccaacaatggcgcattgagcgacaaaacccgcttcaacctgtcgcgcaaggcgttcagccacaccgcccaatacgacggcatgatttccaactacctgacctcactttcagacgacgttttgagcggagagcctgaaatcggcgaatttccaagccagttcaaccaaagctggattaaagtgcaagacatgcgctatggcgaaaacccgcatcagcgcgccgcgttctaccgcgatattgaccccgccgcaggcagcctttccgcctacaaacaactgcaaggcaaagaattgtcttacaacaacatcgccgatgccgatgccgcatgggaagccgtcaaatcctttgacgcgccagcctgcgtgatcgtcaaacacgccaatccgtgcggcgtcgccgttgcagccgatacattgaccgcctacaaactcgcctacgtcaccgacaccaccagcgcgttcggcggcatcatcgccttcaaccgcgaagtggacggcgaaaccgtcaaacagattaccgacaaccagtttatggaagtcttgatggcgccgaagtttaccgccgaagccctcgaaatcgccgccgccaagaaaaacgtgcgcgtattggaagtgccgcttgaggcaggcgcaaaccgcttcgaactcaaacgcgtcggcggcggactgttggtacaaacccctgatattcaccgcctcaaccgcgccgatttgaaagtcgtctccaaacgccaaccaaccgagcaagaatggaacgacctgatgtttgtttggaacgtcgcaaaatacgtcaaatccaacgccatcgtcttcggcaaaggcggtcaaacctacggcatcggcgcaggccaaatgagccgcgtggacagcacccgcatcgccgcccgcaaagcgcaagatgccaatctcgacctcaacggcgcatgtgccgcttccgatgctttcttccccttccgcgacggcgtggacgtgattgccgagcagggcatcaaagccatcatccatccggcaggttcgatgcgcgatcaggaagtcttcgacgcagcggacgaacacggcatcgccatggtcgtaaccgacgtgcgccacttccgccattaa

SEQ ID NO: 56736 - DNA, 1875 bp, Neisseria meningitidis
ttgcgcccgatattcggacgcaacgccgtttgttcagacggcatttcccaaacccactgtccgacattcaaaacaactctaatgaaaaatatccgaaatttctccatcattgcccacatcgaccacggcaaatcgacgcttgccgaccgcttcatccaatattgcggcggtttggatttgcgcgaaatgagtacgcaggtactcgattccatggacatcgaaaaagagcgcggcattaccatcaaagcgcaaaccgccgcgctcaactataaagcgcgcgacgggcaggtgtatcagcttaatttgattgacacgccgggacacgtcgacttctcttacgaagtttcccgttcgctgtcggcttgcgaaggcgcgcttttggtcgttgacgcgtcgcagggcgtggaagcgcaaaccgtagcgaactgttacaccgcgattgatttgggcgtggaggttgtgcctgttttgaacaaaatcgacctgccagccgccgaccccgaacgcgtggagcaggaaattgaagacatcatcggcatcgatgcggtcggcgcggtgcagtgttccgccaaaagcggcatcggcgtggaagacgttttggaagaaatcgttgccaaaattcctgcgccgaccggcgatgaaaacgcgccgctgcaagccgtgattgtcgattcgtggtttgacaactacgtcggcgtggtcatgctgattcgagtgaaaaacggcaccatcaaactgaaagacaaagtgcgctttatgagcaccaaggcggaaacgcaggttgagcagttgggcgtattcacaccgaaatcggttcaaaaacaagaactcaaagccggcgaagtgggctttttgattaccggcgtaaaagaattgggtcaggcgaaagtcggcgatacggttacactggttgccaaccctgccactgagccgctgcccggcttccaagaagtacaaagccaagtattcgccggactttatcccgtggaaagccacgactacgaagccttgcgcgacgctttggaaaaattgcagcttaacgacgcttcgttgaaattcgagcctgaagtttcccaggcattgggcttcggcttccgttgcggcttcttgggtctgttgcacttggaaatcgtgcaggaacgcttggagcgcgagttcgatatggatttgattaccaccgcgccgacggtggtttacgaagtcgtgttgaaaagcggcgaaaaaatcgaagttgaaaacccgtccaaactgcccgacatcggcagcatcgaaaccatactcgagccgattattaccgcgaccatccttgtgccgcaggaatacgtcggcaacgtcatgactttgtgtaaccaaaagcgcggcgttcaggtcaatatgcagtacatgggccgccaagtcatgctgacttacgatttgcccatgaacgaagtcgtcatggacttcttcgacaaactcaaatccacttcgcgcggttatgcttcgttggactaccatttcaaagagttccaaccgtctgatttgattaagctggatattatggtcaacggcgaaaaagtcgatgcattaagcctgattgtgcaccgtcaaagcgcggttcaccgaggccgcgagctggcatcaaaaatgcgcgagctgattccgcgccaaatgttcgacatcgccgtccaagccgccatcggcagccagattatcgcccgcgaaaacgtcaaagccctgcgtaaaaacgttttggcgaaatgttacggcggcgatattacgcgtaagaaaaaactgcttgaaaaacaaaaggcaggtaaacgccgtatgaaacaagtgggcaatgtggaaattccgcaaagcgcgttcttggcgattttgcaggtgagcgacaaataa

SEQ ID NO: 56737 - DNA, 1092 bp, Neisseria meningitidis; identical to SEQ ID NO: 44962

SEQ ID NO: 56738 - DNA, 2214 bp, Neisseria meningitidis; identical to SEQ ID NO: 44862

SEQ ID NO: 56739 - DNA, 1782 bp, Neisseria meningitidis
atgccttatttcgccctgtttgacgatgccgtaagcggccgcgcaaaacgctatcaaaatcatgtggaaagccgttttttccgtcccgaagaactcgatgctttggacggcgcgctgcaatcgggctggcaaaaagggctgcatgccgtgttgtttgcagactacggattcggtttgccgctgacgggggttgagtccgagcgcggcggcaaccttgccctgcactggtttgccgactgcgccgacaccgatgccgcaagctggcttgcccgacactcagacgaccttcccgccggcatttccacgccgcaatcctccgtatccgaagccgattacctcgaccatatccgccaaatccacgaagccatccgacgcggcgacacctatcaaatcaactacactacccgcctgcacctgcaagcctacggcaatcccgtcaaactttaccaacgcctgcgccagcccgtcccctatgccgttttgtcccacctgcccgatgcacaagggcaatccgcgtggacgctgtgtttctcgcccgaactcttcctcaaaatcggttcggacggcaccatcagcaccgaaccgatgaaaggcaccgcgccgattttgggcgacggacaagacgaacgccgcgccgccgagttgcaagcagacccgaaaaaccgcgccgaaaacgtgatgattgtcgatttgctgcgtaacgatctcggcaaaatcgcccaaaccggcacagtatgcgtacccgaaccgtttaaagtatcgcgtttcggcagcgtttggcagatgaccagcaccatccaagcccaagccttgccgcacacctcgttcgccgacatcctccgcgccgccttcccctgcggcagcatcaccggcgcgcccaaaaaaatgagtatgcagattatcgaatcgctcgaagccgaagcgcgcggactttatacgggcagcatcggctatttgaacccgtgttccggcggcttggggtttgaaggcacgttcaacgtcgttatccgcaccttgtcgctcacgccgctttcagacggcatttatcaaggcgtgtacggtgtcggttccggcatcgtcatcgacagcgaccccgccgccgaatatcgggaatgcggctggaaagcccgtttcctcaacgaattgcgccccaacttcggcatttttgaaaccctgcgcgcggaaaacggacgctgcaccctgctcgaccgccacctatgccgtctgaaaacctccgcacgcgccctcaacctgcccctgcccgacggctgcgaaaatcaaatcaaacaatacattgccgacttgcccgatggcgcgttccgcgtcaaagccctgctcgcttcagacggcatcagcctgtcccgcgccgttttaaaccgtctgaccgacaaacaacgcgtcatcatttcgccgaccatcctgcccgcacaaaactacctgcgccgcttcaaaaccacacaccgcgccctcttcgaccaagcgtggcaaaccgccgaaacacaaggcgcgttcgacagcctgtttttcaattcagacggcatcctgctcgaaggcggcagaagcaacgtgttcgtcaaataccaagggcaatggctcacaccgtctttagatttagacattttaaacggcataatgcgccaagccgtattggacgaaccgcaaaaatatttgcaaacaaatcaagtaatcgaaacacacatcacacaaaaaacactgcaagaagccgaagaaatccgcctctccaacgccttgcgcggcgtatttgccgccgcccttgcctga

SEQ ID NO: 56740 - DNA, 972 bp, Neisseria meningitidis; identical to SEQ ID NO: 39558

SEQ ID NO: 56741 - DNA, 738 bp, Neisseria meningitidis; identical to SEQ ID NO: 47068

SEQ ID NO: 56742 - DNA, 897 bp, Neisseria meningitidis
ttgaatccgacgaatgatttgaaagcgtggcaacagagggcgcaggcacagacagagctgctgctggaacgctttttgccgtctgaaaacgaaatcccgcacacgctgcacgaagcgatgcgctatgcggctttggacggcggcaagcgtctgcgtccgatgctggttctggcagcttcggaattaggcgaagccgtgcatgaagcagtagaacaggcaatggcggcaatcgaaatgatccacgtctattctttggttcacgacgatatgccggcgatggacaacgacagcctgcgccggggcaaaccgacctgccacatcaaatatggcgaagcaaacgcactgctgaccggcgatgctttgcaaacccaagccttcgacgtgttaagtcgtccgacagaactgcccgccgcacgccagttggcaatgttgtcggtgttggcaaaagcgggcggaagcaggggtatggcgggcggtcaggcaatcgatttggcgaatgtcggcaaacaaatggttcaagccgatttggaacagatgcacagcctgaaaacgggtgctttgattcgtgcggcggttttattgggggcgatgtcctgcccgaatctgtctgaagacagtctggcggtattggatgattatgcggcaaaattgggcttggcgttccaagtcatcgacgatgtgttggactgcgaagcggacacggcaaccctggggaaaacagcaggcaaagacgcggacaacgataagccgacttatgtgaaactgatgggcttggaagcggcgcgctcatacgcacacaaactggttgccgaagcggtcgcgctgctcgaacccttcggcgacaaagccctgcgcctgcggcagttggcagaatttgcagtcgcccgcaaatattaa

SEQ ID NO: 56743 - DNA, 1137 bp, Neisseria meningitidis
atgaaaaacatatctctttctccgcccgccatgcttggcatcctcggcggcggacaattaggcagaatgtttaccgttgccgccaaaaccatgggctacaaagtaaccgttctcgaccccgatccggacgcgccggcagcagaatttgccgactgtcatttatgcgcgccgtttaacgaccaagctgctttggacgaattggcaaaatgcgcggcggtgaccactgaatttgaaaacgtcaatgccgatgcgatgcgttttctcgccaaacacaccaatgtttcccccggcagcgactgcgttgccatcgcgcaaaaccgcattcaggaaaaggcatggatacgcaaagcaggattgcaaaccgcgccgtatcaagcaatttgcaaagccgaagacatcactgaagaaagcatacaatttctgcccggcatcctgaaaaccgctacattgggctatgacggcaaaggccaaatccgcgtcaaaacggtggatgaactcaaagccgcgtttgccgaacaccgcggcgtggattgcgttttggaaaaaatggtggacttgcgcggcgaaatttccgttatcgtatgccgtctgaacaatgacaacgtgcaaactttcgatcctgccgaaaacattcacgaaaacggtatcctcgcctactccatcgtcccagcccgactgagtgccgacattcagcaacaggcgcgacaaatggcgcagcgtttggccgatgaattgaactacgtcggcgtattggcggtagaaatgtttgttgtcggcgacacgcatgaattggtcgtcaacgaaatcgcgccgcgtccgcacaattccggccaccataccgtcgacgcctgcgcggcagaccaattccagcaacaggtccgcctgatgtgcaacctgccacctgctgacaccaaattgctgagttcttgctgtatggcgaatattttgggcgacgtttggcaggaagacggcggcgaaccggattggtttcccctgcaaagccggccggacgcgcgcctgcacctttacggcaaaaaaaccgcgcacaaagggcggaaaatgggacactttaccgttttaaccaccgattcggacaccgcatttcaagaagcaaaaaaactgcatcagtccctataa

SEQ ID NO: 56744 - DNA, 1188 bp, Neisseria meningitidis; identical to SEQ ID NO: 38360

SEQ ID NO: 56745 - DNA, 483 bp, Neisseria meningitidis; identical to SEQ ID NO: 45636

SEQ ID NO: 56746 - DNA, 837 bp, Neisseria meningitidis
atgatagacctgcactgccattccatcgtttccgacggtatgctttcccccgccgaagtcgtgcgcctcgcgcatcaaaacggctgcacgctgctggcgttgaccgaccacgaccacaccggcggcatcgccgaagcgcgtgccgaagccgacaggctcggtttgcgcctgattaacggcgtggaaatctccgtaacgtggcgcgggcgtaccatacacgttgtcggcttagactttgacgaacaagacgaaaacctgcaaaacctgttggcgcaagtgcggcaaggccgtctgaaacgcctcgaagccatcgccgccaagctggaaaaacgcggcatttcgggcgcatacgacggcgcgctcgcgctggcggcaaacaaagaaatggtcagccgcacacacgtcgccgagttcctcattcgggtaggacacgtcaaaaacaagcagcaggcgttcaccaaatacttgggcgacggcaaatcctgcgccgtccgccacgaatgggcgacgctggaagactgcgtctccgccgtcaacggcgcgggcgggttggcggtcatcgcccatccgatgcgttatgatttgtccgccaccgccaagcgcaatctgtttgaagaatttaaaaaactcggcggtgcgggtatcgaagtccacagcggaaactgttgcaaaaacgaccgcctcaactacgcgcttttggcagaacgcttcggattgttggcaagcgcgggcagcgacttccaccgtttaaacgacttcagcggcggcattctcggcgcgtgtcccgaactgccggaaaactgcaaaccggtgtggacgcacttttcccgacattga

SEQ ID NO: 56747 - DNA, 729 bp, Neisseria meningitidis; identical to SEQ ID NO: 44541

SEQ ID NO: 56748 - DNA, 504 bp, Neisseria meningitidis; identical to SEQ ID NO: 39039

SEQ ID NO: 56749 - DNA, 663 bp, Neisseria meningitidis; identical to SEQ ID NO: 45156

SEQ ID NO: 56750 - DNA, 372 bp, Neisseria meningitidis; identical to SEQ ID NO: 45458

SEQ ID NO: 56751 - DNA, 534 bp, Neisseria meningitidis; identical to SEQ ID NO: 45949

SEQ ID NO: 56752 - DNA, 2061 bp, Neisseria meningitidis; identical to SEQ ID NO: 44672

SEQ ID NO: 56753 - DNA, 759 bp, Neisseria meningitidis; identical to SEQ ID NO: 45881

SEQ ID NO: 56754 - DNA, 198 bp, Neisseria meningitidis; identical to SEQ ID NO: 43079

SEQ ID NO: 56755 - DNA, 300 bp, Neisseria meningitidis; identical to SEQ ID NO: 45286

SEQ ID NO: 56756 - DNA, 372 bp, Neisseria meningitidis; identical to SEQ ID NO: 45763

SEQ ID NO: 56757 - DNA, 1311 bp, Neisseria meningitidis; identical to SEQ ID NO: 45122

SEQ ID NO: 56758 - DNA, 1542 bp, Neisseria meningitidis; identical to SEQ ID NO: 39823

SEQ ID NO: 56759 - DNA, 1251 bp, Neisseria meningitidis; identical to SEQ ID NO: 44589

SEQ ID NO: 56760 - DNA, 345 bp, Neisseria meningitidis; identical to SEQ ID NO: 49922

SEQ ID NO: 56761 - DNA, 2829 bp, Neisseria meningitidis; identical to SEQ ID NO: 45633

SEQ ID NO: 56762 - DNA, 1290 bp, Neisseria meningitidis; identical to SEQ ID NO: 38999

SEQ ID NO: 56763 - DNA, 510 bp, Neisseria meningitidis; identical to SEQ ID NO: 36896

SEQ ID NO: 56764 - DNA, 537 bp, Neisseria meningitidis; identical to SEQ ID NO: 44233

SEQ ID NO: 56765 - DNA, 246 bp, Neisseria meningitidis; identical to SEQ ID NO: 44126

SEQ ID NO: 56766 - DNA, 501 bp, Neisseria meningitidis
atgaatgcaatgccccaaaccgccgcacaaaacgaaaccctgcacacttgtagcattattgtcgatgatgcacaggatttttcccccatgcttctcgatgcagggcgggacgacacacttatcagcgaatcgatgattccgcaaatccgcactgttgccgccctgatagccgccgaacggcacgacttcagccgcagcagccccgccgagtttaccgatgccgccgatttttttgccgcacggattctcgtattgggcgtgcgacgcttccatctggacgtatcgctgcttcagattttgaaaaccgccaacagccgcgcccgccgctttgccgaaaaacaccgcctgtttttcacacccgcacaagccgaattgagcctgaacaaacacaaaaaccgccgcctgctgaccgtagaaaccgaacacgaagtcgaaaacaaaggcaacccagtcgccaacagcctcgcatttgtccgcaaactgcacaccctgcccctgtaa

SEQ ID NO: 56767 - DNA, 1065 bp, Neisseria meningitidis
atgactcttttaaaaaacgataccttcctccgcgccctgcttaaacagcccgtcgaatacacgccgatttggatgatgcgtcaggcggggcgttatctgcccgaatataaagccacacgcgcgaaagcgggcagcttcctcgatttgtgcaaaaacaccgaattggcgaccgaagttaccatccaacctttggaacgtttcgatttggacgcggcgattttgttttccgacatcctgaccgtccctgacgcaatgggcttgggactgtattttgccgaaggcgaaggcccgaaattcaaacgcgccctgcaacacgaggacgacattgccaaattgcacgtccccgatatggaaaaactgcaatacgtctttgatgccgtcagctccatccgtaaagcactggacggccgcgtaccgcttatcggcttctccggcagcccgttcacacttgcctgctacatggttgaaggtggcagcagcaaagaattccgcaccatcaaaaccatgatgtactcgcgccccgatttgctgcacaaaatcctcgataccaatgctcaagccgttaccgcctatctcaacgcccaaatcgacgcgggcgcgcaggctgtgcagattttcgacacttggggcggcgtcttgagcgatgaggcgtttaaagaattcagcctcaaatacatccgccagatcgtcgccggactcaaacgcgaaagcgaaggcagacgcgtgcctgttatcgtatttgccaaaggcggcgggctgtggctggaaagcatggcagaaattggcgcagacgcattgggcttggactggacgtgcaacataggcgaagcacgccgccgcgtcggcaagcaagtcgccctgcaaggcaacttcgacccgttcgccctcttcggtacgccggaatccatccgcaccgaggtcgcacgcatcctagccgactacggacaaggcagcggccatgtcttcaacctcggacacggcatcaaccaacacgccgaccccgaacacgccaaaatcttagtcgacaccgtacacgagctgtcgcggcagtatcacggcgggtaa

SEQ ID NO: 56768 - DNA, 501 bp, Neisseria meningitidis; identical to SEQ ID NO: 37418

SEQ ID NO: 56769 - DNA, 666 bp, Neisseria meningitidis; identical to SEQ ID NO: 45088

SEQ ID NO: 56770 - DNA, 942 bp, Neisseria meningitidis; identical to SEQ ID NO: 40047

SEQ ID NO: 56771 - DNA, 924 bp, Neisseria meningitidis; identical to SEQ ID NO: 45081

SEQ ID NO: 56772 - DNA, 678 bp, Neisseria meningitidis
atgcaagctgattttaaccgtcccgtcctggccatcgataccggtacttcctgtttgtcgctcgcactgcgtgccgacggcgaaacccgtctgttccatcaggaagccggcagccgccagtccgaactaattctgccggaaatccgcaccctattcctcgatgcgggcattaccgccgccgatttgggtgcggtcgtgtatgcacagggccccggcgcgtttaccggactgcgtatcggcatcggtgtggctcagggtttggcaacaccgtttgatacccccttaatcggcgtaccctcgctcgatgccgccgcctcgatgccgccgccgcaaagttgcatccttgccgctacggacgcgcgtatgggcgaagtgttttatgcatggttcgatacgctgaactgccgccgtttgagcgattatcaggtcggtaaggctgcagacatccggctgccggaaggatgcaccttttcagacggcataggcagcgcgttcgcactggaagaggctccgccgttttcaggtaaacccgatatgccgactgccgccgactttctcgcattggcagccaagggcggctatcctgccgtccatgccgcacacgccgaactgctctacgtccgcaacaaaatcgccctaaccgccaaagaacaggcggaacggaaagcccgaacatga

SEQ ID NO: 56773 - DNA, 369 bp, Neisseria meningitidis; identical to SEQ ID NO: 41144

SEQ ID NO: 56774 - DNA, 726 bp, Neisseria meningitidis; identical to SEQ ID NO: 45241

SEQ ID NO: 56775 - DNA, 483 bp, Neisseria meningitidis; identical to SEQ ID NO: 38704

SEQ ID NO: 56776 - DNA, 867 bp, Neisseria meningitidis; identical to SEQ ID NO: 47330

SEQ ID NO: 56777 - DNA, 1554 bp, Neisseria meningitidis
atgaaccggacttatgccaatttctacgaaatgctcgccgccgcctgccgcaaaaacggcaacggcacggcagtgttcgacggcaaggaaaaaaccgcctaccgcgcgctcaagcaggaggccgaagccgtcgcggcgtatctgcaaaatatcggcgtgaagttcggcgacacggtcgcgctggcggtttccaattccacagaatttattaccgcctatttcgccgtctccgccatcggcgcggtcgccgtaccgatgaacacatttttgaaaaacagcgaatacgcgtatatcctgaacgactgcaaggcgcgcttcctgttcgcctcggcgggcctgtcaaaagagttggcgggcttgaaggcgcaaacgcccgtcgaaaaaatcatttggacggacaaaagccgtccggctggcgaaatggcggaaggcgatgccttttttgaagacgtgcgccgcttccccgaaaaacccgacttgggccgccaaccccggataaatgatttggcacacatcatctacacctccggcacgacggggcatcccaaaggcgcgctaatcagttacgccaacctgttcgccaacctgaacggcatcgaacgcatctttaaaatctccaagcgcgaccgctttatcgttttcctgccgatgttccacagcttcacgctgacggctatggtgctgctgccgatttatatggcgtgttcgattattttggtcaaatccgttttcccgttttccaacgttttgaaacaggccctgctcaaacgcgcgaccgtgtttttgggcatacccgcgatttacaccgcaatgagcaaggcgaaaatcccttggtatttcagatggttcaaccgcattcgcctgtttatcagcggcggtgcgcctttggcggaacaaaccatcctcgatttcaaagccaagttcccccgcgccaaattgctggaaggctacggactgagcgaagcctctcccgtcgtcgccgtcaatacgcccgagaggcaaaaagcccgcagcgtcggcatccccctgcccggtttggaagccaaagccgtcgatgaagaattggtcgaagtgccgcgcggcgaagtgggcgaactgatcgtcaggggcggttcggtgatgcggggctacctcaatatgcctgccgccaccgatgaaaccatcgtcaacggctggttgaaaacgggcgatttcgttaccatagacgaagacggctttatctttatcgtcgaccgcaaaaaagatttgattatttccaaaggtcaaaacgtctatccgcgcgaaatcgaagaagaaatctacaaactcgatgccgtcgaagccgctgccgtcatcggcgtgaaagaccgttatgccgacgaggaaatcgtcgccttcgtccaattgaaggaaggtatggatttgggcgagaacgaaatccgccgccacctgcgtaccgtgctggcaaatttcaaaatccccaaacaaatccactttaaagacgggctgccgcgcaacgctacgggcaaggtattgaaacgggtgttgaaggagcagtttgacggaaacaaatga

SEQ ID NO: 56778 - DNA, 1452 bp, Neisseria meningitidis; identical to SEQ ID NO: 46705

SEQ ID NO: 56779 - DNA, 828 bp, Neisseria meningitidis
atgcagcttgtcaaccaatccctgattgtacaggcgggcaaacgccgcaacattcaagcaagcgaagcggaaatcgatgccgtcgtcgcaaaaaatcccgccctcaaaaacctcagccccgcccaacgccgcgattttgccgacaacatcattgccgaaaaagtccgccagcaggcagtgatgcagaacagccgcgtgagcgaagctgaaatcgatgccttcctcgagcaggcgcaaaaacaaggcatcaccctgcccgaaggcgcaccgttgcgccaataccgcgcccaacacatcgtgattaaagcatccacctattatatcctatttgttaaaatcaataataaatacaaggcaatccaaatgaaagaactagataaaatcgatttccgcattcttaagatcctccaacagaatgcccgcatcccgatgacggagcttgccgagaaggtaggcttgtccaccacgcccgttacagagagggtgcgccgtttggagcgggaacattatatttccggctatcacgcccacctcaatccccatctgttgggcaaaccgctattggtttttgtcgagctgaagctgcaatccaaatcgggcaatattttcgaagatttcaaaaaagaagtgctgaaaattccgcaaattatggaatgccacttggtgtcgggcgaatacgactatctgattaaagtacgtttgcccgatatgtctgcctatcgggatatgctaggcaatatcctattgcaactgcctgccgcttcggagagtaggagttatgttgtgatggaggaggtcaaagaaaatccggttttggatttggattga

SEQ ID NO: 56780 - DNA, 993 bp, Neisseria meningitidis; identical to SEQ ID NO: 44567

SEQ ID NO: 56781 - DNA, 846 bp, Neisseria meningitidis; identical to SEQ ID NO: 45104

SEQ ID NO: 56782 - DNA, 924 bp, Neisseria meningitidis; identical to SEQ ID NO: 45713

SEQ ID NO: 56783 - DNA, 1911 bp, Neisseria meningitidis; identical to SEQ ID NO: 45335

SEQ ID NO: 56784 - DNA, 756 bp, Neisseria meningitidis; identical to SEQ ID NO: 44309

SEQ ID NO: 56785 - DNA, 1134 bp, Neisseria meningitidis; identical to SEQ ID NO: 44852

SEQ ID NO: 56786 - DNA, 978 bp, Neisseria meningitidis; identical to SEQ ID NO: 47357

SEQ ID NO: 56787 - DNA, 786 bp, Neisseria meningitidis
atggaaaacggaaaaacagtcccgagatggcgttttgccttgaaaagtgcgggttggcatctcttaatcagcctgtcggttgcagggctggcggcattgctggtttttaaggtttggtatccttatccttatgccgagctgacgggagggctgtcgctttatcagctggtggtggctgtcgatattgtatgtggtccgctgctgactttaattttggcaagcccgaagaaaaagacaaaggcacgcatggtcgatttttccatggtcggcatcatccagctggcggctttggtgtacggtctgcacagcgtttcgctggcgcgtcctgtggtggaagcgtttgaacaggatcgtatgaccattgttacggcggcggaagtcgtggtcgaagatttgcacaaagcccccgaagggctgcaaagcctgtcgtggttcggcatccgccgcattgcattgaaagaacctgaggatgcggatgagaagaacaagacgctggatttgtccctgaaaggtatcgagccgagtatgcgtcccgaccagtggctgccgtattccgacaaggaagcagaagaaatccgcaaacatctgaaaccgctgaaagtcttggcggatgcgagaaaaacgacggttgcggacattctgaaacaggcaggtctcgccgaaggggaggagctgtattacctgccgtttaccagcagcaggcagaaagagtggatagtcattaccgataaagagggcaacaccaaaggctacgcgccgatagacggcttcatcatcaccccttaa

SEQ ID NO: 56788 - DNA, 912 bp, Neisseria meningitidis; identical to SEQ ID NO: 44207

SEQ ID NO: 56789 - DNA, 720 bp, Neisseria meningitidis; identical to SEQ ID NO: 45652

SEQ ID NO: 56790 - DNA, 771 bp, Neisseria meningitidis; identical to SEQ ID NO: 39218

SEQ ID NO: 56791 - DNA, 600 bp, Neisseria meningitidis; identical to SEQ ID NO: 45176

SEQ ID NO: 56792 - DNA, 231 bp, Neisseria meningitidis; identical to SEQ ID NO: 38834

SEQ ID NO: 56793 - DNA, 276 bp, Neisseria meningitidis; identical to SEQ ID NO: 45473

SEQ ID NO: 56794 - DNA, 891 bp, Neisseria meningitidis; identical to SEQ ID NO: 44980

SEQ ID NO: 56795 - DNA, 726 bp, Neisseria meningitidis; identical to SEQ ID NO: 38250

SEQ ID NO: 56796 - DNA, 252 bp, Neisseria meningitidis; identical to SEQ ID NO: 44560

SEQ ID NO: 56797 - DNA, 750 bp, Neisseria meningitidis; identical to SEQ ID NO: 46699

SEQ ID NO: 56798 - DNA, 609 bp, Neisseria meningitidis
atgatggagaaaatcggactcttcggcggcactttcgacccgatacacaacgggcacctccatatcgcccgcgcctttgccgacgaaatcggcttggacgcggttgttttcctgccgacaggcggcccgtatcacaaagacgccgcctccgcttccgccgccgaccgccttgccatggtcgaattggcgacggcagaagatgcgcgttttgccgtcagcgactgcgacatcgtccgccggggcgagacttacactttcgacaccgtccaaattttccgccagcagttcccctcggcgcaactctggtggctgatgggcagcgacagcctgatgaagctgcacacatggaaaaaatggcagatgctcgtgcgcgaaaccaatatcgccgtcgccatgcggcagggcgacagcctgcaccaaaccccgcgcgaactgcacgcgtggctgggcaatgcgcttcaggacggcagcgtccgcatcttgtccgccccgatgcataatgtgtcgtcaacggaaatccgccgcaaccttgccggccaaggcgtttcagacggcatcccgcctgccgccgcacgctacatccgcgaacacggtttgtatgaaaaataa

SEQ ID NO: 56799 - DNA, 252 bp, Neisseria meningitidis; identical to SEQ ID NO: 45697

SEQ ID NO: 56800 - DNA, 321 bp, Neisseria meningitidis; identical to SEQ ID NO: 44453

SEQ ID NO: 56801 - DNA, 243 bp, Neisseria meningitidis; identical to SEQ ID NO: 39374

SEQ ID NO: 56802 - DNA, 864 bp, Neisseria meningitidis; identical to SEQ ID NO: 44678

SEQ ID NO: 56803 - DNA, 369 bp, Neisseria meningitidis; identical to SEQ ID NO: 37026

SEQ ID NO: 56804 - DNA, 900 bp, Neisseria meningitidis
ttgccgtctgaaaagaaaatgtgtatcgagatgaaatttatattttttgtactgtatgttttgcagtttctgccgtttgcgctgctgcacaaacttgccgacctgacgggtttgctcgcctaccttttggtcaaaccccgccgccgtatcggcgaaatcaatttggcaaaatgctttcccgagtgggacggaaaaaagcgcgaaaccgtattgaagcagcatttcaaacatatggcgaaactgatgcttgaatacggcttatattggtacgcgcctgccgggcgtttgaaatcgctggtgcgttaccgcaataagcattatttggacgacgcgctggcggcgggggaaaaagtcatcattctgtacccgcacttcaccgcgttcgagatggcggtgtacgcgcttaatcaggatgtaccgctgatcagtatgtattcccaccaaaaaaacaagatattggacgcacagattttgaaaggccgcaaccgctacgacaatgtcttccttatcgggcgcaccgaagggctgcgcgccctcgtcaaacagttccgcaaaagcagcgcgccgtttctgtatctgcccgatcaggatttcggacgcaacgattcggtttttgtggattttttcggtattcagacggcaacgattaccggcttgagccgcattgccgcgcttgcaaatgcaaaagtgatacccgccatccccgtccgcgaggcggacaatacggttacattgcatttctacccggcttgggaatcctttccgagtgaagatgcgcaggccgacgcgcagcgcatgaaccgttttatcgaggaacgcgtgcgcgaacatcccgagcagtatttttggctgcacaagcgtttcaaaacccgtccggaaggcagccccgatttttactga

SEQ ID NO: 56805 - DNA, 513 bp, Neisseria meningitidis; identical to SEQ ID NO: 44991

SEQ ID NO: 56806 - DNA, 1083 bp, Neisseria meningitidis
atgcaaaccgcaaacaaaaaaaccatcctcgttaccggcggtgcgggctttatcggttctgccgttgtccgtcatattatccgaaacacccaagattccgtcgtcaacctcgacaaactgacctacgcgggcaatctcgaatcgctgaccgacattgccgataatccccgctatgctttcgagcaagtggacatttgcgaccgcgccgaactcgaccgcgtattcgcacaacaccggcccgatgccgtgatgcacttggcggcggaaagccatgtcgaccgctctatcggttcggcaggcgagtttatccaaaccaatatcgtcggcacattcaatctgcttgaagcagcccgcgcctactggcaacaaatgccgtctgaacagcacgaagccttccgtttccaccatatttcgactgatgaagtgtatggcgatttaggcggcacagacgatttgtttaccgaaaccacgccctacgcgccgtccagcccctactctgcctctaaagcgtccagcgaccacctcgtccgcgcgtggcagcggacttacggtttgccgaccattgtaaccaactgctccaacaactacggtccttaccattttccggaaaaactcattcctttgatgattctgaacgcgcttgacggcaaaccgctgcctgtgtacggcgacggtatgcaaatccgcgactggctgtttgtcgaagaccacgcgcgcgcactgtatcaggttgttaccgaaggtgttgtcggcgaaacctacaatatcggcggccacaatgaaaaagccaatattgaagtcgtcaaaaccatctgcgccctgctggaagagcttgttcctgaaaaaccggccggtgtggcgcgttatgaagatttgattactttcgtacaagaccgccccggccatgacgtacgctacgccgtcgacgcagccaaaatcaggcgggatttgggctggctgcctttggaaaccttcgagtccggcctccgcaaaaccgtgcaatggtatctggacaacaaaacctggtggcaaaatgtattgaacggcagctatcgtttggaacgtttaggtactggaaaatag

SEQ ID NO: 56807 - DNA, 330 bp, Neisseria meningitidis; identical to SEQ ID NO: 37738

SEQ ID NO: 56808 - DNA, 591 bp, Neisseria meningitidis; identical to SEQ ID NO: 44623

SEQ ID NO: 56809 - DNA, 348 bp, Neisseria meningitidis; identical to SEQ ID NO: 45022

SEQ ID NO: 56810 - DNA, 729 bp, Neisseria meningitidis; identical to SEQ ID NO: 39334

SEQ ID NO: 56811 - DNA, 1485 bp, Neisseria meningitidis; identical to SEQ ID NO: 44497

SEQ ID NO: 56812 - DNA, 273 bp, Neisseria meningitidis; identical to SEQ ID NO: 38717

SEQ ID NO: 56813 - DNA, 1212 bp, Neisseria meningitidis; identical to SEQ ID NO: 45207

SEQ ID NO: 56814 - DNA, 2151 bp, Neisseria meningitidis; identical to SEQ ID NO: 45694

SEQ ID NO: 56815 - DNA, 270 bp, Neisseria meningitidis; identical to SEQ ID NO: 43524

SEQ ID NO: 56816 - DNA, 705 bp, Neisseria meningitidis
atgacctcatgtgaacctgttaatgaacaaaccagtttcaacaatctcgagccaatgacaggatttgaacatacggttacatttgattttcagggcatcaaaatggttatcccttatggctatcttgcacggtatacgcaagacaatgccacaaaatggctttccgacacgcccgggcaggatgcttactccattaatttgatagagattagcgtctattacaaaaaaaccgaccaaggctgggttcttgagccatacaaccagcaaaacaaagcgcactttatccaatttctacgcgacggtttggatagcgtggacgatattgttatccgaaaagatgcgtgtagtttaagcacgactatgggagaaagattgcttacttacggggttaaaaaaatgccatctgcctatcctgaatacgaggcttatgaagataaaagacatattcctgaaaatccatattttcatgaattttactatattaaaaaaggagaaaatccggcgattattactcatcggaactatcataggtatggagagaacgattacagcactagcgtaggttcctgtattaacggtttcacggtacggtattacccgtttattcgggaaaagcagcagctcacacagcaggagttggtaggttatcaccaacaagtagagcaattggtacagagttttgtaaacaattcaagtaaaaaataa

SEQ ID NO: 56817 - DNA, 351 bp, Neisseria meningitidis; identical to SEQ ID NO: 39765

SEQ ID NO: 56818 - DNA, 1746 bp, Neisseria meningitidis; identical to SEQ ID NO: 44429

SEQ ID NO: 56819 - DNA, 273 bp, Neisseria meningitidis; identical to SEQ ID NO: 44503

SEQ ID NO: 56820 - DNA, 1227 bp, Neisseria meningitidis; identical to SEQ ID NO: 44587

SEQ ID NO: 56821 - DNA, 891 bp, Neisseria meningitidis; identical to SEQ ID NO: 44480

SEQ ID NO: 56822 - DNA, 1128 bp, Neisseria meningitidis; identical to SEQ ID NO: 45875

SEQ ID NO: 56823 - DNA, 369 bp, Neisseria meningitidis; identical to SEQ ID NO: 45474

SEQ ID NO: 56824 - DNA, 306 bp, Neisseria meningitidis; identical to SEQ ID NO: 36883

SEQ ID NO: 56825 - DNA, 699 bp, Neisseria meningitidis
ttgccgcttctgtctgtcagccgtttcgggctgcacaccacatctgttcaaaggaaaaccatgtttcaaaattttgatttgggcgtgtttctgcttgccgtcctgcccgtgctgctcgccattaccgtcagggaggtggcgcgcggctatacggcgcgctactggggagacaacactgccgaacaatacggcaggctgacactgaaccccctgccccatatcgatttggtcggcacaatcatcgtaccgctgcttactttgatgttcacgcccttcctgttcggctgggcgcgtccgattcctatcgattcgcgcaacttccgcaacccgcgccttgcctggcgttgcgttgccgcgtccggcccgctgtcgaatctggcgatggctgttctgtggggcgtggttttggtgctgactccgtatgtcggcggggcgtatcagatgccgttggctcaaatggcaaactacggtattctgatcaatgcgattctgttcgcgctcaacatcatccccatcctgccttgggacggcggcattttcatcgacaccttcctgtcggcgaaatattcgcaagcgttccgcaaaatcgaaccttatgggacgtggattatcctgctgcttatgctgaccggggttttgggtgcgtttattgcaccgattgtgcggctggtgattgcgtttgtgcagatgttcgtctga

SEQ ID NO: 56826 - DNA, 1254 bp, Neisseria meningitidis; identical to SEQ ID NO: 45443

SEQ ID NO: 56827 - DNA, 369 bp, Neisseria meningitidis; identical to SEQ ID NO: 38555

SEQ ID NO: 56828 - DNA, 1269 bp, Neisseria meningitidis; identical to SEQ ID NO: 44605

SEQ ID NO: 56829 - DNA, 2115 bp, Neisseria meningitidis
atgttcctcttttcagacggcctacaatccattaataacaataatcgacgaaaacgcattgtgaaaaacgcctacatcccctctcgtggcatccgcaaaatcccccatctcttcaccctattgcctgagtttcatatctgcaaggatgggaaaggagcagaggctgttatcggctggggtttgcgcccgacgacacacaaagcgcgtgcttttgccgctgaacaccagcttccctttattgctttggaagacggctttttacgctcgcttggcctgggcgttgccggctatcctccctattccatcgtctatgacgacatcggcatctactacgacaccacacgtccttcgcgtttggaacaactgattcttgccgccgataccatgccgtctgaaaccttggctcaggcgcagcaggcgatggatttcatcctgcaacaccacctgtccaaatacaaccacgcgcccgaactttcagacgatcatcctttacgctccccatccaaacctgaaaccgtcctcattatcgaccaaacattcggcgatatggccatccaatatggcggcgcagacgcctctacgtttgaactgatgtttcagacggccttaaatgaaaacccgcaagccgatatttgggtcaaaacccatcccgatgttttgtgcggcaaaaaacaaggctatctgacccaactggcgcagcaacaccgcgtcaatcttctggcagaagacatcaatccgatttctttgttgcaaaacatcgataaagtttattgcgttacctcgcaaatgggttttgaggcgcttttgtgcggcaagccgctgaccactttcggcctgccgtggtatgccggatggggcgtgagtgacgaccgccatcctaaaatcgacagccttgttcaaacccaacgccgcgccccccgcaacttgctgcagctcttcgctgcagcctatctgcaatacagccgctacctcaaccccaataccggcgaagcaggcagcctctttgatgtcatcgactatctggcgacggtcaaacgtaaaaacgacaaattgcgtggcgagttatattgcgtcggtatgtctttgtggaaacgcgcggttgccaaaccgttctttaacgtaccctcttgccgtctgaaatttatctcttccacccaaaaactggccggggtcaaactgtccgacgatgcacgcatcctggcttggggcaacggcaaagaggccatcgtccgctttgccgaacaacaccacatccccctgctgcgcatggaagacggctttatccgctcggtcggactcggctccaacttagtgccgccgctgtcgctcgttaccgacgatatgagcatttatttcaatgccgaagccccatcccgccttgaacacatcctgcaaaaccaaaacttcgacgatcaagactttcagacggccttgaagttgcaaaaaatgctgaccgaaaaccatatcagcaaatacaacgtcggcaactcagactttaccgccccatcaaccgacaaaaccgtgatcctcgttcccggtcaggttgaggatgatgcgtctatccgctacggttcgccccaaatctatcacaatctggatttgctccgtaccgtacgcgaacgccatcccgatgcctatatcatctacaaaccgcatcccgatgtagtcagcggtaaccgcatcggccatatttcccctgaagatgctgcacgatatgccgaccaaaccgccgaacaagccgacatcctgacctgtctccaatacgcagacgaaatacataccatgacttcgctgaccggttttgaagccttgttgcgcggcaaaaaagtcagctgctacggcctgcctttttacgcaggctgggggcttacccaagatctgctccccatcccgcgccgtagccgcagacttgagctttggcagctgattgccggcacgctcatccactatcccgactacatccaccccgaaacccatcaggccataaatgcagaaaccgcagcccaaatcctgatacgacaaaaaaatatgcaaaaaaacaacaacggattacatcgcgggtgctttgccaaaaaattaggtaaaatcaaacaactatatcgatctttcaaataa

SEQ ID NO: 56830 - DNA, 1311 bp, Neisseria meningitidis; identical to SEQ ID NO: 44274

SEQ ID NO: 56831 - DNA, 420 bp, Neisseria meningitidis
atgaatctcgtgaaactgctggcgaataactggcaaccgattgccatcatcgcgcttgtcggcacgctcttggcggtgtcgcaccatcaaggctacaagtcggcttttgcgaagcagcaggcggtcattgacaagatggaaaaagacaaagcgcaagccctgctgttgtcggctcaaaactacgcccgcgagctggaacaggcgcgtgcggaagctaaaaaatatgaagtcaaggcgcacgccgtcggcatggctttggcgaaaaaacaggcggaagtcagccgtctgaaaacggaaaataaaaaggaaatcgaaaatgtccttactcaagaccgtaaaaatgcaggcggcggttgtattgacggctttggccatcacggcttgcagctctacaagcgcgccctcggctacggaaattaa

SEQ ID NO: 56832 - DNA, 678 bp, Neisseria meningitidis; identical to SEQ ID NO: 44558

SEQ ID NO: 56833 - DNA, 918 bp, Neisseria meningitidis; identical to SEQ ID NO: 45665

SEQ ID NO: 56834 - DNA, 1380 bp, Neisseria meningitidis; identical to SEQ ID NO: 53656

SEQ ID NO: 56835 - DNA, 1446 bp, Neisseria meningitidis
atgaactggtctgatttgaatttaatgcccgccatgcccgaagtcgcgctgctgtcgctgctggtgttattgttgctggcagacttgtgggtcagtgatgacaaacgccgttggacgcattacggcgcgttggcaacggtggcggttacggctgtggtgcagcttgccgtttgggaacagggcagcacgtcttcgttcaacggcatgtatattgcagacggtatgtcgcgtttggcaaaaatggttttatatgccttgacgtttgccctgtttgtttatgccaagccctacaaccaagtgcgcggtattttcaaaggcgagttttacaccctgtcgctgtttgccctcttgggcatgagcgtgatggtgagcgcggggcattttttaactgcctatatcggtttggaactcttgtcgcttgccctttacgccctgattgccctgcgccgcgattccggctttgccgccgaagccgccttgaaatattttgttttgggcgcgctggcatccggcctgctgctctacggtatttctatggtttacggcgcaaccggttcgctggaatttgccggcgtgctcgcctcttccttcaatgaagaagccaatgaatggctgttgaaactgggtctggtgtttatcgtcgtcgccgttgcgttcaaactcggcgcggtgccgttccatatgtgggtgcccgacgtgtatcacggcgcgcccacttctgttaccgccttggtcggcactgccccgaaagtcgccgccgtcgttttcgctttccgcatcctcgttaccgggctgggaaccgtgcatcatgactggtctctgatgtttgccctgcttgccgccgcctcgctgctggtcggcaaccttgccgccatcatgcagaccaatatcaaacgtatgctcgcctattccaccgtatcgcatatgggctttatcttgttggcgtttatggcaggcgcggtcggctttgcggcgggtctctattacgccattacctacgcgctgatggcggcggcagggttcggcgtgttgatggtgttgtcggatggggacaacgagtgcgaaaacatcagcgatttggcagggttgaaccaacaccgcgtatggcttgcctttttgatgctgctggttatgttctctatggcgggcattccgccgctgatgggcttttacgccaaattcggcgtgattatggcactcttaaaacaaggctatgtttggttgtccgtatttgccgtcgtgatgtcgctgattggcgcgttctactacctgcgcgtggtcaaagtcatgtattttgacgaatccggccgcgcccgtcccaccgtcggcggcaacaatgccgcaaaattccttttgagcgtcaacgcgctgctgttggtgctgtggggcattatgccgcaaaccgttatcgactggtgcgccaaggcgttggaaaacacgctgtaa

SEQ ID NO: 56836 - DNA, 732 bp, Neisseria meningitidis; identical to SEQ ID NO: 44931

SEQ ID NO: 56837 - DNA, 906 bp, Neisseria meningitidis
atggacattctggacaaactggtcgatttcgcccaattgacgggcagtgtggatgtgcagtgccttttgggcggacaatggtcggtacggcatgaaaccttgcaacgcgaaggattggtacacattgttacatcgggcagcggctatctctgcatcgacggcgaaacttccccgcgtccggtcagtacaggggatattgtatttttcccgcgcggcttgggtcatgtgttgagccacgacggaaaatgcggagaaagtttacaaccggatatgcggcagcacggtgcgtttacggtcaagcagtgcggcaacggacaggatatgagcctgttttgcgcccgtttccgctacgacacccacgccgatttgatgaacgggctgcctgaaaccgtttttctgaacattgcccatccgagtttacagtatgtggtttcaatgctgcaactggaaagcaaaaaacctttgacggggacggtttccgtggtcaacgcattgtcgtctgtcctgctggtgcttatcctgcgcgcctatctcgaacaggataaggatgtcgaactctcgggcgtattgaaaggttggcaggacaaacgtttgggacatttaatccaaaaggtgatagacaaaccggaagacgaatggaatgtcgacaaaatggtggcggctgccaatatgtcgcgcgcacaactgatgcgccgtttcaaaagccgggtcggactcagcccgcacgcctttgtgaaccatatccgcctgcaaaaaggcgcgttgctgctgaaaaaaaacccggattcggttttgtcggtcgcactgtcggtaggctttcagtcggaaacgcacttcggcaaggcgttcaaacggcaatatcacgtttcgccgggtcaataccggaaagaaggcgggcaaaaataa

SEQ ID NO: 56838 - DNA, 1098 bp, Neisseria meningitidis
ttgcgatataattcaaaccatttgccaaaaccgtcaaacactatgccgtctgaaacacgcctgccgaactttatccgcgtcttgatatttgccctgggtttcatcttcctgaacgcctgttcggaacaaaccgcgcaaaccgttaccctgcaaggcgaaacgatgggcacgacctataccgtcaaatacctttcaaataatcgggacaaactcccctcacctgccgaaatacaaaagcgcatcgatgacgcgcttaaagaagtcaaccggcagatgtccacctatcagcccgactccgaaatcagccggttcaaccaacacacagccggcaagcccctccgcatttcaagcgacttcgcacacgttactgccgaagccgtccgcctgaaccgcctgacacacggcgcgctggacgtaaccgtcggccccttggtcaacctttggggattcggccccgacaaatccgttacccgtgaaccgtcgccggaacaaatcaaacaagcagcatcttatacgggcatagacaaaatcattttgaaacaaggcaaagattacgcttccttgagcaaaacccaccccaaggcctatttggatttatcttcgattgccaaaggcttcggcgttgataaagttgcgggcgaactggaaaaatacggcattcaaaattatctggtcgaaatcggcggcgagttgcacggcaaaggcaaaaacgcgcgcggcgaaccttggcgcatcggcatcgaacagcccaacatcgtccaaggcggcaatacgcagattatcgtcccgctgaacaaccgttcgcttgccacttccggcgattaccgtattttccacgtcgataaaagcggcaaacgcctctcccatatcattaatccgaacaacaaacgacccatcagccacaacctcgcctccatcagcgtggtcgcagacagtgcgatgacggcggacggcttgtccacaggattattcgtattgggcgaaaccgaagccttaaagctggcagagcgcgaaaaactcgctgttttcctgattgtcagggatacaggcggctaccgcaccgccatgtcttccgaatttgaaaaactgctccgctaa

SEQ ID NO: 56839 - DNA, 4179 bp, Neisseria meningitidis; identical to SEQ ID NO: 44999

SEQ ID NO: 56840 - DNA, 1251 bp, Neisseria meningitidis; identical to SEQ ID NO: 41516

SEQ ID NO: 56841 - DNA, 1179 bp, Neisseria meningitidis; identical to SEQ ID NO: 44657

SEQ ID NO: 56842 - DNA, 942 bp, Neisseria meningitidis; identical to SEQ ID NO: 38350

SEQ ID NO: 56843 - DNA, 240 bp, Neisseria meningitidis; identical to SEQ ID NO: 44237

SEQ ID NO: 56844 - DNA, 2766 bp, Neisseria meningitidis; identical to SEQ ID NO: 45507

SEQ ID NO: 56845 - DNA, 492 bp, Neisseria meningitidis; identical to SEQ ID NO: 42478

SEQ ID NO: 56846 - DNA, 369 bp, Neisseria meningitidis; identical to SEQ ID NO: 42386

SEQ ID NO: 56847 - DNA, 840 bp, Neisseria meningitidis; identical to SEQ ID NO: 39493

SEQ ID NO: 56848 - DNA, 987 bp, Neisseria meningitidis; identical to SEQ ID NO: 44177

SEQ ID NO: 56849 - DNA, 426 bp, Neisseria meningitidis; identical to SEQ ID NO: 49760

SEQ ID NO: 56850 - DNA, 2226 bp, Neisseria meningitidis; identical to SEQ ID NO: 44293

SEQ ID NO: 56851 - DNA, 258 bp, Neisseria meningitidis; identical to SEQ ID NO: 40560

SEQ ID NO: 56852 - DNA, 948 bp, Neisseria meningitidis; identical to SEQ ID NO: 45487

SEQ ID NO: 56853 - DNA, 1092 bp, Neisseria meningitidis; identical to SEQ ID NO: 46293

SEQ ID NO: 56854 - DNA, 861 bp, Neisseria meningitidis; identical to SEQ ID NO: 45023

SEQ ID NO: 56855 - DNA, 816 bp, Neisseria meningitidis; identical to SEQ ID NO: 44574

SEQ ID NO: 56856 - DNA, 1455 bp, Neisseria meningitidis; identical to SEQ ID NO: 44721

SEQ ID NO: 56857 - DNA, 1521 bp, Neisseria meningitidis; identical to SEQ ID NO: 39047

SEQ ID NO: 56858 - DNA, 564 bp, Neisseria meningitidis; identical to SEQ ID NO: 44781

SEQ ID NO: 56859 - DNA, 300 bp, Neisseria meningitidis; identical to SEQ ID NO: 45286

SEQ ID NO: 56860 - DNA, 1194 bp, Neisseria meningitidis
atgaatcccaaacacctcatcgcattttccgccctgttcgccgccacgcaggcaaacgctctgcccgtcgcctccgtcagcctcgacaccgttaccgtttccccgtccgccccctacaccgatacaaacgggctcttgaccgactacggcaacgccgccgcctcgccttggatgaaaaaactccgatccgtcgcacaaggcagcggcgagaccttccgcatcctgcaaatcggcgactcgcacaccgccggcgacttctttaccgacagcctccgcaaacgcctgcaaaaaacatggggcgacggcggcataggctgggtctaccccgccaacgtcaaagggcagcgcatggcggcagtccggcacaacggcaactggcaaagcctcaccagccgaagtgcagcagcagacttcccgctcggtggcatcctcgcccacaccggcagcggcggcagcatgaccctgaccgcatcggacggcaagaccggcaaacagcgcatttccctgtttgccaaacccctgctcgccgaacaaaccctgaccgtcaacggcaacaccgtctccgccaacggcggcggctggcaggtactggatacgggcgcggcactgcccctgaccatacagaccgaaatgccgtgggacatcggcttcatcaacatcgaaaatcccgccggcggcattaccgtttccgcgatgggcatcaacggcgcacaattaacccagtggtcgaaatggcgtgccgaccgtatgaacgaccttgcccaaaccggcgccgatctagtcatccttgcctacggcaccaacgaagccttcggcgacaacatcgacattgccgacactgaacaaaaatggctggataccgtccgccaaatccacgacagcctgcctgccgccggcatcctcatcatcggcgcacccgaatccctgaaaaacacgctcggcgtatgcggcacacgtcccgtccgcctgaccgaagtccaacagatgcagcggcgcgtcgcccggcagggacaaaccatgttctggtcttggcaaaacgccatgggcggcatatgcagcatgaaaaactggctcaaccaaggatgggccgccaaagacggcgtacacttctccgccaaaggctaccggcgcgcggcggaaatgctcgccgacagcctcgaagaactcgtccgcgccgccgcaatcaggcaataa

SEQ ID NO: 56861 - DNA, 1197 bp, Neisseria meningitidis; identical to SEQ ID NO: 39631

SEQ ID NO: 56862 - DNA, 537 bp, Neisseria meningitidis; identical to SEQ ID NO: 38262

SEQ ID NO: 56863 - DNA, 1044 bp, Neisseria meningitidis
atgcagattaccgacttactcgccttcggcgctaaaaacaaagcatccgaccttcacctgagttcgggcatatcccctatgattcgggttcacggcgatatgcggcgcatcaaccttcccgaaatgagcgcggaagaggtcggtaatatggtaacttcggtgatgaacgaccaccagcggaaaatctaccagcaaaacttggaagtcgacttctcgttcgaactgcccaacgtcgcccgattccgcgtcaacgccttcaacatcggccgcggtcccgccgccgtattccgcaccattcccagcaccgtcttatcgctggaagaattgaaagccccgagcattttccaaaaaatcgcagaatcgccgcgcggcatggtattggttaccggccctaccggttcgggcaaatcgaccacgcttgccgcgatgatcaactacatcaacgaaacccagccggcacacatcctgaccatcgaagacccgatcgaattcgtccaccaaagcaaaaaatccctgattaaccagcgcgagctgcaccagcacaccctcagcttcgccaacgcgctgcgttccgcattgcgcgaagaccccgacgttatccttgtcggcgagatgcgcgaccccgaaaccatcggcttggcactgaccgccgccgaaaccggacacttggttttcggcacgctgcacacgaccggcgcagcaaaaaccgtcgaccgtatcgtggacgtattcccggcgggagaaaaagaaatggtgcgctctatgctgtccgaatcgctgaccgccgtcatctcccaaaacctgctgaaaacgcacgacggcaacggccgtgtcgcctcgcacgaaatcctgattgccaaccccgccgtccgcaacctcatccgcgaaaacaaaatcacgcagattaactccgtcctgcaaaccgggcaggcgagcggtatgcagacaatggaccaatcgctgcaatcgctggtgcgccaagggctgatcgcaccggaagtcgcacgcagacgcgcgcaaaacagcgaaagtatgagtttctga

SEQ ID NO: 56864 - DNA, 492 bp, Neisseria meningitidis; identical to SEQ ID NO: 45059

SEQ ID NO: 56865 - DNA, 1344 bp, Neisseria meningitidis; identical to SEQ ID NO: 39017

SEQ ID NO: 56866 - DNA, 1002 bp, Neisseria meningitidis; identical to SEQ ID NO: 44449

SEQ ID NO: 56867 - DNA, 669 bp, Neisseria meningitidis; identical to SEQ ID NO: 45133

SEQ ID NO: 56868 - DNA, 1215 bp, Neisseria meningitidis
atgagtgaagcagaatatttttcccatttcatatctaacggcaatgggaagttattagaaattccgcaacgtaggggcaggcaggacggcgtttttatagattggttgtcattcacactgcacgaagattccttgctgaaagtttccggatgccccttagtttccgatgccgaatatatgtttgttttaagcaaaaaattggaggaaatattagggtttggcatcacgagcagatgcaaatcgaagggcaataaattttacgattcgatgtttaggttgggatcggaagaagttgactacggcgaagtccattacggaggtcagcgaaatacggttttaatcgaattgaaaggtgtaggttgcaacattgcaaatccaggttgggaattgaggcttaagcagtttttggaagattcattgaggccgaggataacgcgggtagatttggcacttgatttttttgatggggagtacacgccggaacaggcacttttggatcacgataatggtttttttgataacagcaatcaaaggccgaaatctgaaacgatcggtacggcttggcggaatgaggacgggagcggcaagacattttatgtaggtcgcaagaaaaattctcgttttgttcgtgtttatgagaaaggcaggcagcttggagataaagaaagcaaatgggtaaggttcgagatccagtttaattatggagatatagaaatacccttggatattttaataaatcagggttcgtatttctgtggagcttttccaatttgtagaaaatttaaaaatatgccggttcccgaaaggtttgatcagagaaagaaaacgcttaatttaactttcgagcataaattgcattacgcgaaaaacgcggttggaaaactggtcaatttcatgattgaaatgggttttgataatagcgaaattgtggaatctttaaaggcagattcgggatttcccaaaggattagaacctgaaaaatatgctctggaaatgttaagggacggtttgaaacacggttttattcatgaacagccggatattgatttggaaattgaacttgatgaattgggggttattgcttttaaaaattctgacaaattcgatagggaaaaaaggctttttagtcctgattatgatgccgagaaagaaaggaaatatcaggattatctagatgaagtttatcatcaaaatgtaaattatgattatttttaa

SEQ ID NO: 56869 - DNA, 591 bp, Neisseria meningitidis; identical to SEQ ID NO: 44465

SEQ ID NO: 56870 - DNA, 1266 bp, Neisseria meningitidis; identical to SEQ ID NO: 47268

SEQ ID NO: 56871 - DNA, 795 bp, Neisseria meningitidis; identical to SEQ ID NO: 44749

SEQ ID NO: 56872 - DNA, 600 bp, Neisseria meningitidis; identical to SEQ ID NO: 45784

SEQ ID NO: 56873 - DNA, 807 bp, Neisseria meningitidis; identical to SEQ ID NO: 44863

SEQ ID NO: 56874 - DNA, 1749 bp, Neisseria meningitidis; identical to SEQ ID NO: 44747

SEQ ID NO: 56875 - DNA, 2280 bp, Neisseria meningitidis; identical to SEQ ID NO: 47413

SEQ ID NO: 56876 - DNA, 903 bp, Neisseria meningitidis; identical to SEQ ID NO: 45584

SEQ ID NO: 56877 - DNA, 990 bp, Neisseria meningitidis; identical to SEQ ID NO: 44298

SEQ ID NO: 56878 - DNA, 600 bp, Neisseria meningitidis; identical to SEQ ID NO: 38221

SEQ ID NO: 56879 - DNA, 1284 bp, Neisseria meningitidis; identical to SEQ ID NO: 44141

SEQ ID NO: 56880 - DNA, 714 bp, Neisseria meningitidis; identical to SEQ ID NO: 49230

SEQ ID NO: 56881 - DNA, 819 bp, Neisseria meningitidis
atggtattatggcagttaacttttgttaataatgctgtttcggggctttcccgcgttgagtccgcccgtaaaggcattgaaggaaaaaatatgaccgcctaccgtatcgcacccagtattttgtcggcagactttgcccgcctcggagaagaggtggaaagcgtcattgcggcaggtgcagatctgatccattttgacgtgatggacaaccattatgtgccgaacctgaccttcggccctatggtttgcgcggcgttgaagccttatgcaagcgtgccgatcgatgtgcatctgatggtcgaacccgttgacgacctgattcagtcgtttgccaaagcaggagcatcgattatcacttttcatcccgaagcgagccgccatatcgaccgcagcttgagcctgattcgtgatatgggctgtcaggcggggctggtgttgaatccggcaacgcccgtatatctgttggaaaacgtattggacaggctggatatggttttgctgatgtcggtcaaccccggattcggcggacaaagcttcatcccgcacacccttgaaaaaatccgccgggtgcgggcgatgctggatcggtacgaagcacaaagcgggcggcacatcgccatcgaagtggacggcggcatcaaaaccgacaatattgccgccgttgcccgagctggtgcggatacctttgttgccggttctgcgattttcggcaaaccagactataaggcggtgattgatgcgatgagggctgaactggaaaaaagcggcaggctgaaccttgcgccaatgattgaaatagaaatgccgtctgaaaattag

SEQ ID NO: 56882 - DNA, 1194 bp, Neisseria meningitidis; identical to SEQ ID NO: 44495

SEQ ID NO: 56883 - DNA, 1410 bp, Neisseria meningitidis; identical to SEQ ID NO: 55247

SEQ ID NO: 56884 - DNA, 1881 bp, Neisseria meningitidis; identical to SEQ ID NO: 38456

SEQ ID NO: 56885 - DNA, 1227 bp, Neisseria meningitidis; identical to SEQ ID NO: 46159

SEQ ID NO: 56886 - DNA, 231 bp, Neisseria meningitidis; identical to SEQ ID NO: 44466

SEQ ID NO: 56887 - DNA, 3486 bp, Neisseria meningitidis; identical to SEQ ID NO: 45489

SEQ ID NO: 56888 - DNA, 324 bp, Neisseria meningitidis; identical to SEQ ID NO: 37053

SEQ ID NO: 56889 - DNA, 639 bp, Neisseria meningitidis; identical to SEQ ID NO: 44351

SEQ ID NO: 56890 - DNA, 786 bp, Neisseria meningitidis; identical to SEQ ID NO: 44866

SEQ ID NO: 56891 - DNA, 1257 bp, Neisseria meningitidis; identical to SEQ ID NO: 45359

SEQ ID NO: 56892 - DNA, 897 bp, Neisseria meningitidis; identical to SEQ ID NO: 45354

SEQ ID NO: 56893 - DNA, 1194 bp, Neisseria meningitidis; identical to SEQ ID NO: 45668

SEQ ID NO: 56894 - DNA, 465 bp, Neisseria meningitidis; identical to SEQ ID NO: 36919

SEQ ID NO: 56895 - DNA, 465 bp, Neisseria meningitidis; identical to SEQ ID NO: 45291

SEQ ID NO: 56896 - DNA, 216 bp, Neisseria meningitidis; identical to SEQ ID NO: 39553

SEQ ID NO: 56897 - DNA, 1245 bp, Neisseria meningitidis; identical to SEQ ID NO: 44839

SEQ ID NO: 56898 - DNA, 1569 bp, Neisseria meningitidis; identical to SEQ ID NO: 40511

SEQ ID NO: 56899 - DNA, 873 bp, Neisseria meningitidis
ttgcgaccatctgaatcatttggacaaactatgtgtcaactgctgggcatgaactgcaatacgccgaccgatattatgttttcctttgaaggcttccgccggcgcggcggcattaccgaccatcatgccgacggtttcggcatcggctttttcgaaggcaaaggcgtgcgcctgttccacgacgacaagccgagcgcaaattcccccgtcgccgacctcgtgcgtgcctaccaaatcaaatcggaaaacgtcatcgcacatatccgcaaagcatcgcaaggacaaacctcgctggcgaacacccatccctttatgcgcgaaatgtggggcggctactggctgtttgcccacaacggacatttgattgattttttccccgaacagggcgaatttttccaccccgtcggcacaaccgattccgaacgcgcgttctgccacatcctcaaccgcctgcgcacccgctttgccgcccgtcccgacgacgacacgctgtttgacgcgattgcggggctgacgcacgaaatccgcaagttcgggctgtttaactttatgctttcagacggcattgccctgtttgcccacgccagcacactgctgcactacatcgtccgccaagccccgttcggcaaggcgcgcctgctcgacgacgacgtgatggtcgattttgccgaagtaaccacgccctccgaccgcgtcgccgttatcgccaccctgccactgacccgcgacgaatcatggtcccaacttgccgtggacgaactggtcatgttccgcgaaggcaacatcgtccgacacgaccgtcccgaaaaccccgtctatatgagtgccgaagaaggtctggaaatcgcccgcgccgccggcgtatcggtttga

SEQ ID NO: 56900 - DNA, 3204 bp, Neisseria meningitidis; identical to SEQ ID NO: 36673

SEQ ID NO: 56901 - DNA, 774 bp, Neisseria meningitidis; identical to SEQ ID NO: 39194

SEQ ID NO: 56902 - DNA, 393 bp, Neisseria meningitidis
gtggtgtttggttgtcttgcgctgcatcaagctgtatcgggcgcgcaaagggaatgccgccgtcaaacggcatatgcgcgatactttgtcgctgaacgacgcggtcgagaagtgcgcgccgtcgatgcgcctttgtccaaactggcgcaagaggcattgcagtcttaccgcaactaccgccgaaacgaagcgtccgaactggcgcacgctttgccgttgaacgagtatttggtcattcaaatccgcaacagtatggcgcagattatgcgccggtttgattacgggatgaccgcgcttgcctccatcggcgcgaccgcgccgtttatcgggctgttcggcacggtttgggggatttaccacgccctgatcatatcgggcaaagcgggcagatga

SEQ ID NO: 56903 - DNA, 822 bp, Neisseria meningitidis; identical to SEQ ID NO: 44347

SEQ ID NO: 56904 - DNA, 777 bp, Neisseria meningitidis; identical to SEQ ID NO: 45453

SEQ ID NO: 56905 - DNA, 354 bp, Neisseria meningitidis; identical to SEQ ID NO: 39616

SEQ ID NO: 56906 - DNA, 411 bp, Neisseria meningitidis; identical to SEQ ID NO: 44362

SEQ ID NO: 56907 - DNA, 1647 bp, Neisseria meningitidis
atgaaacactttcacgacttacccgcatggtcgaaattgtggaaccactttgacgacagcaaaacattgcatatgcgcgaaatgttcgagcaagacccgcagcgtgcggaacgctactggctgcaagtcggcggactgacgctggactactccaaaaaccgcatcaacgacgaaaccatgtcgcttttgttcgagcttgcccgagaagcaggcgtgccggagcggatgcggcagatgttccacggcgaaaaaatcaataccaccgaaaaccgcgccgtcctgcatgtcgcccttcgcaaccgcaccaattcgccgattgtggttgacggtgaagatgtgatgcccaaagtcaaccgcgttttgcaacgtatgggcgaatttgcacacgaagtccgcagcggaagctggctgggctataccaaccaagtcattaccgacgttgtcaacatcggcatcggcggatcggatttgggcccgctgatgatgtgtaccgcgctcaaacctttcggtcatccgcgcctcaatatgcacttcgtctccaacgtggacggctcccaactgcgcgacgtattgtccaaagtccaccccgaaaccacgctgttcatcatcgcctccaaaacatttaccacgcaggaaacgctgaccaacgcgctgaccgcgcgcgaatggtttttgaatcatgcgggcgacgaagaagccgttgccaaacacttcgccgccgtttccaccaatcaaaaagccgtcgccgaattcggcatcgacaccgccaatatgtttgaattttgggattgggtcggcggtcggtacagcctgtggtccgccatcggattgccgattatgctgtatctcggcgaagaaaacttcattgaaatgctcaacggcgcgcacctgatggaccaacacttcatcaacacaccgctcgagcgcaacctgcccgtcattctcgccctcatcggcatctggtatatcaactactacggcggcggcagccacgtcatcgcgccttacgaccaacatttgcaccgcctgcccaaattcatccagcagctcgatatggaaagtaacggcaaacaggttacgttggacggcaaagcagtcggacacgaaacctcgccgattatctggggcgaaacgggcattaacggccagcacgccttcttccaactgctgcaccaaggcacgcacattacccccatcgacctgattgcctcgcttgaaaaacgcagcaacctgcccggacaccacgaaatcctgcttgccaacgtcttcgcccaagcagaagcctttatgcgcggcaaaacccccgacgaagtccgcgccgaactcaaagcgcagggtatggatgaggcgcgcatcgaagagctggtcccgcacaaaaccttctccggtaaccgcccgaccaacctcatcctgatggacaaggtcaacccgcgtaatatgggcagcctgattgccatgtacgaacacaaaaccttcgtacaaggcatcatttggggcatcaacagcttcgaccagtggggcgtggaactcggcaaacaactggctaaaaccattttgggcgaactgaccggcgaaaccgggtcgcaaaagcacgacagctcgaccgaacgcctgatcaacctctacctgcagaccaaccgcaaataa

SEQ ID NO: 56908 - DNA, 273 bp, Neisseria meningitidis; identical to SEQ ID NO: 44810

SEQ ID NO: 56909 - DNA, 540 bp, Neisseria meningitidis; identical to SEQ ID NO: 44661

SEQ ID NO: 56910 - DNA, 1059 bp, Neisseria meningitidis; identical to SEQ ID NO: 38958

SEQ ID NO: 56911 - DNA, 1296 bp, Neisseria meningitidis; identical to SEQ ID NO: 45572

SEQ ID NO: 56912 - DNA, 1470 bp, Neisseria meningitidis; identical to SEQ ID NO: 38653

SEQ ID NO: 56913 - DNA, 1050 bp, Neisseria meningitidis
atgtccaaacagcccaccagcaaacgccaatggcgcgacggcgcagccccgtctgccaagaaaaccgccaaacctttcaaaagcaaagcccgtcccaaaggcgaaacgcgcaaaaccgccacccaagcttacggacaaaaagcttcagacggcatcaagccgcaaaacgcccccaaacagcgcgccgccaaagccaaaaaactcgtcgtccgcaatcccaaccaaaaaattatggaacacgcgcgcgatttgaaagaacgccgcagcgacctgtcgcgcatggaacccgaacgcctgcaaaaagtgcttgccgcgtccggcgtcggctcgcgccgcgaaatggaagaatggattaccaacggctggataacggtcaacggcaaaaccgcgcaactgggcgacaaagttacccccgacgaccacgttaccgtcaaaggcagcatcatcaagctcaaatgggcggaccgcctgccgcgcatcatcctgtattacaaacaagaaggcgaaatcgtttcccgtgacgacccgcaaggccgcgtcagcatattcgaccgcctgccgcaggccgccagcagccgctgggtcgccatcggacgcttggacatcaacaccagcggacttctgattcttaccacctccggcgaactcgtccaacgtttcgcccaccccagcttcgaagtcgaacgcgaatacgccgtgcgcgtcttgggcgggctgaccggcgaacaaatgcgcgtcctcaccgaagaaggcgtgatgctcgaagacggcttggcaaaagtcgaacgcatccgcgaacaaggcggcgaaggcgcgaacaaatggtacaacgtcgtgattaaagaaggccgcaaccgcgaagtgcgccgcatttttgaaagccaaggactcaccgtcagccgcctcgtgcgcgtcggcttcggtcccatcggactgcccaaccgcctcaaacgcgggcagttctacgaactcaaccccgccgaagtcgccaacatcctcaaatgggcggaaatgctgctgccgggcgaataccgccgcaaaaaagcctaa

SEQ ID NO: 56914 - DNA, 567 bp, Neisseria meningitidis; identical to SEQ ID NO: 41762

SEQ ID NO: 56915 - DNA, 327 bp, Neisseria meningitidis; identical to SEQ ID NO: 39180

SEQ ID NO: 56916 - DNA, 918 bp, Neisseria meningitidis; identical to SEQ ID NO: 45098

SEQ ID NO: 56917 - DNA, 474 bp, Neisseria meningitidis; identical to SEQ ID NO: 36318

SEQ ID NO: 56918 - DNA, 990 bp, Neisseria meningitidis; identical to SEQ ID NO: 44298

SEQ ID NO: 56919 - DNA, 852 bp, Neisseria meningitidis; identical to SEQ ID NO: 45378

SEQ ID NO: 56920 - DNA, 525 bp, Neisseria meningitidis; identical to SEQ ID NO: 44934

SEQ ID NO: 56921 - DNA, 540 bp, Neisseria meningitidis; identical to SEQ ID NO: 55041

SEQ ID NO: 56922 - DNA, 372 bp, Neisseria meningitidis; identical to SEQ ID NO: 36794

SEQ ID NO: 56923 - DNA, 318 bp, Neisseria meningitidis; identical to SEQ ID NO: 45471

SEQ ID NO: 56924 - DNA, 735 bp, Neisseria meningitidis; identical to SEQ ID NO: 44212

SEQ ID NO: 56925 - DNA, 627 bp, Neisseria meningitidis; identical to SEQ ID NO: 39831

SEQ ID NO: 56926 - DNA, 324 bp, Neisseria meningitidis; identical to SEQ ID NO: 44318

SEQ ID NO: 56927 - DNA, 237 bp, Neisseria meningitidis; identical to SEQ ID NO: 44770

SEQ ID NO: 56928 - DNA, 2751 bp, Neisseria meningitidis
atgctgacaaacattgccaagaaaatcttcggcagccgcaacgaccgcttgctgaaacaataccgtaaatccgttgccagaatcaacgcgctcgaagaacagatgcaagccctaagcgatgctgatctgcaagccaaaactgccgaattcaaacaacgcctcgccgacggtcagactttggacggcattttgcccgaagccttcgccgtctgccgcgaagcgtcccgccgcaccctcggtatgcgccacttcgacgtgcagcttatcggcggtatggtgctgcacgacggcaaaatcgccgaaatgcgtaccggcgaaggcaaaaccctggtcgccaccctcgccgtctatctcaacgcgctggccggcaaaggcgtacacgtcgttaccgtcaacgactacctcgcctcacgcgatgcgggcattatggagccgctctataatttcctcggtctgaccgtcggcgtgattatttcagatatgcagccgttcgaccgtcaaaacgcctatgccgccgatatcacctacggcaccaataatgaattcggcttcgactacctgcgcgacaatatggttaccgaccaatacgacaaagtgcagcgcgaattgaattttgccgttgtcgatgaagtggattccatcttgattgacgaagcgcgcactccgctgattatctccggtcaggcggatgacaacatccagttgtaccaaatcatgaacaccgttccgccccacctcgtccgtcaagagacagaagaaggcgaaggcgactattgggtcgacgaaaaggcacatcaggtcatcctgagcgaagcaggtcacgaacacgccgagcaaatcctgacccaaatgggattgctggcagaaaacgactccctctattccgccgccaatatcgccctgatgcaccaccttatggcggcattgcgcgcgcattccctcttccacaaagaccaacattacgtcatccaagacggcgaaatcgtcatcgtggacgaattcaccggccggctgatgtccggccgccgctggtcggagggtctgcatcaagccgtcgaagccaaagaaggcgtggaaatcaaacgcgaaaaccaaacccttgcctccatcaccttccaaaactatttccgcctgtacaccaagctctccggcatgaccggcacagccgataccgaagctttcgagttccaaagcatctacaacctcgaaaccgtcatcatcccgaccaaccgccctgtacagcgcaaagacttcaacgaccagattttccgttccgccgaagaaaaattcgaagccgtcgtcaaagacatcgaagaatgccacaaacgtgggcagcccgtcctcgtcggcaccaccagcatcgaaaactccgaactggtctcccaccttctgcaaaaagccggactgccgcacaacgtcctcaacgctaaagaacacgaacgcgaagccctgattgtcgcccaagccggcaaagtcggcgcgattaccgttgccaccaatatggcgggacgcggtacggacatcgttttaggcggcaacctgaagcaccaaaccgatgccatccgtgccgacgaaaccttgagcgacgaagagaaacaggcacaaatcgccgcactcgaaaacggctggcaggcagaacacgataaagtaatggaagcaggcggcctgcacatcatcggtacggaacgccacgaaagccgccgtatcgacaaccaattgcgcggacgttccggccgtcagggcgaccccggatccagccgtttctacctttcgtttgaagacccgctgctgcgcttattcgcactcgaccgcgccgccgccatcctcaaccgtctcgcccccgaacgcggcgttgccatcgaacacaacctgctgacgcgccaaatcgaaggggcgcaacgcaaagtcgaaggcagaaacttcgatatgcgcaaacaggttttggaatacgacgacgttgccaacgaacagcgcaaagtcatttacagccagcgcaacgaaattctgaccagcaaagacatcagcgacctgatgcaggaaatccgttctgatgtcgtcagcgacctcgtggatacctatatgcctcccgacagcatggaagaacaatgggacatcccgactttggagaaccgtctggctgccgaattcagactgcacgaagacatccaatcctggctgaaggcggacaatgcgattgacggtcaagacatcaaagaacgcctgatcgaacgcatcgaaaacgaatatgccgccaaaaccgaactggtcggtaagcaggcaatggccgatttcgagcgcaacgtgatgttgcaggtcatcgacaaccaatggcgcgaacacctcgccgctatggactacctgcgacaaggcatacacctgcgcagctatgcccaaaaaaatccgaagcaggaatataaacgtgaagcctttaccatgttccaagacctgtggaacggcatcaaattccatattgcctccctgcttacctcggttcaaatcgaacaaaaccctgtcgcggtggttgaagagcaacccatcggcaacatccagtccatccattccgaatcgcccgatatggaagaacttttgggtcagtcgcaaaccgatctggttaccgaagcctttaatcccgatgggacagatttcagccccgaagccttggaagcgcgggggcaaatcgtccaccgcaacgacccctgcccctgcggcagcggtttgaaatacaaacaatgccacggcaaactggcttaa

SEQ ID NO: 56929 - DNA, 1314 bp, Neisseria meningitidis
atgatgaacacgccgcatccgcgcccgaaaatcgccgtcatcggcgcaggctgggcaggactgtccgccgccgtcaccttggcgcggcacgccgacgttaccctgtttgaagccggccggcaggcgggcggcagggcgcgcgcactggccggaaataccgacggtttcggttttttggacaacgggcagcacattttgctcggcgcataccggggcgtgttgcgcctgatgaaaaccatcggttcagacccccgtgccgcctttttgcgcgtaccgctgcactggcatatgcacggcggtttgcagttccgcaccctccccctgcccgcgccgctgcatattttgggcggcgtgctgcttgcccggcgcgtaccgtccgcattcaaagccaaactgcttgccgatatgtccgatttgcagaagtccgcacgcctcggacagcccgacacgacagttgcacaatggctgaaacagcggaacgtgccgtgtgccgccgtgatgcagttttggcagccgctggtgtggggtgcgctcaacacgcctttggaaaccgcaagcctgcgcgtgttgtgcaacgttttgtccgacggcgtgctgacgaaaaaatccggcagcgactatcttctacccaagcaggatttgggcgcaatcgtcgccgaacccgccttggcggagcttcaacggctcggcgcggacatccgcctcgaaacgcgcgtatgccgtctgaacaccctcccggacgggaaagtgctcgtcaacggcgaagctttcgatgccgccgtccccgccaccgcgccctaccacgccgccgcgctcctgcccgaaggcacgcccgaacacgttcagacggcatatcaaaaccttcgctaccacgccatcaccaccgtctatctgcgctacgccgaacccgtccgcctgcccgccccgctgaccggccttgccgacggcacggtgcaatggctgctttgccggggcaggctcggactgcctgaaaacgaagtgtccgccgtcatcagcgtttccgaccgcgtcggcgcgtttgcaaaccgggcgtgggcggacaaagcccacgccgacctcaaacgcatccttccgcatttgggcgaacccgaagccgtgcgcgtcatcaccgaaaaacgcgccacaaccgcagccgatgccccgccgccggacttgtcgtggttgcaccggcaccgcatcttccccgccggcgactacctccacccggactaccccgccacgctcgaagccgccgtacaatcaggtttcgcgtcggcggaagcctgcctgcaaagcctgagcgatgccgtctga

SEQ ID NO: 56930 - DNA, 1692 bp, Neisseria meningitidis; identical to SEQ ID NO: 39144

SEQ ID NO: 56931 - DNA, 747 bp, Neisseria meningitidis; identical to SEQ ID NO: 38219

SEQ ID NO: 56932 - DNA, 1164 bp, Neisseria meningitidis; identical to SEQ ID NO: 38788

SEQ ID NO: 56933 - DNA, 552 bp, Neisseria meningitidis; identical to SEQ ID NO: 44477

SEQ ID NO: 56934 - DNA, 261 bp, Neisseria meningitidis; identical to SEQ ID NO: 39662

SEQ ID NO: 56935 - DNA, 423 bp, Neisseria meningitidis; identical to SEQ ID NO: 36840

SEQ ID NO: 56936 - DNA, 435 bp, Neisseria meningitidis; identical to SEQ ID NO: 40706

SEQ ID NO: 56937 - DNA, 924 bp, Neisseria meningitidis; identical to SEQ ID NO: 37161

SEQ ID NO: 56938 - DNA, 606 bp, Neisseria meningitidis
atgctttgtccgaacactgcaagaaacaaggaaaacattatgagcatcaagtccgacaaatggatacgccgaatgagcgaagaattcggcatgatcgaccctttcgagccgaaccaaatcaaagaagccgacggcaaacgcatcatctcctacggtacgtccagctacggctacgacatccgctgcgcaaacgaatttaaaatcttcaccaacatcaacagcaccatcgtcgatcccaaaaacttcgacccgaaaaacttcgttaccgttgaagacgactgctgcatcatcccgcccaattccttcgcactggcgcgcacggtcgaatatttccgcatcccgcgcaacgtcctgaccgtctgcttgggcaaatccacctacgcccgctgcggcattatcgtcaacgttaccccgttcgaaccggaatgggaaggctacgttaccctcgaattttccaacaccacccccctgcccgccaaaatctacgcaggcgaaggtgtggcgcaagtcctcttcttcgagagcgacgaaatctgcgaaacctcatacaaagaccgcaacggcaaatatatggggcaaaccggcgttaccctgcccaaagcctga

SEQ ID NO: 56939 - DNA, 645 bp, Neisseria meningitidis; identical to SEQ ID NO: 38405

SEQ ID NO: 56940 - DNA, 519 bp, Neisseria meningitidis; identical to SEQ ID NO: 38951

SEQ ID NO: 56941 - DNA, 621 bp, Neisseria meningitidis; identical to SEQ ID NO: 44920

SEQ ID NO: 56942 - DNA, 219 bp, Neisseria meningitidis; identical to SEQ ID NO: 36510

SEQ ID NO: 56943 - DNA, 654 bp, Neisseria meningitidis; identical to SEQ ID NO: 45527

SEQ ID NO: 56944 - DNA, 1101 bp, Neisseria meningitidis
atggacaatattgacatgttcatgcctgaacaagaggaaatccaatcaatgtggaaagaaattttactgaattacggtattttcctgctcgaactgcttaccgtgttcggcgcaattgcgctgattgtgttggctatcgtacagagtaagaaacagtcggaaagcggcagtgtcgtactgacggatttttcggaaaattataaaaaacagcggcaatcgtttgaagcattctttttaagcggggaagaggcaaaacatcaggaaaaagaggaaaagaaaaaggaaaaggcggaagccaaagcagagaaaaagcgtttgaaggagggtggggagaaatcttccgaaacgcaaaaatcccgcctttttgtgttggattttgacggcgatttgtatgcacacgccgtagaatccttgcgtcatgagattacggcggtgcttttgattgccaagcctgaagatgaggttctgcttagattggaaagtccgggcggcgtggttcacggttacggtttggcggcttcgcagcttaggcgtttgcgcgaacgcaatattccgctgaccgtcgccgtcgataaggtggcggcgagcggtggttatatgatggcgtgtgtggcggataaaattgtttccgctccgtttgcgattgtcggttcggtgggtgttgtagcggaagtaccgaatatccaccgcctgttgaaaaaacatgatattgatgtggatgtgatgacggcgggcgaatttaagcgcacggttacttttatgggtgaaaatacggaaaagggcaaacagaaattccgacaggaactggaggaaacgcatcagttgttcaagcagtttgtcagcgagaaccgccctcaattggatattgaggaagtggcaacgggcgagcattggttcggtcggcaggcgttggcgttgaacttgattgacgagatttcgaccagtgatgatttgttgttgaaagcgtttgaaaacaaacaggttatcgaagtgaaatatcaggagaagcaaagcctgatccagcgcattggtttgcaggcggaagcttctgttgaaaagttgtttgccaaacttgtcaaccggcgggcggatgtgatgtag

SEQ ID NO: 56945 - DNA, 1653 bp, Neisseria meningitidis; identical to SEQ ID NO: 45236

SEQ ID NO: 56946 - DNA, 777 bp, Neisseria meningitidis; identical to SEQ ID NO: 45411

SEQ ID NO: 56947 - DNA, 1542 bp, Neisseria meningitidis; identical to SEQ ID NO: 44643

SEQ ID NO: 56948 - DNA, 348 bp, Neisseria meningitidis; identical to SEQ ID NO: 39706

SEQ ID NO: 56949 - DNA, 432 bp, Neisseria meningitidis; identical to SEQ ID NO: 38610

SEQ ID NO: 56950 - DNA, 1389 bp, Neisseria meningitidis; identical to SEQ ID NO: 44338

SEQ ID NO: 56951 - DNA, 1209 bp, Neisseria meningitidis; identical to SEQ ID NO: 44792

SEQ ID NO: 56952 - DNA, 126 bp, Neisseria meningitidis; identical to SEQ ID NO: 39360

SEQ ID NO: 56953 - DNA, 438 bp, Neisseria meningitidis; identical to SEQ ID NO: 39000

SEQ ID NO: 56954 - DNA, 447 bp, Neisseria meningitidis; identical to SEQ ID NO: 38678

SEQ ID NO: 56955 - DNA, 447 bp, Neisseria meningitidis; identical to SEQ ID NO: 45533

SEQ ID NO: 56956 - DNA, 987 bp, Neisseria meningitidis; identical to SEQ ID NO: 44901

SEQ ID NO: 56957 - DNA, 303 bp, Neisseria meningitidis
atgaagatgattgcacgtgtaaccggtatgaaacgaagcaaaggcattacggaaaagggtcaatcttatgattctacgaagctctttattgagattcagtttcctgaaagccaagatatgtgcggatatgctagccaagagttcgcatacggcacatatgaaaactatgaaaaactgcttgcttcaggcgtaaaaatgccgttcaaggcagaaattgattttgatttcgtcaccaacggcaaagcagtaaaacagattgtaactaacgttgtccctgtttttgagaaacctaaaaactcatga

SEQ ID NO: 56958 - DNA, 492 bp, Neisseria meningitidis; identical to SEQ ID NO: 42478

SEQ ID NO: 56959 - DNA, 2274 bp, Neisseria meningitidis; identical to SEQ ID NO: 45267

SEQ ID NO: 56960 - DNA, 672 bp, Neisseria meningitidis; identical to SEQ ID NO: 44797

SEQ ID NO: 56961 - DNA, 231 bp, Neisseria meningitidis; identical to SEQ ID NO: 44466

SEQ ID NO: 56962 - DNA, 933 bp, Neisseria meningitidis; identical to SEQ ID NO: 38585

SEQ ID NO: 56963 - DNA, 1368 bp, Neisseria meningitidis; identical to SEQ ID NO: 44374

SEQ ID NO: 56964 - DNA, 423 bp, Neisseria meningitidis; identical to SEQ ID NO: 38773

SEQ ID NO: 56965 - DNA, 2082 bp, Neisseria meningitidis; identical to SEQ ID NO: 44909

SEQ ID NO: 56966 - DNA, 324 bp, Neisseria meningitidis
atgaatccagcccccaaaaaaccttctcttctcttctcttccgcagcgcaggcggcaagtgaagacagcgggcacggcccgtattatgtgcaggcggatttagcctatgccgccgaacgcattacccacaattatccggaaccaaccggtgcagacaaagacaaaataagcacagtaagcgattatttcagaaacatccgtgcgcattccatccaccctcgggtgtcggtcggctacgacttcggcgactggagaatagcggcagattatgccagttacagaaaatggaaagaaagtaattcttctactagggcgtgtccctaa

SEQ ID NO: 56967 - DNA, 696 bp, Neisseria meningitidis; identical to SEQ ID NO: 39886

SEQ ID NO: 56968 - DNA, 204 bp, Neisseria meningitidis; identical to SEQ ID NO: 37144

SEQ ID NO: 56969 - DNA, 387 bp, Neisseria meningitidis; identical to SEQ ID NO: 39754

SEQ ID NO: 56970 - DNA, 867 bp, Neisseria meningitidis; identical to SEQ ID NO: 44667

SEQ ID NO: 56971 - DNA, 969 bp, Neisseria meningitidis; identical to SEQ ID NO: 45295

SEQ ID NO: 56972 - DNA, 612 bp, Neisseria meningitidis
  misc_feature 593, 594, 595, 596, 597: 'n' is a, c, g or t
atgagccaaaaccatactattttacaaaacctccccgtcggtcagaaagtcggcatcgccttctccggcggacttgatacctccgccgcgctgttgtggatgaaactcaaaggcgcactgccttatgcctacactgccaacctcggtcagcccgatgaagacgactacaacgccattcccaaaaaagcgatggaatacggtgcggaaaacgcccgcttaatcgactgccgcgcgcagttggcacacgaaggcatcgccgccatccaatgcggcgcgttccacgtttccaccggcggcatcgcctatttcaacaccacgcctctgggccgcgccgtaaccggcacgatgcttgtttccgcaatgaaagaagacgacgtaaacatctggggcgacggcagcacctacaaaggcaacgacatcgagcgtttctaccgctacagtttgctcaccaatcccgcgctgaaaatctacaaaccctggctcgaccagcaatttatcgacgaactcggcggccgtcacgaaatgagcgaatttctgattgccaacggcttcaactacaaaatgtcgttgaaaaagcctactccaccgattcnnnnncacacacttaattaa

SEQ ID NO: 56973 - DNA, 288 bp, Neisseria meningitidis; identical to SEQ ID NO: 36767

SEQ ID NO: 56974 - DNA, 684 bp, Neisseria meningitidis; identical to SEQ ID NO: 45567

SEQ ID NO: 56975 - DNA, 321 bp, Neisseria meningitidis; identical to SEQ ID NO: 45714

SEQ ID NO: 56976 - DNA, 357 bp, Neisseria meningitidis
atgttgtccgcttactttcccgtctttgtctttatcctcgtcggcctcgcggccggcgtactgtttatcctgctcggcacgattttaggcccgaaacgccactatgccgaaaaagacgcgccttacgaatgcggtttcgaagcctttgaaaacgcaaggatgaagttcgacgtgcgctattacctcgtcgccatcctctttatcttgtttgatttggaggtcgcgtttatgttgccgtgggcagtcgtgttcaaagatttgggcgcgtacggcttctggtctatgctggtgtttatcgtcgttctgacggtaggctttatttacgaatggaaaaaaggtgcgctggaatgggaatag

SEQ ID NO: 56977 - DNA, 483 bp, Neisseria meningitidis; identical to SEQ ID NO: 45182

SEQ ID NO: 56978 - DNA, 1356 bp, Neisseria meningitidis; identical to SEQ ID NO: 38945

SEQ ID NO: 56979 - DNA, 1167 bp, Neisseria meningitidis; identical to SEQ ID NO: 45287

SEQ ID NO: 56980 - DNA, 306 bp, Neisseria meningitidis; identical to SEQ ID NO: 45752

SEQ ID NO: 56981 - DNA, 4170 bp, Neisseria meningitidis; identical to SEQ ID NO: 45436

SEQ ID NO: 56982 - DNA, 1104 bp, Neisseria meningitidis
atgtcttcttttatttttcccgataacggggccgaatggcgcaacgaaagtgtgcaaaagccgcccaaaggttggcattatgtccgcgaaagcggtgcagacggcattttgaaggctgcctatcaaaatattgcaactgtctggcagggcgatttccacaatgccaaacaggtgctttctgcaatgaagaagagggctcgcaaacctgccgccgtccgttccgatgcggatatcgccgcccttttccatgcccaccgtatgaagcaggcgcagcagagccgtattctgaatatgcttgccgttgaaatccgccccggttttgtgttggacaacaaacgcgcgcccgatatacgcgccgccctgctcgacgtgtacggagaggcggacggcaaaccgtttttcctgccgctcaatctgctgctggggtttatgggtgcgcacgagtggcataagaaaggggttgccgttccgcagctgggcggcagcatacacgttcctttcggcgtattctcgccgttgcgcggcgaatacctcgacctgctcgcccatgcgccgtcaacgggttttcagacggcattcgatatcgggacgggctcgggcgtgcttgccgccattttggcgaaacagggcattccttccgtcatcggcacggataccaatccgaaagccgtcgcctgcgcccgtgccaatattgcccgtttgggctttgaaaaacaggttgagatacgggaaaccgatctgtttcccgaagggtttgccgatctgattgtctgcaatccaccctggcttcccgccaagccgacttccgccgtcgaatccgcgttatacgaccccgaatctgcgatgctggctgcgtttttgcgggatgcgccgaaacatctgaatcccgacggagaaatccgcctgattatttccgaccttgcagagcatttggggctgcgccctgccgattttttggaaaaggcatttatccgggcgggtttgcgtgttgccgatatgatgaaaaccaagccgaagcacaaaaaagccgcgaatccgagcgatccgcttgcttttgcgcgaacccgggaaaccactttcctataccgtttgaaaaaggcataa

SEQ ID NO: 56983 - DNA, 903 bp, Neisseria meningitidis; identical to SEQ ID NO: 40953

SEQ ID NO: 56984 - DNA, 378 bp, Neisseria meningitidis; identical to SEQ ID NO: 38868

SEQ ID NO: 56985 - DNA, 510 bp, Neisseria meningitidis; identical to SEQ ID NO: 36289

SEQ ID NO: 56986 - DNA, 291 bp, Neisseria meningitidis; identical to SEQ ID NO: 44816

SEQ ID NO: 56987 - DNA, 939 bp, Neisseria meningitidis; identical to SEQ ID NO: 38569

SEQ ID NO: 56988 - DNA, 915 bp, Neisseria meningitidis; identical to SEQ ID NO: 44569

SEQ ID NO: 56989 - DNA, 1311 bp, Neisseria meningitidis; identical to SEQ ID NO: 45437

SEQ ID NO: 56990 - DNA, 660 bp, Neisseria meningitidis; identical to SEQ ID NO: 47683

SEQ ID NO: 56991 - DNA, 1011 bp, Neisseria meningitidis; identical to SEQ ID NO: 38365

SEQ ID NO: 56992 - DNA, 390 bp, Neisseria meningitidis; identical to SEQ ID NO: 38449

SEQ ID NO: 56993 - DNA, 1059 bp, Neisseria meningitidis; identical to SEQ ID NO: 45097

SEQ ID NO: 56994 - DNA, 975 bp, Neisseria meningitidis; identical to SEQ ID NO: 45618

SEQ ID NO: 56995 - DNA, 774 bp, Neisseria meningitidis; identical to SEQ ID NO: 40828

SEQ ID NO: 56996 - DNA, 2691 bp, Neisseria meningitidis; identical to SEQ ID NO: 44427

SEQ ID NO: 56997 - DNA, 648 bp, Neisseria meningitidis; identical to SEQ ID NO: 38134

SEQ ID NO: 56998 - DNA, 846 bp, Neisseria meningitidis
atgccgcaagttcggcaggaaaaaggagaagaaatggacaaaatcagagttgccgccgtgcagatggtgtcgggcgtgtcgccggaaaccaacgtcgctgccatgaaacgcctggtcgcacgggcggcggagcagggtgtggattgggtgctgctgcccgaatattgggtgctgatgggcgcaaacgataccgacaaactcgcgcttgccgagcctttgggcggcggacgctttcagacggcattgagcgaaacggcgaaagaatgcggcgtggtgctgttcggcggaaccgtgccgctgcaaagccccgaggcgggcaaggtcatgaatactttattggtgtacgggcgcgacggcaaacggacggggctgtaccacaaaatgcacctcttcggcttttccggtttgggcgaacgctatgccgaagccgataccatcagcgcagggcgggaagtgccgcacttgtcggcagaaggcgtgtcggtggcggcgggcatttgttacgatgtccgctttcccgaatttttccgccgccagctgccgtttgacgtattgatgctgcccgctgcgtttacgcacacgacgggcaaggcgcattgggagctgctgctgcgcgcgcgtgccgtcgaaaaccaatgttacgtcgtggcggcggcacagggcggtttgcacgaaaacggacggcgcacgttcggacacagcatgattgtcgatccgtggggcgacgtattggacgtattacccgaaggcgaaggcatcgttacggcagacatcgatgccaaccgcctgaacagcgtccgcaaccgcctgcccgccttgaaataccgggttttggatgccgtctga

SEQ ID NO: 56999 - DNA, 270 bp, Neisseria meningitidis
atgccgtctgaaacttttccgtttcagacggcatagttttacagcaatctaaacagggcggactggaatcaaaaacacaccttcgccattcccgcacaagcacttcccctatacgctcccaaccccaatccgccgcattccagacggcattgcctttccgacagccgaacaaaaccccgaatccgtctgcacggttcggggcatatctccaatacgggcatcgtgctccggaaaaccgtcaaatccgcatcggcatcacaatatatttga

SEQ ID NO: 57000 - DNA, 546 bp, Neisseria meningitidis; identical to SEQ ID NO: 45074

SEQ ID NO: 57001 - DNA, 933 bp, Neisseria meningitidis; identical to SEQ ID NO: 44984

SEQ ID NO: 57002 - DNA, 1986 bp, Neisseria meningitidis; identical to SEQ ID NO: 44981

SEQ ID NO: 57003 - DNA, 1509 bp, Neisseria meningitidis; identical to SEQ ID NO: 45689

SEQ ID NO: 57004 - DNA, 123 bp, Neisseria meningitidis; identical to SEQ ID NO: 38799

SEQ ID NO: 57005 - DNA, 510 bp, Neisseria meningitidis; identical to SEQ ID NO: 40753

SEQ ID NO: 57006 - DNA, 132 bp, Neisseria meningitidis; identical to SEQ ID NO: 38518

SEQ ID NO: 57007 - DNA, 333 bp, Neisseria meningitidis; identical to SEQ ID NO: 43845

SEQ ID NO: 57008 - DNA, 987 bp, Neisseria meningitidis
ttgcccgatgcggcaaaccggcatcgtccggcaatacggttgtttaaaaataggaaaatcaggatggaaaaccaaaggccgctcctaggcttcgcgttggcacttttggcggcgatgacgtggggaacgctgccgattgccgtgcggcaggtattgaagtttgtcgatgcgccgacgctggtgtgggtgcgttttaccgtggcggcggcggtattgtttgttttgctggcattgggcgggcggctgccgaagtggcgggatttttcttggtgctcattcaggctgctgctgctcggcgtggcgggcatttcggcaaactttgtgctgattgcccaagggctgcattatatttcgccgaccacgacgcaggttttgtggcagatttcgccgtttacgatgattgttgtcggtgtgttggtgtttaaagaccggatgactgccgctcagaaaatcggcttggttttgctgcttgccggtttgcttatgttttttaacgataaattcggcgagttgtcgggtttgggcgcgtatgcgaagggcgtgttgctgtgtgcggcaggcagtatggcatgggtgtgttatgccgtggcgcaaaagctgctgtcggcgcaattcggaccgcaacagattctgctgttgatttatgcggcaagtgccgccgtgttcctgccgtttgccaaaccggcacacatcggaagtttggacggtacgttggcgtgggtttgttttgcgtattgctgcttgaatacgttaatcggttacggctcgttcggcgaggcgttgaaacattgggaggcttccaaagtcagcgcggtaacaaccttgctccccgtgtttaccgtaatattttctttgctcgggcattatgtgatgcctgatacttttgccgcgccggatatgaacggtttgggttatgttggcgcactggtcgtggtcgggggtgcggttacggcggcggtgggggacaggctgttcaaacgccgctag

SEQ ID NO: 57009 - DNA, 471 bp, Neisseria meningitidis; identical to SEQ ID NO: 38791

SEQ ID NO: 57010 - DNA, 423 bp, Neisseria meningitidis; identical to SEQ ID NO: 45387

SEQ ID NO: 57011 - DNA, 2262 bp, Neisseria meningitidis; identical to SEQ ID NO: 45315

SEQ ID NO: 57012 - DNA, 1155 bp, Neisseria meningitidis; identical to SEQ ID NO: 45755

SEQ ID NO: 57013 - DNA, 618 bp, Neisseria meningitidis; identical to SEQ ID NO: 45292

SEQ ID NO: 57014 - DNA, 390 bp, Neisseria meningitidis
  misc_feature 8, 9, 10, 11, 12: 'n' is a, c, g or t
gtgtgtgnnnnnaccggcagctacaggttcacacgaagcggcggcctcatcgaaaacgaagtcgtcttccccgtcgcctttgccgacggcaacgtcaaatgcttcgtatccgaacgccattcgggacgcgttaccggcgatcgaaggcaacacaactggctgtttatccgcgcaaaaaaccacgccgccgccattattaccaactggtacgaaggcagttgcgactggatggccatcggcaaagccgcctcgggaaacgccgccagctccccgataggccccgaaatacctgaaaccaacgaagaaccgcaaagagagagtggaagaacatcaaccggaccccgaaaccgccgccgccgagacggcttgctcgaggcactgcaagactag

SEQ ID NO: 57015 - DNA, 2037 bp, Neisseria meningitidis; identical to SEQ ID NO: 44507

SEQ ID NO: 57016 - DNA, 423 bp, Neisseria meningitidis; identical to SEQ ID NO: 47408

SEQ ID NO: 57017 - DNA, 549 bp, Neisseria meningitidis; identical to SEQ ID NO: 39055

SEQ ID NO: 57018 - DNA, 744 bp, Neisseria meningitidis; identical to SEQ ID NO: 47131

SEQ ID NO: 57019 - DNA, 693 bp, Neisseria meningitidis; identical to SEQ ID NO: 39347

SEQ ID NO: 57020 - DNA, 705 bp, Neisseria meningitidis; identical to SEQ ID NO: 42578

SEQ ID NO: 57021 - DNA, 369 bp, Neisseria meningitidis
gtgttgtcgggaatgacgaatccatccatacggaaacctgcaccacgtcattcccacgaaagtgggaatctagaatctcgggggtttcagtcatttccgatagattcccgccgcgtcaggggtctggattcccgcctgcgcgggaatgacgaatttcgagattgcggtattgtcgggaatggcgggtttcaagattgcggtattgtcgggaatgacgggtttcaagattacggtgttgtcgggaatgacggttcgggtatttccacgcccgccccgcgtttgtcaacggcaggtgcatcaaaaatgccgtctgaaggttcagacggcatcggtatcggggaatcagaagcggtagcgcatgcccaatga

SEQ ID NO: 57022 - DNA, 372 bp, Neisseria meningitidis; identical to SEQ ID NO: 38879

SEQ ID NO: 57023 - DNA, 1422 bp, Neisseria meningitidis; identical to SEQ ID NO: 44445

SEQ ID NO: 57024 - DNA, 1002 bp, Neisseria meningitidis; identical to SEQ ID NO: 44136

SEQ ID NO: 57025 - DNA, 3024 bp, Neisseria meningitidis
atgaacagtcaaaagctgcccgaggtaaagtgggggaattcatataaaaaaggggagttgaggcccgaagacagggatcgtaaatttacctttacgagtacttatggaatcaaacgcaacactaatatcacattcaataataccgattatcttgtttctgaaaaaaacggtactgccgttttcggcgcggcgacctacctgccgccctacggcaaggtttccggttttgataccgataggctgaccaagcgcggcaatgccgttgattggattaatacgacccacccggggttgataggctacagctaccaaggtatcacatgcagcagcagcagctgtcctgaatttggctataaaacccaatttaccttcggtaattccggtttggcaaaaaagacaaacagcagcaagctggatatatacgaagacaaaagccgcgacaattcgcccatttacaaattgcaggattatccttggttgggcgtgtctttcaatttgagcagcgatagctacgtcaaacaaaagagacacaatagtttggtatcttcttttagcgaggatgtgacgcagagcaatggtacgcaaagcccatacaaagacagaaacctcgtttatcgtacagacgattaccataataagggtaattatagccatcaggacgcacaccacgccatcgccttttatctgaacgccaagctgcacctgctggataaaaaacaaatcaaaaatatcgcgcaaggcagtgaacttaatttgggtatgttgaaaacgcacatcgagctgccgaaaaattttaatcaaaggagcttggtaggttcggtggttagttggacggttaaagatgagggaaaagtcagcgtcaaactcaaattgccggaagtcaaagcaggccgctgcatcaacaaagataaccccaatcccaaatccaaagccccttcccccgccctgaccgcccccgcgctgtggttcggacctgtgcaaaatggtaaggcgcagatgtattccgcttcggtttccacctaccccgacagttcgagcagccgcatcttccttcaaaatctggaaagaaaaaccgaccccggcagacccggccgccattccctcgaaaccttgactgagaacgatattaaaagtcgacagccgaatttcacagggcggcaaacaatcatccgattggatagcggcgtacagcagattaaactggatcaaaacaatactgaggtcgtcaattttaatggaaacagcaacaacgcaactttcggcattgttagtgaatatggcctcacgcctgatgccaatgagtggaaaaaagtattgctgccttggacggttcgtgctttcaatgatgacggtcgatttaacacagtcaacaaagaagaaaacaacggcaagccaaaatacagtcaaaaataccgcagccgcgacaacggcaagcacgagcgcaatttgggcgacatcgtcaacagccccatcgtggcggtcggcgagtatttggctacttccgccaacgacgggatggtgcatatcttcaaacaaagcggcggggacaagcgcagctacaatctgaagctcagttatatcccgggtacgatgccgcgcaaggatattcaaaacaccgaatccacccttgccaaagagctgcgcgcctttgccgaaaaaagctatgtgggcgaccgctacggcgtggacggcggctttgtcttgcgcaaagtcgaacggaacgggaaagaccatgtgtttatgttcggcgcgatgggctttggcggcagaggcgcgtatgccttggatttaagcaaaatcgacagcggcaacggcaacctggcagacgtttccctgtttgatgtcaaacatgacaagaatggcaataacggcgtgaaattaggctacaccgtcggcacaccgcaaatcggcaaaacccacgacggcaaatacgccgctttcctcgcctccggttatgcgactaaagacattaccagcggcgacaataaaaccgcgctgtatgtgtatgatttggaaagcagcggtacgctgattaaaaaaatcgatgtacccggcggcaagggcgggctttcgtcccccacgctggtggataaagatttggacggcacggtcgatatcgcctatgccggcgatcgcggcgggaatatgtaccgctttgatttgagcagtcaaagtcctgatcaatggactgtacgccctatttttgaaggcacaaaaccgattacttccgcgcccgccatttcccaactgaaagacaaacgcgtggttatcttcggcacgggcagcgatttgagtgaggatgatgttgataatacggatgaacaacatatttacggtatcttcgacgacgatacggcgacgacgggttctgtaaacttcagcggtacgggaggcgggctgctcgagcaacaccttactcaggaaaataaaaccttattcctgaccgattacaagcgatccgacggatcgggcagtaaggggtggatggtgaaattgcagcccggacaacgcgttaccgtcaaaccgaccgtggtattgcgtaccgcctttgtaaccatccgcaaatataaagacaacggctgcggcgcggaaaccgctattttgggcatcaataccgccgacggcggcaagctgaccaagaaaagcgcgcgcccgattgtgccggaagccaatacggctgtcgcgcaatattccggtcataagcaaaccgccaaaggcaaatccatccctataggttgtatgtggaaaaacaatgaaaccgtctgcccgaacggatatgtttacgacaaaccggttaatgtgcgttatctggatgaaaagaaaacagacggattttcaacaacggcagacggcgatgcgggcggcagcggtatagaccccgccggcaagcgttccggcaaaaacaaccgctgcttctcccaaaaaggggtgcgcaccctgctgatgaacgatttggacagcttggacattaccggcccgacgtgcggtatgaaacgaatcagctggcgtgaagtcttctactga

SEQ ID NO: 57026 - DNA, 390 bp, Neisseria meningitidis
atgaaaaacgttcaaaaaggctttacgctgctcgagctgatgattgccgtcgccatcctcggcatcctgacgctcatcacctacccttcctataaaacctacatccggcgcatccgcctgtcggaagtcaaatccaccctgctgatgaacgcgcagaccatggaacgttactaccgccaaaaagggacgtttgaaaactacgataaaaacaaactgaaacaaaacaaatatttcaacgttaccttaagcaaagtcagccccgaccactttacccttctggccgaccccaatcccaccaccaacgacggcgaaacctgcgtcgttacgctcaacgacggcggtaccattgccgcttccggtacaaaccaatcctgccccggcttcgactaa

SEQ ID NO: 57027 - DNA, 729 bp, Neisseria meningitidis; identical to SEQ ID NO: 45825

SEQ ID NO: 57028 - DNA, 624 bp, Neisseria meningitidis; identical to SEQ ID NO: 44836

SEQ ID NO: 57029 - DNA, 546 bp, Neisseria meningitidis; identical to SEQ ID NO: 39790

SEQ ID NO: 57030 - DNA, 936 bp, Neisseria meningitidis; identical to SEQ ID NO: 45685

SEQ ID NO: 57031 - DNA, 1827 bp, Neisseria meningitidis; identical to SEQ ID NO: 44515

SEQ ID NO: 57032 - DNA, 570 bp, Neisseria meningitidis; identical to SEQ ID NO: 45756

SEQ ID NO: 57033 - DNA, 648 bp, Neisseria meningitidis; identical to SEQ ID NO: 44369

SEQ ID NO: 57034 - DNA, 606 bp, Neisseria meningitidis; identical to SEQ ID NO: 39821

SEQ ID NO: 57035 - DNA, 603 bp, Neisseria meningitidis; identical to SEQ ID NO: 36499

SEQ ID NO: 57036 - DNA, 1047 bp, Neisseria meningitidis; identical to SEQ ID NO: 43592

SEQ ID NO: 57037 - DNA, 780 bp, Neisseria meningitidis; identical to SEQ ID NO: 39156

SEQ ID NO: 57038 - DNA, 609 bp, Neisseria meningitidis
atgcttgaaccataccgtctgatttgtcaaaaccgttcgatttgtgggaaaatcccaagattgaatttaacggagggcgacaccgtgttggacagggaaggctatcgccccaatgtcggtatcatcttaaccaacaaccgcgacgaagtcttttggggtaagcgcgtgcgcgaacattcttggcagtttccgcaaggcggcatcaagccgggcgaaagccccgaaaccgcgatgtaccgcgagctttacgaagaagtcggacttctgtcgcaacacgtcaaaatcgtcgggcggacgcgcgactggctgcgttacgacgtgccgaacaactgggtacgccgcgaatggcgcggctcttatcgcgggcagaagcagatttggtatctcctgcgcctgaccggccgggattgcgatgtcaacctgcgcgccacccgccaccccgaatttgacggctggcgttggcaccaatattgggcgcccgttgacgaagtgattgatttcaaacgcgacgtttatttgggggcattgaaagaactttcttcccgcttcctgcgcggtatggaaagttatgaagactttgccgcccgccaactttccggcaaccggtaa

SEQ ID NO: 57039 - DNA, 756 bp, Neisseria meningitidis; identical to SEQ ID NO: 45394

SEQ ID NO: 57040 - DNA, 1296 bp, Neisseria meningitidis; identical to SEQ ID NO: 39281

SEQ ID NO: 57041 - DNA, 1101 bp, Neisseria meningitidis; identical to SEQ ID NO: 45724

SEQ ID NO: 57042 - DNA, 1029 bp, Neisseria meningitidis
atgccgcaaggacattttatgagcaaaaaacgagttctgaccggcgtaaccaccaccggcatcccgcatctgggcaactacgtcggtgctatccgccccgccgtccgcgcggcgcaaaaccctgataccgaatccttcctcttcctcgccgattaccacggtatcatcaaatgccacgagccggagatgattcaccaatccacccaagccgttgccgccacttggcttgcctgcggactcgaccccgagcgcaccaccttctaccgccaaagcgacattcccgaagtgatggaattgaactggattctgacctgtatcaccgccaagggtttgatgaaccgcgcccacgcctacaaagccgccgtgcaggcaaattcagaaaacaatcaggaagatcccgatttcggcgtggaaatgggtttgttcagctatccgattctgatgaccgccgacatccttatgttcaacgccaacgaagtgcccgtcgggcgcgaccaaatccaacacgtcgaaatggcgcgcgacatcgccggtcgcttcaatcaccgcttccgagaactctttaccctgcccgaagtgaaaatcgacgaaaacgtcgaactcttggtcggtttggacggacgcaaaatgtccaaatcctacggcaacaccattccgctttgggaaaacgacaaaaaaacccaaaaatcggtcaacaaaatcatcaccaatatgaaagagccgggcgagccgaaacagcccgacgaaagcccattgtttgaaatctacaaagccttctccacgccgtctgaaacggtggaatttacgaaaatgcttgccgacggcttggcttggggcgaggcaaaaaaacttttggcggcgaaaatcaacgccgaactcgccgaaccgcgcgaacgctacaacgagctgaccgccgacccttcgcaaatcgaagagattttgcaggcaggcgcgcaaaaagcgcgtaaagaagcacgcgaattgttggacaaagtacgcgatgcggtcggcatccgcccgttgaaataa

SEQ ID NO: 57043 - DNA, 2526 bp, Neisseria meningitidis
atgaatccaaactcaaaacataacactaactttaccaatcttcttaaaccgtctgatagtgatataaaacaatttgccgcacaacacatccgccacctcaccgacctgctcaaccgctatgcctacgaatactacaccctcgacgcgcccagcgtacccgatgccgaatacgacaaattattccgcgagctcgaagcgttggaattaaaccatcccgagctcaaactgcccgacagtccgacccagcgcgtcggcggcgagcctttggcgggatttgccgaagtgcgccacgaagtgccgatgctgtcgctgaccaacgctttttccccgcaagatgaaaacggcgtgttcgaccatgccgaaatgtacgctttcgaccaacgcgtgcgcgacggtttggacggcggcaaacccgaatacgttatcgaacccaaattcgacggcctcgccatcagcctgctctaccgcgacggcgtattggtgcaggcggcaacgcgcggcgacggcacgacgggcgaagacgttacccaaaacatcaaaaccgtatccaacatccccttgcggctgcacggcgaaaatacgcccgaactcatcgaggtacgcggcgaagtgctgatgctcaaagccgattttgtcgccctcaataaaagacaagccgaaaacgggcaaaaaccctttgccaatccgcgcaacgccgccgccggcagcctacgccaactcgattcgcgcatcaccgcgcaacgcaaactgcactttttcccctactccgtcgcccgccagcaagatggtttcgtcgcggaagaacacatccaggaactcgcctatttccaagcactcggcttcagtctgcccaatggcaatttcggctgtttcaaaaatatcgacgaagtattggcgttttacgaacacatgcagcaaaaacgccccgaactgccctacgaaatcgacggcatggtggttaaagtcaacagcttggcgcaacagcacgaactcggcttcatctcccgcgcgccgcgttgggcggttgcccacaaattccctgccgaagaagccctgaccattgtcgaagcgattgacgtgcaaatcggcaggacgggcgcggtaacgccggttgcccgattacagcccgtattcgtcggtggcgtaactgttaccaacgccaccctgcacaatcaggacgaagtatcgcgcaaagacgttcgcgtcggcgataccgtcgtcgtacgccgtgccggagacgtgattcccgaagttgtgcgcgtgatttttgaacgccgcccgatgcgggaaaccgccgttgccgtttcagacggcatcgggcatcggcaggacgatttgtttgccgaaacaccgtccgccaatcaaacccaatccgttccgctccacaagccctaccgcctgccgacccactgccccatctgccgcagcgaaatcgaacgcgaagaaggcgaagccgtcgcccgatgcagcggcggtatgctttgtcaggcacaacgcgcgcaaggcttaatccacttcgcctcgcgcaaagcgatggacctcgacggcttgggtgaaaaacaaatcgaacagcttgtcgcgcaagacctcgtccgccacttcgccgatctctaccgcctcgacatcccgaccttgcaaaaaatgaaggaaacagcggacaaaaccgttgccgaatcggatcaaatgccgtctgaaggcagttcggtcggcgcgtcgggcaaacataaaaaacaaccagtcaagtgggcggaaaacatcctcgcaggcatagaagccagcaaaacgcccgaactcgcccgcttcctgttcgcgctcggcatccgccacgtcggcgaacgcaccgccaaaacgctggcacaggcattcggcacattggaacgcgtccgccgcgcccccgaacccgtcctcgcctgcctgcccgacatcggtacggtagtggcgcgttccattgcccacttcttcgcccaagccgaacagcaggcgatgatagacgaactgctcgccgcaggcgttgccccgcaaacccaagccgttaccatcccgcccgcccgccacgccgaaccgcaacgctggatcgcccgcctgcccggtttcaaaatcagcgaaaacaaagcccaagccttatgggaactcgccggcaaaaacatagaagggctgcaaaccgacaaagccctccccaccgactggcaggcgtggcgcagcgaaccacaaaacgccgccctgctcgaaaacctgaaaaccttcttcgcgcaaatgccgtctgaagacgaggcggcgcaaggttcagacggcatcaataaagccgtggcgggcaaaaccttcgtgttaaccggcaccctgcccaccctcaaacgcgaccaagcccaatccctaatcgaagccgcaggcggcaaagtttccggcagcgtgtccaaaaaaaccgattacgtcgtcgccggagaagccgcgggcagcaagctggaaaaagccaatgccttgggcgtttccgtcctcagcgaagccgaactgcttaccctgctcggctga

SEQ ID NO: 57044 - DNA, 291 bp, Neisseria meningitidis
  misc_feature 276, 277, 278, 279, 280: 'n' is a, c, g or t
atgttgaaacaaacgacacttttggcggcttgcgcctcctttgccgcactgttgggcggttgtgctacccagcagcctgcccccgtcattgcaggcaattcaggtatgcaggacgcgccgtcttcggcagtttacaacaacccctatggagcaacgccgtacagcccggctcctgccggcgatgcgccttatgtgccgccggtgcaaagcgcgccggtttatacgcctcctgcttatgttccgccgtctgcacctgccgtttcgggtacatacgtnnnnncacacacttaa

SEQ ID NO: 57045 - DNA, 658 bp, Neisseria meningitidis
atgttggaaattttgttccgccatcaagacttcgtcgccatcaacaaaccgggcggcatatccgtccaccaagacagcggcgagaccggactggcccgaacactcgccatacagttgggcgtagagcgtgtgtggctgctgcaccgattggacaaacagaccagcggcattttactgtttgccctcaacagagaaagcgcgtccgcccttagcggacagtttgccggcaaaagcatcaaaaaaacctatttggcactatccgaccgcaaaccgtccaaaaagcagggttggattaaaggcggaatggaaaaatccagacgcggaatgtggaagttgacgcgcaatacagaaaatatcgccgttacccgattccacagcatcagtatcgccgaaaaactgcggctgttcatcctggaaccgcatacgggcaaaacgcaccaattgagagtggcgatgaaaagtttgggcagtccgattctgggtgacagcttatacggcggaacagaatccgaaaccatgtttctgtatgcatggaaaatacaatttgcctaccaaaaccgacaaatcgaaattgttgcacccttaaaaaacgaatggcagactgaaaatatctctcatgcgctggaagaattttatatggcaaaagcaggttaataaa

SEQ ID NO: 57046 - DNA, 1776 bp, Neisseria meningitidis; identical to SEQ ID NO: 39332

SEQ ID NO: 57047 - DNA, 492 bp, Neisseria meningitidis; identical to SEQ ID NO: 38741

SEQ ID NO: 57048 - DNA, 681 bp, Neisseria meningitidis; identical to SEQ ID NO: 45525

SEQ ID NO: 57049 - DNA, 909 bp, Neisseria meningitidis; identical to SEQ ID NO: 45198

SEQ ID NO: 57050 - DNA, 792 bp, Neisseria meningitidis; identical to SEQ ID NO: 44703

SEQ ID NO: 57051 - DNA, 1056 bp, Neisseria meningitidis; identical to SEQ ID NO: 44627

SEQ ID NO: 57052 - DNA, 1371 bp, Neisseria meningitidis; identical to SEQ ID NO: 45342

SEQ ID NO: 57053 - DNA, 1623 bp, Neisseria meningitidis
atggaaacaataccggcagcgcaaaacaaagccgtaagcccgtccttttcagacggcatctccggtcagactgtcaacaattccgataaaatgctatactcgcgcccgttgccgcgccgtccgaaaccgccctttgggaaagcagaaatgatcagcaaacaagaataccaagcccaagccgctcaaggctacaaccgcatcccgctcgtgcaagaactccttgccgatttggatacgccgctttccctctatctcaaactcgccaaccgcccctatacctacctgctcgaatccgttgtcggtggcgaacgtttcggccgctattcttttatcggcctgccttgcagccactatctcaaagccagcggcaaacacgtcgatgtttatcaaaacggcgaaattgtcgagcaacacgacggcaaccccctgccctttatcgaagccttccacaaccgcttcaaaacacccgaaatcccaagcctgccgcgctttaccggcggactggtcggctacttcggttacgaaaccatctacaattttgaacacttcgcccaccgcctgaaaaacaccaccaaagccgacccgctcggcacgcccgacatcctcctgatgctctcgcaagagcttgcagtagtggataacctaagcggtaaaatctacctgattgtttacgccgatccgtcgcagcccgacggctacgaacgcgcacgcgaacgcctcgaagacatccgtacacagttacgccaaagttgcgccatcccgctttcgctcggcagcaaacacaccgaagccgtcagcgaattcggcgaagagccgttcaaagcctgcgttaacaaaatcaaagactacatctttgcaggcgactgcatgcaggttgtccccagccagcgcatgagcatggaattcaccgacagctcgctcgccctctaccgcgccttgcgcacgctcaacccttcgccttatctcttctactacgatttcggcgatttccacatcgtcggctcctcgcccgaaatcctcgtccgccgcgaacgcgacgatgtcatcgtccgccccatcgccggcacgcgcctgcgcggcaaaacccccgccgaagaccttgccaacgaacaagatttgttaagcgatgccaaagaaatcgccgaacacgtcatgttgattgacttaggacgcaacgacgtcggccgcatcagtaaaaccggcgaagtcaaagttaccgacaaaatggtgattgaaaaatactcccatgtaatgcacatcgtttccaacgtcgaaggccgtctgaaagacggcatgaccaacatggacatcctcgccgctaccttccctgccggcacactctccggcgcacccaaagtccgcgccatggaaatcatcgaagaagtcgaaccgagcaaacgcggcatctacggcggtgccgtcggcgtatggggtttcaacaacgacatggatttggcaatcgccatccgcaccgccgtagtaaaaaacaacacgctatacgtccaaagcggcgcgggcgtggttgccgactccgatccggcctccgaatggcaggaaacacaaaacaaagcccgagccgtcatacacgccgcgcagatggtgcaggaagggttggataaatga

SEQ ID NO: 57054 - DNA, 996 bp, Neisseria meningitidis; identical to SEQ ID NO: 45012

SEQ ID NO: 57055 - DNA, 459 bp, Neisseria meningitidis; identical to SEQ ID NO: 45546

SEQ ID NO: 57056 - DNA, 639 bp, Neisseria meningitidis; identical to SEQ ID NO: 39626

SEQ ID NO: 57057 - DNA, 987 bp, Neisseria meningitidis
atgaaacactttctttcccttttcgcctccatactgatgtctgccctgattgccgcgtggtttgcccaaaacccgatcaatgcctactggcagcagacctaccaccgcaacagcccgctcgaaccgcttgccgcctacggatggtggcggagcggtgcggcgttgcaagaaaacgcctacaccctttcagacggcatcaaagccttcctgtccggcgaaacgccgccgacggctcaagacggcggttcggcagatatgccgcctgaagccgccgcatccgaagccgcccctcaaaccggcgaaatccaagaatggaaacaggacaccgacaccgccgccgtccgcagcggcgacaaagtctttttcgccggcgactcgctgatgcagggcgttgcacccttcgtgcaaaaaagcctgaaacagcaatacggcatcgaatccgtcaacctcagcaaacaaagcacggggctgtcctacccctcattcttcgactggccgaaaacgattgaagaaaccctgaaaaaacatcccgaaatcagcgtgctcgccgtcttcctcggcccgaacgacccgtgggatttccccgtcggcaaacgctacctcaaattcgcttccgacgaatgggcgcaagaatacctgaaacgcgtcgaccgcatccttgaagccgcacacacgcaccgcgtccaagtcgtctggctcggcatcccctacatgaaaaaagccaagctcgacgggcagatgcgctacctcgacaaactgctttcggaacatttgaaaggcaaaatcatcctgattcccaccgcgcacaccctgagcggcgggaaagaccgctacacggactccgtcaacgtcaacggcaaacccgtccgctaccgcagcaaggacggcatacactttaccgccgaaggacaaaaactgctggcgacaaaaataatggaaaaaatcgtttttgaaccaagtacgcaaccatcaagtacacagccatga

SEQ ID NO: 57058 - DNA, 825 bp, Neisseria meningitidis; identical to SEQ ID NO: 44232

SEQ ID NO: 57059 - DNA, 621 bp, Neisseria meningitidis; identical to SEQ ID NO: 45773

SEQ ID NO: 57060 - DNA, 975 bp, Neisseria meningitidis; identical to SEQ ID NO: 39370

SEQ ID NO: 57061 - DNA, 753 bp, Neisseria meningitidis
ttgaaagtcgatgccaatcccgacaaatacataaaggcaaccggatatcccggttattccgaaaaagtagaagtcgcacccggaacaaaagtgaatatgggacccgtcacggacaggaacgggaatcccgttcaggttgtcgcaacattcggcagggattcgcaaggcaacaccacagtggatgttcaagtaattccgcgtcccgacttaacccccggaagcgcggaagcgccgaacgcacagccgctgcccgaagtatcgcccgctgaaaaccccgcaaacaacccggcccccaatgagaaccccggcacgcgtcccaatcccgaacccgaccccgatttgaatcccgatgcaaatcccgatacggacggacagcccggaacaagccccgattccccggccgttccggaccgcccaaacggcagggacggcaaagatggcgggcttttgtgcaaattcttccccgacattctagcttgcgacaggctgcccgagcccaatccggcagaagatttaaatctgccgtctgaaaccgtcaatgtagagtttaagaaatccggaatctttcaagattccgcacagtgtcccgcccccgttacgttcactataaccgtgcttgattcaagcaagcagttcgcgttcagctttgagaacgcatgtaccatagccgaacggctaaggtacatgcttctcgcccttgcttgggcggttgccgcctttttttgtatccgcacagtatcccgtgaagtctag

SEQ ID NO: 57062 - DNA, 969 bp, Neisseria meningitidis; identical to SEQ ID NO: 44947

SEQ ID NO: 57063 - DNA, 474 bp, Neisseria meningitidis; identical to SEQ ID NO: 45181

SEQ ID NO: 57064 - DNA, 2760 bp, Neisseria meningitidis; identical to SEQ ID NO: 44880

SEQ ID NO: 57065 - DNA, 267 bp, Neisseria meningitidis; identical to SEQ ID NO: 37278

SEQ ID NO: 57066 - DNA, 354 bp, Neisseria meningitidis; identical to SEQ ID NO: 45932

SEQ ID NO: 57067 - DNA, 1020 bp, Neisseria meningitidis; identical to SEQ ID NO: 44737

SEQ ID NO: 57068 - DNA, 210 bp, Neisseria meningitidis; identical to SEQ ID NO: 39816

SEQ ID NO: 57069 - DNA, 999 bp, Neisseria meningitidis; identical to SEQ ID NO: 44423

SEQ ID NO: 57070 - DNA, 138 bp, Neisseria meningitidis; identical to SEQ ID NO: 36823

SEQ ID NO: 57071 - DNA, 129 bp, Neisseria meningitidis; identical to SEQ ID NO: 45231

SEQ ID NO: 57072 - DNA, 1461 bp, Neisseria meningitidis
atgggttcggcagtcggcggacagccgctcgaaaaaatatttttgccggacgacaagggtttgttcatactgccgaacctgccggttttgcatcctgattgggtgtatcgccttttttcctttataatgccgccacttatatttgccactttcccgatgaagccgtttgccgaaaatatcccccacagccttcgcggcaactgccgcgacgaagccctaccgccgcatacggtagattgcccggaatgcggctgccgcgcggatgtgcctcggttggacaggggggaggcggcgttctgcccgcgctgcggctataagctcttcagggtgggcaggcatcctttttccgccccgcccgcttatgcggcggcttcgctgattttgatggcgtttgcttacggtatgacgtatatcgaggtcgggataccgggtgcggcatccgtcctttcgctgcccgagatgatgcgcctgatggtgtttcaggattatggttttttggccgaagtgatgtttgtgctgaccttcggcgcgccggttctgtttctgctgctgtgcctgtatgtctatgccgcgctgatacggaaacgggtgtatcctgcgctgcgtttggcaacgcgtgtgatggtgcgcttgaggcaggcgatgatggtggatgtgttttttgtttccacgctggtggcgtatatcaagctctcgtctgtggcagaggttcgcttcgggtcggcgttttatctgatgttcgcgctgtcggttatgctgattcggacttcggtatccgttccccagcattgggggtattttcaaatcgggcggctgacgggggataatgcggttcagacggcatcggaaggcaaaacctgttgcagccgctgcctgtatttccgcgacagtgccgaatccccctgcggtgtgtgcggcgcggaactgtaccgccgacggccgaaaagtctgagtatttcgtcggcgtttctgacggcggcggttattttgtatttccctgccaatatcctgccgattatgatttcgtccaatcctgccgccacggaggtcaataccatccttaacggcatcgcttatatgtgggacgagggcgacaggctgattgcggcggttattttcagcgcgagtattttggtgccggtgctgaagattgcggcaatgtcggttttaattgcgtccgcccgcttcgctttgccgacaggcgcaaagaaattgtcacacctctaccgcatcaccgaagcggtcggccgctggtcgatgattgatatttttgtgattattattttaatgtgttcgttccacacttatgccgcgcgcgtcattccgggcagtgcggcagtctatttctgcctggtcgtgattctgacgatgctgtccgcctattatttcgacccgcgcctgctttgggacaaacgcgcttcagacggcattgctttcaacgaaacggaaaaacatgactga

SEQ ID NO: 57073 - DNA, 708 bp, Neisseria meningitidis
ttggtcaaaacggcagacggctacaaagccatcgcccgtatccgagtcggcgaccgcgtctttgccaaggacgaaacaagcggggtaacgggatacaaacccgttaccgcccgatacggcaatccgtatcaagaaaccgtttacattgaaatttcagacggcatcggcaacaaccaaaccctgatttccaataaaatccacccgttttacagtcaaggaaaatggatacaggcaggtcgtctgaaaaaaggcgacaccctgctttccgaaagcggcgcaaaacagacggttcaaaacattaccttcaaacagcagccgctcaaagcctacaatctgaccgtcgccgattggcatacctacttcgtcaagggcagtcaggcggaaacggaaggggtttgggttcataatgattgtccgtatgataaaggcaaccaacgatataaagacgcttcttatcatggcaaaaatgataattctgtgaaaagtagagcaccaacaaacggacaagcagctcttgataattccgttcaagttaaatcaacttctcctcgaagagttggggttgataaagccaataatgaaatcgttgtattagacaaaactcaaacttttaataacggttttgcggaatatcacgggcatgtcagaagttggcaagatttgcataccgatcagaaaaatgctttaaaaaaagcaggattggattag

SEQ ID NO: 57074 - DNA, 546 bp, Neisseria meningitidis; identical to SEQ ID NO: 49338

SEQ ID NO: 57075 - DNA, 1071 bp, Neisseria meningitidis; identical to SEQ ID NO: 44790

SEQ ID NO: 57076 - DNA, 318 bp, Neisseria meningitidis; identical to SEQ ID NO: 39139

SEQ ID NO: 57077 - DNA, 966 bp, Neisseria meningitidis; identical to SEQ ID NO: 38346

SEQ ID NO: 57078 - DNA, 1527 bp, Neisseria meningitidis
gtgaaaccgctgcgcagactgacaaacctccttgccgcctgcgccgtagcggccgctgctttcggacagcccgccctcgcggcggacttggcgcaagatccgttcattaccgataacgcccaacggcagcactacgaacccggcggcaaataccacctcttcggcgacccgcgcggcagcgtttccgaccgcaccggcaaaatcaacgtcatccaagactatacccaccagatgggcaacctgctcatccaacaggcggcaatccaaggcaatcttggttacaccgtccgcttttccggacacggatacgaagaacacgcccccttcgacaaccacgccgccgacagcgcaagcaaagaacaaggcaacgtcaacgaaggctttaccgtgtatcggctcaactgggaaggacacgaacatcatcccgccgatgcctacgacggcccgaagggcggcaattaccccaaacctacgggcgcacgagacgaatacacctatcacgtcaacggcacagcccgcagtatcaaactcaatccgaccgacacccgcagcatcaaactcaatccgaccgacacccgcagcatccggcaacgcatatccgacaattacagcaacctcggcagcaatttctccgaccgcgccgatgaagccaacagaaaaatgttcgagcacaatgccaagctcgaccgctggggcaacagcatggagtttgtcaacggtattgccgccggcgcgctcaacccctttatcagcgcgggcgaagccttgggcataggcgacatactgtacggaacgcgctatgccatagacaaagccacaatgcgcaacatcgcccccttacccgccgagggcaaattcgccgccatcggcggcttgggcagcgtggcgggctttgaaaaaaatacgcgtgaagccgttgaccggtggatacaggaaaaccccaatgccgccgaaaccgtcgaagccctggtcaacgtcctgccgtttgccaaagtcaaaaacctgacaaaggcggcaaaaccggggaaggctgcggttagcggggatttttctgctgcatacaatacaagaacaactagaaaagttactacagaaacagaggggttaaatagaatcagacagaaccagaaaaatagtaatatacatgagaaaaattatggaagagataatcctaatcatattaatgttttatctggaaattctatacaacatatactgtatggagatgaagcaggaggtgggcatctttttcctggcaaacctggtaagacaacattcccccaacattggtcagccagtaaaataactcatgaaattagtgatatcgttacatccccaaaaacgcaatggtatgcacagactggaacaggcggcaaatatattgctaaaggaagaccagccaggtgggtatcatatgaaacgagagatggaattcgtatcagaacagtttatgaacctgcaacaggaaaagtggtaactgcattccccgatagaacctctaatcccaaatataaccctgtaaaataa

SEQ ID NO: 57079 - DNA, 966 bp, Neisseria meningitidis; identical to SEQ ID NO: 45347

SEQ ID NO: 57080 - DNA, 969 bp, Neisseria meningitidis; identical to SEQ ID NO: 44119

SEQ ID NO: 57081 - DNA, 723 bp, Neisseria meningitidis
atgccgtctgcaccgtcggcgcctattcagacggcattattgtttcaaccgacaaaggacatccacaccatgcaggataatgctttgacaatcgccttatccaaggggcgcatttttgaggagacgctgccgctgcttgccgctgccggcattgttccgactgaagagcctgaaaaatcgcgcaagctgattatcgggacgaaccatgaaaacatccgccttgtcattgtccgcgcaaccgatgtgccgacttatgtccgctacggcgcggcggacttcggcattgcgggcaaagacgtgctgatcgaacacggcggcacggggctttaccggcctttggatttggagattgccaagtgccgcatgatggttgctgtgcgtaaagggtttgattacgaagcagcttcgcaacccggatgccgtctgaagattgccacgaagtatcctgaaatcgcggcatctcattttgccggcaagggtgtccatgtggacattatcaaactgtacggctcgatggaacttgcgccgctggtcggcttgagcgatgcgattgtggacttggtttcgacgggcaacaccttgaaggcaaacggcttggaagcagtcgaacacatcgtcgacatttccagccgcctggtggtcaacaaggctgctttgaaaacgaaatacgcgctgctggagccgattattcaggcgttcggcggcgcagtgaaggcgaagtaa

SEQ ID NO: 57082 - DNA, 147 bp, Neisseria meningitidis; identical to SEQ ID NO: 42194

SEQ ID NO: 57083 - DNA, 981 bp, Neisseria meningitidis
ttgccgttttccactttattccgcctgaaaccaatgaccgacatcacaccgtttgccaaccgcttgggcaaaaacatcaaacaccttatgaaatgggcgaaacgcaacggcattgaagcctggcgcatttacgaccgcgacatcccccaattcccctttgccgccgatgtttacggcgatcgaatccaccttcaggaatacgataccggctggctgatgcggcccgaagaatacgaagcgtggcttgccgaagtcttggaagccgtcgctttcgttaccggttttgaacccgaacaaatccgcctcaaacgccgcgaacgccaaaaaggtttgcagcaatacgaaaaaaccggcaaggcgggcgacgatttcgtcatcaccgaaaacggccgcaagttttgggtcaaccttgataagtatttggatacggggctttttttggatcatcgaaacacgcgcaaaaaagtcggcgaaacggcggcgggcaaacgttttttaaacctgttttcctacaccggcagcttcactgtctatgccgccaccggcggcgcggcatccagcgaaactgtcgatttgtctaacacttatctcgattgggcgagacgcaattttgaattgaacggcatcgatacggaacggcataaaatcgtccgcgccgacgtgttccaatatcttcagacggcatatggggaaggcaggcggttcgacctcattgtgatggacccgcccagtttttccaacagcaagaaaatgtccgacatcctcgacatccagcgcgaccacaaaaagctgattgacggcgcggtgaagctgctcgcttcagacggcattttgtacttttccaacaacctgcgcagcttcgtcttagacgacttggtatcggaacaatacgccgtcaaagacatttccaaacaatccgttcccgaagatttccgcaacaaaaaaatccataggtgctgggaaatccgccacaaatcttaa

SEQ ID NO: 57084 - DNA, 612 bp, Neisseria meningitidis; identical to SEQ ID NO: 36530

SEQ ID NO: 57085 - DNA, 624 bp, Neisseria meningitidis; identical to SEQ ID NO: 36421

SEQ ID NO: 57086 - DNA, 840 bp, Neisseria meningitidis; identical to SEQ ID NO: 45249

SEQ ID NO: 57087 - DNA, 723 bp, Neisseria meningitidis; identical to SEQ ID NO: 45767

SEQ ID NO: 57088 - DNA, 213 bp, Neisseria meningitidis; identical to SEQ ID NO: 38488

SEQ ID NO: 57089 - DNA, 297 bp, Neisseria meningitidis; identical to SEQ ID NO: 37913

SEQ ID NO: 57090 - DNA, 1059 bp, Neisseria meningitidis; identical to SEQ ID NO: 37985

SEQ ID NO: 57091 - DNA, 324 bp, Neisseria meningitidis; identical to SEQ ID NO: 38645

SEQ ID NO: 57092 - DNA, 3888 bp, Neisseria meningitidis
atgcagagttgggggattccattagcaattgctggagatataattgcagcaacggctattgccacaggagatactggtacgatatctacagaggaattttataattttgacaactggaaaggttttgggtatgagctatttgaagactggtctcgttgggtatacgactggctgcccgacggctggaatctgtggaaagaattggacagaaaccgttcaggccaataccacatctacgaccccctcgccctagacctagacggcgacggcatagaaacagtcgccgccaaaggcttttcaggcagcctcttcgaccataacggcaacggcatccgcaccgccactggctgggtttctgccgatgacggtttactcgtccgcgatttgaacggcaacggcatcatcgacaacggcgcggaactcttcggcgacaataccaaactggcagacggttcttttgccaaacacggctacgcagctttggccgaattggattcaaacggcgacaacatcatcaacgcggcagacgccgcattccaatccctgcgtgtatggcaggatctcaaccaggacggcatttcccaagctaatgaattgcgtacccttgaagaattgggtatccaatctttggatctcgcctataaagatgtaaataaaaatctcggcaacggtaacactttggctcagcaaggcagctacaccaaaacaaacggtacaaccgcaaaaatgggggatttacttttagcagccgacaacctgcacagccgcttcaaagacaaagtggaactcactgccgaacaggcaaaagccgccaatcttgcgggcatcggccgtctgcgcgatttgcgcgaagctgccgcattgtccggcgatttggccaatatgctgaaagcttattctgccgccgaaactaaagaagcacagttggcattgttagataatttgattcacaaatgggcggaaaccgattcgaactggggcaaaaaatcgccaatgcgactttcaaccgattggacgcaaacggctaacgggggtgtggctcttaccccgtctcaagtaacgcgactaaaacagaacgctttagtttctctttccgacaaagccaaagcagctatcgatgccgcccgcgaccgcattgccgtgcttgatgcctacacggggcaggattccagcacactctattacatgagcgaagaagacgcgcttaatatcgtcaaagtaaccaacgatacatacgaccatctcgccaaaaacatctaccaaaacctgttgttccaaacccgtttgcagccatatttgaatcaaatcagtttcaaaatggaaaatgatacgttcactttggattttagtggtcttgttcaagcatttaaccatgtcaaagaaactaatccgcaaaaagcttttgtggatttggccgagatgcttgcatatggcgaacttcgttcttggtatgaaggtcgaagactaatggccgattatgtggaggaggcaaaaaaagcaggtaaatttgaagattaccagaaagtgttgggtcaggagaccgttgcattattagctaaaacatcgggtacgcaagcagatgatatcctgcaaaatgtaggctttggtcataataaaaatgtttctttatatggtaatgacggcaacgacactctaatcggcggcgccggtaatgactatttggagggcggcagcggttcggatacttatgtcttcggcaaaggcttcggtcaggatacggtctataattacgactacgctaccggacgcaaagacatcatccgctttaccgacggtattacagccgatatgctgacttttacccgagagggcaaccatcttcttatcaaggcaaaagacggcagtggacaagtgactgttcagtcctatttccagaacgatggctcaggtgcttaccgtatcgatgagattcatttcgataacggcaaagtactggatgttgccactgtcaaagaactggtacagcaatccaccgacggttcggacagattgtatgcctaccaatccggaagtaccttaaacggcggattgggcgatgactatctgtacggtgccgacggggatgacctgctgaatggtgatgcaggcaacgacagtatctacagtggcaatggcaatgatacgctcaatggaggagaaggcaacgacgccctgtacggctataatggtaacgatgtactgaatggtggcgaaggcaatgatcatttgaacggcgaagacggtaacgacactctgatcggcggtgcaggcaatgattacttggagggcggcagcggttcggatacttatgtcttcggcaaaggcttcggtcaggatacggtctataattacgactacgctaccggacgcaaagacatcatccgctttaccgacggtattacagccgatatgctgacttttacccgagagggcaaccatcttcttatcaaggcaaaagacggcagtggacaagtgactgttcagtcctatttccagaacgatggctcaggtgcttaccgtatcgatgagattcatttcgataacggcaaagtactggatgttgccactgtcaaaaaactggtacagcaatccaccgacggttcggacagattgtatgcctaccaatccggaagtaccttaaatggcggattgggcgatgactatctgtacggtgccgacggggatgacctgctgaatggtgatgcaggcaacgacagtatctacagtggcaatggcaatgatacgctcgatggaggagaaggcaacgacgccctgtacggctataatggtaacgatgtactgaatggtggcgaaggcaatgatcatttgaacggcgaagacggtaacgacactctgatcggcggtgcaggcaatgattacttggagggcagcagcggttcggatacttatgtcttcggcgaaggcttcggtcaggatacggtctataattacgactacgctaccggacgcaaagacatcatccgctttaccgacggtattacagccgatatgctgacttttacccgagagggcaaccatcttcttatcaaggcaaaagacggcagtggacaagtgactgttcagtcctatttccagaacgatggctcaggtgcttaccgtatcgatgagattcatttcgataacggcaaagtactggatgttgccactgtcaaaaaactggtacagcaatccaccgacggttcggacagattgtatgcctaccaatccggaagtaccttaaacggcggattgggcgatgactatctgtacggtgccgacggggatgacctgctgaatggtgatgcaggcaacgacagtatctacagtggcaatggcaatgatacgctcgatggaggagaaggcaacgacgccctgtacggctataatggtaacgatgtactgaatggtggcgaaggcaatgatcatttgaacggcgaagacggtaacgacactctgatcggcggtgccggtaatgattacttggagggcggcagcggttcggatacttatgtcttcggcaaaggcttcggtcaggatacggtctataattaccatgtggataaaaactctgacactatgcactttaaaggatttaaagcagcagatgttcattttatccgttccggaagtgatttggtgcttagcgcttctgaacaagacaacgtacgtatttccggattcttctatggtgaaaaccatcgtgtagatacatttgtctttgatgatgcagctatcagtaatccagattttgccaagtatattaatgctggcaataatttggtacagtctatgtctgtgttcggttctaatactgctgcgacaggaggaaatgtggatgccaatatacaatccgtacagcagccgttattggtaacgccatctgcataa

SEQ ID NO: 57093 - DNA, 738 bp, Neisseria meningitidis; identical to SEQ ID NO: 39629

SEQ ID NO: 57094 - DNA, 186 bp, Neisseria meningitidis; identical to SEQ ID NO: 44958

SEQ ID NO: 57095 - DNA, 1254 bp, Neisseria meningitidis; identical to SEQ ID NO: 45811

SEQ ID NO: 57096 - DNA, 1089 bp, Neisseria meningitidis
atgtcccaaactatcgacgaactcctccttccccaccgcaacgccatcgacaccatcgatgccgaaatcctgcgcctgctcaacgaacgtgcgcaacacgcccacgccatcggcgagctgaaaggcacgggcgcagtgtaccgccccgaacgcgaagtcgccgtgttgcgccgcattcaggatttgaacaaaggcccgctgcccgacgaatcggtagcacgcctgtttcgggaagtgatgagcgagtgcctcgccgtagaacgcccgctgaccatcgcctatctggggccgcagggcacgtttacccagcaggcggcgatcaagcatttcggacacgccgcgcacaccatggcgtgtccgaccatagacaactgcttcaagcaggttgaaacccgtcaggcggattatctggtcgcgcccgtggaaaactcgaccgaaggctcggtcgggcgcacgttggatttgcttgccgttaccgcgttgcaggcgtgcggcgaagtcgttttgcgcatccaccacaaccttttgcgtaaaaacaacggcagcaccgaaggcattgccaaagtcttttcccacgcgcaggcgttggcgcagtgcaacgactggttgggcagacacctgcccaacgccgaacggattgccgtgtccagcaatgccgaagccgcaaggctggttgccgaatcggacgacggtacggttgccgccatcgccggacgcacggcggcggaaatctacggactcgatatggttgccgagtgcatcgaagacgaaccgaacaacaccacgcgcttcttggtgatgggacatcacgaaaccggtgcaagcggcagcgacaagacttcgctggccgtttccgcgcccaaccgcgccggtgcggttgcctcgctgctgcaaccgctgaccgagtcgggtatttccatgaccaagtttgagagccgtccgagcaaatccgttttgtgggaatacctgttctttatcgatatcgagggacaccgccgggacgcgcagattcagacggcattggaacgcttgggcgaacgcgcttcgttcgtcaaagtcatcggttcgtacccgaccgccgttttgtag

SEQ ID NO: 57097 - DNA, 684 bp, Neisseria meningitidis; identical to SEQ ID NO: 45197

SEQ ID NO: 57098 - DNA, 276 bp, Neisseria meningitidis; identical to SEQ ID NO: 45703

SEQ ID NO: 57099 - DNA, 441 bp, Neisseria meningitidis; identical to SEQ ID NO: 38836

SEQ ID NO: 57100 - DNA, 330 bp, Neisseria meningitidis; identical to SEQ ID NO: 45498

SEQ ID NO: 57101 - DNA, 1035 bp, Neisseria meningitidis; identical to SEQ ID NO: 38282

SEQ ID NO: 57102 - DNA, 888 bp, Neisseria meningitidis; identical to SEQ ID NO: 44356

SEQ ID NO: 57103 - DNA, 285 bp, Neisseria meningitidis; identical to SEQ ID NO: 37122

SEQ ID NO: 57104 - DNA, 1338 bp, Neisseria meningitidis
atgaccgacacagccggtctgcgccgccgcaacctgcggcaatggatagcagaacactacggcggtttgcaaacccgttttgccgaagccgttgccctcaacacaggcgaactctccgcccttttgaaaaacaaatccttcggcgagaaaaaagcccgtaaaatcgaacaggcggcaaaaatgcccgctttctggctcgataccgaacacaccgcccgcccgcccgaacacacaggaaaacacaccatgtcccatatttcccccatccccgaaatccttgccgacatcaaagccggcaaaatggtcatcatcaccgatgccgaagaccgagaaaacgaaggcgacctgctgatggcggcgcaattcgtcacgcccgaagccatcaacttcatgatcaaacacgcgcgcggcttggtctgcctgccgatggacggcgaaatggtcgaaaaactcgggctgccgatgatgacccaaaaaaacggcgcgcaatacggcaccaactttaccgtctccatcgaagccgcacacggcattaccaccggcatttccgccgccgaccgcgccctgactattcaaaccgccgtttccccgaccgccaaacccgcagacatcgtccaacccggtcatatcttcccgcttcgcgcccaaaaaggcggcgtactcgtccgcgccggacacaccgaagccggcgtcgacttggcgcaaatgaacgggctgattcctgccgccgtcatctgtgaaatcatcaacgacgacggcaccatggcgcgtatgcccgagctgatgaagtttgccgaagaacacaaccttaaaatcggcaccattgccgacctcatcgaataccgcagccgtaccgaaagcctgctcgaagacatgggcaatgcgcctgtacaaaccccgtggggcgagttccaacaacacgtttacgtcgacaaactctccggcgaaacccacctcgccctcgtcaaaggcacgcccgccgccgacaccgaaaccctcgtccgcgtccacgaacccttcagtgtgatggacttcattcaagccaacccgcgccattcatggtcattgcccaaagcactcgagcgcgtccaacaggcagaaagcggcgtcgtcatccttctgcaccgcaccgaagacggcgcatccctgctcgaccgcaccctacccaaaggcgcaaaccaagcctacaaatgggacagcaaaagctacggcatcggcgcacaaatcctcgtcggcctcaacgtcaaaaaactgcgcgtcctcgggcagccctcatctttcaccggtctgaccggcttcggtttggaagtcgtcggctttgaagaagcggaaaaataa

SEQ ID NO: 57105 - DNA, 657 bp, Neisseria meningitidis; identical to SEQ ID NO: 45433

SEQ ID NO: 57106 - DNA, 1746 bp, Neisseria meningitidis; identical to SEQ ID NO: 43160

SEQ ID NO: 57107 - DNA, 1152 bp, Neisseria meningitidis; identical to SEQ ID NO: 39535

SEQ ID NO: 57108 - DNA, 321 bp, Neisseria meningitidis; identical to SEQ ID NO: 41873

SEQ ID NO: 57109 - DNA, 1110 bp, Neisseria meningitidis; identical to SEQ ID NO: 44565

SEQ ID NO: 57110 - DNA, 1170 bp, Neisseria meningitidis
atgacagcacataaaatcctgcccgtcctgctttccatcatcttaggcgtttctcacgcaacggccgcatcgcccgcgcccaacaaaccggcggtacacgccgcccccacgttccaaacacccgaaaccctcacagcggcacacatcgttatcgaccttcaaagcaaacagattttatccgccaaaaacatcaatacccctgtcgaaccggcggcactaacccaactgatgaccgcatatctggttttcaaaaacatgaaatcgggaaatatccgatctgaagaaaacttaaaaatacccgaatccgcatgggcttcagaaggaagcagaatgtttgtacgtcccagcgatacggtcagcaccgacaaactcttaaaaggcatgattgcactatccgcaaacgatgccgccctaacccttgccggccggctgggcaacggctcgattgaaaattttgtgcaacaaatgaacaaagaagcccgacgcttgggcatgaagaacactgtattcaaaaatccgacaggcttgagtagagaaggacaggtttccaccgccaaagacctcgcccagctgtctgaagcattgatgcgcgactttccggaatattacccgctgttttccatcaaatctttcaaattcaaaaatatagagcaaaacaaccgcaatatccttttatatagggacaacaatgtaaacggtctgaaagccggacacacagaaagcggcggctacaaccttgccgtgtcatactccggcaacggcaggcacatccttgtcatcacattgggttcggaatcggcggaaacacgcgcatcagacaacagcaagctgctgaactgggcattgcaggccttcgatacgcccaaaatatatccgaaaggcaaaaccgttgcccaaatccaaatttccggaggcagcaaaaaaaccgtccgcgcaggcttcctcaaagaagcctacatcactctgccacataaggaagcgaaaatggcagaacagattttggaaaccatacagccgattcccgccccggtaaaaaaagggcaaattttaggaaaaatcaaaatcagacaaaacggatacaccattgccgaaaaagaaatcgtcgcactggaaaatgtaaaaaaaagaagccggtggcaaaggctttgggcgcgtctgacagggcagtaa

SEQ ID NO: 57111 - DNA, 1392 bp, Neisseria meningitidis; identical to SEQ ID NO: 45350

SEQ ID NO: 57112 - DNA, 975 bp, Neisseria meningitidis; identical to SEQ ID NO: 44181

SEQ ID NO: 57113 - DNA, 1017 bp, Neisseria meningitidis; identical to SEQ ID NO: 44539

SEQ ID NO: 57114 - DNA, 432 bp, Neisseria meningitidis; identical to SEQ ID NO: 45320

SEQ ID NO: 57115 - DNA, 447 bp, Neisseria meningitidis; identical to SEQ ID NO: 47354

SEQ ID NO: 57116 - DNA, 984 bp, Neisseria meningitidis
atgtggcggatcggaggggcaggcggtcggcaaaccgtgcgcccggcggcagcattgccgtacattataacagccaaatccgcatcctgctttcagacggcaacggctgtcaagaaaaagcggcgcgtgtacaatacgcggattgtatgtttaggacggattggaaaaagaatggaaaatatcggcaggcagcgacccatcggcgtttttgactcgggaatcggcggtttgaccaatgtgcgagcgctgatggaacggctgccgatggagaacatcatttatttcggcgacacggcgcgcgtgccttacgggacgaaatctaaggcgaccatcgaaaatttctcgatgcagattgtcgattttttattggaacacgatgtcaaggcgatggttatcgcgtgcaatacgattgcggcggtggcggggcagaaaatccgtcaaaaaaccggcaatatgcccgttttggacgtgatttccgccggcgcgaaagccgcgctggcaacgacgcgcaacaataaaatcggcattatcgccaccaatacgacagtcaacagcaacgcctatgcgcgcgccatccacaggaacaaccccgatacgctcgtccgcacgcaggccgcgccgctgctcgtccctttggtggaggaaggttggttggaacatgaagttacccgcctgaccgtatgcgaatacctcaaaccattgcttgcggacggcatcgatacgctggtgttgggctgcacgcactttcccttgctcaaacccttaatcggcagggaggcgcacaatgtcgcactggtcgattccgcgattacgactgccgaagaaaccgcacgcgtccttgcgcaggagggattactcaataccgacaacaacaatcccgactaccgtttttatgtcagcgatattcctttgaaattcagaaccatcggcgagcgttttctgggcaggacgatggagcagattgaaatggtgtctttgggttag

SEQ ID NO: 57117 - DNA, 1446 bp, Neisseria meningitidis
atgagtacacaaacaaattttgatttggtgttgttcggtgcgaccggcgatttggcgatgcgcaagctgttgccctgtctgtaccaggcgcatgttgccggtctgcttcatcccgaagggcgtattttaggggtcagccgcagcgagttggataccgaaggttttctggcgaaggtggaaaccagttccaaaatccatgtgaaagaaaatttttccgatgaggcttgggcatcgtttgtcgaacgtctcgcatatctcaaagtcgatgttacgcagccggacgattttgccgctttgggcgatttggtcaaagcgcgcaaagaaaccgacaatgtcgtcatctatctttccaccgcgccgaaattcttcgcgcaaacatgtgaaaaccttgccaaaatcggtttgaacgccgacaacgtgcgtgtggttttggaaaaaccgttgggtacggatttggcttcttcccagcaaatcaataccgatgttgcgcgttatttcaaagaagggcaaatttaccgcatcgaccactaccttggcaaagaaagcctgcaaaacctgcttgcgctgcgttttgccaatgtaatgttcgagccgctgtggaacaataaatacatcgaaagcgtgcagttgaccatcgccgaacagctcggtgtggaagagcgcggcgagttttacgacattaccggcgcgttgcgcgatatggtgcaaaaccatttgatgcagatgctgtgcatgactgcgatggaagcccccgccagcttggatgccgacgcggtgcgcgatgaaaaagtcaaagtcatcaagtcattgaagccgctgaccgtcgaatctgtcaatgaaaatgtcgtgcgcggacaatataccgccgccaaaggcatgaacggctatcttgaagaaatcaacgttccgcaagacagctttaccgaaacctacgtcgccattaaagccgaaatcgaaaacgaacgctggaagggcgttcccttctacctgcgtaccggcaagcgcatggcgggcaaagtggcggaaatcgttttgaacttcaaagatttgaacagccatatttttgaaggcagtcgcaccgcgcccaaccggctcgttatcgagttgcaaccatatgaatccgtgcgcctctatacgcagatgaaaaccccgggggcaggaaataaggtcgaaaccgtgccgctggcaaccgatttgggcaaagcattggaaggccgccgcgcggaagcttacgagcgcctgctgctggatgtgattaacggcaaactcgctttgttcaaccgccgcgacgaactcgaagccgcgtgggaatatgtgatgccgattttggaaaactgggcaaataacaccacgccgccgcacggctacggcgcacactcgtgggggcctgaagccgcgcgcgaactattggcgcgcgacggacacaagtggcacgaagagcagtaa

SEQ ID NO: 57118 - DNA, 720 bp, Neisseria meningitidis; identical to SEQ ID NO: 44635

SEQ ID NO: 57119 - DNA, 1545 bp, Neisseria meningitidis; identical to SEQ ID NO: 44193

SEQ ID NO: 57120 - DNA, 438 bp, Neisseria meningitidis; identical to SEQ ID NO: 45344

SEQ ID NO: 57121 - DNA, 1869 bp, Neisseria meningitidis; identical to SEQ ID NO: 45917

SEQ ID NO: 57122 - DNA, 174 bp, Neisseria meningitidis; identical to SEQ ID NO: 48197

SEQ ID NO: 57123 - DNA, 2019 bp, Neisseria meningitidis; identical to SEQ ID NO: 46540

SEQ ID NO: 57124 - DNA, 864 bp, Neisseria meningitidis; identical to SEQ ID NO: 44872

SEQ ID NO: 57125 - DNA, 435 bp, Neisseria meningitidis; identical to SEQ ID NO: 50941

SEQ ID NO: 57126 - DNA, 480 bp, Neisseria meningitidis; identical to SEQ ID NO: 38443

SEQ ID NO: 57127 - DNA, 804 bp, Neisseria meningitidis; identical to SEQ ID NO: 38447

SEQ ID NO: 57128 - DNA, 1140 bp, Neisseria meningitidis; identical to SEQ ID NO: 45172

SEQ ID NO: 57129 - DNA, 720 bp, Neisseria meningitidis; identical to SEQ ID NO: 44115

SEQ ID NO: 57130 - DNA, 261 bp, Neisseria meningitidis; identical to SEQ ID NO: 49896

SEQ ID NO: 57131 - DNA, 204 bp, Neisseria meningitidis; identical to SEQ ID NO: 39691

SEQ ID NO: 57132 - DNA, 2055 bp, Neisseria meningitidis
atgacacgcaaaatcctcgttacctccgccctgccctatgccaacggcagcatccacctcggccatatggtcgaacacatccaaaccgacgtttgggtgcgctttcaaaaactgcgcggccacgaatgctactactgctgcgccgacgacactcacggcacgcccgtaatgcttgccgcgcaaaaacaaggcatcgcgcccgaagacatgattgccaaagtgcgcgaagagcacctcgccgactttaccgatttcggcatcggttacgacaattattacagcacccattcccctgaaaacaaacagttttcccaagacatttaccgcgcgctgaaagccaacggcaagattgagagccgcgtcatcgagcagcttttcgaccccgaaaaacaaatgttcctgcccgaccgcttcgtcaaaggcgaatgcccgaaatgccacgcccaagaccaatacggcgacaactgcgaagtctgcggcacgacctattccccgaccgaactgatcaacccgtattccgccgtttccggcgcgaaacccgaattgcgcgaatccgaacacttcttcttcaaactgggcgaatgcgccgacttcctcaaagcatggacttccggcaacaacccgcacgacggcaagccccatctgcaagccgaagccctcaacaaaatgaaagaatggctgggcgaaggcgaagaaaccacgctgtccgactgggacatttcccgcgacgcgccgtatttcggctttgaaatccccgacgcgccgggcaaatacttctacgtctggctggacgcgcccgtcggctacatggcgtcgtttaaaaacctgtgcgaccgcatcggcgtcgattttgacgaatacttcaaagccgacagccaaaccgagatgtaccacttcatcggcaaagacatcctctatttccacgccctgttctggcctgccatgctgcacttctccggccaccgcgccccgaccggcgtgtacgcacacggctttttgaccgtggacggacaaaaaatgtccaaatcgcgcggcaccttcatcaccgctaaatcctatctggaacaaggtttaaaccccgagtggatgcgctactacatcgccgccaaactcaacagcaaaatcgaagacatcgatttgaacctgcaagactttatctcgcgcgtcaacagcgacctcgtaggcaaatacgtcaacatcgccgcccgcgcgtcaggttttatcgccaaacgctttgaaagccgtctgaaagacgttgccgacagcgcgttgctggcaaaactgactgcgcaaagcgaagccattgccgaatgctacgaaagccgcgaatacgccaaagccctgcgcgacatcatggcattggcagacattgtcaacgaatatgttgatgccaacaaaccttgggaactggcgaaacaagaaggccaagacgcacgcctgcacgaagtatgcagcgagctcatcaacgccttcaccatgttgaccgcctacctcgcccccgtgttgccgcaaaccgccgccaacgccgcgcgtttcctcaatctggacgcgattacttgggcgaacacaagggtaaccttgggcgaacacgccatcaacaaatacgaacatttaatgcaacgagtggagcaaaaacaagtggacgatttaatcgaagccaacaaacaaagtattcagacaacccccgcgcctgttgaagacagcaaatacgaaaaagtcgccgaacaggcgggtttcgacgactttatgaaaatcgatatgcgcgtcgccaaagtattgaactgcgaagccgtcgaaggcagcaccaaactcctgaaattcgacctcgatttcggttttgaaaaacgtatcatcttctccggcatcgccgcgttttaccccaaccctgccgagttaaacggaagaatggtcattgccgtcgccaacttcgccccgcgcaaaatggcgaaattcggcgtatccgaaggcatgattttgagtgccgccacggcagacgggaaactgaaactgcttgatgtcgacgcaggcgcgcaaccgggcgacaaagtcggttaa

SEQ ID NO: 57133 - DNA, 489 bp, Neisseria meningitidis; identical to SEQ ID NO: 39373

SEQ ID NO: 57134 - DNA, 603 bp, Neisseria meningitidis; identical to SEQ ID NO: 38953

SEQ ID NO: 57135 - DNA, 291 bp, Neisseria meningitidis; identical to SEQ ID NO: 38495

SEQ ID NO: 57136 - DNA, 510 bp, Neisseria meningitidis; identical to SEQ ID NO: 42226

SEQ ID NO: 57137 - DNA, 696 bp, Neisseria meningitidis; identical to SEQ ID NO: 45623

SEQ ID NO: 57138 - DNA, 1011 bp, Neisseria meningitidis; identical to SEQ ID NO: 44780

SEQ ID NO: 57139 - DNA, 1362 bp, Neisseria meningitidis; identical to SEQ ID NO: 44971

SEQ ID NO: 57140 - DNA, 303 bp, Neisseria meningitidis; identical to SEQ ID NO: 44727

SEQ ID NO: 57141 - DNA, 840 bp, Neisseria meningitidis; identical to SEQ ID NO: 38805

SEQ ID NO: 57142 - DNA, 566 bp, Neisseria meningitidis
ttgaacatcaaatattcgggcatcgaaaacaggtttgaaaccgccatcctgaagaaaaacggcgtaagatccggcttcgtctccttcgcccccaaccttgccgccgtcaaactgaacgattatgccaaagttagaaaacggattaccaaaaccaaacagaaagccgacatcgtcattgtaatgttccacggcggcgggaagggaaacaggcggaacacctgccgttcgataccgaaatcttctatggggaaaacaggggcaacgtcgtcgagtttgcacggcttgccgtcgattccggcgcggatgtcgtattcgggcaggggccgcacgttacacgcgccgtcgaactttaccgcgaccgcttcatctcttacagcggcggcaactttgccacctacggcgcaatcaacacctccggcatcagcggcattgcgccgattttcaaaattatcaccaacaaacagggtaaatttatttccggaactatcatccctattacccaagccgacgataaaatccccaaaatcgaccctgaaaaaccgttatcgggcggattatttatctga

SEQ ID NO: 57143 - DNA, 2838 bp, Neisseria meningitidis; identical to SEQ ID NO: 44328

SEQ ID NO: 57144 - DNA, 1251 bp, Neisseria meningitidis; identical to SEQ ID NO: 44392

SEQ ID NO: 57145 - DNA, 882 bp, Neisseria meningitidis; identical to SEQ ID NO: 45356

SEQ ID NO: 57146 - DNA, 1458 bp, Neisseria meningitidis; identical to SEQ ID NO: 45532

SEQ ID NO: 57147 - DNA, 420 bp, Neisseria meningitidis; identical to SEQ ID NO: 44730

SEQ ID NO: 57148 - DNA, 1539 bp, Neisseria meningitidis; identical to SEQ ID NO: 39517

SEQ ID NO: 57149 - DNA, 1977 bp, Neisseria meningitidis; identical to SEQ ID NO: 45146

SEQ ID NO: 57150 - DNA, 486 bp, Neisseria meningitidis
atggacgcgctgcacaccatcgcccgaaacctgacgaaaaaacgtcaaaccgtaagctgtgccgaatcctgcacgggggggctgcttgccgccgcattcacaagcgttgcaggcagttcgcaatggttcgatcaaagttttgtaacatacagcaacaaagccaaagaagaccgcttgggcgtgttgcccgaaaccctgctcgaacacggcgcggtcagccgccaaaccgtctatgagatggcgcgcggcgcgaaagccgtggcgcaggcggattacgccgtcggtatttccggcatcgccggtccgggcggcggcagcgaaagcaaacccgtcggcacggtttggttcgggtttgcctttccgggcggaagttgcgaagcaatgcgccgttttgacggcaaccgcgaatccgtccgcgcgcaggcggtcgccttcgcgttggaacggttggcggggctgattgaaaacggcggcgatgctgtctaa

SEQ ID NO: 57151 - DNA, 603 bp, Neisseria meningitidis; identical to SEQ ID NO: 45681

SEQ ID NO: 57152 - DNA, 1218 bp, Neisseria meningitidis; identical to SEQ ID NO: 44261

SEQ ID NO: 57153 - DNA, 1770 bp, Neisseria meningitidis; identical to SEQ ID NO: 45392

SEQ ID NO: 57154 - DNA, 735 bp, Neisseria meningitidis
atgtgcgcgtttaccagcaaagaaaaagccaaaatccacctcgaaagcggcgcgaaaaaagtcctcatttccgcaccgggcggcgacgatgtcgatgcaaccgtcgtgtacggcgtgaacgacagcgtcctgaccgccgacatgaccgtcgtttccaacgcttcctgcaccaccaactgcctctcgccggttgccaaagtgttgagcgaaagcgtcggcatcgtcaaaggcgcgatgaccaccatccacgcgctgaccaacgaccaaaccgttaccgacgtgcgccacaaagacctgcgccgcgcccgcagcggcgtggaaaacatgattccgaccaaaaccggcgcggcaaaagccgtcggtttggtactgcccgaattgaaaggcaggctcgacgggcttgccatccgcgtgccgaccgtcaacgtatcattggtagatttgagcttccaagccgcgcgcgacacgacagtcgaagaaatcaacgcactgatgaaagccgcctcggaagcaggcgcgctcaaaggcgttttaggctacaacaccctgcccttggtttccatggacttcaaccacactaccgaagccagccacttcgacgcaacactgaccaaagtcgttgacggcaacatgattaaagtcttcgcatggtatgacaacgaatggggcttcagctgccaaatgctgaacaccgcacgccgtatgttcggacttgaagtgcgcccgctcaaataa

SEQ ID NO: 57155 - DNA, 201 bp, Neisseria meningitidis; identical to SEQ ID NO: 45370

SEQ ID NO: 57156 - DNA, 318 bp, Neisseria meningitidis; identical to SEQ ID NO: 45471

SEQ ID NO: 57157 - DNA, 1500 bp, Neisseria meningitidis; identical to SEQ ID NO: 44591

SEQ ID NO: 57158 - DNA, 483 bp, Neisseria meningitidis; identical to SEQ ID NO: 38977

SEQ ID NO: 57159 - DNA, 450 bp, Neisseria meningitidis; identical to SEQ ID NO: 44886

SEQ ID NO: 57160 - DNA, 2247 bp, Neisseria meningitidis
ttgagaaattttgaccataccggcgctcagacggcatcccgcagccttaactgccgtctgaatatcaaagcaggaatcacgcttatgcaacaaaaaatccgtttccaaatcgaaggcatgacctgccaggcctgcgcttcgcgcattgaaaaagtgttgaacaaaaaagactttgtcgaatcggcgggggtgaacttcgccagcgaggaggcgcaggttacgtttgacgacagcaaaacttccgcagccgacattgccaaaatcattgagaaaaccggttacggcgcgaaggaaaaaacggaagatacattgccgcaagctgaagcagaacaccatatcggctggcggctgtggctgctgtccgccatcaatattccgttccttgtcggtatggcggggatgatgatcggtaggcacgattggatgattccgccgttgtggcagtttgcgctggcaagcattgtgcaactttggctggcaatcccgttttacaaaagcgcgtgggcgagcattaaaggcgggctggcgaatatggacgtgctggttactatcggcacggtgtcgatttacctgtattccgtttatatgttgtttttcagtccgcacgcggcacacggaatggcgcacgtgtattttgaagcgggcgtgatggtgattggttttgtgtcgctgggcaaatttttggaacaccgtaccaaaaaatccagcctgaacagcttgggcttgctgctcaaactcacgccgacccaagtcaacgtgcagcgcgatggcgaatggaaacagcttcccatcgaccaagtgcaaatcggcgaccttatccgcgccaaccacggcgaacgcattgccgccgacggcgttatcgaaagcggcagcggctgggcggacgagagccatcttaccggcgaatccaatcccgaagagaaaaaggcgggcggcaaagtgttggcgggcgcgctgatgaccgaaggcagcgtggtgtaccgcgccgcgcagctcggcagccaaaccctgctcggcgacatgatgaacgcactctctgaagcgcaaggcagtaaagcaccgattgcgcgcgtggcggacaaggcggcggcggtgttcgtgcctgccgtcgtgggcatcgcgttgttgacttttattgttacttggctgattaagggcgattggacggttgcgctgatgcacgccgtcgccgttttggtgattgcctgcccgtgtgcgctcggtctggctacacccgccgcgattatggtcggcatgggtaaagcagtgaaacacggcatttggtttaaagacgcagcggcaatggaagaagccgcccacgtcgatgccgttgtgttggacaaaactggcacgctgaccgaaggcaggccgcaggttgccgccgtttattgtgttcccgacagcggctttgacgaagacgatttgtaccgcatcgccgctgccgtcgaacaaaacgccgcccatccgcttgcccgagccatcgtttccgccacccaagcgcgcggtttggagattcccgccgcacaaaacgcgcaaaccgttgtcggcgcaggcattgccgccgaagtggaaggtgcgggattggtgaaagcgggcaaagccgaatttgccgaactgaccttgcccgagttttcagacggcgtttgggacattgcaagcattgttgcagtctcagtcgataacaaacctatcggtgcattcgcacttgccgacgcgttgaaagccgataccgccgaagccataggccgtctgaaaaaacacaatatcgatgtttacatcatgagcggcgacaaccaaggcacggtcgaatacgtcgcccaacaactgggtatcgctcacgccttcggcaatatgagtccgcgcgacaaagccgccgaagtgcagaaactcaaagccgccggcaaaaccgtggcgatggtcggcgacggcatcaacgacgcgcccgcgctcgccgccgcaaacgtcagcttcgccatgaaaggcggtgcggacgttgccgaacacaccgcgtccgccacgctgatgcagcattcggttaatcagctcgccgatgccctgctggtgtcgcaagccactttgaaaaacatcaagcaaaacctgtttttcgccttcttctacaatatcttgggcattccgctcgccgcgcttggctttttaaatcccgtcatcgcaggcgcggccatggcggcaagctcggtttccgtgttgagcaatgccttgcgcctgaaacgggtaaaaatcgattga

SEQ ID NO: 57161 - DNA, 1773 bp, Neisseria meningitidis; identical to SEQ ID NO: 44305

SEQ ID NO: 57162 - DNA, 171 bp, Neisseria meningitidis; identical to SEQ ID NO: 37387

SEQ ID NO: 57163 - DNA, 987 bp, Neisseria meningitidis; identical to SEQ ID NO: 45829

SEQ ID NO: 57164 - DNA, 807 bp, Neisseria meningitidis
atgcaaaaccacgttatcagcttagcttccgccgcagaacgcagggcgcacattgccgataccttcggcaggcacggcatcccgtttcagtttttcgacgcactgatgccgtctgaaaggctggagcaggcaatggcggaactcgtacccggcttgtcggcgcatccttatttgagtagtgtggaaaaagcctgctttatgagccacgtcgtattgtggaagcaggcgttggacgaaggcgtaccgtatgttgccgtatttgaggatgatgtcttactcggcgaaggggcggagaaattccttgacgaagacgcttggctgcaagagcgttttgacaaggattccgcctttatcgtccgcttggaaaccatgtttatgcacgtcctgacctcgccctccggcgtggcggactactgcgggcgtgcctttccgctgttggaaagcgaacactgggggacggcgggctatatcatttcccgaaaggcaatgcggttttttttggacaggtttgccgttttgccgtccgaacgcctgaaggcggtggattggatgctgttcagcagttttctcgacaaaggggggatgacggtttgccaactgacccccgccttgtgcatccaaagcgaaaccctgcccagccaactgaaaaacggcaggcaggaatcgtaccgcaaccgccgctccccgaaggttttgttgaaacgcgctttgggaaaaatcggcagggaaatcgaaagggcgagggaacggaaacgtcagaaaaaattggaaaaacacctcgggcggcacgtcgtcccgtttgaatag

SEQ ID NO: 57165 - DNA, 759 bp, Neisseria meningitidis
atgattaccatccgcaacgtcagcttccacatcggcacttgccccattctggacaacatcagcctcgacattcccgaaggcggcattaccgcgctgatcggcccgaacggcgcaggcaagtccaccctgttttcctttatggcgcggctgcgcccgcttgaaagcggcagcatcgcctaccgcggcaaaaaccttgccggcactcccaccgccgaactcgcccgcacgctctccatcctcacccaagaaaacagcatcatgagccgcatcaccgtgcgcgacctgctgatgttcggccgttacccctaccatcaaggcagaccgactgccgaatgccgccgtatcgttaacggtgcaatcgaagaattccacctgcaagacctctccgaccgctatctgaccgaactctccggcggccaacgccaacgcgccatgattgcgatggtgttctgccaaagcaccgactacgtccttttggacgaaccgctgaacaacctcgatatgtatcacgcccgctcgctcatgcagattctgcaaaagctcacgcgcgaacacaaacgcaccaccgtcgccgtattgcacgacattaaccaggccgccgcttacgccgaccacgtcgtcgccatgaaaaacggcaaagtcgccctgaccggcacgcccgaagaagtgttcaccgtacacaacatcaaagaactgttcgacatggacgtggacgtactcgactacgaaggcaaaaaactcatcgtccaccatatctga

SEQ ID NO: 57166 - DNA, 330 bp, Neisseria meningitidis; identical to SEQ ID NO: 45521

SEQ ID NO: 57167 - DNA, 1395 bp, Neisseria meningitidis; identical to SEQ ID NO: 45077

SEQ ID NO: 57168 - DNA, 855 bp, Neisseria meningitidis; identical to SEQ ID NO: 39178

SEQ ID NO: 57169 - DNA, 540 bp, Neisseria meningitidis; identical to SEQ ID NO: 44661

SEQ ID NO: 57170 - DNA, 2928 bp, Neisseria meningitidis
atgccgtctgaacaagggtttcagacggcatttgccttttccgttataatccggggttgtgcggggtcgggttttaagccggcatcgtccttccctatttttttctgtcccttatcggttttaagcgggttttttatgtccaacagacctacactcctcctcgttgacggctcgtcctacctctaccgtgcgtatcacgcgatggggcaaaacctgaccgcccccgacggcgcgccgacgggtgcgctgtatggcgtattgaatatgttgcgccgtttgcggtcggaatatccgcacgattattgcgcggtggtttttgatgcgaaaggcaaaaatttccgccatcaaatgtttgaagaatacaaggcgacgcgcccgccgatgcccgacgatttgcgcccgcaggcggaagcactgccggatttagtgcgcctgacaggctggccggtattggtgattgggcaggtggaggcggacgatgtgatcggcacgctggcgaaacagggggcggaacatggtttgcgagtcattgtttcgaccggcgataaggacatggcgcagttggtggatgagcgcgttacgctggtgaacacgatgagcggagaaacgctggatattgaaggcgtgaaggcaaaattcggcgtgcgccccgaccaaatccgcgattatctcgcgctgatgggcgacaaggtggacaacgtgccgggcgtggaaaaatgtggcccgaaaacggcagtgaagtggctggaagcctacggctcgttgcaaggcgtgatggaacacgcttcggaaatcaagggcaaagtgggcgagaatctgcgtgccgccctgccgcgcctgccgctgtcgtatgatttggtaacgattaaaaccgatgtggacttgcacgccgagctttcagacggcatcgaaagcctgcgccgtaccgcgccgaaatgggcgcaactggttgtcgatttcaaacgctggggcttccgcacctggctgaaagaagcggaatcaaacatgaataccggctcgaccgatgatgtgttcggcagcgacagcatcggtgagcaggcggctttgaatgcggaaatgccgtctgaaaaacaagctgaaaaagccaccgcccccgaaaggctggattatcaagccgttaccaccgaagcgcagtttgccgctttgttggacaaactgtcgcgggcgaacacaatcggcatcgatacggaaaccacgtcattagacgcgatgaacgcctcgctggtcggcatcagcatcgctttccaagcaggcgaagcggtttacatccccgtaggacacagcctgaccgcagcgcctgaacagcttgatttacaagacgtattaggccgtctgaaaccgcatttgggaaaccccgccctaaaaaaaatcgggcaaaacctcaaatacgaccaacacgttttcgccaactacggcatcgccctgaacggcattgccggcgacgccatgctcgcttcctacatcatcgagagccatctcggacacggcttggacgaattgtccgaacgctggctcggcttggaaaccattacctacgaatcgctgtgcggcaaaggcgcgaagcaaatcggttttgccgatgtcgccatcgggcaggcgaccgaatacgccgcccaagacgccgatttcgccctgcgcctcgaagcgcacctgcgcgcgcaaatggacgaaaaacagcttgaaatgtatgaaaaaatggagctgcccgtcgcgcaggtattgtttgaaatggaacgcaacggcgtgcaaatcgaccgcgccgaactcgcccgccaaagcgcggaactcggcgccgagctgatgaagctcgaacaacaagcctatgccgccgcagaccagccgttcaacctcaattcgcccaaacagctgcaagaaatcctgttcgacaaaatgggcatccccaccaaaggcctgaaaaaaaccgccaaaggcggcatttccaccaacgaagccgtgctcgaacagctcgcgcccgactaccccctgcctaaaatcatcctgcaaaaccgcagcctggcgaagctcaaatccacctacaccgacaaactacccgaaatgatttcccccaaggacggccgcgtgcataccacctacgcccaagccgtcgccattaccggccgcctcgccagcaacaaccccaacctgcaaaacatccccatccgcaccgccgaaggccgccgcgtgcgccgcgcctttaccgcaccgcaaggcagcgtcatcgtttccgccgactattcccaaatcgagctgcgcattatggcgcacctctccggcgacaaaaccctgattgccgcgttccaaaacggcgaagacgtacaccgccgcaccgccgccgaagtgttcggcactgcgcccgaaaacgtctcgtccgagcaacgccgctacgccaaaaccatcaacttcggcttaatttacggtatggggcaatacggtttggcaaaatcattgggcatcgacaacctttccgccaaaaactttatcgaccgctacttcgcccgctaccccggcgtcgccgaatacatgcagcgcaccaaagaacaagccgccgcccaaggctacgtcgaaaccctgttcggcagaaggctctatttgcccgacatccgcaacaaaaacgccaacgcccgcgcaggagccgagcgcgccgccatcaatgcccccatgcaaggcaccgcgtccgacctcatcaaacgcgccatgatagacgtgcgaaactgtctttcagacggcatcggcagcaaactggtcatgcaggtgcatgacgaactggtgctggaagtcgttgaaaccgaactggattttgtcaaagaaaaactgccgcagattatggcgaaagtggacggcggattattggatgtaccgctggtggctgaggttggcgtaggggagaattgggaagaggcacattga

SEQ ID NO: 57171 - DNA, 375 bp, Neisseria meningitidis; identical to SEQ ID NO: 41186

SEQ ID NO: 57172 - DNA, 495 bp, Neisseria meningitidis; identical to SEQ ID NO: 44694

SEQ ID NO: 57173 - DNA, 1248 bp, Neisseria meningitidis; identical to SEQ ID NO: 39099

SEQ ID NO: 57174 - DNA, 627 bp, Neisseria meningitidis
atgacacaagaacatttcccatcattcttcaaccaagccccgaccattaccgtccaagacgcattggccgaattcctcggcgcggccgaaaacggcatcctcacttaccgctacgccgatgccgtgcgcctgtgcggacattcctgcccgaccgtcgcgggcgcgtacctgatggttatcaaaggtctgaaagcactttacggcgaagagctgcccgaacgcggcggcatcgaagcctttatgcagggcacgcgcgacgaaggcacggtcggcgtaaccgcgtccgtcgtccaactcctcaccggcgcagcccccgaaaccggctttggcggcatcggaatgcagggacgctttgcccgccgccacctcttatcctttggtgtaggcgaaatcaacggcacactgaccctgcgccgcaaagacaacggcaaaaccgtcgccgtcagcctcaacgccgccctgcaaccctttgcacccgaaatgcgcgaacttatgcccaaagccgtcggcggcagcgcaagcgccgacgaacttaaacaattcggcgaactctggcaagaacgcgtccgtgccttcctgattgaccaagccgacaaccccgaatttgttaccgtcagcgaaatctaa

SEQ ID NO: 57175 - DNA, 174 bp, Neisseria meningitidis; identical to SEQ ID NO: 42248

SEQ ID NO: 57176 - DNA, 279 bp, Neisseria meningitidis; identical to SEQ ID NO: 44294

SEQ ID NO: 57177 - DNA, 468 bp, Neisseria meningitidis; identical to SEQ ID NO: 38530

SEQ ID NO: 57178 - DNA, 291 bp, Neisseria meningitidis; identical to SEQ ID NO: 38495

SEQ ID NO: 57179 - DNA, 981 bp, Neisseria meningitidis
atggggattgcgccttactgtcgaaaccttattattcaggagcagaagatgaaaattgcaaacagcatcaccgaactaatcggcaacacgcctttggtcaaactgaaccgtctgaccgaaggtttgaaggcggaggttgccgtgaaactggaatttttcaatccaggcagcagcgtcaaagaccgcattgccgaagcaatgatcgagggtgccgaaaaagcgggcaaaatcaacaaaaacaccgtcattgtcgaagcaaccagcggcaatacgggtgtcggtttggcaatggtatgtgccgcacgcggctacaagctggcgattaccatgccggaaagcatgagtaaggagcgcaaaatgctgttgcgcgcgtttggtgcggagctgattctgacccctgccgccgaaggtatggcgggcgcgattgccaaagcgaaatccttggtggacgcgcatcccgacacttattttatgccgcgccagttcgacaatgaggcaaaccccgaagtccaccgcaaaacaaccgccgaggaaatttggcgggatacggacggcaaagtcgatgtcttcgttgccggcgtcggcacgggcggtacgattaccggcgtgggcgaagtgttgaaaaaatacaaacccgaagttaaagtggttgccgtcgagcctgaagcttcacccgtattgagcggcggcgaaaaaggcccgcacccgattcaaggcatcggcgcaggctttattccgaccgttttgaataccaaaatttacgacagcattaccaaagtgtcgaacgaagcggcttttgaaaccgcccgcgcaatagcggaaaaagaaggcattttggtgggtatttcttccggtgcggcggtttggagtgcgttgcagcttgccaaacagcctgaaaacgaaggcaagctgatagtcgtgctgctgccttcttatggcgaacgctatctctctacgccactttttgcagatttggcataa

SEQ ID NO: 57180 - DNA, 948 bp, Neisseria meningitidis
atggctattccagttttactttggggtgcagccgccgcccttgctgcaacaggtattgtcaaaggagcagccgcactcagcgatatagatgatgcaaaagaaataggtgagcgtgcagaacgccgttataaacgcaggaaaagagaattgaattcgactaaagacgaaaccaaccttgcttttgaggagctgggacagtttaaggttgatatttttaacaatcaaatcagacatattgttcaagtcctaaacaacaccagcaacaagcatgcgaaaagcgaactgtcgggttttaacagtacatttgatattgctgaattaaaagaaatggaaactatggtgcaaacttctttagagttaagcaccaatctcggcagtagtgccattactggcgcactggcaggctttggcgtatacggtgcagtacctatgattgcaactgcttccacaggaacagcaatctccaccctttcaggtgctgcggcaaccaatgcaacccttgcttggctcggaggtggctcattggcagcaggtggattcggtatggcaggcggcatggtggctttgggtggcatcgtggcaggacctgctttagcaatcggtggatttatgctggcaagcaaggcggaagaggcactgacggaagcacgagcatatagtgctgaaatcgatgaggctattgacgagatggatttaattacagaaggattagaagggttgaaggaaaacgcaagggaaatacgccataccttagaagaaatggttaaacgtttcgaaaaggttcgtgtcgaccatgccgaccatcctgatttccataccatgctggtcatcggcaaggcgattaaaaatctgctgaatacgcctattatggaagaggacggatctcctgtagccaatatccgtcatcaatgcgaaggttgtctgaatatcgaattaggtacagtataa

SEQ ID NO: 57181 - DNA, 1815 bp, Neisseria meningitidis; identical to SEQ ID NO: 45000

SEQ ID NO: 57182 - DNA, 1479 bp, Neisseria meningitidis; identical to SEQ ID NO: 44563

SEQ ID NO: 57183 - DNA, 1131 bp, Neisseria meningitidis
atgtttaccgatgaaaatatgaccgcaaaggaagaactgttcgcatggctgcgccatatgaaccaaaacaaaggttccgacctgttcgtgacgactcatttcccgcccgcaatgaagctggacggcaaaatcacccgcatcacggacgaaccgctgacggcggaaaaatgtatggaaatcgccttttcgattatgagtgcgaagcaggcggaagaattttcatcgaccaacgagtgcaacttcgccatcagtctgccggacaccagccgcttccgcgtcaatgcgatgatacagcgcggcgcgacagcgttggtattccgtgcgattaccagcaagattcccaagtttgaaagcctgaacctgccgccggtcttgaaggatgtcgcgctgaaaaaacgcgggctggttatttttgtcggcggcaccggctcgggcaaatcgacttcgcttgcctcgcttatcgactaccgcaatgaaaattcgttcggacacatcatcaccatcgaagacccgatcgagtttgtccacgaacacaaaaactgcatcatcacccagcgcgaggtcggcgtggatacggaaaactggatggcggcgttgaaaaacacgctgcgtcaggcgccggatgtgattctgatcggcgaaatccgcgaccgcgaaacgatggactacgccattgcctttgccgaaacggggcatttgtgtatggcgacgctgcacgccaacagcaccaatcaggcactcgaccgcatcatcaactttttccccgaggagcggcgcgaacaattgctgacggatttgtcgctcaaccttcaggcgtttatttcgcaacgcctcgttccgcgagacggcggcaagggcagggtggcggcagtcgaggtgctgctcaattcgcccctgatttcggagttgattcacaacggcaacatccatgaaatcaaagaagtgatgaaaaaatccactaccctgggtatgcagaccttcgaccaacacctttaccaattgtatgaaaaaggcgatatttccttgcaggatgccttgaaaaatgccgattcggcgcatgatttgcgtttggctgttcagttgagaagccgccgcgcgcaaagttccggaccggatttggaattgctctga

SEQ ID NO: 57184 - DNA, 279 bp, Neisseria meningitidis; identical to SEQ ID NO: 45377

SEQ ID NO: 57185 - DNA, 1338 bp, Neisseria meningitidis; identical to SEQ ID NO: 38368

SEQ ID NO: 57186 - DNA, 567 bp, Neisseria meningitidis; identical to SEQ ID NO: 45282

SEQ ID NO: 57187 - DNA, 1497 bp, Neisseria meningitidis; identical to SEQ ID NO: 38911

SEQ ID NO: 57188 - DNA, 1350 bp, Neisseria meningitidis; identical to SEQ ID NO: 46905

SEQ ID NO: 57189 - DNA, 486 bp, Neisseria meningitidis; identical to SEQ ID NO: 45574

SEQ ID NO: 57190 - DNA, 864 bp, Neisseria meningitidis; identical to SEQ ID NO: 44142

SEQ ID NO: 57191 - DNA, 2595 bp, Neisseria meningitidis; identical to SEQ ID NO: 44645

SEQ ID NO: 57192 - DNA, 687 bp, Neisseria meningitidis
atgacggtgttgcaagaacgttatcgggaggtgtccgaccgtattggaaaattggttctgcaggcgggaaggaagccgcattccgtcagcctgattgccgtcggtaagactttcccttcagacggcatccgcgaagtttacgccgccggacagcgtgatttcggcgagaactatattcaggagtggtacggcaaaacggaagagttggcggatttgaccgacatcgtgtggcacgtcatcggcgatgtgcagtccaacaaaaccaagtttgtcgccgaacgcgcgcattgggtgcataccgtatgccgtctaaagaccgccgtccggctgagtgggcagcgtccttcttcaatgccgcctttgcaggtgtgtatcgaggtgaatattgcaggcgaggcggcaaagcacggtgttgctcccgaagaagcggtcgcgcttgcggtcgaagtggcgaagttgcccaaccttgtcgtgcgcggactgatgtgcgttgccaaagccaacagcagtgaaacggagttgaaaacccagtttcagaccatgcaaaagttgcttgccgacctcaatgcggctggcgttaaggcagacgtgctgtctatggggatgtcggacgatatgcctgccgccattgagtgcggtgcgacacacgtccgtatcggcagcgcgattttcgggaaaaggggctga

SEQ ID NO: 57193 - DNA, 198 bp, Neisseria meningitidis; identical to SEQ ID NO: 36305

SEQ ID NO: 57194 - DNA, 756 bp, Neisseria meningitidis
ttgggcttattcaaattagggacacgccctaagacaaatatcgtaaaaattgatgaaaaattagaagccgtggctgataccgtcgacaagcatgccgaagcattcaacgatatcgccgattcattggatgaaaccaacactaaggcagacgaagccgtcaaaaccgccaatgaagccaaacagacggccgaagaaaccaaacaaaacgtcgatgccaaagtaaaagctgcagaaactgccgctggcacagctaatactgcagccgacaaggccgaagctgtcgctgcaaaagttaccgacatcaaagctgatatcgctacgaacaaagataatattgctaaaaaagcaaacagtgccgacgtgtacaccagagaagagtctgacagcaaatttgtcagaattgatggtctgaacgctactaccgaaaaattggacacacgcttggcttctgccgaaaaatccattaccgaacacggtacgcgcctgaacggtttggatagaacagtgtcagacctgcgtaaagaaacccgccaaggccttgcagaacaagccgcgctctccggtctgttccaaccttacaacgtgggtcggttcaatgtaacggctgcagtcggcggctacaaatccgaatcggcagtcgccatcggtaccggcttccgctttaccgaaaactttgccgccaaagcaggcgtggcagtcggcacttcgtccggttcttccgcagcctaccatgtcggcgtcaattacgagtggtaa

SEQ ID NO: 57195 - DNA, 294 bp, Neisseria meningitidis; identical to SEQ ID NO: 36355

SEQ ID NO: 57196 - DNA, 138 bp, Neisseria meningitidis; identical to SEQ ID NO: 39930

SEQ ID NO: 57197 - DNA, 1305 bp, Neisseria meningitidis; identical to SEQ ID NO: 44339

SEQ ID NO: 57198 - DNA, 132 bp, Neisseria meningitidis
atgcaggtttccgtatggatggattcgtcattcccgcgcaggcgggaatctaggtctgtcggtgcggaaacttatcgggtaaaacggtttcttgagattttgcgtcctgaattcccactttcgtgggaatga

SEQ ID NO: 57199 - DNA, 1287 bp, Neisseria meningitidis; identical to SEQ ID NO: 45698

SEQ ID NO: 57200 - DNA, 1380 bp, Neisseria meningitidis; identical to SEQ ID NO: 44209

SEQ ID NO: 57201 - DNA, 174 bp, Neisseria meningitidis; identical to SEQ ID NO: 36913

SEQ ID NO: 57202 - DNA, 756 bp, Neisseria meningitidis; identical to SEQ ID NO: 44544

SEQ ID NO: 57203 - DNA, 2646 bp, Neisseria meningitidis
ttgagagacattgaaaaaattatgaaaacctccgaactgcgccaaaaattcctaaaattttttgaaaccaaaggccacaccgtcgtccgctcttccagcctcgtgccgcacgacgacccgaccctgctgtttaccaacgcgggcatgaaccagtttaaagacgtattcttaggtttcgacaaacgcccgtacagccgcgccaccaccgcgcaaaaatgcgtacgcgcaggcggcaagcacaacgacttggaaaacgtcggctacaccgcccgccaccacaccttctttgaaatgatgggcaacttctccttcggcgactacttcaagcgcgacgcgatccacttcgcttgggaatttctgacttcccccgaatggctcaatatccccaaagacaaactgttggcgaccgtttacgcggaagacgacgaagcctacaacatctggttgaacgaaatcggtatgccgtccgagcgcatcgtccgcatcggcgacaacaaaggcgcgaaatacgcgtccgacaacttctggcaaatgggcgacaccggcccttgcggcccctgctccgaaattttctacgaccacggcgaagaaatttggggcggcattcccggcagccccgaagaagacggcgaccgctggatcgaaatttggaactgcgtattcatgcagttcaaccgcgacgaacaaggcaatatgaatccgctgcccaagccgtccgtcgataccggcatgggcttggaacgcatggccgccgttatgcagcatgttcacagcaactacgaaatcgacttgttccaagacctgctcaaagccgttgcccgcgaaaccggcgcagctttcagcatggaagaaccaagcctaaaagtcatcgccgaccacatccgctcctgctcattcctgattgcagacggcgtattgccttccaacgaaggccgcggctacgtattgcgccgcattatccgccgcgccgtgcgccacggttacaaactgggtcaaagcaaaccgttcttccacaaactggtggccgatttggtcaaagagatgggcgatgcctaccctgaattgaaagaaaaacaagttcaaatcgaagaagcgttgaaaaacgaagaaagccgttttgcccaaactctggaaaccggtatggctttgttggaaaacgcgcttgccaaaggcagcaaaaaactcgacggcgaaatcatcttcaaactctacgatacctacggtttcccatacgacttgactgccgacatctgccgcgaacgcaatatcgaactggacgaagcaggcttcgagcgcgaaatggaagcccaacgcgcacgcgcacgcgccgcacaaagcttcaaagccaacgcccaactgccttatgacggtcaagacaccgagtttaaaggttatagcgaacgccaaaccgaatccaaagtcctcgccctctacaaagacggcgagcaagtcgacgaattgaacgaaggcgacagcggcgcagtcgtcatcgactttaccccgttctatgcagaatccggcggccaagtcggcgatgtcggctatatcttctcaggcgaaaaccgctttgaagtactcgatacccaaaaaatcaaagcggccgtattcggtcaattcggcgtacaaacttcaggccgtctgaaagtcggcgacagcgttaccgccaaagtggacgacgaaatccgcaatgccaatatgcgcaaccacagcgcaacccacttgatgcacaaagccctgcgcgatgtattgggcagacacgtcgaacaaaaaggctctttggttaccgccgaatccacccgtttcgacatttcccatccccaagcggtaactgccgaagaaatcgccgaagtcgaacgccgcgtcaacgaagccgttttggcgaacgttgccgtcaacgccgccattatgagcatggaagacgcgcaaaaaaccggcgccatgatgctcttcggcgaaaaatatggcgacgaagtacgcgtattgcaaatgggcggtttctctaccgaattgtgcggcggcacgcacgtttcacgcaccggcgacatcggcctcttcaaaatcatcagcgaaggcggtattgccgcaggcgtgcgccgtatcgaagccatcaccggcctgaacgcactcaaatgggcgcaagagcaagagcgtttggtgaaagacatcattgctgaaaccaaagcccaaaccgaaaaagacgtactggcgaaaatccaagcaggcgcggcacacgccaaagcattggaaaaagaattggcacgcgccaaagccgaactcgccgtccacgcaggcgcaaaactcttggacgacgcaaaagacttgggcgcagccaaactcgttgccgcccaaatcgaagccgacgcagccgccctgcgcgaaatcgtaaccgacctgaccggaaaatccgacaacgccgtgattcttttagcggcagtaaacgacggcaaagtctccctgtgcgccggcgtatccaaagccctgaccggcaaagtcaaagcaggcgatctggttaaatttgcagccgaacaagtcggcggcaaaggaggcggcagaccagatttggcacaggcagggggcacggatgccggcaaattgcccgccgtgttggatagcgtgaaagactgggtcggcgcgaagctggtttga

SEQ ID NO: 57204 - DNA, 1935 bp, Neisseria meningitidis; identical to SEQ ID NO: 46132

SEQ ID NO: 57205 - DNA, 327 bp, Neisseria meningitidis; identical to SEQ ID NO: 45036

SEQ ID NO: 57206 - DNA, 393 bp, Neisseria meningitidis; identical to SEQ ID NO: 38784

SEQ ID NO: 57207 - DNA, 762 bp, Neisseria meningitidis; identical to SEQ ID NO: 39551

SEQ ID NO: 57208 - DNA, 1002 bp, Neisseria meningitidis; identical to SEQ ID NO: 46340

SEQ ID NO: 57209 - DNA, 342 bp, Neisseria meningitidis; identical to SEQ ID NO: 39379

SEQ ID NO: 57210 - DNA, 372 bp, Neisseria meningitidis; identical to SEQ ID NO: 45650

SEQ ID NO: 57211 - DNA, 345 bp, Neisseria meningitidis; identical to SEQ ID NO: 39778

SEQ ID NO: 57212 - DNA, 1446 bp, Neisseria meningitidis; identical to SEQ ID NO: 44542

SEQ ID NO: 57213 - DNA, 207 bp, Neisseria meningitidis; identical to SEQ ID NO: 39219

SEQ ID NO: 57214 - DNA, 447 bp, Neisseria meningitidis; identical to SEQ ID NO: 39246

SEQ ID NO: 57215 - DNA, 816 bp, Neisseria meningitidis; identical to SEQ ID NO: 38138

SEQ ID NO: 57216 - DNA, 2382 bp, Neisseria meningitidis; identical to SEQ ID NO: 44205

SEQ ID NO: 57217 - DNA, 939 bp, Neisseria meningitidis; identical to SEQ ID NO: 44988

SEQ ID NO: 57218 - DNA, 1242 bp, Neisseria meningitidis; identical to SEQ ID NO: 47155

SEQ ID NO: 57219 - DNA, 474 bp, Neisseria meningitidis; identical to SEQ ID NO: 44295

SEQ ID NO: 57220 - DNA, 576 bp, Neisseria meningitidis; identical to SEQ ID NO: 44953

SEQ ID NO: 57221 - DNA, 729 bp, Neisseria meningitidis
atgtgccggactgccgcaaatcatcccttttcccgaaaaatatttgacttcaaactgcctatgaaccacgacatcactttcctcaccctgttcctactcggtttcttcggcggaacgcactgcatcggtatgtgcggcggattaagcagcgcgtttgcgctccaactccccccgcatatcaaccgcttttggctgatcctgctgcttaacacaggacgggtaagcagctatacggcaatcggcctgatactcggattaatcggacaggtcggcgtttcactcgaccaaacccgcgtcctgcagaatattttatacacagccgccaacctcctgctgctctttttaggcttatacttgagcggtatttcttccttggcggcaaaaatcgagaaaatcggcaaaccgatatggcggaacctgaacccgatactcaaccggctgttacccataaaatccatacccgcctgccttgcggtcggaatattatggggctggctgccgtgcggactggtttacagcgcgtcgctttacgcgctgggaagcggtagtgcggcaacgggcgggttatatatgcttgcctttgcactgggtacgctgcccaatcttttggcaatcggcattttttccctgcaactgaaaaaaatcatgcaaaaccgatatatccgcctgtgtacgggattatccgtatcattatgggcattatggaaacttgccgtcctgtggctgtaa

SEQ ID NO: 57222 - DNA, 846 bp, Neisseria meningitidis
  misc_feature 4, 5, 6, 7, 8: 'n' is a, c, g or t
gtgnnnnnaaccaatctaggcgaacataaaatcggtgcgaaagcctataaccctgtttggtacatccccaaatccatacagaaagaacgcggcgacggcgtaaaaaccatagccgccggcccggacaaccctttggggccggtttttgtccgcttaggcgaccccaaactcggtttgggcatacacgggaccaatgcgccggccagcgtgcccggggttcggagtcacggctgcgtccgcatgaaatcgcccgacgcgctcgagtttgccaaaaccatcgccagcggctcgcccgcctccgtcatctatcaaatggcgggtctcaatgaagatgcggatcgcaacctgtggcttgccgccttccgcgacccttacggtaagaacaaccttgacatcgcctctctgaaaaaaagtattgcgcaatgggcaaaaacacagggtaaaaccatcgcgcccgagaaagtcgatgctgtactcaaagaccgcaccggatcggccgtctgcctgacctgcggcaaaaacggcaagatgaagatgccgctcaaatcgctggcgtggatacagggttcttcctcatacagccaagctgaagtcattgaacaaactgaggaaaccaactctgccgaaatatccgagacacgcacgcccgaagtgcctgatgtacacacgcccgaggcacaaccgcatttaaatacccaatccgacggcacgccgactgcctataccgaaccggctgccgattcatcgccgcaagtagaaacacctgatcaggctgcttccgagccggttgatgtattattttcaatagatgtgatacggcagggaaatttgcgtttaggtaattga

SEQ ID NO: 57223 - DNA, 423 bp, Neisseria meningitidis
atgaaaatcaccaaaatcttcaccttcgactcctcgcatatgctcgacgggcatgacggcaaatgccaaaacttgcacggacatacctacaaactcgaaatcaccgtttcagacggcattatcaaaggcagcgcgaaagacggtatggtgatggactttaccgacttgaaagccattgtcaaacaacacattaccgaccccttcgaccacgccttcatctaccacggcggcaacagccgcgaatctcaaatcgccgcactcttggaaggctggaacatgaaaaccctgcgcctgccctgccgcaccactgccgaaaatatggcggtcgaaatgtacgaccgtctgaaaaacgcggggctgaacgtgtgccgcgtcaaattgtgggaaacgccgacatcgtgtgcggagtatgaaggggagtag

SEQ ID NO: 57224 - DNA, 363 bp, Neisseria meningitidis; identical to SEQ ID NO: 45465

SEQ ID NO: 57225 - DNA, 1035 bp, Neisseria meningitidis; identical to SEQ ID NO: 45939

SEQ ID NO: 57226 - DNA, 327 bp, Neisseria meningitidis
gtgaattttaaacaaccacttttaccaaaaggagctctaaaaatgggacagtacaagaagctatggtacttgctgtttgccgttctggcggtatgctttaccattcttggctatatgggcagcgaggtttacaaaaaagccccgccttaccctgaacaggtcgtttccgcatcaggcaaagtgctgatgacgaaagacgatattttggcaggtcagtctgcgtggcagagtaccggcggtatggaagtcggttcgattctgggtcacggcgcatatcaggctccggactggacggccgactggctgcatcgtgagttggttgcatag

SEQ ID NO: 57227 - DNA, 291 bp, Neisseria meningitidis; identical to SEQ ID NO: 41644

SEQ ID NO: 57228 - DNA, 417 bp, Neisseria meningitidis; identical to SEQ ID NO: 37115

SEQ ID NO: 57229 - DNA, 474 bp, Neisseria meningitidis; identical to SEQ ID NO: 45148

SEQ ID NO: 57230 - DNA, 1215 bp, Neisseria meningitidis; identical to SEQ ID NO: 44713

SEQ ID NO: 57231 - DNA, 552 bp, Neisseria meningitidis; identical to SEQ ID NO: 45190

SEQ ID NO: 57232 - DNA, 1194 bp, Neisseria meningitidis
atgtctgatcaaaaaaaccgcagaaatgccttaatcggcgctgcattcctgatggcgacttccgccatcggcccgggctttctgacccaaaccgccaccttcacccaagcactggcggcaagtttcggctttgtgattctgctctcgattctgctcgacatcggggcgcagctcaatatttggcggattgtcgccgtttccgaaaaacaggcgcaggatattgccaatcaggtcttgcccggcgcaggctatttcttggctgtgctgattgtgatgggcggtttggcgttcaatattggcaacgtcggcggcgcaggcttgggtctgaacctgctgaccggactgtcaccggaaaccggtgccgtgatcagcggcgtgattgccatcggtgtgtttctgtttaaagaagcaggcaaagtgatggacaaattcgcccaagtgatgggtttcgtaatgattgcgctgacggtttatgtggcatggcaggcgaatccgccgctggcagatgccgccgtgcatacctttatgccggaaaaactcgatgcaatggcgattgttacactggtgggcggcacggtcggcggctacatcaccttcgccggtgcgcaccgtctgctggacgcaggtatcaaaggcaaatcggcgttgccggaagtgagccaaagctcggtgcgggcgatcctgattgcctcgattatgcggattgtattgtttttggcggttttgggcgtggtcagccaaggcgtacagctcaatcccgacaaccctgcttccacaccatttgaatatgcggcgggatacatcggcctgctgattttcggcgtggtgatttgggcggcttcgattacttcggtgattggtgcggcttatacttcggtgtcgttcttctccggtctcagcccgtctatcgaacgcaataaaaacaaatggattattgcctttatcgccgtgtccaccgccgtattttccaccatcggcaaaccggcgcaggtgctggtgttcgtaggcgcattaaacggcctgattttaccgatttccctcggtctgattctgattgccgcctacaaaaccaaaattgtcggcgactacaaacacccgctgtggctcaccgtttccggcgtgattgtggtcggtttgatggcagtactcagcgccatcaccatcagcaaatatatcggcggcttgttcggctga

SEQ ID NO: 57233 - DNA, 132 bp, Neisseria meningitidis; identical to SEQ ID NO: 48615

SEQ ID NO: 57234 - DNA, 1077 bp, Neisseria meningitidis; identical to SEQ ID NO: 44846

SEQ ID NO: 57235 - DNA, 282 bp, Neisseria meningitidis; identical to SEQ ID NO: 39486

SEQ ID NO: 57236 - DNA, 1578 bp, Neisseria meningitidis; identical to SEQ ID NO: 44304

SEQ ID NO: 57237 - DNA, 381 bp, Neisseria meningitidis; identical to SEQ ID NO: 39549

SEQ ID NO: 57238 - DNA, 534 bp, Neisseria meningitidis; identical to SEQ ID NO: 44316

SEQ ID NO: 57239 - DNA, 1602 bp, Neisseria meningitidis; identical to SEQ ID NO: 39640

SEQ ID NO: 57240 - DNA, 1072 bp, Neisseria meningitidis
atgcgcccgttttgcgtcggcgcgacagtgcttgccatactcggcgcgttggtgtttttcatcagccccggtgtcgtcgtcctgcaccgccaaatcttcttagaactcatgctgcctgcagcatatggtggtttcctgactgcggctttgttggactggacgggtttttcgggcaacctgaaacctgccactactttgatggcggtgttgttgcttgttgcggctgttttattgccgtttttaccgcaacttgccgcattctttgtagcggcttattggctggttttattgctgttctgcgcttggttgatttggctggcccgcaacacggataacttcgccctgctgatgctgcttgccgcgttcaccgtttttcagacggcatacgcggcaaccggcgacttgaacctgttgcgcgcgcaagtgcatttaaatatggctgcggtgatgtttgtttccatacgtgtgagtgttttgctgggcgcggaagcccttaaagaatgccgtctgaaagaccctgtttttattccaaatatcgtttataaaaacatcgccattactttcctgctcttgcacgccgccgccgaactttggctgcccgcgcaaaccgccggttttaccgcgctcgccgtcggctttatcctgcttgccaaactgcgcgaactgcaccatcacgaactcctgcgcaaacactacgtccgcacttattacctgctccagctctttgccgccgcaggctatttgtggacaggcgcggcgaaactgcaaaacttacctgcctccgcgcccctgcacctgattaccctcggaggcatgatgggcggcgtgatgatggtgtggctgaccgccggactgtggcacagcggctttaccaagctcgactaccccaaactctgccgcatcgccgtccccatccttttcgccgctgccgtttcgcgcactgttttaatgaacgtgaacccgatattcttcatcaccgtccccgcgattctgaccgtcgccgtgtttgtgctttatctctttacgttcgtaccgatctttcaggcaaatgcgtttacgggcgatccggaat

SEQ ID NO: 57241 - DNA, 1575 bp, Neisseria meningitidis
atgttcagacggtatcttccgaacagacagatgaatatggtttccaaactggacaaatactggcagcaccccgccctctactggcctttgctcatcctttttgccgccgccaccccctttaccttcgcaccctactaccacttttggctgatgcccttgattttcggtgccttcgtccgcctcatcgaactgcgtccgcgttttgctgtctcttccgcctacctgttcggcctgaccgcatacacgacacagttctactggatacacaccgccctgcacgacgtttccggcctgcccgacctctatgccgtaccgctgaccttcctactccccgcctaccttgccctttatccggcactgtgtttctggctgtggaaaaaatttaccctgcctcggggcataaaaatcggtttggtactgcccatcctgtggacactgaccgagtttgcccgcgaacgtttcctgaccggattcggctggggcgcaatcggctactcccaaatcaccccggacagcccgctcgccggctttgccccattgggcggcatccacatggttacactggcaaccgcctttctcggtgtctggctggttttggcgagtgataacaccgcacgttcgggcaaacgcctgcttccaattatcctgattgccgccctgcttgccgcaggctacaccgcccgacaaaccgacttcacccgccccgacggcagccgcagcaccgtcgccctgcttcaaggcaacatcgaccaaaccctcaaatggcgtgaagaccaagtcatcccgaccatacagaaatattacgaacaggtcggcaaaaccactgccgacatcgtcatcctgcccgaaaccgccatccccgttatgcgccaaaacctgccggaaaacatactggcaaaatttgccgaacaggcgcaaaacaacggcagcgcgctcgccgtcggcatcagccaatacacttcggacggcaacggttacgaaaacgccgtcatcaacctgaccggttatcaggaaaacaatcaggacggcatcccctactacgccaaaaaccacctcgtccccttcggcgaatacaaaccgctgcccttcctgaccacgccgctttacaaaatgatgaatatgcccctttccgacttccgcaaaggcggcggtaagcaatccgccctgctgatgaaaaaccaaaaaatcgccttcaacatctgttacgaagacggattcggcgacgaactgattgccgccgccaaagatgccacactgcttgccaatgccagcaatatggcgtggtacggaaaatccaacgccatgtaccagcacctccaacaatcgcaggcgcgggctatggaactcggacgctatatggtccgtgccaccaacaccggcgcaaccgccatcatctcccccaaaggcaacatcatcgcccaagcccaacccgatacggaaaccgtattggaaggacacatcaaaggctatgtcggcgaaacgccctatatgaaaaccggcagttcatggtggttgatgggcatattgaccctagccgcactgattcttttcatcttccgaaacaaagaacactga

SEQ ID NO: 57242 - DNA, 447 bp, Neisseria meningitidis; identical to SEQ ID NO: 44675

SEQ ID NO: 57243 - DNA, 432 bp, Neisseria meningitidis; identical to SEQ ID NO: 36206

SEQ ID NO: 57244 - DNA, 348 bp, Neisseria meningitidis; identical to SEQ ID NO: 38212

SEQ ID NO: 57245 - DNA, 966 bp, Neisseria meningitidis; identical to SEQ ID NO: 45729

SEQ ID NO: 57246 - DNA, 855 bp, Neisseria meningitidis; identical to SEQ ID NO: 44382

SEQ ID NO: 57247 - DNA, 753 bp, Neisseria meningitidis; identical to SEQ ID NO: 38815

SEQ ID NO: 57248 - DNA, 1041 bp, Neisseria meningitidis; identical to SEQ ID NO: 45119

SEQ ID NO: 57249 - DNA, 1344 bp, Neisseria meningitidis; identical to SEQ ID NO: 38748

SEQ ID NO: 57250 - DNA, 723 bp, Neisseria meningitidis; identical to SEQ ID NO: 45562

SEQ ID NO: 57251 - DNA, 900 bp, Neisseria meningitidis; identical to SEQ ID NO: 36345

SEQ ID NO: 57252 - DNA, 786 bp, Neisseria meningitidis; identical to SEQ ID NO: 44566

SEQ ID NO: 57253 - DNA, 588 bp, Neisseria meningitidis
atgcgggctgtcgggcattgttggaaaagatttccaaataaagcaattgaatacaaatataaaaccgcctcctgccgtatcggttgttcagacggcataaacagagaatttatgaaaacaaatttcaaacagaaaattatcgaacaggcacgcagcgaaggcttgcaggtaaccgctttgcgcgagcaggtattagatattgtcttgcagcaaagcggcgtgattaaagcctacaacgtcttgtcgcagatgcagcagcaaagcgagggcgtgcttgcaccgcctaccgcctaccgcgcccttgatttttgggcggagcagggcgttttgcacaaagtggcggcggtcaacggctatattttgtgcagccacgcgcagcacgagtgcgacgaccattgccacgaccacgaagaagccgaagcgcaccacagcgcgtttattttggtctgcaccgaatgcggcacggcggacgagcaaaccctcagccacgagtgggcggcactgcgcgcaggcgttgccgaaagcggctttgcgctgaaagaagaacacgttgttttaactggaatctgtaaaaaatgtcagaaatga

SEQ ID NO: 57254 - DNA, 720 bp, Neisseria meningitidis
atgaaaaataaaaattatttactagtatttatagttttacatatagccttgatagtaattaatatagtgtttggttattttgtttttctatttgatttttttgcgtttttgttttttgcaaacgtctttcttgctgtaaatttattatttttagaaaaaaacataaaaaacaaattattgtttttattgccgatttctattattatatggatggtaattcatattagtatgataaatataaaattttataaatttgagcatcaaataaaggaacaaaatatatcctcgattactggggtgataaaaccacatgatagttataattatgtttatgactcaaatggatatgctaaattaaaagataatcatagatatggtagggtaattagagaaacaccttatattgatgtagttgcatctgatgttaaaaataaatccataagattaagcttggtttgtggtattcattcatatgctccatgtgccaattttataaaatttgcaaaaaaacctgttaaaatttatttttataatcaacctcaaggagattttatagataatgtaatatttgaaattaatgatggaaacaaaagtttgtacttgttagataagtataaaacattttttcttattgaaaacagtgtttgtatcgtattaattattttatatttaaaatttaatttgcttttatataggacttacttcaatgagttggaatag

SEQ ID NO: 57255 - DNA, 543 bp, Neisseria meningitidis; identical to SEQ ID NO: 44543

SEQ ID NO: 57256 - DNA, 216 bp, Neisseria meningitidis; identical to SEQ ID NO: 38426

SEQ ID NO: 57257 - DNA, 966 bp, Neisseria meningitidis; identical to SEQ ID NO: 54385

SEQ ID NO: 57258 - DNA, 624 bp, Neisseria meningitidis; identical to SEQ ID NO: 37310

SEQ ID NO: 57259 - DNA, 1407 bp, Neisseria meningitidis
atgaccgccgctcctgatatcctctaccggcaagccgccgcccttttggaacaatccaataccgcccaagccctgcccctgttgcaacaggcggcagagcaaggttatgcggaagctgctttcgtattgggcaaccatctgctgcaaaacggccaaccggagcaggcactttcatggttggaagccgccgcggcccaacgccatcccaaagcactcttctccctgctgcaacaacgcgaacacaacggcaccccgaccggacagcttctcaacgactatgcctggctgggtgagcaggggcactcagaagcccaattaatcctcatgcgttaccacacgcagcgcaacgatccacaatcgctctactgggcggagcttgccgctgcccaatatgccgcacctgcgtattaccatttggcacgccatcatcaacgccaaggcgacgttgaaacagccatcgaacaatacgaaaaagcggcagcactcggcgtaactgccgcctgctggcaacttggtcaaatctacttctacggtacaggtgtcagccccaaccacgcacaagccgaacactatctcgaaccagccgcacaagccggccacatcgccgcacaaacgctgctggctgaccttcttgccgcccaacgcaaacctgaagccttggaatggtatcgtcgtgccgccgataaggaacaagcggaagcacaggccaagctggcccaatacgccctgaccggcgaactttccgaacgcgatccgttccaagcggcacgatatgccaaagccgctgccgagaaagaccatcctgaagccctgaaaatcatgggcgacctctaccgctacggtctcggtatcaaagccgacaaccatatcgcgcaagattactaccaccgtgccgccgcgctgggttctgccgccgcagcacaaaaactcatcagcgacgccgcgctgtaccatccgcaacaatacgaacaaatcaaaactgccgccctgcaacaacaacaaaccgaaaccatctaccgtttggcggaagcacaagcctgcgccatcggccgtcccgccgactacaatgccgcgcgaaaaaattacatggaagctgccgggttccaccataaaaacgcagcggcagccttaggccgcatctaccattacggcctcggtacggcgcaagatcctcgggcggctgcacactggtacgccattgctgccgaacaaaaccacccttccgcccaataccacctcgcctgtttttactatcacgggcaaggtgtcggctgtcatgttccgaccgcctgctactggctgcaggccgccatcggcaacggccacacttcggccgaatcattaatatccctattagaacaatggcgacgcgaagcacaccatgccatcggacaaaaggccgtctga

SEQ ID NO: 57260 - DNA, 456 bp, Neisseria meningitidis; identical to SEQ ID NO: 45576

SEQ ID NO: 57261 - DNA, 1206 bp, Neisseria meningitidis
ttgaagccttgcgatacgggcggtaaaatcgcggtttatccggttcgagaaaccggcgacagcaaggactttcccatgattaaaatcagcacccgcttcgatgccggctcggtcgtcgtcaaagacctgaccgatccttccaacatccgcctcgccctgcgtcccgacaacgcctccgattttgcacaatggttctacttccggctgcaaggcgcggcatatcaaaactgcatcatgcattttgacaatgcggcagaagccgcctacccgaaaggctgggaaggctatcaggcgtgtgcctcatacgaccgccgcaactggttccgcgtaccgacttcctacgaaaacggcgtactgaccgtcaaccataccccgctgtccaatagcgtgtactacgcctatttcgaaccctattccgaagaacagcacctcaacctcctcggcgacgcgcaaggcagcggcctgtgccgcatcgacgacttgggcagcaccgtgcaagggcgcgacatcaatctgctgaccataggcaaccaggtcgaaagcgatttgaaaatctggattaccgcccgccagcatccaggcgaaaccatggcggaatggtttgtcgaggggctgctcggcagactgctcgaccatcaggatgcaaccgcgcgcaccctgctcgatcgcgccacgttctatatcgtccccaacatgaaccccgacggttcggcactgggcaaccttcgcaccaacgccgccggtgtgaacctcaaccgcgaatgggaaaatccgactgtggaaaaaagccccgaagtgttcttcgtgcgtgaaagaatgctggaaaccggcgtggatttgtttttggatatccacggcgacgaagggttgccctttgtctttgttgcaggaactgaaggcgtgccgaactacaatccgcgcatttccgcgttggaaacacagttcaaaaccgcccttttgaacgccagccccgatttccaagatgaatacggttacgaaaaagatgcgcccggtcaggcaaacgtgaccttggcaacaaactgggtcggcaaccgtttcaactgccttgcctatacgttggaaatgccgttcaaagacaatgccaacctgcccgacgacgacttcgggtggaacggtcaacgttcgttgcgcttgggcgaagcggtgctttccgccattttgaacgtcgccggcgatttgcgttga

SEQ ID NO: 57262 - DNA, 759 bp, Neisseria meningitidis; identical to SEQ ID NO: 46642

SEQ ID NO: 57263 - DNA, 282 bp, Neisseria meningitidis; identical to SEQ ID NO: 39155

SEQ ID NO: 57264 - DNA, 879 bp, Neisseria meningitidis; identical to SEQ ID NO: 44706

SEQ ID NO: 57265 - DNA, 789 bp, Neisseria meningitidis; identical to SEQ ID NO: 44470

SEQ ID NO: 57266 - DNA, 1392 bp, Neisseria meningitidis; identical to SEQ ID NO: 38504

SEQ ID NO: 57267 - DNA, 1164 bp, Neisseria meningitidis; identical to SEQ ID NO: 45612

SEQ ID NO: 57268 - DNA, 624 bp, Neisseria meningitidis; identical to SEQ ID NO: 41608

SEQ ID NO: 57269 - DNA, 303 bp, Neisseria meningitidis; identical to SEQ ID NO: 39071

SEQ ID NO: 57270 - DNA, 819 bp, Neisseria meningitidis; identical to SEQ ID NO: 37573

SEQ ID NO: 57271 - DNA, 849 bp, Neisseria meningitidis
atggacttcaaacaatttgattttttacacctgatcagtgtttccggttgggagcatctggctgaaaaggcgtgggcgttcgggctgaaccttgccgccgcgctgcttatttttttggtcggaaaatgggcggcgaaacgcattgtcgccgtgatgagggcggcgatgacgcgcgcgcaggtcgatgccacgctgattagttttttgtgtaatgttgccaatatcggcttattgattttggtgattattgccgcattgggcagattgggcgtttccacaacatccgtaaccgccttaatcggcggcgcgggtttggcggtggcgttgtccttgaaagaccagctgtccaattttgccgccggtgcgctgattatcctgttccgcccgttcaaagtcggcgattttatccgcgtcggcggttttgaaggatatgtccgagagattaaaatggtgcagacttctttgcggacgaccgacaacgaagaagtcgtgctgcccaacagcgtggtgatgggcaacagcatcgtcaaccgttccaccctgccgctttgccgcgcccaagtgatagtcggcgtcgattacaactgcgatttgaaagtggcgaaagaggcggtgttgaaagccgccgtcgaacaccccttgagcgttcaaaacgaagagcggcaggccgccgcctacatcaccgccttgggcgacaatgccatcgaaatcacattatgggcttgggcaaacgaagcagaccgctggacgctgcaatgcgacttgaacgaacaagtggtcgaaaacctccgcaaagtcaatatcaacatcccgttcccgcaacgcgacatacacatcatcaattcttaa

SEQ ID NO: 57272 - DNA, 513 bp, Neisseria meningitidis; identical to SEQ ID NO: 38230

SEQ ID NO: 57273 - DNA, 618 bp, Neisseria meningitidis; identical to SEQ ID NO: 45040

SEQ ID NO: 57274 - DNA, 1167 bp, Neisseria meningitidis; identical to SEQ ID NO: 45211

SEQ ID NO: 57275 - DNA, 741 bp, Neisseria meningitidis; identical to SEQ ID NO: 39171

SEQ ID NO: 57276 - DNA, 363 bp, Neisseria meningitidis; identical to SEQ ID NO: 37674

SEQ ID NO: 57277 - DNA, 627 bp, Neisseria meningitidis; identical to SEQ ID NO: 45676

SEQ ID NO: 57278 - DNA, 4176 bp, Neisseria meningitidis; identical to SEQ ID NO: 45931

SEQ ID NO: 57279 - DNA, 993 bp, Neisseria meningitidis; identical to SEQ ID NO: 44932

SEQ ID NO: 57280 - DNA, 510 bp, Neisseria meningitidis; identical to SEQ ID NO: 39924

SEQ ID NO: 57281 - DNA, 1419 bp, Neisseria meningitidis; identical to SEQ ID NO: 45619

SEQ ID NO: 57282 - DNA, 846 bp, Neisseria meningitidis; identical to SEQ ID NO: 44327

SEQ ID NO: 57283 - DNA, 681 bp, Neisseria meningitidis; identical to SEQ ID NO: 45005

SEQ ID NO: 57284 - DNA, 714 bp, Neisseria meningitidis; identical to SEQ ID NO: 46738

SEQ ID NO: 57285 - DNA, 1524 bp, Neisseria meningitidis; identical to SEQ ID NO: 44215

SEQ ID NO: 57286 - DNA, 1569 bp, Neisseria meningitidis; identical to SEQ ID NO: 36917

SEQ ID NO: 57287 - DNA, 588 bp, Neisseria meningitidis
atgagcgagttggataacatccttgcccacaaccggcagtttgtcgagtcgggcgaatatgaaaaatactttaccgacaaataccccgaacgcgggctggcggttttatcctgtatggatgcgcggattatcgagctgctgcccaatgctttgggattgaggaacggcgatgccaagctgattaaaaatgccggcgcgctggttacgcacccgtggggttcggtgatgaggagcctgttggtcgccgtgtttgaactgaaggtcagagagattatggtcatcgcccatcacgattgcgggatgcaggggctgaatgccgaagaattcctcgggcgggtccgggaaagccggattcccgaagaccgcatcgaaaccctgcgttatgccggcatcgacctcgacggctggctgaccggtttcgacaacgtcgaagacagcgtgcgccacacggtcgaactcatccgccaccatccgctgatgccgcgccatattgccgttcacgggctgattatccatcccgttaccggcaaactgaccacggtggtgcgggacggcgtttcagacggcattccaagggaggcggtatga

SEQ ID NO: 57288 - DNA, 621 bp, Neisseria meningitidis; identical to SEQ ID NO: 37903

SEQ ID NO: 57289 - DNA, 888 bp, Neisseria meningitidis; identical to SEQ ID NO: 39159

SEQ ID NO: 57290 - DNA, 1836 bp, Neisseria meningitidis
gtgaacactactcctatccactccaaactcgccgaaatcaccgggcgcattattgaacgcagccgtccgacgcgtgaaaaatatctggcgaagatccgcagtgccaaacaaatgggacgcttagagcgcaaccagctcggttgctccaacttggcgcacggctatgctgccatgcctaaaagtatcaaaatcgaaatgcttcaggaaaccgtccccaacttaggcatcatcaccgcctacaacgacatggtttccgcacaccagccgtttaaagacttccctgaccaaatcaaagacgaagcgcagaaaaacggcgcgaccgcccaagtcgccggcggcacacccgccatgtgcgacggcatcacgcaaggctacgccggtatggaactgtcgctgttctcccgcgacgtgattgccatgagtaccgccgtcgggctgtcgcatcaaatgtttgacggcagcctgtttatgggcgtatgcgacaaaatcgttccgggtttgatgataggcgcgctttcgttcggtcatattccgggtatcttcgtccccgcaggcccgatgtccagcggtatcggcaacaaagaaaaagcccgcacccgccagcttttcgccgaaggcaaggtcggacgcaacgaacttttgaaaagcgaaatgggttcttaccacagcccgggcacctgcactttctacggcacggcaaactccaaccaaatgatgatggaaatgatgggcgtgcacctgcctgccgccgccttcgtccacccttacaccgacctgcgcgaagccctaacccgctacgccgccggacacctcgcgcgcggcatcaaaaacggcacgattaaacctttgggcgaaatgttgaccgaaaaatcctttatcaacgccttgattggcctgatggcaaccggcggttcgaccaaccacaccatgcacctcgttgccatggcacgcgccgccggcgtgattttgaactgggacgacttcgacgaaatttcctccatcatcccgctgctcattcgcgtttatccgaacggcaaggccgacgtgaaccactttaccgcagcgggcggactgcctttcgttatccgcgaattgctgaatgcaggcctgttgcacgacgatgtcgataccgtcgtcggacacggtatgcgccactacaccaaagagcctttcctcatcgacggcaaactcgaatggcgcgaagcccccgaaaccagcggcaacgacgacatcctgcgtaaagctgacaacccgttctcccccgacggcggtctgcgcctgatgaaaggcaacatcggacgtggcgtgattaaagtgtccgccgtgcgcgaaggctgccgcattattgaagcgcctgccatcgtgttcaacgaccaacgcgaagtgttggctgcgtttgaacgcggcgagttggaacgcgattttgtgtgcgtcgtccgctaccaaggcccgcgtgccaacggtatgcccgaattgcacaaactgaccccgcctttaggcatcctgcaagaccgcggcttcaaagtggcgctgctgaccgacggccgtatgtccggcgcgtccggcaaagttccagcctccatccacatgacacccgaagccctgatgggcggcaacatcgccaaaatccgtaccggcgacctgatccgcttcgactccgttaccggcgaactcaacgtcctgattaacgaagccgaatggaacgcccgagaagtcgaaagcatcgacttgggcgcgaaccaacaaggctgcggccgcgaacttttcgccaacttccgcagcatgaccagcagcgccgaaaccggcgcgatgagcttcggcggcgaatttgcctga

SEQ ID NO: 57291 - DNA, 1791 bp, Neisseria meningitidis; identical to SEQ ID NO: 45276

SEQ ID NO: 57292 - DNA, 390 bp, Neisseria meningitidis
atgttatataaatgtaaaatcaaaaagttagataacaccattgaagagacagtattgattgaaataaatggttatgaactacattgttttatatcatactgcccattcaaaatatttgaaaatcaattttatgaagtggaattatcctatgaaatctttaatgattgcatactggataaatcaacttcaaatattggatttagaaaaatagatgatagtttcaagtatgaaataacggcagaattaaaaaataatcatctaaccctacaaaatatacaatttgaagaagatgagtatttaataaactactcttatcttgataattgtttggttacattaacggttgatagaataagtgtttcatttattagagaaattcaggcagcctga

SEQ ID NO: 57293 - DNA, 651 bp, Neisseria meningitidis; identical to SEQ ID NO: 38886

SEQ ID NO: 57294 - DNA, 666 bp, Neisseria meningitidis
gtggacaatatgatgaagttcaaatatgtttttctgttggcgtgtgttgtcgtttctttatcttatcgtctgaatgctgcaccgatgtttaacgataatcctgttgtttacggaaaaatcaaagtgcagagttggaaagcgcggcgggatttcaatattgtaaagcaggatttggatttttcctgcggggcggcttcggtggcgacgcttttgaacaatttttacgggcaaacgctgacggaagaagaagtgttgaaaaagctggataaggagcagatgcgcgcgtcgtttgaggatatgcggcgcattatgccagatttgggttttgaagcgaaaggctatgccctgtctttcgagcagctcgcgcagttgaaaatccccgtcatcgtgtatctgaaataccgtaaggatgatcatttctcggtattgcgcggtatagacggcaatacggttttgcttgccgacccgtcgctgggtcatgtttcgatgagcagggcgcagtttttggatgcttggcaaacccgtgagggaaatttggcaggtaagattttggcggtcgtgccgaaaaaagccgagacaatttcaaataaattgtttttcacacatcatcccaagcggcagacagagtttgcagtccgacaaatcaggcaagcacgtgcagagtaa

SEQ ID NO: 57295 - DNA, 930 bp, Neisseria meningitidis; identical to SEQ ID NO: 45586

SEQ ID NO: 57296 - DNA, 570 bp, Neisseria meningitidis; identical to SEQ ID NO: 45306

SEQ ID NO: 57297 - DNA, 924 bp, Neisseria meningitidis; identical to SEQ ID NO: 39636

SEQ ID NO: 57298 - DNA, 1008 bp, Neisseria meningitidis; identical to SEQ ID NO: 44128

SEQ ID NO: 57299 - DNA, 1524 bp, Neisseria meningitidis; identical to SEQ ID NO: 46045

SEQ ID NO: 57300 - DNA, 474 bp, Neisseria meningitidis; identical to SEQ ID NO: 44983

SEQ ID NO: 57301 - DNA, 756 bp, Neisseria meningitidis; identical to SEQ ID NO: 44689

SEQ ID NO: 57302 - DNA, 1512 bp, Neisseria meningitidis; identical to SEQ ID NO: 44625

SEQ ID NO: 57303 - DNA, 132 bp, Neisseria meningitidis; identical to SEQ ID NO: 45341

SEQ ID NO: 57304 - DNA, 1266 bp, Neisseria meningitidis; identical to SEQ ID NO: 39430

SEQ ID NO: 57305 - DNA, 1428 bp, Neisseria meningitidis; identical to SEQ ID NO: 44187

SEQ ID NO: 57306 - DNA, 228 bp, Neisseria meningitidis; identical to SEQ ID NO: 45011

SEQ ID NO: 57307 - DNA, 822 bp, Neisseria meningitidis; identical to SEQ ID NO: 44134

SEQ ID NO: 57308 - DNA, 312 bp, Neisseria meningitidis; identical to SEQ ID NO: 39461

SEQ ID NO: 57309 - DNA, 1011 bp, Neisseria meningitidis; identical to SEQ ID NO: 47849

SEQ ID NO: 57310 - DNA, 774 bp, Neisseria meningitidis; identical to SEQ ID NO: 44195

SEQ ID NO: 57311 - DNA, 459 bp, Neisseria meningitidis; identical to SEQ ID NO: 44367

SEQ ID NO: 57312 - DNA, 1044 bp, Neisseria meningitidis; identical to SEQ ID NO: 45021

SEQ ID NO: 57313 - DNA, 495 bp, Neisseria meningitidis; identical to SEQ ID NO: 45300

SEQ ID NO: 57314 - DNA, 1083 bp, Neisseria meningitidis; identical to SEQ ID NO: 45884

SEQ ID NO: 57315 - DNA, 891 bp, Neisseria meningitidis; identical to SEQ ID NO: 44409

SEQ ID NO: 57316 - DNA, 1407 bp, Neisseria meningitidis; identical to SEQ ID NO: 45750

SEQ ID NO: 57317 - DNA, 621 bp, Neisseria meningitidis; identical to SEQ ID NO: 38571

SEQ ID NO: 57318 - DNA, 822 bp, Neisseria meningitidis
atgatgaaaggtatggataaattgagataccaacaggattttttaaatatccgccccatttttacagccggcgaacaagaatacctgaccggattgtccgatcggcttcctttatctgttttaacgggctccgtgcgtaatattgaagaaatcggtatcgattttgtatatagttctgccaaattggaaggaaacacttataatcaatacgatacgcaggcattgcttaaactcgggcaaaccgcaggcgggaagttatattcggatgccgtaatgttaatcaacctgagggaaagttaccggcacctgctgtccggtttggacagccccgagccgtttgactggttggatttcttaaaaaccacccacagcctgatttccgaaaacttactggaaaaaggctccggcggcgtagtccgccgcgacagcgttaccataagcgggacagactacacccctttatctaacccgcaaagtttggatacggaattaaaatggttgcttcaagaagctcccaaaatagaaaatcctttcgaccgcgccgtttatctccataataatttggcgtatcttcaatattttaaagattgcaataaacgtactgccagaaactgcatgaccttgtcgctgatgcgctccggtttttttccttgcgtattcgcccccgacagttatcccgcctatgccgaggctgtcgtagcctattacgaaaccggcgattacggtttattcaagaaatattttatttcggcatacgaaaataccgtaaataagtacggtccccagcctgatatggatatttcccgcaacttctccctttaa

SEQ ID NO: 57319 - DNA, 1350 bp, Neisseria meningitidis; identical to SEQ ID NO: 44843

SEQ ID NO: 57320 - DNA, 885 bp, Neisseria meningitidis
ttggatgtggtatcgttcgccttgggtcagttgcgtgtagctcatggcaatctttcttgcaggaaaggccgtatgctaccgcatactggcctttttctgttagggaaagttgcacttcaaatgcgaatccgccggcctgcaagtgcgtatcggccagcgtttttaccgcactaccgcccgcgccgttatcggcagcggcggcacggcggaaataccggcaatcgccgacgagccgggcgcggccgccaatgtggcgacggcgaggcgcaactgatggccgcccccgccggtgtggccaccgaatgccgccttaccgtacaaggcggcaccgaccgagaaagcgatgcctcactgctggcgcgtctgttgaaaatcatccgccgaccgcccgcaggcggcaaccgttacgactataaaaactgggcgttgagtgttgacggcgtaaccagcgcatatgtttatccgctgcgccgcggcttgggtacggtggatattgccattacctccgccgacggtgtgccatcggaagaaactgtgcgccgcgtacaggcttatatcgacgagatgcgcccggtaacggcaaaaaatgcgctggtactcaagccaaccgtaacggcggtgcctgttaccgtgcaagtcaagctcgacggcatcgacttggacgaggccaagcgccgcatacggacggccctaaaagaatatttcgacaccctgatccccggcgacggcctgactgtgtcgcaaatcgaggcggctatcagcaatgtggatggtgtgatcgaccgccgtctgactgcgccgacggccaaccgtgccgccgatacggttaaccgcatcgagtggtttaaagcgggcgcgattaatgtaacggagatgccgtcatga

SEQ ID NO: 57321 - DNA, 501 bp, Neisseria meningitidis; identical to SEQ ID NO: 37882

SEQ ID NO: 57322 - DNA, 330 bp, Neisseria meningitidis; identical to SEQ ID NO: 37077

SEQ ID NO: 57323 - DNA, 429 bp, Neisseria meningitidis; identical to SEQ ID NO: 40578

SEQ ID NO: 57324 - DNA, 426 bp, Neisseria meningitidis; identical to SEQ ID NO: 38777

SEQ ID NO: 57325 - DNA, 264 bp, Neisseria meningitidis
atgaacaaattgaatttccttctgctgcttgcggtgtgcgtttccgctttttccgttgtgatgcagcaaaaccagtacaggctcaatttcacagctttggataaggcgaaaaaacaggaaatcgccttggagcaggattatgcgcaaatgaggctgcaacaggcgcgtttggcgaaccacgaagcgatcagggcggcggcagaaaaacaaaacctccatccgccggtttcgggcaatacctttatggtggagcatcaaagatag

SEQ ID NO: 57326 - DNA, 1728 bp, Neisseria meningitidis; identical to SEQ ID NO: 45588

SEQ ID NO: 57327 - DNA, 246 bp, Neisseria meningitidis; identical to SEQ ID NO: 38257

SEQ ID NO: 57328 - DNA, 156 bp, Neisseria meningitidis; identical to SEQ ID NO: 38050

SEQ ID NO: 57329 - DNA, 921 bp, Neisseria meningitidis
ttgcaccaaactttccattctttccgtttttcagacggcatcgttaaagtagtccttccttttccttattttcagcattgttttatgttaccgctcaaaacgcccggcgtactgcccggcttcaaactcagccttggtctgaccgtattgtgcctgtcgctgcttgtggtcttgccgtttgcgatgatggcggcgaaggcggcggaaatcggctggggcggcttttggaacacgattgccgagccgaacgcgttggcggcggtgtggctgagtttgcggatgtcgttttatgcgatgctgaccaatgtcgtgttcggcacgctggtggcgtgggtattggtgcgctatgaatttccgggcaagggcttggcgaacgcgctggttgatttgccgtttgcgctgccgacggcggttacgggtatcgcgttggcaaccctgtatgcgcctaacggttggataggccgttttttcgagcctttgggcatcaaaatcgcgtttacgcccgtcggcatttggattgcgctggtcgtcgtcagcctgccctttatcgtccgcgccgtgcagccggtgttggaggaattatcgggcgaatatgaggaagcggcggcgactttgggcgcaaaccgctttacgacgttccgccgcgtgctgctgccggaaatcacgccggcactcttgaccggcgcgggaatgatgttcgcgcgggcaacgggggaatacggctcggtgatttttatcgcgggcaatattccgatggtttctgaaatcctgccgctgattattacgggcaagctggaacagttcgacgtgcagggcgcgtcggcggtggcgttgtttatgctgctggtttcgtttgtgattctgtttgcgctgaacgtgatgcagtgggcgttgggcaggcgttcgggcgcgaagggttga

SEQ ID NO: 57330 - DNA, 663 bp, Neisseria meningitidis; identical to SEQ ID NO: 45178

SEQ ID NO: 57331 - DNA, 1005 bp, Neisseria meningitidis; identical to SEQ ID NO: 44461

SEQ ID NO: 57332 - DNA, 2427 bp, Neisseria meningitidis; identical to SEQ ID NO: 44903

SEQ ID NO: 57333 - DNA, 1635 bp, Neisseria meningitidis; identical to SEQ ID NO: 45732

SEQ ID NO: 57334 - DNA, 840 bp, Neisseria meningitidis; identical to SEQ ID NO: 44138

SEQ ID NO: 57335 - DNA, 339 bp, Neisseria meningitidis; identical to SEQ ID NO: 44994

SEQ ID NO: 57336 - DNA, 603 bp, Neisseria meningitidis
ttgcgcgtactgtccgcgccgccggctttgcctttcgcatatgcttctgtatcatgtgggtttttctgtcttttatggtttttgtcggaggctttgatggttgacgcttggtctgtccctgattttgaatcgaaaatctgtccgcccgaggcattgtccgaacggttggctcggttgccgcgcccgctggtgtttaccaacggctgtttcgacatcctccacagggggcacgttacttatctggcgcaggcgcgttcggcaggggcggcgttggtgctggcgttgaataccgatgcttcggtgcggcgtttgggcaaggacggcgaccgcccgattaatcctttggagaaccgtgccgccgttgccgccgctttggaaagtgtggatttggtaacgtggtttgacggggatacgccggcggcgttgattgaggcggtcaaacctgagattttggtcaagggcggcgattgggctgcggataagattgtcggtgcggcagaaacgttggcgcgcggcggtcaggtgttttcaattccgtttctgcaccagacttcgacaacgaagactttggcaaaaatccgtgcggcagagggcggaaaatga

SEQ ID NO: 57337 - DNA, 246 bp, Neisseria meningitidis; identical to SEQ ID NO: 39751

SEQ ID NO: 57338 - DNA, 279 bp, Neisseria meningitidis; identical to SEQ ID NO: 37183

SEQ ID NO: 57339 - DNA, 417 bp, Neisseria meningitidis; identical to SEQ ID NO: 39888

SEQ ID NO: 57340 - DNA, 669 bp, Neisseria meningitidis; identical to SEQ ID NO: 39796

SEQ ID NO: 57341 - DNA, 504 bp, Neisseria meningitidis; identical to SEQ ID NO: 38844

SEQ ID NO: 57342 - DNA, 1176 bp, Neisseria meningitidis; identical to SEQ ID NO: 44778

SEQ ID NO: 57343 - DNA, 1971 bp, Neisseria meningitidis
ttggatttgaccgcgcaacagacttacggcaaaaaattcgatgaagtttcccctgaagaacaagccgttctgaaaacccgactggctgacgaataccgcaaccaaagccgtattaaagaagacggcagcgtcgtcatcagcgatacgcgcgtgaaagccatcgaaagcatcctgccttattaccacggtgtttacggcgatgatcccgcgctgcaaaccacccgcgaacactttgcaatgaaaaacaacacattgccaagccaagaagcgcgtgaaaaactgttcgacttcttcttctggacttcttggtctgcttcgaccaaccgtcctgacgagacgttcacttataccaacaactggccgcacgagcctttgatcaacaacgtaccgaccactgaaaactatatgtggtcattcaccagcgttgttcttctgctgatgggcatcggtttgttgatgtggggttattccttcctgaccaaacacgaggaagtggaagtgccgtctgaagacccgatttccaaaatccaactgaccccttcacaaaaagcattgggcaaatacgtcttcctgacggttgccctgtttgtggtacaagtattgctgggcggtctgaccgcgcactacaccgtcgaaggtcagggtttctacggcattgacgaggcgttgggctttgaaatgtccgactggttcccttacgccctgacccgtacttggcacatccaatccgccatcttctggattgcaaccggctttttgacggcaggtttgttccttgcgccgattgtcaacggcggcaaagatcccaagttccaacgtgcaggcgtgaacttcctctatatcgccctcttcatcgtggtcggcggctcttacgcgggcaacttcttcgcgttgacgcacatccttcccccggaatttaacttctggttcggacaccaaggttacgaatacctcgatttgggacgtttctggcaactcctgctgatggtcggcctgctgttgtggctgttcctgatgttgcgttgcacggtttccgccttcaaagaaaaaggcgtggacaaaaacctgctggcaatctttgtcgcttctatggtcggtgtgggcgtattctacgcaccgggactgttctatggcgagaaatccccgattgccgtaatggaatactggcgttggtgggtggttcacctgtgggtggaaggcttctttgaagtatttgccactgccgcttttgcctttgtcttctacaatatgggctttgtccgccgcagtaccgccacagcttctactctggccgctgccgccatctttatgttgggcggcgttccgggtacgctgcaccacctgtacttctccggctctacctccgcctctatggcaatcggtgcctgcttctccgctttggaagtcgtgccgctggtgttgctgggccgtgaagcatacgagcattggtcttaccaacacctgtccgactgggcgaaacgcctgcgttggccgctgatgtgcttcgtggcagtcgccttttggaatatgatcggtgccggtgtattcggtttcctgattaacccgccgatttccctgttctatatccaaggtttgaatacttctgctgttcatgcgcacgccgccttgttcggtgtgtacggtttcttggcattgggcttcgtattgctggttgcccgttatttgaaaccgaacgcgcagtttgacgacaaactgatgacttggggcttctggctgctcaacggcggcttggtcggtatgattgccatcagcctgttgccggttggcgtgattcaggcatacgcctccatcacgcacggcctgtggtatgcacgcagcgaagagtgcctgcaaatggaaatcctcgacaccttgcgttgggtacgtacggcagctgacttggtctttatcggcggtgcaatctgcgttgccatccaagccactaaaatcgtattcggccgcgacaaataa

SEQ ID NO: 57344 - DNA, 1335 bp, Neisseria meningitidis
gtgggcgaacctgaaaacaaatcatccgaacccgtacgcgagatacaggcatcaaaagaaatgccgtctgaaacctcttccccacgcaaagaaaacgaaacagaagtacacattcctgccgctccttttatcgtcaaacagtccggcagcaacgctttggcagtctgcgccctggtattggcggcattgggtttgggtacaagtggttttttgtttgtccagggacagaatgtcttgaaaaaccaagagctggcattcaaccaaaaaatcgacaaagccgccttgggcgagtcggaaaacgccgccctgttgaaagacaacctcaaccggcaagccgccatacaatcagagctcgaccgtttggacggaaacgtcaaagcaaacggcgaacaaatcttggaaatgcaaaaatcctatcgcgagttgaccaaaggacgcgccgattggctggtggacgaaaccgagaccatactcaatctggcggcgcaacagctggtgttgactggcaatatccaaacggcagtcggcgtattggagcatatcgacagccgcctgtcccgtttcaatcaggcagagcttctgccgatcaagcaggcggtcagcagcgacttggcggaactgaaaaaccgtccctatgtcgatatttccggcacggcattgcgcctcgacaggctggaaaccgccgtatccggactgccgctgatgcttgacggcgtgctgaaaccgggtgtacaggcacgcaacgaagccgtttccgcttcatggtggcagaacgtatgggaaaaatccctcggcacattgaaggggctggtcgaaatccgccgtttggaaaacaacgattccatgctgatttcaccggaacaggcatattttgtgcgtgaaaacctgcgcctccgccttttggatgcgcggactgcattaatgcagcgtaacagcgaagtctatcagggcgatttgaacaatgccgaagccgccgtcagacagtatttcgatgccaagtctcccgccacgcagtcgtggctgaaagaactggcggaattgaaggcgttggatgtgcgcatgacggcggatgacggtttgaaaaacagcctaaatgccgtccgcgcctatcgcgacggtacgcgcatgacggcggcggaaaatcaagaagcggaacaggcggcttccgaaccggcaaacgaaaacacagcttccgaaccggctgccgcatcggatgtgaagaccatagaagcaccgtccctgccttcggaacgcaaaccggaacagcctgcaaaaaaacagaccgtaccggaaaaggcagggcgttcgccgtccgctaaaggagaacgcgcatga

SEQ ID NO: 57345 - DNA, 828 bp, Neisseria meningitidis; identical to SEQ ID NO: 38917

SEQ ID NO: 57346 - DNA, 321 bp, Neisseria meningitidis; identical to SEQ ID NO: 43250

SEQ ID NO: 57347 - DNA, 369 bp, Neisseria meningitidis; identical to SEQ ID NO: 39932

SEQ ID NO: 57348 - DNA, 486 bp, Neisseria meningitidis
atgtttgtgaacgagaaatatccttatgcggctctgtttgcgggactggtgtttttgacgctgccgtttgcgttggcggtgcatgatgcctttgcgcttgcgttcggacggacggggttgctggtgtcggtgtcggacggcggattcggctggcgaggaggctgggacggcgtggtgtggtttgtgttcggagtgtttgcgtttttgaatgtggttgtgtcggcgggtctgacgaaactggcgtacaaaaagatgatgcggcggcattcgcgttacacactgtttctgtcgggcgtggcggcttgcgcggcggcagcggtggcttggattttcgagctgctgcttggcagtggggctttgggcgggctgcgtggggaggcggtgttggaatatgcgtttgccgtgtggctggtggcgatgctgacgctgcccaaacgcctgacgcgcgcgccggtgcagccggtggtgtttcacaggaaaaaatag

SEQ ID NO: 57349 - DNA, 579 bp, Neisseria meningitidis; identical to SEQ ID NO: 36924

SEQ ID NO: 57350 - DNA, 342 bp, Neisseria meningitidis; identical to SEQ ID NO: 39758

SEQ ID NO: 57351 - DNA, 1395 bp, Neisseria meningitidis
ttgattcaaagtgcggcacaattatatcggcagcggatattttcgtctttcaatatttacatttcagtcggcttacaaggagacacaatgaagccagtaaacatcggtcttttaggtttgggtacggtcggcggcggtacggctgccgtgttgcgggacaacgcggaggaaatttcccgccgcttggggcgcgaagtgcgcatcagtgccgtatgcgacttgagcgaagaaaaagcccgccaaatctgcccgtccgcagcctttgtcaaagatccgttcgaactggtcgcgcgtaaagacgtcgatgtcgtcgtcgaattgttcggcggcacgggcattgccaaagatgcggtgttgaaagccattgaaaacggcaaacacatcgttaccgccaacaaaaaactgctcgccgaatacggcaacgaaatcttcccgctggcggaagaaaaaaatgtcatggtgcaatttgaagcggcagtagcgggcggtatcccaatcatcaaagccctgcgcgaaggtttggcggcaaacaggattaaatccatcgccggcattattaacggcaccagcaacttcatcctctccgaaatgcgtgaaaaaggcagcgcgtttgccgatgtactgaaagaagcgcaggcactgggctatgccgaagccgacccgaccttcgacatcgaaggacatgacgcgggccataaaatcaccatcatgagcgcgctggcattcggcacgccgatgaacttttccgcctgctacctcgaaggcatcagcaaactcgacagccgcgacatcaaatacgccgaagaacttggctaccgcatcaaactgttgggcatcacccgcaaaaccggcaaaggcatcgagctgcgcgtccaccctaccctgattcccgaaagccgcctcttggcaaacgtcaacggcgtgatgaacgccgtgcgcgtcaacgccgatatggttggcgaaaccttatattacggcgcgggcgcgggcgcattgccgaccgcttccgccgtggttgccgatatcatcgacatcgcccgcctggttgaagccgataccgcccaccgcgtaccgcatctggcgttccaacccgcgcaagtccaagcgcaaaccatcctgcctatggacgaaattaccagcagctactacctgcgcgtccaagccaaagacgaaccgggcacgctggggcaaatcgccgcgctgttggcacaagaaaacgtgtccatcgaagcactgattcaaaaaggcgtgattgatcagaccactgccgaaatcgtgattctgacccacagcacggtcgaaaaacacatcaagtcggcaatcgcagccatcgaagcactggattgcgtggaaaaaccgattaccatgatccgcatggaaagcctgcatgactga

SEQ ID NO: 57352 - DNA, 483 bp, Neisseria meningitidis; identical to SEQ ID NO: 36693

SEQ ID NO: 57353 - DNA, 582 bp, Neisseria meningitidis; identical to SEQ ID NO: 38841

SEQ ID NO: 57354 - DNA, 279 bp, Neisseria meningitidis; identical to SEQ ID NO: 36597

SEQ ID NO: 57355 - DNA, 357 bp, Neisseria meningitidis; identical to SEQ ID NO: 44769

SEQ ID NO: 57356 - DNA, 930 bp, Neisseria meningitidis; identical to SEQ ID NO: 47363

SEQ ID NO: 57357 - DNA, 435 bp, Neisseria meningitidis; identical to SEQ ID NO: 45056

SEQ ID NO: 57358 - DNA, 1260 bp, Neisseria meningitidis; identical to SEQ ID NO: 44493

SEQ ID NO: 57359 - DNA, 1449 bp, Neisseria meningitidis; identical to SEQ ID NO: 46113

SEQ ID NO: 57360 - DNA, 1563 bp, Neisseria meningitidis; identical to SEQ ID NO: 39009

SEQ ID NO: 57361 - DNA, 1311 bp, Neisseria meningitidis
atgtacgctaaaaaaggcggtttgggactggttaaaagccgccgtttcgcacctcttttcgctacgcagtttctcggcgcgttcaacgacaatgtgttcaaaaccgcgctgtttgtgatgattgggttttacggtttggggcaaaacggcttcctgcctgccggacagatgttgaacttgggcgcgttgctgtttattttgccgtatttcctgttttcctcgctgtcggggcagttgggtaacaaattcgacaaggccgttttggcgcgttgggtcaaggtgctggaaatgatcattatggcggtggcggcatacgggttttatatccggtctgccccgctgcttttggcgtgtctgttttgcatgggcgcgcaatcgacgctgttcgggccgctgaaatacgccatcctgcccgattatctcgacgacaaagagttgatgatgggcaacagcctgattgaatcgggtacgtttgtcgccatcctgttcggtcagattttgggaacggcggtggcaggtgtaccgccttatattgtcgggatactggttttgctggtcgccgtcggaggcacggtcggcagcctgtttatgccgtctgtacccgccaaggctgccgatacacaaattgagtggaatattgtccgtggcacaaaatccctgctgagtgaaacggtgcggcacaagcccgtttttaccgccattatcggtatttcgtggttttggtttgtcggcgcggtttataccacgcaactgccgacctttacccaaatccatctgggcggcaacgacaatgttttcaacctgatgcttgccctgttttccatcggtattgccgccggttcggtactgtgtgccaagttcagcagggaacggctgatgttggcttgggtaacggttggtgcgttgggtttgacggtttgcggcctggttttggtgtggctgacgcacggacaccgttttgaagggctgaacggcattttttggtttttatcgcaaggatgggcatatcccgtgatggcggtgatgacgctgatcggctttttcggcggatttttctccgttccgctctatacttggctgcaaaccgccagtagcgagactttccgcgcccgcgccgttgccgccaacaatatcgttaacggtatttttatggtttccgccgccgttttgagcgcggtgttgctgtttttgtttgacagcatttccttgttgtatctgattgtcgctttgggcaatattccgttgtcggtatttttgattaagcgcgaaaggcggtttttaggcgcggcggcaatcaggaaaaaaccttga

SEQ ID NO: 57362 - DNA, 294 bp, Neisseria meningitidis; identical to SEQ ID NO: 44435

SEQ ID NO: 57363 - DNA, 951 bp, Neisseria meningitidis; identical to SEQ ID NO: 45991

SEQ ID NO: 57364 - DNA, 1230 bp, Neisseria meningitidis; identical to SEQ ID NO: 40266

SEQ ID NO: 57365 - DNA, 915 bp, Neisseria meningitidis; identical to SEQ ID NO: 45937

SEQ ID NO: 57366 - DNA, 213 bp, Neisseria meningitidis
ttggaaatttgcggcatccgccgcaaacgtaaacccgtaatgtatttgaccgtggttttttttacttcggttcgccttcttaccagcaagcggcgtgccaaaaaggggttcggctcggcattttacagaatatttttttatttgtctatttggtattggtatttttttatatcaacgcggcgcggcctgcggcggaataatgcggcgggctga

SEQ ID NO: 57367 - DNA, 891 bp, Neisseria meningitidis; identical to SEQ ID NO: 47367

SEQ ID NO: 57368 - DNA, 384 bp, Neisseria meningitidis; identical to SEQ ID NO: 38800

SEQ ID NO: 57369 - DNA, 1284 bp, Neisseria meningitidis; identical to SEQ ID NO: 44463

SEQ ID NO: 57370 - DNA, 273 bp, Neisseria meningitidis; identical to SEQ ID NO: 44827

SEQ ID NO: 57371 - DNA, 798 bp, Neisseria meningitidis; identical to SEQ ID NO: 45259

SEQ ID NO: 57372 - DNA, 3033 bp, Neisseria meningitidis; identical to SEQ ID NO: 44628

SEQ ID NO: 57373 - DNA, 300 bp, Neisseria meningitidis; identical to SEQ ID NO: 44211

SEQ ID NO: 57374 - DNA, 2745 bp, Neisseria meningitidis; identical to SEQ ID NO: 45601

SEQ ID NO: 57375 - DNA, 918 bp, Neisseria meningitidis
atggaaaaagcagaacatttgaacagcagccggttcgtcaatctggtcaaaagcggcggcggcagctatgtggagggcagctaccgtttcgatactttgtccaacggcatttccatccacggcggcacagtaacggcacggtgtgatttttgcagcagccgcctcgccgaaccttatgtgtcgttcgtgctcttgctggaaggcagtttggacttcggcatcaaccgctgccgcttccaaatcgatgcggacggcggcaagattgtcctaattgctgtcggggaagaagtcctgttcagccgctatctttaccgaggcggcaaaacggtcaaaatgaccattaaaggtatggaacaatggctgctgcgtccggaatacgcgcgtttcgcacccctgctttaccgcgaaccggtcaggatatgggatttgcccccgaacctgcgcggcttggcggcatcctgcctgaaagccgtcccaaaggggcatttgggcgaaacattgcgccgcgaggcggacgtgttgcggctgctgtcggacttgtgggacacggtttcagacggcatcgggccggcggcggggcaaacggcggaagcagacgctatgccgtctgaagacttcagccgcaccctaaatgccgcgtttgccgacggcgcacaccaagtcaaccggctgacagacgcgctgaacatcagtgaaaggacgctgcaacgccgtatgcgcgaccatttcggtattaccgcaagcgagtggctgcaccacaaacaaatgcagcacgcgctctacctgttgcaaaacgggggcaaaagcataggcgaaaccgcgtatttgtgcggctaccgccacgtttccagctttactcaggcattcaggcaatatttcggcagcacgcctgcggaaaccaaaaaagaaaaccggtaa

SEQ ID NO: 57376 - DNA, 531 bp, Neisseria meningitidis; identical to SEQ ID NO: 44748

SEQ ID NO: 57377 - DNA, 936 bp, Neisseria meningitidis; identical to SEQ ID NO: 54703

SEQ ID NO: 57378 - DNA, 1473 bp, Neisseria meningitidis; identical to SEQ ID NO: 44151

SEQ ID NO: 57379 - DNA, 537 bp, Neisseria meningitidis; identical to SEQ ID NO: 44472

SEQ ID NO: 57380 - DNA, 1068 bp, Neisseria meningitidis; identical to SEQ ID NO: 39103

SEQ ID NO: 57381 - DNA, 1275 bp, Neisseria meningitidis; identical to SEQ ID NO: 45020

SEQ ID NO: 57382 - DNA, 6081 bp, Neisseria meningitidis
atgaataaaggtttacatcgcattatctttagtaaaaagcacagcaccatggttgcagtagccgaaactgccaacagccagggcaaaggtaaacaggcaggcagttcggtttctgtttcactgaaaacttcaggcgacctttgcggcaaactcaaaaccacccttaaaaccttggtctgctctttggtttccctgagtatggtattgcctgcccatgcccaaattaccaccgacaaatcagcacctaaaaaccagcaggtcgttatccttaaaaccaacactggtgcccccttggtgaatatccaaactccgaatggacgcggattgagccacaaccgctatacgcagtttgatgtcgacgctaaaggtgctgtactgaacaacgatcgcaacaacaacccgtttctggccaaaggcagtgcgcagttgattttgaacgaggtgcgcggtgcggccagcaaactcaatggcatcgttaccgtaggtggtcaaaaggccgatgtgattatcgccaaccccaacggcattaccgtgaacggcggcggctttaaaaacgtcggccgcggtatcttaactaccggtgcgccccaaatcggcaaagacggtgcactgacaggatttgatgtgcgtcaaggcacattgaccgtaggagcagcaggttggaatgataaaggcggagccgactacaccggggtacttgctcgtgcagttgctttgcaggggaaattacagggtaaaaacctggcggtttctaccggtcctcagaaagtagattacgccagcggcgaaatcagtgcaggtacggcagcgggtacgaaaccgactattgcccttgatactaccgcactgggcggtatgtacgcagacagcatcacactgattgccaatgaaaaaggcgtaggcgtcaaaaatgccggcacactcgaagcggccaagcaattgattgtgacttcgtcaggccgcattgaaaacagcggccgcatcgccaccactgccgacggcaccgaagcttcaccgacttatctctccatcgaaaccaccgaaaaaggagcggcaggcacatttatctccaatggtggtcggatcgagagcaaaggcttattggttattgagacgggagaagatatcagcttgcgtaacggagccgtggtgcagaataacggcagtcgcccagctaccacggtattaaatgctggtcataatttggtgattgagagtaaaactaatgtgaacaatgccaaaggctcggctaatctgtcggccggcggtcgtactacgatcaatgatgctactattcaagcgggcagttccgtgtacagctccaccaaaggcgatactgaattgggtgaaaatacccgtattattgctgaaaacgtaaccgtattgtccaacggcagtattggcagtgctgctgtaattgaggctaaagacactgcacacattgaatcgggcaaaccgctttctttagaaacctcgaccgttgcctccaacatccgtttgaacaacggtaacattaaaggcggaaagcaggtggtactgatggctgatggcgacattcaggcaaaagcctccaatctgaatgcatccggcaatctgtatattcatgcaggtaaggatctggatttgaatgccgataaagacttatcaacacaaagtatcagcctgagggcagacaacaccgccctcatcagtagcaacggtaacaccttgactgcagaaaagaatctggatattcaggcaggtagcttgagtgtgcgtcaaagtaatctgcaatccagtggcggtaatgtgcagatgagcgcgactaaaggcaacatcagcttgaatcagagttggataaatgccagtcagaatattgatacggcagcacttcaaggcaatattatttcagacggtctgactgctgttgccgaagttggacgcgtatctcttcttgccaacggcaatgttgatttcaacggtctaaataccttgattgcggaaggagacattaatgctggttcagtcggtaaaggccgtctgaaaatggacaataccgatatttatgcttctgcaggcgatgtgaaactggttgccggaggtcaattagatttaggcaacggcaccgttaacggcggtcatatcagcttagacagcaataaaggcagcatggtggtgcaggatgtacacctgaatgcccgcgcatcactgaaagtggatgcggatcaaactttaaccattaataacagcaagctcaattccggtcacaatacccagattaatacaaatcatggtcatatgacgcttaatcagcttgatgctcattcacgtcgtcatatgagtatcagtgcacagggtaaaggcaaaggaaaagacagcggtcaaattttacaaaacgaccagcaaaacagtaaaagtactttggcggcagatggtgtattgtcattgaacagcagcgcattacaggttttggacaatactaccctgcgcggtggcgcgataaacatcaaagctggcggaggcatcatcaaacggggctatatcgattgggaaacccaagatacggctactatgcgttcagcggaactgaaaccactgtctggtatgatgtcgatagaatcgggcggtgataaccctttaaccgttgaacccggtaaccgtatcgtttctgcaggtgatttggccgtgaaccacaacggcacattccaaatcagtgccagagcaggaaataacggcaatccgagtgcgcaaacagccagcgtttcagctaaaggcaatatcgggattgtggcgggagaggtggatattgatgcagcaaatattgccgcagggaaagatttggctttagtggcaactaaagggaatatttcactaaacagtattaggaatacgtttagtaactatcaattgaaaacagataaacacaatatcacacagcaacttactgatgtagagcaggagcttagtaagttaacgagcgatcctaaatatcgtaaagcacaggatcttccacaaatgttgaggcgtaaatataagaggcgtgacaaagtattcggtgatagtgaggccagattacgtggtttacgagcagagataaatgctgctgatgaggcttgggcagaactccaatccccagtaaaagcgttacttgaacgtaaacaattgttacaacaagcccttttaacagtttcccaaccgggtagtggtcacgaaaaccaaggtagcacccttagcggtcaaaatatcaaactgctcgctgcaggtggtatccgtatccagggctccaaagttgctgccacccaacaggcaaatatccaagctgcaggatttttacctgcaccagccgcagaggaactgcaagaaggtcgacttcaatcagccattgacatcagcggtgtatttgatacttttgaatatggtcagcaaggcagcgataaatacggctatgccattttcagcaggccatctgaaatttcaggaaaaacaggtgttaccctctctgcaccaaatgccaatgagaacagccgcatcagtctgagtgcggcaaacatcgaagctgaaaacggcaaaatcaaactgcaatcctacggcgaccaatcctattacgccgggcagggcgaactctataccttagaacgccgcagctacaaaaccggcaaatggtacaaccgcaaacacattaccgaagtcaaagaacacaaaaacgccaagcccgacgcagtaaacctcagcgcatcccaaggcatcgacatcaaatctggtggcaacatcgacgcctacgccaccgcattcgatgcccccaaaggcagcattaacatcgaagccgggcggaaattgacactctatgccgtagaagagctcaactacgacaaacttgacagccaaaaaaggcgcagatttctcggcatcagctacagcaaagcacacgacaccaccacccaagtcatgaaaaccgcgctgccctcaagggtagttgcagaatcagccaacctccaatcgggctgggataccaaactgcaaggcacacagtttgaaaccacactgggtggcgcaaccatacgcgcaggcgtaggcgagcaggcacgggcagatgccaagattatcctcgaagggatcaaaagcagcatccacacagaaaccgtgagcagcagcaaatctactctatggcaaaaacaggcaggacggggcagtaacatcgaaaccttgcaattgccgagtttcaccggtcccgttgcgcccgtactgtccgctcccggcggctatatcgtcgacattccgaaaggcaatctgaaaaccgaaatcgaaaagctgtccaaacagcccgaatacgcctacctgaaacagcttcagacggccaagaacgtcgattggaaacaggtgcagctggcctacgacaaatgggactataaacaggaaggcttgaccggagccggtgcagcgattgtggtgattattgtaaccgctctaacttatggatacggagcggctgcagcgggtagcgtaactgccgcaggaagtagtacagccgcagctgcaacaacgacagcggcagcaactaccactgtttctactgcagctgccatgcaaaccgcagctttagcctccttgtatagccaagcagctgtagccatcatcaataataaaggcgatgtaggcaaagcattaaaagatctcggcaccagtgatacggtcaagcagattgttacttccgcactgacggcgggtgcattaaaccagatgggagcagatattgcccaattgaacagcaaggtaagaaccgaactgttcagcagtacgggcaatcaaaccattgccaaccttggaggcagattggccaccaacctcagcaatgcaggtatctcagctggtatcaataccgccgttaacggcggcagcttgaaagacaacttaggcaatgccgcattgggagcattggttaatagcttccaaggggaagccgccagcaaaatcaaaacaaccttcagcgacgattatgttgccaaacagttcgcccacgctttggcgggttgtgttagcggactggtacagggaaaatgtaaagatggggcaattggcgcagcagttggggaaatcgtagctgaatccatacttggcggcagaaaccctgctacactcagcgatgcagaaaagcataaagttatcagttactcgaagattattgcgggcagcgtggcggcactcaacggcggcgatgtgaatactgcggcgaatgcggctgaggtagctgtggtgaataatgctttgaattttgacagcacccctaccaatgcgaaaaagcatcaaccgcagaagcccgacaaaaccgcactggaaaaaatcatccaaagtattatgcctgcacatgcggcaggtgcgatgactaatccgcaggataaggatgctgccatttggataagcaatatccgtaatggcatcacaggcccgattgtgattaccagctatggagtttatgcagcaggttggacagctccgctgatcggtacagctggtaaagcagctatcagcacctgtatggctaatccttctggttgtactgtcatggttacgcaggctgctgaagcgggcgcgggaatcgccacgggtgcggtaacggtaggcaacgcttgggaagctccagtaggagcgttgtcgaaagcgaaggcggctaagcaggctataccaacccagacagttaaagaacttgatggcttactacaagaatcaaaaaatataggtgctgtaaatacacgaattaatatagcgaatagtactactcgatatacaccaatgagacaaacgggacaaccggtatctgctggctttgagcatgttcttgaggggcacttccataggcctattgcgaataaccgttcagtttttaccatctccccaaatgaattgaaggttatacttcaaagtaataaagtagtttcttctcccgtatcgatgactcctgatggccaatatatgcggactgtcgatgtaggaaaagttattggtactacttctattaaagaaggtggacaacccacaactacaattaaagtatttacagataagtcaggaaatttgattactacatacccagtaaaaggaaactaa

SEQ ID NO: 57383 - DNA, 1701 bp, Neisseria meningitidis
atgtcagtcaaaatccaaacccgatccatcaataccgacgtttttaatcatttgctcaccgccggtgccgatcctttaatcgcccggctttgtgcttcgcgcggtgtgcaaagtcctgccgaattggacgacaagcttgctgcgcttttgccgtatcaaacgctgacaaactgcgaagccgccgccggacgtttggcggatgcggttgggcgcaaggaaaaaatcctgattgtcgccgactacgatgccgacggcgcgacggcgtgtgccgtcggtttggacggtttggcggcgatgggggcaaaagtggatttccttgtgcccaaccgctttgaacacggctacggcttaacgcccgaacttgccgaaatcgctgccgcgcagggcgtggatttgctgattacggtggataacggtatcgccagcatcgcaggcgtggcgagggcgcaggctctgggtttggatgtgattgtaaccgaccaccatctgcctgccgataccgtgcccgactgcatcatcgtcaatccgaaccaaaaaggctgcggtttccaaagcaaaagcttggcgggcgtgggcgtgattttttatgtgttgacggcgttgcgtgccgaactgcgccgccgcaattatttttcagacggcctgaaagagccgaatctgggcgatcttttggatttggtcgcactcggcacggttgccgatgtcgtccctctcgaccacaacaaccgcatcctcgtgtcgcaaggtttgaaacggatgcgttcgggcaaaatgcgccccggcatccgcgccttgtttgaagtggcgcggcgcgactggcgcaaggcgcagccgtttgatatgggttttgcgttgggcccgcgcatcaatgccgccggacggctggacgatatgtcggtcggcatcgcctgcctgttggcgcgagatgattccgaagctcaggaactggcggctcagttaaacaacctcaatatcgagcgtcgcgaaatcgagcagtctatgctgcaagacgcgctgaacgcctttcctgaaaccctgccttcaggtcagacgactttggtggcgtatcgcgacgacttccatcaaggcgtggtcggtatcgtcgccagccgcctcaaagaccgtttttatcgtccgaccatcgtgtttgcgcctgccgacaacggcgaagtgcgcggttcggggcgttccattcccaacctgcacctgcgcgatgctttggacttggtgtccaaacgccatcccgatttgattttaaaattcggcggacacgcgatggcggcgggtttgagcatacttgaacacaacattcccgcgtttcagacgacctttgaagaagccgtgcgcgaaatggtgtgcgaagacgatttgtcgcaaaccttcatcaccgacggcagcctgcccgcctgcgacatcacgttggaacaggcgcaaaaccttgcccgtcacgtttgggggcagggcttcgcgccgccgagctttaccgacgagttccacgtcgtccgccagcaacctttgggcgcggagggcaaacacaaaaaagtctggctgcaaaaagacggctgcgaatttgaagcgatgttttggcgttgcagcgaagacatccccgaatacatccgcacggtttaccgccccgttgccaacgaatggcgcaacaatctcgaattgcagctgtatatcgattactgggaagcggtgtag

SEQ ID NO: 57384 - DNA, 246 bp, Neisseria meningitidis; identical to SEQ ID NO: 38743

SEQ ID NO: 57385 - DNA, 1221 bp, Neisseria meningitidis
ttgatcggctttatttatatcgtattaaaaatattcggaattggaataatggcaacacacggagacgaagtgaaaattcaaaacagacaagaagccgatagcgcaaaagccaaacgcaaacgccgcctgacggcattgacgctgctgttcgcgcttgccgccgcagccgccgggtcggcgttttttttatggtggcagcacgaagaagaaacggaagacgcttatgttgctgggcgcgtggttcaggttacgccgcaaaagggcggtacggtgcggaaggttttgcacgacgatacggatgccgtgaaaaaaggcgacgtgctggcggtattggacgacgataatgatgtgctggcttacgagcgggcaaaaaacgagctgattcaggcggtgcggcaaaaccgccggcaaaatgccgccacttcgcaggcgggggcgcaggttgccttgcgccgtgcggatttggcacgcgcgcaggatgatttgcgccgccggtctgctttggcggaatcgggcgcggtgtccgccgaagagctggcacacgcccgtgcggcagtgtctcaggcgcaggcggcggtcaaagcggctttggcggaagaatcttcggcacgcgcggctttgggcggtcaggtttctttgcgcgaacagccggcggttcagacggcaatcggcaggttgaaagatgcgtggttgaaccttcagcggacgcaaatccgcgcgccggcggacggtcaggtggcgaagcgttcggtgcaggtcgggcagcaggtggcggcaggcgcgccgctgatggcggtggtgccgctgtcggatgtgtgggtggatgccaattttaaagagacgcagttgcggcatatgaaaatcggacagcctgccgagctggtgtccgatttgtacggcaaacaaattgtttatcgcggcagggtggcagggttttcggcaggtacgggcagcgcgttttcgctgattccggcgcaaaacgcaacgggcaactggattaaagtggtgcagcgcgtccccgtccgtatcgtgctgaaccgcgaagatgtggacaggcatcccttgcgcatcggtttgtcgatgacggttaaagtggatacttctgccgcaggcgcgcctgtttcaaaaacgccgggtgcggcattgccggaaatggaaagtaccgactggtcggaagtcgatcggacggtcgatgaaatcctcgggcaatccgcgccctga

SEQ ID NO: 57386 - DNA, 306 bp, Neisseria meningitidis
ttgataaccggcacgcccggttcagggaaaacattaaaaatggtttccatgatggcaaacgatgaaatgtttaagccggatgaaaacggcatacgccgtaaagtatttacgaacatcaaaggcttgaagataccgcacacctacatagaaacggacgcgaaaaagctgccgaaatcgacagatgagcagctttcggcgcatgatatgtacgaatggataaagaagcccgaaaatatcgggtctattgtcattgtagatgaagctcaagacgtatggccggcacgctcggcagttcaaaatccctga

SEQ ID NO: 57387 - DNA, 126 bp, Neisseria meningitidis; identical to SEQ ID NO: 42488

SEQ ID NO: 57388 - DNA, 3243 bp, Neisseria meningitidis
atgcaaaatatgaaaaaccaagtacgcggatcaggcatggatgcacgatccaatccggccaatgtttcagacggcctgcaaaacagttcgagccatatcggtaccaacacgcgctaccgcctgaccaagctcggcgaacaaatggcgcgcctgcccatcgacccgaaaatcgcgcgcattttgctggcggcgaagaaacacgactgtatggcggaaatattggtgattgcgtccgcgctgtcgattcaagacccgcgcgagcggccgttggaagcgcgcgatgctgcctccaaggcacacgaacgttttaccgacaagcagtccgatttccttgcctatctgaacatttgggacagcttccagcgtgagcgcgacaaaggtttgtccaacaagcagctggtgcagtggtgccgccaatatttcttgtcgcacctgcggatgcgcgaatggcgcgagctacaccaccagcttgcccaaactgcgattgaaatgggtttgaccaccaaagaagccgctttcagacgttctcccgaagtcaggcagctcacgtcgtctgaaaatgcaggcgaccaagacctatccgccaaactcaaacaaaaacaactggataagaaacaacaccgcgcccaaatccgcgctgccaaagaagcgggctacgaacaaatccaccgcgccctgctcaccggcctcatcgccaacgtcggcatgaaatcacccgacggcaacgactacaccagcacgcgcggcagccgcttccaccttttccccgcctccgccctgttcaaggcgaagcccaaatgggtgatggcggcagaactcgttgaaacgacaaaactttatgcccgcgacgtagccgccatccagcccgaatggatcgagcaggaagcgccgcacctcgtccgctaccactatttcgagccgcattgggaacaaaaacgcggcgaagtcatcgccagcgaacgggtaacgctctacggcctgaccgtcctgccgcgccgccccgtgtcctacggcagaatcgcccccgaagaagcgcgcgaaatctttatccgcggcgcattggtggcacaggaatgcgatttgaaagcggacttttttgtccacaacaaaaagctgattaaagaaattaccgaactcgaacacaaatcgcgcaagcaagacgtgctggtcgatgacgaagccctgtttgcgttttataacgaacgactgcccgaaatggcttggaaagacgcgcaaggcagcgtttggggaagtgaagattccgtacggattattgaatctgacaaagccgagaggtcgtctgaaaatgagcgcaacgagtttcgtaaaaacaagcgtaatgggtctcgccaaaatgaaaatcacggcaacaccgtaggttgggttgaaaacccaacatcagccgcaactgcaaaaactgttgggtttgacaacccaacctacgctactcagcaacccaccccctcccccgagagggagggtcggggagagggcaaaacagttgccgcacaaaccaacttttccgcaaccgcagcaaaccctctcccgcaggagagggaacagagtgcctcagcttcaacgttttcagacgacctgcgtcctgcaaatctgcagcaaaccgccccctcccccgtgggggagggctggggagagagcaaaacagttgccacccaaaccaacttttccgcaacctcaacactttcagacgaccccaaacccaaaaagcagcctgcacctcaaaaaggccgtctgaaacccctacccctcgccgacatccgcaccttccaagcctggctcaaaaccgccgagtgcgacaatccgcgcctgctgttcctcagccgcgacgatctgatgcaacacgccgccgcacacattaccgaagaacagttccccaaattctggcaaaccgcagacggcaaattcaaactttcctaccgcttcgagccgcaccatccgctagacggcgtgaccatgaccgtgccgctgaccgtcctcaaccgcctgcacgcgccatcgctcgaatggctggtgcccggtatgttgcgcgaaaaaatccagctgctgattaaagcactgccgaagcaaatccgccgcatttgtgtgcccgtacccgatttcatcacccaatttttaagccaaaaccctgatcgcaacgcccccatcctgccccaacttgcccaagccatcgccaaaaccgcaggcgacatccgcatactcgagcaaatcaaccaagacgaatgggccgcgttcaggctgcccgaacactgctatttcaacctccgcattatcgacgacggcggacaagagcttgccggcggccgcaaactgcatgaattgcaacaacagctcggccaagccgccgccgttaccttccgcgacaacacccaagaattcgagcgcgacaacgtgaccacatgggacattggcaccctgcccgaatccatcaaattcgcacgcggcaaacaacagctcaccggctacctcggtctgcaaaaagaaaaagacggccgcatcgccctgcgcctgtgtgacaccaccgaagctgccgaacaggcacaccgtcaaggcgtaatcgaattgatgaagctgcaattaaaagagcaggtaaaagatctgaacaaaggcattcaaggctttacccaagccgccatgctgctcaaacacatcaacgccgacaccctgtgcgacgacctcacccaagccgtctgcgaccgcgcctttatcggcgaagacgagctgccgcgcaacgaaaaagcctttaaagagcaaatcaaacgcgcccgcagccgcctgcctgccgtcaaagaagccctcagccgctacctgcaggaaaccgcagccgcctacgccgaactcaacagcaaactcggcaaacacccattgacccacctcctacgccaacgcctgcaaaccctgctcgccgccggcttcgccacccgcaccccgtgggcacaatggccgcgcctccccatctacctcaaagccatgaccctgcgcctcgaaaaatacagcagcaaccccgcccgcgacgcagcccgcgaagccgatatccaagagctggaacaaatgtggcaggaaaaaacagacagcctgattaaacaaggtctccccatttcagacggcctcgccgcgtttaaatggatgattgaagaattgagggtgtcgctgttcgcgcaggaattgaagacaccgtatccggtgtcggtgaagcggttgttgaagatgtgggaggatcttaattaa

SEQ ID NO: 57389 - DNA, 531 bp, Neisseria meningitidis
atgaaattcgtcagcgaccttttgtccgtcatcctgtttttcgccacctataccgttaccaaaaacatgattgccgcaacggcggtcgccttggttgccggtgtggttcaggcggcttttctgtattggaaatataaaaagctggatacgatgcagtgggtcggactggtgctgattgtgatattcggtggcgcaaccattgttttgggcgacagccgcttcattatgtggaagccgagcgttttgttttggctgggcgcgctgttcctgtggggcagccacctcgccggtaaaaacggcttgaaggcgagtatcggcagggagattcagcttccggatgccgtatgggcgaaattgacgtatatgtgggtcggtttcctgatttttatgggtatcgccaactggtttgtgtttacccggttcgagtcgcaatgggtcaactataaaatgttcggctcgactgcactgatgcttgttttctttattattcagggtatttatctgagtacctgtctgaaaaaggaggattga

SEQ ID NO: 57390 - DNA, 291 bp, Neisseria meningitidis; identical to SEQ ID NO: 44147

SEQ ID NO: 57391 - DNA, 558 bp, Neisseria meningitidis; identical to SEQ ID NO: 44393

SEQ ID NO: 57392 - DNA, 957 bp, Neisseria meningitidis; identical to SEQ ID NO: 45429

SEQ ID NO: 57393 - DNA, 879 bp, Neisseria meningitidis; identical to SEQ ID NO: 45844

SEQ ID NO: 57394 - DNA, 324 bp, Neisseria meningitidis; identical to SEQ ID NO: 36328

SEQ ID NO: 57395 - DNA, 564 bp, Neisseria meningitidis; identical to SEQ ID NO: 38634

SEQ ID NO: 57396 - DNA, 687 bp, Neisseria meningitidis; identical to SEQ ID NO: 44235

SEQ ID NO: 57397 - DNA, 3249 bp, Neisseria meningitidis
ttgaagtgttgtcaatgtgggcaggcgaacatgaataacgaaaccaagatttatattaccgccgaaactggcggtgtcgtcagcggcgtagaaaaggcaaaacaatccatcaagtctttgggggatgtggcatcttcccaggggcggcgtatttctgacggattggtacatagtggcgacggcgcagagaaatcatcgacggtagtgtcggcggcatcgaagcggacggaacggtctttggcttctctggagaatgccatccgccgcgatatagccgttaagattgcaggcggtaaggcaaaccgagagtattacgaagagcttgcgcgccagcgcggtatcgatattgcacggcttaatccgctactgtcccaattggacaggcataatacgcagaccaatcgcgctacgcagtctgtcaagcagttcaataacgcattgcggcaaaccccggcacaaattaccgacatcgttacccagcttgcaggcgggcaaagcccgtttctgatcatgattcaacagggtgggcagttgcgtgatatgtatggcggcttcggtggtatgcttaagggactggccacggtcatttcccctatgcgccttgctgtcgcggggttgggcggcggcattgcggcattgggttatgcgatgtatcagggggcagaggaatcgtgcgaataccgtaaagccttgatacttgccggagatgcagcagggattactgcagacaggatgcaggaaatcgctgtttcggtcggggcagcgacgggcggctatgctgatgcgcgtgctgcaattacggccttggtctcaagcggcaaggttgcaacggacaattacgaacagttcgcccggagtattaccctccagtcgcaggcaacggggcaaagtattgacgatttggttgagaaatatactgaaatcgccaaagacccgctgaaagctgtggtatccctatcagccacctaccggacaatgactgccgatgtttaccagcaggtcaaggctttgcaggcacaaggtcgggaacaggacgcggttgcattggtgcagcggaaattctccgaagagtcggaggatatggcaaaacgcgtactgggtaatcttgggttgattgagcgggcgtggaaggatattaaagaaagtgcgtcggaggcatgggatgctgttaaatccataggtagggacaagaccaagctggatgaaattgccgcgctagattcgtttatttcccaaatcgaaaccagcaagaaacatccggttacacaattgttttggggtgaagagggtgagcgtaagctgcaggaagcctatgcgcggcgtgcccggttgcgtgccgaaatcgacaaggaggcagccgctgctgaaactttgcggcagaaacagaagcagaaccaaaatcgaactgaaggtatagccgaattggaggctgtttcggaacgttatgccactcgagagcagcaacggcagcgcgaactgcttaaaaacgacaaagcacggaaaaaggcgttggacggcatcactgacgcgaaaaagcggcaagaaatcattaataagcacgcggcaaatgccaagctgattaatgaaagttttgccgagaaaaaacacgaacgacagaaagaaaaaacggataaaacaagctaccccactgtttcgaacggcttgaggattaaaccgggagccgaagcgggcggcaaagcgctaggcggaacatatgccttcgcgcatgccatgcagcagatgctgggagaccgtctgttccgtttcggcgccttccgagatcgataccacattgggaaaaacagcctgcataacagtggattggcatttgatgccactccttctcccggtatggggatgaagcagaaacaggaagttgtcgcccaaatgacccgttatcttgagtcgttggggtttaaaaacgggcaggattttaaccttaaactggaacttgccggacagcgcaataaaaacggtacggtagcaaccggcgaccactggcatttcaactggcgttctcgagaggcggctgcgcgatttgccggcggtgttgagggccaggtgaaaaatatggcgcacctcgggttgtttaagggagtggagaaagaacctctttccggctacgaaaaatggcacgaggattttaaccgtcgggcggcggaggcgggagcgaagcgggtgctggaaattttaaacggcaaccgcgccatcggcgaacagttgaagttgttgtccgacccgactttcggcgattggacgctgaagcagcaggccgatgcccgcgagctggcggagaaggccgatgcgcaggatagtttgacggccgcctccaaaaaatattccgacatagtgaagcaaatgaccgacgattcgaaagaaaagttggatgacaggctgtttgaaatttcgcttatcggcaaaacccgtgaagaaatcgagaaactgacgctggcgagactgtgggacagacagatagcgaaagcccgtgaagaaggtgcgccgttggaaagtatcgatttattggagcgcggcaaggcggaagggatgagcaatctttctcaaatgcagaaggcgcgtgcagacagcgacaatgattggcgcggcggtatcgagtccggcttgaaaagctacatcgattcattcggaacgatgaggcaggcgatggaaaatgccaccgtacaaaccttcgacaaaatgggggatgcgctggcagactttgttgccacaggcaaacttgattttcgaagcctgactgtttccattttgcaggatttgtcaaaaatgctgattaaaatggcgattgtcaatgcaatgaagtcggcgttgggttatgccgacggcggtattgtcggtggaggaagtacgcagttcgacgcgttgttttccggcggcggctataccggctacggcgggaagtatgagcctgccggcattgttcacaagggcgaagtcgtattttcccagcgggacgtacgtaatcacggcggcgttgcggctgtcgagcggctgcggttgaatggttatgccggtggcggcgcagtaggactgccgtccgttttgaccggagtccgttcggccggggctggaagcatgcaggtcaacatcactataaatcgggacggtagcaccgaatcggacagcagtgccgatacggagatggcgaagcatcttgccgctgccataccgggcatggtggaacagtggtatgtcaagaatgtgtaccgtgaaaacggtacttaccataaatag

SEQ ID NO: 57398 - DNA, 1389 bp, Neisseria meningitidis; identical to SEQ ID NO: 45101

SEQ ID NO: 57399 - DNA, 1335 bp, Neisseria meningitidis; identical to SEQ ID NO: 45577

SEQ ID NO: 57400 - DNA, 798 bp, Neisseria meningitidis
atgctgaaacaacgggtgataactgctatgtggctgctgccgctgatgctgggcatgctgttttacgcgccgcaatggttgtgggctgcattttgcggactgattgccctgattgccttgtgggaatatgcccgtatgagcggcttgtgcaaaatcaaaaccaaccattacctcgccgcaaccttggttttcggcgtggttgcctatgcgggcggctggatgctgcctaatttggtttggtatgttgttttggcattttggcttgccatcatgcctttatggttgagattcaaatggaggctcaacggcggttggcaggtttatgccgtcggctggcttttggttatgccgttttggttcgcgctcgtatccctgcgcccgcatcccgatgatgccctgccgctgctcgccgtgatgggtctggtctgggttgccgacgtttgcgcgtatttcagcggcaaggcgttcggcaaacacaaaatcgcgccggcaatcagccccggaaaaagctgggaaggcgcaatcggcggcgcggtttgcgtggccgtgtacatgacctccgtacgaagtgccggctggctggcattcgatacaggctggttcgataccgtgttaatcggtttggtgttgaccgttgtcagcgtatgcggcgaccttttggaaagctggctcaagcgcgcggcaggcatcaaagacagcagcaagctactgccaggacacggcggcgtgttcgaccgtaccgacagcctgattgccgttatcagcgtctatgcggcgatgatgtcggttttaaattga

SEQ ID NO: 57401 - DNA, 300 bp, Neisseria meningitidis; identical to SEQ ID NO: 43627

SEQ ID NO: 57402 - DNA, 1530 bp, Neisseria meningitidis
atgcaaaatatttttattacattttcaggaaaaaccatgttgtcaggactccccatccccaaagacatcgcgcgcccgcccgaaacgatattggtcaacatcacgccgcaggaaacgcgcgtagcggtgttggaggaaaacaatatctgcgagctgcacatcgagcgcaacagcgaacacagcctagtcggcaatatctatttgggcgtggtgcgccgcgtgctgcctgggatgcagagcgcgtttatcgacatcgacttggaacgcgcggcgtttttacacatcgtcgatgtcctcgaacaacgccgcaaccccgaagaaacccagcgcatcgaacatatgctgtttgaagggcagtctgttttggtgcaggtcatcaaagacccgatcaacaccaaaggcgcgcggctttccacccaaatctcgctggcggggcgtttcctcgtccatcttccgcaagaagaccacatcggcgtgtcccaacgcatcgaagacgatgccgaacgcagcagcctgcgcgaacgcctcgacaagctcctgccggaaaatgcctgccggggctacatcatccgcaccaacgccgaaaacgccaccgacgaacagctccagtccgacatcgactacctgaccaaagtgtgggaacacatccaagaacaggcgaaaatccggccgccggaaaccctgctttatcaggatttgcccttgagtttgcgcgtgttgcgcgatatggtcggctgcgacacgcaaaaaatcctcgtcgattccaccgtaaaccacggccgcatgacgcgttttgccgaacaatacgtccacggcgcattgggcaggatagaattgttcaaaggcgaacgcccgctatttgaaacccacaacgtcgagcaggaaatcagccgcgccctgcaaccgcgcgtcaacctcaacttcggcagctacctgattatcgaatccaccgaagcgatgaccacgatagacgtgaacaccggcggcttcgtcggcgcacgcaatttcgatgaaacgattttccgcaccaacctcgaagcctgccacaccatcgcccgcgaattgaggctgcgcaacctcggcggcatcatcatcatcgacttcatcgatatggcgcaggaaagccaccgcgaagccgtgttgcaggagcttgccaaagccctcgccttcgaccgtacccgcgttaccctgcacggttttaccagcctgggactggtcgagctgacgcgcaaacgctcgcgcgaaaacttaaaccaagtcctctgcgaaccctgcccttcctgccaaggcagaggccgtctgaaaacgccgcaaaccgtatgctacgaaatccagcgcgaaatcgtccgcgaagcgcgccgttacgatgccgaaagtttccgcatcctcgccgcccccaacgtcatcgatttgtttttggacgaagaatcgcaatccttggcaatgctgatagatttcatcggcaaaccgatttctctggcagtcgaaaccgcttacacgcaggaacaatacgacatcgttttgatgtaa

SEQ ID NO: 57403 - DNA, 1386 bp, Neisseria meningitidis; identical to SEQ ID NO: 44355

SEQ ID NO: 57404 - DNA, 288 bp, Neisseria meningitidis
gtgtttcagacggcattggacagcagatgccgtctgaaacccttatcgcgtatggcatacacatcaacaataggaaaaaatatggatgaagcggtttttgccgattgggcgttgaaaatctgcctgaccggtttgattatttttttgggttttatcgtttggaatttgggcaaggagtccaaagcgggcaaattcggcatcgccattttgtttttggttttgggcttgggcgtgttcggttttgtatttaaagaactgctaatcaagtttttggtattgcccaaatag

SEQ ID NO: 57405 - DNA, 279 bp, Neisseria meningitidis; identical to SEQ ID NO: 40400

SEQ ID NO: 57406 - DNA, 2121 bp, Neisseria meningitidis; identical to SEQ ID NO: 45683

SEQ ID NO: 57407 - DNA, 1233 bp, Neisseria meningitidis; identical to SEQ ID NO: 39021

SEQ ID NO: 57408 - DNA, 738 bp, Neisseria meningitidis
atgttaagcgcgcgctacctccacctgcacgaagctttgggtttgggtccgatgtggctgaaacaggccgccgccgtcctgccgcccaaaaacacacccgcaaccccggcacaggcacgtcctcaaaccgtccgcgccgccccgatccgcccttcccaaccccataacggtcaggcgcggctcgaaacgatgaaagcgttggaaaccgccgccgtacctacgcgcaaacccgcgcctgaaaccgaaacgcccccgcccggcctttcagacggcatcgcccccgttcccgccgcttcgggcataaccaaacttgccgtcgtcagcctttgcccaccgattgaggatgcggtttacgggcaactgttctacggcaaagcgggtgttctgcttgacaacatactcaaagccgtaggactggatgccgcctatgtccacaaaacctgttgggtgaaaaccgccgccgtcggcaacccgatgccgtctgaagcggcaatcgaaaccgcgacggtttccgtcatgcaggaactcgacggctgccgcgcccccgccgtcctattcctcggacaggcttttgtccagcctgaacggcaaacgatgattgaaactttgtgcggcagccgtcccttcttcatcatcgaccatcccgcccggctgttgcgccaacccgaacttaaagcccgcgcctggcaggtgttgaaacagttgaaacgcgccttgcggcaaggcggcggcagttga

SEQ ID NO: 57409 - DNA, 1437 bp, Neisseria meningitidis; identical to SEQ ID NO: 44194

SEQ ID NO: 57410 - DNA, 1281 bp, Neisseria meningitidis
ttggtaaaagtgggcgacggtgtccacactctgctgctcgacaggccgattgtgcgcgacggcaggaaattcgacgcgccgcttttgtggatggtagtgctgatgacggcgttcagcctgctgatgatttattcggcttctgtgtatttggcatcaaaagaaggcggcgatcagtttttctatttgaccagacaggcggggttcgtcgttgccggcttgatagcgagcggttttttatggtttctttgcaggatgaggacatggcggcggcttgtgccgtggatttttgccctatccggcctgttgctggtagtcgtattgattgccgggcgcgaaatcaatggcgcgacccgttggatacctttgggtccgttgaatttccagccgaccgagctgttcaagctggcggtcatcctttatttggcaagcctgttcacgcgccgtgaagaagtgttgcgcagcatggaaagtttgggttggcagtcgatttggcgggggacggccaatctgatcatgtccgccaccaatccgcaggcacgtcgtgaaacattagaaatgtacggccgtttccgggcgatcatcctgccgattatgctggtggcgttcggtttggtgctgataatggtacagccggatttcggttcgtttgtcgtcattaccgtcattgccgttggaatgctgtttctggcaggattgccgtggaaatattttttcgtcctggtaggcagcgtcttgggcgggatggtgctgatgattaccgccgctccctaccgtgtgcagcgggtagtggcatttttggacccgtggaaagaccctcagggtgccggctaccagcttacccactctctgatggcaatcgggcgcggagagtggttcggtatgggtttgggtgcgagtttgagcaaacgcggctttctgccggaagcgcataccgattttatttttgccatcatcgccgaagaattcggtttcttcggtatgtgtgtgctgatattctgttacggctggctggtggtgcgggcgttttccatcggcaagcagtcgcgcgatttgggtttgactttcaacgcctatatcgcttcgggtatcggcatttggatcggtatccaaagtttcttcaatatcggtgtgaacatcggtgctttgccgaccaaaggtctgacgctgccgttgatgtcctatggcggttcgtcagtctttttcatgctgatcagtatgatgctgctgttgcgtatagattatgaaaaccgccggaaaatgcgcggttatcgggtggagtaa

SEQ ID NO: 57411 - DNA, 510 bp, Neisseria meningitidis; identical to SEQ ID NO: 45486

SEQ ID NO: 57412 - DNA, 2472 bp, Neisseria meningitidis; identical to SEQ ID NO: 45585

SEQ ID NO: 57413 - DNA, 444 bp, Neisseria meningitidis; identical to SEQ ID NO: 47659

SEQ ID NO: 57414 - DNA, 1413 bp, Neisseria meningitidis; identical to SEQ ID NO: 38542

SEQ ID NO: 57415 - DNA, 1974 bp, Neisseria meningitidis; identical to SEQ ID NO: 45052

SEQ ID NO: 57416 - DNA, 1005 bp, Neisseria meningitidis; identical to SEQ ID NO: 44437

SEQ ID NO: 57417 - DNA, 2112 bp, Neisseria meningitidis; identical to SEQ ID NO: 44942

SEQ ID NO: 57418 - DNA, 642 bp, Neisseria meningitidis; identical to SEQ ID NO: 45025

SEQ ID NO: 57419 - DNA, 645 bp, Neisseria meningitidis; identical to SEQ ID NO: 39354

SEQ ID NO: 57420 - DNA, 1176 bp, Neisseria meningitidis
gtgtttaaagtgaaattttatattcgtcacgcagtattattattgtgtggaagtttaattgtaggatgctctgcgattccttcatcaggccccagcgcaaaaaaaattgtctctttagggcaacaatctgaagttcaaattcccgaagtggagctgattgatgtgaatcatacggttgctcagttattatataaggctcagataaatcagtcattcactcagtttggcgatggttatgcttcggctggtacgctaaatattggtgatgtattggatattatgatttgggaagcgccgccggcagtattgtttggtggtggcctttcttcgatgggctcgggtagtgcgcatcaaactaagttgccagagcagttggtcacggcacgtggtacggtttctgtgccgtttgttggcgatatttcggtggtcggtaaaacgcctggtcaggttcaggaaattattaaaggccgcctgaaaaaaatggccaatcagccacaagtgatggtgcgtttggtgcagaataatgcggcgaatgtgtcggtgattcgtgctgggaatagtgtgcgtatgccgctgacggcagccggtgagcgtgtgttggatgcggtggctgcggtaggtggttcaacggcaaatgtgcaggatacgaatgtgcagctgacacgtggcaatgtagtacgaactgttgccttggaagatttagttgcaaatccgcgacaaaatattttgctgcgtcgcggtgatgtggttaccatgattaccaatccctatacctttacgtctatgggtgcggtggggagaacacaagaaatcggtttttcagccagaggcttatcgctttctgaagccattggccgtatgggcggtttgcaagatcgccgttctgatgcgcgtggtgtgtttgtgttccgctatacgccattggtggaattgccggcagaacgtcaggataaatggattgctcaaggttatggcagtgaggcagagattccaacggtatatcgtgtgaatatggctgatgcgcattcgctattttctatgcagcgctttcctgtgaagaataaagatgtattgtatgtgtcgaatgcgccgttggctgaagtgcagaaatttttgtcgtttgtgttctcgccggttaccagtggcgcgaacagtattaataatttaactaattaa

SEQ ID NO: 57421 - DNA, 1959 bp, Neisseria meningitidis
atgtccgaacggcggcagccccatatttacgctataatccatcccgaccaaaccaccgacagcggctgccgttgcagttcccgccctaccgatatgatagaaaaactgactttcggactgtttaaaaaagaagacgcgcgcagctttatgcgcctgatggcgtacgtccgcccctacaaaatccgcatcgttgccgccctgattgccattttcggcgttgccgccaccgaaagctaccttgccgccttcatcgcccccctgattaaccacggcttttccgcacctgccgcgccgcccgagctgtctgccgccgccggcatcatttccaccctgcaaaactggcgcgaacagtttacctatatggtttgggggacggaaaacaaaatctggaccgtcccgctctttctcatcattctcgtcgtcatccgtggcatctgccgctttaccagcacctatctgatgacttgggtctccgtgatgaccatcagcaaaatccgcaaagatatgtttgccaaaatgctgaccctttcctcccgctaccatcaggaaacgccgtccggcaccgtactgatgaatatgctcaacctgaccgaacagtcggtcagcaacgccagcgacatcttcaccgtcctcacgcgcgacacgatgatcgttaccggcctgaccatcgtcctgctttacctcaactggcagctcagccttatcgtcgtcctgatgttccccctgctctccctgctctcgcgctactaccgcgaccgtctgaaacacgtcatttccgactcgcaaaaaagcataggcacgatgaacaacgtgattgccgaaacccatcagggacaccgcgtcgtcaagctgttcaacgggcaggcgcaggcggcaaaccggttcgacgcgatcaaccgcaccatcgtccgcctcagcaaaaaaatcacgcaggcaacggcggcacattccccgttcagcgaactaatcgcctcgatcgccctcgccgtcgtcatcttcatcgccctgtggcaaagccaaaacggctacaccaccatcggcgaatttatggcattcatcgtcgcgatgctgcaaatgtacgcccccatcaaaagccttgccaacattagcatccctatgcagacgatgttcctcgccgccgacggcgtatgtgcatttctcgacaccccgcccgaacaggacaaaggcacgctcgcaccgcagcgtgtcgaagggcgcatcagcttccgcaacgtcgatgtcgaataccgttcggacggcatcaaagccctcgacggcttcaacctcgacatcagacaaggcgaacgcgtcgccctggtcggacgttccggcagcggcaaatccaccgtcgtcaacctgctgccccgctttgtcgaaccgtctgccggcaacatctgcatagacggtatcgacatcgccgacatcaaactcgactgcctgcgcgcccaatttgccctcgtctcccaagacgtattcctgtttgacgacaccctgtttgaaaacgtccgatatagccgtcccgacgcgggcgaagccgaagtcctatccgccctccaagccgctaacctgcaaagcctgatcgacgcatcaccgctcggactgcaccagcccatcggatcgaacggcagcaacttatccggcggacagcggcaacgcgttgccattgcccgcgccattttgaaagacgcgccgatattattattggacgaagccaccagcgcattggacaacgaatccgaacgcctcgtccaacaggcgctcgaacgcctgatggaaaaccgcaccggcatcatcgtcgcccaccgcctgaccaccatcgaaggggccgaccgcatcatcgtaatggacgacggcaaaatcatcgaacaaggcacacacgaacaactgatgtcccaaaacggctactacacgatgttacgcaatatctcaaacaaagatgccgccgtccggacggcataa

SEQ ID NO: 57422 - DNA, 1356 bp, Neisseria meningitidis; identical to SEQ ID NO: 44226

SEQ ID NO: 57423 - DNA, 654 bp, Neisseria meningitidis; identical to SEQ ID NO: 44366

SEQ ID NO: 57424 - DNA, 723 bp, Neisseria meningitidis; identical to SEQ ID NO: 47875

SEQ ID NO: 57425 - DNA, 1785 bp, Neisseria meningitidis; identical to SEQ ID NO: 45360

SEQ ID NO: 57426 - DNA, 360 bp, Neisseria meningitidis; identical to SEQ ID NO: 44131

SEQ ID NO: 57427 - DNA, 231 bp, Neisseria meningitidis
atgaacatcgttaaaaaatatgctgtaaaagcattgttggcagccggtatcttcacaccggctattgttatggcagatggctttgatgcatccgcgattggtacgcaagtggcgaatgtaatcatgggttttgtggcaatggtttccgccgtgggtatggcggccattaccgtcattttggcaatccaaggcttcaaaatggcttggagcatgatcaaatctgtcaaataa

SEQ ID NO: 57428 - DNA, 2439 bp, Neisseria meningitidis; identical to SEQ ID NO: 44804

SEQ ID NO: 57429 - DNA, 1779 bp, Neisseria meningitidis; identical to SEQ ID NO: 45269

SEQ ID NO: 57430 - DNA, 1056 bp, Neisseria meningitidis; identical to SEQ ID NO: 46625

SEQ ID NO: 57431 - DNA, 960 bp, Neisseria meningitidis; identical to SEQ ID NO: 39447

SEQ ID NO: 57432 - DNA, 240 bp, Neisseria meningitidis; identical to SEQ ID NO: 44857

SEQ ID NO: 57433 - DNA, 252 bp, Neisseria meningitidis; identical to SEQ ID NO: 41525

SEQ ID NO: 57434 - DNA, 2019 bp, Neisseria meningitidis
atgaataaatctttatccgggtcggtagaagaataccgcgaactgacgctccgaggcatgatactcggtgcattgatcactgtaatttttactgcgtccaacgtttacctcggtttgaaagtcgggctgacctttgcctcgtcgattccggcggcggtgatttcgatggcggttttaaagtttttcaaaggcagcaatattttggaaaacaacatggtgcagacccaagcttcggcggcgggtacgctttcgaccatcatcttcgtcctgcccggtttgctgatggcgggctactggagcggtttcccgttctggcagacgacgcttttatgtattgccggcgggattttgggggtgattttcaccattccgctgcgttacgcgatggtggtgaaaagcgatttgccttatccggaaggtgtggcggctgctgaaattttgaaagtgggcggtcatgaagaaggggataaccgtcagggcggcagcggcatcaaagagctggcggccggcggcgcgttggcgggattgatgagcttttgtgccggaggtctgcgtgtgattgccgacagcgcgagttattggtttaaaagcggtacggcaattttccaactgccgatgggcttttcactggccttgttgggcgcgggctatttggtcggactgacgggcggcatcgccatcctgttgggcatttcgattgcttggggcattgccgtgccgtatttctcctcacacattccgcaaccttccgatatggaaatggcggcgtttgcgatgaagctgtggaaggaaaaagtgcgttttatcggtgcgggaaccataggtatcgcggcggtttggacgcttttgatgctgctcaagccaatggtggaaggcatgaagatgtcgtttaagagttttggcggcggtgcgcccgctacagaacgcgctgaacaggatttgtcgcctaaagccatgattttctgggtattgtctatgatgtttgttttaggcgtgtcgttttaccactttatcggcgattcgcacattacgggcggcatggcttggcttttggtggtcgtttgcacgcttttggcttccgtcatcggctttttggtcgccgccgcctgcggttatatggcaggtttggtcggctcgtcttccagcccgatttccggcgtgggcatcgtgtccgtcgtcgttatttcactggttttgctgctggtaggcgaatccggaggtttgttggcggatgaggctaaccgcaaatttttgctggcactgactttgttttgcggctcggcagtaatctgcgtggcttcgatttccaatgacaacctgcaagacttgaaaaccggctacctgctcaaagccacgccttggcggcagcaagtcgccctgattatcggctgtatcgttggtgcgctggttatttcgcccgtgttggaactgctttacgaagcctacggctttaccggcgcaatgccgcgcgaaggcatggacgcggcgcaggctttggcagcccctcaagcgactttgatgacgaccatcgcgtcgggcattttcgcccacaaccttgaatgggtctatatctttaccggtatcgtgattggagcagtattaatcgtcgtcgatttggtgttgaaaaaatcatcaggcggcaaacttgccctgcccgtccttgcggtcggtatgggtatttatctgccgccgtccgtcaatatgcccatcgtggcaggcgcggtgttggcggcggtgttgaaacacatcatcggtaaaaaagcggaaaaccgcgaaggccgtctgaaaaacgccgagcgcatcggaaccttgttctccgccggcctgattgtcggtgaaagcctgatcggtgtgattatggcgtttattattgccttctccgtgaccaacggcggctcggatgcgccgctcgcgttgaatctgcaaaactgggatgccgccgcttcttggctgggtttggcgttcttcgttaccgggatgtttttctttgcacagcgcgtactgaaggcgggcaagtag

SEQ ID NO: 57435 - DNA, 996 bp, Neisseria meningitidis; identical to SEQ ID NO: 38514

SEQ ID NO: 57436 - DNA, 1116 bp, Neisseria meningitidis; identical to SEQ ID NO: 39337

SEQ ID NO: 57437 - DNA, 1410 bp, Neisseria meningitidis; identical to SEQ ID NO: 47701

SEQ ID NO: 57438 - DNA, 1311 bp, Neisseria meningitidis
atgccgtctgaaagcaaacccgtgtcgcgcatcgtaaccgacagccgcgacatccgcgcgggcgatgtgtttttcgcattggcgggcgggcggtttgacgcgcatgattttgttgaagacgtattggctgctggtgcggcggcggttgtggtttcgcgcgaagattgtgctgcaatggatggcgcgttgaaagtcgatgacacgcttgccgcattgcaaacgctggcaaaggcgtggcgtgaaaatgtgaatccgtttgtgttcggcattaccggttcgggcggcaagacgacggtgaaggaaatgctggctgcggtattgcgccgccgtttcggcgatgatgccgtgttggcgacggcaggcaacttcaacaaccatatcggattgccgctgactttgttgaagttaaacgaaaaacaccgctatgccgtgattgaaatgggcatgaaccatttcggcgaactggcggttttaacgcaaatcgccaaaccaaatgccgcattggtcaacaacgccatgcgcgcccatgtcggctgcggtttcgacggagtgggcgatattgccaaagcgaaaagcgagatttaccaaggtttatgttcagacggcattgcactgattcctcaagaagatgccaatatggctgtcttcaaaacggcaacgcttaatttgaatacgcgcactttcggcatcgatagcggcgatgttcacgcggaaaatattgtgctgaaaccgttgtcgtgcgaatttgatttggtgtgcggcgacgaacgcgccgccgtggtgctgcctgttcccggccgccacaatgtccacaacgccgccgctgccgccgcgctggctttggctgcgggtttgagtctgaacgatgtggcggaaggtttgaaaggtttcagcaatatcaaaggccgtctgaacgtcaaatccggaatcaagggcgcaaccctgattgacgatacttataatgcgaacccggacagcatgaaagccgcgattgacgtgttggcgcgtatgcctgcgccgcgtattttcgtaatgggcgatatgggcgaactgggcgaggacgaagccgccgctatgcacgccgaagtcggcgcgtatgcctgcgaccaaggcatcgaagcggcttattttgtcggcgacaacagcgtcgaagcggcggaaaaatttggcgcggacggtttgtggttcgccgccaaagacccgttgattcaagtgttgcgccacgatttgcccgaacgcgccaccgtgttggtgaaaggttcgcgctttatgcagatggaagaagtggtcgaggcattggaggataagtga

SEQ ID NO: 57439 - DNA, 462 bp, Neisseria meningitidis; identical to SEQ ID NO: 45545

SEQ ID NO: 57440 - DNA, 771 bp, Neisseria meningitidis; identical to SEQ ID NO: 37153

SEQ ID NO: 57441 - DNA, 234 bp, Neisseria meningitidis; identical to SEQ ID NO: 49199

SEQ ID NO: 57442 - DNA, 870 bp, Neisseria meningitidis; identical to SEQ ID NO: 44381

SEQ ID NO: 57443 - DNA, 540 bp, Neisseria meningitidis; identical to SEQ ID NO: 44661

SEQ ID NO: 57444 - DNA, 186 bp, Neisseria meningitidis; identical to SEQ ID NO: 37143

SEQ ID NO: 57445 - DNA, 606 bp, Neisseria meningitidis; identical to SEQ ID NO: 45248

SEQ ID NO: 57446 - DNA, 825 bp, Neisseria meningitidis; identical to SEQ ID NO: 46962

SEQ ID NO: 57447 - DNA, 615 bp, Neisseria meningitidis
atgaggataaccgttataatcacaactttacagtctgcacagagaaaaccgatgccttggaatctccctatcttcctcacatggttgagggtcttgctcattcctgtcatgacagcccttttttacctgccttttccgtggttcgcggaggaaacgattaatctcaccgccgccgtcatttttgccgttgccgccttaaccgactggtttgacggatttttggcaagactgtggaaacaaacttccgatttcggcgccttcctcgatcccgtcgccgacaagctgatggttgccgtatcgctacttttactggtcaaactcgaccggacctatgttttgtttgccatgatcattatcggcagggaaattaccatttccgcattgcgcgaatggatggcgcaaatgggcaaaaggaacagcgttgccgtcgccaccgtcggtaagttcaaaaccgccgcgcaaatgctggcaattttcctgctgctgctgaatattcccgatttttacggatttaatcttgttgttatcggcaatgtattgatgtttatcgcatctttgctgacagtctggtcgatgctgtattatctgaaaatggcgtggaaagaaatcgcctga

SEQ ID NO: 57448 - DNA, 1281 bp, Neisseria meningitidis; identical to SEQ ID NO: 44844

SEQ ID NO: 57449 - DNA, 594 bp, Neisseria meningitidis; identical to SEQ ID NO: 38213

SEQ ID NO: 57450 - DNA, 186 bp, Neisseria meningitidis; identical to SEQ ID NO: 38793

SEQ ID NO: 57451 - DNA, 1002 bp, Neisseria meningitidis; identical to SEQ ID NO: 44617

SEQ ID NO: 57452 - DNA, 834 bp, Neisseria meningitidis; identical to SEQ ID NO: 39780

SEQ ID NO: 57453 - DNA, 801 bp, Neisseria meningitidis; identical to SEQ ID NO: 38785

SEQ ID NO: 57454 - DNA, 396 bp, Neisseria meningitidis; identical to SEQ ID NO: 44155

SEQ ID NO: 57455 - DNA, 1419 bp, Neisseria meningitidis; identical to SEQ ID NO: 44426

SEQ ID NO: 57456 - DNA, 318 bp, Neisseria meningitidis; identical to SEQ ID NO: 39119

SEQ ID NO: 57457 - DNA, 1302 bp, Neisseria meningitidis; identical to SEQ ID NO: 45009

SEQ ID NO: 57458 - DNA, 687 bp, Neisseria meningitidis; identical to SEQ ID NO: 45770

SEQ ID NO: 57459 - DNA, 876 bp, Neisseria meningitidis; identical to SEQ ID NO: 45640

SEQ ID NO: 57460 - DNA, 1677 bp, Neisseria meningitidis; identical to SEQ ID NO: 44411

SEQ ID NO: 57461 - DNA, 2301 bp, Neisseria meningitidis; identical to SEQ ID NO: 44782

SEQ ID NO: 57462 - DNA, 378 bp, Neisseria meningitidis; identical to SEQ ID NO: 37228

SEQ ID NO: 57463 - DNA, 1815 bp, Neisseria meningitidis; identical to SEQ ID NO: 44551

SEQ ID NO: 57464 - DNA, 1107 bp, Neisseria meningitidis; identical to SEQ ID NO: 44586

SEQ ID NO: 57465 - DNA, 2016 bp, Neisseria meningitidis; identical to SEQ ID NO: 39431

SEQ ID NO: 57466 - DNA, 2025 bp, Neisseria meningitidis
atgaacgacatgactttatatctcatcattgcccttgtgcctttggcaggctcgctgatcgcgggtttgttcggcaacaaaatcggacgtgccggtgcgcatacggttacgatactcggcgtggcggtgtccgccgtgctgtcggcttatgtgttgtggggctttattgacggcagccgcgccaagtttgacgaaaacgtctatacctggctgacaatgggcggcttggatttctccgtcggctttttggtcgatacgatgacggcgatgatgatggtcgtggtcaccggcgtatcgctgatggtacatatctataccatcggttatatgcacgatgaaaaaatcggctaccaacgcttcttcagctatatttctttgtttactttcagcatgttgatgctgattatgagcaacaacttcatccagctcttcttcggttgggaagcggtgggcttggtgtcgtatctcttgatcggtttctatttcaaacgtccgagcgcgacatttgccaacctgaaagcctttttgatcaaccgtgtcggcgacttcggctttttgctcggtatcggcttggtgcttgcctatttcggcggcagcctgcgctatcaagatgtattcgcttatctgcctaatgttcagacggccaccattcaattgttccccagtgtggaatggtctttgattactgtaacctgtttgctcctgtttgtcggtgcgatgggtaaatcggcacaattcccgctgcacgtctggctgcctgattcgatggaaggcccgaccccgatttctgcattgattcacgccgcaaccatggttaccgccggtctgtttatggtatcgcgtatgtcgccgatttatgagatgagtagcactgcgctgtctgtcatcatgatgattggtgcgattaccgccctgtttatgggtttcttgggcgtgattcaaaacgatatcaagcgcgtggttgcgtattccaccctgtcgcaactgggctatatgaccgtggctttgggcgcgtccgcctattccgtggcgatgttccacgtcatgacccacgccttctttaaagccttgctgttcttggcggcaggtagcgcgattatcggtatgcaccacgaccaagatatgcgccatatgggcaacctgaaaaaatatatgccggttacttggctgactatgctgatcggcaatttgtcgctgatcggtacgccgttcttctccggcttctattctaaagattcgattatcgaagcagcgaaatacagcaccctgccgggcagcggctttgcttattttgccgtccttgccagcgtgttcgttaccgcgttttacgcgttccgccaatactttatggtgttccacggcgaagagaaatggcgcagcctgcctgaacatcatgacgatcatcatggtgaagaacatcacggcttgggcaaaaacgacaatccgcacgaaagcccgctggttgttaccctgccgctgattttgcttgccatcccgtccgtcatcatcggctatgttgccatcgagcctatgctttacggcgatttctttaaagacgtgattttcgtcaataccgacgcgcatccgaccatgcacatcatgaaggaagagttccacggcgcattggcaatggtgtcgcacagcctgcattcgcctgtactctaccttgctattgcaggtgtcttaagcgcatggcttttgtacgtcaaactgccgcacctgcctgcgaaaattgcacaggcgttccgtccgatttacgttttgtttgaaagcaaatactacctcgacgccctgtatttcaacgttttcgccaaaggcacacgcgcattgggtaccttcttctggaaagtcggcgataccgccattatcgacaacggcatcgtcaacggctctgccaaactggtcggcgtaattgccgcgcaagtgcgtaaagcccaaaccggctttatctacacctacgccgccgctatggtattcggcgtattggtactgctcggcatgaccttctggggattgttcagataa

SEQ ID NO: 57467 - DNA, 1497 bp, Neisseria meningitidis
atgttttccaactacctactcagcttggcaatatggatacccatcgccgcaggtgtgctggttttggcgaccggtaaagacagccgtgcgccgctggcgcgtgtgctcgccttcatgggtgcgcttgccggtttcttggtaacgctgcccctgtttaccggtttcgaccgtttgagcggcggctatcaatttaccgagttccacgagtggattccgctgctgaaaatcaactacgcattgggcgtggacggtatttcagtgctctttatcatcttgaatgcgtttattacgctgttggtggtattggctggttgggaagtcattcagaaacgtccggcgcagtatatggcggcattcctgatgatgtcgggtttgattaacggtgcgtttgccgcgcaggatgcgattctgttttatgtgttcttcgagggtatgctgattccgctgtacctgattatcggtgtatggggcggcccgcgccgcgtctatgcgtcggtcaagctgttcctctatacgctgatgggttcgctcctgatgctggttgctatggtttacctgtactatcaaacaggcagcttctctattgtcgatttccaaaacatcaaacagattccgttgggcgtacaacagcttttgtttgcggcgttcttcctgtcgtttgccgtaaaagtgccgatgttccccgtacacacttggctgccggatgcccacgttgaagcaccgaccggcggttcgatggtgttggctgcgattacgctgaaactgggtgcgtatggtttcttgcgctttatcctgccgattatgccggatgcggcacgctattttgcccccgtgatcatcgtattgagtctgattgccgtgatttatatcggtatggtggctttggtgcaaaccgatatgaaaaaactggtggcgtattcgtccatcagccatatgggttttgtaacgcttgggatgtttttgtttgttgacgggcagttggacgactgggcattgaaaggcgcggtcattcagatgatttcgcacggtttcgtgtcggcggcgatgtttatgtgcatcggtgtgatgtacgaccgcctgcacacgcgcaatatcgccgattacggcggcgtggtcaacgtgatgcctaagtttgcggcgtttatgatgttgttcggtatggccaatgccggtctgcctgcaacttccggcttcgtgggcgagtttatggtgattatgggcgcggttaaagtgaatttctgggtgggcgcgttggcggccatgaccctgatttacggtgcgtcttataccctgtggatgtacaagcgcgtgattttcggcgcgatccacaatccgcacgttgccgaaatgaaagacatcaactgccgcgaatttgcgattctggcgattttggcggttgtggtattgggtatgggtctgtatccgaacgcatttatcgaagtggtgcatcaggcggcaaacgatttgattgcccatgtggcacaaagcaagatttga

SEQ ID NO: 57468 - DNA, 483 bp, Neisseria meningitidis; identical to SEQ ID NO: 36360

SEQ ID NO: 57469 - DNA, 318 bp, Neisseria meningitidis; identical to SEQ ID NO: 39456

SEQ ID NO: 57470 - DNA, 414 bp, Neisseria meningitidis; identical to SEQ ID NO: 45183

SEQ ID NO: 57471 - DNA, 345 bp, Neisseria meningitidis
ttgattggcagccgatcgagcaaaggtacgaccatctatgccgataaaggctatgacagtgcggaaaaccggcaacatctgaaagaacatcagttgctggacggcattatgcgcaaagcctgccgcaaccgtccgctgtcggaaacgcaaaccaaacgcaaccggtatttatcgaagacccgttatgtggtcgaacaaagcttcggtacgctgcaccgtaaattccgctatgcgcggtcaacctatttcggactgattaaagtgagtgcgcaaagccatctgaaggcgatgtgtttgaacctgttgaaagccgccaacaggctaagtgcgcccgctgccgcctaa

SEQ ID NO: 57472 - DNA, 2157 bp, Neisseria meningitidis; identical to SEQ ID NO: 45014

SEQ ID NO: 57473 - DNA, 1980 bp, Neisseria meningitidis
atgcctaaaattttacaacaaacaaccttacatcgcttttttcgcgcaaacacgcaccatccgattagcccgtccgttttgcagcaggctggcgatttgataagatggttatgtttttcagacggcatttcagatttccgtccatgccgtctgaagccgcaaaacccgattggaggaactgttatgaataccgtatcgaattacctgtccgcattgcgcgaagccatgaaggcgcaaggcttggatgcactcgtcatcccttccgccgacccccacctgtccgaatacctgcccgagcattggcaggcgcgccgcgaattatcgggctttaccggctcggtcggcacattcgtcgttaccgccgacgaagcgggcgtatgggtggacagccgctattgggaacaagccgccaagcagcttgcgggcagcggcatcgaactgcaaaaaagcgggcaagtgccgccgtataacgaatggctcgcggcaaacctgcccgaaaacgccgccgtcggcatcccttccgatatggtctcgctcaccggcaaacgcactttggcgcaatcgctcgccgccaaaaacatccgcatcgaacacccaaacgatctgcttgaccaagtgtggacaagccgcccggccattcctgccgaaaccgtgttcatccacgaccccgcctacgtctccgaaaccgccgccgaaaaactcgcccgcgtgcgcgccgtgatggcggaaaaaggcgcggattaccacttggtttcctcgcttgacgacatcgcctggctgaccaacctgcgcggcagcgacgtgcctttcaaccctgttttcgtgtccttcctgctgattggcaaagacaacgccgtcctgtttaccgaacaatgccgtctgaacgccgaagccgccgccgcgctgcaaaccgcaggcatcacggtcgaaccttatgcccaagttgccgacaaactcgcgcaaatcggcggcgcgctgcttatcgaaccgaacaaaaccgccgtcagcacgcttgtgcgcctgcccgaaagcgtgtgccttatcgaaggcatcaacccgtccacgctgttcaaatcctgcaaatccgaagccgacatcgcccgcatccgcgaagcgatggaacacgacggcgcggcgttgtgcggtttcttcgccgagtttgaagacatcatcggcaacggcggcagcctgaccgaaatcgacgtggacaccatgctttatcgccaccgcagcgtgcgcccaggcttcatttcattgagtttcgacaccatcgcaggcttcaacgccaacggcgcactgccgcattacagcgcgacacccgaaagccacagcaccatcagcggcaacgggcttttgctcatcgactccggcgcgcaatacaaaggcggcacgaccgacatcacccgcgtcgtccccgtcggcacgccgagtgccgaacaaaaaagcgacaacaccctcgttctcaaagcccatatcgcgcttgccgaagccgtgttccccgaaaacatcccctcgccgctgattgatgcgatttgccgcaaacccctgtggcaggcgcaatgcgactacggccacggcaccggacacggcgtaggctatttcctcaacgtccacgaaggcccgcagcgcatcgccttcgccgcccccgccacgcccgaaaccgccatgaaaaaaggcatggttacctccatcgaacccggactctaccgcccgggaaaatggggcatccgcattgaaaaccttgccgccaaccaagccgtcgccgcccctcaagaaaccgaattcggcagcttcctctgttttgaaaccctgaccctctgccccatcgacacccgcctgatggacaccgccctcatgaccgacggcgaaatcgactgggtcaaccgctaccacgccgaagtccgccgccgcctcgagccgctgaccgaaggcgcggcaaaagcgtggctgatcaaacgcaccgaaccgctggcgcgttaa

SEQ ID NO: 57474 - DNA, 810 bp, Neisseria meningitidis; identical to SEQ ID NO: 45759

SEQ ID NO: 57475 - DNA, 1263 bp, Neisseria meningitidis; identical to SEQ ID NO: 45630

SEQ ID NO: 57476 - DNA, 864 bp, Neisseria meningitidis; identical to SEQ ID NO: 44990

SEQ ID NO: 57477 - DNA, 594 bp, Neisseria meningitidis; identical to SEQ ID NO: 38781

SEQ ID NO: 57478 - DNA, 966 bp, Neisseria meningitidis; identical to SEQ ID NO: 44613

SEQ ID NO: 57479 - DNA, 363 bp, Neisseria meningitidis; identical to SEQ ID NO: 39007

SEQ ID NO: 57480 - DNA, 966 bp, Neisseria meningitidis; identical to SEQ ID NO: 44613

SEQ ID NO: 57481 - DNA, 720 bp, Neisseria meningitidis; identical to SEQ ID NO: 46586

SEQ ID NO: 57482 - DNA, 966 bp, Neisseria meningitidis; identical to SEQ ID NO: 38346

SEQ ID NO: 57483 - DNA, 789 bp, Neisseria meningitidis; identical to SEQ ID NO: 36434

SEQ ID NO: 57484 - DNA, 1179 bp, Neisseria meningitidis; identical to SEQ ID NO: 38673

SEQ ID NO: 57485 - DNA, 1143 bp, Neisseria meningitidis; identical to SEQ ID NO: 39162

SEQ ID NO: 57486 - DNA, 384 bp, Neisseria meningitidis; identical to SEQ ID NO: 38550

SEQ ID NO: 57487 - DNA, 579 bp, Neisseria meningitidis; identical to SEQ ID NO: 39087

SEQ ID NO: 57488 - DNA, 618 bp, Neisseria meningitidis; identical to SEQ ID NO: 44520

SEQ ID NO: 57489 - DNA, 558 bp, Neisseria meningitidis; identical to SEQ ID NO: 50305

SEQ ID NO: 57490 - DNA, 798 bp, Neisseria meningitidis; identical to SEQ ID NO: 44680

SEQ ID NO: 57491 - DNA, 567 bp, Neisseria meningitidis
gtgtcggtcggctacgacttcggcggctggagaatagcggcagattatgccggttacagaaaatggaacgacaataaatattccgtcaacacaaaagaggtgctaagaaacaatagcactggcactgaaaactggcaagaactgaagacggaaaatcaggaaaacggcagcttccacgccgcttcttctctcggcttatccgccatttacgatttcaaactcaacgataaattcgataaattcaaaccctatatcggcgcgcgcgtcgcctacggacacgttaaacatcaggttcattcggtggaaacagaaaccacgactgttttcagtaaaccaaaaggcactacagtgccaggcattatctcagaaaaaccgattagcaaacctccctatcacgaaagcaacagcatcagcagcttgggtcttggtgtcatcgccggtgtcggtttcgacatcacgcccaagctgaccttggacaccggataccgttaccacaactggggacgcttggaaaacacccgcttcaaaacccacgaagtctcattgggcatgcgctaccgcttctga

SEQ ID NO: 57492 - DNA, 201 bp, Neisseria meningitidis; identical to SEQ ID NO: 39739

SEQ ID NO: 57493 - DNA, 1242 bp, Neisseria meningitidis; identical to SEQ ID NO: 46475

SEQ ID NO: 57494 - DNA, 387 bp, Neisseria meningitidis; identical to SEQ ID NO: 44178

SEQ ID NO: 57495 - DNA, 1422 bp, Neisseria meningitidis; identical to SEQ ID NO: 38131

SEQ ID NO: 57496 - DNA, 537 bp, Neisseria meningitidis; identical to SEQ ID NO: 45905

SEQ ID NO: 57497 - DNA, 855 bp, Neisseria meningitidis; identical to SEQ ID NO: 45669

SEQ ID NO: 57498 - DNA, 627 bp, Neisseria meningitidis; identical to SEQ ID NO: 39768

SEQ ID NO: 57499 - DNA, 171 bp, Neisseria meningitidis; identical to SEQ ID NO: 41813

SEQ ID NO: 57500 - DNA, 561 bp, Neisseria meningitidis; identical to SEQ ID NO: 38782

SEQ ID NO: 57501 - DNA, 1677 bp, Neisseria meningitidis; identical to SEQ ID NO: 47377

SEQ ID NO: 57502 - DNA, 957 bp, Neisseria meningitidis; identical to SEQ ID NO: 45099

SEQ ID NO: 57503 - DNA, 360 bp, Neisseria meningitidis; identical to SEQ ID NO: 39367

SEQ ID NO: 57504 - DNA, 615 bp, Neisseria meningitidis; identical to SEQ ID NO: 39264

SEQ ID NO: 57505 - DNA, 303 bp, Neisseria meningitidis; identical to SEQ ID NO: 56957

SEQ ID NO: 57506 - DNA, 1134 bp, Neisseria meningitidis; identical to SEQ ID NO: 38450

SEQ ID NO: 57507 - DNA, 645 bp, Neisseria meningitidis
gtgacccgccccgccaaaatcaatacttacacacgcatcatcgacgccagccttgcgcttttcaacgaggaaggcgagcgcaacatcagcaccaaccatattgccgcccacttgggcatcagtccgggcaacctctattaccacttccgcaacaaagacgaaatcatcgtccaactgttcaaacgttacagcgaagccctgctggaatacctcaacgaagccgtgttgccgtctgatgtggaagactccatcaattatatggcgggcatttacgacgtgatgtgggaataccgcttcctattcagcgacgtgaacaccctgcttgcacgcagtgccgaactattgggcgaacacaataccttcacccaagccaaagtctccccgctcttggtcaacctgctgacccagctcaacggtctgaacatcatccaagccgaccaaaccgccatgaacgacctcgccgtcaatatgtggatgatcacgaaatactggttcgacttcgacagctccctgcgcggccgcaccaagctgaccgaagactccaaagcacgcggcatccgccgcaccttaagcctccttcgtccttatcttttgcccgaacaccgcgagaaatacgaccggaaaatcggcaacggcaacccgtaa

SEQ ID NO: 57508 - DNA, 993 bp, Neisseria meningitidis; identical to SEQ ID NO: 45188

SEQ ID NO: 57509 - DNA, 1251 bp, Neisseria meningitidis; identical to SEQ ID NO: 47195

SEQ ID NO: 57510 - DNA, 222 bp, Neisseria meningitidis; identical to SEQ ID NO: 45776

SEQ ID NO: 57511 - DNA, 1266 bp, Neisseria meningitidis; identical to SEQ ID NO: 45103

SEQ ID NO: 57512 - DNA, 651 bp, Neisseria meningitidis; identical to SEQ ID NO: 38345

SEQ ID NO: 57513 - DNA, 1188 bp, Neisseria meningitidis
atgacagaggacgaacgtttcgcgtggttgcaactggcttttacgccctatatcggtgcggaaagtttcttgctgctgctgcaccatttcggcagtgcgcaaaatgccctgtccgcaccggcggaacaggtggcggcactgatacggcacaaacaggcgcttgaggcttggcgcaatgcggaaaaacgcgcctcggcgcggcaggcggcagaagcggcgttggaatgggaaatgcgggacggatgccgcctgatgctgcttcaggatgaagatttccccgaaatgctgacgcaggggctgaccgcgccgccggttttgtttttgcgcggcaacgtgcggctgctgcacaagccttccgccgccatcgtcggcagccgccatgccacgccgcaggcgatgcggattgccaaagatttcggcaagtcgttgggcgggcaaaatatccccgttgtgtcgggtatggcttccggtatcgatactgccgcccatcagggcgcactggaggcagaaggcggcaccatcgccgtgtgggggacgggtatagaccgcatttacccgccgtccaataaaaaccttgcctatgaaatcgccgaaaaaggattgattgtcagcgagtttcccatcggtacgcgcccgtatgccggcaactttccgcgccgcaaccgcctgattgccgcgctgtcgcaggttacgctggtggttgaagctgcgttggaatccggttcgctgattaccgccggcttggcggcagaaatggggcgcgaagtgatggcagtacccggttcgatagacaatccgcacagcaaaggctgccacaaactgattaaagacggcgcaaaattggtggaatgcctggacgacatcctgaacgaatgcccggggctattgcaaaatacgggtgcttcatcatattctataaataaggatacgcccgacacgggacgccgcgccgttcagacggcatacgccccgccgcctgccgcaaaaatgccgtctgaagcggcggcaggcggcacagcccacggcggcatactggataaaatgggtttcgaccccgtccatcccgacgtgcttgccgagcagcttgctatgcctgccgcagatttgtatgccgcactgttggaattggaattggacggcagcgttgccgcaatgcccggcggcagataccagcgtatccgaacttga

SEQ ID NO: 57514 - DNA, 1200 bp, Neisseria meningitidis; identical to SEQ ID NO: 44512

SEQ ID NO: 57515 - DNA, 1458 bp, Neisseria meningitidis; identical to SEQ ID NO: 38730

SEQ ID NO: 57516 - DNA, 618 bp, Neisseria meningitidis
atgcttgccaaaattcccgacggcgatacaataaaaccgattttccacccaaacaggacacacatgaaaaaaatcatcgcctccgcgcttatcgcaacattcgcactcgccgcctgccaagacgacacgcaggcgcggctcgaacagcagcagaaacagattgaagccctgcaacagcagctcgcacagcaggcagacgatacggtttaccaactgactcccgaagcagtcaaagacaccattcctgccgaagcacaggcaaacggcaacaacgggcaacccgttaccggtaaagacgggcagcagtatatttacgaccaatcgacaggaagctggctgctgcaaagcctagtcggcgcggcggcaggcgcgtttatcggcaacgcgctggcaaacaaattcacacgggcaggcaaccaagacagtcccgtcgcccggcgcgcgcgtgcagcctaccatcagtccgcacatcccaatgcgcgcaccagcagggatttgaacacgcgcagcctccgtgcaaaacaacaggcggcgcaggcgcagcgttaccgcccgacaacgcgcccgcccgccaattaccgccgccccgccatgcgcggtttcggcagaaggcggtaa

SEQ ID NO: 57517 - DNA, 2343 bp, Neisseria meningitidis
atgtccaagtggcggggtttcaaccgaaaaggaaatacgataaatatgcaaccgcacgctccacataccgattccaatacgctgatgctcggccgatacgccgaacgcgcctatctcgaatacgccatgagcgtggtcaaaggccgcgcgctgcctgaagtttcagacggccaaaagcccgttcagcggcgcattttgtttgcgatgcgcgatatgggtttgacggcgggggcgaagccggtgaaatcggcacgcgtggtcggtgagattttgggtaaataccatccgcacggcgacagttccgcctatgaggcgatggtgcggatggcgcaggattttaccttgcgctatcccttaatcgacggcatcggcaacttcggttcgcgcgacggcgacggtgcggcggcgatgcgttacaccgaagcgcggctcacgccgattgcggaattgctgttgtccgaaatcaatcagggaacggtggatttcgtgccgaactacgacggcgcgtttgacgagccgctgcacctgcccgcccgcctgcctatggtcttgctcaacggcgcgtcaggcatcgcggtgggcatggcgaccgagattccgtcgcacaatttgaacgaagtgacgcaggcggcgattgcgctgttgaaaaagccgacgctggaaaccgccgacctgatgcaatatattcctgcgcccgattttgccggcggcggtcaaatcatcacgccggcggacgaattgcgccggatttatgaaaccggcaagggcagcgtgcgcgtgcgtgcgcgttatgaaatcgaaaaattggcgcgcggacaatggcgcgtcatcgtaaccgagctaccgccgaacgccaattcctccaaaatccttgccgaaatcgaagagcagaccaacccgaaaccgaaagcgggcaaaaagcagctcaaccaagaccagctcaataccaaaaagctgatgctggatttaatcgaccgcgtgcgcgacgagtccgacggcgaacatcccgtgcgactggtgttcgaaccgaaatccagccgcatcgataccgataccttcatcaacacgctgatggcgcaaacttcgctggaaggcaatgtgtccatgaacttggtgatgatggggctggacaaccgccccgcgcagaaaaacctgaaaacgattttgcaggaatggctggatttccgcaccgtaaccgtaacacgccgtctgaaattccgtttgaaccaagtggaaaaacggctgcacatcctcgaaggccgtctgaaagtctttctgcacatcgacgaagtgattaaagtcatccgcgaatcagatgacccgaaagccgatttgatggcggcgttcgggctgaccgaaatccaggccgaagacattttggaaatccgcctgcgccagttggcgcgtttggaaggtttcaaactcgaaaaagaattgaacgagttgcgcgaggaacaaggccgtctgaatatccttttgagcgacgaaaacgaaaaacgcaagctgattatcaaagaaatacaggcggatatgaaacaatacggcgacgcgcgacgcacgctggtggaagaagccggacgcgccgtgttgacgcagaccactgccgacgaacccatcacgctgattctgtcggaaaaaggctggatacgcagccgcgccggacacaaccttgatttgagccaaaccacgttcaaagaaggtgaccgcctcaaacaaacccttgaaggccgcaccgttttacctgtcgtcatcttggattcatcgggcagaacctacacgctcgatgccgccgaaatccccggcggacgcggcgacggcgtgccggtttcatccttaatcgagctgcaaaacggtgcgaaacccgttgcgatgttgacaggattgccggaacaacattatttattatcaagcagcggcggctacggcttcatcgccaaactgggcgatatggtcgggcgcgtgaaagcgggcaaagtggtgatgaccgcagacagcggcgaaaccgttttgccgccggttgccgtctatgcctcctcgttcatcaaccccgactgcaaaatcattgccgccaccaatcaaaaccgcgccctcgccttccccatcggcgaattgaaaattatggcgaaaggcaaagggctgcaaatcatcggattaaacgccggcgaatcgatgacgcataccgccgtttcttccgagccggaaatcctgattgaaagcgaaggcaggcgcggcgcagcgcacaaagaccgcatccccatctccctgcttgaggcaaaacgcggcaaaaaaggcaaactattacccatatcgggcagcctgaaacagctttcttccccgaaataa

SEQ ID NO: 57518 - DNA, 1221 bp, Neisseria meningitidis
atggctgtcaacctgactgaaaaaaccgccgaacaactgcccgacatcgacggcattgccctctacaccgcccaagcaggcgtgaagaagcccgggcataccgacctgacactgattgccgtagccgccggcagcaccgtcggtgcagtcttcacgaccaaccgtttctgtgccgcgcccgtccacatcgccaaatcgcaccttttcgacgaagacggcgtgcgcgccctcatcatcaacacgggcaacgccaacgcgggtacgggcgcacagggcagaatcgatgctttggcagtgtgtgccgccgccgcccggcaaatcggctgcaaaccgaaccaggtgctgcccttctccaccggcgtgattctcgaaccgctgcccgcagacaaaatcatcgccgcgctgcccaaaatgcagcctgccttctggaacgaagcggcacgcgccatcatgaccaccgacaccgtgcccaaagccgcctcgcgcgaaggcaaggtcggcgacaaacacaccgtccgcgccacgggcatcgccaaaggctcgggcatgattcatcccaatatggcgaccatgctcggtttcatcgccaccgatgccaaagtttcccaacccgtcctccaactgatgacgcaggaaatcgccgacgaaaccttcaacaccatcaccgttgacggcgacaccagcaccaacgacagcttcgtcatcatcgccaccggcaaaaacagccaaagcgaaatcgacaacatcgccgacccgcgttacgcccaactcaaagaattgttgtgcagcctcgcgctcgaactcgcccaagccatcgtccgcgacggcgaaggtgcgaccaagttcatcaccgtccgcgtcgaaaacgccaaaacccgcgacgaagcccgccaagccgcctacgccgtggcacgttcgccgctggtcaaaaccgcctttttcgcctccgaccccaacctcggcaggctgctcgccgccatcggttatgccggcgttgccgacctcgataccgacctcgtagaaatgtatctcgacgatattttggttgccgaacacggtggacgcgccgcaagctacaccgaagcacaagggcaggcggtgatgtcgaaggccgaaatcaccgtccgcatcaagctgcatcgcggacaagccgccgccaccgtctatacctgcgacctgtcgcacggatacgtttccatcaacgccgactaccgttcctga

SEQ ID NO: 57519 - DNA, 2184 bp, Neisseria meningitidis
  misc_feature 2169, 2170, 2171, 2172, 2173: 'n' is a, c, g or t
atgaatgagggtgaagttgttttaacaccagaacaaatccaaaccttacgtggttatgcttcccgtggcgatacctatggcggttggcgttatttggctaatttgggcgaccgttatgcggataatgctgctgcaattgtcggtaaggatacaaacttaaatggtttgaatttatggatgaaaaaaggggtggaaaacctatgggatgatacggtcggtaaaaagacccgtttagagaaatttgatcgggttgcattgcaacatttcagccaatatgtagatctaattaataaaaataatggtagattacctaacactagtgaaattgagagaagttactataaagccgttacctatcatggcgtttcttctagtgcagctattgatttagttattaatcgttcacttccggatatggcggatggttattgggcattaggtttggggatagaagccgaacgtatccacaatgagcaagcagtaaataatccgaacggtagcgaaagggataatagaaagcagttaatatctgctttagataaaggatttgatggatcttttaaagagaagcattttacttttttacaatctgtgatgatggatctaacaaagttaggtgttgaatatacaatagatggttggcaaaaaattggaggttggggtaatgggataatcaatgatttatataaaagtgttgtaaaaagagagtggactggaatatttgagatcgttaataataacatcaagcaaggaaatgaagcttttaaaaatgaaatcaatagcttggttcatgatatgaaagctgctggcaaggaatttggagatgacttaaatacacagtggaataatctcactcaggctgccgaaataatctataatgacatagtagacaatactagtcaaggaatagaaaaaggtgtcaaagccattaaagaattgtctgaaaaaatgaaaaatgctgcttccgatttggctgacggttcagcagagaaagctaaacaagtagtggaagatttggctcaagccgccaaagaagcatacgaaaatgccaaatccacagccgagaaggctgctcaagcagctcgagaattttttaagggcttgcccagttttaaagatctggccgaaaaatttagagatctgttcccaaatccggaaggctggatcgatgatggtcaccaatgtttcgctccttgggttaaagaaactaaaaaacgcaatggcaaatatcatgtctacgacccccttgccctagatttggacggcgacggcatagaaaccgttgccaccaaaggcttttcaggcagcctatttgaccacaaccgcgatggcatccgcaccgccaccggttgggtttctgccgatgacggtctgcttgtgcgcgatttgaacggcaacggcatcatcgacaacggcgcggaactcttcggcgacaataccaaactggcagacggttcttttgccaaacacggctacgcagctttggccgaattggattcaaacggcgacaacatcatcaacgcggcagacgccgcattccaatccctgcgtgtatggcaggatctcaaccaggacggcatttcccaagctaatgaattgcgtacccttgaagaattgggtatccaatctttggatctcgcctataaagatgtaaataaaaatctcggcaacggtaacactttggctcagcaaggcagctacaccaaaacaaacggtacaaccgcaaaaatgggggatttacttttagcagccgacaacctgcacagccgcttcaaagacaaagtggaactcactgccgaacaggcaaaagccgccaatcttgcgggcatcggccgtctgcgcgatttgcgcgaagctgccgcattgtccggcgatttggccaatatgctgaaagcttattctgccgccgaaactaaagaagcacagttggcattgttagataatttgattcacaaatgggcggaaaccgattcgaactggggcaaaaaatcgccaatgcgactttcaaccgattggacgcaaacggctaacgggggtgtggctcttaccccgtctcaagtaacgcgactaaaacagaacgctttagtttctctttccgacaaagccaaagcagctatcgatgccgcccgcgaccgcattgccgtgcttgatgcctacacggggcaggannnnncacacacttaa

SEQ ID NO: 57520 - DNA, 591 bp, Neisseria meningitidis; identical to SEQ ID NO: 39124

SEQ ID NO: 57521 - DNA, 1467 bp, Neisseria meningitidis; identical to SEQ ID NO: 38295

SEQ ID NO: 57522 - DNA, 279 bp, Neisseria meningitidis; identical to SEQ ID NO: 45416

SEQ ID NO: 57523 - DNA, 273 bp, Neisseria meningitidis; identical to SEQ ID NO: 44450

SEQ ID NO: 57524 - DNA, 717 bp, Neisseria meningitidis; identical to SEQ ID NO: 40289

SEQ ID NO: 57525 - DNA, 1116 bp, Neisseria meningitidis
atgggcttgaaaaaggcttgtttgaccgtgttgtgtttgattgttttttgtttcgggatattttatacatttgaccgggtaaatcagggggaaaggaatgcggtttccctgctgaaggacaaactcttcaatgaagagggggaaccggtcaatctgattttctgctataccatattgcagatgaaggtggcggaaaggattatggcgcagcatccgggggagcggttttatgtggtgctgatgtctgaaaacaggaatgaaaaatacgattattatttcaatcagataaaggataaggcggagcgggcgtattttttccacctgccctacggtttgaacaaatcgtttaatttcattccgacgatggcggagctgaaggtaaagtcgatgctgctgccgaaagtcaagcggatttatttggcaagtttggaaaaagtcagcattgccgcctttttgagcacttacccggatgcggaaatcaaaacctttgacgacgggacaggcaatttaattcaaagcagcagctatttgggcgatgagttttctgtaaacgggacgatcaagcggaattttgcccggatgatgatcggagattggagcatcgccaaaacccgcaatgcttccgacgagcattacacgatattcaagggtttgaaaaacattatggacgacggccgccgcaagatgacttacctgccgctgttcgatgcgtccgaactgaagacgggggacgaaacgggcggcacggtgcggatacttttgggttcacccgacaaagagatgaaggaaatttcggaaaaggcggcaaaagatttcaacatacaatatgtcgcgccgcacccccgccaaacctacgggctttccggcgtaaccacattaaattcgccctatgtcatcgaagactatattttgcgcgaaattaagaaaaacccgcatacgaggtatgaaatttatacctttttcagcggcgcggcgttgacgatgaaggattttcccaatgtgcacgtttacgcattgaaaccggcttcccttctagaagattattggctcaagccggtgtatgccctgtttacccaatccggcatcccgattttgacatttgacgataaaaattaa

SEQ ID NO: 57526 - DNA, 450 bp, Neisseria meningitidis; identical to SEQ ID NO: 46109

SEQ ID NO: 57527 - DNA, 1050 bp, Neisseria meningitidis; identical to SEQ ID NO: 36439

SEQ ID NO: 57528 - DNA, 531 bp, Neisseria meningitidis; identical to SEQ ID NO: 39309

SEQ ID NO: 57529 - DNA, 132 bp, Neisseria meningitidis
ttgttcgatcttggcgtgtttgaacgcggcggcgtgaaaggaagggggaaatggttttcccgcgtttggcggcggtcggaggtgctgtgcctgatgtgcggcggcatattttcggtgaaattgattttatag

SEQ ID NO: 57530 - DNA, 168 bp, Neisseria meningitidis; identical to SEQ ID NO: 38803

SEQ ID NO: 57531 - DNA, 927 bp, Neisseria meningitidis; identical to SEQ ID NO: 38159

SEQ ID NO: 57532 - DNA, 210 bp, Neisseria meningitidis; identical to SEQ ID NO: 45301

SEQ ID NO: 57533 - DNA, 1173 bp, Neisseria meningitidis; identical to SEQ ID NO: 44634

SEQ ID NO: 57534 - DNA, 2088 bp, Neisseria meningitidis; identical to SEQ ID NO: 46523

SEQ ID NO: 57535 - DNA, 1428 bp, Neisseria meningitidis; identical to SEQ ID NO: 39120

SEQ ID NO: 57536 - DNA, 3435 bp, Neisseria meningitidis; identical to SEQ ID NO: 45409

SEQ ID NO: 57537 - DNA, 489 bp, Neisseria meningitidis; identical to SEQ ID NO: 38994

SEQ ID NO: 57538 - DNA, 1170 bp, Neisseria meningitidis; identical to SEQ ID NO: 39478

SEQ ID NO: 57539 - DNA, 687 bp, Neisseria meningitidis
atgtacgcatttactgccgcacagcaacagaaggcactcttctggctggtgcttttccatatcctcatcatcgccgccagcaactatctagtgcagttccccttccaaattttcggcatccacaccacttggggtgcgttttcctttcccttcatcttcctcgccaccgacctgaccgtccgcattttcggttcgcacttggcacggcggattatcttttgggtgatgttccccgcccttttgctttcctacgtcttttccgttttgttccacaacggcagttggacaggcttgggcgcactatccgaattcaacacctttgtcggacgcatcgccttggccagctttgccgcctacgcgctcggacaaatccttgatatttttgtgttcaacaaattacgtcgtctgaaagcgtggtggattgcaccgaccgcatcaaccgtcatcggcaatgcactggacacgttagtgttttttgccgttgccttttacgccagcagcgatgaatttatggcggcaaactggcagggcatcgcttttgtcgattacctgttcaaacttaccgtctgcggtctgtttttcctgcccgcctacggcgtgattctgaatctgctgacgaaaaaactgacaaccctgcaaaccaaacaggcgcaagaccgccccgcgccctcgctgcaaaatccgtaa

SEQ ID NO: 57540 - DNA, 2016 bp, Neisseria meningitidis
gtggggagttttcacggattctgtctttcagacagcattggttttcaaatgccgtctgaaaacgcaaaacgctcctgtttctttattctaaacgagaaaacaggagcattttttatgactacgccaaaaaaaaccgccaaaacttccggcaacgaagcgcgcgaacttgccgacttgagcgaagacatcggtatccgcttcaaatatccgaactcggaacgcgtgtatctgcaaggcagccgcgacgacatccgcgtgcctttgcgtgaaatccgtcaggacgacacctatacggcgcaaggcgcggaagccaacccgccgattcccgtctatgacaccagcggcgtgtacggcgatccagcggcacacatcgacctgaaacaaggcctgccgcacatccgcaccgcatggctgaacgaacgcggcgataccgaaatcctgcccaagctctccagcgaatacggcatcgaacgcgcacacgatccgaaaaccgcccatctgcgcttcaaccaaatcacccgcccgcgccgcgcgaaaagcggcggcaacgttacccagcttcactacgcgcgccgcggcatcatcacgcccgaaatggagtttgtcgccatacgcgaacgtttaaaattagacgaattgtcccaaaaatcggaatacgccaaactcttgaaacagcacgcagggcaaagtttcggcgcgaatatcccgacccatcccgaccaaatcacgcctgaattcgtgcgccgagaaattgccgccggacgcgcgattatccccgccaacatcaaccaccccgaactcgaaccgatgattatcggccgcaacttccgcgtcaaaatcaacggcaacttgggcaattccgccgtcacttccagcctgaccgaagaagtcgaaaaaatggtgtggtcgctgcgttggggcgcggacacgattatggatttgtccaccggcgcgcacatccatgaaacgcgcgaatggattatccgcaacgcgcccgtccccatcggcaccgtgccgatttaccaagcgttggaaaaaaccggcggcattgccgaagatttgacttgggatttgttccgcgacaccttaatcgagcaggcggaacaaggcgtggactatttcaccatacacgcaggcgtgttgctgcgttatgtgccgatgactgccgaccgcctcaccggcatcgtatcgcgcggcggttcgattatggcgaaatggtgtttggcacatcatcgggaaaacttcctttacacgcatttcgacgaaatctgcgaaattatgaaggcgtatgacgtatcgttcagcctcggcgacggtttgcgtcccggctgcattgccgatgccaacgacgaatcccaattcgccgagctgcacaccttgggcgaattgacctccaaagcgtggaaacacgacgtacaggtgatgatcgaaggtcccggccatgtgccgctgcaacgcgtcaaagaaaatatgaccgaagagttgcaacactgttttgaagcaccgttttacaccctcggcccgctcgttaccgacatcgcccccggctacgaccacatcacctcgggcataggcgctgccaatatcggctggtacggcacggcgatgctctgttacgttacccccaaagaacatttgggactgcccgacaaagaagacgtgcgtaccggcatcatcacctacaaactcgccgcccacgccgccgacctcgccaaaggctggccgggcgcacagttgcgcgacaacgccctgagcaaggcgcgtttcgagttccgctggcgcgaccagttccgcctaagcctcgaccccgaacgcgccgaaagcttccacgacgaaaccctgcccgccgaaggcgcgaaaatcgcccacttctgttcgatgtgcggccccaaattctgctcgatgaaaatcacgcaggaagtgcgcgactacgccgacaagcaaaaagcccaacggcagggcatggaggaaaaagcggtcgagttcgtcaaaaaaggagcgaagatttacagctaa

SEQ ID NO: 57541 - DNA, 216 bp, Neisseria meningitidis
atgatggaaacccttatcctcgacatcggcggcatgagctgcggcggctgcgtcaaaagcgttacccggatattggaaggcgtaaaaggcgtggcaagcgtcgaagtcagccttgaaaacaaaagtgcgaccgtcggatacgaccccgcgcaaaccgatgcaggggcgttgattgaagccgttgaagacggcggctatgatgccgcgttgaaataa

SEQ ID NO: 57542 - DNA, 1431 bp, Neisseria meningitidis; identical to SEQ ID NO: 45808

SEQ ID NO: 57543 - DNA, 408 bp, Neisseria meningitidis; identical to SEQ ID NO: 44814

SEQ ID NO: 57544 - DNA, 1584 bp, Neisseria meningitidis; identical to SEQ ID NO: 45042

SEQ ID NO: 57545 - DNA, 573 bp, Neisseria meningitidis; identical to SEQ ID NO: 47576

SEQ ID NO: 57546 - DNA, 249 bp, Neisseria meningitidis; identical to SEQ ID NO: 38918

SEQ ID NO: 57547 - DNA, 360 bp, Neisseria meningitidis; identical to SEQ ID NO: 44577

SEQ ID NO: 57548 - DNA, 1311 bp, Neisseria meningitidis
gtgctgactttagatgcgtttgagcaatgcttgaaggattgttttcctcaaggtctgaatggaaaaaaaacagcggtggcattaagcggcggcttggattccgtggtcttgctgcacctgcttgtccgcgctgggaaacgggcaggatttgtgccggaggcattgcatatccatcacggcttgagcccccgtgccgacgattgggcggatttctgtcaaaactattgcgatatgctaggggtggggctggaaacggttaaggtctgcgtggaaaaaaacggtttgggcatcgaagcggcggcgcggcaaaagcgttatgccgcgtttgccgaaaaaggctttgacattttggcgttggcgcaccacagggacgatcaaatcgaaacctttatgctggcggtcgcgcgcggcggcggtttgcgcgctttggcggctatgcccgccgtccgcccttttggggaaaaaggcatcatttggcggcccttgctgcctttttcgcgccaagatatatgggattatgcccaaaaacacggtttgccgaatatcgaggatgaaagcaataccgatacggcttatttgcgaaaccgcttccggcaccgtattttgcccgaactttcggcgcagattccccatttcgggcgacatgtgctgaacaatgtccgcgctttgcaggaagatttggctttgttggacgaggtcgtcgttcaggactgccgttgggtttgcggggccggttatttcgatacggcgcggtggctgacgttttccccgcgccggaaaacccatattttgcggcattttctgaaggaaaacggcattcccgtgccgaatcagaatgcccttgccgacattgcccgggttttgacggaggcaaaaaccggacgttggaacttgcaaggctttgaattgcatcattatgcaggcaggctgtttgtgttccgacaggaaaaaacggataaactgcggtttttgaaagacaggcagataagcggaaatttaagggaaatattgacggggcagggatttgttttaaaacgtcatccgtttgggcttcctgagcatcttttggagcaggacggaattttgaggacggtagcggtatcggatacgttggctgtcggcggcatccataaggatgtgaaaaaaatccttcaggggaaacgggttttgcctgtcctgcgcccaatttggccgcttgttgccgacagcggaaaccgtccattggcgttggcaaactgttgtgcggatttccaatactcggtttcagacggcattttgcccgtccatcctgactttcccattttattttga

SEQ ID NO: 57549 - DNA, 687 bp, Neisseria meningitidis; identical to SEQ ID NO: 38997

SEQ ID NO: 57550 - DNA, 837 bp, Neisseria meningitidis; identical to SEQ ID NO: 44447

SEQ ID NO: 57551 - DNA, 1236 bp, Neisseria meningitidis; identical to SEQ ID NO: 39525

SEQ ID NO: 57552 - DNA, 759 bp, Neisseria meningitidis; identical to SEQ ID NO: 39453

SEQ ID NO: 57553 - DNA, 1647 bp, Neisseria meningitidis; identical to SEQ ID NO: 44191

SEQ ID NO: 57554 - DNA, 408 bp, Neisseria meningitidis
atgaaaattcgggcaataaaatatacggcaatggctgcgttgcttgcctttacggttgcaggctgccagttggcgggttggtatgagtgttcgtccctgtccggctggtgtaagccgagaaaaccggctgccatcgatttttgggacattggcggcgagagtccgccgtctttagaggactacgagataccgctttcagacggcaatcgttccgtcagggcaaacgaatatgaatccgcacaacaatcttacttttacaggaaaatagggaagtttgaagcctgcgggttggattggcgtacgcgtgacggcaaacctttgattgagacgttcaaacaggaaggatttgactgcttggaaaagcaggggttgcggcgcaacggtctgtccgagcgcgtccgatggtaa

SEQ ID NO: 57555 - DNA, 549 bp, Neisseria meningitidis
ttgacaggccgtctgaagacgaaacgcggaacatcggatattcaaggaactttaatgaaaaagaacatattggaattttgggtcggactgttcgtcctgattggcgcggcggcggttgcctttctcgctttccgcgtggccggcggtgcggcgttcggcggttcggacaaaacttacgccgtttatgccgatttcggcgacatcggcggtttgaaggtcaatgcccccgtcaaatccgcaggcgtattggtcgggcgcgtcggcgctatcggacttgacccgaaatcctatcaggcgagggtgcgcctcgatttggacggcaagtatcagttcagcagcgacgtttccgcgcaaatcctgacttcgggacttttgggcgagcagtacatcgggctgcagcagggcggcgatacggaaaaccttgctgccggcgacaccatctccgtaaccagttctgcaatggttctggaaaaccttatcggcaaattcatgacgagttttgccgagaaaaatgccgacggcggcaatgcggaaaaagccgccgaataa

SEQ ID NO: 57556 - DNA, 1197 bp, Neisseria meningitidis; identical to SEQ ID NO: 44474

SEQ ID NO: 57557 - DNA, 1104 bp, Neisseria meningitidis; identical to SEQ ID NO: 44300

SEQ ID NO: 57558 - DNA, 645 bp, Neisseria meningitidis; identical to SEQ ID NO: 41316

SEQ ID NO: 57559 - DNA, 357 bp, Neisseria meningitidis; identical to SEQ ID NO: 39963

SEQ ID NO: 57560 - DNA, 201 bp, Neisseria meningitidis; identical to SEQ ID NO: 45501

SEQ ID NO: 57561 - DNA, 420 bp, Neisseria meningitidis; identical to SEQ ID NO: 55512

SEQ ID NO: 57562 - DNA, 642 bp, Neisseria meningitidis
atgaagataacacactgcaaattaaagaaaaaagtacagaaagaactgctccgtttttttgtgctggaagttaccgcccgttctgccgccgatattttgggtatccatcccaattcggcagtactgttctaccgtaaaatccgcacggttatcaaccatcatttggccttggctgccgatgaggtttttgagggccctgtcgagccggacgaaagcgatttcggcggacggcgtaaaggcagacgtggtcgcggtgcagcaggaaaagtggttgttttcggcattctgaaacgcaacggacgggtctataccgttgtggtggataatgccaagtctgaaacgttactccctgtcatcaaaaagaaaatcatgccggatagtattgtttataccgatagtctgagcagctacgacaagttggacgtgagcggttttatccattaccgcatcaaccattccaaggaatttgcagaccgtcaaaaccacattaacggcattgagaacttttggaatcaggcaaaacgcgtcttgcgaaaatacaacggaatcgatcgtaaatctttcccgctgttcttgaaagaatgcgaatttcgatttaacttcggcacaccgtctcaacagcttaaaatcctgcaaaaatga

SEQ ID NO: 57563 - DNA, 873 bp, Neisseria meningitidis; identical to SEQ ID NO: 38119

SEQ ID NO: 57564 - DNA, 1026 bp, Neisseria meningitidis; identical to SEQ ID NO: 39757

SEQ ID NO: 57565 - DNA, 540 bp, Neisseria meningitidis; identical to SEQ ID NO: 44661

SEQ ID NO: 57566 - DNA, 1434 bp, Neisseria meningitidis; identical to SEQ ID NO: 44217

SEQ ID NO: 57567 - DNA, 453 bp, Neisseria meningitidis; identical to SEQ ID NO: 45863

SEQ ID NO: 57568 - DNA, 957 bp, Neisseria meningitidis; identical to SEQ ID NO: 39269

SEQ ID NO: 57569 - DNA, 420 bp, Neisseria meningitidis; identical to SEQ ID NO: 44898

SEQ ID NO: 57570 - DNA, 564 bp, Neisseria meningitidis; identical to SEQ ID NO: 36686

SEQ ID NO: 57571 - DNA, 1419 bp, Neisseria meningitidis
atgaatattcacgccctgctctccaaacaatggacgctgccgccattcctgccgaaacggctgctgctgtccctgctgatactgctggcccccaatgcgatgttttgggttttggcactgctgaccgccaccgcccgcccgattgtcaatttggactaccttcccgccgcgctgctgatcaccctgccttggcgtttcgtcaaaattgccggcgtattggcgttttggctggcagttttgtttgacgggctgatgatggtgatccagcttttcccttttatggacctcatcggtgccatcaacctcgtccccttcatcctgaccgcccccgccccttatcagataatgaccgggctgttgctgctgtatatgctggcgatgccgtttgtgttgcagaaagccgccgccaaaaccgacttccggcacattgccgtctgcgccgccgttgtggcggcagccggctatttcaccggccatttgagttactacgaccggggtcggatggccaatatcttcggcgcaaacaacttctactacgccaaaagtcaggcgatgctctacaccgtcagccagaatgccgactttattaccgccggcctggtcgatcccgtcttcctccccttgggcaatcaacagcgtgccgccacgcatctgaacgagccgaaatctcaaaaaatcctctttatcgtcgccgaatcttgggggctgccggccaatcccgaacttcaaaacgccacttttgccaaactgctggcgcaaaaagaccgtttttcggtttgggaaagcggcagttttccctttatcggcgcgacggtcgaaggcgaaatgcgcgaactgtgcgcctacggcggtttgcgcgggttcgcactgcgccgcgcgcccgacgaaaaatttgcccgctgcctccccaaccgtttgaaacaagaaggttacgccacctttgcgatgcacggcgcgggcagttcgctttacgaccgcttcagctggtatccgagggcgggctttcaagaaatcaaaaccgccgaaaacctgatcggtaaaaaaacctgcgccattttcggcggcgtgtgcgacagcgagctgttcggcgaagtgtcggcatttttcaaaaaacacgacaagggactgttttactggatgacgctgaccagccacgccgactatcccgaatccgacattttcaaccacaggctcaaatgcaccgaatacggcctgcccgccgaaaccgacctctgccgcaacttcagcctgcacacccaattcttcgaccaactggcggatttgatccaacgccccgaaatgaaaggcacggaagtcatcatcgtcggcgaccatccgccgcccgtcggcaacctcaatgaaaccttccgctacctcaaacaggggcacgtcgcctggctgcacttcaaaatcaaataa

SEQ ID NO: 57572 - DNA, 723 bp, Neisseria meningitidis; identical to SEQ ID NO: 44930

SEQ ID NO: 57573 - DNA, 864 bp, Neisseria meningitidis
  misc_feature 845, 846, 847, 848, 849: 'n' is a, c, g or t
atgctgacgtttatcggactgctgattatcggggtcatcgtatggttgctgctgacggaaaaagtgtcgcccatcatcgcattaatcttggtgccgctgtttggggcgttgctggcggggtttgatgtatcccaattaaaagaattttattcgggcggcaccaaatcggtgatgcagattgtgattatgtttatgttttccattttgttttttggaatcatgaacgatgtggggctgttccgtccgatgataggcggtttgattaagctgactcggggtaatatcgtggcagtgagtgtggggacggtcttggtgtcggtggtggcgcagttggacggggcgggtgcgacgacgtttttattggtcgtccccgcccttttgccgctttacaagcgtctgcatatgaatccttacctgctgtttttgctgctgacttccagtgcgggattgattaaccttctgccgtggggcgggccgactgggcgggttgcaagcgtgttgggcgcagatgtgggcgaattgtataaacctttgttgacggtgcaaattatcggtgtagtgtttatccttgcgctgtccctgcttttgggtgtgcgtgaaaaaaggcggattgtccgggagttgggcgcgttgcccgccgtggcggatttgataaagccggtgcctttgtcggaagaagaacaaaaattggcgcgtccgaaactgttttggtggaatgtcctgctgtttttggcggcgatgagcctgcttttttcgggcatcttcccgccgggttatgtatttatgctggctgcaacggcggcgttgcttttgaattaccgcagcccgcaggaacagatggagcnnnnncacacacttaattaa

SEQ ID NO: 57574 - DNA, 225 bp, Neisseria meningitidis; identical to SEQ ID NO: 44674

SEQ ID NO: 57575 - DNA, 609 bp, Neisseria meningitidis; identical to SEQ ID NO: 39049

SEQ ID NO: 57576 - DNA, 513 bp, Neisseria meningitidis; identical to SEQ ID NO: 44775

SEQ ID NO: 57577 - DNA, 2385 bp, Neisseria meningitidis; identical to SEQ ID NO: 47317

SEQ ID NO: 57578 - DNA, 1242 bp, Neisseria meningitidis; identical to SEQ ID NO: 46031

SEQ ID NO: 57579 - DNA, 924 bp, Neisseria meningitidis; identical to SEQ ID NO: 46119

SEQ ID NO: 57580 - DNA, 1008 bp, Neisseria meningitidis
atgagcaccttcttccggcaaaccgcccaagccatgattgccaaacacatcgaccgtttcccgctattgaagttggaccaggtgattgattggcagccgatcgaacaatacctgaaccgtcaaaaaacccgttaccttagagaccaccgcggccgtcccgcctatcccctgttgtccatgttcaaagccgtcctgctcggacaatggaacagcctctccgatcccgaactcgaacacagcctcatcacccgcatcgatttcaacctgttttgccgtttcgacgaactgatcatccccgattacagtaccttatgccgctaccgcaactggctggcgcaagacgacaccctgtccgaattactcaaactgattaactgccaactgaccgaaaaaggcctaaaaatagagaaagcatccgccgccgtcgttgatgccaccattatccagaccgccggcagcaaacagcgtcaggccatagaagttgacgaagaaggacaaatcagcggtcaaaccacaccgagtaaggacagcgatgcccgttggataaagaaaaacggcctctacaaactcggttacaaacaacatacccgtaccgatgcagaaggctatatcgagaaactgcacattactcccgccaatgcccatgagtgcaaacacctgtcgccgttgttggaaggactgcccaaaggtacgaccgtctatgccgacaaaggctatgacagtgcggaaaaccggcaacatctggaagaacatcagttgcaggacggcattatgcgcaaagcctgccgcaaccgtccgctgacggaaacgcaaaccaaacgcaaccggtatttgtcgaagacccgttatgtggtcgaacagagcttcggtacgctgcaccgtaaattccgctatgcgcggtcaacctatttcggactgattaaagtgagtgcgcaaagccacctgaaagcgatgtgtttgaacctgttgaaagcggccaacaggttaagtgcgcccgctgccgcctaa

SEQ ID NO: 57581 - DNA, 1443 bp, Neisseria meningitidis; identical to SEQ ID NO: 44365

SEQ ID NO: 57582 - DNA, 408 bp, Neisseria meningitidis; identical to SEQ ID NO: 38369

SEQ ID NO: 57583 - DNA, 237 bp, Neisseria meningitidis; identical to SEQ ID NO: 44905

SEQ ID NO: 57584 - DNA, 465 bp, Neisseria meningitidis; identical to SEQ ID NO: 39709

SEQ ID NO: 57585 - DNA, 2775 bp, Neisseria meningitidis; identical to SEQ ID NO: 38521

SEQ ID NO: 57586 - DNA, 1116 bp, Neisseria meningitidis; identical to SEQ ID NO: 44370

SEQ ID NO: 57587 - DNA, 345 bp, Neisseria meningitidis; identical to SEQ ID NO: 38355

SEQ ID NO: 57588 - DNA, 777 bp, Neisseria meningitidis; identical to SEQ ID NO: 44279

SEQ ID NO: 57589 - DNA, 1566 bp, Neisseria meningitidis
atggaaaaatttcgcatgaatttatttactcggaattttctgatagcaacaccgattttaatgtgttgttctcttagttttgcagaaccagcaagaatagatgatcgaataataaaatttaggccatctaaatcaaagttttttgaatctacaggatatagaaaaatcaataatgaattttctaaattcacagaagcggcaaatgtcgaacatatccccacgggcgcaaaagcccgaatcaacgcaaagataaccgccagcgtatcccgcgccgccgtcttgtcaggagtcggcaaacttgtccgccaaggcgcgaaattcagcacaagggcagtcccttatgtagggacagcccttttagcccacgacgtatacgaaactttcaaagaagacatacaggcacgaggctaccaatacgacaccgaaaccgacaaatttgtaaaaggctacgaatatagtaattgcctttggtacgaagacgaaagacgtattaatagaacctatggctgctacggcgttgacagttccattatgcgccttatgtccgattacagcagattccccgaagtcaaagaattgatggaaagccaaatggaaaggcttgcccgtccgtattgggaaaagttaaggaatcgtcctgatatgtattattttaaaaactacaattttaaacgttgttatttcggattgaacggcggagattgtttagttgctaaaggtgatgatggtagaacttttatcagtttctcacttcaaggaaattcaaaatacaaagaagaaatggatgccaaaaagctggaagagattttatcgttgaaagtcgatgccaatcccgacaaatacataaaggcaaccggatatcccggttattccgaaaaagtagaagtcgcacccggaacaaaagtgaatatgggacccgtcacggacaggaacgggaatcccgttcaggttgtcgcaacattcggcagggattcgcaaggcaacaccacagtggatgttcaagtaattccgcgtcccgacttaacccccggaagcgcggaagcgccgaacgcacagccgctgcccgaagtatcgcccgctgaaaaccccgcaaacaacccggcccccaatgagaaccccggcacgcgtcccaatcccgaacccgaccccgatttgaatcccgatgcaaatcccgatacggacggacagcccggaacaagccccgattccccggccgttccggaccgcccaaacggcagggacggcaaagatggcgggcttttgtgcaaattcttccccgacattctagcttgcgacaggctgcccgagcccaatccggcagaagatttaaatctgccgtctgaaaccgtcaatgtagagtttaagaaatccggaatctttcaagattccgcacagtgtcccgcccccgttacgttcactataaccgtgcttgattcaagcaagcagttcgcgttcagctttgagaacgcatgtaccatagccgaacggctaaggtacatgcttctcgcccttgcttgggcggttgccgcctttttttgtatccgcacagtatcccgtgaagtctag

SEQ ID NO: 57590 - DNA, 405 bp, Neisseria meningitidis; identical to SEQ ID NO: 38321

SEQ ID NO: 57591 - DNA, 783 bp, Neisseria meningitidis; identical to SEQ ID NO: 44471

SEQ ID NO: 57592 - DNA, 546 bp, Neisseria meningitidis; identical to SEQ ID NO: 39943

SEQ ID NO: 57593 - DNA, 1152 bp, Neisseria meningitidis; identical to SEQ ID NO: 44669

SEQ ID NO: 57594 - DNA, 777 bp, Neisseria meningitidis; identical to SEQ ID NO: 45554

SEQ ID NO: 57595 - DNA, 321 bp, Neisseria meningitidis; identical to SEQ ID NO: 38269

SEQ ID NO: 57596 - DNA, 801 bp, Neisseria meningitidis; identical to SEQ ID NO: 44476

SEQ ID NO: 57597 - DNA, 702 bp, Neisseria meningitidis; identical to SEQ ID NO: 44773

SEQ ID NO: 57598 - DNA, 1005 bp, Neisseria meningitidis; identical to SEQ ID NO: 56642

SEQ ID NO: 57599 - DNA, 264 bp, Neisseria meningitidis; identical to SEQ ID NO: 37542

SEQ ID NO: 57600 - DNA, 279 bp, Neisseria meningitidis; identical to SEQ ID NO: 38216

SEQ ID NO: 57601 - DNA, 540 bp, Neisseria meningitidis; identical to SEQ ID NO: 38423

SEQ ID NO: 57602 - DNA, 417 bp, Neisseria meningitidis; identical to SEQ ID NO: 45823

SEQ ID NO: 57603 - DNA, 945 bp, Neisseria meningitidis; identical to SEQ ID NO: 39666

SEQ ID NO: 57604 - DNA, 1641 bp, Neisseria meningitidis
atgactgacaacagccctcctccaaacggacacgcccaagcacacgtccgcaaaaacaacaccttcctctctgccgtctggctggttccgctgatcgcgctgattgccggcggctggctgtggattaaggaaatccgcaacagggggcctgtggttacgctcttgatggacagcgcggaaggcattgaggtcaacaatacggtcatcaaagtattgagcatcgatgtcggacgcgttacccgaatcaaactgcgcgacgaccaaaaaggcgtggaagtaaccgcccaactcaatgcggacgtatccggcctcatccgcagcgatacccagttttgggtggtcaagccgcgtatcgaccaaagcggcgtaaccggtttgggtacgctgctttcgggttcgtacatcgcttttacacccggcaaaagcgacgaggcaaaagacgtgttccaagtgcaggacattccgcccgttaccgccatcgggcaaagcgggctgcgcttgaatttgattggtaaaaacgaccgcatcctcaacgtcaacagccctgttttgtatgaaaactttatggtcgggcaagtcgaaagcgcgcatttcgacccgtccgaccaaagcgtgcattacaccatcttcatccaaagccccaacgacaaactgattcattccgccagccgtttttggctggaaagcggcatcaatatcgaaaccacaggcagcggcatcaaactcaattccgcccctctgcctgccctgctgtcgggcgcgatttcatttgattcgccgaaaaccaaaaacagtaaaaacgtcaaaagcgaagacagcttcacgctttacgacagccgcagcgaagtcgccaacctgcctgacgaccgctcgctgtactacaccgcgtttttcaaacaatccgtgcgcggcctgaccgtcggttcgcccgtcgagtacaaagggctgaatgtcggcgtggtttccgatgtcccttattttgaccgcaacgacagcctgcatttatttgaaaacggctggattcccgtacgcatccgcatcgagccttcccgtttggaaatcaatgccgacgaacaaagcaaagagcattggaaacaacaatttcagacggctttaaacaaaggcctgaccgccaccatctccagcaacaacctgctgaccggcagcaaaatgattgagttgaacgatcagccttcgtcttcgcccaagctgcgaccgcataccgtttatgcaggcgataccgtcatcgctacacaaggcggcggtttggacgacttacaggtcaaattggcggatttgctggacaaattcggcaaactgcctttagacaaaaccgtttcaggtttaaacgcttcgctcgccgaactcaaatccacgctgaaatccattaacacgctaagcaataatccgcaaacgcaaaacattccgaacgagttgaaccaaaccctgaaagagttgcgcacaaccctgcaaggcgtatcgccgcaatcgcctatctacggcgacgtacaaaatacgctgcaaagtttggacaaaaccttaaaagacgttcaacccgtcattaacactttgaaagaaaaacccaacgcgctgattttcaacagcagcagcaaagaccctatcccgaaaggaagccgataa

SEQ ID NO: 57605 - DNA, 1188 bp, Neisseria meningitidis; identical to SEQ ID NO: 49497

SEQ ID NO: 57606 - DNA, 900 bp, Neisseria meningitidis
  misc_feature 885, 886, 887, 888, 889: 'n' is a, c, g or t
atgattgctaaacacatcgaccgtttccctctattgaagttggatcaagtgattgattggcagccgatcgaacaatacctgaatcgtcaaaaaacccgttaccttcgagaccaccgcggccgtcctgcctatcccctgctgtccatgttcaaagccatcctgcccggacaatggcacagcctctccgatcccgaactcgaacacagcctcattacccgcatcgatttcaacctgttttgccgttttgacgaactaagcatccccgattacagcaccttatgccgttaccgcaactggctggcgcaagacgacaccctgtccgaattgctggaactgattaaccgccaactgaccgaaaaaggcctaaaaatagagaaagcatccgccgtcgttggcgccaccattattcaaaccgccggcagcaaacagcgccaggccatagaagtcgatgaagaaggacaagtcagcggccaaaccacaccgagtaaggacagcgatgcccgttggataaagaaaaacggcctctacaaactcggttacaaacaacatacccgtaccgatgcggaaggctatatcgagaaactgcacatcacccccgccaatgcccatgagtgcaaacacctgccgccgttgttagaagggatagctgaaggtacgaccgtctatgccgacaaaggctatgacagtgcggaaaaccggcaacatctggaagaacatcagttgcaggacggcattatgcgcaaagcctgccgcaaccgtccgctgtcggaaacgcaaaccaaacgcaaccggtatttatcgaagacccgttatgtggtcgaacaaagcttcggtacgctgcaccgtaaattccgctatgcgcggtcaacctatttcggactgatnnnnncacacacttaa

SEQ ID NO: 57607 - DNA, 141 bp, Neisseria meningitidis; identical to SEQ ID NO: 44879

SEQ ID NO: 57608 - DNA, 315 bp, Neisseria meningitidis; identical to SEQ ID NO: 38226

SEQ ID NO: 57609 - DNA, 498 bp, Neisseria meningitidis; identical to SEQ ID NO: 39756

SEQ ID NO: 57610 - DNA, 807 bp, Neisseria meningitidis
atgaatccagcccccaaaaaaccttctcttctcttctcttctcttctcttctcttctcttctcttctcttctcttctcttctcttccgcagcgcaggcggcaagtgaagacagcgggcacggcccgtattatgtgcaggcggatttagcttatgccgccgaacgtattacccacgattatccgaaagcaaccggtgcaaacaacacaagcacagtaagcgattatttcagaaacatccgtgcgcattccatccacccccgggtgtcggtcggctacgatttcggcgactggagaatagcggcagattatgccagttacagaaaatggaacaacaataaatattccgtcaacacaaaagagttggaaaacaagcataacaataagaaagacctgaagacggaaaatcaggaaaacggtacattccacgccgcttcttctctcggcttatccgccatttacgatttcaaactcaacgataaattcaaaccctatatcggtgcgcgcgtcgcctacggacacgtcagacacagcatcgattcgaccaaaaaaacaacagaggttgttacctccacccatggtggtgctgacacaaaacctacgatttataatggggaaagtacgcaaaacgcctatcacgaaagccacagcatccgccgcttgggtcttggtgtcgtcgccggtgtcggtttcgacatcacgcccaagctgaccctggacaccggataccgttaccacaactggggacgcttggaaaacacccgcttcaaaacccacgaagtctcattgggcatgcgctaccacttctga

SEQ ID NO: 57611 - DNA, 855 bp, Neisseria meningitidis; identical to SEQ ID NO: 46280

SEQ ID NO: 57612 - DNA, 1074 bp, Neisseria meningitidis
  misc_feature 8, 9, 10, 11, 12: 'n' is a, c, g or t
gtgtgtgnnnnnggcggtttgattaagctgactcggggtaatatcgtggcagtgagtgtggggacggtcttggtgtcggtggtggcgcagttggacggggcgggtgcgacgacgtttttattggtcgtccccgcccttttgccgctttacaagcgtctgcatatgaatccttacctgctgtttttgctgctgacttccagtgcgggattgattaaccttctgccgtggggcgggccgactgggcgggttgcaagcgtgttgggcgcagatgtgggcgaattgtataaacctttgttgacggtgcaaattatcggtgtagtgtttatccttgcgctgtccctgcttttgggtgtgcgtgaaaaaaggcggattgtccgggagttgggcgcgttgcccgccgtggcggatttgataaagccggtgcctttgtcggaagaagaacaaaaattggcgcgtccgaaactgttttggtggaatgtcctgctgtttttggcggcgatgagcctgcttttttcgggcatcttcccgccgggttatgtatttatgctggctgcaacggcggcgttgcttttgaattaccgcagcccgcaggaacagatggagcggatttatgcccacgccggcggcgcggtgatgatggcgtccattattttggcggcaggtacgtttttggggattttgaagggtgcggggatgttggacgcgatttccaaagaccttgtgcatatcctgccggacgcgctgctgccttatctgcatattgccatcggtgtgttgggcattccgcttgagttggttttgagtacggacgcttattatttcggactgtttccgattgtggagcagattacctcgcaggcgggcgtggcgcctgaagcagcaggttatgcgatgttgatcggcagtatcgtcggcacttttgttacgccgctttcgccggctttgtggatgggcttgggtttggcgaaattgtcgatgggcaaacacatccgttattcgtttttctgggcgtggggtttgtcgctggcgatattggccagttcgatagcggcaggaatcgtgcctctgccgtaa

SEQ ID NO: 57613 - DNA, 3012 bp, Neisseria meningitidis
atgaacgaacaaaatcagctgaaggtaaagcagaagggttcatattcaaccttaagggaaaaagacagggaacgcaaatttatctataataaaggctggcagggtggaggctctgtctttttcgacaataccgatacccttgtttcccgacaaagcggtactgccgtttttggcacagccacctacctgccgccctacggcaaggtttccggttttgatgccaacgctctgaaagagcgcaacaatgccgtcgattggattcataccacccgggccgggctggcaggctacgcctacaccaacgtcatatgcagaagccaccaatgcccccaacttgtctataaaacccgattttccttcgataatcccgacttggcaaaaagaggaggcgggctggataggcacacagagccaagccgcgacaattcgctcatttacaaattgaaggatcatccatggttgggcgtatctttcaatttgggcagcgagaataccgtcaaaaatagccaatcatccagcagattgatatcttcttttagtgaagacaataataatcaaaccatcgtctctacgacagaaaaccaccctatttcccttggcgacaggcagcgcgaacataccgccgtggcctattatctgaacgccaaactgcacctgctggataaaaaagggattaaagatatcaccggcaaaacagtgcggttgggtgtcttgaagccgagcatcgatgtgaagacacaaaggacggggcttggcggcttgctaggttttcatgctaagtgggacattaaagataccgggcagattccggtcgagctcggcctgccgcaaatcaaagcaggccgctgcatcaacaaaccgaaccccaatcccaaagcccaagccctttcgccggcactgactgcccccgcgctgtggttcggacctgtgcaaaatggcaaggtgcagatgtattccgcttcggtttccacctaccccgacagttcgagcagccaaattttcctgcaaaacctttcccgcaaggatgacacaagcaaaccgggccgctattccctcaaacccttgagtacgtcggagattaaaagtaaagagccgactttcacagggcggcaaaccgtcatccgattggatggcggcgtacagcagattaaacttcaaggcaatgaggtcactagttttaatgtaaacaacggcaacaacactttcggcattgttaaggacttgggcgtcgatcctgatgccagcgagtggaaaaaagtgctgctgccttggacggttcgtgcttccaatgatgacaatcaatttaaaacaattaaccaacaacttaaccaacaaaaaatccaatacagccaaagataccgcatccgcgacaacggcaatcgcgatttgggcgacatcgtcaacagccccatcgtggcggtcggcgagtatttggctacttccgccaacgacgggatggtgcatatcttcaaacaaagcggcggggacaagcgcagctacaatctgaagctcagctacatccccggcacgatgccgcgccaatattttgataacgacacttccgctctcaaagactccaccctcgccaaagagctgcgcacctttgccgaaaaaggctatgtgggcgaccgctacggcgtggacggcggctttgtcttgcgccgcattacagatgaccaagacaagcaaaaacatttctttatgtttggtgcgatgggcctgggcggcagaggcgcgtatgccttggatttgaccaaagccgacagcaataacccgaccgccgtttccctgtttgatgtcaaaaatggcaataatggcaataatggcaataatagcaataatagcaataatagcgtgcaattaggctacaccgtcggcacgccgcaaatcggcaaaacccacaacggcaaatacgccgccttcctcgcctccggttatgcgactaaagacattaacaacggcgacaataaaaccgcgctgtatgtgtatgatttggaaagcaacaacggtacgccgattgcaaaaatcgaagtacccaacggcaagggcgggctttcgtcccccacgctggtggataaagatttggacggcacggttgatatcgcctatgccggcgatcgcggcggcagtatgtaccgctttgatttaagcggcaacaacccgaccagttggtctgcacacgccattttcagcggcaacaaaccgattacttccgcgcccgccatttcccaactgaaagacaaacgcgtggttatcttcggcacgggcagcgatttgagtgaagaggatgtggacagcaaagaaatccaacacgtttacggtatttttgacaatgacacagacacgggtacggcgcaagacgggcagggcaaagggctgctcgagcaaaagctggaaaaagacaaagacggcaaaacgctgtttttaagcgactacaaaaggtctgacggctcgggcgacaagggctgggtagtgaaattggaagccggacagcgcgttaccgtcaaaccgaccgtggtattgcgtaccgcctttgtaaccatccataaatatacgggtaatgacaaatgcggcgcggaaaccgccattttgggcatcaataccgccgacggcggcaagctgaccaagaaaagcgcgcgcccgattgtgccggccgacaatacggctgtcgcgcaatattccggtcataagcaaaccgccaaaggcaaatccatccctataggttgtatggaaaaaaacaatggaatcgtctgcccgaacggatatgtttacgacaaaccggttaatgtgcgttatctggatgaaaagaaaacagacggattttcaacaacggcagacggcgatgcgggcggcagcggaacattcaaagagggtaaaaaacccgcccgcaataaccggtgcttctccggaaaaggtgtgcgcaccctgctgatgaacgatttggacagcttggacattaccggcccgacgtgcggtatgaaacgaatcagctggcgtgaagtcttctactga

SEQ ID NO: 57614 - DNA, 459 bp, Neisseria meningitidis; identical to SEQ ID NO: 45469

SEQ ID NO: 57615 - DNA, 2007 bp, Neisseria meningitidis; identical to SEQ ID NO: 45447

SEQ ID NO: 57616 - DNA, 600 bp, Neisseria meningitidis; identical to SEQ ID NO: 39827

SEQ ID NO: 57617 - DNA, 1170 bp, Neisseria meningitidis; identical to SEQ ID NO: 44714

SEQ ID NO: 57618 - DNA, 366 bp, Neisseria meningitidis; identical to SEQ ID NO: 44550

SEQ ID NO: 57619 - DNA, 609 bp, Neisseria meningitidis; identical to SEQ ID NO: 45110

SEQ ID NO: 57620 - DNA, 1284 bp, Neisseria meningitidis; identical to SEQ ID NO: 45206

SEQ ID NO: 57621 - DNA, 567 bp, Neisseria meningitidis; identical to SEQ ID NO: 44795

SEQ ID NO: 57622 - DNA, 483 bp, Neisseria meningitidis
atgaaatacttgaatcttgccacaatcgcccttgccgccacatttgccgcacataccgcctcggcagacgaacttgccggatggaaagacggtaccgcgcaaagcctgcaatcgctcaaagcccccgtacgcatcgtcaacctgtgggcgacttggtgcggcccgtgccgaaaagagatgcccgccatgtccaaatggtacaaagcgcagaaaaaaggcagcgtcgatatggtcggcatcgcgctcgacacatccgacaatatcggcaacttcctcaaacaaactcctgtttcctacccgatttggcgttacaccggggcgaacagccgaaactttatgaaaacctacggaaacactgtcggcgtactgccctttaccgtcgtcgaagcaccgaaatgcggatacaggcagaccattaccggggaagtgaacgaaaaaagcctgaccgaagccgtcaaactcgcccattcaaaatgccgttaa

SEQ ID NO: 57623 - DNA, 285 bp, Neisseria meningitidis; identical to SEQ ID NO: 44271

SEQ ID NO: 57624 - DNA, 192 bp, Neisseria meningitidis; identical to SEQ ID NO: 45874

SEQ ID NO: 57625 - DNA, 612 bp, Neisseria meningitidis; identical to SEQ ID NO: 45279

SEQ ID NO: 57626 - DNA, 1128 bp, Neisseria meningitidis; identical to SEQ ID NO: 44813

SEQ ID NO: 57627 - DNA, 2016 bp, Neisseria meningitidis; identical to SEQ ID NO: 47284

SEQ ID NO: 57628 - DNA, 963 bp, Neisseria meningitidis; identical to SEQ ID NO: 39603

SEQ ID NO: 57629 - DNA, 660 bp, Neisseria meningitidis; identical to SEQ ID NO: 44556

SEQ ID NO: 57630 - DNA, 633 bp, Neisseria meningitidis; identical to SEQ ID NO: 45450

SEQ ID NO: 57631 - DNA, 399 bp, Neisseria meningitidis; identical to SEQ ID NO: 44864

SEQ ID NO: 57632 - DNA, 474 bp, Neisseria meningitidis; identical to SEQ ID NO: 44352

SEQ ID NO: 57633 - DNA, 660 bp, Neisseria meningitidis; identical to SEQ ID NO: 44330

SEQ ID NO: 57634 - DNA, 558 bp, Neisseria meningitidis
atgaaacccaaattcaaaaccgttttaaccgcgctgcttttggcggtttccctgccgtctatggcggcaacccatgttttgatggaaaccgatatgggcaatatccgtttggttttggacgagtccaaagcccccaagaccgttgctaatttcgtgcgctatgcccgaaaaggcttttacgacgacaccgtttttcaccgcgttatcgacggtttcgttatccagggcggcggatttaccgaagacttggtacaaaaggcaaccgataaggccgttgccaacgaatccggtaacggcttgaaaaacactgccggtaccatcgccatggcgcggacggccgatccggattccgccaccagccaattctttatcaatctggcggacaatgattcactcaactacaaaaacggacaatacggctataccgttttcggcagggtcgaaagcggcatgaacaccgtttccaaaatcgcccgcgtcaaaaccgccacgcacggcctttatcaaaacgtacccgtacagcccgtcaaaatccgtcgcattgttgtcggacagtaa

SEQ ID NO: 57635 - DNA, 810 bp, Neisseria meningitidis; identical to SEQ ID NO: 45425

SEQ ID NO: 57636 - DNA, 1452 bp, Neisseria meningitidis; identical to SEQ ID NO: 45590

SEQ ID NO: 57637 - DNA, 1491 bp, Neisseria meningitidis
gtgaacattcaagatgccgactctgacggcattcagacagcatctgaaaacaataacggcacaaggatggggtacaatcgctctatggaaaaaaacaccctatccgcccgcgcaccatccccttggctgccgcttctgctggcaattgccatttttatgcagatgttggatgcgaccattttaaataccgcactgcctgaaattgccgccgacctgaatgagtcgccattgaacatgcagctggcggttatttcctacacgctgacggttgccctgctgattcctttgagcggttatttggcggacaggttcggaacgaaaaaagtctttttcggttcgattgccgtttttatgctcggatcggcattgtgcgccgcatcgggttcgctgtttgaattgacgctttcccgtgtcgttcagggcatcggcggttcgatgctggttccgataccgcgtctgaccatcttgcgtgtgtacgacaagtccaagctgctcaacgccatcaattatgcggttatgcccgcattaatcggaccggttttagggcctttggcgggcggttatctggtcgaatacgcttcgtggcactggattttcctgctcaacctgcccatcggtcttctgggtttcatattgggacgcaacatcatgcccgatattaaaggcagcaatatctctttagacttcaaaggctatctgattttttctgccgccgcgtgcctcttgttactttcggcagaaagcctgtcgcacgcgctgcctccgtattttgcactgttgccgctgtgcggcggactgctgtttgcacgccgttatttccgacatatgaaaaccgcgtccaaaccgatttattccgccgacctgtttctgatacgcactttccgtctaggactggcgggcaatctgttcagccgtctcggcatcagctcgattccttttctgatgcccctgatgtttcaagtcgctttcggcttcggcgcaagcctgtcgggttggctggtcgcccccgtcgccctgtcttcgctgctggtcaaaccgctgattgcaccgctcatgaaacgtttcggctaccgcacggtactgctttggaacaccaagctgcttgccgccttcatcatgctgctcgccctacctgatggaaactcgccgctgtggatttggattttcctctcgctggcgatcggcgcgtgcaactccctacagttttctgccatgaacacactgaccctcgccgatttgcgcccgcaacagaccggcagcggcaacagcctgatggcggtcaaccaacagcttgccatcagcatgggcattgttgtcggcgcattaatccttaaaaactggacatttctgataccggcttcttcaggtctgcattccgccttccgtatgaccctgctcagtatcggcggcattacccttgcctcgtcgttggttttcaagcgtctgcacgtttcagacggtgcaaacctgacacggaacacaccgtcctaa

SEQ ID NO: 57638 - DNA, 921 bp, Neisseria meningitidis; identical to SEQ ID NO: 44807

SEQ ID NO: 57639 - DNA, 1422 bp, Neisseria meningitidis; identical to SEQ ID NO: 45268

SEQ ID NO: 57640 - DNA, 1527 bp, Neisseria meningitidis; identical to SEQ ID NO: 44799

SEQ ID NO: 57641 - DNA, 1227 bp, Neisseria meningitidis; identical to SEQ ID NO: 46568

SEQ ID NO: 57642 - DNA, 381 bp, Neisseria meningitidis; identical to SEQ ID NO: 44966

SEQ ID NO: 57643 - DNA, 591 bp, Neisseria meningitidis; identical to SEQ ID NO: 38840

SEQ ID NO: 57644 - DNA, 2277 bp, Neisseria meningitidis; identical to SEQ ID NO: 45398

SEQ ID NO: 57645 - DNA, 435 bp, Neisseria meningitidis; identical to SEQ ID NO: 42298

SEQ ID NO: 57646 - DNA, 1011 bp, Neisseria meningitidis; identical to SEQ ID NO: 45544

SEQ ID NO: 57647 - DNA, 387 bp, Neisseria meningitidis; identical to SEQ ID NO: 44892

SEQ ID NO: 57648 - DNA, 2115 bp, Neisseria meningitidis
atggatttattatcggttttccacaaataccgtctgaaatatgcggtggccgtgctgacgatactgcttttggcggcagtcgggctgcacgcttccgtatatcgcaccttcacgcctgaaaacatccgcagccgcctccaacaaagcattgcacacacacaccggaaaatctcgtttgatgcggacattcagcgcaggctcctgccccggccgaccgtcatcctgaaaaacctgaccattaccgaacccggcggcgaccagactgccgtttccgtccaagaaaccaaaatcggattgagctggaaaaacctgtggtcggatcagatacagattgaaaaatgggtggtttcgagtgcggaacttgccctgacgcgcgacgggaaaggtgtttggaacatccaagacctgatcgacagccaaaaacgccaagcctcagtcaaccgcattatcgtcgaaaacagcaccgtccgcctcaatttcctgcaggaacagcttatcctgaaggaaatcaacctcaacctgcaatcccccgattcgtcggggcagccgtttgaaagttcgggcatactggtttggggaaagctgtccgtcccgtggaaaagcagggggctgttcctttcagacggcatcggcacgcccaaaatctcaccgttccattttgaagcttccacttcgctggacggacacggcattaccatttccaccaccggcagcccttctgtccgcttcaacgccggcggagcggatgccgccggcctcggcctgcgtgcagacacttccttccgcaacctccacctgaccgcccaaatccctacgctggcactcaggaacaacagcattaaaattgaaaccgtcaacggcgcatttaccgccggcggcgaatatgcccaatgggacggttcgttcaaactcgacaaagccaacctgcactccggcatcgccaacatcggcaacgccgaaatctccggcagcttcaaaacaccgcgccaccagaccaacttctccctcaattcgccgctcgtatggacggaaaacaaagggctggacgcgccgcgcctgtatgtatcgacccttcaggataccgtcaaccgcctgccgcaaccccgtttcatcagccggctcgacggttcgctgtccgtaccgaatctgcaaaattggaatgccgaattaaacggcacattcgaccgccaaaccgttgccgcgaaattcagatacacacatgaagacgcaccgcatctggaagccgccgtcgcactgcaaaaattgaacctgaccccctatcttgacgacgtgcggcaacaaaacggcaaaatatttcccgacaccctcgccaagctgtccggcgacatcgaggcgcacctgaaaatcggaaaagtccaacttcccggcctgcaactggacgatatggaaacctacctccacgccgacaaaggccatatcgcgctcagccgtttcaagtcagggctttacggcggccataccgaaggcggcatcagcatcgccaacacccgtcccgccacttaccgcctgcaacagaatgcaagcaacatccaaatccaaccgctgctgcaagacctgttcggcttccacagcttcagcggcaacggcgacgcggtcatcgacctgaccgcgggcggcgaaacccgaaaagagcttatccgctcgcttcaaggcagcctgtcgctgaatatttccaatggcgcatggcacggtatcgacatggacaatatcctgaaaaacggcatttcgggcaaaactgccgacaatgccgcacccagcacacccttccaccgattcacgctcaacagcgaaatttcagacggcatcagccgccacatcgataccgaactcttctccgacagcctctatgttaccagcaacggctataccaatctggatacgcaggaattgtctgaagatgtccttatccgcaacgccgtccatccgaaaaacaaaccgattcccctgaaaatcaccggtacggtggacaagccgtccattaccgtcgattacggcaggctgaccggcggcatcaattcgcgcaaagagaaacagaaaatcctcgaagacaccctgctggaacaatggcagtggctcaaacctaaagaaccgtaa

SEQ ID NO: 57649 - DNA, 477 bp, Neisseria meningitidis; identical to SEQ ID NO: 45550

SEQ ID NO: 57650 - DNA, 930 bp, Neisseria meningitidis; identical to SEQ ID NO: 44492

SEQ ID NO: 57651 - DNA, 390 bp, Neisseria meningitidis; identical to SEQ ID NO: 39501

SEQ ID NO: 57652 - DNA, 1071 bp, Neisseria meningitidis; identical to SEQ ID NO: 45193

SEQ ID NO: 57653 - DNA, 651 bp, Neisseria meningitidis; identical to SEQ ID NO: 44494

SEQ ID NO: 57654 - DNA, 135 bp, Neisseria meningitidis; identical to SEQ ID NO: 44583

SEQ ID NO: 57655 - DNA, 963 bp, Neisseria meningitidis; identical to SEQ ID NO: 44442

SEQ ID NO: 57656 - DNA, 306 bp, Neisseria meningitidis; identical to SEQ ID NO: 43025

SEQ ID NO: 57657 - DNA, 798 bp, Neisseria meningitidis; identical to SEQ ID NO: 36554

SEQ ID NO: 57658 - DNA, 312 bp, Neisseria meningitidis
atgtttaatcaaaaccaaactgtaacttatcctgcgacttttttgggagctaaaaaattcaaaggcgaaattgatggctctaatatcgacacttgttccgtattggttgcaacatctttaccggcacagtcgggaaatgctgtcggatttacggcagcgcaaatgaaattcggcgatagcagtaattttgcacgattggaaaatctcaaatacccgtgcggagttatggtaacggttgaaatgacttcgactggtaaaggcatggttccttcattaattgattttcaggtggcagaaaagccgaaaggttga

SEQ ID NO: 57659 - DNA, 1098 bp, Neisseria meningitidis; identical to SEQ ID NO: 39446

SEQ ID NO: 57660 - DNA, 729 bp, Neisseria meningitidis; identical to SEQ ID NO: 45317

SEQ ID NO: 57661 - DNA, 1437 bp, Neisseria meningitidis; identical to SEQ ID NO: 45920

SEQ ID NO: 57662 - DNA, 372 bp, Neisseria meningitidis; identical to SEQ ID NO: 39277

SEQ ID NO: 57663 - DNA, 336 bp, Neisseria meningitidis; identical to SEQ ID NO: 38968

SEQ ID NO: 57664 - DNA, 1839 bp, Neisseria meningitidis; identical to SEQ ID NO: 45661

SEQ ID NO: 57665 - DNA, 378 bp, Neisseria meningitidis; identical to SEQ ID NO: 36713

SEQ ID NO: 57666 - DNA, 240 bp, Neisseria meningitidis
ttggaaatgtttgatggcgaagtagaagcagatgaaagttattttgctgaacgacaaaaccatatcaatggaattgagaacttttggaaccgggcaaaacgtcatttacgcaagtttgacggcattcccaaagcgcattttgagctgtatttaaaggggtacgaacggcgttttaacaacagtgagataaaagttcaaatttccattttaaaacaattagtaaaatcgagtttatcctag

SEQ ID NO: 57667 - DNA, 336 bp, Neisseria meningitidis; identical to SEQ ID NO: 45775

SEQ ID NO: 57668 - DNA, 324 bp, Neisseria meningitidis; identical to SEQ ID NO: 38414

SEQ ID NO: 57669 - DNA, 615 bp, Neisseria meningitidis; identical to SEQ ID NO: 36682

SEQ ID NO: 57670 - DNA, 696 bp, Neisseria meningitidis; identical to SEQ ID NO: 44940

SEQ ID NO: 57671 - DNA, 921 bp, Neisseria meningitidis; identical to SEQ ID NO: 45289

SEQ ID NO: 57672 - DNA, 693 bp, Neisseria meningitidis; identical to SEQ ID NO: 47507

SEQ ID NO: 57673 - DNA, 696 bp, Neisseria meningitidis; identical to SEQ ID NO: 38698

SEQ ID NO: 57674 - DNA, 141 bp, Neisseria meningitidis; identical to SEQ ID NO: 45809

SEQ ID NO: 57675 - DNA, 750 bp, Neisseria meningitidis; identical to SEQ ID NO: 36645

SEQ ID NO: 57676 - DNA, 1008 bp, Neisseria meningitidis
atgagcaccttctttcaacaaaccgcgcaagccatgattgccaaacacatcgaccgtttcccgctattgaagttggatcaagtgattgattggcagccgatcgaacaatacctgaatcgtcaaaaaacccgttaccttcgagaccaccgcggccgtcctgcctatcccctgctgtccatgttcaaagccatcctgcccggacaatggcacagcctctccgatcccgaactcgaacacagcctcattacccgcatcgacttcaacctgttttgccgttttgacgaactgagcatccccgattacagcaccttatgccgctaccgcaactggctggcgcaagacgacaccctgtccgaactgttggaactgattaactgccaactgaccgaaaaaggcttaaaaatagagaaagcatccgccgccgtcattgacgccaccattattcagaccgccggcagcgaacagcgtcaggccatagaagtcgatgaagagggacaagtcagcggtcaaaccacactgagtaaggacaaaaatgcccgttggacaaagaaaaacagcctctacaaactcggttacaaacaacatacccgtaccgatgcggaaggctatatcgagaaactgtacatcactcccaccaatgcccatgagtgcacacacctgtcgccgttgttggaaggactgcccaaaggtacgaccgtctatgccgacaaaggctacgacagcaaggaaaaccggcaacatctgaaagaacatcagttgcaggacggcattatgcgcaaagcctgccgcaaccgtccgctgacggaagcgcaaaccaaacgcaaccggtatttatcgaagacccgttatgtggtcgaacaaagcttcggtacgctgcaccgcaaattccgctatgcgcgggcagcctatttcggactgattaaagtgagtgcgcaaagccatctgaaggcgatgtgtttgaacctgttgaaagccgccaacaggctaagtgcgcccgctgccgcctaa

SEQ ID NO: 57677 - DNA, 948 bp, Neisseria meningitidis; identical to SEQ ID NO: 46360

SEQ ID NO: 57678 - DNA, 573 bp, Neisseria meningitidis
ttgcttaaactgcacttatggaaccagtcaatctacggtgtggatgcagttatcgttacccatacccacgaagaccattggggcgaaaccgccgcacgttccattccgaaaaacctgcccgtatatgtgcagcaccaagccgacgcggcaaaaatccgcagccaaggatttactgatgtacgcgtgttgaacggcagcactgtcttcaacggcgtaaccatcagcaaaaccggcggcgtacatggtacagaagccatgtatgccaacccgcagctagccgaaatcttaggtgatgcaatgggtgtagtattccaaagcagcggacacaaaaccgcttatattatgggtgatactgtgtggacggcagatgtaaacaaagcattgaaccgctacaaacccgattatctgattatgaacacgggctacgcgctgatttcaggcattaccgtacacatggataccgtgaatcataccgccgtcagccgcaccgatatgcgtaaatttatacgcggtcaaggcattgaaagccgtgtgaacgttccggaagacggagaaatcctgaaactggattga

SEQ ID NO: 57679 - DNA, 288 bp, Neisseria meningitidis; identical to SEQ ID NO: 41116

SEQ ID NO: 57680 - DNA, 1332 bp, Neisseria meningitidis; identical to SEQ ID NO: 44408

SEQ ID NO: 57681 - DNA, 828 bp, Neisseria meningitidis; identical to SEQ ID NO: 45164

SEQ ID NO: 57682 - DNA, 474 bp, Neisseria meningitidis; identical to SEQ ID NO: 38731

SEQ ID NO: 57683 - DNA, 1521 bp, Neisseria meningitidis
atgttttttatttcaatccgctatatatttgtcagaaaactatggcgcgcaaacggtcagccctttaaaataacgcctttacgcatcgaaaatccaccggaacgcaacattatgatgaaaaatcgagttaccaacatccattttgtcggtatcggcggcgtcggcatgagcggcatcgccgaagtcttgcacaatttgggttttaaagtttccggttcggatcaggcgcgtaatgccgctaccgagcatttgggcagcctgggcattcaagtttatcccggccataccgccgaacacgttaacggtgcggatgtcgtcgttacctctaccgccgtcaaaaaagaaaatcccgaagttgtcgctgcgttggagcagcaaattcccgttattccgcgcgccctgatgttggcggagttgatgcgcttccgtgacggcatcgccattgccggcacgcacggcaaaaccacgaccaccagcctgaccgcctccatcctcggcgcggcaggacttgacccgactttcgttatcggcggcaaactcaacgccgcaggcaccaacgcccgcttgggcaaaggcgaatacatcgttgccgaagccgacgagtcggatgcatcctttctgcacctgacaccgattatgtccgtcgttaccaatatcgacgaagaccatatggatacctacgggcacagcgtcgaaaaactgcatcaggcgtttatcgatttcatccaccgtatgcccttctacggcaaagcctttttgtgtattgacagcgaacacgtccgcgcgattttgcccaaagtgagcaaaccttatgctacttacggtttggacgataccgccgacatctacgccaccgacatcgaaaacgtcggcgcgcaaatgaaattcaccgtccatgttcaaatgaaaggacatgagcaggggtcgtttgaagtcgtgctgaatatgcccggcagacacaacgtgctgaacgcattggcagccatcggcgtggcgctggaagtcggcgcatcggttgaagcgatccaaaaaggcttgctcggctttgaaggtgtcggccgccgcttccaaaaatacggcgacatcaagttgccaaacggcgggaccgcgctcttggtggacgactacggacaccaccccgtcgaaatggcggcgacccttgccgccgcacgcggcgcgtatccggaaaaacgtttggtactcgccttccagccgcaccgctatacccgcacgcgcgatttgtttgaagactttaccaaagtcctcaataccgttgacgcgctggtgctgaccgaagtttatgccgccggtgaagagccgattgccgccgccgattcccgcgctcttgcccgcgccatccgcgtgttgggcaaactcgagccgatttactgcgaaaacgttgccgatctgcccgaaatgctgttgaacgttttgcaggacggcgacatcgtgttgaatatgggtgcgggaagcatcaaccgcgtccccgccgcgctgctggaattgtcgaaacagatttga

SEQ ID NO: 57684 - DNA, 1185 bp, Neisseria meningitidis; identical to SEQ ID NO: 38307

SEQ ID NO: 57685 - DNA, 411 bp, Neisseria meningitidis; identical to SEQ ID NO: 44723

SEQ ID NO: 57686 - DNA, 711 bp, Neisseria meningitidis; identical to SEQ ID NO: 44788

SEQ ID NO: 57687 - DNA, 1380 bp, Neisseria meningitidis; identical to SEQ ID NO: 45781

SEQ ID NO: 57688 - DNA, 309 bp, Neisseria meningitidis; identical to SEQ ID NO: 38004

SEQ ID NO: 57689 - DNA, 1206 bp, Neisseria meningitidis; identical to SEQ ID NO: 38565

SEQ ID NO: 57690 - DNA, 1065 bp, Neisseria meningitidis; identical to SEQ ID NO: 44887

SEQ ID NO: 57691 - DNA, 1278 bp, Neisseria meningitidis; identical to SEQ ID NO: 44336

SEQ ID NO: 57692 - DNA, 1722 bp, Neisseria meningitidis; identical to SEQ ID NO: 45831

SEQ ID NO: 57693 - DNA, 303 bp, Neisseria meningitidis; identical to SEQ ID NO: 46295

SEQ ID NO: 57694 - DNA, 1374 bp, Neisseria meningitidis; identical to SEQ ID NO: 38214

SEQ ID NO: 57695 - DNA, 594 bp, Neisseria meningitidis; identical to SEQ ID NO: 46811

SEQ ID NO: 57696 - DNA, 396 bp, Neisseria meningitidis; identical to SEQ ID NO: 39569

SEQ ID NO: 57697 - DNA, 468 bp, Neisseria meningitidis; identical to SEQ ID NO: 45145

SEQ ID NO: 57698 - DNA, 927 bp, Neisseria meningitidis; identical to SEQ ID NO: 49280

SEQ ID NO: 57699 - DNA, 1131 bp, Neisseria meningitidis; identical to SEQ ID NO: 44874

SEQ ID NO: 57700 - DNA, 654 bp, Neisseria meningitidis
atgaagataacgcactgcaaattaaagaaaaaagtacagaaagaactgctccgtttttttgtgctggaagttaccgcccgttctgccgccgatattttgggtatccatcccaattcggcagcactgttctaccgtaaaatccgcacggttatcaaccatcatttggccttggctgccgatgaggtttttgagggccctgtcgagccggacgaaagcgatttcggcggacggcgtaaaggcagacgtggtcgcggtgcggcaggaaaagtggttgtcttcggcattctgaaacgcaacggacgggtctataccgttgtggtggataatgccaagtctgaaacgttactccctgtcatcaaaaagaaaatcatgccggacagcattgtttataccaatagtctgagcagctgcgacaagttggacgtgagcggttttatccattaccgcattaaccattccaaggagtttgcagaccgtcaaaaccacattaacggcattgagaacttttggaatcaggcaaaacgcgtcttgcgaaaatacaatggaatcgatcgcaaatctttcccgctgttcttgaaagaatgcgaatttcgatttaacttcggcacaccgtcccggcagctaaaaatcctacaggattggtgtgggatttag

SEQ ID NO: 57701 - DNA, 294 bp, Neisseria meningitidis; identical to SEQ ID NO: 38787

SEQ ID NO: 57702 - DNA, 852 bp, Neisseria meningitidis
atggcacgacacggttggcaggcaggacggtttgaaatcggtttggacaagccgaaaattatgggcatcgtgaatctcacgcctgattctttttccgacggcggcgcgtattcgcaaaatgccaaaaccgctttggcgcacgccgaacggcttttgaaagagggtgcggacattctcgacattggcggcgaatcgacgcggccgggtgcggattatgtttcgtccgaagaagaatgggcgcgggttgagcctgtattggtagaagtcgcgggatggggcgttcccgtcagtttggacacgcgccgcacggtggttatggaaaaagcgttggcactcggcggcatcgatattattaacgatgtggcggcgttgaccgacgaaggcgcggtcgaattgctggcgcgccagacggacacgggtatttgcctgatgcatatgcagggtttgcctgaaaccatgcagattaatccgaaatatcaggatgttgttggtgaagtggcgcggtatttgaaagcgcgggcggcggaatgcatcgcggcaggcatcgccccgcaacgcatcacactcgaccccggtttcggtttcggcaaaaccttacaacacaatatcgcactgatgcggcatttacccgaattgatggcggaaacgggttttccgctgctcatcggcgtgtcgcgcaaacgtatgataggcgagctgactggcgaggcagacgcggcggcgcgcgtacacggcagcgtggcggcggcactggcttccgtggcgcgcggcgcgcaaatcgtgcgggtgcatgatgtgaaggcgacggcggatgcgttgaaggcatgggaagcgttgggcatcaatctgtaa

SEQ ID NO: 57703 - DNA, 1200 bp, Neisseria meningitidis
atgccccctgccgaagtcccttcagacggcattgtcaagaattttattaaaaacaggattcccatcatgagcacccccgccctcctcgtcctcgctgacggcagcgtattccacggcacatcaatcggttacgaaggttcgacttccggcgaagtcgtgttcaatacttcgatgactggctatcaggaaatcctgaccgacccgtcctactgcaaacaaatcgttaccctcacctacccacacatcggcaacaccggcaccaacgccgaagatgaagaaagccgcagcgtttatgccgccggcctgattatccgcgacctgccgctcttgcacagcaacttccgcgcctccgaaagcctgcacgactatctggtacgcaacaaaaccgtcgccatcgccgacatcgatacccgccgcctgaccacgctgttgcgcgaaaaaggcgcgcaaggcggcgcgattctgaccggtgcggatgccacaatcgaaaaagcgcaagaactcatcgccgcgttcggcagtatggtcggcaaagacttggcaaaagaagtttcctgcacggaaacttacgaatggacggaaggcgaatgggaattgggcaagggtttcgttacccctgacgaacagccttaccacgtcgtcgcctacgatttcggcgtgaaaaccaacatcctgcgtatgctcgcctcgcgcggctgccgcctgaccgtcgtccccgcccaaacgagcgcacaagacgtgttggcactcaatcccgacggcgtgttcctgtccaacggccccggcgaccccgagccttgcacctacgccatcgaagccgtgcaaaaactgatggaaagcggcaaaccgattttcggcatctgcttgggacaccagctcatcagcctcgctatcggcgcgaaaaccctgaaaatgcgcttcagccaccacggtgcgaaccaccctgtgcaagatttggacagcggcaaagtcgtcatcaccagccaaaaccacggttttgccgttgatgccgacaccctgcccgctaacgcacgcattacccacaaatccttgtttgacaacactttgcaaggcatcgagctgaccgacaaacctgtgttctgcttccaaggccaccccgaagccagccccggtccgcaagatgtcggctatttgtttgacaaattcattggcaatatgaaagcggcaaaacgggcataa

SEQ ID NO: 57704 - DNA, 1329 bp, Neisseria meningitidis
atggcggaaacaataccggctgccttgaatatgaaggggatgatgatgtttgaacgcagtgtgattgcaatggcttgtatttttgccctttcagcctgtgggggcggcggtggcggatcgcccgatgttaaatcggcggacacgctgtcaaaaccggccgctcctgttgttgctgaaaaagagacagaggtaaaagaagatgcgccacaggcaggttctcaaggacagggcgcgccatccacacaaggcagccaagatatggcggcagtttcggcagaaaatacaggcaatggcggtgcggcaacaacggacaaacccaaaaatgaagacgagggaccgcaaaatgatatgccgcaaaattccgccgaatccgcaaatcaaacagggaacaaccaacccgccgattcttcagattccgcccccgcgtcaaaccctgcacctgcgaatggcggtagcaattttggaagggttgatttggctaatggcgttttgattgatgggccgtcgcaaaatataacgttgacccactgtaaaggcgattcttgtaatggtgataatttattggatgaagaagcaccgtcaaaatcagaatttgaaaatttaaatgagtctgaacgaattgagaaatataagaaagatgggaaaagcgataaatttactaatttggttgcgacagcagttcaagctaatggaactaacaaatatgtcatcatttataaagacaagtccgcttcatcttcatctgcgcgattcaggcgttctgcacggtcgaggaggtcgcttcctgccgagatgccgctaatccccgtcaatcaggcggatacgctgattgtcgatggggaagcggtcagcctgacggggcattccggcaatatcttcgcgcccgaagggaattaccggtatctgacttacggggcggaaaaattgcccggcggatcgtatgccctccgtgtgcaaggcgaaccggcaaaaggcgaaatgcttgctggcacggccgtgtacaacggcgaagtgctgcattttcatacggaaaacggccgtccgtacccgactagaggcaggtttgccgcaaaagtcgatttcggcagcaaatctgtggacggcattatcgacagcggcgatgatttgcatatgggtacgcaaaaattcaaagccgccatcgatggaaacggctttaaggggacttggacggaaaatggcggcggggatgtttccggaaggttttacggcccggccggcgaggaagtggcgggaaaatacagctatcgcccgacagatgcggaaaagggcggattcggcgtgtttgccggcaaaaaagagcaggattga

SEQ ID NO: 57705 - DNA, 1044 bp, Neisseria meningitidis; identical to SEQ ID NO: 44454

SEQ ID NO: 57706 - DNA, 660 bp, Neisseria meningitidis; identical to SEQ ID NO: 44247

SEQ ID NO: 57707 - DNA, 1209 bp, Neisseria meningitidis
atgagtgaagcagaatatttttcccatttcatatctaacggcaatgggaagttattagaaattccgcaacgtaggggcaggcaggacggcgtttttatagattggttgtcatttacgatgcacgaagattctttgctgaaagtttccggatgcccattagtttccgatgccgaatatatgtttgttttgagcaaaaaattggaggaaatattagggtttggcatcacgagcagatgcaaatcgaagggcaataaattttacgattcgatgtttaggttgggatcggaagaagttgactacggcgaagtccattacggaggtcagcgaaatacggttttaatcgaattgaaaggtgtaggttgcaacattgcaaatccaggttgggaattgaggcttaagcagtttttggaagattcattgaggccgaggataacgcgggtagatttggcactcgatttctttgacggtgaatacacgccggaacaggcacttttagatcacgataacgggtttttcgataacagtaacatgaggcctaagtctgaaatgattggaacggcttggcggagagaggacgggagcggcaagacattttatgtaggtcgcaagaaaaattctcgttttgtgcgtgtttatgagaaaggaaggcagctcggcgataaagaaagcaagtgggtaaggttcgaaattcagtttaatcatggagatatggaaatacctttggatattctgataaatcaaggttcttacttttcaggcgctttcccgatttgtcagaaatttaaaaatatgccgaatcctgaaaggtttgattaccgtaaaaaagtggctaatttaacctttcagcataaattgcgttatgcaaaaaatgcggtcggcaaactgattaatttcatgttcgatatgggtttcgataccgatgaaattgtcaaatatttaaaggcggatgcaggttatccaaaaggtctcgagcctgaaaaatattcgttggccggattgaaggaatctttgaaattcggctttatccacgaacaacaggatgtagatttggaaattgaattggaagaactcggaattatcaaatttaagcaatcagataaattcgatccggataaaaggcttttcgatccacatcacgatgcagaaagtgaggggcaatatcagctttatctcgacagaatgtatgatcttcatgcaaatcaaaattaa

SEQ ID NO: 57708 - DNA, 576 bp, Neisseria meningitidis; identical to SEQ ID NO: 45824

SEQ ID NO: 57709 - DNA, 1377 bp, Neisseria meningitidis; identical to SEQ ID NO: 45008

SEQ ID NO: 57710 - DNA, 309 bp, Neisseria meningitidis
atggaatattgcgaacctgaagaagcatccgacccgtacgcaacatacaggcgtgccagcctgatggcgatgctgccgctgtttgttgtgattttggttctgctcaatattgtttttccgcttctggcgcatcccttggcttggctggtgcctgcaggtttcatggttttggtcggcggctttcccttatcgctgccgcttgtggcgctgcttgtcctgacctgctgcattctggcgcattgtccgccattatcccgtcttttgtgctgcccttgcccgaatcatccgatgtctaaaaattctgcctga

SEQ ID NO: 57711 - DNA, 459 bp, Neisseria meningitidis
  misc_feature 4, 5, 6, 7, 8: 'n' is a, c, g or t
gtgnnnnnaaatagagataatgcaaaaaactacgtaaagattgaaacaaaacatcaaggaaacggcagcttccacgccgcttcttctctcggcttatccgccatttacgatttcaaactcaacgataaattcaaaccctatatcggcgcgcgcgtcgcctacggacacgttaaacatcaggttcattcagtggaaacaaaaaccacgactgttacctctaaaccgacggcaacctctccacagggaggccctattatacaaactgatcccagcaaacctccctatcacgaaagccacagcatcagcagcttgggtcttggtgtcatcgccggtgtcggtttcgacatcacgcccaagctgaccttggacaccggataccgctaccacaactggggacgcttggaaaacacccgcttcaaaacccacgaagtctcattgggcatgcgctaccacttctga

SEQ ID NO: 57712 - DNA, 1155 bp, Neisseria meningitidis; identical to SEQ ID NO: 45219

SEQ ID NO: 57713 - DNA, 1077 bp, Neisseria meningitidis
gtgtgccgtatgtttgacgggatttcggttaaaatgacggcatttccatctgaagcagaaagccctgtcatgtatccacttgcccgccgcatcctgtttgcactcgatgccgagaaagcccaccacttcacgctcgacgcgctctacacggtttataaattgggtctgattcccgtaaccggcaaccgtaccaaacctgtaaaattgatgggtatggatttgcccaaccctgtcggacttgccgctggactcgacaaaaacggcgaatacatcgacgcattgggcgcgctcggctttggtttcatcgaaatcggcacggtaacgcccaaaccgcagcccggcaacccgcagccgcgcctcttccgcgttcccgaacaccaaggcatcatcaaccgcatgggtttcaacaaccacggtatcgacaccatgatacgcaacatcgaaaaaagtaaattcagtggcgtattgggcatcaacatcggtaaaaacgcggttacacccatcgaaaacgctgccgatgattatttaatctgccttgaaaaagcctacgcacacgcaagttacattaccgtcaacatttcctcgcccaacaccaaaaacctccgcgcgctgcaaggtggcgacgagttgagcgcattgcttgaggctttgaaaaacaaacaggcacagcttgcctctgtatacgggaaatacgttccgctcgccgtcaaaatcgcccccgatttggatgaagcacaaatcgaagacatcgcccacgttgtcaaatccgtcgaaatggacggcatcatcgctaccaataccaccatcgacaaatcaagtctcggcagccatccgctcgcaggcgagcagggcggtttgagcgggcggcccgttcatgaaaaaagtaatcgggtgttgaagctgttggcagaccacatagacggcaagctgccgattatcggcgtaggcggcattatggaaggcagggacgcggcagataaaatccgcttgggcgcaactgccgtccaggtgtacagcggattgatatacaaaggtccggcattggtcaaagaatgtttgaaggctttggcgcgatga

SEQ ID NO: 57714 - DNA, 1083 bp, Neisseria meningitidis; identical to SEQ ID NO: 45727

SEQ ID NO: 57715 - DNA, 159 bp, Neisseria meningitidis; identical to SEQ ID NO: 48769

SEQ ID NO: 57716 - DNA, 894 bp, Neisseria meningitidis; identical to SEQ ID NO: 44716

SEQ ID NO: 57717 - DNA, 3963 bp, Neisseria meningitidis
atgtctgtcgttttgcccttgcgcggcgttaccgccctttccgatttccgtgtcgaaaaactcttgcaaaaagccgccgcactcggactgcccgaagtcaaattaagcagcgaattttggtatttcgccggcagcgagaaagcattggatgccgcgactgtcgaaaaactgcaagccttgttggcggcgcaaagcgttgaacaaacgccaaaagcgcgcgagggcttgcatttgtttttggtaacgccccgtttgggtacgatttcgccgtgggcttccaaggcgaccaatatcgcggaaaactgcggtttggcaggcatcgagcgcatcgagcgcggcatggcggtgtggctggaaggtgcgcttaccgatgaacagaaacagcaatgggcggcgttgctgcacgaccgcatgaccgaatccgtgctgcccgattttcagacggcatccaaattattccaccatctcgaatccgaaaccttttccaccgttgatgttttaggcggcggtaaagaggctttggtcaaagccaataccgaaatgggtttggcactctccgccgacgaaatcgattatctggttgaaaactatcaggctttgcaacgcaatccgtccgatgtggagctgatgatgttcgcgcaggcaaacagcgaacactgccgccacaaaatcttcaacgccgacttcatcctcaacggcgaaaaacaaccgaaatcccttttcggcatgatacgcgacacgcacaacgcgcatcccgaaggcacggtcgtcgcttataaagacaattcgtccgtgatcgaaggcgcgaaaatcgagcgtttctatccgaatgcggcggaaaaccaaggctaccgtttccacgaggaagacacgcatatcatcatgaaagtggaaacgcacaaccacccgaccgccatcgcgccgtttgcaggcgcggcaacgggcgcgggcggcgaaatccgcgacgaaggcgcaacgggcaaaggttcgcgtccgaaagcaggcttgaccggctttaccgtgtccaacctcaacatccccggcctcaaacagccgtgggaacaagattacggcaagccggaacatatttcctcgccgctggacatcatgattgaaggcccgatcggcggcgcggcgttcaacaacgaattcggccgccccaacctcttgggctacttccgcacttttgaagaaaaatttgacggtcaggttcgcggctaccacaaaccgattatgattgccggcggcttgggcagcattcaggcgcagcagacgcataaagacgaaatccccgaaggcgcgttgctgatccaactgggcggcccgggcatgcttatcggcttgggcggcggcgcggcttcttcgatggataccggcacgaacgacgcttctttagacttcaactccgtacaacgcggcaaccccgaaatcgaacgccgcgcgcaggaagtcatcgaccgctgctggcagctcggcgacaaaaacccgattatctccatccacgacgtgggcgcaggaggtttgtccaacgccttccccgaactggtcaacgatgccggacgcggcgcggtattcgagctgcgcgaagtgccgttggaagaacacggtttaacgcctttgcaaatctggtgcaacgaatcgcaagagcgttatgtgttgtcgattttggaaaaagatttggataccttccgcgccatctgcgaacgcgaacgctgcccgtttgccgtggtcggtacagcgaccgacgacggtcatttgaaagtgcgcgacgatttgttcgccaacaaccccatcgatttgccgttgaacgtcttgctcggcaaaccgcccaaaaccacgcgtaccgacaaaacagttacgccatctaaaaaaccgtttcacgccgacgatatcgacatcaccgaagccgcctaccgcgttttgcacctgcctgccgtagccgccaaaaacttcctgattaccatcggcgaccgcagcgtcggcggcatgacccaccgcgaccaaatggtcggcaaataccaaacccccgtagccgactgcgccgttaccatgatgggcttcaatacctatcgcggcgaagcaatgtctatgggcgaaaaaccgaccgtcgccctgtttgacgcgcctgcttcgggcagaatgtgcgtcggcgaagccatcaccaacatcgcggcggtcaacatcggcgacatcggcaacatcaagctctccgccaactggatggcggcgtgcggcaacgaaggcgaagacgaaaaactctaccgcaccgtcgaagcggtttccaaagcctgtcaggcattggatttgagcattcccgtgggcaaagacagcctgtcgatgaaaaccgtatggcaggatggcgaagagaaaaaatccgtcgtttcgccgttgagcctgattatctccgcgttcgcgccggttcaagacgtacgcaaaaccgttacgcccgaattgaaaaacgtcgaggacagcgtattgctgtttgtcgatttgggcttcggcaaagcgcgtatgggcggctctgcattcggtcaggtatacaacaacatgagcggcgacgcgcccgatttggacgacacaggccgtctgaaagcgttttacaacgtgattcaacagcttgtcgccgaagacaaactcttggcataccacgaccgcagcgacggcggcttgtttgccgttttggtagaaatggcgtttgcagggcggtgcggcttggatatagatttaaatttattgcttgcacaaacatttattaccaaccataccgctctgtctcaatcattgcggactgaagaggtaaaagcgttggctgaatggcaagaaaccattgcccgcacattatttaatgaagagttgggtgctgttatccaagttagaaaacaagatgttgccgatattatcaatttattctatcaacaacagctgcatcataatgtctttgaaatcggtacgttaactgatgagaacacgttaatcatccgcgacgggcaaacgcaccttatttctgacaacctaatcaaactgcaacaaacctggcaagaaaccagccatcaaatccaacgcctgcgcgacaaccctgcctgcgccgacagcgagtttgccctgattggcgacaacgaccgcagcgcattgtttgccaacctgaaattcgacgtgaacgaagacatcgccgcgccgtttatcaacagcggcgcgaaacccaaaatcgccatcctgcgcgaacagggcgtgaacgggcaaatcgaaatggccgccgccttcacccgcgccggattcgatgcttacgacgtgcatatgtccgacctgatggcaggccgcttccgccttgccgacttcaaaatgctggcggcgtgcggcggcttcagctacggcgacgtactcggcgcgggcgaaggctgggcgaaatccatcctgttccaccctgccttgcgcgaccaatttgccgccttctttgccgatccggacacgctgacattgggcgtgtgcaacggctgccagatggtcagcaacctcgccgagattatcccgggtgcagaggcatggcctaaattcaaacgcaacctgagcgaacagtttgaagcacgcctgagcatggttcacgttccgaaatcagcgtcgctgattctgaacgaaatgcaaggctccagcctgcctgtcgtggtcagccacggcgaaggccgcgccgacttcgcgcttcacggcggcaatatttccgccgatttgggcatcgcgctgcaatatgtggacggtcaaaaccaagtgacccaaacctacccgctcaaccccaacggctcgccgcaaggcatcgccggcgttaccaacgccgacggccgcgtgaccatcatgatgccgcatccggaacgcgtgtaccgtgccgcacaaatgagctggaaaccagaagactggacggaattgtccggctggtaccgcctctttgccggcgcacgtaaagccttgggctaa

SEQ ID NO: 57718 - DNA, 324 bp, Neisseria meningitidis; identical to SEQ ID NO: 38492

SEQ ID NO: 57719 - DNA, 753 bp, Neisseria meningitidis; identical to SEQ ID NO: 47266

SEQ ID NO: 57720 - DNA, 966 bp, Neisseria meningitidis; identical to SEQ ID NO: 44613

SEQ ID NO: 57721 - DNA, 1116 bp, Neisseria meningitidis; identical to SEQ ID NO: 38517

SEQ ID NO: 57722 - DNA, 987 bp, Neisseria meningitidis
atgtcttctacgccgaataaacaagccggatatccccgactggtcgccgatatcggcgggacgaatgcacgctttgcgctggaaaccgcgccgcgcgtcattgaaaaagccgccgtgcttccgtgtaaagactacgatacggttaccgatgcggtgcgtgcctatctgaatcaaagcggtgcaacagccgtacggcacgcggcatttgccatcgccaacccgattttgggcgactgggtgcagatgaccaaccaccattgggcgttttccatcgaaaccacccgtcagactttggggctggacaccctcatccttttgaacgactttaccgcgcaggcattggcggtaacgcagacttcaagcaaagacctgatgcaggtaggcgggcaaaagcctgtcgaatttgcccccaaagccgttatcggccccggtaccggcctgggcgtgagcggattggtgcacagccacgcaggctgggtggctttggcgggcgagggcgggcataccagtttcccgccgtttgacgatatggaagtgctgatttggcagtacgccaaaaacaaatacggccatgtttccgccgaacgctttttgagcggcgcgggcttgagcttggtttacgaggctttggctgcaaaacagaaagccaaacccgccaaactgatgccgtctgaaatcacggaaaaggctttgagcggcgcgtcgcctttgtgccgtcagactttggacatcttctgcgccatgctcggcacggttgcttccaacctcgccctgacgctgggcgcgcgcggcggcgtgtacctgtgtggcggcattattccccgcgtgttggaatatttcaaaacttccccgttccgcagccgtttcgagaacaagggcaggtttgaagcatatcttgccgcgattcccgtgtatgtcgtcttgagcgagtttcccggaatttctggtgcggctgcggctctcgacaaccatttgagaaacgtttaa

SEQ ID NO: 57723 - DNA, 630 bp, Neisseria meningitidis; identical to SEQ ID NO: 38660

SEQ ID NO: 57724 - DNA, 849 bp, Neisseria meningitidis
atgttaagcaaaatcagcgaatcactggcaaacctttccggtgcggaacgcaaagtcgccgaatgtgcattggcggaacccaaatggttcgtccatgccgccgttgccgaaattgccgaacgtgcgtccgtcagccagccgaccgtcatccgattctgccgcagcttgggttataaagggctgcccgagttcaagctcgcgttgtccgccagcatcggtcatgagggtatgccctatgtccatgaagaactcaacgccgacgacgatatggcaagcgtggtcgagaaagtgttgggcaatgccgccgcctcgctgttgggcgaacgccgcttcctgaaagagtcggagctggaaaacgccattgccacgctgatgcacgcccgccgcgtcgagttttacggtgtcggcaattccggtatcgttgcgcaggacgcgcaacacaagtttttccgtttcggaatgtccacggtcgcctatgtcgatacgcacacgcagctgatggcagcatccgttttgagcgatcaggatgttttggttgccatttccaacacgggttcgtctatcgaacttttggatgcggtcagcatcgccaaagaaaacggcgcgtccgtcatcgcactgacccgcaacgattcgcctctggcgcaacttgccgactgcgtgttgagcgttgccacacaggaaaatgccgaactctacacgcccatggtttcccgcctcttgcagcttgccgtcatcgacattctcgccattggacttgccctgcgcttgggcgatgctgccagcctgcaattgcagaaaagcaaaaaaagcatacacaacaagcacatcgattacgacaaagattga

SEQ ID NO: 57725 - DNA, 843 bp, Neisseria meningitidis
ttgatacaattccgcctttccaacacgcgcaatcatctttatatgaaaaccaagttaatcaaaatcttgaccccctttaccgtcctcccgctgctggcttgcgggcaaacgcccgtttccaatgccaacgccgaacccgccgtcaaagccgaacccgccgtcaaagccaagtccgccggcaaatccgttgccgcctctttgaaagcgcgtttggaaaaaacctattccgcccaagatttgaaagtgttgagcgtcaatgaaacaccgattaaaggcatttacgaagttgtcgtcagcggcaaacaaatcatctataccgatgccaaaggcgactatatgcttgttggcgacctcatcaacgtcaacacgcgccaaagcctgactgaagaacgcgccgccgatttgaacaaaatcgactttgcttccctgcctttggacaaagccatcaaagaagtgcgcggcaacggcaagctgaaagtcgccgtcttctccgaccccgattgtccgttctgcaaacgcttggaacacgagtttgaaaaaatgaccgacgtgacggtttacagctttatgatgcccattgccggcctgcaccctgatgccgcgcgcaaggcgcaaatcttatggtgtcagcccgaccgcgccaaagcgtggacggattggatgcgtaaaggcaaatttccggtcggcggcagcatctgcgacaatcccgtcgcggaaaccacttccttgggcgaacaattcggcttcaacggcacgccgaccctcgtcttccccaacgggcgcagccaaagcggctacagcccgatgccccaactggaggaaatcatccgcaaaaatcaataa

SEQ ID NO: 57726 - DNA, 1110 bp, Neisseria meningitidis; identical to SEQ ID NO: 45845

SEQ ID NO: 57727 - DNA, 408 bp, Neisseria meningitidis; identical to SEQ ID NO: 45284

SEQ ID NO: 57728 - DNA, 351 bp, Neisseria meningitidis; identical to SEQ ID NO: 39679

SEQ ID NO: 57729 - DNA, 345 bp, Neisseria meningitidis; identical to SEQ ID NO: 46056

SEQ ID NO: 57730 - DNA, 747 bp, Neisseria meningitidis; identical to SEQ ID NO: 44712

SEQ ID NO: 57731 - DNA, 801 bp, Neisseria meningitidis; identical to SEQ ID NO: 51109

SEQ ID NO: 57732 - DNA, 828 bp, Neisseria meningitidis
atggatggagaaggtatgtcggttgggcattatgagaattttcccgtcggttcgctgattttgccgcgcaggttgaggaagccggttcacgcggtgtacgcgtttgcacggacggcggacgatatggcggacgagggcagtatgccgtctgaagccaggttggcggggttggagggtttgcagcgcgagttggacgtgttggcatcgggcggccggtcggcgcatcctttgattgcacgattggatgccgaggcggttgtgccgttcggtttggatttgcagccgttttatgatttgctttctgcattttctcaggatgtggttaaaacgcggtacgcgcatttcggcgagctggccgattattgtcggcgttccgccaaccctgtcggacgcattatgctggctttgtacgggaaaacggatgcggtgtgcgtggcgcaaagcgacggtatctgtacggctttgcaactggtgaatttttggcaggatgtggctgtggattggcaaaagggcagggtttatatcccgcaggacgatttgttgaaattcggtgtttccgaaggacagattgcggagggtagggcggatgaggcgtttcagcggctgatggcgtatgagtgccggcgcgcattccgtatgctgaaggcgggttcgcctttggcgcgcgaattgaaagggcgtatcggtttggaactccgtatgattgtgttgggggcgcagttgattttgcagaaactggacgcgtgccgatacgatgtgtttgcacaacgtccggttttggataagaaggattggttgattatgttgaaacgcgcgttgtggaaatga

SEQ ID NO: 57733 - DNA, 810 bp, Neisseria meningitidis
atgattgattttgacaaaccggctgaagaagacgccatttatcaaagtcgtttgaaaaaaatcgtttcagacgaccttgtcctctacaacgaaaattcccttaacgtcatgcggaagatattggaaaaatatccaaacggctgttttgatatgattttctcagacccgccttactttctttccaatgacggcttcagttgtcaaaacggacaaatggtttccgtcaataagggcaactgggataaatccaaaggaatggcggcagatttggaattctacgaagaatggctccgactgtgttacgccttattaaaaccaaacggcacaatttgggtttgcggcacattccataatatttatttaatcggctacctgatgcaaactatcggataccatattttgaacaatattacttgggaaaaacccaatcctccccctaatttgtcctgccgtttttttacccattcgacagaaacaatcttatgggcaaagaaaaataaaaaagccaaacacacgtttcattatgaaatgatgaaagcacaaaatgatggcaaacagatgaaatgtgtttggacatttcctcctccaaacaaagccgaaaaaacattcggcaaacatccgacacaaaaaccactctccttgcttgaacgctgcatactctcagcttcaaacatcggagatttaatttttgaccctttcatgggcagcggcacaacaggcgttgccgccttaaaacatggtcggaaattttgtggttgcgaactggaagaagatttttttgaattagcaaaaaaaaggttagaaaaatga

SEQ ID NO: 57734 - DNA, 1143 bp, Neisseria meningitidis; identical to SEQ ID NO: 39151

SEQ ID NO: 57735 - DNA, 1056 bp, Neisseria meningitidis; identical to SEQ ID NO: 44255

SEQ ID NO: 57736 - DNA, 1296 bp, Neisseria meningitidis; identical to SEQ ID NO: 44491

SEQ ID NO: 57737 - DNA, 411 bp, Neisseria meningitidis; identical to SEQ ID NO: 39808

SEQ ID NO: 57738 - DNA, 2217 bp, Neisseria meningitidis
gtgctagaatacgccgcccgaagccgccgttcagacggcattccgacgcaccgacagaaacatcacgaccgaaaccaagagaaaaacatggcctatcaagttctcgcccgaaaatggcggcccaaaaccttttccgacttagtcggtcaggaacacgtcgtcaaagccttgcaaaacgccttggacgaaggcaggctgcaccacgcctacctgctgaccggtacgcgcggcgtaggcaaaaccaccatcgcccgcatccttgccaaaagcctcaactgcgaaaacgcgcaacacggcgaaccttgcggcgtgtgcgaaagctgcacccaaatcgatgccggacgctatgtcgacctgctcgaaatcgacgccgcctccaacacaggcatcgacaacatccgcgaagtattggaaaacgcccaatatgcaccgactgccggcaaatacaaagtctatatcatcgacgaagtgcatatgctttccaaaagcgcgttcaacgctatgctcaaaacgctggaagagccgcccgaacacgtcaaattcatccttgccacgaccgatccgcataaagtccccgttaccgtcttgagccgctgcctgcaatttgtcttgcacaatatgacttcgcagcaggttgccgaccacctcgcccacgtcctcgacagcgaaaaaatcgcctacgaaccccctgccctgcaacttttgggacgcgccgccgccggatcgatgcgcgatgccttgagcctgctcgaccaagccatcgccatgggttcgggcagcgttgccgaacaagacgtccgccaaatgatcggtgcggttgacaaacaatacctttacgaactcttgacaggcatcatcaaccaagacggcgcagccctgaccgccaaagcgcaggaaatggcggcgtgtgccgtcggctttgacaacgccttgggcgaacttgccatactgctgcaacacctcgccctgatacaggcggtgccctccgccttggcgcacgacgaccccgattccgatattttgcaccgcctcgcccaaaccataagcggcgaacaaatccagctttactaccaaatcgccgtccacggcaaacgcgacctgagcctcgcccccgacgaatacgccggctttatgatgaccctgctgcgtatgctggcgtttgcgcccttggcggcagcttcgtgtgatacaaacgccgtgattgaaaataccgaactaaaatccccatcggcacaaaccgccgaaaaggaaaccgccgtaaaaaagccccaaccgcgccctgaagcagaaaccgcccaaacacccgttcagacggcatccgcagcggcaatgccgtctgaaggcaaaactgccggacccgtttccaatcaagaaaacaacgatgttccgccttgggaagacgcgccagacgaagcccaagccgcagccggcacggcgcaaacgtcggcaaaaagcattcagacggcatccgaagccgaaacgccgcccgaaaaccaagtttccaagaacaaggcagccgacaacgtaaccgatgcccccttgtccgaagtgccgtctgaaaaccccattcaggcaacaccgaatgatgaagccgttgaaacggaaacatttgcacacgaagcccctgcagaacctttctacggttacggctttccggataatgactgccccgtagaagacggcgcagaaatcccgccgcccgattgggaacacgccgcccctgccgataccgcaggcggaggcgcggacgaagaagcagaagcaggcggcatcggcggaaacaacacgccgtccgccccgccgcccgaattttccaccgaaaactgggcagccatcgtccggcatttcgcccgcaaactcggcgcggcgcaaatgccggcgcaacactccgcgtggacggaataccatcccgacaccggcctgatggttttggcgatgaccgccgaagcccgcgccaccgccgacaaaaaacgtctcgacaaaatccgcgacacccttgcccaagcctacggactgcaactcaccctgcaaacccaagactggcgcgacgaagccggcagggaaacccccgcgatgcaggacaagcgcgtccaagccgaagacaggcaaaaagcacaagcattgctcgaagccgaccccgccgcacaaaaaatcctccaagcattcggcgcgcaatggcagcccgaatcactggaattggcagcaaaccggccataa

SEQ ID NO: 57739 - DNA, 825 bp, Neisseria meningitidis; identical to SEQ ID NO: 45658

SEQ ID NO: 57740 - DNA, 501 bp, Neisseria meningitidis; identical to SEQ ID NO: 44822

SEQ ID NO: 57741 - DNA, 975 bp, Neisseria meningitidis; identical to SEQ ID NO: 44432

SEQ ID NO: 57742 - DNA, 480 bp, Neisseria meningitidis; identical to SEQ ID NO: 44156

SEQ ID NO: 57743 - DNA, 1245 bp, Neisseria meningitidis; identical to SEQ ID NO: 45589

SEQ ID NO: 57744 - DNA, 186 bp, Neisseria meningitidis; identical to SEQ ID NO: 45744

SEQ ID NO: 57745 - DNA, 1311 bp, Neisseria meningitidis; identical to SEQ ID NO: 39855

SEQ ID NO: 57746 - DNA, 753 bp, Neisseria meningitidis; identical to SEQ ID NO: 39622

SEQ ID NO: 57747 - DNA, 1272 bp, Neisseria meningitidis; identical to SEQ ID NO: 44534

SEQ ID NO: 57748 - DNA, 2106 bp, Neisseria meningitidis
atgtcaatatatctatctcgcctatcattcggcttttctcgccgtttactagttgtcttgcaaacggaagcagcagaatgtggattggcgtgtttggtatcggtattggggtttcatggtttttatacggatttgcgccatttaagggcgcgtttttctttgtctcttaaaggcgcaacattggcagatttggtacggtttgctaatagcatgaatttaactgctcgagctgttcggttggatttagatgaattggtaaatttgcgcttaccctgtattttacattgggatttaaatcattttgtggtgttgcatgaagttcatcgtaatcacattgtgattatgaaccctgcttcgggttggcaaaaagtgcgtatggaagaagtctcgcgctgttttacaggcatagcgttggagctattccctaacacgcaatttgaagagaaacacgaaacgcgtaaaattcgcatactaccgatgttgcgcggtgtggttggattaaaaaggtctttatttcagcttctgctgctggcggcagtattacaggtgtttgctttggcaagccctttttttatgcaatgggtaatagatcatgccattgtatcggcagaccgtgatttattgctaacattggcattgggttttggtttgttgatgattgtgcagcagttggtgtcattgttgcaaacttgggcaggtatgtatttgtctacttcattgaatatccaatggaaagccaacgtattccgccgcttaatggatttacctgtttcttatttcactaaacgacacttgggcgatgtggtttcacgttttggctcggtggatagtattcaaagtacgctcacttctactttctttgtgctggtactcaacagcattatggcagtatttacattagggttaatgtatttatacagccctagtttaacggctgttgtattggttgttttactgatttatatcggtattcgttgggtggcatattatccgttacgccatgcaaccgaagaaaatattgttcatgctgccaagcaaagcagttatttcatggaaaccatacgcggtattcaaaccgttaaattatttgataaaaatgcacaacgtcatgcggcttggctgaacttatttgttgatacaatcaacacaggtttaacgacacaaaaactttccgcaatgttcggttttgcgaacagccttttgtttggtatcgctaatattttaattgtgtattttggtgcggtttctgtgttggacggtgtttttaccgttggggcgttaatggcgttaatggcgtttatgtcctacaaaagtcagtttgagagtaaagcaggttcattgattgaccagtttgtacaaatcaaaatgctaggattgcacgcggaacgcttggcggatattgtgctagaaaaaacggaaaacgagcagaacaacgatttcaggctgcctaaaaatttagaacactttgatattaaaatagaaaatctatcatttcgctatgctgaaaatgaaccatacattttgcaagatttcagtttaattatcaaacaaggaacagccattgcttttgctggacattcaggctgtgggaaatctacgctcattcaaattctgacaggcagtctgaaacctgaaagcggtcacgtgttactaggcgagaatgatattcatgcgtttccacctgcatttatccgcaaatggagcgcaagtgtaatgcaagatgatgtgttatttgctggctcaatcgcagaaaacatcagtttttttgatgatacgcccaatatggaaaaaatcgcattttgcgctcaaatggcgaatattcatcatgaaattgtcgctatgcctatggcgtatgaaaccttaattggtgacatgggaagcgcattgagcggtgggcaaaagcagcgtattgttctagctcgtgctttatatcgtgaacccaaaattttgtttttagacgaagccagtagccatttggacatcaacaatgaacgtgtgattaacgataatctacgccaactcaacattaccaaaatcatggtcgcgcatcgtcaggaaactttaaatactgctgatagcgtagtttatttagacaaggtagcctga

SEQ ID NO: 57749 - DNA, 267 bp, Neisseria meningitidis; identical to SEQ ID NO: 39031

SEQ ID NO: 57750 - DNA, 1518 bp, Neisseria meningitidis; identical to SEQ ID NO: 38183

SEQ ID NO: 57751 - DNA, 552 bp, Neisseria meningitidis
atgggtatcgcgcacgggagacggtccgattttataaggctgcgtattcagccgttcgttcaaatcggttttgcccgcatccaatgccttcgcaatcacaaacggtttgattgccgaaccgggttcgatcatatcggttacggcacggttgcgccgctgttcgctgtctgcccggccgggcctgttgggatcgtaggcgggcgtattggccaaggcgaggatttcccccgtgcgggcatccaaaaccaccaccgttccggcttttgcctgatggtattcgaccgccttgttcaactcttcataggccaaggtctgaatcctctgatcgagggaaaggatgatgtctttgccgtttttcggggctttattgcgcggggagtccaagctgtccacaatattgccctgccggtcccgcaaaacgacttccgcgccgtcttcgccatgcaggctgtcttcaagcgaaagttccaaaccttcctgacctttgccgtcaatatcggtaaatccgatgacgtgtgcaaacaggttgcccatcgggtaatggcgttttaa

SEQ ID NO: 57752 - DNA, 1218 bp, Neisseria meningitidis; identical to SEQ ID NO: 45979

SEQ ID NO: 57753 - DNA, 978 bp, Neisseria meningitidis; identical to SEQ ID NO: 44246

SEQ ID NO: 57754 - DNA, 1218 bp, Neisseria meningitidis; identical to SEQ ID NO: 36341

SEQ ID NO: 57755 - DNA, 219 bp, Neisseria meningitidis; identical to SEQ ID NO: 44452

SEQ ID NO: 57756 - DNA, 1176 bp, Neisseria meningitidis; identical to SEQ ID NO: 44641

SEQ ID NO: 57757 - DNA, 519 bp, Neisseria meningitidis; identical to SEQ ID NO: 37482

SEQ ID NO: 57758 - DNA, 684 bp, Neisseria meningitidis; identical to SEQ ID NO: 44267

SEQ ID NO: 57759 - DNA, 870 bp, Neisseria meningitidis; identical to SEQ ID NO: 44344

SEQ ID NO: 57760 - DNA, 360 bp, Neisseria meningitidis; identical to SEQ ID NO: 44510

SEQ ID NO: 57761 - DNA, 1443 bp, Neisseria meningitidis
atgaaacaattggccatgtacatcaacggacgctttgaaaacgacttcaacggcgaatggcgcgacgtattgaacccgtccaccgaagaaaccatcgcccgcgaacccaaaggcggcaaagcggacgttgaccgagccgtggcggcggcacgcgcggcgcaaccggcttgggaacgtctgcctgcggtcgaacgcggcgcgtatttgcgcaaaatcgcccaaggcatacgcgaacgtgccgacgagctgaccgacaccatcgttgccgaaggtggcaaaaccaaagacttggcacgcgtggaagtcatgtttaccgccgactatctcgattaccaggccgaatgggcgcgccgttacgaaggcgaaatcatccaaagcgaccgcccgcgcgaaaacattttattgttcaaacgtccgctgggcgtaattgccggcattttgccgtggaacttccccttcttcctgattgcccgcaaaatgggtcccgctttggtaacgggcaacaccatcgtcgtcaaacccagcagcgtaaccccgatcaactgccacatcttcgccgaaatcgtcgatgcggtcggactgcccgcaggcgtgttcaacgtagtgaacggccctggtgcggaaatcggcaatgccttgtccgcccatccgcaagtcgatatggtcagcctgaccggctccgtcgaagcaggccgccaagtgatggaagccgcctccgccaacatcaccaaagtttcgttggaactcggcggcaaagcccccgccatcgttttgaaagacgcggatttggatttggcggtgaaatccatcttggcttcgcgcgtcggcaacaccggtcaaatctgcaactgcgccgagcgcgtctatgtccacagcagcctgaaagacgcgttcattgaaaaaatgaccgccgccatgaaaggcgtgcgctacggcaaccctgccgaagccgaagcaggcgcgctggaaatgggtccgctgattgaagagcgcgccgtcaaagccgttgccgaaaaagtggaacgggcagtcaaacaaggtgcgaaactggtctgcggcggcaaacgcgccgaagggcgcggctatttcttcgagccgaccctgctgaccgacaccgacaacagtatggacattatgaaagaagaaaccttcggccccgtgctgcccgtttccgctttcgacacgctcgaccaagtcatcgcactggctaacgattgcgagtttggtctgaccagttctgtttatacgactaatttaaacgaagccttctacgttacccgccgcctgcaattcggcgaaacctacatcaaccgcgaaaacttcgaagccatgcagggtttccacgcgggctggaaaaaatccggcatcggcggcgcggacggcaaacacggtttggaagaatatctgcaaacccaagtcgtttatctggaaaccgacatttaa

SEQ ID NO: 57762 - DNA, 312 bp, Neisseria meningitidis; identical to SEQ ID NO: 38659

SEQ ID NO: 57763 - DNA, 1143 bp, Neisseria meningitidis; identical to SEQ ID NO: 45121

SEQ ID NO: 57764 - DNA, 519 bp, Neisseria meningitidis
  misc_feature 504, 505, 506, 507, 508: 'n' is a, c, g or t
atgaacactattgcagacgtgcaatccagccgagatttgcgcaatctgccgatcaatcaggtcggtatcaaagacctgcgctttccgattaccctgcaaactgcagaaggcatccagtccacagttgcccgtctgaccatgacggtttacctgcccgccgagcagaagggtacgcatatgtcgcgctttgtcgcattgatggagcaacatgccgaagccttggattttgcacaattgcgcaggctgactgctgaaatggtcgcgcttttggattcccgcgccggcaaaatcagcgtttctttcccatttttccgcaagaaaaccgccccggtttccggtattcagtctttactggattatgatgtcagcctcacgggcgaaatgaaagacggtgcatacggccacagtatgaaggtcatgattcccgtaacctcgctttgcccgtgttccaaagaaatttcccaatacggcgcgcacaaccagcgttcgcacgttaccgtcagnnnnncacacacttaa

SEQ ID NO: 57765 - DNA, 540 bp, Neisseria meningitidis; identical to SEQ ID NO: 44661

SEQ ID NO: 57766 - DNA, 1380 bp, Neisseria meningitidis
atggcaaaaacgcttaaaaccctttaccaatgcaccgaatgcggcggcacttccccgaaatggcagggcaaatgcccgcattgcggcgagtggaacacacttcaggaaagcttggccgcgcccgagccgaaaaacgcccgcttccaatcttgggcggcggatacctcgaccgtccaatccctctcctccgtgaccgccaccgaagtgccgcgcaatccgaccggcatgggcgaactcgaccgcgtattgggcggcggtttggtcgatggtgcggtcatcctgctcggcggcgaccccggcatcggcaaatctacgctgctgctgcaaaccatcgccaaaatggcgcaaagccgtaaagtgctatacgtttccggcgaagaatccgcccaacaggtcgccctgcgcgcgcagcgtttggaactgcccaccgaaggcgtgaacctgcttgccgaaatccgcatggaagcgattcaagcagcgttgaaacagcatcagcccgaagtcgtggttatcgattccatccaaaccatgtattccgaccaaatcacttccgcccccggttctgtgtcgcaggtgcgcgagtgtgccgcccaactgacgcgcatggcgaaacagatgggcatcgccatgatactggtcggacacgtgaccaaagacggcgcgattgccggcccgcgcgtgctggaacacatggttgataccgtgctgtatttcgagggcgaccaacattccaactaccgcatgatacgcgccatcaaaaaccgcttcggcgcggcaaacgaactgggcgtgttcgcgatgacggaaaacggtttgaaaggtgtgtccaacccgtccgccatcttccttgccagctaccgcgacgacacgcccggttcgtgcgttttggttacgcaggaaggcagccgaccgcttttggttgaaattcaggcattggtcgatgacgcgcacggattcacccccaaacgccttaccgtcggactggaacaaaaccgcctcgcgatgctgctcgccgtgttaaaccgacacggcggcatcgcctgtttcgatcaggatgtgttcctcaacgccgtcggcggcgtgaaaatcggcgaaccggcggcggatttggcggtcatcctcgcgatgctttccagcttccgcaaccgccctatgcctgaaaaaaccgtggttttcggcgaaatcggcttaagcggcgaagtccgccccgtcgcacgcgggcaagagcggctcaaagaagcggaaaaactcggcttcaaacgcgccatcgttcccaaagccaatatgccgcgcaacgccaaagagtttccgaacctgaaaatctacggcgtttcgagtttgcaggaagccatcgatatttgccgtgacagcagggaataa

SEQ ID NO: 57767 - DNA, 180 bp, Neisseria meningitidis; identical to SEQ ID NO: 39090

SEQ ID NO: 57768 - DNA, 219 bp, Neisseria meningitidis; identical to SEQ ID NO: 36291

SEQ ID NO: 57769 - DNA, 366 bp, Neisseria meningitidis; identical to SEQ ID NO: 37248

SEQ ID NO: 57770 - DNA, 1719 bp, Neisseria meningitidis; identical to SEQ ID NO: 45202

SEQ ID NO: 57771 - DNA, 717 bp, Neisseria meningitidis
ttggtcaaatgctgtctgaaaataatttcagacggcatttttatttggggagaaagtgaagtggcttcagtatttttagaaggagaagcagtcgaggtcggcaatattttctgtatcggcaggaactatgccgcacatattgaagagttaaaaaacgaaataccttccgaacctgtggtgtttatgaagccgtcaggcagcattttgaatagcggcggtacaatcttgctgcccgagtttagtagggatgtgcagtttgagtgcgaactcgtgttgctggtcggtaaggattcagacggcatgggagagggtgaagatattttgggatgtgtggcggggtacggcgtgggtttggatttgaccgcgcgagacatccaatgccatctgaaggcgcaggggctgccctggctgaaggcaaaagggttcaggcattccgcgtgcgtgtcggattttgcggcggcagacagaatcggcaatcccgagaaggtgttgttttcattaaaacaaaacggcgtattgaaacagcgcggggataccggtttgatgatttacccgattcgggaaattttacacaaactggcggcggattacggtttggggaaaggggatttggtgtttaccggaacgccctccggcgtgggcgcaatcggtgcgggggacaatttggcattggagctggacggcttggtgcgcgcctctttcacggtagggtgttaa

SEQ ID NO: 57772 - DNA, 2526 bp, Neisseria meningitidis
ttgaaaaacaacagacaaatcaaactgattgccgcctccgtcgcagttgccgcatcctttcaggcacatgctggactgggcggactgaatatccagtccaaccttgacgaacccttttccggcagcattaccgtaaccggcgaagaagccaaagccctgctaggcggcggcagcgttaccgtttccgaaaaaggcctgaccgccaaagtccacaagttgggcgacaaagccgtcattgccgtttcttccgaacaggcagtccgcgatcccgtcctggtgttccgcatcggcgcaggcgcacaggtacgcgaatacaccgccatcctcgatcctgtcggctactcgcccaaaaccaaatctgcactttcagacggcaagacacaccgcaaaaccgctccgacagcagagtcccaagaaaatcaaaacgccaaagccctccgcaaaaccgataaaaaagacagcgcgaacgcagccgtcaaaccggcatacaacggcaaaacccataccgtccgcaaaggcgaaacggtcaaacagattgccgccgccatccgcccgaaacacctgacgctcgaacaggttgccgatgcgctgctgaaggcaaacccaaatgtttccgcacacggcagactgcgtgcgggcagcgtgcttcacattccgaatctgaacaggatcaaagcggaacaacccaaaccgcaaacggcgaaacccaaagccgaaaccgcatccatgccgtccgaaccgtccaaacaggcaacggtagagaaaccggttgaaaaacctgaagcaaaagttgccgcgcccgaagcaaaagcggaaaaaccggccgttcgacccgaacctgtacccgctgcaaatactgccgcatcggaaaccgctgccgaatccgccccccaagaagccgccgcttctgccatcgacacgccgaccgacgaaaccggtaacgccgtttccgaacctgtcgaacaggtttctgccgaagaagaaaccgaaagcggactgtttgacggtctgttcggcggttcgtacaccttgctgcttgccggcggaggcgcggcattgatcgccctgctgctgcttttgcgccttgcccaatccaaacgcgcgcgccgtaccgaagaatccgtccctgaggaagagcctgaccttgacgacgcggcagacgacggcatagaaatcacctttgccgaagtcgaaactccggcaacgcccgaacccgctccgaaaaacgatgtaaacgacacacttgccttagatggggaatctgaagaagagttatcggcaaaacaaacgttcgatgtcgaaaccgatacgccttccaaccgcatcgacttggatttcgacagcctggcagccgcgcaaaacggcattttatccggcgcacttacgcaggatgaagaaacccaaaaacgcgcggatgccgattggaacgccatcgaatccacagacagcgtgtacgagcccgagaccttcaacccgtacaaccctgtcgaaatcgtcatcgacacgcccgaaccggaatctgtcgcccaaactgccgaaaacaaaccggaaaccgtcgataccgatttctccgacaacctgccctcaaacaaccatatcggcacagaagaaacagcttccgcaaaacctgcctcaccctccggactggcaggcttcctgaaggcttcctcgcccgaaaccatcttggaaaaaacagttgccgaagtccaaacaccggaagagttgcacgatttcctgaaagtgtacgaaaccgatgccgtcgcggaaactgcgcctgaaacgcccgatttcaacgccgccgcagacgatttgtccgcattgcttcaacctgccgaagcaccgtccgttgaggaaaatgtaacggaaaccgttgccgaaacacccgatttcaacgccaccgcagacgatttgtccgcattacttcaaccttctgaagtacctgccgttgaggaaaatgcagcggaaatcgttgccgatgatttgtccgcactgttgcaacctgctgaagcaccggccgttgaggaaaatgtaacgaaaaccgttgccgaaatacctgatttcaacgccaccgcagacgatttgtccgcattacttcaaccttctgaagtacctgccgttgaggaaaatgcagcggaaaccgttgccgatgatttgtccgcactgttgcaacctgctgaagcaccggccgttgaggaaaatgcagcggaaatcactttggaaacgcctgattccaacacctctgaagcagacgctttgcccgacttcctgaaagacggcgaggaggaaacggtagattggagcatctacctctcggaagaaaatatcccaaataatgcagataccagtttcccttcggaatctgtaggttctgacgcgccttccgaagcgaaatacgaccttgccgaaatgtatctcgaaatcggcgaccgcgatgccgctgccgagacagtgcagaaattgctggaagaagcggaaggcgacgtactcaaacgtgcccaagcattggcgcaggaattgggtatttga

SEQ ID NO: 57773 - DNA, 612 bp, Neisseria meningitidis; identical to SEQ ID NO: 39023

SEQ ID NO: 57774 - DNA, 183 bp, Neisseria meningitidis; identical to SEQ ID NO: 38993

SEQ ID NO: 57775 - DNA, 780 bp, Neisseria meningitidis; identical to SEQ ID NO: 38783

SEQ ID NO: 57776 - DNA, 1149 bp, Neisseria meningitidis; identical to SEQ ID NO: 39038

SEQ ID NO: 57777 - DNA, 324 bp, Neisseria meningitidis; identical to SEQ ID NO: 45427

SEQ ID NO: 57778 - DNA, 402 bp, Neisseria meningitidis
  misc_feature 379, 380, 381, 382, 383: 'n' is a, c, g or t
atgaagaaaacattgacactgctcgccgtttccgccctatttgccacatccgcccacgcccaccgcgtctgggtcgaaaccgcccacacgcacggcggcgaataccttaaagccgacttgggctacggcgaatttcccgaactcgaacccatcgccaaagaccgcctgcacatcttcagcaaaccgatgcagctggttaccgaaaaaggcaaggaaaacatgattcaacgcggcacatacaactaccagtaccgaagcaaccgtcccgttaaggacggcagttacctcgtcatcgccgaatatcagcctactttctggtcaaaaaacaaagcaggctggaaacaggcgggcatcaaagaaatgcctgacgcaagctatnnnnncacacacttaattaattaa

SEQ ID NO: 57779 - DNA, 207 bp, Neisseria meningitidis; identical to SEQ ID NO: 38607

SEQ ID NO: 57780 - DNA, 1398 bp, Neisseria meningitidis; identical to SEQ ID NO: 45135

SEQ ID NO: 57781 - DNA, 4707 bp, Neisseria meningitidis; identical to SEQ ID NO: 45682

SEQ ID NO: 57782 - DNA, 723 bp, Neisseria meningitidis
atgcccgaaacaggttttcgggcatttttacggcaaatgccgtctgaaaccaccaaacagcggttcagacggcatccctttcaaaagcgtaccattatgaaaaacatcgtcatcctgatttccggacgcggcagcaatatgcaggcaatcgtcaatgccgccattcccaacgtccgcattgccgccgtgttgagcaacagcgaaacggctgccggtttgcaatgggcggccgaacgcggcatcccgaccgacagcctgcatcataaaaactttgaatcacgacttgccttcgataccgccatgatggaaaaaatcgacgcatatcaacccgacttggtggttttggcaggttttatgcggattctgacccctgagttctgtgcccattacgaaggcaggctgatgaacattcacccgtccatccttccctcgtttaccggacttcatacgcacgaacgcgctttggaggcaggttgtcgcgttgccggctgcaccatccatttcgttactgccgaactggattgcggcccgattgtatcgcaaggggttgtgccgatactcgacggcgatacggcagacgatgttgccgcccgggttttggctgtcgagcataaactctatccgaaagccgttgccgattttgccgccggccgcctgattatcgagggaaaccgcgtcagaaattcggaaaacgccgatgccgcccgttttctgacggcgtaa

SEQ ID NO: 57783 - DNA, 1104 bp, Neisseria meningitidis; identical to SEQ ID NO: 44659

SEQ ID NO: 57784 - DNA, 711 bp, Neisseria meningitidis
atgtctcctgttttgtatttgattcctacgcctttgggtacgcctgacacgccgtgcctgttgccgcatgaacaacaggcgattgtcgggctgacggattttgtcgtggaggcggaaaaaacggcgcgtgcgcatttgaaacatttgggcgtgactacgcctatccgcgagctgaatctgcaaacgttgaatgaacatacggatttgaagactttgccggaattgctgaaacctttgcaagaagggcgcagtatgggcattgtcagtgaggcgggttgcccggctgtggccgatccgggtgcgaatttggtggcattggcgcataaacacggttttgaagtgcgtccgctggtcgggccttccagcctgctgctggctttgatggcttcgggtgcgaacgggcagagttttgcgtttaaaggctatctgccgtctgaaaaaaacgagcggattcaggcttttcgggctttggaacagcgttcgcgccagtgcggcgagacgcagatttttattgaaacgccttaccgcaatgatgcgctgcttgccgatgcggtggaaaacctgcatcctgaaacgcgtttatgcacggctacggatttgaccttgccgacacaggaaatcatcagtcaaacaatcgtgcagtggcgaaaaagaaaagaaatgcccaatctgaaaaaacgcccgacgatttttgtgatgtatgcgggttga

SEQ ID NO: 57785 - DNA, 1329 bp, Neisseria meningitidis; identical to SEQ ID NO: 45155

SEQ ID NO: 57786 - DNA, 582 bp, Neisseria meningitidis; identical to SEQ ID NO: 45592

SEQ ID NO: 57787 - DNA, 810 bp, Neisseria meningitidis; identical to SEQ ID NO: 39750

SEQ ID NO: 57788 - DNA, 1047 bp, Neisseria meningitidis; identical to SEQ ID NO: 45779

SEQ ID NO: 57789 - DNA, 1155 bp, Neisseria meningitidis; identical to SEQ ID NO: 45174

SEQ ID NO: 57790 - DNA, 627 bp, Neisseria meningitidis; identical to SEQ ID NO: 37626

SEQ ID NO: 57791 - DNA, 444 bp, Neisseria meningitidis; identical to SEQ ID NO: 45126

SEQ ID NO: 57792 - DNA, 492 bp, Neisseria meningitidis; identical to SEQ ID NO: 39917

SEQ ID NO: 57793 - DNA, 1299 bp, Neisseria meningitidis; identical to SEQ ID NO: 44479

SEQ ID NO: 57794 - DNA, 1221 bp, Neisseria meningitidis
ttggataaatgggaaattaccataatggcgaaaatcattacgccgctgtcggcaaatcaggttaaaaatgcgaagccgcgcgataagctgtataagttgtcggacgggggcgggctggctttgtgggtctacccgacgggcgggcggagttggaagctgtcgtttgtgcaggatggaaggcagcagacaatttcgctggggcggtatcctgatttttcgctggccgatgcgcgggaatggcgggaggaggtgcgccgaaaacgggcgcacggggaaaatgtcgtcaataagaaggtgcgggcggattttgcttttgagaaggtggcgcgtgattggtttgtgcgttggtcgaaggggcggtctgaaaagtatgccggacaggttatgcggaattttgagcggtgggtttttccggctatcggcaatcttgatattcgtcaagtcaggacggcggatgtggtcggctgtctgcgtgtgatggaggcgcgcggtatcgttgatacgttgcgcaaaacgaaaaacagtctgaagatggtgtttgcgtttgcggtcggttcgggaatgatggaaatcaaccctgtcgcgcaaatcggttcgggtgtgtttgaacgggcgaaaacggggaatatggcggcgttgagtccgtctgaattgccgcgcctgattgattttttggagcagcgcaatgaatttgcggtttatgcgggcagggtgcgtatccatcctgtaacgcggctttgtatctattggctgctgttgacaatgacgcggattcaggaggcggcgttgatggagtggtcggagttggacggggaggtttggcgtatccccgccgaacggaaaaaggagcggcgggggcatgatgtgccgctgtcgcgggcgatgcagtgggtgttggatcaggcgcgggcgttgaatgtgaacgggcggtttgtgtttgaaagtgtgaattttcaagggcatatcaataaggaaagtccgcgcgtggcgatgcagcgggcggggctggatacgacggcgcacggtttgcgcttgcttgcgcgtacttatttgcgcgaggttctgaaggtggataatgatgtggcggaaaagctgcttgcccattcgttggggacgaggacgcaaacggcttacaaccgctcggagctttgggaggagcgtaaggatgcgctggaacggtgggggaatgatgttttgaggcttgccaaaaacggaaaatga

SEQ ID NO: 57795 - DNA, 621 bp, Neisseria meningitidis; identical to SEQ ID NO: 39955

SEQ ID NO: 57796 - DNA, 1086 bp, Neisseria meningitidis; identical to SEQ ID NO: 46978

SEQ ID NO: 57797 - DNA, 1128 bp, Neisseria meningitidis; identical to SEQ ID NO: 36955

SEQ ID NO: 57798 - DNA, 1065 bp, Neisseria meningitidis
atggcactcgtatccatgcgccaactgcttgatcatgctgccgaaaacagctacggcctgcccgcgttcaacgtcaacaacctcgaacaaatgcgcgccattatggaagccgccgaccaagtcggcgcgcccgtcatcgtacaggcgagtgcaggtgcgcgcaaatatgcgggcgcgccgtttttgcgccacctgattctggcggcagtcgaagaatttccgcacatccccgtcgtgatgcaccaagaccacggcgcatcgcccgacgtgtgccaacgctccatccaactgggcttttcctccgtgatgatggacggctcgctgatggaagacggcaaaaccccttcttcttatgaatacaacgtcaacgccacccgtaccgtggttaatttctcccacgcctgcggcgtatccgttgaaggcgaaatcggcgtattgggcaacctcgaaaccggcgaagcaggcgaagaagacggcgtaggtgcagtgggcaaactttcccacgaccaaatgctgaccagcgtcgaagatgccgtacgtttcgttaaagataccggcgttgacgcattggctattgccgtcggcaccagccacggcgcatacaaattcacccgtccgcccacaggcgacgtattgcgtatcgaccgcatcaaagaaatccaccaagccctgcccaatacacacatcgtgatgcacggctccagctccgttcctcaagaatggctgaaagtcatcaacgaatatggcggcaatatcggcgaaacctacggcgtgccggttgaagaaatcgtcgaaggcatcaaacatggcgtgcgcaaagtcaacatcgataccgacttgcgccttgcttccaccggcgcggtacgccgctaccttgccgaaaacccgtccgactttgacccgcgtaaatacctgagcaaaaccattgaggccatgaagcaaatctgcctcgaccgttattttgcgttcggctgcgaaggtcaggcaggcaaaatcaaacctgtttcgttggaaaaaatggcaagccgttatgccaagggcgaattgaaccaaatcgtcaaataa

SEQ ID NO: 57799 - DNA, 1032 bp, Neisseria meningitidis; identical to SEQ ID NO: 36792

SEQ ID NO: 57800 - DNA, 1347 bp, Neisseria meningitidis; identical to SEQ ID NO: 38402

SEQ ID NO: 57801 - DNA, 282 bp, Neisseria meningitidis; identical to SEQ ID NO: 45187

SEQ ID NO: 57802 - DNA, 240 bp, Neisseria meningitidis; identical to SEQ ID NO: 44237

SEQ ID NO: 57803 - DNA, 402 bp, Neisseria meningitidis; identical to SEQ ID NO: 39145

SEQ ID NO: 57804 - DNA, 738 bp, Neisseria meningitidis; identical to SEQ ID NO: 45800

SEQ ID NO: 57805 - DNA, 666 bp, Neisseria meningitidis; identical to SEQ ID NO: 45929

SEQ ID NO: 57806 - DNA, 339 bp, Neisseria meningitidis; identical to SEQ ID NO: 44829

SEQ ID NO: 57807 - DNA, 453 bp, Neisseria meningitidis; identical to SEQ ID NO: 45617

SEQ ID NO: 57808 - DNA, 300 bp, Neisseria meningitidis; identical to SEQ ID NO: 38838

SEQ ID NO: 57809 - DNA, 1407 bp, Neisseria meningitidis; identical to SEQ ID NO: 44428

SEQ ID NO: 57810 - DNA, 990 bp, Neisseria meningitidis; identical to SEQ ID NO: 45616

SEQ ID NO: 57811 - DNA, 795 bp, Neisseria meningitidis
atgatgtccgaacaccgagtcaaccacgaacccgtctttctgttggcttcctcgccatggcgcgaaagcagcctgcgggtcgaagccttcagccgccgttacgggcgtgtggcacttttggcaagaagcgcgcgcaagcggcagagcgaattgcgcggcgtgttggtgccgtttgtgccggtgagtgcgtcttggtatggttcgcaagagttgaagaccctacatcgcgccgaatggataggcgggtggccgcagccgcagggtagggctttgttcagcggattgtatgtgaacgagttgatgctgaagttgaccgtccgcgaagatccgttgcccgagttatacgacgcgttggcggaagtgatggaggcggtgtgctgcaaagccgcttatatcgacgacttgcgccgtttcgagtggcggctgctgaacctgttgggcgttgcccccgatttgcacgccgacggcacgggcggcgatattttggcggacaaaacctaccggctgatgcccgaagaggcggtcatgcccgtatgcgaggacgcagacgcgctttcgcacgaagccggcgcaattgtcgaagggcaaagcctgatcgatttgcgcgaaggcagtttccgcaccgccgaaagcctgcaacaggcattgaaaatcacacggctttttatccgccacctgttgcccgaggggctgaaatcgcggcaggtgttggaacagatacggcagtttgaccgcaaagaaaccgcccgggaaaccgtcccgacttcggacggcacggcttcaaatgccgtctga

SEQ ID NO: 57812 - DNA, 189 bp, Neisseria meningitidis; identical to SEQ ID NO: 40436

SEQ ID NO: 57813 - DNA, 1056 bp, Neisseria meningitidis; identical to SEQ ID NO: 38549

SEQ ID NO: 57814 - DNA, 477 bp, Neisseria meningitidis; identical to SEQ ID NO: 54610

SEQ ID NO: 57815 - DNA, 672 bp, Neisseria meningitidis; identical to SEQ ID NO: 44776

SEQ ID NO: 57816 - DNA, 237 bp, Neisseria meningitidis
gtgccgacgataaggaaaaccatgaaggcaattcatccgtatgcatgtccgcgctgctgccggctgcctgccaacacgtttcggacaggcatggcaaattccgcttccaaattctgcattgccaaaggcggcagacgggaagtaaaaaaagacgaaagcggcggcggatatgccctgtgccatttgccggacagtaggattgtcgaggagtgggaatatttccgttcacaacattga

SEQ ID NO: 57817 - DNA, 702 bp, Neisseria meningitidis; identical to SEQ ID NO: 44292

SEQ ID NO: 57818 - DNA, 648 bp, Neisseria meningitidis
  misc_feature 8, 9, 10, 11, 12: 'n' is a, c, g or t
gtgtgtgnnnnngctgccgtttcactgaccggctgtgcgaccgaatcctcacgcagtctcgaggtagagaaagtcgcctcctacaatacgcaatatcacggtgttcgtaccccgatttccgtcggaacattcgacaaccgctccagcttccaaaaaggcattttctccgacggggaagaccgtttgggcagccaggcaaaaaccattctagtaacgcacctgcaacagaccaaccgcttcaacgtactgaaccgcaccaatttgaacgcattaaaacaggaatccggcatttccggcaaagcgcataacctgaaaggcgcagattatgtcgttaccggcgatgtaaccgaattcggacgcagagatgtcggcgatcatcagctcttcggcattttgggtcgcggcaaatcgcaaatcgcctatgcaaaagtggctctgaatatcgtcaacgtcaatacttccgaaatcgtctattccgcacagggcgcgggcgaatacgcactttccaaccgtgaaatcatcggtttcggcggcacttccggctacgatgcgactttgaacggcaaagttttagacttggcaatccgcgaagccgtcaacagcctggttcaggctgttgacaacggcgcatggcaacccaaccgttaa

SEQ ID NO: 57819 - DNA, 1158 bp, Neisseria meningitidis
atgcgaaaaaaacttaccgccctcgtattgtccgcactgccgcttgcggccgttgccgatgtcagcctgtacggcgaaatcaaagccggcgtggaaggcaggaacatccagctgcagttgaccgaaccgctccaaaatattcaacctcaggttactaagcgcaaaagccgcatcaggacgaaaatcagcgatttcggctcgtttatcggctttaaggggagcgaggatttgggcgaagggctgaaggctgtttggcagcttgagcaagacgtatccgttgccggcggcggcgcgacccagtggggcaacagggaatcctttatcggcttggcaggcgaattcggcacgctgcgcgccggtcgcgttgcgaatcagtttgacgatgccagccaagccattgatccttgggacagcaataatgatgtggcttcgcaattgggtattttcaaacgccacgacgatatgccggtttccgtacgctacgattctccggaattttccggtttcagcggcagcgtccaattcgttccggcccaaaacagcaaatccgcctatacaccggctcattttgttcagcagactcctaaaagtcagcctaatctcgttccggctgttgtcggcaagccggggtcggatgtgtattatgccggtctgaattacaaaaatggcggttttgccgggaactatgcctttaaatacgcgaaacacgccaatgtgggccgtgatgcttttgagttgttcttgctcggcagcgggagtgatgaagccaaaggtaccgatcccttgaaaaaccatcaggtacaccgcctgacgggcggctatgaggaaggcggcttgaatctcgccttggcggctcagttggatttgtctgaaaatggcgacaaaaccaaaaacagtacgaccgaaattgccgccactgcttcctaccgcttcggtaatgcagttccacgcatcagctatgcccatggtttcgactttatcgaacgcggtaaaaaaggcgaaaataccagctacgatcaaatcatcgccggcgttgattatgatttttccaaacgcacttccgccatcgtgtctggcgcttggctgaaacgcaataccggcatcggcaactacactcaaattaatgccgcctccgtcggtttgcgccacaaattctaa

SEQ ID NO: 57820 - DNA, 312 bp, Neisseria meningitidis; identical to SEQ ID NO: 38726

SEQ ID NO: 57821 - DNA, 738 bp, Neisseria meningitidis; identical to SEQ ID NO: 44182

SEQ ID NO: 57822 - DNA, 2940 bp, Neisseria meningitidis; identical to SEQ ID NO: 45559

SEQ ID NO: 57823 - DNA, 282 bp, Neisseria meningitidis; identical to SEQ ID NO: 44485

SEQ ID NO: 57824 - DNA, 1104 bp, Neisseria meningitidis; identical to SEQ ID NO: 44300

SEQ ID NO: 57825 - DNA, 4266 bp, Neisseria meningitidis; identical to SEQ ID NO: 44768

SEQ ID NO: 57826 - DNA, 1398 bp, Neisseria meningitidis; identical to SEQ ID NO: 45793

SEQ ID NO: 57827 - DNA, 1296 bp, Neisseria meningitidis
ttggcaggagtcggcaaacttgcccgcttaggcgcgaaattcagcacaagggcggttccctatgtcggaacagcccttttagcccacgacgtatacgaaactttcaaagaagacatacaggcacaaggctaccaatacgaccccgaaaccgacaaatttgtaaaaggctacgaatatagtaattgcctttggtatgaagacgaaagacgtattaatagaacctatggctgctacggcgttgacagttcgattatgcgccttatgtccgattacagcagattccccgaagtcaaagaattgatggaaagccaaatgtataggctggcacgtccgttttggaattggcataaagaagaactgaataaattaagttctttggattggaataattttgttttaaatcgttgcacatttgattggaacggcggagattgtgtggtcaataaaggtgatgattacagaaatggggctaatttttcccttattcgcaattcaaaatacaaagaagaaatggatgccaaaaagctggaagagattttatcgttgaaagtcgatgccaatcccgacaaatacataaaggcaaccggatatcccggttattccgaaaaagtagaagtcgcacccggaacaaaagtgaatatgggacccgtcacggacaggaacgggaatcccgttcaggttgtcgcaacattcggcagggattcgcaaggcaacaccacagtggatgttcaagtaattccgcgtcccgacttaacccccggaagcgcggaagcgccgaacgcacagccgctgcccgaagtatcgcccgctgaaaaccccgcaaacaacccggcccccaatgagaaccccggcacgcgtcccaatcccgaacccgaccccgatttgaatcccgatgcaaatcccgatacggacggacagcccggaacaagccccgattccccggccgttccggaccgcccaaacggcagggacggcaaagatggcgggcttttgtgcaaattcttccccgacattctagcttgcgacaggctgcccgagcccaatccggcagaagatttaaatctgccgtctgaaaccgtcaatgtagagtttaagaaatccggaatctttcaagattccgcacagtgtcccgcccccgttacgttcactataaccgtgcttgattcaagcaagcagttcgcgttcagctttgagaacgcatgtaccatagccgaacggctaaggtacatgcttctcgcccttgcttgggcggttgccgcctttttttgtatccgcacagtatcccgtgaagtctag

SEQ ID NO: 57828 - DNA, 996 bp, Neisseria meningitidis
atgttgagaaaattgttgaaatggtctgccgtttttttgaccgtatcggcagccgttttcgccgcgctgcttttcgtccctaaagacaacggcagggcataccgaattaaaattgccaaaaaccagggtatttcgtcggtcggcaggaaacttgccgaagaccgcatcgtgttcagcaggcatgttttgacggcggcggcctacgttttgggtgtgcacaacaggctgcatacggggacgtacagactgccttcggaagtgtctgcttgggatatcttgcagaaaatgcgcggcggcaggccggattccgttaccgtgcagattatcgaaggttcgcgtttttcgcatatgaggaaagtcatcgacgcaacgcccgacatcgaacacgacaccaaaggctggagcaatgaaaaactgatggcggaagttgcccctgatgccttcagcggcaatcctgaagggcagtttttccccgacagctacgaaatcgatgcgggcggcagcgatttacggatttaccaaaccgcctacaaggcgatgcaacgccgcctgaatgaggcatgggaaagcaggcaggacgggctgccttataaaaatccttatgaaatgctgattatggcgagcctggtcgaaaaggaaacggggcatgaagccgaccgcgaccatgtcgcttccgtcttcgtcaaccgcctgaaaatcggtatgcgcctgcaaaccgacccgtccgtgatttacggcatgggtgcggcatacaagggcaaaatccgtaaagccgacctgcgccgcgacacgccgtacaacacctacacgcgcggcggtctgccgccaaccccgattgcgctgcccggcaaggccgcgcttgatgccgccgcccatccgtctggcgaaaaatacctttattttgtttctaaaatggacggtacgggcttgagccagttcagccatgatttgaccgaacacaatgccgccgtccgcaaatatattttgaaaaaataa

SEQ ID NO: 57829 - DNA, 246 bp, Neisseria meningitidis; identical to SEQ ID NO: 44944

SEQ ID NO: 57830 - DNA, 636 bp, Neisseria meningitidis
  misc_feature 621, 622, 623, 624, 625: 'n' is a, c, g or t
atgatttgccgaaaacctatcggacacacaccatattttgatatgaataaaacaatctgccgcactgctgcactattgataagcggtttttcatacgcaaacaccgtcattcccgatgtctcccccgtcgcacaaggtcaacatgtcttcattaacatccctcagcaacgcctgttcctctacaccgacggcaaactgaccaaggtttatcccgttgcagtaggtcgggcgatgacgcaaaccaatctaggcgaacataaaatcggtgcgaaagcctataaccctgtttggtacatccccaaatccatacagaaagaacgcggcgacggcgtaaaaaccatagccgccggcccggacaaccctttggggccggtttttgtccgcttaggcgaccccaaactcggtttgggcatacacgggaccaatgcgccggccagcgtccccggggttcggagtcacggctgcgtccgcatgaaatcgcccgacgcgctcgagtttgccaaaaccatcgccagcggctcgcccgcctccgtcatctatcaaatggcgggtctcaatgaagatgcggatcgcaacctgtggcttgccgccttccgcgacccttacggtaagaacaacctnnnnncacacacttaa

SEQ ID NO: 57831 - DNA, 1047 bp, Neisseria meningitidis; identical to SEQ ID NO: 45947

SEQ ID NO: 57832 - DNA, 663 bp, Neisseria meningitidis; identical to SEQ ID NO: 38761

SEQ ID NO: 57833 - DNA, 153 bp, Neisseria meningitidis; identical to SEQ ID NO: 38893

SEQ ID NO: 57834 - DNA, 393 bp, Neisseria meningitidis
atgtattcgtttgaagcgaatgcaaatgcagtaaaaatatctgaaactgtttcagttgataccggacaaggtgcgaaaattcataagtttgtacctaaaaatagtaaaacttattcatctgatttaataaaaacggtagatttaacacacatccctacgggcgcaaaagcccgaatcaacgccaaaataaccgccagcatttcccgcgccggcgtattggcggggggcggcaaacttgcccgcttaggcgcgaaattcagcacaagggcggttccctatgtcggaacagcccttttagcccatgacgtatacgaaactttcaaagaagacatacaggcacgaggctaccaatacgacaccgaaaccgacaaatttgtaaaggtctcaggctaa

SEQ ID NO: 57835 - DNA, 366 bp, Neisseria meningitidis; identical to SEQ ID NO: 38539

SEQ ID NO: 57836 - DNA, 2277 bp, Neisseria meningitidis; identical to SEQ ID NO: 44161

SEQ ID NO: 57837 - DNA, 702 bp, Neisseria meningitidis; identical to SEQ ID NO: 44204

SEQ ID NO: 57838 - DNA, 840 bp, Neisseria meningitidis; identical to SEQ ID NO: 36521

SEQ ID NO: 57839 - DNA, 291 bp, Neisseria meningitidis; identical to SEQ ID NO: 44455

SEQ ID NO: 57840 - DNA, 2082 bp, Neisseria meningitidis; identical to SEQ ID NO: 44306

SEQ ID NO: 57841 - DNA, 519 bp, Neisseria meningitidis
atgccgtctgaaacaccgttttccttgtccgaaagccgccattatgaatttgaaggaaactccactataatacggcattcagatctccagacggcatcgcgcccgtcagaccgcacacaaaccaaaaggaaatacatgttccgtactatgcttggcggaaaaatccaccgcgccaccgttaccgaagccgatttgaactacgtcggcagtattaccgtcgatcaagacctgttagacgcagcaggcatctaccccaacgaaaaagtcgccatcgtcaacaacaacaacggcgaacgttttgaaacctataccatttcaggcaaacgcggcagcggcgtggtctgcctgaacggggcggcggccaggctggtacagaaaggcgatatcgtcatcatcatgtcttacgtccaactctccgaacccgaaatcgccgcacacgaacccaaagtcgtcttggtagacggaaacaacaaaatccgcgacatcatctcctacgagccgccgcacaccgtgctgtaa

SEQ ID NO: 57842 - DNA, 426 bp, Neisseria meningitidis; identical to SEQ ID NO: 36185

SEQ ID NO: 57843 - DNA, 450 bp, Neisseria meningitidis; identical to SEQ ID NO: 44603

SEQ ID NO: 57844 - DNA, 657 bp, Neisseria meningitidis; identical to SEQ ID NO: 45537

SEQ ID NO: 57845 - DNA, 252 bp, Neisseria meningitidis; identical to SEQ ID NO: 44560

SEQ ID NO: 57846 - DNA, 1287 bp, Neisseria meningitidis; identical to SEQ ID NO: 39759

SEQ ID NO: 57847 - DNA, 234 bp, Neisseria meningitidis; identical to SEQ ID NO: 45569

SEQ ID NO: 57848 - DNA, 516 bp, Neisseria meningitidis; identical to SEQ ID NO: 38690

SEQ ID NO: 57849 - DNA, 822 bp, Neisseria meningitidis; identical to SEQ ID NO: 44933

SEQ ID NO: 57850 - DNA, 807 bp, Neisseria meningitidis; identical to SEQ ID NO: 44744

SEQ ID NO: 57851 - DNA, 729 bp, Neisseria meningitidis; identical to SEQ ID NO: 39174

SEQ ID NO: 57852 - DNA, 195 bp, Neisseria meningitidis; identical to SEQ ID NO: 44174

SEQ ID NO: 57853 - DNA, 597 bp, Neisseria meningitidis; identical to SEQ ID NO: 48674

SEQ ID NO: 57854 - DNA, 2043 bp, Neisseria meningitidis; identical to SEQ ID NO: 44582

SEQ ID NO: 57855 - DNA, 1155 bp, Neisseria meningitidis; identical to SEQ ID NO: 45256

SEQ ID NO: 57856 - DNA, 861 bp, Neisseria meningitidis; identical to SEQ ID NO: 44388

SEQ ID NO: 57857 - DNA, 693 bp, Neisseria meningitidis
atgccgtctgaaaccgcttcagacggcatcgtcagcacaagacgcaaacccatgaaagcctttaccaaaattaccgccatcgtcgccccgctcgaccgcagcaacgtcgataccgacgccatcatccccaaacaatttctgaaatccatcaaacgcagcggtttcggccccaatgcctttgacgaatggcgttacctcgaccacggcgaaccgggcatggacaacagcaaacgcccgttgaaccctgatttctcgctgaaccagccgcgttaccaaggcgcgcaaatcctgttgacgcgtaaaaacttcggttgcggctcttcacgcgaacacgccccttgggcattggacgactacggcttccgcgccgtcatcgcccccagcttcgccgacatcttcttcaacaactgctacaaaaacggccttttacctatcgtgttgaccgaagaacaagtcgatcggcttttcaaagaagttgaagccaacgaaggctatcagctctccatcgaccttgccgaacaaaccctgaccacccctggcggcgaaacattcacattcgacattaccgaacaccgcaaacactgcctcttaaacggcttggacgaaatcggactgaccctgcaacatgccgatgaaattcacgcctttgaagaaaaacgccgccaaagccagccttggctgtttaacggttaa

SEQ ID NO: 57858 - DNA, 417 bp, Neisseria meningitidis; identical to SEQ ID NO: 39610

SEQ ID NO: 57859 - DNA, 600 bp, Neisseria meningitidis; identical to SEQ ID NO: 45296

SEQ ID NO: 57860 - DNA, 492 bp, Neisseria meningitidis; identical to SEQ ID NO: 44896

SEQ ID NO: 57861 - DNA, 585 bp, Neisseria meningitidis
atgcacatactgaccgccggcgtggacgaggcaggacgcggacctttagtcggcagcgtgtttgccgccgccgtcatccttccggaaacattcgacctgcccggactgaccgactccaaaaaactcagcgagaaaaaacgcgacgcgcttgccgaaatgataaaaaatcaggcggccgcgtggcacgtcgccgccgccacgcccgaagaaatcgccagcctcaacatcctgcacgctaccatgctcgccatgaaacgcgccgttgacggtttggctgtgcgtcccgaaagaatattcatcgacggcaaccgcattccagaacatttaggtatccctgccgaagccgtcgtcaaaggcgacagcaaaatcatcgaaatctccgccgcatccgttttggcaaagaccgcacgcgatgcggaaatgtacgcactggcgcaacgccatccccaatacggtttcgacaaacacaaaggttacggcacgaagcagcatctggaagccctcaaacaatacggcgtgctgcccgaacatcgccgcgacttcgcccccgtcagaaacctgctcgcgcagcagacgctgttttaa

SEQ ID NO: 57862 - DNA, 1173 bp, Neisseria meningitidis; identical to SEQ ID NO: 45950

SEQ ID NO: 57863 - DNA, 1266 bp, Neisseria meningitidis
atgttcagcttcttccgtcgcaagaaaaaacaggaaacgccggctctcgaggaggctcaaattcaggaaaccgcagcaaaagcagagtccgaaaccgatcaagtaattgaaaatattaaagaagatgctgaatctttagcagaaagcgtcaaagggcaggtcgaatctgccgttgaaaccgtcagcggtgcggttgaacaggtaaaggaaaccgttgccgagatgctgtctgaagcagaggaagcggcggaaaaagcagcggaacaagtcgaagcggcaaaagaagccattgccgaaaccgtcggcgaggctgtcgggcaagttcaagaagccgttgcgacaactgaagaacacaagctcggttgggcggcgcgtttgaaacaaggcctgaccaaatcgcgcgacaaaatggcgaaatcgctggcgggcgtgttcggcggcggacaaatcgacgaagatttgtacgaagagctggaaaccgtgctaattaccagcgacatgggcatggaagccaccgaatacctgatgaaagacgtgcgcgaccgcgtcagcctcaaagggctgaaagacggcaacgaattgcgcggcgcgttgaaagaagccttgtacgacctgattaagcctctggaaaaaccattggtcttgcccgaaaccaaagagccgtttgtcatcatgcttgccggcatcaacggcgcgggcaaaaccacgtctatcggcaaactcgccaaatatttccaagcgcagggcaaatccgtattgctggcggcaggcgacactttccgcgccgccgcccgtgagcagcttcaggcatggggcgaacgcaacaacgttaccgtgatttcgcaaaccacgggcgattccgccgccgtgtgcttcgatgccgtccaagccgccaaagcgcgcggcatcgacattgtgctggccgacaccgccggccgcctgcccacgcagcttcatttgatggaagaaatcaaaaaagtgaaacgcgtgctgcaaaaagccatgcccgacgcgccgcacgaaatcatcgtcgtgcttgatgccaacatcgggcaaaacgccgtcaaccaagtcaaagcctttgacgacgcattagggctgaccggtttaatcgtgaccaaactcgacggcacggcaaaaggcggcatcctcgccgcgcttgcttccgaccgccccgtccccgtccgctacatcggcgtgggcgaaggcatagacgatttgcgcccgtttgacgcgcgcgcgtttgtggacgcactgctggattga

SEQ ID NO: 57864 - DNA, 1467 bp, Neisseria meningitidis
atgatgaaattgggtttcaaaccgatacccctcgccattgccgcagtattgtgcgccctggttttggcactgcccgtacccgacggggtcaagcctcaggcttggacgctgctggccatgtttgtcggtgtgattgccgccattatcggcaaggccatgccgttgggcgcgctgtcgattattgccgtcgggttggtcgcagtaaccggcgtaaccgccgacaaaccgggcgcggcgatgagcgatgcgttgagtgcgttcgccaatccgttgatttggctgattgccatcgcagttatgatttcgcgcggtttgctcaaaacagggctggggatgcgtatcggatatttgtttatcgccgtttttggaagaaaaacgctgggcatcggttacagtctcgctctttccgaactgctgctggctcccgttaccccttccaataccgcgcgcggcggcggcattatacatccgattatgcagtcgattgccggcagttacggctccaatcccgcaaaaggcacagaaggcaagatgggtaaatatttggctttggtcaactatcattccaatcccatttcgtcggctatgtttattactgcaactgcccccaaccctttaatcgtcaacttgattgccgaaaatttaggcagtagtttccgtctttcttggggggcgtgggcgtgggcaatggctgttcccggcgttatcgcctttttcgttatgcctttgattttatattttttgtatccgcctgaaattaaagaaacgcccaatgccgttcaatttgccaaagaccgtctgagggagatgggtaaaatgtcggcagacgaaatcattatggcggttattttcggtatcttgctgctgttgtgggcagatgttcccgcccttattaccggcaatcacgcttttagtatcaacgccaccgccaccgcatttatcggattaagcctgcttttgctttccggtgtattgacttgggacgatgttttgaaagaaaaaagtgcgtgggatacgattatttggtttggcgcattgattatgatggccgcatttttaaataaactcggactgattaaatggttctccggagtgttggcggaaagtgtcggcggtttgggcgttagcggcacggctgcgggcgtaatcctcgtgcttgcttatatgtatgcgcattatatgtttgccagtactactgcacatattaccgctatgttcggcgcatttttcgctgctgccgtttcactgaatgccccggcgatgccgaccgcgctgatgatggcggccgcatctaacattatgatgaccctcactcattatgcgaccggtacttcgcctgtgattttcggttcgggctacaccacaatgggagaatggtggaaggcgggttttatcatgagcgtagtcaattttctgatttttttcgttatcggcagcatttggtggaaagttctggggtattggtaa

SEQ ID NO: 57865 - DNA, 738 bp, Neisseria meningitidis; identical to SEQ ID NO: 42917

SEQ ID NO: 57866 - DNA, 768 bp, Neisseria meningitidis; identical to SEQ ID NO: 44841

SEQ ID NO: 57867 - DNA, 1371 bp, Neisseria meningitidis; identical to SEQ ID NO: 44745

SEQ ID NO: 57868 - DNA, 1146 bp, Neisseria meningitidis; identical to SEQ ID NO: 44590

SEQ ID NO: 57869 - DNA, 225 bp, Neisseria meningitidis; identical to SEQ ID NO: 38642

SEQ ID NO: 57870 - DNA, 834 bp, Neisseria meningitidis; identical to SEQ ID NO: 39098

SEQ ID NO: 57871 - DNA, 747 bp, Neisseria meningitidis; identical to SEQ ID NO: 44850

SEQ ID NO: 57872 - DNA, 201 bp, Neisseria meningitidis; identical to SEQ ID NO: 38240

SEQ ID NO: 57873 - DNA, 2835 bp, Neisseria meningitidis; identical to SEQ ID NO: 44939

SEQ ID NO: 57874 - DNA, 936 bp, Neisseria meningitidis; identical to SEQ ID NO: 44359

SEQ ID NO: 57875 - DNA, 870 bp, Neisseria meningitidis; identical to SEQ ID NO: 38859

SEQ ID NO: 57876 - DNA, 657 bp, Neisseria meningitidis; identical to SEQ ID NO: 39384

SEQ ID NO: 57877 - DNA, 492 bp, Neisseria meningitidis; identical to SEQ ID NO: 45648

SEQ ID NO: 57878 - DNA, 501 bp, Neisseria meningitidis; identical to SEQ ID NO: 45157

SEQ ID NO: 57879 - DNA, 435 bp, Neisseria meningitidis; identical to SEQ ID NO: 36184

SEQ ID NO: 57880 - DNA, 678 bp, Neisseria meningitidis; identical to SEQ ID NO: 44616

SEQ ID NO: 57881 - DNA, 585 bp, Neisseria meningitidis; identical to SEQ ID NO: 38223

SEQ ID NO: 57882 - DNA, 570 bp, Neisseria meningitidis
atggcggcaggcaaacataccaaacacagcaaccgggtacgcattatcggcgggcaatgccggggcaggaaattgagtttcacatccgccgacggactgcgtccgacacccgacagcgtgcgtgaaaagctgtttaactggctgggacaggatttgacgggtaaaacggttttggatctcttcggaggcagcggcgcactcggtatggaggcggcatcgcgtcatgcaaaacggatcgtgattgcagacaacaaccgtcaaacggtacaaacccttgagaaaaacagccgcgaactgggtttggggcaggtgcaaatcgtcttttcagacggcatcgcatatctgaagaccgcatccgaacagtttgatgttgtctttctcgacccgccgtttgcatggcaggactggcaaatcctgtttgatgccttgaagccgtgcctgaacccccgggcattcgtctatctcgaggcgggtacgctgccggatattcccgattggctgacggaatatagagaggggaaatcggggcagagtacatttgaattaagggttttccaagtggctgaataa

SEQ ID NO: 57883 - DNA, 1257 bp, Neisseria meningitidis; identical to SEQ ID NO: 44253

SEQ ID NO: 57884 - DNA, 651 bp, Neisseria meningitidis; identical to SEQ ID NO: 45139

SEQ ID NO: 57885 - DNA, 600 bp, Neisseria meningitidis; identical to SEQ ID NO: 48838

SEQ ID NO: 57886 - DNA, 450 bp, Neisseria meningitidis; identical to SEQ ID NO: 45380

SEQ ID NO: 57887 - DNA, 276 bp, Neisseria meningitidis; identical to SEQ ID NO: 44823

SEQ ID NO: 57888 - DNA, 2142 bp, Neisseria meningitidis
atgtgtaaaccgaattatggcggcattgtcttgttgcccttacttttggcatcttgtattggcggcaatttcggcgtgcagcctgttgtcgaatcaacgccgaccgcgtaccccgtcactttcaagtctaaggacgttcccacttcgccccctgccaaaccttctatagaaaccacgccggtcaatcaacctgccgtcggtgcggcaatgcggctgccaaggcggaatatcgcaacttttgataaaaatggtaatgaaattcccgatagtaagcaggcagaggagtatctgccgctcaaagaggaggatatcctgtttttagacggtacgccgcaagaacaggccgacaaacttaaaaagaaaatcaacgaacggtatcctgatgtgaaggttatcacatcgacaaatgaagatgcaaaatataattatcggtttgtccgtgcgggctatgtgtttaccagggggggaggatacgataatgaaaaagaaaagactcctgatggtaaggagtttgttaaccgatttagttatgacggttttgtatattattcaggagaacatccgtctcaatccctgccgcgtactgaaaccgtgcaatattccggtaattggcagtttgttaccgatgccaagcgttggcggacacaaaatgatggtggcggtataaatttggggtttagtcacttttacggcaacgatatcggtgcaacctcttatgccgctagggatgtcgacgacagggaaaaacatcctgccaaatatacggtagatttcggtaacaaaaccctgacgggcgagctgattaaaaaccaatatgtcaaacccaatgagcagcaaaaaccgctgatcatttacaacattactgcaaaattggacggcaaccgctttaccggcagtgccagtgtcaatcctaaattgaagacaaactattcggacaaggaatatttgtttttccatgccgatgccgatcagcggcttgagggcggttttttcggcgataacggagaagagcttgccggacggtttatcagcaacgacaacagcgtattcggcgtattcgcaggcaaacaaaaaacagacgcatcaaacgcatcagatacaaaacctgccctgtcgtctggaaaacacaccaaaatcttggattctctaaaaatttccgttgacgaggcaagtgataacaatgcccgcccgtttgccatttcccctatgcccgattttggtcatcctgacaaacttcttgtcgaagggcgtgaaattcctttggtaaacaaagaacaaaccatcgagcttgccgacggcaggaaaatgatcgtccgtgcttgttgcgattttctgacctatgtgaaactcggacggataaaaaccgaacgcccggcaagtaaaccaaaggcggaagataaaggggaggatgaagagggtgcaggcgttgataacggcgaagaaggcgaagacgaagccgtagaagacgaaggcagcgaagaagacgaagtttccgaaggtgataacggtgaaaacgaagaagaaatcgccgaagaagaaaccgaagaagaagttgaagaacccgaagaagaagttgaagaacccgaagaagaattgccggcagaagaaggcaacggcggttcaggcagcatcctgcccactccggaagcctctaaaggcagggacatcgaccttttcctgaaaggtatccgcacggcggaagccgacattccaaaaaacggaacggcgcattataccggcacttgggaagcgcgtatcggcgtatcggatagtggtacgtccattcaaaaggatagctatgcgaatcaaggggcaaaagcagaatttaccgttgatttcgaagcgaagacggtgtccggaatgctgacagaaaaaaatgatacaacccccgctttttatattgaaaaaggtgtgattgacggtaacggtttccacgctttggcgcatactcgggagaacggtattgacctttctgggcagggttcgactaacccgaagaacttcaaagccgacaatcttcttgtaacaggcggcttttatggcccgcaggcggcagaattgggcggtaatattatcgacagcgaccggaaattcggtgcggtatttggggcgaaaaaagatgacaaggaggcaacacgatga

SEQ ID NO: 57889 - DNA, 1800 bp, Neisseria meningitidis
ttggaggttggtgcaaaacctgcttttttcgcgttacaatctgcacccgatttacttttgaatttgcctgtttggaaaaatatttttatgaaagccagccaattctttatctctactttaaaagaagcccctgccgaagccgcgcttgccagccacaagctgatgatacgcgccggtctgattaaagccaacgcgtccggcctttatacttggatgccgatggggctgcgcgtgttacgcaaagtcgaaaacgtcgtgcgcgaggaaatggcgcgcgcgggcagcgtggagctgctgatgccggtggtgcagcctgccgagctgtggcaggaatccggccgctgggaattttacggtaaagaactgctgcgcctgaaagaccgccacgaccgcgatttctgcatgggaccgacctgcgaggaagtcatcgccgacatcgtgcgcaaagaaatcaacagctacaaacagctgccgaaaaacttttaccacatccaaaccaaattccgcgatgaagtgcgcccgcgtttcggcgtgatgcgcgcgcgcgagttcgtcatgaaagacgcttattccttccatgccgactacgcctcgcttcagacgacctatgatgccatgtatgacgcttactgccgcatctttacccgtctgggcttggcattccgccccgtcgccgcagacaccggcagcatcggcggtacgggttcgcacgagtttcaagtgttggcggaaagcggcgaagatgttattgcatacagcgacacttccgattacgccgccaatatcgagttggcaccgaccttgccgcttaaaggcgaacgcaccgctgctcaggccgagttgaccaaagtacatacaccaaatgtcaaaaccattgagtctttggttgaattcctgaatattccggttgaacaaaccctcaaatccatcgtggtcgaaagcgaaaacgaaggcgaaatcgtcttattactgttgcgcggcgaccatgagttcaacgacatcaaagccgaaaaactcgcaggcgtgaaatcgccattgacgatggcaagttctgccgcgattgtcgaacagttcggcgcaaacggcggctctcttggtcctgtcggcttcaaaggcaaagtctatgccgatttcgctaccgaaaaaggcgcggactgggtcatcggtgcgaacgaagacggctaccactataccggcttcaacttcggtcgcgatgccgccgagcctgaattcgtcgatttgcgtaatgtggtcgaaggcgacgaaagccccgacgggcaaggccgtctgaaactggcgcgcggcatcgaagtcggacacgtcttccagttgcgcgacaaatacacccaagccatgaacgtgagcttcctcgacaacaacggcaaatcgcaaatcatggaaatgggctgctacggtatcggcatcacccgcgtcgttgccgccgccatcgagcagaacaacgacgaaaaaggcatcatctggacgaaggcgatggcgccgtttgaagtcgttatcgtgccgatgaactacaaaaaatcagacgccgtgcgcgaagccgccgacaaaatctacgccgaactgctggcggcaggcgcagacgtcctcctcgacgaccgcgacgaacgcgcaggcgtgttgctgaacgattccgagctgttgggtattccgcaccgcatcgtcatcggcgaccgcgctttgaaagaaggcaatgtcgaatacgccgaacgccgcaacaacgaagcgcaggcagttgcaatcggagaaattgttgcgcgtgtaacagcttcattaaatgggtaa

SEQ ID NO: 57890 - DNA, 2151 bp, Neisseria meningitidis
atgaaaaccccactcctcaagcctctgctcattacctcgcttcccgttttcgccagtgtttttaccgccgcctccatcgtctggcagctaggcgaacccaagctcgccatgcccttcgtactcggcatcatcgccggcggccttgtcgatttggacaaccgcctgaccggacggctgaaaaacatcatcaccaccgtcgccctgttcaccctctcctcgctcacggcacaaagcaccctcggcacagggctgcccttcatcctcgccatgaccctgatgaccttcggctttaccattttaggcgcggtcgggctgaaataccgcaccttcgccttcggcgcactcgccgtcgccacttacaccacacttacctacacccccgaaacctactggctgaccaaccccttcatgattttatgcggcaccgtactgtacagcaccgccatcatccttttccaaatcatcctgccccaccgccccgttcaagaaaacgtcgccaacgcctacgaagcgctcggcagctacctcgaagctaaagccgactttttcgatcccgacgaagccgaatggataggcaaccgccacatcgacctcgccatgagcaacaccggcgtcatcaccgccttcaaccaatgccgttccgccctgttttaccgccttcgcggcaaacaccgccacccgcgcaccgccaaaatgctgcgttactactttgccgcccaagacatacacgaacgcatcagctccgcccacgtcgattatcaggaaatgtccgaaaaattcaaaaacaccgacatcatcttccgcatccaccgcctgctcgaaatgcagggacaagcctgccgcaacaccgcccaagccctgcgcgcaagcaaagactacgtttacagcaaacgcctcggccgcgccatcgaaggctgccgccaatcgctgcgcctcctttcagacggcaacgacaatcccgacatccgccacctcggccgcctgctcgacaacctcggcagcgtcgaccaacaattccgccaactccagcacaacggcctgcaggcggaaaacgaccgcatgggcgacacccgcatcgccgccatagagaccggcagcctcaaaaacacctggcaggcaatccgtcctcagctaaacctcgaatcaggcgtattccgccatgccgtccgcctgtccctcgtcgttgccgccgcctgcaccatcgtcgaagccctcaacctcaacctcggctactggatactactgaccgcccttttcgtctgccaacccaactacaccgccaccaaaagccgcgtccgccagcgcatcgccggcaccgtactcggcgtaatcgtcggctcgctcgtcccctacttcaccccgtctgtcgaaaccaaactctggattgtcatcgccagtaccaccctctttttcatgacccgcacctacaaatacagtttctccaccttcttcattaccattcaagccctgaccagcctctccctcgcaggtttggacgtatacgccgccatgcccgtacgcatcatcgacaccattatcggcgcatcccttgcctgggcggcagtcagctacctgtggccagactggaaatacctcacgctcgaacgcaccgccgcccttgccgtatgcagcaacggtgcctatctcgaaaaaatcaccgaacgcctcaaaagcggcgaaaccggcgacgacgtcgaataccgcgccacccgccgccgcgcccacgaacacaccgccgccctcagcagcaccctttccgacatgagcagcgaacccgcaaaattcgccgacagcctgcaacccggctttaccctgctcaaaaccggctacgccctgaccggctacatctccgccctcggcgcataccgcagcgaaatgcacgaagaatgcagccccgactttaccgcacagttccacctcgccgccgaacacaccgcccacatcttccaacacctgcccgaaaccgaacccgacgactttcagacagcactggatacactgcgcggcgaactcgacaccctccgcacccacagcagcggaacacaaagccacatcctcctccaacagctccaactcatcgctcggcagctcgaaccctactaccgcgcctaccgacaaattccgcacaggcagccccaaaacgcagcctga

SEQ ID NO: 57891 - DNA, 966 bp, Neisseria meningitidis; identical to SEQ ID NO: 39761

SEQ ID NO: 57892 - DNA, 231 bp, Neisseria meningitidis; identical to SEQ ID NO: 37019

SEQ ID NO: 57893 - DNA, 207 bp, Neisseria meningitidis; identical to SEQ ID NO: 39624

SEQ ID NO: 57894 - DNA, 483 bp, Neisseria meningitidis; identical to SEQ ID NO: 44210

SEQ ID NO: 57895 - DNA, 1311 bp, Neisseria meningitidis; identical to SEQ ID NO: 44183

SEQ ID NO: 57896 - DNA, 1635 bp, Neisseria meningitidis; identical to SEQ ID NO: 45745

SEQ ID NO: 57897 - DNA, 321 bp, Neisseria meningitidis
atgaccgaaagcgagtttatccgcgcgagcgaagcattatttgaacacatcgaagaccaaatcgacgaaaacggctgggatttcgactgccggtttgccggaaacgtcctgaccatcgaagccggagacggcacgcaaatcatcgtcaaccgccacacgcccaatcaggaattgtggattgccgcaaaaagcggcggctaccatttcgccgaacaaaacggcaaatggctggcaacgcgcgacagccgcgatttttatgatgttttgaacgaagcactgagcgcggcttcgggcgaagcggttgagattgaggaattgtga

SEQ ID NO: 57898 - DNA, 525 bp, Neisseria meningitidis; identical to SEQ ID NO: 39459

SEQ ID NO: 57899 - DNA, 342 bp, Neisseria meningitidis; identical to SEQ ID NO: 38375

SEQ ID NO: 57900 - DNA, 378 bp, Neisseria meningitidis; identical to SEQ ID NO: 38701

SEQ ID NO: 57901 - DNA, 2790 bp, Neisseria meningitidis
atgaccgattacagtaaaaccgtaaacctgctcgaaagcccgtttccgatgcgcggcaatcttgccaagcgcgagcctgcatggctgaaaagctggtacgagcaaaaacgctaccaaaaactgcgcgaaatcgccaaaggtcgtccgaagttcatcctgcacgacggcccgccgtatgccaacggcgacatccacatcggtcacgccgtcaacaaaattctcaaagacatcattatccgcagcaaaacccaagccggttttgacgcgccttatgtgccgggttgggactgtcacggtttgcctatcgaagtgatggtagaaaagctgcacggcaaagacatgcccaaagcgcgtttccgcgaattgtgccgcgaatatgccgccgaacaagttgcctgccagaaaaaagacttcatccgtctgggcgtgttgggcgactgggacaagccctacctgaccatggattttaaaaccgaagccgataccgtgcgtatgctcggcgaaatctacaaatccggctatctctaccgcggcgcgaaaccggttcagttctgcttggactgcggctcttcattggccgaagccgaagtggaatacaaagacaaagtatcgcctgcgattgacgtgggctatccgtttaaagacaccgctgcgcttgccgctgcattcggtttggcaggcatcgagggcaaagcgtttgccgtcatctggacgaccacgccttggacgctgccagcgagccaagccgtgtctgccggtgcggacgtggtgtatcaattaatcgatacgcccaaaggcaaattggtgctggcgaaagatttggcagaagacgcgctcaaacgttacggtttttcagacggcattgctattcttgccgaaaccaccggcgacaagctggaaaacctgcacatgaatcatccgttcctcgaacgcgatattcccatgctcaacggcgaccacgttaccaccgacgccggtaccggtttggtgcatactgcgcctgctcatggtttggaagactacgccgtctgcaataaatacggcatcgagctttacaaccccgtcaacgccgaaggcaaatacatcagtgaaacgccgcgcgttgccggcatgagcgtttgggaggccaatcccgttatcctgcaatggttggaagaaaccggcaacctcttggcaagcagcaaaatcgaacacagctacgcgcactgctggcgtcacaaaacgccgttgatttaccgtgcgaccggccaatggtttgtcggtatggataaagcaggtgccgatggtaaaaccctgcgcgataaagccatcaaagccgttgatgacactgaatttttcccatcatggggtcgtgcgcgtttggaagccatgattgaaggccgccccgactgggtggtttcgcgccaacgctattggggcacgccgatgactttctttgttcacaaagaaacgggcgagctgcatccgaactctgccgaacttttggaaaaagtcgcgcaacgcatcgaagaaaaaggcatcgaggcttggttctccctcgataagggcgaattgttgagcgcggaagattgcgaacattacgacaaactctccgacacgatggacgtatggttcgactccggttcgacccattattccgttgtgaaacagcgcgaagaattggactggcctgctgacttgtacctcgaaggcagcgatcaacaccggggctggtttcagtcgtccatgctgaccggctgcgcctcatcaatgggtcgcgcgccgtacaaacagctgctgacccatggtttcgtggtggatcaaaacgggcgcaaaatgtcgaaatccatcggcaacgtcgtcgcgccgcaagaagtgtataacgagttcggcgcggacatcctgcgcctgtgggcggcatccaccgattacagcggcgaattggcgatttccaaagaaatcctcaagcgcgtaaccgaaagctaccgccgtatccgcaacaccttgagcttcctgtttgccaacctcagcgacttcaatcctattgaagatgccgtgcaacaggcagacatggtggaaatcgaccgctacgccgtggtattggcacgtcagctgcaagagcgtctggcaggcgattactatccgcgctataccttccactttgctgtaaaagacattgtttctttctgctcggaagacttgggcgcgttctacctcgatatcctgaaagaccgcctctacaccaccaaagccgacagccgcgcccgccgcagcgcgcaaaccgccctgtaccacatcacgcgcagtttggttctcttgattgcgccgattttgtgctttaccggcgaagaagcgtgggacatcatcggcggcggcgaagaagacagcgtcctcttccacacctggcacgagttcccgaccatcaacgaaaaagccgaagccgaactggtgaaaaaatggacggcaatccgcgaagcccgcgaagcggtaaccgccgccatcgagcctttgcgcgccgacaaaaccgtcggttcgtccttgcaagccgaagccgaaatcactgcgccggaagaaatggccggctacctgaacgctttgggcgaagaattgcgctttgccttgctggtgtctaaagcagaagtgaaagtaggcagcgaacttgccgttgccgctaaagccagtgatggtgaaaaatgcgaacgctgctggcactacacccgcgatgtgggcgcggttgcaggctatgaaaccgtctgcaaacgctgtgcagagaatgtcggcagagaaggcgaaacgcgccattacgcctga

SEQ ID NO: 57902 - DNA, 594 bp, Neisseria meningitidis; identical to SEQ ID NO: 37729

SEQ ID NO: 57903 - DNA, 936 bp, Neisseria meningitidis; identical to SEQ ID NO: 44916

SEQ ID NO: 57904 - DNA, 255 bp, Neisseria meningitidis; identical to SEQ ID NO: 39349

SEQ ID NO: 57905 - DNA, 813 bp, Neisseria meningitidis; identical to SEQ ID NO: 39121

SEQ ID NO: 57906 - DNA, 855 bp, Neisseria meningitidis; identical to SEQ ID NO: 44308

SEQ ID NO: 57907 - DNA, 780 bp, Neisseria meningitidis; identical to SEQ ID NO: 39372

SEQ ID NO: 57908 - DNA, 876 bp, Neisseria meningitidis; identical to SEQ ID NO: 38647

SEQ ID NO: 57909 - DNA, 279 bp, Neisseria meningitidis; identical to SEQ ID NO: 36930

SEQ ID NO: 57910 - DNA, 288 bp, Neisseria meningitidis; identical to SEQ ID NO: 39764

SEQ ID NO: 57911 - DNA, 3699 bp, Neisseria meningitidis
atgacctaccccatccccaaaccccgtgaaaaatcccgttggcccaatctttcgcaaggctcgctgcccttggctttggcgcgttatctgccgcacaagcggctcaaggtcgtgctgacccaagatgcggaacaggcgttgcgccttcagacggcatggcggtttttccgtccgcacgacacggcggtgttcttgccggactgggaaacgctgccttacgagcgtttttctccgcatcaggatttggtgtcggagcggctctcggcgttgtggcagattaagagcggcgcggcggacgtgttgtttgtgccggttgccacggcgatgcagaagctgccgcccgtgccgtttttggcggggcgcacgttttggctgaaaacaggacagactttggatataggccgtctgaaaaccgatttggtagatgcgggctacaaccatgtttcccatgttgttgcggcgggcgagtttgccgtgcgcggcggcattgtcgatttgttccccatgggcagcgaaatgccctaccgcatcgatttgtttgacgatgaaatcgacagcatcaaaacctttgatacggacacgcagcgcaccatctcccccgtttccgaaatccgcctgctgccggcgcacgaattccccaccgacagcgaggcgcaaaaaatcttccgcagccgcttccgcgaggaagtcgatggtaatccgaacgatgcggctgtatacaaagcagtaagcaacggccacttcggtgcgggcgtggaatattacctgccgctgttttttgaaaacgagctggaaacgctgtttgactatatcggcgaagacgcgctgtttgtctctttgggcgatgttcacgccgaggcaaaccgcttttggagcgacgtcaaatcgcgttacgccatggcgcagggcgacgaaacctatccgcctttgcttccacagcatttgtatctctctgccgatgtttttgcaggccgtctgaaaaactacggacaggtgctgcccgatgtttccggcaaggaacacgccctccccgaccttgccgtcaaccgacaatccgacgagcctttgcaggcattgaaggattttcagacggcgtttgaaggacggattttgctgtgcgccgaaagtttgggacggcgcgaaaccatgctcggcttcttgcagcaaaacggtttaaaagccaaaagcgtgtctgattggcaaggcttcttgtcggcacatgagccgctgatgattacagtggcaccgttggcttacggattcaaactgggcggattgcaatccccgaaccagcagcaaactacttccgcctccgaaggagaaggcgatgcggttaccgaccaaaccgaattttccgcatccgcaacaaaccctctccctagccctctcccacaggagagggaacaaagtgcagccgtcgtttcagacagtctgaaagcagccgccgtttcaaccgaaagcagcctgccccccggtaaaagtaatctgcacgggcaaatccaacagcaacctgccccctcccccgtgggggagggttggggagagggcaaagcagttgccgctcaaagtgccatcgccgtcatcaccgaatccgatctctaccaatacgtcgcccgttcgcgcgtccacaaccgccgcaagaaacacgccgccgtttcagacggtctgttgcgcgaccttgccgaaatcaacatcggcgaccccgtcgttcacgaagaacacggcatcgggcggtatatgggcttgatcacaatggatttgggcggcgaaaccaacgaaatgatgttgcttgaatatgcaggcgaagcgcagctttatgtgcctgtttcgcaactgcatttaatcagccgctactccggtcaggcgcatgaaaacgtcgccctgcacaagctcggcagcggcgcgtggaacaaagcgaaacgcaaagccgccgaaaaagcgcgcgataccgccgccgagttgctcaacctctacgcccaacgcgctgcccaatcgggacacaagtttgaaatcaacgagttggactatcaggcgtttgccgacggtttcggctacgaggaaaccgaagaccaggccgccgccatcgccgccgtgattaaagacctgacacaggcgaagccgatggaccgactcgtgtgcggcgatgtcggctttggcaaaaccgaagtcgccctgcgcgccgcgtttgtggcggtgatgggcggcaaacaggtcgccgtactcgccccaaccacgcttctagtcgagcagcacgcgcaaaactttgccgaccgtttcgccgatttccccgtgaaagtcgccagcctttcgcgtttcaacaacagcaaagccaccaaagccgcactggaaggcttggcggacggcacggtcgacatcgttatcggcacgcacaaattggtgcaggacaacatcagattcaaaagcttaggtttagtgattatcgatgaagaacaccgcttcggcgtgcgccagaaagaacagctcaaacgcctgcgcgccaatgtcgatatccttaccatgaccgccacgccgattccgcgcaccctcagcatggcactcgaaggcctgcgcgacttctcgctgattaccaccgcgcccagccgccgcctcgccgtgaaaacctttgtcaaaccgttcagcgaaggcagcgtgcgcgaagccgtgttgcgcgaactcaaacgcggaggacaggtatttttcctgcacaatgaagtagatacgattgaaaatatgcgcgagcggctggaaaccctgctgcccgaagcccgcatcggcgtggcgcacggacaactgcgcgagcgcgagctggaacaagtcatgcgcgactttttacagcaacgattcaacgtgttgctctgttccaccatcatcgaaaccggtatcgacattcccaacgccaacaccatcatcatcaaccgcgccgacaaattcggactggcgcaactgcaccagcttcgcgggcgcgtcggacgcagccaccaccaagcctacgcctacctgctcacgcccgaatacatcaccaaagacgcagaaaaacgcctcgacgccatcgcggcagcagacgaactcggcgcaggtttcaccctcgccatgcaggatttggaaatccgcggcgcaggcgaaatcctcggcgaagggcagtccggcgaaatgatacaggtcggcttcacgctctacaccgaaatgctcaaacaagccgtgcgcgatctcaaaaaaggccgccaacccgacctcgacgcgccgctgggcatcaccaccgaaatcaaactgcacagccccgccctactgcccgaaagctactgccccgacatccacgagcgtctcgtcctctacaaacgcctcgccgtctgcgaaaccgtgcagcaaatcaacgccatacacgaagaactcgtcgaccgcttcggcctgcccgaacaacccgtcaaaacccttatcgaaagccaccacctgcggcttatggcaaaagaattgggtatcgatgccattgatgcggccggcgaagcggtaacggtaaccttcggtaaaaacaataatgtcgatccaaccgaaatcatcctgctgattcagaacgacaaaaaataccgccttgccggcgccgataagctgcggtttaccgcagagatggaaaatatcgaggtcagaatcaacaccgtaaaaaacgttttaaaaaccttgcaaaacagatgcctgcccaaataa

SEQ ID NO: 57912 - DNA, 285 bp, Neisseria meningitidis; identical to SEQ ID NO: 45785

SEQ ID NO: 57913 - DNA, 702 bp, Neisseria meningitidis; identical to SEQ ID NO: 44996

SEQ ID NO: 57914 - DNA, 1170 bp, Neisseria meningitidis; identical to SEQ ID NO: 44169

SEQ ID NO: 57915 - DNA, 471 bp, Neisseria meningitidis; identical to SEQ ID NO: 37133

SEQ ID NO: 57916 - DNA, 783 bp, Neisseria meningitidis; identical to SEQ ID NO: 38738

SEQ ID NO: 57917 - DNA, 588 bp, Neisseria meningitidis; identical to SEQ ID NO: 38394

SEQ ID NO: 57918 - DNA, 813 bp, Neisseria meningitidis; identical to SEQ ID NO: 50490

SEQ ID NO: 57919 - DNA, 234 bp, Neisseria meningitidis; identical to SEQ ID NO: 40733

SEQ ID NO: 57920 - DNA, 624 bp, Neisseria meningitidis; identical to SEQ ID NO: 44580

SEQ ID NO: 57921 - DNA, 264 bp, Neisseria meningitidis; identical to SEQ ID NO: 39198

SEQ ID NO: 57922 - DNA, 990 bp, Neisseria meningitidis; identical to SEQ ID NO: 44677

SEQ ID NO: 57923 - DNA, 951 bp, Neisseria meningitidis; identical to SEQ ID NO: 45033

SEQ ID NO: 57924 - DNA, 528 bp, Neisseria meningitidis; identical to SEQ ID NO: 39057

SEQ ID NO: 57925 - DNA, 1434 bp, Neisseria meningitidis
atgaacgaatattcccaattaatcaagcatcccgatatttccctttccccgatttcagacggcatcggggtcggcaatccggcgacgggtgaaattttggcgtatgtccgcaagacggattcggacaaactgaaaaacctgattcaaaaggcggcggcagcgcaaaaattatgggcggcgaaaactgctttggaacgcgccgacatattgtggtgttggtattttttagttaaagaaaacaaagaagcactggcgcgcctgatgacgatggagcagggcaaaagcctgaccgagtcgcgcggcgaaattgattatgcggcttcgtttgtgcgctggtttgccgaagaggcgcggcggattgacggcgatgtgctgacaagcgtgaaagcgtcgcaaaaactggtcgtgttgaaacagcccgtcggcgttaccgctgcgattacgccgtggaactttccgtccgcgatgattgcgcgcaaggccgcgcctgctttggcggtgggttgcgcgatgatcatcaaacccgcatcgctcacgcctttgagtgcgtatgccttggcttcgttggcttacgaagcgggcgtaccacaggatttgttgcccgtcgtcagcggccgcgcatcggaaatcggccgtgaatttgccacgaacccgattatccgcaaaatcagcttcaccggctctaccgaagtcggtgcgaaaatttttgccgacagcgcggcggacattaaaaaactcagtttggagctgggcggcaacgcgccgtttatcgtgtttgacgatgccgatttggacaaagccgtcgaaggtgcgctcgccagcaagttccgcaacagcggtcagacctgcgtctgcaccaaccgcgtttacgcccaatcgggcatttacgacgcattttgccgcaaattgagtgaaaaagcagccgcgctcaaattgggcaacggcttggaggatggcgtaaaccaagggccgttgattgaggaaaaagcggtggaaaaagtcgagcagcacatcgccgacgcgctctcaaaaggcgcgatctgtctgaccggcggcaaacgcagcgcgttgggcggaacgttttttgagccgactgtcttaagcggcattacggcacaaatggcggtggcacgcgaagaaaccttcgggcctttgtgtccggtattccgttttgaaaccgaagccgaggtcatcgaggctgcgaacaatacggaatacggtttggcagcttaccttttcaccgccgacaccgcccgccaatggcgcgtcggcgaagccttggaatacggcatggttggcatcaatacgggcttaatcagtaatgaagcggcaccgtttggcggcgtgaaacgcagcggtttgggacgtgaaggcagcaaatacggtgcggacgaatatctagaattgaaatatctgtgtatggatgtcgggtga

SEQ ID NO: 57926 - DNA, 921 bp, Neisseria meningitidis; identical to SEQ ID NO: 44268

SEQ ID NO: 57927 - DNA, 981 bp, Neisseria meningitidis; identical to SEQ ID NO: 44717

SEQ ID NO: 57928 - DNA, 372 bp, Neisseria meningitidis; identical to SEQ ID NO: 36308

SEQ ID NO: 57929 - DNA, 942 bp, Neisseria meningitidis
atgaaaaccctgctcctcctcatccccctcgtcctaaccgcctgcggcacactgaccggcatacccgcccacggcggcggcaaacgctttgccgtcgaacaagaactcgtcgccgcatcgtcccgcgccgccgtcaaagaaatggatttgtccgccctgaaaggacgcaaagccgccctttacgtctccgttatgggcgaccaaggttcgggcaacataagcggcggacgctactctatcgacgcactgatacgcggcggctaccaaaacaatcccgaaagtgccacccaatacagctaccccgcctacgacactaccgccaccaccaaatccgacgcgctctccagcgtaaccacttccacatcgctcttaaacgcccccgccgccgccctgactagaaacagcggacgcaaaggcgaacgctccgccggactgtccgtcaacggcacgggcgactaccgcaacgaaaccctgctcgccaacccccgcgacgtttctttcctgaccaacctcatccaaaccgtcttctacctgcgcggcatcgaagtcgtaccgcccgaatacgccgacaccgacgtattcgtaaccgtcgacgtattcggcaccgtccgcagccgtaccgaactgcacctctacaacgccgaaacccttaaagcccaaaccaagctcgaatatttcgccgtcgaccgcgacagccggaaactgctgattgcccctaaaaccgccgcctacgaatcccaataccaagaacaatacgccctttggaccggcccttacaaagtcagcaaaaccgtcaaagcctcagaccgcctgatggtcgatttctccgacatcaccccctacggtgacacaaccgcccaaaaccgtcccgacttcaaacaaaacaacggtaaaaaacccgatgtcggcaacgaagtcatccgccgccgcaaaggaggataa

SEQ ID NO: 57930 - DNA, 1386 bp, Neisseria meningitidis; identical to SEQ ID NO: 39654

SEQ ID NO: 57931 - DNA, 396 bp, Neisseria meningitidis; identical to SEQ ID NO: 39895

SEQ ID NO: 57932 - DNA, 435 bp, Neisseria meningitidis; identical to SEQ ID NO: 45690

SEQ ID NO: 57933 - DNA, 771 bp, Neisseria meningitidis; identical to SEQ ID NO: 45200

SEQ ID NO: 57934 - DNA, 1083 bp, Neisseria meningitidis; identical to SEQ ID NO: 45535

SEQ ID NO: 57935 - DNA, 1764 bp, Neisseria meningitidis; identical to SEQ ID NO: 45457

SEQ ID NO: 57936 - DNA, 1077 bp, Neisseria meningitidis; identical to SEQ ID NO: 45890

SEQ ID NO: 57937 - DNA, 957 bp, Neisseria meningitidis; identical to SEQ ID NO: 45175

SEQ ID NO: 57938 - DNA, 1080 bp, Neisseria meningitidis
atggcatccgcttttggagagaccgcgctgcaatgcgccgctttgacggacaatgttacgcgtttggcgtgttacgacaggatttttgcggcacagcttccgtcttcggcagggcaggaagggcaggagtcgaaagccgtactcaatctgacggaaaccgtccgcagcagcctggataagggcgaggcggtcattgttgttgaaaaaggcggggatgcgcttcctgccgacagtgcgggcgaaaccgccgacatctatacgcctttgagcctgatgtacgacttggacaaaaacgatttgcgcgggctgttgggcgtacgcgaacacaatccgatgtaccttatgccgctctggtacaacaattcgcccaactatgccccgggttcgccgacgcgcggtacgactgtacaggaaaaattcggacagcagaaacgtgcggaaaccaaattgcaggtttcgttcaaaagcaaaattgccgaagatttgtttaaaacccgcgcggatctgtggttcggctacacccaaagatccgattggcagatttacaaccaaggcaggaaatccgcgccgttccgcaatacggattacaaacctgaaattttcctgacccagcctgtgaaggcggatttgccgttcggcggcaggctgcgtatgctcggtgcgggttttgtccaccagtccaacggacagagccgtcccgaatcgcgttcgtggaacaggatttacgccatggcaggcatggaatggggcaaattgacggtgattccgcgcgtgtgggtgcgtgcgttcgatcagagcggcgataaaaacgacaatcccgatattgccgactatatggggtatggcgacgtgaagctgcagtaccgcctgaacgacaggcagaatgtgtattccgtattgcgctacaaccccaaaacgggctacggcgcgattgaagccgcctacacgtttccgattaagggcaaactcaaaggcgtggtacgcggattccacggttacggcgagagcctgatcgactacaaccacaagcagaacggtatcggtatcgggttgatgttcaacgacttggacggcatctga

SEQ ID NO: 57939 - DNA, 1842 bp, Neisseria meningitidis; identical to SEQ ID NO: 44310

SEQ ID NO: 57940 - DNA, 234 bp, Neisseria meningitidis; identical to SEQ ID NO: 41393

SEQ ID NO: 57941 - DNA, 297 bp, Neisseria meningitidis; identical to SEQ ID NO: 38749

SEQ ID NO: 57942 - DNA, 1893 bp, Neisseria meningitidis; identical to SEQ ID NO: 37559

SEQ ID NO: 57943 - DNA, 1059 bp, Neisseria meningitidis; identical to SEQ ID NO: 40263

SEQ ID NO: 57944 - DNA, 1104 bp, Neisseria meningitidis; identical to SEQ ID NO: 44659

SEQ ID NO: 57945 - DNA, 1389 bp, Neisseria meningitidis; identical to SEQ ID NO: 45424

SEQ ID NO: 57946 - DNA, 522 bp, Neisseria meningitidis
ttgctgccgcaaaacggtgtgccggaatatggagaaaaaagaccgatgcaaaaaatccccctgaccgtacgcggtgcggaattgctgaaacaggaattgcagcagctcaaaagcgtggcgcgtcccgaagtgatcgaagcgattgccgaagcccgttcgcacggcgatttgtccgaaaacgccgaatacgaagccgccaaagaacgccaaggctttatcgagggccgcatttccgagctggaacacaaactttccgttgcccacatcatcaatccgaccgaaatccacgccgaaggcaaaatcgtgttcggtacgacggttacgctggaagatttggaaacggaagaacacgttacctatcaaattgtcggcgaagacgaagccgacatcaaacagggcaaaatctatgtcggctcaccgattgcccgcgccttaatcggcaaggaagagggcgatacggcggaagtccaagccccgggcggcgtgcgcgaatacgacattatcgaagtccgatatatttga

SEQ ID NO: 57947 - DNA, 1458 bp, Neisseria meningitidis; identical to SEQ ID NO: 44683

SEQ ID NO: 57948 - DNA, 1008 bp, Neisseria meningitidis; identical to SEQ ID NO: 44483

SEQ ID NO: 57949 - DNA, 894 bp, Neisseria meningitidis
atgattattgtcatgagcaggcgtgccgccgaagcggacattgccggcgttgtcgcctttatccgcagcagaggtctgcgagaacacatttctcacggcgacgagcgtaccgtcatcggcgcaatcggcgacgatagggttttgagcgtcagggaggtgcagacgctgccggaggtcgagaaagccgtccgcattttggatacatggaaaaccgtcagtcgggaaaatcgggcggaagacagccgcgttgccgccaaaggcgtggctttcggcggcggggaaaccgtccgtatcgccgcagaaccgtcagtatggcgcaatgcggatgcagtgtttctggatccgtttttcacttcggcaaacttatacgacacttcaagtgcggatgaaaggcggggacggtgcagacggttggcggaacagaccgcatcggcgcatggcgcagggaaacccgtattggtgcgcgtccgcaacgtccgccatgtcgaagcggctttgaatgcgggggcggacatcctgtatttgggcggcgggctgatgtccgatcttgccgtattgaatgaagccggaagcctgaacattcccttggtgctgtgtaaagacaagcaccattctgccgaagattggttgaatgccgcagaatatgtcgtctcgcgcggcaaccgccacctgattctgggcgagtcgggcgtgttgagccataccaaagaccatccctaccgtttggatgtcgaatccatcgtgaaagtccgccaaatcagccatctgcccgtgattgcgaatattacgggattatggaaccgcgatatgccgcaggaaatcctgtacggcttggcaaaggcggcaggcgcgtgcggaatcgtcggaacctgttttgaaaagtcgggcggatag

SEQ ID NO: 57950 - DNA, 477 bp, Neisseria meningitidis; identical to SEQ ID NO: 44496

SEQ ID NO: 57951 - DNA, 1929 bp, Neisseria meningitidis
atgtccaaaaaccaaaatcacgaagaataccaagacgatgcccgacccctgacgattgaggaacaacgcgcgcgcctgcgccaactcatcattatgggcaaagaacgcggctacatcacctactccgaaatcaatgacgcactgcccgacgatatgtccgatgccgatcaaatcgacaacatcgtcagtatgatttccggtttgggtatccaagttaccgaacacgcccccgatgcggaagacatattgttaagcgacaatgccgccgttaccgacgatgatgccgtcgaagaagccgaggccgccctttccagcgccgactccgagttcggcaggacgaccgaccccgtccgtatgtatatgcgcgaaatgggacaggtcgacctgctgacccgcgaagacgaaatcatcatcgccaaaaaaatcgaaaacgccctgaaaaatatggttcaggccatctccgcctgcccgggatccattgcggaaatcttagaactcatcgaaaaaatccgcaaagacgaaatccgcgtcgacgaagtcgtagaagccattatcgacccgaatgaagtattgctcaacgaattgggcttggggcacttggaaaccacagcgcccgagaaaccttccaacgacaattcggacgaaaacgaagacgacgaagaatcggaagaagatgcggatgaaatctcggcagccaatctcgccgaattgaaacaaaaagtcatcggccactttgcccaaatcgaaaaagactacaaaaaaatgatcggtcgtttggaaaaacaccacagccggcacaaagactatctcgcctaccgcgacgcgattgccaacaaactgctggaagtccgtttcgccacccggcaaatcgacagcctcagcagcagcctgcgcggaaaagtagaaaacatccgcaaactcgaacgcgaaatccgcgacatctgcctcgaccgcgtccatatggagcgcgactacttcatccaaaacttcctgcccgaaatcaccaatctggaatggattgaagaagaaatcgccaaaggcagggtttggagcgacgcgctcgaccgcttccgccacgccatcctcgaaaaacaaaccgagttggcagatatggaaaaagaaacccgcatttccatcgaagagttgaaagaaatcaacaaaaatatggtgtcgagcgaaaaagaaaccgcagccgccaaacaggaaatgattcaggcaaacttgcgcctcgtcatttccattgccaaaaaatacaccaaccgtggcttgcagttccttgatttgattcaggaaggtaacatcggcctgatgaaagcggtcgacaagttcgaataccgccggggctacaaattctccacctacgcaacctggtggatccgccaggcaatcacccgttcgattgccgatcaggcgcgtaccatccgcattccggtacatatgattgaaaccatcaacaagatgaaccgcatctcgcgccaacaccttcaagaaaccggcgaagaacccgattccgccaaacttgccgaactgatgcagatgcccgaagacaaaatccgcaaaatcatgaaaatcgccaaagagccgatttcgatggaaacccccatcggcgacgacgacgattcgcacttgggcgacttcatcgaagatgccaacaatgttgcgccggccgatgcggcaatgtacaccagcctgcacgaagtaaccaaagaaatcctcgaaagcctgacaccgcgtgaggcaaaagtcctgcgtatgcgtttcggcatcgatatgaacaccgaccacacgctggaagaagtcggcagacagtttgacgtaacgcgcgaacgcatccgacaaatcgaggcaaaagcactccgcaagctgcggcatccgacaagaagcgaccgtttgagaagtttcttggacagcgaagacagcaagctgtaa

SEQ ID NO: 57952 - DNA, 597 bp, Neisseria meningitidis; identical to SEQ ID NO: 38176

SEQ ID NO: 57953 - DNA, 678 bp, Neisseria meningitidis; identical to SEQ ID NO: 44564

SEQ ID NO: 57954 - DNA, 1509 bp, Neisseria meningitidis; identical to SEQ ID NO: 41877

SEQ ID NO: 57955 - DNA, 384 bp, Neisseria meningitidis; identical to SEQ ID NO: 36608

SEQ ID NO: 57956 - DNA, 144 bp, Neisseria meningitidis; identical to SEQ ID NO: 39918

SEQ ID NO: 57957 - DNA, 999 bp, Neisseria meningitidis; identical to SEQ ID NO: 45558

SEQ ID NO: 57958 - DNA, 186 bp, Neisseria meningitidis; identical to SEQ ID NO: 38247

SEQ ID NO: 57959 - DNA, 435 bp, Neisseria meningitidis; identical to SEQ ID NO: 39366

SEQ ID NO: 57960 - DNA, 285 bp, Neisseria meningitidis; identical to SEQ ID NO: 39839

SEQ ID NO: 57961 - DNA, 1383 bp, Neisseria meningitidis; identical to SEQ ID NO: 45942

SEQ ID NO: 57962 - DNA, 411 bp, Neisseria meningitidis; identical to SEQ ID NO: 44362

SEQ ID NO: 57963 - DNA, 1149 bp, Neisseria meningitidis; identical to SEQ ID NO: 44122

SEQ ID NO: 57964 - DNA, 2394 bp, Neisseria meningitidis
atgaaactgaaacagattgcttccgcactgatggtcttgggcatatcgcctttggcacttgccgacttcaccatccaagacatccgcgtcgaaggcttgcagcgtaccgagccgagcaccgtattcaactacctgcccgtcaaagtcggcgacacctacaacgacacacacggcagtgccatcatcaaaagcctgtacgccaccggtttctttgacgacgtacgcgtcgagactgcggacgggcagctcctgctgaccgttatcgaacgccccaccatcggctcgctcaacatcaccggcgcaaaaatgctgcaaaacgacgccattaagaaaaacctcgaatcgttcgggctggcgcagtcgcaatactttaatcaggcgacactcaatcaggcagtcgccggcctgaaagaagaatacctcgggcgcggcaaactcaatatccaaatcacgcccaaagtaaccaaactcgcccgcaaccgcgtcgacatcgacatcacgattgacgagggcaaatccgccaaaatcaccgacatcgaatttgaaggcaaccaagtctattccgaccgcaaactgatgcggcagatgtcgctgaccgaaggcggcatttggacatggctgacacgaagcaaccaattcaacgagcagaaatttgcccaagacatggaaaaagtaaccgacttctaccagaacaacggctacttcgatttccgcatcctcgataccgacatccaaaccaacgaagacaaaaccaagcagaccatcaaaatcaccgtccacgaaggcggacgtttccgttggggcaaagtctccatcgaaggcgacaccaacgaagtccccaaagccgaactggaaaagctgctgaccatgaagcccggcaaatggtacgaacgccagcagatgaccgccgttttgggtgagattcagaaccgcatgggctcggcaggctacgcatacagcgaaatcagcgtacagccgctgccaaacgccgaaaccaaaaccgtcgatttcgtcctgcacatcgaaccgggccggaaaatctacgtcaacgaaatccacatcaccggcaacaacaaaacccgcgacgaagtcgtgcgccgcgaattgcgccaaatggaatccgcgccttacgacacttccaagctgcaacgctccaaagagcgcgtcgagcttttaggctacttcgacaatgtccagtttgacgccgtcccgcttgccggcacacccgacaaagtcgatttgaacatgagcctgaccgaacgttccaccggctcgctcgacttgagcgcgggctgggtacaggataccggcctggtcatgtccgcaggcgtttcccaagacaacctgttcggtacgggcaagtcggccgccctgcgcgcctcacgaagcaaaaccacgctcaacggctcgctgtcgtttaccgacccgtacttcacggcagacggggtcagcctgggctacgatgtttacggaaaagccttcgacccgcgcaaagcatcgaccagcatcaaacaatataaaaccaccacggcaggcgcaggcatccgcatgagcgtgcctgttaccgaatacgaccgcgtgaatttcggtttggtggcagaacacctgaccgtcaacacctacaacaaagcgcccaaacactatgccgactttatcaagaaatacggcaaaaccgacggcacagacggcagcttcaaaggctggctgtacaaaggtaccgtcggctgggggcgcaacaaaaccgacagcgcgttatggccgacacgcggctacctgacgggcgtgaacgccgaaatcgccctgcccggcagcaaactgcaatactactccgccacccacaaccaaacctggttcttccccctgagcaaaaccttcacactgatgcttggcggcgaaatcggctatgccaacggctacggcaaaaccaaagaaatccccttctttgaaaacttctacggcggcggcctgggttcggtacgaggttacgaaagcggcacactcggtccgaaagtctatgacgaatacggcgaaaaaatcagctacggcggcaacaaaaaagccaacgtctccgccgagctgctcttcccgatgcccggcgcgaaagacgtgcgcaccgtccgcctgagcctgtttgccgacgcaggcagcgtgtgggacggcaaaacctacgacgacaacagcagttccgcgaccggcggcagggttcaaaacatttacggcgccggcaatacccataaatccacctttaccaacgaattgcgctattccgccggcggcgcggttacctggctctcgcctttaggcccgatgaaattcagctacgcctacccgctgaagaaaaaaccggaagacgaaatccaacgcttccaattccaactcggcacgacgttctaa

SEQ ID NO: 57965 - DNA, 516 bp, Neisseria meningitidis; identical to SEQ ID NO: 38602

SEQ ID NO: 57966 - DNA, 426 bp, Neisseria meningitidis; identical to SEQ ID NO: 39813

SEQ ID NO: 57967 - DNA, 1860 bp, Neisseria meningitidis; identical to SEQ ID NO: 45769

SEQ ID NO: 57968 - DNA, 213 bp, Neisseria meningitidis; identical to SEQ ID NO: 36410

SEQ ID NO: 57969 - DNA, 264 bp, Neisseria meningitidis; identical to SEQ ID NO: 44436

SEQ ID NO: 57970 - DNA, 537 bp, Neisseria meningitidis; identical to SEQ ID NO: 45068

SEQ ID NO: 57971 - DNA, 837 bp, Neisseria meningitidis; identical to SEQ ID NO: 44139

SEQ ID NO: 57972 - DNA, 564 bp, Neisseria meningitidis; identical to SEQ ID NO: 45112

SEQ ID NO: 57973 - DNA, 270 bp, Neisseria meningitidis; identical to SEQ ID NO: 38590

SEQ ID NO: 57974 - DNA, 948 bp, Neisseria meningitidis; identical to SEQ ID NO: 44214

SEQ ID NO: 57975 - DNA, 201 bp, Neisseria meningitidis; identical to SEQ ID NO: 36599

SEQ ID NO: 57976 - DNA, 438 bp, Neisseria meningitidis; identical to SEQ ID NO: 44404

SEQ ID NO: 57977 - DNA, 1179 bp, Neisseria meningitidis; identical to SEQ ID NO: 44729

SEQ ID NO: 57978 - DNA, 1179 bp, Neisseria meningitidis; identical to SEQ ID NO: 44771

SEQ ID NO: 57979 - DNA, 471 bp, Neisseria meningitidis; identical to SEQ ID NO: 36859

SEQ ID NO: 57980 - DNA, 723 bp, Neisseria meningitidis; identical to SEQ ID NO: 39380

SEQ ID NO: 57981 - DNA, 693 bp, Neisseria meningitidis; identical to SEQ ID NO: 39567

SEQ ID NO: 57982 - DNA, 3606 bp, Neisseria meningitidis; identical to SEQ ID NO: 44800

SEQ ID NO: 57983 - DNA, 1416 bp, Neisseria meningitidis; identical to SEQ ID NO: 44158

SEQ ID NO: 57984 - DNA, 354 bp, Neisseria meningitidis; identical to SEQ ID NO: 39564

SEQ ID NO: 57985 - DNA, 507 bp, Neisseria meningitidis; identical to SEQ ID NO: 45072

SEQ ID NO: 57986 - DNA, 861 bp, Neisseria meningitidis; identical to SEQ ID NO: 38865

SEQ ID NO: 57987 - DNA, 240 bp, Neisseria meningitidis; identical to SEQ ID NO: 39582

SEQ ID NO: 57988 - DNA, 1587 bp, Neisseria meningitidis; identical to SEQ ID NO: 45609

SEQ ID NO: 57989 - DNA, 429 bp, Neisseria meningitidis; identical to SEQ ID NO: 38929

SEQ ID NO: 57990 - DNA, 987 bp, Neisseria meningitidis; identical to SEQ ID NO: 38696

SEQ ID NO: 57991 - DNA, 1662 bp, Neisseria meningitidis; identical to SEQ ID NO: 45179

SEQ ID NO: 57992 - DNA, 309 bp, Neisseria meningitidis; identical to SEQ ID NO: 40022

SEQ ID NO: 57993 - DNA, 1245 bp, Neisseria meningitidis; identical to SEQ ID NO: 45677

SEQ ID NO: 57994 - DNA, 492 bp, Neisseria meningitidis; identical to SEQ ID NO: 39850

SEQ ID NO: 57995 - DNA, 201 bp, Neisseria meningitidis; identical to SEQ ID NO: 38240

SEQ ID NO: 57996 - DNA, 2634 bp, Neisseria meningitidis
ttgcaaaaaacaccgctgtatatctgttcaaacagcacttttttgatgaaaaatcaatatagtaaatcattgcatggcgtgttttaccttgccttctatgataaaatacacgcattttttgcagagcagttgtttcaactcatcataaatatgaacaaaaaacccacctacatcagtttatttagcagtgcaggcgttggttgctatggttttaaaaccaatggttttgaatgcgtagcaaccaacgaacttttagaaaaacgcctaaaaatccaaaaatataatcaaaaatgccgctttgattcaggttatattgccggcgatattaccctgcctgaaacccaagccaaattgtttgccgaaattcgacgctggaatactgaaattgatgttgtgattgccacaccgccttgccaaggaatgtcggttgccaaccataaaaaaaataatgaaatggcaagaaattctttggtcgtggaatcaatcaaaatcgttcgggaagttcagcccaagttttttatttttgaaaacgtcaaagcctttttaaaaacaccctgcaccgataccgattatcaagaaaagccgattgaggaagccatttggtcaaatttgggcggacattacaacattctatccaatgtactaaattttaaagattatggtgcaaattccagtcgtaccagaacgctggtgattggcgtgcgaaaagatattcatcacattacgccgtacgatattttccccaagcaaacaccgccaaaaaccttgcgtacattgctggctgatctgccgcctttaatgcaaatgggcgaaattagcgatgatgatatttaccatagctatcgtgaatttgatcgccgtatgttgccgtggattgcacagcttaaagaaggcgagtcagctttccaaaatactgattctgcacgcattccccatcaaattaaaaatggtgaaattatctacaatcaaaacaaaaatggagacaaatacgcccgttggtttttagatcgtgagggtccgtgcatccatacccgtaatgacattttagccagccaaaacaccatccatcccactgaaaaccgtgtattttccgtgcgtgaactcatgcgtatgatgtcaattccgccatcatttaaatggacggcacaagatgaaaaacagcttaatgcactgtcatttgatgagaaaaaaacctttttgaaaaaagaagagctgaatatccgccattgtatcggtgaatctgtgccaaccgctgttttggccaatgtcgcacaaaacattcaggcagccttgcaacagtccgaactgtcaatgacggaaattcaaaatttaatcaaacgagaaaatttatcccttgccgataatctctaccgatttattgagcaacattttgacgcatatccattcagtcggcttttgcaaattgctgaatacgctaatgctgcccgtagcgaaacggctgcttattttacccgtattgatattgctttcggactggttaatgctcttcctgatttcaaaaagaaaaaaaacttacggattttagaaccctctgtcggcattggtaatttcattccactactggcaaaaaaatatgcagacaaagaaaaagttatttttgatttggtggatattgactcaaacagtttaaatctcctgtcattgctgctgaaaaaattaaatttaggcagtaaatttgagttcaatattattcatcaggattttttaaccgcaacgctgcctgaaaactatgatctagtcatcggcaatccaccatacggcaaagttaaggcaagtgataaaaatttggcactataccgtaaaaatgctaccaataaagatacgcaaaatattttttcattttttattgataaggctctgacgctcagtaaaaccgtggctttggttgttcccaaaagtgtgattaacgcccccgagtttcaaataacccgacaacaacttatcacagccaatatcaaccgcattattgattacggcgagaaagcatttaaaggcgtaaaaatagagacgattgcctttattgccgatcaaaccgacaaagacaatcaacatattacgatagaaagccatatccaagaaacgttgatacaaaactgtaaaaactattttttttctgataattttccctattggttgatttatcgtaatagtgaatttgatcaaattgcacaaaaattggaatttaatgtatttcaatcattccgagatcgccaaattaccaaagcgcatacacagaatagtggcaatgttcgggttttaaaatcccgtaatatcggtaacaacgagattattgatattgagggttatgatagttatgtggattcagttgcccctttttctgtcggcaaatttattaaccgtaaaaatgtcgtgatgattcccaatctgacttacaaacctcgggcagcatttttgcctgaaaacagtattgctgatggctcggttgccctactgacaatgaaaaaacacgaaaaaatcctaacccaacgagatctcgcatactatgcaactcccgaatttgagcagttttaccgtgttgcccgtaattatggttctcgttcaatgaatatagacaatcattctgtgttttttttcggattgctaaaagattag

SEQ ID NO: 57997 - DNA, 759 bp, Neisseria meningitidis; identical to SEQ ID NO: 39063

SEQ ID NO: 57998 - DNA, 123 bp, Neisseria meningitidis; identical to SEQ ID NO: 38734

SEQ ID NO: 57999 - DNA, 1839 bp, Neisseria meningitidis
atgttacccgcccgtttcaccattttatctgtgctcgcggcagccctgcttgccgggcaggcgtatgccgccggcgcggcggatgcgaagccgccgaaggaagtcggaaaggttttcagaaagcagcagcgttacagcgaggaagaaatcaaaaacgaacgcgcacggcttgcggcagtgggcgagcgggttaatcagatatttacgttgctgggaggggaaaccgccttgcaaaaggggcaggcgggaacggctctggcaacctatatgctgatgttggaacgcacaaaatcccccgaagtcgccgaacgcgccttggaaatggccgtgtcgctgaacgcgtttgaacaggcggaaatgatttatcagaaatggcggcagattgagcctataccgggtaaggcgcaaaaacgggcggggtggctgcggaacgtgctgagggaaagaggaaatcagcatctagacggactggaagaagtgctggctcaggcggacgaaggacagaaccgcagggtgtttttattgttggcacaagccgccgtgcaacaggacgggttggcgcaaaaagcatcgaaagcggttcgccgtgcggcgttgaaatatgaacatctgcccgaagcggcggttgccgatgtggtgttcagcgtacagggacgcgaaaaggaaaaggcaatcggagctttgcagcgtttggcgaagctcgatacggaaatattgccccccactttaatgacgttgcgtctgactgcacgcaaatatcccgaaatactcgacggctttttcgagcagacagacacccaaaacctttcggccgtctggcaggaaatggaaattatgaatctggtttccctgcacaggctggatgatgcctatgcgcgtttgaacgtgctgttggaacgcaatccgaatgcagacctgtatattcaggcagcgatattggcggcaaaccgaaaagaaggtgcttccgttatcgacggctacgccgaaaaggcatacggcagggggacgggggaacagcggggcagggcggcaatgacggcggcgatgatatatgccgaccgaagggattacaccaaagtcaggcagtggttgaaaaaagtgtccgctccggaatacctgttcgacaaaggtgtgctggcggctgcggcggctgtcgagttggacggcggcagggcggctttgcggcagatcggcagggtgcggaaacttcccgaacagcaggggcggtattttacggcagacaatttgtccaaaatacagatgttcgccctgtcgaagctgcccgacaaacgggaggctttgagggggttggacaagattatcgaaaaaccgcctgccggcagtaatacagagttacaggcagaggcattggtacagcggtcagttgtttacgatcggcttggcaagcggaaaaaaatgatttcagatcttgaaagggcgttcaggcttgcacccgataacgctcagattatgaataatctgggctacagcctgctttccgattccaaacgtttggacgaaggcttcgccctgcttcagacggcataccaaatcaacccggacgataccgctgtcaacgacagcataggctgggcgtattacctgaaaggcgacgcggaaagcgcgctgccgtatctgcggtattcgtttgaaaacgaccccgagcccgaagttgccgcccatttgggcgaagtgttgtgggcattgggcgaacgcgatcaggcggttgacgtatggacgcaggcggcacaccttacgggagacaagaaaatatggcgggaaacgctcaaacgtcacggcatcgcattgccccaaccttcccgcaaaccccggaaataa

SEQ ID NO: 58000 - DNA, 330 bp, Neisseria meningitidis; identical to SEQ ID NO: 45117

SEQ ID NO: 58001 - DNA, 669 bp, Neisseria meningitidis
ttgccgtctgcttcagacggcattttgagtcattgggaacggcagactgcaatcatgaaaacctcgaacttttccaagagaacatccgcaatgaaaacttttgccctgatactggccgacggtcaggcgagccgtatgggaggcgaggacaaggggcttgctcttttggggggtaaggcactgatagatcatgtcatcgacagggtcaggccgcaggtcagccatatcgccatcagcaccaaccggaatttggaagaatatgctcgaagaagtccgcatatttttccggacgcacggcagtggcagcatttcggcccgctttcggcattgtgtaccgcagccaacgatttgcagttggcgactgccgactggcttttggttgtgccgtgcgatatgccgtatctgccgggcgatttggtggcgaggtttgaaaccgtgtcgaaacgcacaccgttgtgcaatgcgtattatgtggaaacgccgataacgatgcactacaacattatgtatatccgcccgcagattctgcaaagcgcgattccctatctgttttcgggtatgaaaacattaagaagctggttgcagcagcaaagggcgcggccggtcagattcgagtttgacgggcattttgccgacttgaacacgcaaatcgatttgcaggagggataa

SEQ ID NO: 58002 - DNA, 714 bp, Neisseria meningitidis; identical to SEQ ID NO: 38766

SEQ ID NO: 58003 - DNA, 891 bp, Neisseria meningitidis; identical to SEQ ID NO: 45149

SEQ ID NO: 58004 - DNA, 2028 bp, Neisseria meningitidis
ttgtccctgtctgaatttatagaacgccgaacgtcatttaatccgatggttattttgacgactttgttttttgtgtgtgttttggtggtattggttttaaccgtgccggatcaggcgcagatgtggctcgatcgggcaaaagaagtcatttttaccgagttcagctggttttatgttttaacgttttccatttttctgggtttcctgctgatactctcggtcagcagtttgggaaacatcaggctcggacgggatgaagatgtgccggaattcggcttcctgtcgtggctggcgatgctgtttgcggccgggatgggcgtgggtctgatgtttttcggcgtggcagagccgttgatgcattatttttcggacattacggccggcacgccggaacacaggcagcagcaggcattgctgcacacggtgttccattggggcgttcacgcttggtcggtgtacggtacgattgcattggctttggcttatttcggtttccgctacaagctgccgcttgccctgcgttcttgtttttaccccctgttgaaagaaaaaatttccggaaggttcggcgatgccattgatattatggcgttgcttgctacttttttcggcatcatcaccacattggggttcggggcttcgcaactgggcgccggattgcaggaaatgggctggattgccgaaaacagcttcagcgtgcaggttttgattatcgccgccgtcatgtccctcgccgtcgtttcggcaatatccggcgtggggaagggcgtgaaggtgttgagcgagttgaacctgagccttgcgtttttgctgctgttttttgttttggcggcgggccccactgtttacctgttgtcggcattcggcgacaacatagggaactacctcgaaaatctggtgcgcctcagttttaaaacttatgcgtacgaacgggaacacaagccgtggtttgaatcttggacggtgctttattgggcgtggtggtgttcttgggcgccgtttgtgggtttgtttatcgcgcgtatttcaaaggggcgcaccatccgcgagtttgtcttcggggttttgctcatccccggcctgttcggcgttttgtggtttaccgtcttcggcaatacggcgatttggctgaatgacggggttgcggggggaatgctcgaaaagatgacctcctctccggaaacgctgctttttaaattctttaattacctccccctgcccgaattgacgagcatcgtcagcctgctggtcatttctctgttttttgtaacttctgccgattccgggatttatgtcctgaacaatattacctctcgggacaaaggcttgagcgcgccacggtggcaggcggttatgtggggcgtgctgatgtctgccgttgccgttttgctgatgcgctcgggcggactcggcaacctgcagtctatgaccctgattgtttccctgccgtttgccctgctgatgctgataatgtgtttcagcctgtggaaaggcttgagtgcggataagaaatattttgagacccgggttaaccctaccagtgtattttggacgggcggcaagtggaaagaacggctggtgcagataatgagccagacgcaggagcaggatattttaaaattcctcaaacataccgcatcgcccgctatgcacgagttgcaacgggagctttcggaagaatacggcttgagcgtccgggtcgataagatgtttcatcaggacgagcccgcaatcgagtttgtcattcgcaaagagacgatgcgcgattttatgtacgggattaagtctgtcgggcaggatgtatccgaccagttgattaacgacggcaacctgccgcatatccggcatcagacaacttacaaaccctacgcttattttttcgacgggcgcgtcgggtacgatgtgcagtatatgaacaaggacgagctgattgccgacattttgaaaaactacgaacgttatttgatgttgttggatgatgtcggtcaggaactgatggcgcacgagcaggtggaattggcagagtaa

SEQ ID NO: 58005 - DNA, 966 bp, Neisseria meningitidis; identical to SEQ ID NO: 44613

SEQ ID NO: 58006 - DNA, 291 bp, Neisseria meningitidis; identical to SEQ ID NO: 44147

SEQ ID NO: 58007 - DNA, 423 bp, Neisseria meningitidis; identical to SEQ ID NO: 38711

SEQ ID NO: 58008 - DNA, 1830 bp, Neisseria meningitidis
atgatgatcaaaccgaccgccctgctcctgccggctttatttttctttccgcacgcatacgcgcctgccgccgacctttccgaaaacaaggcggcgggtttcgcattgttcaaaaacaaaagccccgacaccgaatcagtcaaattaaaacccaaattccccgtccgcatcgacacgcaggacagtgaaatcaaagatatggtcgaagaacacctgccgctcatcacgcagcagcaggaagaagtattggacaaggaacagacaggcttcctcgccgaagaagcaccggacaacgttaaaacgatgctccgcagcaaaggttatttcagcagcaaagtcagcctgacggaaaaaggcggggcttatacggtgcacatcacaccggggccgcgcaccaaaatcaccaacgtcggcgtcaccatcctcggcgacatcctttcagacggcaacctcgccgaatactaccgcaacgcgctggaaaactggcagcagccggtaggcagcgatttcgatcaggacagttgggaaaacagcaaaacttccgtcctcggcgcggtaacgcgcaaagcctacccgcttgccaagctcggcaacacccgggcggccgtcaaccccgataccgccaccgccgatttgaacgtcgtcgtggacagcggccgccccatcgccttcggcgactttgaaatcaccggcacacagcgttaccccgaacaaatcgtctccggcctggcgcgcttccaaccgggcacgccctacgacctcgacctgctgctcgacttccaacaggcgctcgaacaaaacgggcattattccggcgcgtccgtacaagccgacttcgaccgcctccaaggcgaccgcgtccccgtcaaagtcagcgtaaccgaggtcaaacgccacaaactcgaaaccggcatccgcctcgattcggaatacggtttgggcggcaaaatcgcctacgactattacaacctcttcaacaaaggctatatcggttcggtcgtctgggatatggacaaatacgaaaccacgcttgccgccggcatcagccagccgcgcaactatcggggcaactactggacaagcaacgtctcctacaaccgttcgaccacccaaaacctcgaaaaacgcgccttctccggcggcatctggtatgtgcgcgaccgcgcgggcatcgatgccaggctgggggcggagtttctcgcagaaggccggaaaatccccggctcggatgtcgatttgggcaacagccacgccacgatgctgaccgcctcttggaaacgccagctgctcaacaacgtgctgcatcccgaaaacggccattacctcgacggcaaaatcggtacgactttgggcacattcctgtcctccaccgcgctgatccgcacctctgcccgcgcaggttatttcttcacgcccgaaaacaaaaaactcggcacgttcatcatacgcggacaagcaggttacaccgttgcccgcgacaatgccgacgttccttcggggttgatgttccgcagcggcggcgcgtcttccgtgcgcggttacgaactcgacagcatcgggcttgccggcccgaacggatcggtcctgcccgaacgcgccctcttgacgggcagcctggaataccaactgccgtttacgcgcaccctttccggcgcggtattccacgatatgggcgatgccgccgccaatttcaaacgtatggagctgaaacacggttcgggactgggcgtgcgctggttcagcccgctcgcgccgttttccttcgacatcgcctacgggcacagcgataagaaaatccgctggcacatcagcttgggaacacgcttctaa

SEQ ID NO: 58009 - DNA, 1239 bp, Neisseria meningitidis; identical to SEQ ID NO: 46980

SEQ ID NO: 58010 - DNA, 621 bp, Neisseria meningitidis; identical to SEQ ID NO: 46275

SEQ ID NO: 58011 - DNA, 828 bp, Neisseria meningitidis; identical to SEQ ID NO: 49067

SEQ ID NO: 58012 - DNA, 285 bp, Neisseria meningitidis; identical to SEQ ID NO: 56698

SEQ ID NO: 58013 - DNA, 1539 bp, Neisseria meningitidis; identical to SEQ ID NO: 45340

SEQ ID NO: 58014 - DNA, 954 bp, Neisseria meningitidis; identical to SEQ ID NO: 45270

SEQ ID NO: 58015 - DNA, 402 bp, Neisseria meningitidis; identical to SEQ ID NO: 45821

SEQ ID NO: 58016 - DNA, 1080 bp, Neisseria meningitidis; identical to SEQ ID NO: 43538

SEQ ID NO: 58017 - DNA, 936 bp, Neisseria meningitidis; identical to SEQ ID NO: 45520

SEQ ID NO: 58018 - DNA, 2178 bp, Neisseria meningitidis
atgttccgaaagccgtctgaaatgcccgccccccaactttccgccccttatgatcccctgaccgccgaagcgcgtgccctgcttttccataccgcctcctacctcaagcccgaggaacaggcggagcttgaaaaagctgtcgcctatgcgtttcgcgcccacgacgggcaaacccgcaaaagcggggagccctacatcacgcatccgattgccgttgcgacgcagctcgccctttggcatatggacatacagggtctttgtgcaggcgtgatgcacgacgtattggaagatacgggcgtgacaaaaggggaaatggcggcggtgttcggcaatacggttgccgagatggtggacgggctgtccaaactcgaaaaactcaaatttgaagatcatgcggaacatcaggcggagagtttccgcaaactgattttggcgatgaccaaagatgtgcgcgtgattgtcgttaaacttgccgaccgtctgcataatatgcggacgctcggttcgatgcgcccggacaaacgccgccggattgcaagggaaacccttgaaatctatgcacagattgccaaccgtataggtttgaataacgcatatcaagagcttcaggatttatcgttccaaaacctgcatcccaaccgctacgagactttaaaaaaagcgatggacaagagccggaagaaccggcaggacgttgtcggcaaagtcttgcgcgcattcggccagcggctggtaggcgcgaatatagaggccaaaatcaaaggcagggaaaaaaacctgtacggcatccatcagaaaatgatggcgaaaaagctgcgctttgccgaggttatggatatttacggtttccgcgtcattgtcaacagcattccagcctgttatgccgcactcggcgcattgcacaccctctatcagcccaagcccgggcggttcaaagactatatcgccattccgaaaagcaacgggtatcaaagtctgcatacgactttggtcggcccttacggcttgccgattgaagttcagatacgtaccaaggaaatggatgctgttgccgaaggtggaatcgccggacattggagctataaatcatattctaagacggtcgatcaggcggtgcttcacacaaaccggtggctgaaaaatatcttagatttgcaggcaagcagtgccaatgccattgagtttctcgaacacgtcaaagtcgatttgtttccgaacgaaatctacatccttacgccaaaaggaaaaatcctaactttgcccaaaggggcaacgcctgtcgattttgcttatgcggtgcataccgatatcgggcacaaaaccgttgccgcacgtatcaacaatatcatgatgccgttgcgtacgaagctcaaaaccggtgattctgttgaaattatcacatccgaacacgccaaacccaatcccgcgtggttgaatttcgccgtgtccggcagggcgcgcagtgccatacgccaatatattaaaaaccttaaccggcacgatgcggtcgttttgggagagagcctcttacaaaaagccctgtccagtttgctgcccaaagatgtcctgctttcagacggcatcaaggaaaaatatcttgccgatctcaacgacaagcagacatcgtttgaagaagtgctgtacaacgtagggatggggcataccctgcctgtttatgtcgccatgcacattgctgagttggcaggggagcatttcggcagcgaggtcaggctcagttccattaaagtcgatggtcaggaaagcgggcatattcattttgcagagtgctgccaccctgttcccggcgattccatccgtttgctgttggttaagggaaaaggcatgattatccatagggatagctgcccgacgttgttgaagtccgatcccgaacagcagctggatgcagactgggaaaatatgaacgggcagaactaccgtgtcgggcttcaagtccaatcggaagacagccacggcctgttggcattaatggcgcaagcgatttccgattccggtgcggacatcgagtcggtcgaaacaccgtctaaatcccagtcgggaacggaaggttttgtcgaattcaaattcttattgaaagtcaagaatttggatcagttgaatcagattattcaaaatctgcatagtattccatatatccgcaaagtcatcagaagttga

SEQ ID NO: 58019 - DNA, 405 bp, Neisseria meningitidis; identical to SEQ ID NO: 56025

SEQ ID NO: 58020 - DNA, 246 bp, Neisseria meningitidis; identical to SEQ ID NO: 45720

SEQ ID NO: 58021 - DNA, 648 bp, Neisseria meningitidis; identical to SEQ ID NO: 44241

SEQ ID NO: 58022 - DNA, 1485 bp, Neisseria meningitidis; identical to SEQ ID NO: 46504

SEQ ID NO: 58023 - DNA, 402 bp, Neisseria meningitidis; identical to SEQ ID NO: 36186

SEQ ID NO: 58024 - DNA, 504 bp, Neisseria meningitidis; identical to SEQ ID NO: 38374

SEQ ID NO: 58025 - DNA, 1158 bp, Neisseria meningitidis; identical to SEQ ID NO: 44504

SEQ ID NO: 58026 - DNA, 945 bp, Neisseria meningitidis
gtgtccatccccaccgccaccccgctgcccaccggcgaggtaaagttatcagacgacaatagcaaaatcgaaaacatcaacaccgccgacaccggaagcacatccggcatttccattcagcagcggaaatatgaagtagaaagttacggcatcaaaagagaagaaaaagcattcatcttccaaacacccggcggcgcgcaatacgccctttcatcctacgccgaccccataaccgtcagctactcctcccccgatttcaaaattcccgaccgccacgcagggcagcggcttgccgacggcagccgcatctttatctgttgcagcgaatccggggctacttcgtatgcggaaatcaccaaacaagattatatgaaattcggggcgtggataggtcccaacggcgaaatcgacctcttcgccggcggcttccccgtcggcaaaacgccgaagcctaaatactcttggggcaacaccgaacccgaaaccaaaggcaagggcaaaatcacttatcaggtttggggcatccgcgtcagaaacaggcaatttgttacttcctcttatacgccgccgaaaagcggttcttattatgggacacttgccaacacccccgtcctttcctttatcactgccaatttcaacagcaacaaactggcaggcgaaatccgcggcaacagcgattacggaccgagtgtgaaaattgaaaacgcaacgattaacagtttatccttttccggcactgccacgtccggcgggaaaaccggcaatttggaaggcaagttttttggaaaattcaacggcagctacggcaacactgaaaccagcataggcggcaaaatcacttttaaagacgaccgctccctcgataccgtattcggcggtgtgagttatgtaaaaaaacttgatgaaaccgccaatcgagataccgaacaccttactaaacaataa

SEQ ID NO: 58027 - DNA, 387 bp, Neisseria meningitidis; identical to SEQ ID NO: 55415

SEQ ID NO: 58028 - DNA, 486 bp, Neisseria meningitidis; identical to SEQ ID NO: 39660

SEQ ID NO: 58029 - DNA, 1503 bp, Neisseria meningitidis; identical to SEQ ID NO: 45626

SEQ ID NO: 58030 - DNA, 471 bp, Neisseria meningitidis; identical to SEQ ID NO: 44380

SEQ ID NO: 58031 - DNA, 456 bp, Neisseria meningitidis; identical to SEQ ID NO: 40384

SEQ ID NO: 58032 - DNA, 546 bp, Neisseria meningitidis
atgattatagttgaacatttagaacattatttgggtgaaatcgaaagcggtataaaatgcttggatcgacgttatcatctcagcgtttccgtcttcccatcacaaccatataaaggggtaactactttttctactttaggcttgaatcgatatgacttgaactataagagtaggtttgaattaatttttacctgttctgaagaatggaataaagaaaatattgcagcttttctatcaggagtggctgaatatttgattgacaatagacaacctattttaagaggtgaaattattcaattacccagggtaattatcgaaggtagcaaaatggatgcactgtatgtttccgccccattttatttcgacgatgattttcaggtctgttatggcgaacactacaataccgttttccctttgcttgtcccgttgtataaacaggaagcggaattggtggaaaaaaagggttggaatgcttttgagcagtttttgctggataatgaagttgacaacctttcggatatgaataggaaaccgtttgtttggtaa

SEQ ID NO: 58033 - DNA, 1464 bp, Neisseria meningitidis; identical to SEQ ID NO: 45580

SEQ ID NO: 58034 - DNA, 195 bp, Neisseria meningitidis; identical to SEQ ID NO: 39661

SEQ ID NO: 58035 - DNA, 312 bp, Neisseria meningitidis; identical to SEQ ID NO: 39211

SEQ ID NO: 58036 - DNA, 354 bp, Neisseria meningitidis; identical to SEQ ID NO: 44446

SEQ ID NO: 58037 - DNA, 549 bp, Neisseria meningitidis; identical to SEQ ID NO: 42575

SEQ ID NO: 58038 - DNA, 1503 bp, Neisseria meningitidis; identical to SEQ ID NO: 45130

SEQ ID NO: 58039 - DNA, 1041 bp, Neisseria meningitidis; identical to SEQ ID NO: 44521

SEQ ID NO: 58040 - DNA, 291 bp, Neisseria meningitidis; identical to SEQ ID NO: 38283

SEQ ID NO: 58041 - DNA, 780 bp, Neisseria meningitidis; identical to SEQ ID NO: 38884

SEQ ID NO: 58042 - DNA, 822 bp, Neisseria meningitidis; identical to SEQ ID NO: 44998

SEQ ID NO: 58043 - DNA, 534 bp, Neisseria meningitidis; identical to SEQ ID NO: 37691

SEQ ID NO: 58044 - DNA, 354 bp, Neisseria meningitidis; identical to SEQ ID NO: 37509

SEQ ID NO: 58045 - DNA, 273 bp, Neisseria meningitidis; identical to SEQ ID NO: 39724

SEQ ID NO: 58046 - DNA, 588 bp, Neisseria meningitidis; identical to SEQ ID NO: 45803

SEQ ID NO: 58047 - DNA, 2898 bp, Neisseria meningitidis
gtgctacaatatcggttttcctttatttttcaggcggcatccattatgtgcaaccatcatccccaacattcgcacgacaacgacaccatccgcatacgcggcgcgcgcacgcataatttgaaaaacgtcgatttagacattccgcgccacaagctggtggtggtaacaggattgtcaggcagcggcaaatcatcgctggcgttcgacacgctgtatgccgaaggacagcggcgttatgtcgagagcctgtccgcctatgcgcggcagtttttgcagatgatggacaaacccgatgtcgatttgatcgaaggcctgtcgcccgcgatttccatcgagcagaaatccaccagccacaatccgcgttccaccgtcggcacggttacggaaatccacgactatctgcgccttttgtacgcacgcgtcggcacaccctactgccccgaacacaagctgccgctatccagccaaaccgtatctcaaatggttgatgccgtcttaaaactgccggaagacacgcgcgtgatgattctggcgccggcggtacgagagcgtaagggcgagtttgtcgacttctttgccgacttgcaggcgcaaggctttgcccgtgtgcgcgtggacggcgaagtttatcagcttgacgaagtgccgaagctggagaaaaacatcaagcacaatatcgacgtggtcatcgaccgcgtgaaagtgaaggcggacatcaagcagcggctggcggaaagttttgaaaccgcactgcgccacggcaacgagcgcgcgctggcgatggaaatggaaagcggcgaagaacattggttttccgcgcgtttcgcctgtcccgtatgttcatacagcctgcccgaattagagccgcgcctgttttcgttcaacaacccgatgggctcctgcccaacttgcgacggcttgggcaacaccaacttcttcgatcccgaaaaagtggtcgcgcatcccgaattgtcgctggcaacgggcgcgattgacggctgggataagcgcaaccagttctatttccaaatgattcagtcgctggcgcggcattacggtttcgatgtgcaggctgcttgggaaacgctgcctgaaaaagtcaaaaaagtcgtgctgcacggctcgggcaaggaagtcattgatttcacctacctatccgaacgcggcaccaccttcaaccgcagccacgccttcgaaggcatcatccccaatctcgaacgccgctaccgcgaaaccgacagcgaaaccgtgcgcgaaaaactgcgcgaataccaaaaccaccgcgcctgcccgagctgcggcggcgcacgtttgcgcaaagaagcccgctacgtttacgtcagcggtgagccgttgcacgaagtttccgcctggccgctcaccaaaacccaccaattctttgaaacactggatttagacggcaacaaaaaacaaatcgccgaaaaaatcctcaaagaaatcaccgaacgcctcggcttcctgattaacgtcgggctggattacctgaatctctcccgttccgccgaaaccctttccggcggcgaagcccagcgcatccgcctcgccagccaaatcggcagcggcctgaccggcgtgatgtacgttttggacgaaccctccatcggcctgcaccagcgcgacaacgaccgcctgcttgccaccctcaaacgcctgcgcgatttgggcaacagcgtcatcgtggtcgaacacgacgaagacgccatccgcgaagccgatttcgtcgtcgatatgggcccgggcgcaggcgaacacggcggcaacgtattgattgccgacacgcccgaaaacgtcgccaaatgcgaaaactccgttaccggacaatatctcagcggcaaaaaatccattgccgtgccgtctgaacgcacgcccgtcaatcccgaacgaatgctcgtcctcaaaggcgcgcgcggcaacaacctcaaaaatgttaccctcgaactgccgctcggtttaattacctgcatcaccggcgtatccggcagcggcaaatccaccctgattaacgacaccctcgccaaaatcactgcccgcgaactcaaccgcgcccaagaagaacccgccccatacgacgacatccgcggcctcgaacacctcgacaaagtcatcaacgtcgaccaatcccccatcggccgcaccccacgctccaatcccgccacctacaccggcctgttcacccccatccgcgaactcttcgccggcgtacccctctcgcgcgaacgcggctacaatgtcggcagattctccttcaacgtcaaaggcggccgctgcgaagcctgccaaggcgacggcgtcatcaaagtcgaaatgcacttcctgcccgacgtgtatgttccctgcgaagtctgccacggcaaacgctacaaccgcgaaacgctcgaaatccaatacaaaggcaaaaacatcagccaagtcctcgacatgaccgttgaagaagcccgcgaatttttcgacgccgtccccaccgtatcgcgcaaactgcaaaccttgatggacgtaggcttaggctacatccgtctcggccaatccgccaccaccctctccggcggcgaagcccagcgcgtcaaactcgccttggaactctccaaacgcgacaccggcagaacgctctacatcctcgacgaacccaccaccggcctacacttcgccgacatcgccctgctgctggaagtcatagaccgtctgaaaggcaaaggcaactcgatagtgattatcgagcataatcttgacgttataaaaacggctgattatattgtggacttagggccggaaggtggtgatggcggggggaggattattgcggaaggcagtcccgagcaggtggcgaaggttaaggggagttataccgggaagtatttggaagttatgttaaaatattag

SEQ ID NO: 58048 - DNA, 1620 bp, Neisseria meningitidis; identical to SEQ ID NO: 44361

SEQ ID NO: 58049 - DNA, 876 bp, Neisseria meningitidis; identical to SEQ ID NO: 45531

SEQ ID NO: 58050 - DNA, 660 bp, Neisseria meningitidis; identical to SEQ ID NO: 44157

SEQ ID NO: 58051 - DNA, 942 bp, Neisseria meningitidis; identical to SEQ ID NO: 44332

SEQ ID NO: 58052 - DNA, 417 bp, Neisseria meningitidis; identical to SEQ ID NO: 44488

SEQ ID NO: 58053 - DNA, 552 bp, Neisseria meningitidis
atgccgtctgaacgccgaccgtttcaaacggcatttttatcgaacaggaaaaccgtcggtaaacttgcagagcgtgtgcaatcccgatatgatggtttgcataaatttaaacatatatgttccgcagctatggcactgattaaagagccgttggacaaagcgaaacaaaggaacgaagaacttgaagcggcagaagaagcggcggcgcaggaggcattgggtcgggagcaggaagtcgaccgcgtatccgaatgggaagaacgctacaagctgtcgcgcagcgagttcgagcagctctggaaaggattgcctcaaaccgtacagaataagctgcaagcctcacagaaaacatggaaaagcggtatggacaaaatctgtgccaacaatgcgaaagccgaaggtgaaacgccaaacggcataaaagtcagcgaactggcatgcaaaacggtggaaaccgaagcacgcttggaagagctgtacaaccgtaaaaaagcccttatcgacgaaatggtcagggaagcggacaagaaagaactgccaaagcggctctga

SEQ ID NO: 58054 - DNA, 1647 bp, Neisseria meningitidis; identical to SEQ ID NO: 39359

SEQ ID NO: 58055 - DNA, 939 bp, Neisseria meningitidis; identical to SEQ ID NO: 45070

SEQ ID NO: 58056 - DNA, 780 bp, Neisseria meningitidis; identical to SEQ ID NO: 44868

SEQ ID NO: 58057 - DNA, 1125 bp, Neisseria meningitidis; identical to SEQ ID NO: 45383

SEQ ID NO: 58058 - DNA, 360 bp, Neisseria meningitidis; identical to SEQ ID NO: 38354

SEQ ID NO: 58059 - DNA, 1854 bp, Neisseria meningitidis; identical to SEQ ID NO: 45191

SEQ ID NO: 58060 - DNA, 132 bp, Neisseria meningitidis; identical to SEQ ID NO: 38857

SEQ ID NO: 58061 - DNA, 1218 bp, Neisseria meningitidis
atgaaaacggtagtctggattgtcgtcctgtttgccgccgccgtcggactggcgctggcttcgggcatttacaccggcgacgtgtatatcgtactcggacagaccatgctcagaatcaacctgcacgcctttgtgttaggttcgctgattgccgtcgtggtgtggtatttcttgtttaaattcattatcggcgtattcaatatccccgaaaagatgcagcgtttcggttcggcgcgtaaaggccgcaaggccgcgcttgctttgaacaaggcgggtttggcgtattttgaagggcgttttgaaaaggcggaacttgaagcctcgcgcgtgttgggcaacaaagaggcgggcgacaaccggactttggcattgatgctgggtgcgcacgccgccggacagatggaaaacatcgagctgcgcgaccgttatcttgcggaaatcgccaaactgccggaaaaacagcagctttcccgttatcttttgttggcggaatcggcgttgaaccggcgcgattacgaagtgtcggaagccaatcttcatgcggcggcgaagatgaatgccaaccttacgcgcctcgtgcgtctgcaacttcgttacgctttcgacaggggcgacgcgttgcaggttctggcaaaaaccgaaaaactttccaaggcgggcgcgttgggcaaatcggaaatggaacggtatcaaaattgggcataccgccgccagctggcggatgctgccgatgccgccgctttgaaaacctgcctgaagcggattcccgacagcctcaaaaacggggaattgagcgtatcggttgcggaaaagtacgaacgtttgggactgtatgccgatgcggtcaaatgggtcaaacagcattatccgcaaagccgccgacccgaacttttggaagcctttgtcgaaagcgtgcgctttttgggcgaacgcgatcagcagaaagccatcgattttgccgatgcttggctgaaagaacagcccgataacgcgcttctgctgatgtatctcggtcggctcgcctacggccgcaaactttggggtaaggcaaaaggctaccttgaagcgagtattgcactaaagccgagtatttccgcgcgtttggtcctagcaaaggtttttgacgaaaccggagaaccgcagaaggcggaggcgcagcgcaacttggttttggcaagcgttgccgaggaaaaccgaccttccgccgaaacctgttga

SEQ ID NO: 58062 - DNA, 519 bp, Neisseria meningitidis; identical to SEQ ID NO: 36779

SEQ ID NO: 58063 - DNA, 2703 bp, Neisseria meningitidis; identical to SEQ ID NO: 45136

SEQ ID NO: 58064 - DNA, 2559 bp, Neisseria meningitidis; identical to SEQ ID NO: 44176

SEQ ID NO: 58065 - DNA, 786 bp, Neisseria meningitidis; identical to SEQ ID NO: 45688

SEQ ID NO: 58066 - DNA, 1455 bp, Neisseria meningitidis; identical to SEQ ID NO: 44854

SEQ ID NO: 58067 - DNA, 1743 bp, Neisseria meningitidis; identical to SEQ ID NO: 47373

SEQ ID NO: 58068 - DNA, 303 bp, Neisseria meningitidis; identical to SEQ ID NO: 43286

SEQ ID NO: 58069 - DNA, 270 bp, Neisseria meningitidis; identical to SEQ ID NO: 45073

SEQ ID NO: 58070 - DNA, 789 bp, Neisseria meningitidis; identical to SEQ ID NO: 44579

SEQ ID NO: 58071 - DNA, 1809 bp, Neisseria meningitidis; identical to SEQ ID NO: 45671

SEQ ID NO: 58072 - DNA, 429 bp, Neisseria meningitidis; identical to SEQ ID NO: 41701

SEQ ID NO: 58073 - DNA, 312 bp, Neisseria meningitidis; identical to SEQ ID NO: 39965

SEQ ID NO: 58074 - DNA, 876 bp, Neisseria meningitidis; identical to SEQ ID NO: 44545

SEQ ID NO: 58075 - DNA, 912 bp, Neisseria meningitidis; identical to SEQ ID NO: 44117

SEQ ID NO: 58076 - DNA, 258 bp, Neisseria meningitidis; identical to SEQ ID NO: 36717

SEQ ID NO: 58077 - DNA, 324 bp, Neisseria meningitidis; identical to SEQ ID NO: 37971

SEQ ID NO: 58078 - DNA, 396 bp, Neisseria meningitidis; identical to SEQ ID NO: 45813

SEQ ID NO: 58079 - DNA, 423 bp, Neisseria meningitidis; identical to SEQ ID NO: 44621

SEQ ID NO: 58080 - DNA, 438 bp, Neisseria meningitidis; identical to SEQ ID NO: 38425

SEQ ID NO: 58081 - DNA, 402 bp, Neisseria meningitidis; identical to SEQ ID NO: 38334

SEQ ID NO: 58082 - DNA, 1272 bp, Neisseria meningitidis; identical to SEQ ID NO: 38882

SEQ ID NO: 58083 - DNA, 525 bp, Neisseria meningitidis; identical to SEQ ID NO: 45948

SEQ ID NO: 58084 - DNA, 1371 bp, Neisseria meningitidis
atgccgcaaaacactttaaacatcgttatcctcgccgccggcaaaggcacgcgcatgtattccaaaatgcccaaagtgctgcaccgcatcggcggcaagcccatgctcgggcgcgttatcgacaccgccgccgcgctgaatccgcaaaacatctgcgtcgtcatcgggcacggcaaagaccaagttttaaacgctgtcaaacgcgatgtcgtttgggttgaacaaaccgaacagctcggtaccggccacgccgtcaaaaccgccctgccccacctttccgccgaaggccgcacgctggtactgtacggcgacgttcccctgattgacgttaaaaccctcaaaaccctgctcgaagccgccggcaacgaagtcggtctattgaccgacgttcccgccgacccgacaggcttgggccgcatcatccgcgacggcaacggcagcgtaaccgccatcgtcgaagaaaaagacgccgacgccgcccaaaaagccgtaaaagaaatcaataccggcattttggttctgcccaacgccaaactggaaaactggctgaacagcctctccagcaacaatgcccaaggcgaatactatctgaccgacctcatcgccaaagccgttgccgacggtattaaagttcatcccgtccaagtgcacacctcctacctcgccgccggcgtgaacaacaaactccagctcgccgaactcgagcgtattttccaaaccgaacaggctcaagaattgctcaaagcaggcgttaccctgagcgacccggcacgtttcgatttacgaggccgtctgaaacacggacaagatgtcgtaattgatgtgaactgtatctttgaaggcgaagtcgaaatcggcgacaacgtcgaaatcggcgcaaactgcgtcatcaaaaacgccaaaatcggcgcaaacagcaaaatcgcccccttctcccacctcgaagactgcgaagtcggcgaaaacaaccgaatcggcccgtacgcccgtttgcgtccgcaagccaaactagccgccgacgtacacatcggcaacttcgtcgaaatcaaaaacgccgccatcggcaaaggcaccaaagccaaccacctcacctacattggtgatgccgaagtcggcagcaaaaccaacttcggcgcaggtacgattattgccaactacgacggcgtgcacaaacacaaaaccgtcatcggcaacgaagtgcgcatcggttcaaactgcgtactggttgcccccgttaccctcggcaacaaagtaaccacaggcgcaggcagcgcgattacccgcaacgtcgaagacggcaaactcgccctcgcccgcgcccgccaaaccgtcatcgaaggctgggtgaggccggaaaaagacaaacaataa

SEQ ID NO: 58085 - DNA, 504 bp, Neisseria meningitidis; identical to SEQ ID NO: 44607

SEQ ID NO: 58086 - DNA, 318 bp, Neisseria meningitidis; identical to SEQ ID NO: 43905

SEQ ID NO: 58087 - DNA, 1293 bp, Neisseria meningitidis; identical to SEQ ID NO: 45147

SEQ ID NO: 58088 - DNA, 1185 bp, Neisseria meningitidis; identical to SEQ ID NO: 44303

SEQ ID NO: 58089 - DNA, 981 bp, Neisseria meningitidis; identical to SEQ ID NO: 45967

SEQ ID NO: 58090 - DNA, 621 bp, Neisseria meningitidis
atggcacagtttttcgctattcatcccgacaacccccaagaacgcctcatcaagcaggcggtcgaaatcgtcaataaaggcggcgtggtcgtttatccgaccgattcctgttatgccttgggttgcaaactcggcgataaggcggcgatggaacgcatactctccatccgaaaaatcgatttgaaacaccacctgaccctgatgtgcgccgatttgagcgagttgggcacatacgccaaaatcgacaacgtacagtttcgtcagcttaaggccgccacgcccgggccttatacctttatcttgcaggcgacgaaggaagtgccggcgcgcacgctgcacccgaaacgcaaaaccatcgggctgcgtattcccgataatgccattgcacaagccctgctgggggaattgggcgagccgcttttaagctgcaccctgatgctgcccgaagacggcgaaccattgaccgatccttatgaaatccgcgagcgtttggaacacgccgtcgatttggtgattgacggcggctggtgcggaaccgagccgaccaccgtcatcgacatgaccgacggtacggaattggtgcgccaaggttgcggcgatacggcggtgttcggtttgtag

SEQ ID NO: 58091 - DNA, 909 bp, Neisseria meningitidis; identical to SEQ ID NO: 44959

SEQ ID NO: 58092 - DNA, 303 bp, Neisseria meningitidis; identical to SEQ ID NO: 43912

SEQ ID NO: 58093 - DNA, 1332 bp, Neisseria meningitidis; identical to SEQ ID NO: 48039

SEQ ID NO: 58094 - DNA, 318 bp, Neisseria meningitidis; identical to SEQ ID NO: 45861

SEQ ID NO: 58095 - DNA, 822 bp, Neisseria meningitidis; identical to SEQ ID NO: 45969

SEQ ID NO: 58096 - DNA, 375 bp, Neisseria meningitidis; identical to SEQ ID NO: 39975

SEQ ID NO: 58097 - DNA, 624 bp, Neisseria meningitidis; identical to SEQ ID NO: 45971

SEQ ID NO: 58098 - DNA, 300 bp, Neisseria meningitidis; identical to SEQ ID NO: 45972

SEQ ID NO: 58099 - DNA, 540 bp, Neisseria meningitidis; identical to SEQ ID NO: 45047

SEQ ID NO: 58100 - DNA, 867 bp, Neisseria meningitidis
atgaaaggcatcatactggcaggcggcagcggcacgcgcctctaccccatcacgcgcggcgtatccaaacagctcctgcccgtgtacgacaaaccgatgatttattaccccttgtcggttttgatgctggcgggaatccgcgatattttggtgattaccgcgcctgaagacaacgcctctttcaaacgcctgcttggcgacggcagcgatttcggcatttccatcagttatgccgtgcaacccagtccggacggcttggcacaggcatttatcatcggcgaagaatttatcggcaacgacaatgtttgcttggttttgggcgacaatattttttacggtcagtcgtttacgcaaacattgaaacaggcggcagcgcaaacgcacggcgcaaccgtgtttgcttatcaggtcaaaaaccccgaacgtttcggcgtggttgaatttaacgaaaacttccgcgccgtttccatcgaagaaaaaccgcaacggcccaaatccgattgggcggtaaccggcttgtacttctacgacaaccgtgccgtcgagttcgccaaacaaatcaaaccgtccgcacgcggcgaattggaaattaccgacctcaaccggatgtatttggaagacggctcgctctccgttcaaatattgggacgcggtttcgcgtggctggacaccggtacgcacgaaagcctgcacgaggcggcttcgttcgtccaaaccgtgcaaaacatccaagacctgcaaatcgcctgtctggaagaaatcgcctggcgcaacggttggctttccgatgaaaaactggaagaattggcgcgcccgatggcgaaaaaccaatacggccaatatttgctgcgcctgttgaaaaaataa

SEQ ID NO: 58101 - DNA, 618 bp, Neisseria meningitidis; identical to SEQ ID NO: 45560

SEQ ID NO: 58102 - DNA, 558 bp, Neisseria meningitidis; identical to SEQ ID NO: 45978

SEQ ID NO: 58103 - DNA, 666 bp, Neisseria meningitidis; identical to SEQ ID NO: 45923

SEQ ID NO: 58104 - DNA, 927 bp, Neisseria meningitidis; identical to SEQ ID NO: 45980

SEQ ID NO: 58105 - DNA, 321 bp, Neisseria meningitidis; identical to SEQ ID NO: 39983

SEQ ID NO: 58106 - DNA, 714 bp, Neisseria meningitidis; identical to SEQ ID NO: 37885

SEQ ID NO: 58107 - DNA, 501 bp, Neisseria meningitidis; identical to SEQ ID NO: 45389

SEQ ID NO: 58108 - DNA, 1185 bp, Neisseria meningitidis; identical to SEQ ID NO: 45235

SEQ ID NO: 58109 - DNA, 1128 bp, Neisseria meningitidis; identical to SEQ ID NO: 44120

SEQ ID NO: 58110 - DNA, 483 bp, Neisseria meningitidis; identical to SEQ ID NO: 39984

SEQ ID NO: 58111 - DNA, 1887 bp, Neisseria meningitidis; identical to SEQ ID NO: 45246

SEQ ID NO: 58112 - DNA, 1977 bp, Neisseria meningitidis; identical to SEQ ID NO: 45153

SEQ ID NO: 58113 - DNA, 2391 bp, Neisseria meningitidis; identical to SEQ ID NO: 44153

SEQ ID NO: 58114 - DNA, 291 bp, Neisseria meningitidis; identical to SEQ ID NO: 39909

SEQ ID NO: 58115 - DNA, 924 bp, Neisseria meningitidis; identical to SEQ ID NO: 39986

SEQ ID NO: 58116 - DNA, 873 bp, Neisseria meningitidis; identical to SEQ ID NO: 45984

SEQ ID NO: 58117 - DNA, 852 bp, Neisseria meningitidis; identical to SEQ ID NO: 45412

SEQ ID NO: 58118 - DNA, 1452 bp, Neisseria meningitidis; identical to SEQ ID NO: 45985

SEQ ID NO: 58119 - DNA, 342 bp, Neisseria meningitidis; identical to SEQ ID NO: 45956

SEQ ID NO: 58120 - DNA, 1857 bp, Neisseria meningitidis; identical to SEQ ID NO: 38136

SEQ ID NO: 58121 - DNA, 2379 bp, Neisseria meningitidis; identical to SEQ ID NO: 45987

SEQ ID NO: 58122 - DNA, 1422 bp, Neisseria meningitidis; identical to SEQ ID NO: 38326

SEQ ID NO: 58123 - DNA, 1395 bp, Neisseria meningitidis; identical to SEQ ID NO: 45357

SEQ ID NO: 58124 - DNA, 1326 bp, Neisseria meningitidis; identical to SEQ ID NO: 44490

SEQ ID NO: 58125 - DNA, 558 bp, Neisseria meningitidis
atgaacatcattgataccgccattcctgacgtaaaactgcttgagccccaagtcttcggcgacgcgcgcggcttttttatggaaaccttccgcgacgagtggtttaaaacccaagtctgcgaacgcaccttcgtgcaggaaaaccactccaaatccggcaaaggcgtattgcgcggcctgcactaccaaaccgaaaacacacaaggcaaactcgtacgcgtagttgtcggcgaagtattcgacgtggccgtcgatatgcgtaaagactcccccactttcggcaaatgggtaggcgagattctgtccgcagaaaacaaacgccaactgtgggtacccgaaggtttcgcacacggcttctatgtactgagcgatgaagccgagttcgtctataaatgcacggactattacaagcctgaagccgaacaggttttaatatggaacgacccgacagtcggcataggctggccgcttcaaaccgcgccgctgctgtcgcccaaagaccttgccggcaaaacgtgggcgcaagccgaaaagctccgccttccgctttaccgataa

SEQ ID NO: 58126 - DNA, 867 bp, Neisseria meningitidis; identical to SEQ ID NO: 58100

SEQ ID NO: 58127 - DNA, 1401 bp, Neisseria meningitidis; identical to SEQ ID NO: 44335

SEQ ID NO: 58128 - DNA, 291 bp, Neisseria meningitidis; identical to SEQ ID NO: 45422

SEQ ID NO: 58129 - DNA, 969 bp, Neisseria meningitidis; identical to SEQ ID NO: 44817

SEQ ID NO: 58130 - DNA, 207 bp, Neisseria meningitidis; identical to SEQ ID NO: 39999

SEQ ID NO: 58131 - DNA, 408 bp, Neisseria meningitidis; identical to SEQ ID NO: 45996

SEQ ID NO: 58132 - DNA, 1107 bp, Neisseria meningitidis; identical to SEQ ID NO: 45997

SEQ ID NO: 58133 - DNA, 543 bp, Neisseria meningitidis; identical to SEQ ID NO: 45999

SEQ ID NO: 58134 - DNA, 933 bp, Neisseria meningitidis; identical to SEQ ID NO: 45962

SEQ ID NO: 58135 - DNA, 432 bp, Neisseria meningitidis; identical to SEQ ID NO: 40005

SEQ ID NO: 58136 - DNA, 1197 bp, Neisseria meningitidis; identical to SEQ ID NO: 46004

SEQ ID NO: 58137 - DNA, 261 bp, Neisseria meningitidis; identical to SEQ ID NO: 46005

SEQ ID NO: 58138 - DNA, 1503 bp, Neisseria meningitidis; identical to SEQ ID NO: 47982

SEQ ID NO: 58139 - DNA, 1536 bp, Neisseria meningitidis; identical to SEQ ID NO: 40021

SEQ ID NO: 58140 - DNA, 198 bp, Neisseria meningitidis; identical to SEQ ID NO: 46017

SEQ ID NO: 58141 - DNA, 354 bp, Neisseria meningitidis; identical to SEQ ID NO: 46019

SEQ ID NO: 58142 - DNA, 216 bp, Neisseria meningitidis; identical to SEQ ID NO: 37963

SEQ ID NO: 58143 - DNA, 732 bp, Neisseria meningitidis; identical to SEQ ID NO: 40027

SEQ ID NO: 58144 - DNA, 888 bp, Neisseria meningitidis; identical to SEQ ID NO: 46685

SEQ ID NO: 58145 - DNA, 1356 bp, Neisseria meningitidis; identical to SEQ ID NO: 46026

SEQ ID NO: 58146 - DNA, 354 bp, Neisseria meningitidis; identical to SEQ ID NO: 40032

SEQ ID NO: 58147 - DNA, 273 bp, Neisseria meningitidis; identical to SEQ ID NO: 43985

SEQ ID NO: 58148 - DNA, 111 bp, Neisseria meningitidis; identical to SEQ ID NO: 40033

SEQ ID NO: 58149 - DNA, 279 bp, Neisseria meningitidis; identical to SEQ ID NO: 40034

SEQ ID NO: 58150 - DNA, 507 bp, Neisseria meningitidis; identical to SEQ ID NO: 47385

SEQ ID NO: 58151 - DNA, 228 bp, Neisseria meningitidis; identical to SEQ ID NO: 44482

SEQ ID NO: 58152 - DNA, 825 bp, Neisseria meningitidis
gtgaaccgaactaccttctgttgcctttctttgaccgctgccctgattctgaccgcctgcagcagcggagggggcggtgtcgccgccgacatcggtgcggggcttgctgatgcactaaccgcaccgcttgaccataaagacaaaggtttgcagtctttgacgctggatcagtccgtcaggaaaaacgagaaactgaagctggcggcacaaggtgcggaaaaaacttatggaaacggcgacagcctcaatacaggcaaattgaagaacgacaaggtcagccgcttcgactttatccgtcaaatcgaagtgaacgggcagctcatcaccttggagagcggagagttccaagtgtacaaacaaagtcattccgccttaaccgcccttcagaccgagcaagtacaagactcggagcattccaggaagatggttgcgaaacgccagttcagaatcggcgacatagcgggcgaacatacgtcttttgacaagcttcccaaaggcgacagtgcgacatatcgcgggacggcgttcggttcagacgatgctggcggaaaactgacctatactatagacttcgccgccaagcagggatacggcaaaatcgaacatttgaaatcgccagaactcaatgtcgatctggccgccgcctatatcaagccggatgaaaaacaccatgccgtcatcagcggctccgttctttacaaccaagacgagaaaggcagttactccctcggtatctttggcgggcaagcccaggaagttgccggcagcgcggaagtgaaaaccgcaaacggcatacgccatatcggtcttgccgccaagcaataa

SEQ ID NO: 58153 - DNA, 1392 bp, Neisseria meningitidis
atgtttcccgatttctcccaaaccctctccaaagaccgccacttcctacgttccgccttcaaaaatcccaacaaatacggcgggttgtccaaagtcgaagaaaaataccgaaaatcgcacgaaatctttttgaaacgtttggcagccttgcccaaacccgaattcgacaacaccctgcccgttcacgaaaaacttgacgaaatcaaaaaaaccgttgccgaacatcaggtaacgattatttgcggcgaaaccggttcgggcaagaccactcagttgcccaagatttgtctggaactcgggcgcggggcggcgggtttgatcgggcatacccagccgcgccgtttggcggcgcgttccgtagcagagcggattgccgaagagctgaaatccgaaatcggcagcgcggtcggctataaagtgcgcttcaccgaccacacctcgcgcgatgcctgcgtcaagctgatgaccgacggcatcctgctggcggaaacccagaccgaccgttatctcgccgcctacgacacgattatcatcgacgaagcgcacgagcgcagcctgaacatcgacttccttttgggctatttgaaacaactcctgccgcgccgccccgatttgaaagtcatcatcacctcggcaacgatagacgcagaacgcttttcccaacacttcaacggcgcgcccgtgctggaagtgagcggacgcacctatcccgtcgaaatcctctaccgaccgctgatcggcaaagacgaagacgacgcggaaatagaattgaccgacgcgattgtcgatgcggcggacgaattggcgcgatatggcgaaggcgatattttggtattcctgccgggcgaacgcgaaatccgcgaagccgccgaagccctgcgcaaatccacgctacgccgcaacgacgaaatcctgcccctgttcgcacgcctgtcgcacgccgagcagcacaaaatctttcacccctccggagcgaaacgccgcatcgtgctggcaaccaacgtcgccgaaacctcgcttaccgtgccgggcatcaaatacgtcatcgacaccggcctcgcgcgcgtcaaacgctattccgcacgggcgaaagtggagcagcttcatatcgaaaaaatctcccaagccgccgcccgccaacgctccggccgctgcggacgcgtctccgcaggcgtatgtatccgattgttttcagaagaaaatttcaacaaccgccccgaatttaccgaccccgaaatcgcccgcagcaacctcgccgccgtcatcctgcgcatggcatcgctgaaactcggcgacgtagcggcattcccatttttagaaatgcccgattcgaggtatattaatgacggttttcaggtattgctggaattaggggcagtggaggccgcctga

SEQ ID NO: 58154 - DNA, 658 bp, Neisseria meningitidis; identical to SEQ ID NO: 46032

SEQ ID NO: 58155 - DNA, 1266 bp, Neisseria meningitidis
atgcaacaaattaaatttattgacttattttccggaatgagtggcatcaggaaaggattcgaacaagcctgtcggaaacagtcggttgcttgcgaatgtgtttttacttcagaaatcaaaccggcagctttggaagtattgaagcaaaactaccctgatgaagtgccgtatggagacataacgaaaattgaaacaggggatattcccgattttgacattctgttggcaggcttcccttgtcaggctttttctttcgccggaaaaagattgggctttgaagatacacggggaacgcttttctttgatgtggcaaggattttaaaagcaaaaaaaccaaaaggttttattttggaaaatgtggaaggattggtgacacacgatagaaaagattcgacacaaaaatggcgcaccctgaccgttattttggaaaccttggaagcattgggctactatgtttcttggaaagttttaaatgcaaaagatttcggcattccccaaaacaggaagcgcatttatctgacaggcagtttgaaatccaaacccgacttatctttcgaaacaagcccaagtccgaaattaaaaaatattttggaatcgggactgcctactgaaagcagccctttcatcaagaaattgctaaaaaaatttcccccgtccgaactgtacggaaaatcagtaaaagacaaacggggagggaaaaacaatattcacagttgggatattgaattaaaaggcgcagtaaccgaagaagagaagcaattgttaaatatccttctaaaagaacggaggaaaaaaagggcttcagaaatcggcatagattggatggatgggatgcctttgacaaaagcgcaaatttcaactttctataaacaccccgatctccaaaatattttggacagcctgacagataaaggctatttggttttagagcatccgaaacaaaaaattggcgggcaaagaatcaaagatgaatccctgcccaaaggctacaatattgtttcaggtaaaaaatcttttgaaatcaataaaatattagatccaaacgatgttgcgccaaccttggttgcaatggatatggagcaccttttcgtcgttgacaacggcggtttgcgtacacttaccggaaaagaagggttgcgcttattcggctatccggacgattattcgtttgatattcccaaaaaagacagatgcgatttattgggtaataccgttgccgtccctgtgattaaggcggtatctgaaagacttctgcatactttataa

SEQ ID NO: 58156 - DNA, 3201 bp, Neisseria meningitidis
atgcgaacgaccccaaccttccctacaaaaactttcaaaccggctgccatggcgttagctgttgcaacaacactttctgcctgcttaggcggcggcggcacttctgcgcccgacttcaatgcaggcggcaccggtatcggcagcaacagcagagcaacaacagcgaaatcagcagcagtatcttacgccggtatcaagaacgaaatgtgcaaagacagaagcatgctctgtgccggtcgggatgacgttgcggttacagacagggatgccaaaatcaatgccccccccccgaatctgcataccggagactttacaaacccaaatgacgcatacaagaatttgatcaacctcaaacctgcaattgaagcaggctatacaggacgcggggtagaggtaggtatcgtcgatacaggcgaatccgtcggcagcatatcctttcccgaactgtatggcagaaaagaacacggctataacgaaaattacaaaaactatacggcgtatatgcggaaggaagcgcctgaagacggaggcggtaaagacattaaagcttctttcgacgatgaggccgttatagagactgaagcaaagccgacggatatccgccacgtaaaagaaatcggacacatcgatgtggtctcccatattattggcgggcgttccgtggacggcagacctgcaggcggtattgcgcccgatgcgacgctacacataatgaatacgcatgatggaaccaagaacgaaataatgtctgcagccatccgcaatgcatgggtcaagctgggcgaacgtggcgtgcgcatcgtcaataacagttttggaacaacatcgagggcaggcactgccgaccatttccaaatagccaattcggaggagcagtaccgccaagcgttgctcgcctattccggcggtgataaaacagacgagggtatccgcctgatgcaacagagcgattacggcaacttgtcctaccacatccgtaataaaaacatgcttttcattttttcggcaagcaatgacgcacaagctcagcccaacacactgaccctattgccattttatgaaaaagatgctcaaaaaggcattatcacagtcgcaggcgtagaccgcagtggagaaaagttcaatggctccaaccattgcggaattactgccatgtggtgcctatcggcaccctatgaagcaagcgtccgtttcacccgtacaaacccgattcaaattgccggaacatccttttccgcacccatcgtaaccggcacggcggctctgctgctgcagaaatacccgtggatgagcaacgacaacctgcgtaccacgctgctgacaacggctcaggacatcggtgcagtcggcgtggacagcaagttcggctggggactgctggatgcgggtaaggccatgaacggacccgcgtcctttccgttcggcgactttaccgccgatacgaaaggtacatccgatattgcctactccttccgtaacgacatttcaggcacgggcggcctgatcaaaaaaggcggcagccaactgcaactgcacggcaacaacacctatacgggcaaaaccattatcgaaggcggttcgctggtgttgtacggcaacaacaaatcggatatgcgcgtcgaaaccaaaggtgcgctgatttataacggggcggcatccggcggtagcctgaacagcgacggcattgtctatctggcagataccgaccgatccggcgcaaacgaaaccgtgcacatcaaaggcgatctgcagctgggcggcgaaggtacgctgtacacacgtttgggcaaactgctgaaagtggacggtacggcgatgaccggcggcaagctgtacatgtcggcacgcggcaaaggggcaggctatctcaaccgtaccggacaacgtgttcccttcctgagtgccgccaaaatcgggcgggattattctttcttcacaaacatcgaaaccgacggtggtctgctggcttccctcgacagcgtcgaaaaaacagcgggcagtgaaggcgacacgctgtcctattatgtccgtcgcggcaatgcggcacggactgcttcggcagcggcacattccgcgcccgccggtctgaaacacgccgtagaacagggcggcagcaatctggaaaacctgatggtcgaactggatgcctccgaatcatccgcaacacccgagacggttgaaactgcggccgccgaccgcacagatatgccgggcatccgcccctacggcgcaactttccgcgcagcggcagccgtacagcatgcgaatgccgccgacggtgtacgcatcttcaacagtctcgccgctaccgtctatgccgacagtaccgccgcccatgccgatatgcagggacgccggctgaaagccgtatcggacgggttggaccacaacgctacgggtctgcgcgtcatcgcgcaaacccaacaggacggtggaacgtgggaacagggcggtgttgaaggcaaaatgcgcggcagtacccaaaccgtcggcattgccgcgaaaaccggcgaaaatacgacagcagccgccacactgggcatgggacacagcacatggagcgaaaacagtgcaaatgcaaaaaccgacagcattagtctgtttgcaggcatacggcacgatgcgggcgatatcggctatctcaaaggcctgttctcctacggacgctacaaaaacagcatcagccgcagcaccggtgcggacgaacatgcggaaggcagcgtcaacggcacgctgatgcagctgggcgcactgggcggtgtcaacgttccgtttgccgcaacgggagatttgacggtcgaaggcggtctgcgctacgacctgctcaaacaggatgcattcgccgaaaaaggcagtgctttgggctggagcggcaacagcctcactgaaggcacactggtcggactcgcgggtctgaagctgtcgcaacccttgagcgataaagccgtcctgtttgcaacggcgggcgtggaacgcgacctgaacggacgcgactacacggtaacgggcggctttaccggcgcgactgcagcaaccggcaagacgggggcacgcaatatgccgcacacccgcctggttgccggtctgggcgcggatgtcgaattcggcaacggctggaacggcttggcacgttacagctacgccggttccaaacagtacggcaaccacagcggacgagtcggcgtaggctaccggttctga

SEQ ID NO: 58157 - DNA, 1071 bp, Neisseria meningitidis
atgaaaatcatcctgaccacttctatgtcgggcttgggcggcacggaaaccgccaccgtccgcctcgggcggctgctcaaacggcgcgggcacgacatcatccttgcttcttcggacgggccttttgtcggagaggcgcaagcatcgggcatccgttggcagccggttgatttttaccggggcgggcttgccggctacctcaaaagcacctttgcctacgcccggatgctgcgccgcgaacaacccgacatcatcgactgccaaatggcgcgcgttgttccagcctgcgcccttgccgccaaaatcgtttcgccgaaaaccaaaatcatctaccactcgcacggtttggacgcggcaacctaccccaaaatcgccaagctcttcgacaagctgggcgtgtacatcatcggcaactgtaaacacgagcgcgaaaaactcatccgccacggcttccccgccggccggattgcctacgcctacaacgctcccccccccccggaatttcatttccggaaaaccaaaaaagaatgcgccgtactcggcacactttcccgtttggacaccgtccgcgccgtgcatctgatgttggatattttgaagaaaatggttgaccgcggtatgcctgtacgcctcaacgttgcaggtatcggcgaagaaatggacaacctcaaagcccaagccaaacgtttgggcattgaagacaaagtcaccttcctcggcggcgtccgcgatttgaccggctacttcaaagaagtcgatattttggtgaacacgccgcattgcgtgggcgatcacggcgcaggtgtcggcaacaatattttggaagccggcctttacgacacgcctgtcgtgacctacaacatggcgggcatttccgaaatggtcattaccggccaaaccggctactgcattcctttcggcgacgacgaagcatttatcgaagccttcgatacactcatcaagcatccagagttgcgcagccaaatgggcaaagccctgcacaaacatgtcgaaaccttatgctccgacgacgaaatctaccgcaccaccatggctgcgtacgaaatgtaa

SEQ ID NO: 58158 - DNA, 777 bp, Neisseria meningitidis; identical to SEQ ID NO: 52055

SEQ ID NO: 58159 - DNA, 966 bp, Neisseria meningitidis; identical to SEQ ID NO: 40049

SEQ ID NO: 58160 - DNA, 1575 bp, Neisseria meningitidis; identical to SEQ ID NO: 56143

SEQ ID NO: 58161 - DNA, 984 bp, Neisseria meningitidis; identical to SEQ ID NO: 40053

SEQ ID NO: 58162 - DNA, 489 bp, Neisseria meningitidis
atgctcaaaataaccctaattgcggcgtgtgcggaaaacctgtgcatcggggcgggcaatgcgatgccttggcacattcccgaagatttcgcatttttcaaagcctataccttgggcaaacccgtcattatggggcggaaaacgtgggaatccctgcacgtcaaacccctgcccggacggaggaacatcgtcatcagccggcaggcggattattgcgcggcaggcgcggaaacggcggcaagtttggaggcggcattggcattgtgcgcaggcgcggaagaagccgtcattatgggcggcgcgcagatatacggacaagcgatgccattggcgaccgatttgcggataaccgaagtggatttgtctgtggaaggagatgcatttttccccgcaatagaccggacgcattggaaagaagcagagcggacggaacgccgtgtcagcagcaaaggcacgagctatgcttttgtgcattatttgagatattga

SEQ ID NO: 58163 - DNA, 1644 bp, Neisseria meningitidis; identical to SEQ ID NO: 44137

SEQ ID NO: 58164 - DNA, 630 bp, Neisseria meningitidis; identical to SEQ ID NO: 46046

SEQ ID NO: 58165 - DNA, 1143 bp, Neisseria meningitidis; identical to SEQ ID NO: 45167

SEQ ID NO: 58166 - DNA, 1368 bp, Neisseria meningitidis; identical to SEQ ID NO: 40055

SEQ ID NO: 58167 - DNA, 4476 bp, Neisseria meningitidis
atgcgcttcacacacaccaccccattttgttccgtattgtccaccctcggtctttttgccgtttcccctgcttactcatccattgtccgcaacgatgtcgattaccaatattttcgcgactttgccgaaaataaaggcgcgttcgccgtaggtgcaagcaatatttccatccaagacaagcaaggcaaaatattaggcagggttctcaacggcatccccatgcccgacttccgagtcagcaaccggcaaaccgccatcgccaccctgattcacccccaatacgtcaacagtgtcaaacacaacgtcggctacggttccatacaattcggcaacgacacccaaaatccagaagaacaagcctatacctaccgcctcgtatcacgcaacccgcacccggactacgactaccaccttccccgcctcaacaaactggttaccgaaatctcacctgccgcactcagcagcgtacccttgcttggaaacggccagccaaaggccaatgcctacctcgataccgaccgcttcccctactttgtacgactcggctcaggcacgcaacaagtccgcaaagcagacggcacgcgtacacgaaccgccccggcataccaatacctgaccggcggcacgccgctgaaagtattggggttccaaaaccacggcttactcgtcggcggcagcctgaccgaccaaccccttaacacctacgcaatcgccggagacagcggttcccccctgtttgccttcgacaagcatgaaaaccgctgggtgcttgcgggcgtactcagcacctacgccggcttcgataatttcttcaacaaatacatcgtcacgcaacccgaattcatccgttccaccatccgccaatacgaaacccggctggatgtcgggctgaccaccaacgaactcatatggcgcgacaacggtaatggcgacagcaccctgcaagggctcaacgaacgcatcaccctgcccattgcaaacccttcgcttgccccacaaaacgacagcaggcacatgccgtctgaagatgccggcaaaacgctcatcctatccagcaggttcgacaacaaaacactgatgctggcagacaatatcaaccaaggcgcaggcgcattgcagttcgacagcaacttcaccgtcgtcggtaaaaaccacacatggcaaggtgcaggcgttatcgtagccgacggcaaacgcgtcttctggcaagtcagcaaccccaaaggcgaccggctctccaaactgggcgcaggcacgcttatcgccaacggacaaggcatcaaccagggcgacatcagcatcggggaaggcactgtcgtactcgcccaaaaagctgcttcagacggcagcaaacaagcattcaaccaagtcggcatcaccagcggcaggggtacggccgtcctcgccgacagccagcaaatcaaatccgaaaacctctatttcggcttcaggggcggacggctcgacctcaacggcaacaaccttgcctttacccatatccgccatgcggacggcggcgcgcagatcgtcaaccacaaccctgaccaagccgcgacactgacgctgaccggcaaccccgtcctcagtcctgagcatgtcgagtgggtgcaatggggcaaccgtccgcaaggcaacgcggcggtttacgaatacatcaacccgcaccgcaaccgtcggaccgactacttcatactcaaacccggcggcaacccgcgcgaatttttcccgttaaatatggaaaactcaacaagctggcaatttatcggcaacaacaggcaacaggccgccaaacaagtcgcccaagccgaaaatgcccgccccgacctaattaccttcggcggatacttgggtgagaacgcgcaaacgggcaaagccgcaccgagttacagcaaaaccaatatcgaatgggtgaatggtccaaacaccccacacaagccctcgccctatacgaatacgccaacccgcacaggggcaggcgtaccgacgattaccgcctcaaagaaggcggcaaccccggcgcctacttcccatggaatgcctacagcacccaagactgggaatttctcggacatgaccggcgaagcagccatagaaaaaaaccgccatatcgcaaatgccgccgtatacggccggcccgaataccgttacaacggcgcactcaacctgcactatcgtcccaaacgcaccgacagcacgctgttgctcaacggcggcatgaaccttaacggggaagtcttgattgagggcggcaatatgattgtgtcaggcaggcccgtaccccatgcctacgaccaccaggccaaacgcgaacccgttcttgaaaacgaatggaccgacggcagcttcaaggctgcacggttcaccctacgaaaccatgcccgactgacagcagggcgcaataccgcgcatctggacggcgacataaccgcatacaatctgtccggcatcgacctcggctttatccaaggcaaaacaccggaatgctaccgctcctaccatagcggcagcacccactgcacacccaacgccgttttaaaagccgaaaactatcgtgcactacctgtaacgcaagtacgcggcgacattacccttaacgaccgttcagagctccgcctgggcaaagcacacctgtacggcagcatccgtgccggcaaagacaccgcagtccgcatggaagcagacagcaactggacactttcccagtccagccacaccggcgcactgacgcttgacggcgcacaaattaccctgaaccccgatttcgccaataatacacacaacaaccgcttcaacacactgaccgtcaacggcacacttgacgggttcggcacattccgattcctgaccggcatcgtccgaaaacaaaatgccccccccctcaaactggaaggggacagccgcggcgcattccaaatccacgtcaaaaacaccggacaagaacctcaaacaaccgaatcgcttgcacttgtgagcctcaatccgaaacacagccaccaagcccgattcaccctccaaaacggctatgccgatttgggtgcctaccgctacatcctccgcaaaaacaacaacggatacagcctgtacaacccgctcaaagaggccgaacttcaaattgaagccacgcgtgcggaacatgagcgcaaccaacaggcatacaaccaattacaggcaaccgacatcagcagacaggttcaacatgactctgacgcgaccaggcaggcactacaggcctggcagaacagtcaaaccgaacttgcccgcatcgacagccaagtccaatatctgtccgcccaattgaaacagacagacccgctgaccggcattctgacgcgtgcccaaaacctgtgtgccgcacaaggatacagtgtcgatatctgccgtcaggttgccaaagccgccgacacgaacgacctgacactcttcgaaaccgaactggatacgtatatagaacgtgtagaaatggccgaatccgaacttgacaaagcacggcaaggcggcgatgcgcaagccgtcgaaacagcccggcacgcctacctgaacgcactcaaccgtctgtcccgacaaatccacagtttgaaaaccggcgttgccggcatccgtatgccgaacctggccgaactgatcagccggtcggccaacaccgccgtttccgaacaggccgcctacaataccggccggcaacaggcgggacgccgcatcgaccgccaccttaccgatccgcagcagcaaaacatctggctggaaaccggtacgcaacaaaccgactaccatagcggcacacaccgtccctaccaacaaactaccaactatgcacatatcggcatccaaaccggcatcaccgaccgtctcagtgtcggtacgattttaaccgatgagcgcacaaacaaccgttttgatgaaggcgtatccgcccgaaaccgcagcaacggcgcacatctattcgtcaaaggggaaaacggcgcactctttgccgcggcagatttaggctacagcaacagccgtacccgatttaccgattatgacggggctgccgtccgccgccacgcatgggatgcaggcatcaacaccggcatcaaaatcgataccggcatcaacctcagaccctatgccggcatccgtataaaccgcagcaacggcaaccggtacgtactcgacggcgcagagataaacagcccggcgcaaatccaaaccacatggcatgccggcatccgtctcgataaaaccgtcgaactgggtcaagccaagctgacccccgctttcagcagcgattactaccatacccgccaaaacagcggttccgccctcagcgtcaacgaccgtaccttactgcagcaagccgcccacggcacactgcataccctgcaaatcgacgccggatacaaaggctggaacgccaaacttcatgccgcttacggcaaagacagcaacaccgcccgccacaaacaggcaggaatcaaaataggctacaactggtaa

SEQ ID NO: 58168 - DNA, 1878 bp, Neisseria meningitidis
atgagccaagccttaccctaccgcccggacatcgacacattgcgcgccgccgccgtcttgtccgtcatcgtgttccatatcgaaaaaaattggctgccgggcgggtttctcggtgtcgatatatttttcgtgatttcaggctttttgatgacgatgattcttcaccgcgaaatgtcgggggggggggggttttccctgaaggcattttatatccgccgcatcaaacggattttgcccgcatttttcgccgtattggcggcaacgctgataggcggcttctttttattcaccaaagatgatttctttcttttgtggaaatccgcgctgaccgccttgggtttcgcctccaacctgtattttgcaagggggaaggattatttcgatcccgcgcaggaagaaaagcccttgctgcacatttggtctttgtcggtcgaagaacaattttactttgtctttccgatattgctgctgcttgtcgcccgcaaaagcccgcgcgtacagttcggcttcctcgccgcattgtgcgccttaagccttgccgcttcctttatgccttccgcgttcgataaatattacctgccccacctgcgcgcctgcgaaatgctggtcggatcgctgaccgccgtgtggatgcggtaccggcaacagcggaatctcgccgttggcagatgctgtgccgccgccggcgcattgttttccgcgtgcatactgtccgcctgcctgtttgcctattcgaaacaaaccgcctatttcccgggacccgccgctttgattccctgtctggctgttgccgcgctgatttatttcaatcattacgaacacccgcttaaaaaatttttccaatggaaaatcactgttgccgccggtttgatttcctattcgctttatctgtggcattggccgatattggcctttatgcgctatatcggcccggacaacctgccgccttattcaacagcggcagcaatcgtcctgatattgctgctttccctgatttcttatcactgcatcgaaaagccgtttaaaaaatggaaaggttcgttcgcacaatccgttttatggatttatgccttgcctatgctcattttgggggcgggctcgtttttcgcgatgaggctgccgtttatggcgcaatacgaccgcttggggctgacgcgttccaacacctcctgccacaacaataccggcaaacaatgcctgtggggggatacggaaaaacagccggagctgctggttttgggcgactcccacgccgaccattacaaaacattcttcgatgccgtgggcaaaaaagaaaaatggtccgccactatggtttccgccgacgcttgcgcctatgtggaaggctacgcgtcccgtgtgttccaaaactgggccgcctgccgcgccgtttaccgctatgccgaagaacacctgcccctgtattcaaaagtggttttggcgatgcgctggggcagccaaatgcccgaaaacagccgctcccttgcctacgatgccggttttttccaaaaattcgaccgtatgctgcacaaactctcatccgaaaaacaagccgtttacctgatggcggacaaccttgcctcgtcttacaacgtacaacgcgcctatatcttgtcttcacgcataccgggttaccgccaaaccctgcgcccggacgacgaaagcactctgaaagccaatgcacgcatcagggaattggcagccaaataccccaacgtctatattattgatgccgccgcctatatccccgcaaatttccaaatcggcggattgccggtttactcggacaaagaccacatcaacccttacggcggcacggaattggcgaagcgtttttccgaaaaacaacggtttctcgatacgcgccataaccattga

SEQ ID NO: 58169 - DNA, 1404 bp, Neisseria meningitidis; identical to SEQ ID NO: 46050

SEQ ID NO: 58170 - DNA, 1119 bp, Neisseria meningitidis; identical to SEQ ID NO: 39438

SEQ ID NO: 58171 - DNA, 1677 bp, Neisseria meningitidis; identical to SEQ ID NO: 38898

SEQ ID NO: 58172 - DNA, 510 bp, Neisseria meningitidis; identical to SEQ ID NO: 46052

SEQ ID NO: 58173 - DNA, 945 bp, Neisseria meningitidis
atgaaagcaatggtttatcacggcgcaaacgacatccgttttgaagaaaaaccccgtccgcagattatcgatccgaccgatgcggtggtgaaaatcgtcaaaaccacgatttgcggtaccgatttgggtatttggaaaggcaaaaaacccgaagtcgccgacggccgtattctcggtcatgaaggcatcggtattgtagaagaagtcggcgaggctgtaaaaaacatcaaagtcggcgataaagtcattatttcatgcgtcagcaaatgctgtacttgcgacaactgcaaaatccaactttattcgcattgccgcaacggcggctggattttgggctacatgattgacggcacgcaggcagaatacgtccgcacgccttatgccgacaacagcctcgtgccgctgcccgacaacgtcaacgaagaagtcgccctgttgttgagcgacgccttgccgaccgcccaactgtacagccccgccgccatcattgtttgcgatatggacgaaaaccgtttgaaactggcgaaagagttgggcgcaacccataccattaaccctgcttccggcgatgtaagcaagcaagttgtcgctatcgtcggcgaagacggcgtggactgcgcgatcgaagccgtcggtatccctgcaacttggaatatgtgccaagacattgtgaaacccggcggccatatcgccgttgtcggcgtacacggtcaatccgttgatttcaaactggaaaaactgtggattaaaaagcttgccatcactaccggcctggtaaacgccaataccaccgaaatgctgatgaaggcaatttccagcagctccgtcgattacaccaaaatgttgacccaccgtttcaaattcagcgaattggaaaaagcctacgacgtgttcaaacacgccgccgaaaatcaagcgatgaaagtggttttggaagcggattaa

SEQ ID NO: 58174 - DNA, 1086 bp, Neisseria meningitidis; identical to SEQ ID NO: 38486

SEQ ID NO: 58175 - DNA, 630 bp, Neisseria meningitidis; identical to SEQ ID NO: 44175

SEQ ID NO: 58176 - DNA, 426 bp, Neisseria meningitidis
atgtattgggaacgcggtctgcacatgtataaggcaagtgctgtcgtgccaacgggatatgtacgggttgggaataccgcgccgctggtcggcgaagacacgcaacggtatgcctctttttggggcgacggctacgacgtgtaccgtcagttgagatggcagcagatacccgaaaaacagagaaaggcattcaaaaaagccgccaaaagcaaaaagaccgtgatgtttgccggacgggaatacggcatatccaaacagaatttgagcgatgtttgggatgattttgaagacgcgatggaactgaaggcgtttccctgcctgtcttcgctgtttctgaccaagtggcataaaaatctatatgatagtggattaacaaaaaccagtacggcgttgcctcgccttagctcaaagagaacgattctctaa

SEQ ID NO: 58177 - DNA, 1518 bp, Neisseria meningitidis; identical to SEQ ID NO: 40117

SEQ ID NO: 58178 - DNA, 321 bp, Neisseria meningitidis; identical to SEQ ID NO: 40070

SEQ ID NO: 58179 - DNA, 568 bp, Neisseria meningitidis
gtgaattataaaatatacgatggtgcaaagattattaaaaaagaaaatttatcaattggggattattctcaaattgatgattttgtattttttaattgtggagagaaaagtattttaggaagttttgttcatatatcatcatttaccagtattattggtggtggagaattttatatggatcatttttcaggattaagcgcagggtgtagaattattaccggtagcgatgattttatgggggggggggttaaccaatccaacagtcccatctaaatatactaatgttaaaaaatctagtgttagaattggaaaacatgcaattttaggaacaaatgtaacagtattaccaggcgttactattggtgatggggttgctgttggagcaggggctatagtgagaaaaaatcttgagccgtggactatttatgtcggggtagattgtaaaccactgaagcgcagatcacaagataaaatattggagttagagaaacatcttgtagcagaatttaatctagatttatgtcctataatcccatccccgaacctgcccaaaccaaaggaaacgcga

SEQ ID NO: 58180 - DNA, 294 bp, Neisseria meningitidis; identical to SEQ ID NO: 40076

SEQ ID NO: 58181 - DNA, 375 bp, Neisseria meningitidis; identical to SEQ ID NO: 40077

SEQ ID NO: 58182 - DNA, 282 bp, Neisseria meningitidis
atgaaattgttggccgcattgattccgctcttgatgagcgtcgtaggccgtatattgactgcattgggattgatggccgtgacctattcgggggtggatagattggtagcccattttcaacaggcgataacccatagcataacgggcgcacctcaagcaatgttacagcttttctatataagcggcggtggtactgttctaaacattcttttcggcgcgatcgcctttattctgtcattcaaacaaataacaaaactagcaacctcaatcgggaagaaaaaa

SEQ ID NO: 58183 - DNA, 381 bp, Neisseria meningitidis; identical to SEQ ID NO: 50035

SEQ ID NO: 58184 - DNA, 324 bp, Neisseria meningitidis
atggcggcaccccccccccgacaaaaaaaaacaatccggaacgcatctgaccgttccggcttgttttcaggcgaatccgccgcatcagaacatactgcgcacgcccatattgacctgccaagtctggcgcatcgtgtgcatcgaagacctttgcgcctcaaaataaagctgccttccgttgtcggcattaccacgcaaaaaaatgaattgcttgatattccaatgttttttatatgtttttatattgtgatgcgatcagacaaacgcccccctgacatttgtttagacggcatcgtattgctaaatttctataagtatgtataa

SEQ ID NO: 58185 - DNA, 237 bp, Neisseria meningitidis; identical to SEQ ID NO: 40080

SEQ ID NO: 58186 - DNA, 225 bp, Neisseria meningitidis
atggcaaaaatcaaaattatcccgacccgtagttttttcgatggtgaacagacgtttgccacagggaaaaaatattcggtggacgaatctgcggcggctgtctatatccgcgaaggttgggcggcagaagcgcctgccaaagaggccgaatcccctgttgccgatggcggcgaagctgaagatagcggtaacgcatccggtgagggcggcgaggacggcagtgtt

SEQ ID NO: 58187 - DNA, 219 bp, Neisseria meningitidis; identical to SEQ ID NO: 46065

SEQ ID NO: 58188 - DNA, 198 bp, Neisseria meningitidis; identical to SEQ ID NO: 40083

SEQ ID NO: 58189 - DNA, 324 bp, Neisseria meningitidis; identical to SEQ ID NO: 38284

SEQ ID NO: 58190 - DNA, 195 bp, Neisseria meningitidis; identical to SEQ ID NO: 39733

SEQ ID NO: 58191 - DNA, 483 bp, Neisseria meningitidis; identical to SEQ ID NO: 46347

SEQ ID NO: 58192 - DNA, 420 bp, Neisseria meningitidis; identical to SEQ ID NO: 37358

SEQ ID NO: 58193 - DNA, 243 bp, Neisseria meningitidis; identical to SEQ ID NO: 44059

SEQ ID NO: 58194 - DNA, 237 bp, Neisseria meningitidis; identical to SEQ ID NO: 45833

SEQ ID NO: 58195 - DNA, 312 bp, Neisseria meningitidis; identical to SEQ ID NO: 46071

SEQ ID NO: 58196 - DNA, 204 bp, Neisseria meningitidis; identical to SEQ ID NO: 46447

SEQ ID NO: 58197 - DNA, 207 bp, Neisseria meningitidis; identical to SEQ ID NO: 40088

SEQ ID NO: 58198 - DNA, 207 bp, Neisseria meningitidis; identical to SEQ ID NO: 44064

SEQ ID NO: 58199 - DNA, 195 bp, Neisseria meningitidis; identical to SEQ ID NO: 46074

SEQ ID NO: 58200 - DNA, 441 bp, Neisseria meningitidis; identical to SEQ ID NO: 40090

SEQ ID NO: 58201 - DNA, 195 bp, Neisseria meningitidis; identical to SEQ ID NO: 40091

SEQ ID NO: 58202 - DNA, 396 bp, Neisseria meningitidis; identical to SEQ ID NO: 40092

SEQ ID NO: 58203 - DNA, 210 bp, Neisseria meningitidis
gtgggatgcagggtgtgcttcagcccgctgcatcaaaaatttttggagaatcggcgggagtcggcggttttggtttcggcggggacggtggaaatgggtaacattgacggaatcgacggaagcggtgggcttcagcccaccgcttgtatattggaatcaccgtatcatagcgccacccgcgcccacccaaggcacacaaccgttgcgtag

SEQ ID NO: 58204 - DNA, 207 bp, Neisseria meningitidis
ttaaaaaatacttggcaaggtgtgaaaaaaggcgtacattccgctacacagaattacagacgcagcggagcaatgccgtctgaaaggattttccggtcagtcttgcgattggtcggggtttcatcggaaacggtgaaacgaaagtttgccggcgtagagttgagctacgcgggcaaagccgcaggcgaaagcctgtattgtttgtga

SEQ ID NO: 58205 - DNA, 270 bp, Neisseria meningitidis; identical to SEQ ID NO: 38063

SEQ ID NO: 58206 - DNA, 474 bp, Neisseria meningitidis; identical to SEQ ID NO: 45061

SEQ ID NO: 58207 - DNA, 303 bp, Neisseria meningitidis; identical to SEQ ID NO: 40930

SEQ ID NO: 58208 - DNA, 219 bp, Neisseria meningitidis; identical to SEQ ID NO: 40094

SEQ ID NO: 58209 - DNA, 216 bp, Neisseria meningitidis; identical to SEQ ID NO: 40095

SEQ ID NO: 58210 - DNA, 807 bp, Neisseria meningitidis; identical to SEQ ID NO: 44600

SEQ ID NO: 58211 - DNA, 183 bp, Neisseria meningitidis; identical to SEQ ID NO: 46082

SEQ ID NO: 58212 - DNA, 2121 bp, Neisseria meningitidis; identical to SEQ ID NO: 40097

SEQ ID NO: 58213 - DNA, 213 bp, Neisseria meningitidis; identical to SEQ ID NO: 40098

SEQ ID NO: 58214 - DNA, 552 bp, Neisseria meningitidis; identical to SEQ ID NO: 39879

SEQ ID NO: 58215 - DNA, 531 bp, Neisseria meningitidis
atgtttccccccgacaaaacccttttcctctgtctcagcgcactgctcctcgcctcatgcggcacgacctccggcaaacaccgccaaccgaaacccaaacagacagtccggcaaatccaagccgtccgcatcagccacatcgaccgcacacaaggctcgcaggaactcatgctccacagcctcggactcatcggcacgccctacaaatggggcggcagcagcaccgcaaccggcttcgattgcagcggcatgattcaattcgtttacaaaaacgccctcaacgtcaagctgccgcgcaccgcccgcgacatggcggcggcaagccgcaaaatccccgacagccgccttaaggccggcgacctcgtattcttcaacaccggcggcacacaccgctactcacacgtcggactctatatcggcaacggcgaattcatccatgcccccagcagcggcaaaaccatcaaaaccgaaaaactctccacaccgttttacgccaaaaactacctcggcgcacatactttctttacagaa

SEQ ID NO: 58216 - DNA, 414 bp, Neisseria meningitidis; identical to SEQ ID NO: 46086

SEQ ID NO: 58217 - DNA, 1230 bp, Neisseria meningitidis
atgccttctgcccattatcctgaaatgagcgaaaaactgatggcggttttgatggcgatgctggttacgctgatgccgttttccatcgatgcctacctgcccgcgattcccgaaatggcgcagtcgctgaacgcggatgtccaccgcatcgaacagagcctgagtttgtttatgttcggcacggcgttcggacaggtggtcggcggttcggtgtccgacatcaaagggcgcaaacccgtcgcgctgaccggactgaccgtctactgccttgccgttgccgccatcgtatttgcttcgagtgccgaacagctcctcaacctgcgcgtcgtgcaggcattcggtgcgggcatgactgtggtcatcgtcggcgcaatggtgcgcgattattattccggacgcaaagccgcccagatgtttgcccttatcggcatcattttgatggttgtgccgctggtcgcatccatggtcggcgcattgttgcagggcttgggtggctggcaggcgatttttgtttttctggcggcgtattcgctggtgctgctcggtttggtgcagcatttcctgcccaagcctgccgtcggcggcaaaatcggacgggacgtgttcgggctggtggcggggcggttcaagcgcgtattgaaaacccgtgccgcgatgggttatctgttttttcaggcattcagcttcggttcgatgttcgcctttctgaccgaatcttccttcgtgtaccagcagctctaccgtgttacgcctcatcaatacgcttgggcgtttgcactcaacatcatcacgatgatgtttttcaaccgcattaccgcgtggcggctcaaaaccggcgtgcatccgcaaagcatcctgctgtgggggattgtcgtccagtttgccgccaacctgtcccaactcgccgccgtgctgtttttcgggttgcccccgttttggctgctggtcgcgtgcgtgatgttttccgtcggtacgcagggcttggtcggtgcaaacacgcaggcgtgttttatgtcttattttaaggaggagggcggcagcgcaaatgccgtgttgggcgtgttccaatccttaatcggcgcgggcgtgggtatggcggcgaccttcttgcacgacggttcggcaaccgtgatggcggcaacgatgaccgcgtccacctcttgcggcattgcgcttctgtggctctgctcgcatcgtgcgtggaaagaaaacgggcaaagcgaatacctt

SEQ ID NO: 58218 - DNA, 1167 bp, Neisseria meningitidis
atgagcaaaaaactccatccgcaaacgctcgccatacgcggcggcaaagaacaaaccgaataccgcgaacacaatcaggccttgttcctgaccagcagcttcatgtgggacaacgcccaacacgccgccgatttgttttcaaaaaaaatcaaaggcttcacttatacccgtaccgccaacccgaccacagccgcctttgaaaaacgcatcgccgctttggaaggtgcggaacgcgcggttgccacttcgaccggcatgtccgcgattcaggcggcgtttttcacctttttgcaggcgggcgaccatgtggtttccagccgcagcctgttcggcacgaccgtcggctttatcaataacatcgttaccaaattcggcatcgaagtgagccacgtgtcgccgactgatataaacgaatggaaagccgccgtcaaagccaataccaaactgctgtttttggaaacgccgtccaaccccttgggcgaagtggccaacttggaggcattggcggaattggcgcacggcatcggcgcgattttggtggtggacaacagcctgctgtcgcccatcggctctcagcctttgaagcacggcgcagatatttccgtttcttccgcaaccaaagccatagacggacacggacgcgtgatgggcggcgtgttggcgggttcggaagaactgatggcgcaggccgccgtttactgcaactcttgcgggctggcgatgtcgccgtttaacgcgtggcagttgttgagcggcgtggaaaccctgtcgctgcgtatggaaaaacagttcgacaacgccctgaaaatcgcacaatggctgcaagcgcagccgcaggttcaagccgtgtactacaccggattgcccgaccatccgcaggcggcgcttatccgcaaacagcaaaacggcggcggcatcgtcatcggctttgaagtcgccgaccaagcagccgcgtggaaagtcgtggacggcgtggaactcttttcccgtaccgccaacctcggcgacgtgcgctcgaccatcacccatccgtggacaaccacgcacggcaggatgcagcccgaagaaaaactcgccgccaacatccgccccggattggtgcgcctgtcggtcggtttggaatatgttggcgatttgattgacgatttgaaacaggcactcgcacgc

SEQ ID NO: 58219 - DNA, 399 bp, Neisseria meningitidis; identical to SEQ ID NO: 46088

SEQ ID NO: 58220 - DNA, 297 bp, Neisseria meningitidis
atgcattatttcagtattcatgaccaatcgggacggcatataggctttttcatcctgcttgccgacgacgaatcggaagcacggccgcaaagcgggcgttttgccgtcaaacttgaaggcggaatggaaaatcatgtcctgtcgccgttcggtcagacggaaatcccccaatattggcgcgtggtcaaagaccgtatcgagctgttttttgacgaagctcccgtcggaagtttgcgtaacgaatatctgaccgtgtcggggcagacttttgttttgaacgatttgacagggaatatg

SEQ ID NO: 58221 - DNA, 411 bp, Neisseria meningitidis; identical to SEQ ID NO: 40101

SEQ ID NO: 58222 - DNA, 288 bp, Neisseria meningitidis
gtgttggggaaggttgccgaaattcgaagaatgccctctccccagccctcccccacgggggagggagaaggttgcagcagattttgcggttgcaggcgatttgaaaggcaacttagatttgcagctgttgtttcaggtcatctgaaaaataaaaagcagcctgcacaacctgttttccttgcagaacccttaatcccaaccgccaccacgtcctctctcccatgggagagagtcagagagagggcaacaaactgtaaggcttacacaaacagtaacccgacaacagaa

SEQ ID NO: 58223 - DNA, 213 bp, Neisseria meningitidis; identical to SEQ ID NO: 46091

SEQ ID NO: 58224 - DNA, 198 bp, Neisseria meningitidis; identical to SEQ ID NO: 48082

SEQ ID NO: 58225 - DNA, 402 bp, Neisseria meningitidis; identical to SEQ ID NO: 46094

SEQ ID NO: 58226 - DNA, 1029 bp, Neisseria meningitidis
atggatttaagtatcgtagttcccatttataatgtcgaaagttatttggaagcgtgtttaagttccatagaacctatattaagtaatgaaaatgtcgaacttatccttgtgaatgacgggtcaaaagacggaagtgaagatatatgttataaatatatagataaaacaacaaacaacaaacaacaaacaacaaacaacaaacaacaaacaacaaacaacaccagataccgaacaccaaacatcaaatatatatataaggataaccaagggacggcagaagctaggaataccggaataaaaaattcaaacggaaaatatatagtctttattgattcagatgattttattaattgtcaggtcttgctggattttcttagtaaagatgatattgatatgccggatgtggtttttttaaatgcggttaaatatgataagggaagtgtttcacattttggcgaagattatcagcctgaaaaaatactcaatcaatccaaagtcgaagttttgaaaggattatgccgatttagaaaatttccgggttcggcgtgtaataagattataaaaagggaattgattatcaaagaaaaactgttttttgaaaaagaggtttatgccgaagatatcgaatggtcaatgagattatttaatgcggcaacaactttttcttatttggacggttgttattactattatcggcagggaagaaaagattctaaaacaggaactgtttcggaaaaaagtataaagtcattattatatattttggagaaaaatgcggaaatggaatttaatagggatatatcaagttatctttattcttttctttcctacgaatatctcgttttgctttttatcatgacgagtaaaaatatagagtgtgatgctgatataaaaagaagggcgtatcatttaaggtttatgctgttaaagtccaataaattgatatataagctgatattcccgataatcacattattcggggttgatattacaggcaggattttaaaagcaatcagggggaatatttaa

SEQ ID NO: 58227 - DNA, 1158 bp, Neisseria meningitidis; identical to SEQ ID NO: 46096

SEQ ID NO: 58228 - DNA, 1056 bp, Neisseria meningitidis
atggaactcaaaatagacattgcaaccaacaacttcaaacacggcggcggcacggaacgctacacattggatttggtaaagggtctgaacagacaaaacatcacaccggccgtttatgcgacgaaatttgatcacggcattcctgaatacgccatgatcgaaccccatcttgtcgatcaacaccggacgctgaaaaaactacgctcattcctcttttcaagtcggctcgctcaaaccagaaaaaacagtgccgccaaactgattgcctgccaccacgccgattacgccgacctcctcatctgcggcggcacacacttgggctacctgcaccatatggcgcaaaaaccgaacctgctcgaccgtctcgccatacgccgcaaccgcagcaactacgccaccgccaaactgattatggcgcattcccatatgatgcggcgcgaactggtcggactgtacggcgttccccctgaaagaatccaagtcgcccccccccccccagatacggaacgcttctttccacaacccggagaaactgccgacctgcgcgccaaatacggctttgccgaccatgaaaccgttttcctgttcccatcgaccggccacacgcgcaaaggtctggaactgcttgccgactttttcgaacataccggcctgcccgtcaagcttgccgttgtcggctccccgctcccccgccctatgaaaaacgtcgtcggactgggcttctgcaccgatatgcccgaactctaccgcgccgccgactttaccattatggcctccctgtatgaacccttcgggctggtcggtgtcgaatccgtcctatgcggcacacgcgtcgtcctctccgaaaacatggcatgtacagaggtcatgaacgaagaagccggattctttttctcacgccaaaacccggaaaccctggcgcaagccgttgcccaagccgtcagccttaaaaaacagggcggacaccgcctgtccgacccgatgcgtgcactgaactacaacccgtccctgtcgcaccacatcgaccgactgaccgacatactggcatccgtataa

SEQ ID NO: 58229 - DNA, 516 bp, Neisseria meningitidis; identical to SEQ ID NO: 44311

SEQ ID NO: 58230 - DNA, 801 bp, Neisseria meningitidis
atggcagacatcctgccatccgacaagcggcggcaaccgccaaaaacgaaaggaaatccaatgaacataatcgaacaagaaatgaaacactccagtctgagaaaagtagatgccgaaatcgccaaaatcattgcagacgcgcacaaaatcaacgccgaatccgtaaaaatagcccaagagtcccgctggtatcccatgatagcggccaccgggctggttaccgccatcgccgccgtgttggcactgatattcaaatttgcctgaccacaagccccgcgaggggctttatcccaacaaaatgaacagagccgcactattcaaccgctaccccgaatggattatcgggcaagacggcgcaagccgtttcattacccattgccgctatccccgcctgattgccaaaatccacaggcagacagacggcgaatgcccgggcgggcattaccgccattccgaaaacggcatcaccctttacgattttatttttttcgacggcaaaccggcagacgaagcccgatttgccgccgtccttaccgaaacctgccgcagggcagtcaaaaaaatatgcgaaacaaaataaaccgcaacgacatggaactcggctacacgccttacaaccttcgcacccttcgcaaccgctgcaaactgacacaggccgagttggcgcaaatcgtcggggtgaagcactacatacaggtaggccgctgggaagccgaacccgataccgaaacccgtcgggccgatatgccgctggaaaaatggcggcagttcctcgattggatagaaaaaacaaacgccgtc

SEQ ID NO: 58231 - DNA, 195 bp, Neisseria meningitidis; identical to SEQ ID NO: 40129

SEQ ID NO: 58232 - DNA, 339 bp, Neisseria meningitidis
ctgttcggcgaagtgtcggcatttttcaaaaaacacgacaagggactgttttactggatgacgctgaccagccacgccgactatcccgaatccgacattttcaaccacaggctcaaatgcaccgaatacggcctgcccgccgaaaccgacctctgccgcaacttcagcctgcacacccaattcttcgaccaactggcggatttgatccaacgccccgaaatgaaaggcacggaagtcatcatcgtcggcgaccatccgccgcccgtcggcaacctcaatgaaaccttccgctacctcaaacaggggcacgtcgcctggctgcacttcaaaatcaaataa

SEQ ID NO: 58233 - DNA, 1578 bp, Neisseria meningitidis; identical to SEQ ID NO: 46102

SEQ ID NO: 58234 - DNA, 1197 bp, Neisseria meningitidis; identical to SEQ ID NO: 40050

SEQ ID NO: 58235 - DNA, 423 bp, Neisseria meningitidis; identical to SEQ ID NO: 48099

SEQ ID NO: 58236 - DNA, 273 bp, Neisseria meningitidis; identical to SEQ ID NO: 42079

SEQ ID NO: 58237 - DNA, 1035 bp, Neisseria meningitidis; identical to SEQ ID NO: 46105

SEQ ID NO: 58238 - DNA, 2034 bp, Neisseria meningitidis; identical to SEQ ID NO: 46107

SEQ ID NO: 58239 - DNA, 1929 bp, Neisseria meningitidis
atgctgccaacccaacccaacccaacccaacccaacccaagccctgatctaatcgacacagccggggtgaacaccgaggcaatctacacttcagacggcattaccgccaactctacccaactcgaacagctcaaaaaactgtttcccgcctgttttgacgcagacggaaatttccttatcgacagattacaagccgaaattgcgccacagaccgacatcggacgcgaattttacgaaatgaactggctgggcaaatcatatgctcgcctgcttcgcaacctgccgcccgaaaccctgataagtgaagacaagacgcacaacgccaaacccgaaaatgcaggcagccaaaacctactgattcgtggcgacaatctagaagtgttgaaacacttaaaaaacgcctacacaaacagcgtgaagatgatttacatcgacccgccctacaacaccggatcagacggctttgtctatcaggacgaccgcaaattcacaccagccgaacttgcctgcttagccaatattgacgaagacgaagccgcgcggattttagatttcaccgacaaaggctcaaactcgcacagtgcatggttgacctttatgtatccgcgcctgtatatcgcccgcgaactgttaaaggacgacggcgtgatttttatctcgattgacgataacgaagcggcgcagttgaagttgttgtgtgatgaagtgtttggggaagggaattttattaaagatttaattgttaatacatcagaaggtggtggtaatgcaaaatatgttgtaaatgggcatgaaactgttttagtttatgcgaaagatattactcattttgacaatctaaaaagaccaaaagatatacgcggcaaaaaaattgtaatcaatgatgaattatattggatacaggaagatgccgttcgcgaacagtttggcaaatatgggaacttgcattacgaagatattattgaaataaaaggaattgagtttaaaaacaaaattgataaagatattgaaaataatgaatatatcttaattccgaagtcttatgggaaaacaattattggaaaacttagaaaagtatccgatgatttttccaaatttcatagcatcttaaatattggaaatataagtaaaaatcttactaaagatggtattcgtgaattagaagagttgtttgaaactggaaaaggttattctccttttgaaacaccaaaaccattagatttattgaaaagattagttctttctgcaactttcaagggaaatcaaactgacctaatcctagacttcttcgcaggcagcggcacaaccgcccacgccgtgatgcagcttaacgccgaaggacaaaacggtaaccgccgctatatctgtgtacagcttcccgaaaaaaccgctgaaaaatccgaagcccgtaaagcaggctacccgaccatcttcgacatcaccaaagcccgcatagaaaaagccgccgccaaaatccgcgtcgaacatcccgattacacgggcgattcgggcttcaaaatctttcaaacggcagacaatttcaggcagcatccggacaaggatttttcgcccgaacaaccggatttgccgcttaacgatgaattaagcgaagaacagctgcaaacgcttctgaccacctggacgctgtatgacggggcggcactgaccacgccggttgagcctgtgcggttaggggcttacacggcgtatctgtgcgaaaaacggctgtatctgatgaatgccggttttacttctgccgatttgttggcgtttatccgcaagctggacgacgatgcggctttcaatcccaaccgcgtgattgtattcggcagcaatatggcaagcgccatgcagcacgaacttgaccaggcggttcgcggttatgccaataaaaaagagattgagttgaatgtggttatcagggtttga

SEQ ID NO: 58240 - DNA, 2103 bp, Neisseria meningitidis
atgacactgaaagcaagcaagcaagcaagcaagcaagcaagcaagcaagcaagcaagcaagcaagcaagcaagcaagcaagcaagcaagcaagcaagcggtcgggttaatctattaacattatctgttttatcgctgttttgcacgccatatgtttgaggttcggatgcgtacgatcccgtcaaagaagccgagattaaaaacaaatttattttagaagcggcggaagacagaaattcccacgtttggcgcggcccgtgcagcatatcttttgattgcttcggtatgttcagagctcagcttggttcaaatactcgttctaccaaaatcggcgacgatgccgatttttcattttcagacaagccgaaacccggcacttcccattatttttccagcggtaaaaccgatcaaaattcatccgaatatgggtatgacgaaatcaatatccaaggtaaaaactacaatagcggcatactcgccgtcgataatatgcccgttgttaagaaatatattagatacttacggggataatttaaaggatgcggttaagaagcaattacaggatttatacaaaacaagacccgaagcttgggaagaaaataaaaaacggactgaggaggcgtatatagaacagcttggaccaaaatttagtatactcaaacagaaaaaccccgatttaattaataaattggtagaagattccgtactcactcctcatagtaatacatcacagactagtctcaacaacatcttcaataaaaaattacacgtcaaaatcgaaaacaaatcccacgtcgccggacaggtgttggaactgaccaagatgacgctgaaagattccctttgggaaccgcgccgccattccgacatccatacgctggaaacttccgataatgcccgcatccgcctgaacacgaaagatgaaaaactgaccgtccataaggattatgcgggcggcgcggatttcctgttcggctacgacgtgcgggagtcggacgaacccgccctgacctttgaagacaaagtcagcggacaatccggcgtggttttggaacgccggccggaaaatctgaaaacgctcgacgggcgcaaactgattgcggcaaaaacggcggattccggttcgtttgcgtttaaacaaaattaccggcagggactgtacgaattattgctcaagcaatgcgaaggcggattttgcttgggcgtgcagcgtttggctatccccgaggcggaagcggttttatatgcccaacaggcttatgcggcaaatactttgtttgggctgcgtgccgccgacaggggcgacgacgtgtatgccgccgatccgtcccgtcaaaatatacggggtggcgcggctgcggacgggcggcgcaaaggcgtgcaaatcggcggcgaggtgtttgtacggcaaaatgaaggcagccggctggcaatcggcgtgatgggcggcagggtcggccagcacgcatcagttaacagcaaaggcggtgcggcaggcagtgatttgcatggttatggcgggggtgtttatgctgcgtggcatcagttgcgcgataaacaaacgggtgcgtatttggacggctggttgcaataccaacgtttcaaacaccgcatcaatgatgaaaaccgtgcggaacgctacaaaaccaaaggttggacggcttctgtcgaaggcggctacaacacgcttgtggcggaaggagttgtcggaaaaggcaataatgtgcggttttacctgcaaccgcaggcgcagtttacctacttgggcgtaaacggcggctttaccgacagcgaggggacgggggtcggactgctcggcagcggtcagtggcaaagccgcgccggcattcgggcaaaaaaccgttttgctttgcgtaatggtgtcaatcttcagccttttgccgcttttaatgttttgcacaggtcaaaatctttcggcgtggaaatggacggcgaaaaacagacgctggcaggcaggacggcgctcgaagggcggttcggcattgaagccggttggaaaggtcatatgtccgcacgcatcggatacggcaaaaggacggacggcgacaaagaagccgcattgtcgctcaaatggctgttttga

SEQ ID NO: 58241 - DNA, 711 bp, Neisseria meningitidis; identical to SEQ ID NO: 45485

SEQ ID NO: 58242 - DNA, 807 bp, Neisseria meningitidis; identical to SEQ ID NO: 45050

SEQ ID NO: 58243 - DNA, 162 bp, Neisseria meningitidis
atgtccgaacaacccgaaaaaaatcataaccccctccttgaggacgaacgcaagaaccccgtgtaccgcatggggcaggcagttgccggattcatgctcgtcgtttgggtcgccgtattggcactcgtgtttttcctggtcttccgtttttggctttcctaa

SEQ ID NO: 58244 - DNA, 1008 bp, Neisseria meningitidis
atgttgaaacaaacgacacttttggcggcttgcgcctcctttgccgcactgttgggcggttgtgctacccagcagcctgcccccgtcattgcaggcaattcaggtatgcaggacgcgccgtcttcggcagtttacaacaacccctatggagcaacgccgtacagcccggctcctgccggcgatgcgccttatgtgccgccggtgcaaagcgcgccggtttatacgcctcctgcttatgttccgccgtctgcacctgccgtttcgggtacatacgttccttcttacgcacccgtcgacatcaacgcggcgacgcatactattgtgcgcggcgacacggtgtacaacatttccaaacgctaccatatctctcaagacgatttccgtgcgtggaacggcatgaccgacaatacgttgagcatcggtcagattgttaaagtcaaaccggcaggatatgccgcaccgaaaacctcagccgtagaaagcaggcccgccgtaccggctgccgtgcaaacccctgtgaaacccgccgcgcaaccgcctgtgcagtccgcgccgcaacctgccgcgcccgctgcggaaaataaagcggttcccgcgcccgccccgcaatctcctgccgcttcgccttccggcacgcgttcggtcggcggcattgtttggcagcgtccgacgcaaggtaaagtggttgccgatttcggcggcaacaacaagggtgtcgatattgccggtaatgcgggacagcccgttttggcggcggctgacggcaaagtggtttatgcaggttccggtttgaggggatacggcaatctggtcatcatccagcataattcttccttcctgaccgcatacgggcacaaccaaaaattgctggtcggcgaaggccagcaggtcaaacgcgggcagcaggtcgctttgatgggcaataccgacgcttccagaacgcagcttcatttcgaggtgcggcaaaacggcaaaccggttaacccgaacagctatatcgcgttctga

SEQ ID NO: 58245 - DNA, 462 bp, Neisseria meningitidis; identical to SEQ ID NO: 44882

SEQ ID NO: 58246 - DNA, 483 bp, Neisseria meningitidis; identical to SEQ ID NO: 40363

SEQ ID NO: 58247 - DNA, 1266 bp, Neisseria meningitidis; identical to SEQ ID NO: 45709

SEQ ID NO: 58248 - DNA, 1233 bp, Neisseria meningitidis
atggctaaaaacggaggattttctttgttcgcaaagaaagaaaaacgctttatctttgaaggcaggcattccgcctccgacaaactggtcaacggcgaagtatccgcgtttaccgaagaagaggcgcgcaaaaaactggcaaaacgcggcatccgcccgttgcagattacccgtgtgaaaacaagctccaagcgcaaaatcacacaagaagacatcaccgttttcacccgccagctgtccacgatgattaaagcgggcctgccgctgatgcaggcatttgaaatcgtggcgcgcggacacggcaacccgtctatgacggaaatgctgatggaaatccgaggcgaagtggaacagggcagctcgttgagccgcgcattctcaaaccacccgaaatatttcgaccgcttctactgcaacctggttgcggcgggcgaaacgggcggcgtattggaaagcctgctggacaaattggcaatttacaaagaaaaaacccaggccatccgcaaaaaggtaaaaaccgcgctgacctatccggtatccgtcatcgccgtcgccatcggtttggtattcgtgatgatgattttcgtactgcccgcctttaaagaagtttacgccaatatgggcgcggagcttcccgcactgacccaaacagtgatggatatgtccgactttttcgtctcatacggctggatggtgctgatcgcactgggctttgccatatacggcttccttaaattgaaggcgcgttcgattaaaatccaacggcgtatggatgccatactgctgcgtatgccgattttcggagacattgtccgcaaagggacgattgcccgctggggcaggacgacagcgacgctgattgcggcaggcgtgcctttggtcgatgtattggactccactgccggcgcggcgggcaatttaatctatgaagaagccacccgggaaatccgtacgcgcgtcatccaaggtttgtctatgacttcggggatgcgtgcgacggaactgttccccaatatgatgttgcagatgtcttccatcggcgaggaatcgggttctttggacgatatgctcaacaaagccgccgaattttacgaagacgaggtggacaatgcggtcggcaggctgtccgctatgatggagccgatcattatcgtgattttaggcttggtcatcggcacgcttctggtcgccatgtatctgccgctgtttaatttgggcaacgtggtcgcctga

SEQ ID NO: 58249 - DNA, 495 bp, Neisseria meningitidis; identical to SEQ ID NO: 43579

SEQ ID NO: 58250 - DNA, 660 bp, Neisseria meningitidis
atggatacttggcacgatgcactgggcaacgaaaaacatcaaccgtattttcagaaaattttaaatgcggtcaggcaggaacgtttgtcgggacaaatcatctatccgccggagactgatgtgttcaacgcattccgcctgacagcgttcgaccgggtcaaagtcgttattctcggacaagatccgtatcacggggcagggcaggcgcacggtttggcattttccgtccggcagggtgtccgcataccgccgtctttactcaatatctacaaagaattggaaaccgacatcaacggtttttccattcccgatcacggctgcctgacggcttgggcggagcagggcgtattgcttctgaacacggttttgacggtgcgtgcaggacaggcgcattcgcacgcccttttaggctgggaacgctttaccgataccgtcatcaggcagcttgcggcgcaccgcaagcaccttgtcttcatgttgtggggcgggtatgcgcaacaaaaaaggaaactgatagacagtcaaaatcatttgatactgaccgcaccgcatccgtctcctctgtcggcatatcgcggttttttcggctgccgccatttttcacaggcaaacagctatttgagccggcacggtatcgatccgataaactggaagctgtga

SEQ ID NO: 58251 - DNA, 117 bp, Neisseria meningitidis; identical to SEQ ID NO: 43182

SEQ ID NO: 58252 - DNA, 735 bp, Neisseria meningitidis; identical to SEQ ID NO: 44023

SEQ ID NO: 58253 - DNA, 387 bp, Neisseria meningitidis; identical to SEQ ID NO: 45699

SEQ ID NO: 58254 - DNA, 723 bp, Neisseria meningitidis; identical to SEQ ID NO: 42576

SEQ ID NO: 58255 - DNA, 312 bp, Neisseria meningitidis; identical to SEQ ID NO: 37456

SEQ ID NO: 58256 - DNA, 1812 bp, Neisseria meningitidis
atgaaacaaatccgcaacatcgccatcatcgcccacgtcgaccacggcaaaaccacattggtcgaccaactgctgcgccaatccggcacattccgcgccaaccagcaggttgacgagcgcgtgatggacagcaacgaccttgaaaaagaacgcggcatcaccatcctcgccaaaaacaccgccatcgattacgcgggctaccacatcaatatcgtcgacacgccgggacacgccgactttggcggcgaagtggagcgcgttttggggatggtggactgcgtcgtcttgttggtggatgcgcaagaaggtccgatgccgcaaacccgtttcgtgaccaaaaaagccttggctttggggctgaaaccgattgttgtcatcaacaaaatcgataaaccgtccgcccgtccgagctgggtcatcgaccaaactttcgaactcttcgacaacttgggcgcaactgacgaacagttggacttcccgattgtttacgcttcaggtttgagcggctttgccaagctggaagaaaccgacgagagcaacgacatgcgtccgctgttcgacaccatcctaaaatacacgcccgcaccgagcggcagcgcggacgaaacgctgcaactgcaaatctcccaactcgactacgataactacaccggccgcctcggcatcggtcgtatcttgaacggacgtatcaagcccggtcaagttgttgccgtgatgaaccacgagcagcaaatcgcccaaggccgcatcaaccagcttttgggtttcaaaggcttggaacgcgtgccgcttgaagaagccgaagcaggcgacatcgtgattatttccggtatcgaagacatcggtatcggcgtaaccatcaccgacaaggaaaatcccaaaggtctgccgatgttgagcgtagacgaaccgacgctgaccatggactttatggtgaacaccagcccactcgcgggtactgaaggcaaattcgtaaccagccgccaaatccgcgaccgcctgcaaaaagaattgctgaccaacgttgccctgcgcgtggaagataccgccgatgccgacgtgttccgcgtatccgggcgcggcgaactgcacctgaccattttgttggaaaatatgcgccgcgaaggctacgaactcgccgtcggcaagccgcgcgtcgtgtaccgcgacatcgacggtcaaaaatgcgaaccttatgaaaacctgaccgtggacgtacccgacgacaaccaaggcgcggtaatggaagaactcggccgccgccgtggcgaactgaccaatatggaaagcgatggcaacggacgcacccgcctcgaataccatattccagcgcgcggcttgatcggtttccaaggcgaatttatgaccctgacgcgcggggtcgggctgatgagccacgtgttcgacgattacgcgcccgtcaaacccgatatgcccggccgccacaacggcgtgctggtgtcccaagagcagggcgaggcagtcgcttacgccttgtggaatctggaagaccgcggccgtatgttcgtatcgcccaacgacaaaatctacgaaggtatgattatcggtatccacagtcgcgacaacgatttggtggtcaacccgctcaaaggcaaaaaacttaccaacgtccgtgccagcggtaccgacgaagccgttcgcctgaccacgccgattaaactgacgctggaaggtgcggttgagtttatcgacgatgacgaactcgttgaaatcacgccgcaatccatccgtctgcgcaagcgttacctgagcgaattggaacgccgccgccatttcaaaaagctagattga

SEQ ID NO: 58257 - DNA, 1059 bp, Neisseria meningitidis; identical to SEQ ID NO: 52049

SEQ ID NO: 58258 - DNA, 1224 bp, Neisseria meningitidis
atgtctgcgcaatcacaaaacaatcatacgtccccattggtcgtcttgaccacgctgttcttcatgatgggttttattacctgcatgaacgacatccttatccctcatttgaaagaaattttcgacctgtcttacgttcaggcgatgctgatccaattctgtttctttaccgcctatgcggtgatgtccatcccgatgggggcttttgtcggcaaagtcggctacaaaaacggcgttatcggcggctttctgctgacggcggtcggatgcctgctgttttatcctgctgcgggtagccattcttacgcggtatttttgggcgcgttgtttattttggcttccggcgtaacgctgcttcaggtcgccggtaatccttatgttaccctgctggcgaaacccggcaaggaatcggcaacactgacgctggttcaggcgtttaacgctttgggtacgaccattgcgccgcaaatcggcgcgttcctgattctggcggacgcaacccaaaccgtcagcaaggcggaacagatttcttccgtacagattccctatttgggactggcggggctgctgattatccttgccgttttcgtgaaaatgatccggctgcccgacgcgcgcaaaattgccgccgaggaaagcgcgcacaaccacgacggcaaaaccagcgtatggcaatacaaacatctcgtgttcggcacggcaggcattttctgctatgtcggcgcggaggtgtctatcggttcgttgatggtcaacgtattgggttatctgaaagggctggatcatgcttctgccgcgcattacctgtcgttctattggggcggcgcgatggtcggacgtttcctcggttcggcggtgatggcgaaattcgcgcccaaccgttatttggcgtttaacgcatcggctgcggtcgtactgcttgccgtcgcgatggcgacgggtagcggcaatgcggatgtggcgatgtggtcgctgcttgccatcggttttttcaactcgattatgttcccgacgattttctctttggcaaccaaaggattgggaaaatttaccaacgcggcttccggtgtactgtgtaccgcgattgtcggcggtgcggtcgttcctgtcgtgcagggctgggtggcagatacttacaccctgatgtcttcgtttgtcgtttccgtcatctgttatctgtatatcgtgttttttgcggtgtacggatatagggcggacaaataa

SEQ ID NO: 58259 - DNA, 651 bp, Neisseria meningitidis
atgatttcggttgaacatgtttccaagcagtatcaaatgcgcggcggtatgcggacggtgttagacgatatcaatttttcgctgcaaaagggtgagaaagttggtattttggggcgtaatggtgccggtaaatcgacgctcatccgtttgatcagtggcgttgagccgccgaccacgggtgaaatcaagcggacaatgagtatttcttggcctttggcattctccggtgcgtttcaaggcagtctgaccggtatggacaatttgcgtttcatctgccggatttacaatgtcgatatcgattatgtgaagaactttaccgaagagttttccgagttggggcaatatctttacgagccggtcaagcgttattcttcaggtatgaaggcgcgtttggcatttgctttgtcgttggcggtagagtttgattgctatttgattgacgaagtgattgcagttggtgactcgcgttttgccgataaatgtaagtacgagttgtttgaaaagcgcaaagaccgttccatcatcttggtgtcgcacagccacagcgccatgaagcaatattgcgataatgcgatggtgctggaaaaagggcatatgtaccagtttgaagatatggacaaagcctacgaatattataattcgctgccttaa

SEQ ID NO: 58260 - DNA, 333 bp, Neisseria meningitidis; identical to SEQ ID NO: 43845

SEQ ID NO: 58261 - DNA, 1110 bp, Neisseria meningitidis
atgaaatacaaaagaatcgtatttaaagtcggcacatcttcgattacccattcggacggcagtctctcgcgcggcaaaatccaaaccatcacccgccagcttgccgcattgcatcatgcgggacacgagctggtcttggtgtcttccggcgcggttgcggcagggttcggtgcgctgggtttcaaaaaacgtccggtcaaaatcgccgacaaacaggcttccgccgccgtcgggcaggggctgctgatggaagaatatacggcaaacctgtcttcagacggcatcgtgtccgcacaaatcctgctcagccgcgccgactttgccgacaaacgccgctaccaaaatgccggcggcgcactttccgtgctgctgcaacgccgcgccgtccccatcatcaatgaaaacgatacggtttcggttgaggaattgaaaatcggcgacaacgacacattgagtgcgcaagtggcggcgatgatacaggcagacctcttggtgctgctgaccgacatagacggtctttacaccggcaacccgaacagcaatcccgatgccgtacggctggacaaaatcgaacacatcaaccatgaaatcatcgaaatggcgggcggctcgggttcggcaaacggcacaggcggtatgctgactaaaatcaaagcggcgacgattgcgaccgagtccggcgtaccggtctatatctgttcctcgctcaaacccgatgcacttgccgaagcggcagataatcaggcggacggctcgtttttcgtcccccgtgccaaaggtttgcggacgcagaagcaatggctggcgttctattccgaaagcaggggcggcgtttatgtggacgaaggtgcggaacacgctttgtccgaacagggaaaaagcctgctgatgtcgggcattgccggaatcgaagggcatttttcccgtatggacaccgtaaccgtgtacagcaaggcaaccaaacagcctttgggcaaagggcgagtcctgttcggctctgccgccgccgaagacctgctcaaattgcgtaaggcgaaaggcgtgttcatccatcgggacgactggatttccatcacgcccgaaatacgcctgcttctgaccgaattttag

SEQ ID NO: 58262 - DNA, 330 bp, Neisseria meningitidis
atgaaacaaaatatcgaaaaactcgaaagcagcgtttatacgctggtacaaaaattcgaaaccctcgtcagcgaaaaccgccgcctcaaagaaaccgtcgccgaacttaaacgggcgcacgagcggcaaaaactcgaacacgaaaccgccgtcgacgaactcagcgaagccctgctcgtccaagtcggcaaactcaaagaagacctgcaaaacaaaatcgacagcctgacagaagaaaatacacgataccgcagcctgctcgaacagagcagggaaaaaatcagcgcactggcagcgcgcctcccccaatggcaggaaacgcagcaataa

SEQ ID NO: 58263 - DNA, 1404 bp, Neisseria meningitidis; identical to SEQ ID NO: 43725

SEQ ID NO: 58264 - DNA, 462 bp, Neisseria meningitidis; identical to SEQ ID NO: 50783

SEQ ID NO: 58265 - DNA, 2664 bp, Neisseria meningitidis
atgtccacccaattacacgatgttgaccctatcgaaacccaagagtggctggacgcgttaagctccgtcctcgaatatgaaggcggcgaacgcgcgcaatacctcttggaaaacctggtcaaatactgccgcgacaagggcgtacgtatgccacacggcacgaccaccccgtatttgaataccgtttcggttgaaaacgaaaaaggcattccgggcgaccaaaacatcgaacaccgcatccgcgcattcgtgcgctggaacgccgccgccatcgtattgcgcgccggcaagaaagatttggaactgggtgggcacatcgcatctttccaatctgccgccaccatgtacgaagtcggtttcaaccacttttggaaagccaaaggcgaaggcgaagaaggcgatttggtcttcttccaaggtcacgtcgccccgggcatctatgcacgcgcattcgtcgagggccgtctgaccgaagaccagctgaacaacttccgccaagaagtggacggacacggtctgccttcctatccgcacccccacctcttgcccgacttttggcagttcccgaccgtatccatgggcttggggcccatcatggcgatttatcaggcgcgtttcctgaaatacttggaatcgcgtggtttggcaaaaaccaaaggccgtaaagtatggtgtttctgcggcgacggcgaaatggacgaacccgaatctcaaggtgcaatcgcactggctgcacgcgaaggcttggacaacctgattttcgtcatcaactgcaatctgcaacgcttggacggtccggtacgcggcaacggcaaaatcatccaagaattggaaggcaactttgccggcgccggctggaatgtcgtcaaagtcatttggggccgccgctgggaccgcctcttggcgaaagacaaagacggtatcctgcgccaacgtatggaagaatgtttggacggcgactaccaaacttacaaatccaaagacggcgcgtatgtgcgcgaacacttcttcaatacgcccgaactgaaagcattggttgccgatatgaccgatgagcaactctgggcattgaaccgcggcggccacgacccgcaaaaagtgtacaacgcctacgaccgcgcagcgaaccatgccgacggcaaacctaccgtcatcttggcgaaaaccattaaaggttacggtatgggcgcatccggcgaaggtcagaacgttgcccaccaagccaaaaaaatggacaaagcgtccctgaaacaattccgcgaccgctttgacattccggttaccgacgaacaaatcgaaagcggcgatctgccttacctgacttttgcccccgatacggaagaatacaaatacctgcacgcacgccgcgatgctttgggcggctacctgccgcaacgcaaaccgacgcaggaagtattggaagtgcccgagctgtcagcattcgacgcacaactcaaatccagcggtgaacgcgagttctcgaccacgatggcattcgtccgcatcctgtccactttactgaaagacaaaaaaatcggcaaacgcgtcgtacctatcgttcccgacgaaagccgtactttcggcatggaaggtatgttccgccaatacggtatttggaatccgaaaggtcagcaatatacccctcaagacaaagaccaactgatgttctataaagaatccgttgacggtcaaatcttgcaagaaggtattaacgaaccgggcgcgatggccgactggattgcggctgcaaccagctacgccaacagcaacttcgccatgattccgttctacatctactactctatgttcggtttccaacgtatcggcgacttggcttgggcggcgggcgatatgcacgcgcgcggcttcctgctgggcggtactgccggccgtacgacgctgaacggcgaaggcctgcaacacgaagacggccacagccacatccaggccgacctgattccgaactgcgtatcttatgacccgactttccaatacgaagtcgccgtcatcgtacaagacggtctgcgccgtatgtatgccaataatgaagacgtgttctactacatcaccctgatgaacgagaactacacccatccggatatgcccgaaggtgcggaacaagacatcttgaaaggtatgtacctgctgaaagccggcggcaaaggcgacaagaaagtccaactgatgggttccggtacgattttgcaagaagtgattgccggtgccgagctgctgaaagccgacttcggcgtggaagcagacatttggtcttgcccatccttcaacctgctgcaccgcgacgctgtcgaggtagaacgcttcaaccgcctgcatccgctggaagccgaaaaagtacctttcgttacttcccaactgcaaggtcatgacggtccggttattgccgctaccgactatatccgcagctatgctgaccgtatccgcgcctacatcccgaacgactaccacgtcttgggtactgacggcttcggccgctccgacagccgcgccaacctgcgccgcttctttgaagtggatcgctacaacgttgccgtggccgcattggccgcattggcggaacaaggcaaagtcagcaaagaaaccgttcaacaagccattgagaaatacggcatcaaagccgattcagctcctagctggaaacgctga

SEQ ID NO: 58266 - DNA, 420 bp, Neisseria meningitidis; identical to SEQ ID NO: 42466

SEQ ID NO: 58267 - DNA, 1074 bp, Neisseria meningitidis
atgcggccgtttttcgtcggcgcggcggtgcttgccatactcggtgcgctggtgtttttcatcaaccccggtgccatcgtcctgcaccgccaaattttcttggaacttatgctgccggcggcatacggcggttttttgactgcggctttgttggactggacgggtttttcgggtaacctgaaacctgtcgcgactttgatggcggcattattgctcgccgcatccgctatactgcccttttcgccgcaaactgcctcgtttttcgtcgccgcctattggctggtgttgctgctgttctgcgcccggctgatttggctagaccgaaacaccgacaacttcgccctgctaatgttacttgccgcgttcactgtttttcagacggcatatgccgtcagcggcgatttgaacctgttgcgcgcgcaagtgcatctaaatatggcggcggtgatgttcgtatccgtgcgcgtcagtattcttttgggcgcggaagccctgaaagaatgccgtctgaaagacccagtattcatccccaatgtcgtctataaaaacatcgccattactttcctgctcttgcacgccgccgccgaactttggctgcccgcgcaaaccgccggttttaccgcgctcgccgtcggcttcatcctgctcgccaagctgcgtgagcttcaccatcacgaactcttacgtaaacactacgtccgcacttattacctgctccaactctttgccgccgcaggctatctgtggacaggcgcggcgaaattacaaaacctgcccgcctccgcgcccctgcacctgattaccctcggcggcataatgggcggcgtgatgatggtatggctgactgccggactgtggcacagcggttttaccaaactcgactaccccaaactctgccgcatcgccgtccccatcctcttcgccgccgccgtctcgcgcgctgttttaatgaacgtgaacccgatattcttcatcaccgtccccgcgattctgaccgccgccgtgttcgtgctttacctgctgacattcgtaccgatctttcgggcgaacgcgtttacagacgatccggaataa

SEQ ID NO: 58268 - DNA, 999 bp, Neisseria meningitidis
atgtccgaaaacaaacaaaacgaagtcctgagcggttacgaacaactcaaacggcgcaaccgccgccgcctcgtaacggcaagttgcctggttgccgcctcctgcatcctgctggcagccgccctcagttccggccctgccgaacagactgccggcgaaacaagcggcgtagaaaacaaagcggcaggtgcggcacaaacccctgccttgaaatccgccgccgacaaaccgcaggacttggcaggcgaagacaagccttctgccgccgacagcgaaatcagcgagcctgaaaacgtaggcgcgccgctggtgctgattaacgaccgcctcgaagacagcaacatcaaaggtttggaagcatccgagaaactgcaacaggcagaaaccgccaaaaccgcaccgaagcaggcaaaacaacgcgctgccgaaaaagtgccggcaactgccgacagtacggatacggtagcggttgaaaaaccgaaacgcactgccgaaacaaaaccgcaaaaagcggaacgcactgccaaagccaagcccaaagccaaagaaaccaaaaccgccgaaaaagttgccgacaaaccgaaaactgccgccgaaaaaaccaaaccggatacggcaaaatccgacagcgcggtaaaagaagcgaaaaaagccgacaaggctgaaagcaaaaaaacagccgaaaaagaccgttcggacggcaaaaaacacgaaacggcacaaaaaaccgacaaagcggacaagaccaaaaccgccgagaaggaaaaatccggtaaaaaagccgccattcaggcaggttatgccgaaaaagaacgcgccttaagcctccagcgcaaaatgaaggcggcgggtatcgattcgaccatcaccgaaattatgaccgacaacggcaaagtttaccgtgtcaaatcaagcaactataaaaacgcaagggatgccgaacgcgatttgaacaaattgcgcgtacacggtatcgccggtcaggtaacgaatgaataa

SEQ ID NO: 58269 - DNA, 366 bp, Neisseria meningitidis; identical to SEQ ID NO: 42928

SEQ ID NO: 58270 - DNA, 1209 bp, Neisseria meningitidis; identical to SEQ ID NO: 38616

SEQ ID NO: 58271 - DNA, 1779 bp, Neisseria meningitidis
atgacggttttgaagccttcgcactggcgggtgttggcggagcttgccgacggtttgccgcaacacgtctcgcaactggcgcgtatggcggatatgaagccgcagcagctcaacggtttttggcagcagatgccggcgcacatacgcgggctgttgcgccaacacgacggctattggcggctggtgcgcccattggcggttttcgatgccgaaggtttgcgcgagctgggggaaaggtcgggttttcagacggcattgaagcacgagtgcgcgtccagcaacgacgagatactggaattggcgcggattgcgccggacaaggcgcacaaaaccatatgtgtgacccacctgcaaagtaagggcagggggcggcaggggcggaagtggtcgcaccgtttgggcgagtgtctgatgttcagttttggctgggtgtttgaccggccgcagtatgagttgggttcgctgtcgcctgttgcggcagtggcgtgtcggcgcgccttgtcgcgtttaggtttggatgtgcagattaagtggcccaatgatttggttgtcggacgcgacaaattgggcggcattctgattgaaacggtcaggacgggcggcaaaacggttgccgtggtcggtatcggcatcaattttgtcctgcccaaggaagtagaaaatgccgcttccgtgcaatcgctgtttcagacggcatcgcggcggggcaatgccgatgccgccgtgctgctggaaacgctgttggtggaactggacgcggtgttgttgcaatatgcgcgggacggatttgcgccttttgtggcggaatatcaggctgccaaccgcgaccacggcaaggcggtattgctgttgcgcgacggcgaaaccgtgttcgaaggcacggttaaaggcgtggacggacaaggcgttttgcacttggaaacggcagagggcaaacagacggtcgtcagcggcgaaatcagcctgcggtccgacgacaggccggtttccgtgccgaagcggcgggattcggaacgttttctgctgttggacggcggcaacagccggctcaagtgggcgtgggtggaaaacggcacgttcgcaaccgtcggtagcgcgccgtaccgcgatttgtcgcctttgggcgcggagtgggcggaaaaggcggatggaaatgtccgcatcgtcggttgcgccgtgtgcggagaattcaaaaaggcacaagtgcaggaacagctcgcccgaaaaatcgagtggctgccgtcttccgcacaggctttgggcatacgcaaccactaccgccaccccgaagaacacggttccgaccgctggttcaacgccttgggcagccgccgcttcagccgcaacgcctgcgtcgtcgtcagttgcggcacggcggtaacggttgacgcgctcaccgatgacggacattatctcgggggaaccatcatgcccggtttccacctgatgaaagaatcgctcgccgtccgaaccgccaacctcaaccggcacgccggtaagcgttatcctttcccgaccacaacgggcaatgccgtcgccagcggcatgatggatgcggtttgcggctcggttatgatgatgcacgggcgtttgaaagaaaaaaccggggcgggcaagcctgtcgatgtcatcattaccggcggcggcgcggcaaaagttgccgaagccctgccgcctgcatttttggcggaaaataccgtgcgcgtggcggacaacctcgtcattcacgggctgctgaacctgattgccgccgaaggcggggaatcggaacatacttaa

SEQ ID NO: 58272 - DNA, 945 bp, Neisseria meningitidis
atgattgagaaaagtatttctattgtagatggaaaggaatactccgtttttgctgtatcacacgagtttcgttatacctttgatgagcctattttagtcgctgacttgattagttctctaaaagcttatgaaacactgacaagtagttatcttccagcaattttgaatcagctgtttgatgtcaaaatccaaaaaatcaaagtagctgtatctgaaattgaaagaggatctttccttgaaaaactgattttcaatttattcttcaaagatgaagatgcttataatgaattttgtcttaaaatacgaaaatttctaggaacagaaaatcaggacggaagtattaatatgtccaaaatcattatgtttgcaatgactacacttttaggggtaggtgctggttatctcttgtttaaaaacccgccacaagagaagcaggcaataaccaacaacatcgttaccgtcattaatgctgatagttctgtcgcactggatggtgaacatttggtttcagtggtaaaagaagtaacaggaagcagcaagcaaaaaactgcagaaaatgtggcaaaagtatatgctccagcaagtaaaaataatggcagtattacccttgggacagatgatgttcggattgaacctgttgcacaacaaactgtagcaactttgcctaaagatgtggacttacgtgatacgccattgactgaagattacaccgatattgatgtgcaaattcgtgctactgaccgtgataaaaattcagggtggtatgcagtcatagaccaaattgttccatcacgtgttcgattagaactgcctgaagatattgatttgaataggctggctaacaatgctactatccgtgcaaatgtaacagttgagtttgacttaaagcaaaatggctctcgtaagcctaaaaaaatcatcctcacatctctctctactgattaa

SEQ ID NO: 58273 - DNA, 582 bp, Neisseria meningitidis
atggaagaaaaaaacgactacaccgacgcggcatccgacaaccgcaacgggcaggaaattgaagtcggaattgccggcgcaggcgaccggatacttgccgcgctgctgaaccaattgtttacctttttggttttgttggtgccgtttgccggactgattgctttcgccatcaagaatgaaggcaggattggcggcagtgaggaaatattcgggctgcttttgggcatgacttccttttgggtaggactggcgggcattttggtttataccgtcgttcaaatctactatatgagtcgggacgggcagtcattgggtaagaaaatcatgagaatccgcgtgttgaaaaccgacggccgcaatcccggttttgtcggcacggttttggtacgcgaaatcgcatggtcggttttggttgccattattgccgccgttatcggtcttatagcaggtgacaacggagaaaacgccatcaacctgctggcattccttgccaactttgtcctgctctttatggtcaaacgcgaccgccgcacgctttacgacatactggcggatacggttgtcgtcaagctgcccaaataa

SEQ ID NO: 58274 - DNA, 1218 bp, Neisseria meningitidis; identical to SEQ ID NO: 51714

SEQ ID NO: 58275 - DNA, 1035 bp, Neisseria meningitidis
atgccgaattgtttcaaatttcataccgttatcgaacggcattggcaaaaaccttatccggttttgtcttttctgcttaagccgctctccgggctgtttgccaaaattgcggcaaaacggcggacggattttttatcgggaaaacggcaaagcgaaaagctgcccgtgcctgtggtcgtggtcggcaacatccacgcgggcgggacggggaaaacgccgattgttgccgcgctggtgtcgggtttgcaggaaaagggcgtcaaggtcggcatcatcagccggggctacgggcgtaagagcaaggcggttcatgtattgaatgccgcaagccgagcggaagatgcgggcgacgagcctttgctgctgttcagcaaaaccggtgcgccgacggcggtgggcagcagccgtgcagaggtaggcagggcattgctggcggcgcatcccgacatcggactgattgtggcggacgacggtttgcagcattacgccctacagcgggatgtagaaatcgcggtgtttccgtctgccgacacagcaaggcaagatttggatttgctgcccaacggcaatttgcgcgaacctttgtcgcggctggattcggtggatgcggtcgtcgtcagcggcggcaaggcggatgcgctgtttaggccgtctgaaaatatgtttcacagccgtatcgaagcgggacgaatttaccgtttgaacaatccgtccgaaatactggacacaggccgtctgaaaaatcaaaccgtcgtcgccgtggcaggtattgccaagccggcgcgttttttcgattcgttgcggcatatgggcattaccgtgaagcgaaccgtcgcgctgcccgaccacgccgacatttcggcggcagatttgcccgatgcggacgcggtcattattacggagaaagatgcggtcaaattttcagacggcatttgcaccgataatgtttgggtgttgcccgtttgtgcgataatcgaacctgatttggcggcgtttgtgttggagcggttggaagatgtaccgaaggccgtctga

SEQ ID NO: 58276 - DNA, 1329 bp, Neisseria meningitidis
atgaaaaaagtatttatccgtaccttcggctgccagatgaacgaatacgacagcgacaaaatgctcgccgtcctcgccgaagaacacggcggcatcgaacaggttacccaagccgacgaagccgacatcatcttgttcaacacctgctccgtgcgcgaaaaagcacaggaaaaagtgttctccgatttggggcgcgtgcgtccgctcaaagaaaaaaaccccggccttatcatcggcgttgccggctgcgtcgcctcgcaagaaggcgaaaacatcatcaaacgcgcgccttatgttgacgtggttttcggcccgcaaacgctgcaccgcctgcccaaaatgattgtggacaaagaaaccagcgggctgtcgcaagtcgatatttccttccccgaaatcgaaaaattcgaccacctgccgcccgcccgcgtcgaaggcggcgcggcatttgtatcgattatggaaggctgttccaaatactgctcattctgcgtcgtcccctacacgcgcggcgaagaattctcccgcccgctcaacgacgtattgacagaaatcgccaaccttgcccagcaaggcgttaaagaaatcaacctcttaggccaaaacgtcaatgcctatcgcggcgaaatggacgacggcgaaatctgcgacttcgccaccctgctgcgcatcgtccacgaaatccccggcatcgaacgtatgcgcttcaccaccagccacccgcgcgagtttaccgactcgattatcgagtgctaccgcgacctgcccaaattggtttcccacctgcacctgccgattcaaagcggttccgaccgcgtattgagcgcgatgaaacgcggctacaccgctttggaatacaaatccatcatccgcaaactgcgtgccatccgtcctgatttatgcctgagcagcgactttatcgtcggcttccccggcgagaccgaacgcgagttcgagcaaaccttgaaactggtgaaagacattgccttcgacttgagcttcgtgtttatttacagtccgcgccccggcacgcctgccgccaacctgcacgacgacacgccgcacgaagaaaaagtgcgccgcctcgaagccttgaacgaagtcatcgaagccgaaaccgcgcgcatcaaccaaaccatggtcggcacggttcaacgctgcctggtcgaaggcatctccaaaaaagaccccgaccagctccaagcccgcaccgccaacaaccgcgtcgtcaacttcaccggcacgcccgacatgatcaaccaaatgatcgatttggaaatcaccgaggcctacaccttctccctgcgcggcaaaattgtcgaagcctaa

SEQ ID NO: 58277 - DNA, 855 bp, Neisseria meningitidis; identical to SEQ ID NO: 51138

SEQ ID NO: 58278 - DNA, 1059 bp, Neisseria meningitidis; identical to SEQ ID NO: 42848

SEQ ID NO: 58279 - DNA, 1527 bp, Neisseria meningitidis
atgaatcccatgtacattacttttgcaatctatctggttgcagtccttctcatcgggcttgccgcttatttttccacgcgcaatttcgacgattatattttgggtgggcgcagcttgggtccgtttgttacggcgatgtcggccggcgcgtccgatatgtccggctggcttttgatgggtctgccgggcgcgatttacctgagcggtttgaatgaggcttggattgccatcggtctcttggtcggcgcgtatttcaactggctcttggtggcgggccgcctgcgcgtgcataccgaatacgccaacaatgcgctgacgctgccggattatttcttccaccgcttcggcgcgggcggacacttgatgaaagtggtttccgcactgattatcctgttcttcttcacgatttattgcgcctcgggcattgtggcgggcgcaaccctgttccaaagcctgtttgaaggtatgacttacaatcaggcaatgtggctgggcgcgggcgcgaccatcgcctataccttcttgggcggtttcttggcggtcagctggacggatacgctgcaggcttctttgatgattttcgccctgattttaacgccggtgatggtctatctgggcttgggcggcgcggaacagatgtctgccgcgattcaaagcgtcgccgcaggcacgggcaaagaatacggcagcctgtttgccggtacgaccgtcatcggcatcatttccaccgccgcatggggcttgggctatttcggacagccgcacattttggcgcgctttatggcggccgaaagcgcgaaatcgctggtatccgcacgccgcatcggcatgacttggatggcgttgtgccttgcgggcgcggtggcggtcggttatttcggcattgcgtatttcggtgcaaatcccgacaaagtttcttctatgagcggcaaccacgaacgcatcttcatcgcgctttccaccctgctgttcaacccttggatcgccggcatcattttgagcgcgattttggcggcggtgatgtccaccctgtcctgccagcttttggtttgctccagcgcgattaccgaagacttctacaaaggctttttgcgtaaaaacgcgcaacagtcggaactggtatgggtcggccgcctgatggtcttggcgattgccgtgatttccatcctgattgcttccgatccgaacagcaaagtattgggactggtttcttacgcgtgggcaggtttcggtgcggcgttcggcccgattgtgattctgtccgtattgtggaaacgcatcactgcctacggcgcgttgtcgggtatggttgcaggtgccttaaccgtagtcgtatgggcggaatgggtgaaaaaaccggctcaagcggcaggagaaagcggcttgttgacgatgtacgaaatcgtgccgggctttattgtctgcttaatcattgccgtgttggtttccctgttcaacaaagaaccttcgcgcgaaacccaagaacgctttgaaaaagccgacgcagattaccgcgccgcccgataa

SEQ ID NO: 58280 - DNA, 141 bp, Neisseria meningitidis; identical to SEQ ID NO: 49273

SEQ ID NO: 58281 - DNA, 225 bp, Neisseria meningitidis; identical to SEQ ID NO: 39182

SEQ ID NO: 58282 - DNA, 2115 bp, Neisseria meningitidis
atgtcagttttccgcatcaatatgaccgccgccacggttttggcagcactctcgtcttcggtttttgccgcacaaacggaaggtttggaaaccgtccatattaagggtcagcgttcttacaacgcgattgccaccgagaaaaacggcgattacagctcgtttgccgccaccgtcggtacaaaaatccccgcttctttgcgcgaaattccgcaatccgtcagcatcattaccaaccagcaggtcaaagaccgcaatgttgatacgtttgatcagttggcacgcaaaacgcccggcctgcgcgtgttgagcaacgacgacggacgctcttcggtttacgcgcgcggttacgaatacagcgaatacaacatcgacggcctgcccgcgcagatgcagagtatcaacggcacgctgcccaacctgttcgccttcgaccgcgtggaagtgatgcgcgggccgagcggactgttcgacagcagcggcgagatgggcggcatcgtgaatctggtgcgcaaacgcccgaccaaagcgttccaaggtcatgcggcggcagggttcggtacgcacaaacaatataaagccgaggcggacgtatcgggcagcctcaattcagacggcagcgtgcgcggccgcgtgatggcgcagaccgtcggcgcgtctccgcgtcccgccgagaaaaacaaccggcgcgaaaccttctacgcggcggcggattgggacatcaaccccgatacggttttgggcgcgggctatctttaccagcaacgccgcctcgcgccgtacaacggcctgcctgccgatgccaataacaaattaccgtccctgccgcaacacgtatttgtcggcgcggattggaacaaatttaaaatgcacagccacgacgtgttcgccgatttgaaacattacttcggcaacggcggctacggcaaagtcggtatgcgctattccgatcggaaagccgattccaattatacgtttgcgggcagcaaactcaacaataccggacaagccgacgtagcgggtttgggtacggacattaaacaaaaagcctttgcggttgacgcaagttacagccgtccgtttgccttgggcaacaccgccaacgaatttgtgattggtgcagactacaaccgcttgcgcagtactaatgaacaagggcgttcgactttgtcaaaaagcgtcgctttagatggtttccgcgctttgccttataacggcatacttcagaacgcccgcgccggaaacaaaggtttcaatcactccgttaccgaagaaaacctcgacgaaaccggtttgtatgccaagacggtgttccgtcctctggaaggtttgtcgttgattgcaggcggacgtgtaggacatcacaaaatcgagtcgggcgacggcaaaaccctgcataaagcttcgaaaaccaaatttacaagctacgccggcgcggtttacgatatagacggcagcaacagcctgtacgcttccgcctcccaactctacacaccgcaaaccagcatcggcaccgacggcaagctgctcaaaccgcgcgaaggcaaccagtttgaaatcggctacaaaggcagctacatggacgaccgcctcaatacccgggtttcgttctaccgcatgaaggataaaaacgccgccgcaccgctggactcaaacaacaaaaaaacccgttacgccgcattgggcaaacgcgtgatggaaggtgttgagaccgaaatcagcggcgcgatgacaccgaaatggcaaatccatgcaggttacagctacctgcacagccaaatcaaaaccgcctccaattcgcgcgacgaaggcatcttcctgctgatgcccaaacacagcgcaaacctgtggacgacttaccaagttacgtccgggctgaccatcggcggcggcgtgaacgcgatgagcggcattacttcatctgcagggatacatgcaggcggttatgccacgttcgatgcgatggcggcataccgcttcacgcccaaactgaagctgcaaatcaacgccgacaacatcttcaaccgccattactacgcccgcgtcggcagcgagagcacctttaacattcccggttcggagcgcagcctgacggcaaacctgcgttacagtttttaa

SEQ ID NO: 58283 - DNA, 321 bp, Neisseria meningitidis; identical to SEQ ID NO: 45714

SEQ ID NO: 58284 - DNA, 1782 bp, Neisseria meningitidis
atgccttatttcgccctgtttgacgatgccgtaagcggccgcgcaaaacgctatcaaaatcatgtggaaagccgttttttccgtcccgaagaactcgatgctttggacggcgcgctgcaatcgggctggcaaaaagggctgcattcggtgttgtttgcagactacggattcggtttgccgctgacgggggttgagtccgaacgcggcggcaatcttgccctgcactggtttgccaactgcgccgacatcgatgccgaaagctggcttgcccgacactcagacggcctccccgccggcatttccacgccgcaaccctccgtatccgaaaccgattacctcgaccgcatccgccaaatccacgaagccatccggcgcggcgacacctatcaaatcaactacaccacccgcctgcacctgcaagcctacggcaatcccgtcagcctctaccgccgcctgcgccagcccgtcccctatgccgtcttgtcccacctgcccgatgcggaggggcaatccgcgtggacgctgtgtttctcgcccgaactcttcctcaaaatcggttcggacggcaccatcagcaccgaaccgatgaaaggcaccgcgccgattttgggcgacggacaagacgaacgccgcgccgccgagttgcaagcagacccgaaaaaccgcgccgaaaacgtgatgattgtcgatttgctgcgtaacgatctcggcaaaatcgcccaaaccggcacagtatgcgtacccgaaccgtttaaagtatcgcgtttcggcagcgtttggcagatgaccagcaccatccaagcccaagccttgccgcacacctcgttcgccgacatcctccgcgccgccttcccctgcggcagcatcaccggcgcgcccaaaaaaatgagtatgcagattatcgaatcgctcgaagccgaagcgcgcggactttatacgggcagcatcggctatttgaacccgtgttccggcggcttggggtttgaaggcacgttcaacgtcgttatccgcaccttgtcgctcacgccgctttcagacggcatttatcaaggcgtgtacggcgtgggttccggcatcgtcatcgacagcgaccccgccgccgaatatcgcgaatgcggctggaaagcccgtttcctcaacgaattgcgccccgatttcggcatttttgaaaccctgcgcgtcgaaaacggacgctgcaccctgctcgaccgccacctatgccgtctgaaaacctccgcgcaagccctcaacctgcccctgcccgacggttgcgaaaatcaaatcaaacaatacattgccgacttgcccgacggcgcgttccgcatcaaagccctgctcgcttcagacggcatcagcctgtcccgcgccgttttaaaccatttggctgacaaacaacgcgtcatcatttcgcccgccgtcctgcccgcacaaaactacctgcgccgcttcaaaaccacctgccgcgccctcttcgaccaagcgtggcaaaccgccgaaacacaaggcgcgttcgacagcctgtttttcaattcagacggcatcctgcttgaaggcggcagaagcaacgtgttcatcaaacatcgcggacaatggcttacgccctctttagatttagacattttaaacggcataatgcgccaagccgtgttggacgaaccgcaaaaatatttgcaaacaaatcaagtaatcgaaacacacatcacacaaaaaacactgcaagaagccgaagaaatccgcctctccaacgccttgcgcggcgtatttgccgccgcccttgcctga

SEQ ID NO: 58285 - DNA, 198 bp, Neisseria meningitidis; identical to SEQ ID NO: 36305

SEQ ID NO: 58286 - DNA, 942 bp, Neisseria meningitidis; identical to SEQ ID NO: 43207

SEQ ID NO: 58287 - DNA, 1050 bp, Neisseria meningitidis
atgccgtctgaagccttcagacggcatcgtgcctatcgggagaataaattgcagcctttagtcagcgtattgatttgcgcctacaacgtagaaaaatatttcgcccaatcattagccgccgtcgtgaatcagacttggcgcaacttggagattttgattgtcgatgacggctcgacagacggcacgcttgccattgccaaagatttccaaaagcgggacagccgtatcaaaatccttgcacaagctcaaaattccggtctgattccctctttaaacatcgggctggacgaattggcaaagtccggggggggggggaaatatattgcgcgcaccgatgcagacgatattgccgcccccgattggattgagaaaatcgtgggcgagatggaaaaagaccgcagcatcattgcgatgggtgcgtggctggaagttttgtcggaagaaaaggacggcaaccggctggcgcggcatcacaggcacggcaaaatttggaaaaagccgacccgacacgaagatattgccgactttttccctttcggcaaccccatacacaacaacacgatgattatgcggcgcagcgtcattgatggcggtttgcgttacaacactgagcgggattgggcggaagattaccaattttggtacgatgtcagcaaattgggcaggctggcttattatcccgaagccttggtcaaataccgccttcacgccaatcaggtttcatccaaatacagcatccgccaacacgaaatcgcgcaaggcatccaaaaaaccgccagaaacgattttttgcagtctatgggttttaaaacccggttcgacagccttgaataccgccaaataaaagcagtagcgtatgaattgctggagaaacatttgccggaagaagattttgaacgcgctcgccggtttttgtaccaatgtttcaaacggacggacacgccgcccgccggcgcgtggctggattttgcggcagacggcaggatgcggcggctgtttaccttgaggcaatacttcggcattttgcgccgattgctgaaaaaccgttga

SEQ ID NO: 58288 - DNA, 249 bp, Neisseria meningitidis; identical to SEQ ID NO: 38918

SEQ ID NO: 58289 - DNA, 255 bp, Neisseria meningitidis; identical to SEQ ID NO: 39349

SEQ ID NO: 58290 - DNA, 804 bp, Neisseria meningitidis
atgaaaaaaattcttttaacggtttcattaggtttggcgctgagtgcctgtgccactcaaggtacggtagataaagatgcccagattacccaagactggagtgtggaaaaactctatgccgaagcccaggatgagctgaacagcagcaattatactcgagctgtcaaattatacgaaatcttggaatcgcgcttccccaccagccgccatgcccggcagtcgcaactggataccgcatacgcctattataaagacgatgaaaaagacaaagctctggcggcaatcgaacgcttccgccgccttcacccgcaacacccgaatatggattacgcgctgtatctgcgcggcttggtgctgttcaacgaagaccagtccttcttgaacaaactggcctcgcaagactggtccgaccgcgacccgaaagccaaccgcgaagcgtaccaggcgtttgcggaactcgtccaacgcttcccgaacagcaaatacgccgccgatgcaaccgcacgcatggtcaaactggtcgatgcactgggcggcaatgaaatatcggtggcgcgctactacatgaaacgcggtgcatacatcgccgccgccaaccgcgcccaaaaaatcatcggcagctaccagaatacgcgttatgtcgaagaatcgctcgccatattggaacttgcctaccaaaaactcggcaaaccacagcttgccgccgatacgcgccgcgtgttggaaaccaacttcccgaaaagcccgtttttgacgcacgcttggcagcccgacgatatgccctggtggcgttactggcattaa

SEQ ID NO: 58291 - DNA, 552 bp, Neisseria meningitidis
atgaaaacgtatctggctctgatttctgctgccgttatcggtttggctgcctgctctcaagaacctgccgcgcctgctgccgaggcaactcatgctgctgaagcacccgcttccgaagcacctgccgccgaagctgctcctgcagatgctgccgaagcccctgctgccggcaactgtgcggcaactgtcgaatccaacgacaatatgcagttcaacaccaaagacatccaagtcagcaaagcatgtaaagagttcaccatcactctgaaacataccggtacgcaacccaaagccagcatgggtcacaaccttgtgattgccaaagctgaagacatggacggcgtatttaaagacggcgtaggtgctgccgataccgactatgtcaaacctgacgatgcgcgcgttgttgcccacaccaaactgatcggcggcggcgaagagtcttccctgactttggatcctgccaaactggctgacggcgaatacaaattcgcttgtaccttcccaggtcacggtgctttgatgaacggcaaagtgactttggtcgattaa

SEQ ID NO: 58292 - DNA, 891 bp, Neisseria meningitidis; identical to SEQ ID NO: 43240

SEQ ID NO: 58293 - DNA, 1092 bp, Neisseria meningitidis; identical to SEQ ID NO: 51545

SEQ ID NO: 58294 - DNA, 1398 bp, Neisseria meningitidis
atgagccaaggcaaaatcgtacaaattatcggtgcggttgttgacgtggaatttccacgcgacatgattccgcgcgtttacgacgctttgaaattagacgaaaacggtctgactttggaagtccaacagcttttgggcgacggcgtagtccgtaccattgcgatgggcagctcggacggtttgaaacgcggcatgactgtgagcaataccggtgcgcccattactgtgccggtaggtaaaggtacgttgggacgcattgtcgatgtattgggaacgcctgttgacgaggcaggtccgatcgataccgacaagagtcgtgccatccaccaagccgctcctaagtttgacgaactgtcttccacaaccgaattgctcgaaacgggcattaaagtgattgacttgctgtgtccgtttgccaaaggcggtaaagtaggtctgttcggcggtgccggtgtgggtaaaaccgtgaacatgatggaattgatcaacaacatcgccaaagcgcacagcggcttgtccgtgttcgcaggcgtgggtgagcgtacccgcgaaggtaacgacttctaccacgagatgaaagattccaacgtattggataaagtggcaatggtttacggtcagatgaacgaacctccgggcaaccgtttgcgtgtcgcattgaccggtttgaccatggcggaatacttccgtgacgaaaaagacgaaaacggcaaaggccgcgacgtattgttcttcgtggacaacatctaccgttacactctggccggtaccgaagtatccgcattgttgggccgtatgccgtctgcagtgggctaccaaccgacattggcagaagaaatgggtcgtttgcaggagcgtattacctctacccaaaccggttctattacttctatccaagccgtatatgtacctgcggacgacttgaccgacccgtctccggcaacaacgttcgcccacttggacgcaaccgtcgtattgagccgcgatattgcctctttgggtatttacccggcagtcgatccgcttgattccacttcgcgccaactggatccgatggtcttgggtcaagagcactacgacgtggcgcgcggcgtacagtccaccctgcagaaatacaaagaattgcgcgacatcatcgccatcttgggtatggacgaattgtctgacgaagacaaactgaccgtaatgcgtgcgcgtaaaatccaacgcttcctgtcccaaccgttccacgttgccgaagtgtttacaggttctccgggcaaatatgtcgccctgcgcgataccattgccggcttcaaagccatcttgaacggcgaatacgaccatctgcccgaacaggcattctacatggtcggcagcatcgaagaagcggttgagaaagcgaaaaccttaaactga

SEQ ID NO: 58295 - DNA, 744 bp, Neisseria meningitidis
atgctcatcatccgcaacctgatttactggctgatactctgttccaccctgattttcctctttccctttatgctgctcgcctcgcctttccgagacggggcgcacaagatggcgcgggtctgggtcaaaatcctcaacctctcgctcaaacacatcgtcgggctcaaataccgcatcatcggcgcggaaaacatccccgaccgccccgccgtcatctgcgccaaacaccaaagcggctgggaaacgctcgcccttcaggacatttttccgccgcaggtttacgttgccaaacgcgagttgttcaaaatcccctttttcggctggggcttgaaactggtcaaaaccataggcatagaccgcaacaaccgccgcgaagccaacgagcagctcataaaacaggggttggcgcgcaaaaacgaaggctattggattaccattttccccgaaggcacgcgccttgcacccggaaagcgcggcaaatacaaactcggcggtgcgcgcatggcgaaaatgtttgagatggacatcgtccccgtcgccctcaacagcggcgaattttggccgaaaaactcctttctgaaatatccgggggaaatcaccgtcgtcatctgtccgaccatcccgcacgcaagcggcagcgaagccgaattgatggaaaaatgcgaacatctcatcgaaacgcaacaaccgcttatttccggcgcaggcccgtttgccgccaaaatgccgtctgaaaccgcatga

SEQ ID NO: 58296 - DNA, 729 bp, Neisseria meningitidis; identical to SEQ ID NO: 43072

SEQ ID NO: 58297 - DNA, 282 bp, Neisseria meningitidis; identical to SEQ ID NO: 49862

SEQ ID NO: 58298 - DNA, 1644 bp, Neisseria meningitidis; identical to SEQ ID NO: 39802

SEQ ID NO: 58299 - DNA, 1794 bp, Neisseria meningitidis
atgaaaaatatccgaaatttctccatcattgcccacatcgaccacggcaaatcgacgcttgccgaccgcttcatccaatattgcggcggtttggatttgcgcgaaatgagtacgcaggtactcgattccatggacatcgaaaaagagcgcggcattaccatcaaagcgcaaaccgccgcgctcaactataaagcgcgcgacgggcaggtgtatcagcttaatttgattgacacgccgggacacgtcgacttctcttacgaagtatcccgttcgctgtcagcttgcgaaggcgcgcttttggtggtcgatgcgtcccaaggtgtagaagctcaaactgtggcgaactgctataccgcgattgatttgggcgtggaagttgtgcctgttttgaacaaaatcgacctgccggccgccgaccccgagcgcgtggagcaggaaattgaagacatcatcggcattgatgccgttggtgcggtacagtgttccgctaaaagcggcattggtgtggaagatgttttggaagaaatcgttgccaaagtccctgcgccaaccggtgatgaaaatgcgccgttgcaagcggttattgttgattcatggtttgacaactacgtcggcgtagttatgttgattcgtgtgaaaaacggcaccatcaagctgaaagacaaagtgcgctttatgagcaccaaggcggaaactcaggttgagcagctgggcgtttttacgccgaaatcggttcaaaaacaagaactcaaagccggagaagtgggctttttgattaccggcgtgaaagaattgggacaggcgaaagtcggcgatacggttactttggttgccaaccctgcctctgagccgctgcccggcttccaagaggtgcaaagccaagtattcgcgggtctctaccccgtagaaagccacgactatgaagccttgcgtgacgctttggaaaaattacagcttaacgacgcttcgctaaaattcgagcctgaagtttcccaagcattgggcttcggcttccgttgcggcttcttgggtctgttgcacttggaaatcgtgcaggaacgcttggagcgcgagttcgacatggatttgattaccaccgcgccgacggtggtttatgaagtcgtgttgaaaagcggcgaaaaaatcgaagtcgaaaatccgtccaaactgcccgacatcggcagcatcgaaaccatactcgagccgattattaccgcgaccatcctcgtgccgcaggaatacgtcggcaacgtcatgactttgtgtaaccaaaagcgcggcgttcaggtcaatatgcaatatatgggccgccaagtcatgctgacttatgatttgccgatgaacgaagtcgtcatggacttcttcgacaaactcaaatccacttcgcgcggttatgcttcgttggactaccatttcaaagagttccaaccgtctgatttgattaagctggatattatggtcaacggcgaaaaagtcgatgcattaagcctgattgtgcaccgtcaaagcgcggttcaccgaggccgcgagctggcatcaaaaatgcgcgagctgattccgcgccaaatgttcgacatcgccgtccaagccgccatcggcagccagattatcgcccgcgaaaacgtcaaagccctgcgtaaaaacgttttggcgaaatgttacggcggcgatattacgcgtaagaaaaaactgcttgaaaaacaaaaggcaggtaaacgccgtatgaaacaagtgggcaatgtggaaattccgcaaagcgcgttcttggcgattttgcaggtgagcgacaaataa

SEQ ID NO: 58300 - DNA, 1272 bp, Neisseria meningitidis; identical to SEQ ID NO: 43272

SEQ ID NO: 58301 - DNA, 1677 bp, Neisseria meningitidis
atgtcccaacaatacgtctattctatgctgcgcgtgagcaaggttgtgccgccgcagaaaaccatcattaaagatatttccctttctttcttccccggcacgaaaatcggcctgctcggtttgaacggcgcgggcaagtccaccgtgctgcggattatggcgggtgtggataaggaatttgagggcgaagccgtgccgatgggcggcattaaaatcggctacctgccgcaagagcctgagcttgatcctgaaaaaaccgtgcgcgaggaagtggaaagcggtttgggcgaagtggctgccgcgcagaaacgtttggaagaagtgtatgccgagtacgccaatcctgatgcggattttgacgcgttggcagaagagcagggccgcttggaagcgattattgcggcaggttcgtccacgggcggcggtgcggaacacgaattggaaatcgccgccgacgcgctgcgcctgccggaatgggatgccaaaatcgataatttgtccggcggtgaaaaacgccgcgttgccttgtgcaaactcttgttgagcaaacccgatatgcttttgctggacgagccgaccaaccacttggacgcggaatctgtcgagtggctggagcaatttctcgtgcgcttccccggtacagtcgttgcggtaacacacgaccgctacttcctcgacaacgccgccgaatggattttggaactcgaccgcggccatggtattccgtggaaaggcaattactcgtcttggctggagcagaaagaaaaacgcttggaaaacgaggcaaaatccgaagccgcgcgcgtgaaggcgatgaagcaggaattggaatgggtgcgccaaaatgccaaaggccgccaagccaagtccaaagcgcgtttggctcgttttgaagaaatgagcaactacgaataccaaaaacgcaatgaaacgcaggaaatcttcattcccgtcgccgagcgtttgggtaacgaagtgattgaatttgtgaatgtttccaaatcgttcggcgacaaagtgctgattgacgatttgagcttcaaagtgcctgcgggcgcgattgtcggcatcatcggtccgaacggcgcgggtaaatcgacactgtttaaaatgattgcgggcaaagagcagcccgattccggtgaagtgaaaatcgggcaaaccgtgaaaatgagcttgattgaccaaagccgcgaaggtttgcaaaacgacaaaaccgtgttcgacaacatcgccgaaggtcgcgacattttgcaggttggtcagtttgaaatccccgcccgccaatatttgggacgcttcaatttcaaaggcagcgaccaaagcaaaattgcaggtcaattgtctggcggcgaacgcggtcgtctgcacttggcgaaaaccttgttgggcggcggcaatgtattgctgttggacgaaccgtccaatgaccttgacgtagaaaccctgcgcgcgctggaagacgcattgctggaatttgccggtagcgtgatggtgatttcgcacgaccgttggttcctcgaccgtattgctacgcatatcttggcttgcgaaggcgactccaaatgggtgttcttcgacggcaactatcaggaatacgaagccgacaagaaacgccgactcggcgaagaaggcgcgaaaccgaaacgcatcaaatacaaaccggtaacgcgttaa

SEQ ID NO: 58302 - DNA, 1131 bp, Neisseria meningitidis; identical to SEQ ID NO: 43401

SEQ ID NO: 58303 - DNA, 1167 bp, Neisseria meningitidis
atgagaaaattcaatttgaccgcattgtccgtgatgcttgccttaggtttgaccgcgtgccagccgccggaggcggagaaagctgcgccggccgcgtccggtgagacccaatccgccaacgagggcggttcggtcagtatcgccgtcaacgacaatgcctgcgaaccgatggaactgaccgtgccgagcggacaggttgtgttcaatattaaaaacaacagcggccgcaagctcgaatgggaaatcctgaaaggcgtgatggtggtggacgagcgcgaaaacatcgcccccggactttccgataaaatgaccgtcaccctgttgccgggcgaatacgaaatgacttgcggtcttttgaccaatccgcgcggcaagctggtggtaaccgacagcggctttaaagacaccgccaacgaagcggatttggaaaaactgtcccaaccgctcgccgactataaagcctacgttcaaggcgaggttaaagagctggtggcgaaaaccaaaacttttaccgaagccgtcaaagcaggcgacattgaaaaggcgaaatccctgtttgccgacacccgcgtccattacgaacgcatcgaaccgattgccgagcttttcagcgaactcgaccccgtcatcgatgcgcgtgaagacgacttcaaagacggcgcgaaagatgccggatttaccggctttcaccgtatcgaatacgccctttgggtggaaaaagacgtgtccggcgtgaaggaaattgcagcgaaactgatgaccgatgtcgaagccctgcaaaaagaaatcgacgcattggcgtttcctccgggcaaggtggtcggcggcgcgtccgaactgattgaagaagtggcgggcagtaaaatcagcggcgaagaagaccggtacagccacaccgatttgagcgacttccaagccaatgtggacggatctaaaaaaatcgtcgatttgttccgtccgttgatcgagaccaaaaacaaagccttgttggaaaaaaccgataccaacttcaaacaggtcaacgaaattctggcgaaataccggactaaagacggttttgaaacctacgacaagctgggcgaagccgaccgcaaagcgttacaggcctctattaacgcgcttgccgaagaccttgcccaacttcgcggcatactcggcttgaaataa

SEQ ID NO: 58304 - DNA, 633 bp, Neisseria meningitidis
atgctcaacattcaaaatccgatgtttctgatgctgatgagcgacagcccacagctgcgcgagtttctggtgcgcaatatcgacaacatcgccaacgatacagaagcctttataaaccgctacgacctcaaccgtcatatgatttacaatactctgctgatggtagagggtaagcagcttgatcggttgaaacaacgtagcgagaaagtcttggcgcatcccacccctagcaaatggctgcaaaagcggttgtacgattaccgcttcttcctcgctttcgccgaacaggatgccgaggcgatgaaggccgccttagagccgcttttcgataaaaaaaccgcgcgtatggctgccaaagaaacattgtcctatttcgatttctacctgcagccgcaaatcgttacctacgccaaaatcgcatccatgcacggtttcgatttgggcatagatcaagaaatcgcaccgagggatttgattgtttacgatccgctgccggcagacgaatatcaagacatcttcgattttatgaaacagtatgacttgtcttacccgtatgaatatctgcaggattggatagattactatacgttcaaaaccgataagctggtatttggtaacgcgaagcgagagtga

SEQ ID NO: 58305 - DNA, 864 bp, Neisseria meningitidis; identical to SEQ ID NO: 50338

SEQ ID NO: 58306 - DNA, 288 bp, Neisseria meningitidis; identical to SEQ ID NO: 36549

SEQ ID NO: 58307 - DNA, 738 bp, Neisseria meningitidis
atgattattttggacaaggtttccaagcattaccaaacgcgcgacaagacccgttttgccgctgtcgagccgaccagcctcgaaatccgcgacggcgaaattttcgggctgatgggctattccggcgcgggcaaatccaccctgttgcgactgattaacctgttggaacgtcccgacacgggcaaggtcaacgtctgtggacaagagctgaccgcgcttgatgccgccgcattgcgtcaggcgcggcagaatatcggcatggtgtttcagcagtttaatcttttgagcaaccgcaccgttgccgacaatgttgcctttcctttggaaatcgccggatggccgtctgaaaaaatcaaagcgcgcgttgccgaatgtctcgaaatcgtcggactgaccgaacgcgccggccactatcccgcccagctttcaggcgggcagaaacagcgtgtcggcatcgcccgcgcactcgcgcccaaaccccaagtcatcctcgccgacgaacccacttccgccctcgaccccgccaccacgcgcagcgtcttggaatgtttggaagacatcaacaaacgattcaacgtaaccatcgtcatcgtaacccacgaaatgagcgttatcagacgactgtgcgaccgcgccgccctgttggataaaggcaaagtcgtcgaaatcgtcgaagtacgcggcaaccaaatccacgcccgatccgacatcgggcgcgaactgattcgggaggactga

SEQ ID NO: 58308 - DNA, 864 bp, Neisseria meningitidis
atggaattgaacgaatttctcgataaagcctatgccgttttgcggcgtttggatgccgtgcttccgcccgaacctgggcatacggattggaacgcgcttgccttccgctggcagagtgcgggcaaaaaaggtttttgggaacacttgcccgatccgcacaccttccccttggcaaggctggcgggagtcggcaggcaaaccgaattgctggtgcgtaataccgaacagttcattgtcggcagacccgcgaacaatgtattgatgagcggcgcgcgcggaacaggcaaatcctcgctggtcaaagccctgctgcacgaatatgcggataagggattgcgcctgatcgaagtcgataaaagcgatttaatcggcctgccttacctgttgacgcttttgaaggaacgtccggaaaaatttatcgtattttgcgacgatttgtcgtttgaaagcggcgatgaaacctataaggcattgaaaaccgcgttagacggcggtctgtctcaacgttgcgccaacgtgctggtgtacgcgacttccaacagacggcacctgatgcccgaatattttgacgagaatgccggtacgacggggatgcggggggaagtccatcagaaagaagcggtggaagaaaaaatatccctgtccgaccgattcggattgtggctcagtttttatccgttcgatcaaaacgattatctggcggcggtgcaaaattggctggaagatttcggcgtgccgtatgatgaaaccgcacagatggcggcattgcagtgggcgcagacgcggggcagccgttcgggacgttccgcgtggcagtttgcctgcgactgggcgggcaggctgccggagcaacgtgcgccgtga

SEQ ID NO: 58309 - DNA, 480 bp, Neisseria meningitidis; identical to SEQ ID NO: 43074

SEQ ID NO: 58310 - DNA, 825 bp, Neisseria meningitidis; identical to SEQ ID NO: 43351

SEQ ID NO: 58311 - DNA, 735 bp, Neisseria meningitidis
atgattcaacgccaaatcatcctcgataccgaaaccaccggtctgtatgccgacggcggcgaccgcttggtcgagtttgccggtttagaaatggtcaaccgccaaatgaccgacaaaaacctgcacctctatgtccaccccgagcgcgatatgcctgaagaggcggcgagggtgcacggtctgacgatagaggttttggaagggaaaaacgcaccgccttttgcagaggtcggcaggcagattgccgatttcctgcgcggtgcggaactgattatccacaatgccaaattcgacgtgggcttcctcaatatggagttccgccggatggggttgccgaccgttgaggaactcggctgtaccgttaccgataccctggcgatggcgcgcgaaatgttccccgggcagaaagccagcctggatgccctgtgcaaccgtttttccgtcgaccgcagcaagcgcgtcctgcacggcgcattgatcgactgcgaacttttgggcgaagtctatcttgctatgacgcggcggcagttcgacctgatgggtgcggccgcagaggaaaaaatggaaaccaaacccgtggtgcataccgaaaccaaacgcagcggcaaactgaaagtcatcagggcggacgaaaacgagttggcggcgcacgggcaatatttggacggcttgggcgaagcctgtatctggcgcaaggaagccgtgccgtctgaaaacggcgggacggacgcatga

SEQ ID NO: 58312 - DNA, 1332 bp, Neisseria meningitidis
atggattcgggaattctgaaattacgggtatcagcaggcgaaataggggatatccgctatgaagaaaaacgggatgggaagtctgccgaaggcagtattagtacattcaataacaaatttcccttatataggaacaaaattctcaatcttcgcgatgtagagcagggcttggaaaacctgcgtcgtttgtcgagtgttaaaacagatattcagattataccgtccgaagaagaaggcaaaagcgatttacagatcaaatggcagcagaataaacccatacggttcagtatcggtatagatgatgcgggcggcaaaacgaccggcaaatatcaaggaaatgtcgctttatcgttcgataaccctttgggcttaagcgatttgttttatgtttcatatggacgcggtttggcgcacaaaacggacttgactgatgccaccggtacggaaactgaaagcggatccagaagttacagcgtgcattattcggtgcccgtaaaaaaatggctgttttcttttaatcacaatggacatcgttaccacgaagcaaccgaaggctattccgtcaattacgattacaacggcaaacaatatcagagcagcctggccgccgagcgcatgctttggcgtaacagacttcataaaacttcagtcggaatgaaattatggacacgccaaacctataaatacatcgacgatgccgaaatcgaagtgcaacgccgccgctctgcaggctgggaagccgaattgcgccaccgtgcttacctcaaccgttggcagcttgacggcaagttgtcttacaaacgcgggaccggcatgcgccaaagtatgcctgcaccggaagaaaacggcggcgatattcttccaggtacatctcgtatgaaaatcattactgccggtttggacgcagccgccccatttattttaggcaaacagcagtttttctacgcaaccgccattcaagctcaatggaacaaaacgccgttggttgcccaagataaattgtcaatcggcagccgctacaccgttcgcggatttgatggggagcagagtcttttcggagagcgaggtttctactggcagaatactttaacttggtattttcatccgaaccatcagttctatctcggtgcggactatggccgcgtatctggcgaaagtgcacaatatgtatcgggcaagcagctgatgggtgcagtggtcggcttcagaggagggcataaagtaggcggtatgtttgcttatgatctgtttgccggcaagccgcttcataaacccaaaggctttcagacgaccaacaccgtttacggcttcaacttgaattacagtttctaa

SEQ ID NO: 58313 - DNA, 210 bp, Neisseria meningitidis; identical to SEQ ID NO: 39345

SEQ ID NO: 58314 - DNA, 1509 bp, Neisseria meningitidis
atgaccaccacccccgcaaacatcctcgcctccgtcgatttgggttccaacagtttccgcctccagatttgcgaaaacaacaacggacaattaaaagttatcgattccttcaaacagatggtgcgcttcgccgccggtctggacgaacagaaaaacctcagcgcatcctcacaggaacaggctttagactgcctagcaaaattcggcgaacgcctgcgcggcttccgccctgaacaggtacgcgccgtggcaaccaatacattccgcgtcgccaaaaacatcgcagatttccttcccaaggccgaagcggcactgggtttccccatcgaaatcatcgcagggcgcgaagaggcgcggctgatttataccggcgtgatccacaccctccccccgggcggcggcaaaatgctggttatcgacatcggcggcggttcgacagaatttgtcatcggttcgacgctgaatcccgacattaccgaaagcctgcccttgggctgtgtaacctacagcctgcgcttcttccaaaacaaaattaccgccaaagacttccaatccgccatttccgccgcccgtaacgaaatccagcgcatcagcaaaaatatgaggcgcgaaggttgggatttcgccgtcggcacatcgggttcggcaaaatccatccgtgatgtgcttgccgccgaaataccccaagaggcggacattacctacaaaggaatgcgcgccctcgccgaacgcatcatcgaagccggttcggtcaaaaaagccaaatttgaaaacctgaaaccggaacgcatcgaagtctttgccggcgggcttgccgtgatgatggcggcgtttgaggaaatgaaactcgacaggatgaccgtaaccgaagccgccctgcgcgacggcgtgttttacgatttgatcgggcgaggtttaaacgaagatatgcgcggacaaacggttgccgagttccaacaccgctaccacgtcagcctcaatcaggcgaaacgcaccgccgaaaccgcgcaaacctttatggacagcctctgccacgccaaaaatgttacggttcaagaacttgccttgtggcaacagtatctcggacgcgccgccgcgctgcacgaaatcggtttggacatcgcccacaccggctatcacaagcattctgcctacatcctcgaaaacgccgatatgccgggtttttcacgcaaagaacagaccatacttgcccaactggtcatcggtcatcgcggcgatatgaaaaaaatgggcggcatcatcggcaccaacgaaatgttgtggtatgccgttttgtcgctgcgccttgccgccctgttctgccgttcacgccaagacctgactttcccgaaaaatatgcagttgcgcacggatacggaaagctgcggcttcatcctgcgtattgacagggagtggctggaacgccaccccctgattgccgacgcattggaatatgaaagcgtccaatggcaaaaaatcaatatgccgttcaaagtcgaggccgtctga

SEQ ID NO: 58315 - DNA, 1977 bp, Neisseria meningitidis
atgtccaaactcaaaaccatcgctctgaccgcatcaggtctgtccgtttgtccgggtttcctatacgcccaaaacacctcatcacaccaaatcggtttggcgattatgcgcttaaactcttcaatactcgacctgcccccgacaaaacaatatttccaatccggcagcctgtggggcgagctgcgccaaggcttccggatgggcgaagtcaatcccgaactggtacgccgccacgaaagcaaattcatcgcaagccacagctatttcaacagggtcatcaaccggagtagaccctatatgtaccatatcgccaacgaagtcaaaaaacgcaatatgcccgccgaagccgccctgcttcccttcatcgaaagcgcgttcgtcaccaaagccaaatcacacgtcggcgcatcaggattatggcagtttatgcccgctaccggcaggcattacggcctggaaaaaacaccggtttacgacggcaggcacgacgtttacgccgccaccgatgccgcactcaactatctgcaatacctctatggactgttcggcgactggccgcttgcctttgccgcctacaactggggtgaaggcaacgtcggacgcgccatcaaccgcgcccgcgcccaagggctcgaaccgacctacgaaaacctgcgtatgcccaacgaaacgcgcaactatgtccccaagctgctcgccgtgcgcaacattattgccactccccaatctttcggcatgaatatcagcgacatagacaacaaaccctattttcaggcagtcgaaccggatcgtccgctcgacaacgaagccatcgcccggcttgccggcatcacgcaaagcgagctgctcgccctaaaccccgcattcaacgtccccgcgtttatccccaaaagcaaacgcaaactgctgcttcctgtcgcgtccgtacaaaccttccaaagcaactacctcaacgccgcacccgacagcctgttttcatgggaagtctatacgcctgccgccaaaaccagcctgtccgacatctcgacggcaaccggcatgagcattgccgacatcaaacgcctcaacaacctgaacggcaaccttgtcaacgcaggacgcagcatccttgtcgccaagaacggcaaaacccttcagacggcatcggaatccgtcgtttccatcgacatcgacaatacgcccgacacctaccgttccaatatgccggcaggcacggtgaacgtcggcattgcccgaatccgacccgccgccgcacagacagcggacattaccgtcgcacctttgccgcagaaaaccgtccgtacggaacccgatccccttgtccgtattgccgaacctgcccttgcgacagccgcagcgcaacctcaaaccgaaaaacagaccgccatgccgtctgaaacccaaaccgcaacactcgcgcagatcatcccccaaaacgacatgcaggcggcagacgaactcatgcagcttgttgcccgaaacaacctgcgccgacaggctgaagaaaccatctccgccgtcatcggcacgcctgacacagttgccgaacacaaaatttccgcatctccgcaacataccgctgccgccgacggcaaacgccggatacgtttggaaacacgtatagccaaagctgccgacggcgaagccgaaatctccccgctccatgccagcatccaccgcgttgtagaaggcgacaccctgttcaacattgccaaacgctacaatgtcagcgtagccgacctgattgtcgccaacaacatcaaaggcaacaccatccaaaaaggacaggtactccgcctggcgcaggcagcccccgcccaaacccgtattgaaaaagtatcctacaccgcgcgcaaaggcgacaccttcaaaagtatcgccgcgcgcttcaatatccatatcgacgacatccgccggctgaatcccaacctgaacaccatcaatccgggacagagggtcaaactgattggaagctga

SEQ ID NO: 58316 - DNA, 411 bp, Neisseria meningitidis; identical to SEQ ID NO: 37452

SEQ ID NO: 58317 - DNA, 1053 bp, Neisseria meningitidis
atgaccgtatcccccgtcgccttgcgccgtaagaccgagtgcaagcctcatcccaccgcgcgctattggaaaaaatgcgatgtcgaagccctgttcggacttcccttcctcgacctcatttaccaagccgccgaaatccaccgccaaaatttcaacccgcgcgaaatccagctttccacgctgttgtccatcaaaaccggcggttgtcccgaagattgcgcctactgtccgcaatcggcgcaccacaacaccaatctgggcaaagagcagatgatggatgtggatgaaatcgtcgaaaaagccaaaatcgccaaatcgcgcggcgcaagccggttttgtatgggcgcggcatggcgcggccccaaacccaaagacgtggagacggtttccgcaatcatcaaagccgtcaagggcttgggtatggaaacctgtggcacgttcggtatgctcgaagaaggtatggcggaagacttgaaagaggcgggcttggattattacaaccacaacctcgacaccgaccccgaccgctacaacgacatcatccatacacgccggcatgaagaccgtatggacaccttgggcaaagtccgcaacgccggtttgaaagtctgctgcggcggcatcgtcgggatgaacgaaactcgtgccgaacgcgccgggctgattgccagcctcgccaacctcgacccgcagcccgaaagcgtgccgattaaccggttggtcaaagtggaaggcacgccgcttgacgatgccgaagatttggactggacggaatttgtccgcaccatcgccgtggcgcggattacgatgccgcaaagttatgtccggctgtcggcagggcgcagcaatatgccggaagcgatgcaggcgatgtgctttatggcgggcgcgaattcgattttttacggcgacaagctgttgacgacaggcaatcctgatgaggacggcgacagaatcctgatggaaaagcttaacctgtatcccttacagtttgagctggaaggcgaggtcgccgaagtggaaaaagcctctgggattaaagtggattattga

SEQ ID NO: 58318 - DNA, 963 bp, Neisseria meningitidis
atgcagtatgccaaaatttccggcacgggcagctatcttcctgccaaccgcgtcagcaatgacgaccttgcccaaaaagtggatacctcggacgagtggattaccgcgcgcacgggcatcaaattccgccatattgcagccgaaaacgaaaaaaccagcgaccttgccgccgaagcggcgcggcgcgctttggcagatgccaaattaaatataaacgacattgatttgattatcgtggcgacggcaacgccggatatgcagtttccttctaccgccaccatcgtgcagcaaaaattgggcatcaccaacggctgtcccgcgtttgacgtacaggcagtgtgcgcaggctttatgtacgcgctgaccacggcaaacgcctacattaaaagcggtatggcgaaaaacgcgctgatcatcggcgcggaaaccttcagccgcatcgtcgattggaacgaccgcacaacctgcgtattgttcggcgacggcgcgggcgcggtggttttgagcgcggcggacaaaccgggcatcatccacagcaaactcaaagccgacggcaattatctgaaactcttaaacgtccccgggcaaatcgcctgcggcaaagtttccggttcgccgtacatttcgatggacggtcccggcgtgttcaagtttgccgtcaaaatgctgtccaaaatcgccgatgacgttatcgaagaagccggttataccgccgctcaaatcgactggatcgtgccgcatcaggcaaaccgccgcattatcgaatcgaccgcgaaacatttaggtttgagtatggacaaagtcgtcctgaccgtccaagaccacggcaacacatccgccgcatcgattccgctggctttggatacgggcatccgcagcggacaaatcaaacgcggtcaaaacctgctgctcgaaggcatcggcggcggtttcgcgtggggcgcggtgctgttgcaatattga

SEQ ID NO: 58319 - DNA, 1302 bp, Neisseria meningitidis
atgaccgaatccgtccgcctccccgtcgcccgtctcaaaccttccaccgtcgccctgcccggctccaaaagcatcagcaaccgcaccctgctgcttgccgccttgtccgacaatgcttgcgaaatccattccctgctcaaatccgacgataccgaccgtatgctcgaagcactcgataaactcggcgttcaaatcgaatatcttgccgaagaccgtctgaaagtgcacggcacaggcggacgcttccccaaccgcactgccgatttgtttttgggcaacgcgggcacggcgttccgcccgttaaccgccgctctggccgttttgggcggcgattatcatctgcacggcgtgcctcgtatgcacgaacgccccatcggcgatttggccgatgcactgcggattgccggcgccgatgtcgaatatctcggcaaggaacactatccgccgcttcatatcggcaaacgtcaagacaacggcgaacgcgtgattccgattaaaggcaatgtgtccagccagtttctgaccgcccttttaatggcgttgccgctgaccgggcaggcgtttgaaatccgtatggtcggcgagttaatttccaagccctatatcgacattactttaaaactgatggcgcaattcggcgtacaggttatcaatgaaggctaccgcgtcttcaaaattcccgccgatgcgcgctaccacgcgcccgaacacttgcacgtcgaaggcgatgcctccggcgcgtcctacttcctcgcagccggtttgattgccgccacgcccgtccgcgttaccggtatcggcgcaaacagcatacagggcgatgtcgcctttgcccgtgagctggaaaaaatcggggcggacgtggtttggggcgaaaacttcgtcgaagtctcgcgcccgaaagaacgtgccgtccaagcctttgatttggatgcgaaccatatccccgatgccgcgatgaccctcgccatcgtcgcgcttgctacagggcaaacctgcacgcttcgcaacatcggttcgtggcgcgtcaaagagaccgaccgcattgccgcaatggcgaacgagttgcgcaaactcggtgcaaaagtcgccgaagaagccgaagcaattcacatcacctcgcccgaaacgccgacacccgacgccgtcatcgacacttacgacgaccaccgcatggcaatgtgtttctcgctggtttcgctgttgggcgtacccgtcgtcatcaacgatccgaaatgcacccacaaaaccttcccgacttatttcgacgtgttctcatcgctgaccgaaacagcggaataa

SEQ ID NO: 58320 - DNA, 1326 bp, Neisseria meningitidis; identical to SEQ ID NO: 43956

SEQ ID NO: 58321 - DNA, 696 bp, Neisseria meningitidis
atgttgagcgaggcggacattgccgcgcagacggcttttgccgccgcgttgccgcttctgatcgattgcccgatgttgggcgaggaaatgtcgcgacaggaacagtcggctctgtgggaacaatattcgggggaaaaggggctgtggattgtcgatccgatagacgggacaaacaattttgtcaacgggctgccgcattttgccgtgtcggtggcgtttgtccgcaacgggcgcgccgaattgggcgtaatctacaatccggtcagcggcgaatgtttttatgctgaacgcgggcagggtgcgtttttaaacgggacacgcctgcctttgcgtctcgtggataagaagttgaatgaggcaatcgcgggcgtggaaatcaaatatctgcgttcgggcaaactgtccagccgcatgagtacgctcgcgccttttggaacgatacggagtatgggcagcagtacgttggactggtgttatctggcgtgcgggcgttatgatgtttatgtccacggcgggcagaagctgtgggattatgccgccggcgcgttgattttcgaggaggcgggcggcaggctgacgactttggaaggcgacgggttttggagtggtgaacacgtgttcaaacgctcggtcgtcgccgcgctcgaaccgaagctgtttgaacgctgggtcgagtggatacgggaaaaccaatag

SEQ ID NO: 58322 - DNA, 390 bp, Neisseria meningitidis
atgtggaaaatcataaaagaggatagtgatgatttaggatttgcaattaaatgcttattctctcaatctattgatttaaatgaattcaagttatggattgaacaagtagtacgcgatatgcccatcgaggacatccctttttatatttttgacttggcggatttcgatgtaggaattggcgatattggcaatattgtaggttttgctccgagttccagcctgccgaaatcgaaaaaaaatgccttgaccggcattgccttcttaagggggatagatgtctatgatccgcctatttcaaaagaaaaagcattaaaagccttagagaaacatcctgaaatttatcagaaatttcagcatttctttccgtttgtagaactgcccccgctttaa

SEQ ID NO: 58323 - DNA, 870 bp, Neisseria meningitidis
atgaagcgcatctttttgcccgccttgcccgccatcctgcctttatccacttatgccgacctgcccttgacgattgaagacataatgaccgacaagggaaaatggaaactggaaacttcccttacctacctgaacagcgaaaacaaccgcgccgaacttgccgcaccggtttacattcaaaccggcgcaacctcgtttatccccattccgaccgaaatccaagaaaacggcagcaataccgatatgctcgtcggcacgctcggtttgcgctacggactgaccgggaataccgacatttacggcagcggcagctatctgtggcacgaagaacgcaaactcgacggcaacggcaaaacccgcaacaaacggatgtccgacgtatccctcggcatcagccacactttccttaaagacgacaaaaaccccgccctaatcagctttcttgaaagcacggtttacgaaaaatcgcgcaacaaagcctcgtcgggaaaatcgtggctcatcggcgccaccacctacaaagccatagatccgattgtcctttccctcaccgccgcctaccgcatcaacggcagcaaaaccctttcagacggcatccgctacaaatcgggcaactacctgctgctcaaccccaacatctcatttgccgccaacgacagaatcagcctgaccggaggcatccaatggctgggcaaacagcccgaccgcatagacggcaaaaaagaatccgcaagaaacacatccacctacgcccatttcggcgcaggtttcggtttcaccaaaaccacggctttaaacgcatccgcacgtttcaacgtttcagggcaaagcagttccgaactgaaatttggcgtacagcatacattttaa

SEQ ID NO: 58324 - DNA, 945 bp, Neisseria meningitidis; identical to SEQ ID NO: 51716

SEQ ID NO: 58325 - DNA, 501 bp, Neisseria meningitidis; identical to SEQ ID NO: 37418

SEQ ID NO: 58326 - DNA, 423 bp, Neisseria meningitidis; identical to SEQ ID NO: 42719

SEQ ID NO: 58327 - DNA, 408 bp, Neisseria meningitidis; identical to SEQ ID NO: 53410

SEQ ID NO: 58328 - DNA, 1473 bp, Neisseria meningitidis; identical to SEQ ID NO: 43380

SEQ ID NO: 58329 - DNA, 1719 bp, Neisseria meningitidis; identical to SEQ ID NO: 52136

SEQ ID NO: 58330 - DNA, 1035 bp, Neisseria meningitidis; identical to SEQ ID NO: 42242

SEQ ID NO: 58331 - DNA, 690 bp, Neisseria meningitidis
  misc_feature 667, 668, 669, 670, 671: 'n' is a, c, g or t
atgaacgagaaaaccatcatccttgccaatccgcgcggcttctgcgctggtgtggatcgggcaatcagtattgtcgaacgtgctttggaagagttcggcgcgccgatttatgtgcgccacgaagtcgttcacaacaaattcgtcgtggacaacctgcgtgaaaaaggtgcggtgtttattgaagacttggcggaagtgccgccgggcgcgacactggtttattcggcacacggcgtatcgaaggcggtgcggcaagaagcggcggagcgcggtttccgcgtgtttgatgcgacttgcccgctggtgacgaaagtgcataaggaagtcgcccgactggatgcccaagactgtgaaatcatcatgatcgggcataaggggcacgtcgaggtcgaaggaacgatggggcagcttgcgccgggcaaaatgcttttggtcgaaacggtcggagatgtggcaaaactcgaagtcagaaaccccgacaaactcgcctatgtcagccaaaccacgctctcggtcgatgaaaccaaagacatcatcgccgcgctgaacgcgcgtttccccaatatccgcaatccgcacaaggaagatatctgctatgcgacgaccaaccggcaaaccgccgtcaaagagttggcagaacagtgcgacatcgtgattgtggtcggtnnnnncacacacttaattaattaa

SEQ ID NO: 58332 - DNA, 2751 bp, Neisseria meningitidis
atgctgacaaacattgccaagaaaatcttcggcagccgcaacgaccgcttgctgaaacaataccgtaaatccgttgccagaatcaacgcgctcgaagaacagatgcaagccctaagcgatgctgatctgcaagccaaaactgccgaattcaaacaacgcctcgccgacggtcagactttggacggcattttgcccgaagccttcgccgtctgccgcgaagcgtcccgccgcaccctcggtatgcgccacttcgacgtgcagcttatcggcggtatggtgctgcatgacggcaaaatcgccgaaatgcgtaccggcgaaggcaaaaccctggtcgccaccctcgccgtctatctcaacgcgctggccggcaaaggcgtacacgtcgttaccgtcaacgactacctcgcctcacgcgatgcgggcatcatggaaccgctctataatttcctcggccttaccgtgggcgtgattatttcagatatgcagccgttcgaccgtcaaaacgcctatgccgccgatatcacctacggcaccaataatgaattcggcttcgactacctgcgcgacaatatggttaccgaccaatacgacaaagtgcagcgcgaattgaattttgccgttgtcgatgaagtggattccatcttgattgacgaagcgcgcactccgctgattatctccggccaggcagacgacaacatccagttgtaccaaatcatgaacaccgtcccgccccacctcgtccgccaagagacagaagaaggcgaaggcgactactgggtagatgaaaaggcgcaccaggtcatcctgagcgaagccggccacgaacacgccgagcagattctgacccaaatgggattgctggcagaaaacgactcgctctattctgccgccaacatcgccctgatgcaccaccttatggcggcattgcgcgcgcatacgttattccacaaagaccaacattacgttatccaagacggcgaaatcgtcatcgttgacgaatttacaggccgtctgatgtccggccgccgctggtccgaaggcctgcatcaagccgtggaagccaaagaaggcgtggaaatcaaacgcgaaaaccaaaccctcgcctccatcaccttccaaaactatttccgcctgtacaccaagctctccggcatgaccggcacagccgataccgaagccttcgagttccaaagcatctacaacctcgaaaccgtcatcatcccgaccaaccgccccatacaacgcaaagacttcaacgaccagattttccgttccgccgaagaaaaattcgaagccgtcgtcaaagacatcgaagaatgccacaaacgtgggcagcccgtcctcgtcggcacaaccagcatcgaaaactccgaactggtctcccatcttttgcaaaaagccggtctaccgcacaacgtcctcaacgccaaagaacacgaacgcgaagccctgattgtcgcccaagctggcaaagtcggcgcgattaccgttgccaccaatatggcgggacgcggtacggacatcgttttaggcggcaacctgaagcaccaaaccgatgccatccgtgccgacgaaaccttgagcgacgaagagaaacaggcacaaatcgccgcactcgaaaacggctggcaggcagaacacgataaagtaatggaagcaggcggcctgcacatcatcggtacggaacgccacgaaagccgccgtatcgacaaccaattgcgcggacgttccggccgtcagggcgaccccggatccagccgtttctacctttcgtttgaagacccgctgctgcgcttattcgcactcgaccgcgccgccgccatcctcaaccgtctcgcccccgaacgcggcgttgccatcgaacacaacctgctgacgcgccaaatcgaaggggcgcaacgcaaagtcgaaggcagaaacttcgatatgcgcaaacaggttttggaatacgacgacgttgccaacgaacagcgcaaagtcatttacagccagcgcaacgaaattctgaccagcaaagacatcagcgacctgatgcaggaaatccgttctgatgtcgtcagcgacctcgtggatacctatatgccgcccgacagcatggaagaacaatgggacatcccgactttggagaaccgtctggctgccgaattcagactgcacgaagacatccaatcctggctgaaggcggacaatgcgattgacggtcaagacatcaaagaacgcctgatcgaacgcatcgaaaacgaatatgccgccaaaaccgaactggtcggcaagcaggcaatggccgatttcgagcgcaacgtgatgttgcaggtcatcgacaaccaatggcgcgaacacctcgccgctatggactacctgcgacaaggcatacacctgcgcagctatgcccaaaaaaatccgaagcaggaatataaacgtgaagcctttaccatgttccaagacctgtggaacggcatcaaattccatattgcctccctgcttacctcggttcaaatcgaacaaaaccctgtcgcggtggttgaagagcaacccatcggcaacatccagtccatccattccgaatcgcccgatatggaagaacttttgggtcagtcgcaaaccgatctggttaccgaagcctttaatcccgatgggacggatttcagccccgaagccttggaagcgcggggacaaatcgtccaccgcaacgacccctgcccctgcggcagcggtttgaaatacaaacaatgccacggcaaactggcttga

SEQ ID NO: 58333 - DNA, 1239 bp, Neisseria meningitidis
atggctttttatgcttttaaggcgatgcgtgcggccgcgttggctgccgccgttgcattggtactgtcgtcttgcggtaaaggcggagacgcggcgcagggcgggcagcctgctggtcgggaagcccctgcgcccgtcgtcggtgtcgtaaccgtccatccgcaaaccgtcgcattgaccgtcgagttgccggggcgtttggaatcgctgcgtaccgccgatgtccgcgcccaagtcggcggcatcatccaaaaacgcctgttccaagaaggcagttatgtccgtgccggacagccgctgtatcagatcgacagttccacttatgaagcaggtctggaaagtgcgcgtgcgcaactggcaacggctcaggcaacgcttgccaaagcggatgcggatttggcgcggtacaagcctttggttgccgccgaagccgtcagccggcaggaatacgatgctgcggtaacggcgaaacgttctgccgaggcaggtgtcaaagcagcacaggcggcgatcaaatctgccggcatcaatctgaaccgttcgcgcattaccgcgccgatttccggctttatcggtcagtccaaagtttccgaaggtacgctgttgaatgcgggcgatacgaccgtgctggcaaccatccgccaaaccaatccgatgtatgtgaacgttacccagtctgcatccgaagtgatgaaattgcgccgtcagatagccgaaggcaaactgctggcggcggatggtgtgattgcggtcggcatcaaatttgacgacggcacagtttaccctgaaaaaggccgtctgctgtttgccgatccgaccgtcaacgaatcgaccggtcagattaccctgcgcgccgccgtaccgaacgatcagaatatcctgatgcccggcctgtatgtgcgcgtgctgatggaccaagtggcggtggataacgcattcatcgtgccgcagcaggcggtaacgcgcggtgcgaaagataccgtgatgattgtgaatgcccaaggcggtatggaaccccgcgaggtaacggtcgcgcaacagcagggtacgaattggattgttacgtcgggtctgaaggacggggacaaggtggttgtggaaggcatcagtatcgccggtataacgggtgcgaaaaaggtaacgcccaaagaatgggcgccgtctgaaaaccaagccgccgcgcctcaagctgacgttcagacggcatctgaagccaaaactgcttctgaagcggaataa

SEQ ID NO: 58334 - DNA, 1116 bp, Neisseria meningitidis
atgaaagtaggtttcgtcggctggcgcggcatggtcggctctgttttgatgcagcgtatgcaagaagaaaacgacttcgcccatattcccgaagcgtttttctttaccacttccaacgtcggcggcgcagcccctgatttcggtcaggcagccaaaacattgttggatgccaacgatgttgccgaattggcaaaaatggacatcatcgttacctgccaaggcggcgattacaccaaatccgtgttccaagccctgcgcgacagcggctggaacggctactggattgacgcggcgtcctcactgcgtatgaaagacgatgcgattatcgtcctcgaccccgtcaaccgcaatgtcatcgacaacggcctcaaaaacggcgtgaaaaactacatcggcggcaactgcaccgtctccctgatgctgatggctttgggcggcctgttccaaaacgatttggttgaatgggcaaccagcatgacctaccaagccgcttccggcgcaggtgcgaaaaatatgcgcgaactcatcagcggtatgggcgcggttcacgcccaagtggcggacgagcttgccgatccttccagcgcgattctcgacatcgaccgcaaagtatctgatttcctgcgcagcgaagactatccgaaagccaacttcggcgtaccgctcgccggcagcctgattccgtggattgacgtggatttgggcaacggccagtccaaagaagaatggaaaggcggcgcggaaaccaacaaaatcctcggccgcagcgacaatccaaccgtgattgacggcctgtgcgtccgcatcggctctatgcgctgccacagccaagcccttaccctgaagttgaaaaaagacctgcccatttccgaaatcgaagcgattttggcaggcgcgaacgactgggtgaaagtcatccccaacgaaaaagaagccagcatccgcgagctgacccccgccaaagttaccggcacgctgtccgtccccgtcggacgcatccgcaaactgggtatgggcggcgaatacatcagcgcgttcaccgtcggcgaccagctcttgtggggcgcggccgagccgctgcgccgcgtattgcgtatcgtgttgggcagcctgtaa

SEQ ID NO: 58335 - DNA, 2307 bp, Neisseria meningitidis
atggcgaaaaacctattaatcgtcgaatccccgtccaaagccaaaaccctgaaaaaatatttgggcggcgattttgaaatccttgcatcctacggacacgtccgcgacctcgtccccaaaagcggcgcggtcgatcccgacaacggctttgcgatgaaataccaattgattagccgcaacagcaaacacgtcgatgccatcgttgccggtgccaaagaagctgaaaacatctacctcgccaccgacccggatagggaaggcgaagccatttcctggcatcttttggaaatcctcaaatccaaacgcggcttgaaaaacatcaagccgcagcgtgtcgtgttccacgaaatcaccaaaaacgccgtgctcgatgccgttgcccatccgcgcgaaatcgaaatggacttggtcgatgcacaacaagcccgccgtgctttggactatttggtcggctttaacctttcgccattgttatggaaaaaaatccgccgaggtttgagcgcggggcgtgtgcaaagccctgctttgcgcctgatttgtgagcgcgaaaacgaaatccgcgcgtttgaagcgcaggaatattggacggtgcatctcgacagccacaaaggccgcagcaagttcaccgccaaactcgcccaatacaacggcgcgaaactcgaacaattcgacctgtcgaacgaagccgcgcaagccgacgtattgaaagaactcgaaggcaaagaagccgtcgttaccgccattgaaaagaaaaagcgcagccgcaatcctgccgcgccgttcaccacttctaccatgcagcaggatgccgtgcgcaaactcggcttcaccaccgaccgcaccatgcgtaccgcccaacagctttatgaaggtatagacgtagggcagggcgcgatcggtctgattacctatatgcgtaccgacagcgtgaatttggcggatgaagcgttaaccgaaatccgccattacattgaaaacaaaatcggcaaagaatatctgccgagtgccgccaaacaatacaaaaccaaatccaaaaacgcccaagaagcccacgaagccatccgtccgacttccgtgtaccgcacgcccgaaagcgtcaaacccttcctgagcgcagaccagttcaaactctatcaaatgatttggcagcgtaccgtcgcctgtcagatgacgcctgccaaattcgaccaaaccaccgtcgatattaccgtcggcaaaggcgtattccgcgtaaccggacaagtgcaaaccttcgcaggcttcttgagcgtttatgaagaaagcagcgacgatgaagaaggcgaagacagcaaaaaactgcccgaaatgagcgaaggcgataaattgcccgtggacaaactctacggcgaacaacactttaccactccgccgccgcgctacaacgaagccacgctggttaaagccctcgaagaatacggcatcggccgcccctcgacctacgccagcatcatctccacgctcaaagaccgcgaatacgttacccttgagcaaaaacgcttcatgcccaccgacacaggcgacatcgtcaacaaattcctgaccgaacacttcgcccaatacgtcgattaccacttcaccgccaaactcgaagaccagcttgacgaaattgccgacggcaaacgccaatggattcccttgatggacaaattctggaaaccgttcatcaaacaagtggaagaaaaagaaggcatcgaacgcgccaaatttaccacgcaggaacttgatgaaacctgcccgaaatgcggcgaacacaaactgcaaatcaaattcggcaaaatgggtcgttttgttgcgtgtgccggttatcccgagtgcagctacacgcgcaacgtcaacgaaactgccgaagaagccgccgagcgcatcgccaaagccgaggctgaacaagccgaactcgacggacgcgaatgtcctaaatgtggtggtcgcctagtgtacaaatacagccgaaccggcagcaaattcatcggctgcgccaactaccccaaatgcaaacacgtcgagccgctggaaaaaccgaaagataccggcgtccagtgtccgcaatgcaaaaaaggcaacctcgtcgagcgcaaatcccgctacggcaaactgttttacagttgcagcacctatcccgactgtaactacgccacatggaacccacccgttgcagaaagctgtccaaaatgcgcatggccggttttgaccatcaaaaccaccaaacgctggggtgtagaaaaagtctgcccacaaaaagaatgcggctggaaagaacagattgaaccgcccgcgccgaaggagtaa

SEQ ID NO: 58336 - DNA, 819 bp, Neisseria meningitidis; identical to SEQ ID NO: 50753

SEQ ID NO: 58337 - DNA, 633 bp, Neisseria meningitidis
atggggaatacaaaccgtgtgccggagcaggcacgttatgatgccgaacgcaggcaggcagacgaagcattggcgggcgtgtttccggcagtcagtatcttcggcagcgcgcgcacgccgcagaatcatgcggattatgcgttcgccttccgtctggcgcggcggctgtcggattcgggcattgccgtcatttcgggcggcgggccggggattatggaggcggcaaacaagggcgcgtttgcagggaagtcggtttcggtggggctgaacatcgttttgccgcacgagcagaaaccgaatccgtatcaggacatcgccttgcggttttcccgttttgccgaacgcaaggcggtgtttttccgctattcccaagcatatgtcgtgatgccgggcggcttcgggacgctggacgaattgtttgaaatcctgaccttggtacagacgggcaaagtgccgccgcgtccgattgttttggtcggaaaggcgttttggtcgggcttggcggagtggataaacgcgcagcttttggcgcgcggtctgatttccgaaggggcagcctctttgttcgccatatcggacgatgaagacgaaatcgttgcgtatctgtcggaacacgggcttcagacggcatag

SEQ ID NO: 58338 - DNA, 1854 bp, Neisseria meningitidis; identical to SEQ ID NO: 42349

SEQ ID NO: 58339 - DNA, 384 bp, Neisseria meningitidis
atgactttcgcctattggtgcatcctgattgcctgcttattgccgcttttttgtgcagcgtatgccaaaaaaaccggcggattccgcttcagcgacaatcatcatccccgtgattttctggcgcgtacccaaggtgccgctgcccgtgcccatgccgcgcagcaaaacagttttgaagcatttgcaccatttgcagccgccgttttgacggcacacgcaaccggcaatgccggacaagcaaccgtcaacacgcttgccggcctgttcatcctgttccgcctcgcctttatctggtgctacatcgcagacaaagcagcattgcgctcgctgatgtgggcgggcggatttgcctgcaccgtcgggctgtttgtcgcggctgcttga

SEQ ID NO: 58340 - DNA, 3486 bp, Neisseria meningitidis
atgcgcctgacccatatcaaactctccggcttcaaatcttttaccgacccgaccacgattcatgtgccggggcagcttgtcgcggttatcgggccgaacggctgcggcaagtcgaatgtgattgacgcggtgcgctgggtgttgggtgaggcttcggcgaagcagcttcgcggcgagagtatgcaggacgtgatttttaacggtgcggcaacgcgccgtcctgcgccaagagcttcggtggagctggtgtttgacaacagcggccacagtttgcagggcgcgtgggggcagtatgccgaggtgagcatcaagcggcagctgacgcggcagggcgaatcgacttatttcatcaacaatcagaccgtgcgccgccgcgatattactgatttgtttctgggtacgggcgtgggcgcgcgcggttatgccgttatcgagcaggggatgatttcgcgcatcatcgaagcgcggccggaggagttgcgcgcttatatcgaggaggcggcgggtgtgtccaaatataaggaacgccgcaaggagacggaaggctgtctgaaagacacgcgcgagcatttgcagcgtttgggcgatttgcagaacgaattggcgcgtcaggtggaaaagctggagaaacaggcggaaaccgccgaacgctataaatccctgaccgcgcagttgaatcaacaacaggatttgctcgattacgcccaatggcagcaatcgcttgccgccgccgacaaagcgaccgcgcagcatcagtctttgcaggcgcagcaggacgaaaccgccgcgcaggttcaggcgttaaacgacgaagtacacgccttgcagaccgccgaacagtcgcagcagcaggcggtacacgaactgggcaacaaacgcggcgtgttgcgcgagcagattgcccgtttggaagaacaaatccgccatcagcaaaacctgcatcaacgcatcgaacgcgacaagcaggcggcgcaggcgcagttacaacgcattcatcaagagcagcagcaaatccgcgtgcagcttgaagaaaacgagttgcaggtcgaagaaaaacaaaccgagctggcggaatgggcgatgcaggttgccgaacacgaagagcgtctgcccgaattggaagaagcccaagccacgctcaatgccgccttccaaacccagcaggacgaggcaaaccgcatccgccgcgaactggcgttgaagcagcagcagcttgcccatgccgaacaaaccgttgccaagcacgaagagcgcaaaggtcgtctgaaacaggaaaaccaagccctgaacctgcccgacgaagccgaaaccgccgccgcgcaggaagccgccgccttgttgcaaagccagcaagagcattacgaagaacaaatcatcgccgccgaagaagctctacacgccgcccgcgaggcgtttcagacggcatcaaaccgcttccaaagcctgaagcagcaacacatcaccttgcaggcgcagcagcaggcgttgtcgcaaatcctgtcgcaacagcaggaagccgccgacttctggcaggcaaccgaccacgccgccgcgccgcagctgtggcaacacatcaccgcgcctgccgagtggcagcacgccttgtccgtcatccttgcagaacgcctgcacgcccgcgccgtgccgcaaggtttcgtaccgcccgaacctttgccgcaggggcaggcggcgtggctttcagacggtctctccggcggcatcaaaaaatccctgcccgtacaggcattgctgaaccaaatccaagcgcagccgccgtttcagacggcattgcactactggctcgacggcgtattgtgcgcgcccgatttgagctatgccctcgcgcatcaaaacgatttgggcgcacaccaaatctggctcacgcccgaaggtcatcaggtcgataaagtcagcgtcctgctctatgccaaacccgcgcaggaaagcctgattgcccaaaaagcgcgcctcgacggcatcgcgtccgaactggaaaacctcgcccccgaactttccgccgccgaagccgcgttcaaacaggcggaagctgccgtgcgctcgtctgaagtgcaacataaaaacctgatgcagcagcaacagcagcacacgcgccaatacagtcaggcgcagcaacgcgccgccgaactcttagcgcgtaccaaccaagggcaaatccgccgcgaacacatcgagcgcgaactggcgcagttggcggaagaacagaccgtgttgcaacacacgtccgacgggctttcagacgacatcgttaccttgcaggaagccgccgccgaactcgaacaccagcagcaaaccaccgcgcacagccgccaagagcagcaaggccgtctgaaacaggcgcagcttgccctgttggaagccaaccgccaatatgggcttgccgaagtcgccgtccacaaactcaaccagcaaaaacaaaactaccggcagcaaatcgcccagcttgaacagcaaaccctcgactggcaggaacgccagcaagagcttgccctcgcctatgaaaccgagttccaaaacgacgagcagcacatcaagcttgaagaattaagcgaagccgtacagaccttggacgaagaatatattgttgtgcaagagaaactcgcgcagattcaggcgcagggcagggagcaatacgcccgagtacaagccctgcaaacccagttgccacagcttcaggcagccacccaaaccgccctgttgcagcagcaggaagccctgattaacgccaaacgctaccatcaaaacctgaccgaacgtgccgccgatttggacgcgctcgaagcgttggcgaaagaatcgccgaaagtattgaacagcagcatcggcagcctttcgcaacaaatcgaagcactcggcgcggtcaacctcgccgccctgcaagaactcgaagaagcgcgcgaacgcgacggctactaccgcagccagagcgaagacgtgcaggccgccattacgcttttggaagaagccatcgcccaaatcgacgacaaaaccaaagcgcgtttcaaagaaaccttcgatgccgtcaacggcaaagtccaaactttcttcccgaccctgttcggcggcggcgaagccaccctcaaaatgataggcgacgacctcctgaccgccggcgtgtccattatggcgcgtccgcccggcaagaaaaacagcaccatccacctcctttccggcggcgaaaaagccctcaccgccatgagcctcgtgttcgccctgttcagcctcaatcctgctccgttctgccttttggacgaagtcgacgctccgttggacgatgccaacacctcgcgtttctgcaacctggtcaaagaaatgtcggcgcaaacccagttcctctacatctcccacaaccgcctgaccatggaaatggcggagcagctcgtcggtgtaaccatgcaggaaaaaggcgtgtcgcgcgtcgtcgccgtggacatcaaacaagcgttggaaatggcggaatccgtttga

SEQ ID NO: 58341 - DNA, 2526 bp, Neisseria meningitidis
ttgaaaaacaacagacaaatcaaactgattgccgcctccgtcgcagttgccgcatcctttcaggcacatgctggactgggcggactgaatatccagtccaaccttgacgaacccttttccggcagcattaccgtaaccggcgaagaagccaaagccctgctaggcggcggcagcgttaccgtttccgaaaaaggcctgaccgccaaagtccacaagttgggcgacaaagccgtcattgccgtttcttccgaacaggcagtccgcgatcccgtcctggtgttccgcatcggcgcaggcgcacaggtacgcgaatacaccgccatcctcgatcctgtcggctactcgcccaaaaccaaatctgcactttcagacggcaagacacaccgcaaaaccgctccgacagcagagtcccaagaaaatcaaaacgccaaagccctccgcaaaaccgataaaaaagacagcgcgaacgcagccgtcaaaccggcatacaacggcaaaacccataccgtccgcaaaggcgaaacggtcaaacagattgccgccgccatccgcccgaaacacctgacgctcgaacaggttgccgatgcgctgctgaaggcaaacccaaatgtttccgcacacggcagactgcgtgcgggcagcgtgcttcacattccgaatctgaacaggatcaaagcggaacaacccaaaccgcaaacggcgaaacccaaagccgaaaccgcatccatgccgtccgaaccgtccaaacaggcaacggtagagaaaccggttgaaaaacctgaagcaaaagttgccgcgcccgaagcaaaagcggaaaaaccggccgttcgacccgaacctgtacccgctgcaaatactgccgcatcggaaaccgctgccgaatccgccccccaagaagccgccgcttctgccatcgacacgccgaccgacgaaaccggtaacgccgtttccgaacctgtcgaacaggtttctgccgaagaagaaaccgaaagcggactgtttgacggtctgttcggcggttcgtacaccttgctgcttgccggcggaggcgcggcattaatcgccctgctgctgcttttgcgccttgcccaatccaaacgcgcgcgccgtaccgaagaatccgtccctgaggaagagcctgaccttgacgacgcggcagacgacggcatagaaatcacctttgccgaagtcaaaactccggcaacgcccgaacccgctccgaaaaacgatgtaaacgacacacttgccttagatggggaatctgaagaagagttatcggcaaaacaaacgttcgatgtcgaaaccgatacgccttccaaccgcatcgacttggatttcgacagcctggcagccgcgcaaaacggcattttatccggcgcacttacgcaggatgaagaaacccaaaaacgcgcggatgccgattggaacgccatcgaatccacagacagcgtgtacgagcccgagaccttcaacccgtacaaccctgtcgaaatcgtcatcgacacgcccgaaccggaatctgtcgcccaaactgccgaaaacaaaccggaaaccgtcgataccgatttctccgacaacctgccctcaaacaaccatatcggcacagaagaaacagcttccgcaaaacctgcctcaccctccggactggcaggcttcctgaaggcttcctcgcccgaaaccatcttggaaaaaacagttgccgaagtccaaacaccggaagagttgcacgatttcctgaaagtgtacgaaaccgatgccgtcgcggaaactgcgcctgaaacgcccgatttcaacgccgccgcagacgatttgtccgcattgcttcaacctgccgaagcaccgtccgttgaggaaaatataacggaaaccgttgccgaaacacccgacttcaacgccaccgcagacgatttgtccgcattacttcaaccttctaaagtacctgccgttgaggaaaatgcagcggaaaccgttgccgatgatttgtccgcactgttgcaacctgctgaagcaccggccgttgaggaaaatgtaacggaaaccgttgccgaaacacccgatttcaacgccaccgcagacgatttgtccgcattacttcaaccttctgaagcacctgccgttgaggaaaatgcagcggaaaccgttgccgatgatttgtccgcactgttgcaacctgctgaagcaccggccgttgaggaaaatgcagcggaaatcactttggaaacgcctgattccaacacctctgaggcagacgctttgcccgacttcctgaaagacggcgaggaggaaacggtagattggagcatctacctctcggaagaaaatatcccaaataatgcagataccagtttcccttcggaatctgtaggttctgacgcgccttccgaagcgaaatacgaccttgccgaaatgtatctcgaaatcggcgaccgcgatgccgctgccgagacagtgcagaaattgctggaagaagcggaaggcgacgtactcaaacgtgcccaagcattggcgcaggaattgggtatttga

SEQ ID NO: 58342 - DNA, 552 bp, Neisseria meningitidis; identical to SEQ ID NO: 37351

SEQ ID NO: 58343 - DNA, 1113 bp, Neisseria meningitidis
atgaccgcaaaggaagaactgttcgcatggctgcgccatatgaacaaaaacaaaggttccgacctgtttgtgacgacccatttcccgcccgcaatgaagctggacggcaaaatcacccgcatcacggacgaaccgctgacggcggaaaaatgtatggaaatcgccttttcgattatgagtgcgaagcaggcggaagaattttcatcgaccaacgagtgcaacttcgccatcagcctgccggacaccagccgcttccgcgtcaatgcgatgatacagcgcggcgcgacggcgttggtattccgtgcgattaccagcaagattcccaagtttgaaagcctgaacctgccgccggtcttgaaggatgtcgcgctgaaaaaacgcgggctggttatttttgtcggcggcaccggctcgggcaaatcgacttcgcttgcctcgcttatcgattaccgcaatgaaaattcgttcggacatatcatcaccatcgaagacccgatcgagtttgtccacgaacacaaaaactgcatcatcacccagcgcgaggtcggcgtggatacggaaaactggatggcggcgttgaaaaacacgctgcgtcaggcgccggatgtgattctgatcggcgaaatccgcgaccgcgaaacgatggactacgccattgcctttgccgaaacggggcatttgtgtatggcgacgctgcacgccaacagcaccaatcaggcactcgaccgcatcatcaactttttccccgaggagcggcgcgaacaattgctgacggatttgtcgctcaaccttcaggcgtttatttcgcaacgcctcgttccgcgagacggcggcaagggcagggtggcggcagtcgaggtgctgctcaattcgcccctgatttcggagttgattcacaacggcaacatccatgaaatcaaagaagtgatgaaaaaatccactaccctgggtatgcagaccttcgatcaacacctttaccaattgtatgaaaaaggcgatatttccctgcaagaagcattgaaaaatgccgattccgcacacgatttgcgtttggcggtacagttgcgcagccgccgcgcgcaaagttccagccccgatttggaactgctctga

SEQ ID NO: 58344 - DNA, 390 bp, Neisseria meningitidis
atgtggaaaatcataaaagaggatagtgatgatttaggatttgcaattaaatgcttattctctcagtctattgatttaaatgaattcaagttatggattgaacaagtaatacgcgatatgcccattgaggacatccctttttatatttttgatttggcggatttggatgaagaaattgataatatttacaatatcataggttttgtttcgagttacagcttatcaaaattgagaagaaatgccttaacaggcattgccttcttaagggggatagatgtctatgaccctcccgtttcaaaagaaaaagcattaaaagccttagagaaatatcctgaaatttatcagaaatttcagcatttctttccgtttgtagagctgccgccgctttaa

SEQ ID NO: 58345 - DNA, 915 bp, Neisseria meningitidis
atgcagaattttggcaaagtggccgtattgatgggcggtttttccagcgaacgagaaatctcgctggacagcggcaccgccattttgaatgctttaaaaagcaaaggcatagacgcatatgccttcgatcctaaagaaaccccattgtctgaattgaaggcacaaggttttcagacggcattcaacatccttcacggtacttacggcgaagacggggcggttcagggtgcattggaactgttgggcattccctataccggcagcggtgtcgccgcatccgccatcggcatggacaaataccgctgcaaactgatttggcaggcattgggactgcccgttcccgagttcgccgtcctgcacgacgacactgatttcgatgccgtcgaagaaaaattgggcctgccgatgtttgtgaaaccggcggccgaaggcagcagcgtaggcgtggtaaaagtcaaaggaaaaggccgtctgaaaagcgtttacgaagaattgaaacaccttcagggcgaaatcattgccgaacgttttatcggcggcggcgaatattcctgccccgtcctgaacggcaaagggctgcccggcatacacatcattcccgcaaccgagttttatgactacgaagccaagtacaaccgcaacgacaccatttatcaatgtccttcggaagatctgaccgaagccgaagaaagcctgatgcgcgaactggcggttcgcggcgcgcaggcaatcggtgcggaaagctgcgtgcgcgtcgatttcctcaaagataccgacggcaaactctatctgttggaaatcaacaccctgcccggtatgacgagccatagtttagtaccgaaatccgctgccgttacgggcgtgggttttgccgatttatgtattgaaattttgaagaccgcacatgtgggataa

SEQ ID NO: 58346 - DNA, 1920 bp, Neisseria meningitidis
atgattgaaatcaaaaacctcaccctgcaacgcggtttgaaagtcctgctcgacaaagccaacgctaccgtcaatcccggtcagcgcgtcggtttgatcggcaaaaacggaacgggcaaatcgagcctgtttgccttaatcaagggtgaaatcactcaggacggcggcgatgtctcgattccgaaaaactggcggctcgcttccgtttcccaagaaacgcccgatttggatatttccgctttggattacgttttgcagggcgatgccgagttgcaggcttttcagacggcattgaggcaggcagaagcgcaaaatgacggcatgaagcaggcggaatatcatgctaaattggaagaaatcgacgcttataccgcgccggcgcgtgcggcaaaattgttgaacgggctgggtttttcgcaagaagaacacagccgccccgtcaaatccttttccggcggctggcgtatgcgcctgaatcttgcgcaagccctgatttgccgcgccgatttgctcttgcttgacgaaccgaccaaccacttggatttggaaaccgtcttgtggctggaaaaccaccttgcttctttaccctgcacgcaaatcatcatttcccatgaccgcgattttctcaacgcggcaactacccaaaccattgaattatcgcagcaaaaactcacgcaatacggcggcaattacgatttttaccaaaacgaacgtgcgcagcgtctcgcgcaacaacaagctgcctatgtcaaacagcaggcgcaaatcaaacatttgcaatcctttatcgaccgcttcaaagccaaagccaccaaagccgttcaagcgcaaagccgcatgaaggctttggcgaagctcgaacgcatcgctcccgcgcatctggacagcgagttttcctttgagttttaccatcccgaccatctgcccaatcctttgttaaagctagaacacgctgatttgggttacgaaggcaaaactgtcctgcacgacattaccctgtcgctggaaagcggcgcacgctacgggctattgggtgtcaacggcagcggcaaatccacctttatcaaagccttggcaggcaaaatcgatttgctttccggcagcatcatccgttccgaaaaactcaatatcggctattttgcccaacaccaactcgacaccatccgcgccgaccaaaaccctgtttggcatattcagcagctttctcccgaagtacgcgaacaagaaatccgaaatttcctcggcggcttcaattttgttggcgatatggcgttacagaaaaccgaacctttttccggcggagaaaaagcccgccttgcccttgccatgattatctggcaaaagccgaacctgttgctgcttgacgaaccgaccaaccatttggacttggatatgcgccacgccttaacgctcgcgttgcaaagtttccaaggcgccttaatcatcgtatcgcacgaccgcagcctgcttgaagcgactaccgacagcttcctcctgatcgacaaaggccgtctgaagaacttcgacggcgatttgaacgattaccgccaatggcgtttggcacaggaaaacgccgccgcaccagcagcatccgcacaaagccaaagccgcaaagacaccaagcgcatcgaagcgcaaatccgtcaggaaaaagcccgacgcggcaagccgatacagcagaaaatagaccgtgccgaaaaagaaatggcgcagctttccgaaattcagacggcatgtgaagcatttttagcacaagaagacgcttaccttgaagcaaacaaagaaaaattgcaaaataccttatccctgctggcaaaagtcaaaacacaacttgcccaaatcgaagaggtttggctggcttgtcaagaagaattggaacggattgaaactgaaatcgagaaacagtttgccgagcgataa

SEQ ID NO: 58347 - DNA, 270 bp, Neisseria meningitidis; identical to SEQ ID NO: 37545

SEQ ID NO: 58348 - DNA, 372 bp, Neisseria meningitidis; identical to SEQ ID NO: 36308

SEQ ID NO: 58349 - DNA, 975 bp, Neisseria meningitidis
gtgcagccggggctttgggcttcagacggcatattttcggaatggcggcattcttgccgtcggcgcggcagccgtatggggaagggaggggatattgtggtcggtaacggcaaaaaatatgccgcaccattgctggtgctgggttgcgtggtgttcggtctgggcagtctgattgtcagatccgtccccgtcggttcgtatgcaatcgcattttggcggttgctgatttcggtgttcgtattttggtttttagcacggtttttcgggcaaaaattcccaaaaaacaggaaaaccgtccgatatgccctgacggcgggcgtgtttctcgctttcgatttggcgttgtggcacgaaagcatacacgcggtcgggccgggtatttccaccctgctcaacagcctgcaaatctttttcttgtcggcaatcggtgttttctttttcggcgagcgtttgagcgggctgaaaaaggcaggcttaatatcggcagttgccggtgtggcgatgattgccggtgcggaattcggctacaacggtaatgcggtttggggattcgtcagcggtttggtgtccgggctgatgcttgccctgtcgatggtgttcgtccgcaagactcatgaagtcgagccggtggcgcttttcccttcaatgatgattttgagtttgggcggcgcggtatcgctggttgttccggcattgctgatggatggcggcgtgctttatccgacgacttggaaagatgcgggtttggtgcttgtgtacggcgtggtgatgcagtgcttcgcgtgggcgatggttgcctatgcgattccgctgctttcgctgtcgctgacggggctgctgcttttgtccgaaccggttgccgccctgttcatcgattatttcgggttgggcaaaccgattgaaggcgtgcagtgggcaggggtggcgctgacgctttcggcaatttacctcggttcgctgaaacagcagtcttaa

SEQ ID NO: 58350 - DNA, 1446 bp, Neisseria meningitidis
atgacccaatacacattgaaacaggcaagcgtcctgttgcagtccaaacagatttccgccgtcgaactggcaagcgcataccttgccgccatcgccgaaaaaaatcccgccctcaacggctatatcaccatcgaccaagataaaacccttgcagaagcccgtgccgccgacgaacgtatcgcgcagggcaacgcctccgcgcttaccggcgtacccgtcgcctacaaggatattttctgccaaaccggctggcgcagcgcgtgcgcttccaaaatgctcgacaacttcatctccccctacaccgccaccgtcgtccaaaacctgctcgacgaaggtatggtaacgctcggccgcaccaatatggatgagttcgctatgggttcgaccaatgaaaactcattctacggtgcagccaaaaacccatggaatcttgagcacgtacccggcggttcgtcaggcggttccgccgccgtcgttgccgcgcgcctcgcccctgccgcgctcggttcggacaccggcggctctatccgccaacccgcatcgcactgcggtatcaccggtatcaaacctacctacggcacggtttcccgcttcggtatggtcgcctacgcctccagcttcgatcaagccggcccgatggcgcaaactgccgaagactgcgcgattctgttaaacgcgatggcaggtttcgacccgaaagactccaccagcctcgagcgcgaaaaagaagactacacccgcgatttgaaccaaccgctcaaaggtttgaaaatcggcctgcccaaagaatatttcggcgaaggcaacagcgccgatgttctgacggcattgcaaaacaccattgatttgctgaaagcccaaggcgcggaattgattgaagtttccctgccgcaaaccaagctgtccattccggcctactatgtcctcgcctccgcagaagccagtaccaacctttcacgttacgacggcgtacgttacggacaccgtgccgcccaattcagcgatttggaagaaatgtacggcaaaacccgcgccgaaggttttggcagcgaagtcaaacgccgcatcatgatcggcacttatgtactgtcgcacggctactacgatgcctactatctcaaagcccaaaaactgcgccgcctcgttgccgatgattttcagacggcatttgcacggtgcgacctcatcctcgcgccgaccgcaccctccgccgcacccaaaatcggagcggatgcttcgccggttgaaacctacttgagcgatatctacaccatcgccgtcaacctcgccggactgcccgcattgaccctgcccgcaggtttcagcggcggcggactgcccatcggtgtacagcttatcggcaactatttctccgaagccaaaatcctcggtgcggcgcatcaaatccaactcaacagcgattggcacggcaaacgacccgaatga

SEQ ID NO: 58351 - DNA, 828 bp, Neisseria meningitidis; identical to SEQ ID NO: 53512

SEQ ID NO: 58352 - DNA, 720 bp, Neisseria meningitidis; identical to SEQ ID NO: 53943

SEQ ID NO: 58353 - DNA, 417 bp, Neisseria meningitidis
ttgaccgatgatgcggtgcgtttggctttacggcaggcggtaatggcggtgcgcgaacggtatccgtttgaaattttggcatgggtgttgatgcccgaccatctgcataccatatggcggctgccggacaatgattctgcttattcggaacgctggcggcaaatcaagcggcacagccaatatttaatcggcggcaatctcaggctttggcaaaaacgcttttgggaatatactatccgcgatgaggccgattttgcctggcattttgattatctgcatttcaatccggtcaaacatggctatgtaggacaaatttccgattgggggttttctacgtttcaccgttatgtcaaacagggtatttatccgcataattggggtggcggcaatgcggacttttctattggatacgattga

SEQ ID NO: 58354 - DNA, 324 bp, Neisseria meningitidis; identical to SEQ ID NO: 43824

SEQ ID NO: 58355 - DNA, 1092 bp, Neisseria meningitidis
atgtcccatatctcccccatccccgaaatcctagccgacatcaaagccggcaaaatggtcatcatcaccgatgccgaagaccgagaaaacgaaggcgacctgctgatggcggcgcaattcgtcacgcccgaagccatcaacttcatgatcaaacacgcgcgcggcttggtctgcctgccgatggacggcgaaatggtcgaaaaactcgggctgccgatgatgacccaaaaaaacggcgcgcaatacggcaccaactttaccgtctccatcgaagccgcacacggcattaccaccggcatttccgccgccgaccgcgccctgactattcaaaccgccgtttccccgaccgctaaacccgaagacatcgtccaacccggtcatatctttccgcttcgcgcccaaaaaggcggcgtactcgtccgcgccggacacaccgaagccggcgtcgacctggcgcaaatgaacgggctgattcctgcctccgttatttgcgaaatcatcaacgacgacggcacgatggcgcgtatgcccgaactgatgaaattcgccgaagaacacaagctcaaaatcggcacgattgccgacctcatcgaataccgcagccgtaccgaaagcctgcttgaagacatgggcaatgcgcctgtacaaaccccgtggggcgagttccaacaacacgtttacgtcgacaaactctccggcgaaacccacctcgccctcgtcaaaggcacgccctccgccgacaccgaaaccctcgtccgcgtccacgaacccttcagcgtcatggacttcatccaagctaacccgcgtcattcatggtcgctgcccaaagcactcgagcgcatccaacaggccgaaagcggcgtagtcatccttctgcaccgcaccgaagacggcgccgccctgctcgaccgcaccctgcccaaaggtgcaaaccaagcctacaaatgggacagcaaaagctacggcataggcgcgcaaatcctcgccggcctcaacgtcaaaaaactgcgcgtcctcgggcagccctcatctttcaccggcctgaccggcttcggtttggaagtcgtcggctttgaagaagcggaaaaataa

SEQ ID NO: 58356 - DNA, 276 bp, Neisseria meningitidis; identical to SEQ ID NO: 51340

SEQ ID NO: 58357 - DNA, 354 bp, Neisseria meningitidis; identical to SEQ ID NO: 42785

SEQ ID NO: 58358 - DNA, 873 bp, Neisseria meningitidis; identical to SEQ ID NO: 50880

SEQ ID NO: 58359 - DNA, 219 bp, Neisseria meningitidis
atggatgcactgtatgtttccgccccattttatttcgatgatgattttcaggtctgttatggcgaacactacaataccgttttccctttgcttgtcccgttgtataaacaggaagcggaattggtggaaaaaaagggttggaatgcttttgagcagtttttgctggataatgaagttgacaacctttcggatatgaataggaaaccgtttgtttggtaa

SEQ ID NO: 58360 - DNA, 1770 bp, Neisseria meningitidis
atgaccgtacagaccaagacaaaaggtttggcgtggcaagaaaaaccgctatccgacaacgaacgtctgaaaaccgaaagcaattttttacgcggcacgattttggacgatttgaaagacccgctcacgggcggcttcaaaggcgacaacttccaactcatccgcttccacggtatgtatgagcaggacgaccgcgacatccgcgccgaacgcgccgaggcaaaactcgagcccttgaaatttatgcttttgcgctgccggctgccgggcgggatcatcaaaccgtcccaatggatagaactggacaaatttgcccgggaaaacagtcattaccgctccatccggctgaccaaccggcaaaccttccaatttcacggcgtgccgaaagccaagttgcagacgatgcaccgcctcttgcacaaactgggtttggattccatcgccacggcggcggatatgaaccgcaacgtgctttgcacgtccaacccgatcgagtccgaactgcaccggcaggcttacgaatacgcgaaaaagatttccgaacacttgctgccgcgcacgcgcggttatctggatgtgtgggtggacggcaaaaaagttcaaagttctgacgacttccttcaagaagacgagccgattttgggcaaaacctatctgccgcgcaaattcaaaaccgcagtcgtcatcccgcccttaaatgatgtggactgctacggcaacgacttggattttgtcgccatttcagacggcaacggacagcttgccggattcaatgttttggcgggcggcgggctttcgatggaacacggcaacaccaaaacctatccgaacatttcactggaactgggtttcgtgcctccggaacacgcgctgaaggccgccgaagcggtggtaaccacgcagcgcgacttcggcaaccgcagcgaccgcaaaaacgcccgcacccgctacaccattcaaaatatgggcttggacaacttccgcgcggaagtcgaacgccgtatgggtatgccgttcgaacccatacgcccgttcaaatttaccgggcgcggcgaccgcatcggctgggtgaaaggcatagacggcaactggcatttgacccttttcatcgaaagcgggcgtttggttgacgaaggcgggaaacagcttctgaccggcgtgttggaaatcgccaaaatccacaaaggcgacttccgcatcaccgccaaccaaaacctcatcgtggcaaatgtacccgaaagaggcaaagcccggatcgaacagctcgcccgctcatacgggctgatacacgacggtgtcagcaaactgcgcgaaaatgcgatgtcgtgcgtttccttcccgacctgcccgctggcaatggcggaagccgaacgcgtgctgccggacttcatcggcgagctggataagattatggcgaaacacggcacgtcggacgactacatcgttacccgcattaccggctgcccgaacggctgcggacgggcgatgttggcggaaatcggactggtcggcaaagccgtcggacgctacaacctccatatcggcggcgaccgtgaaggcgtacgcatcccccgtctttacaaagaaaacatcaccctgcccgaaatccttgccgaattggacgacctgatcggcaaatgggcggcagaacgcaatatcggcgaaggtttcggcgatttcgccatacggacgggcatcgtcaaacccgtattaaatgcacccgttgatttttgggacgcatccaaagccgtcgcgattgcccgcgcctga

SEQ ID NO: 58361 - DNA, 396 bp, Neisseria meningitidis
atgccgtctgatgtcggaatacggcttcagacggcattcaaacggaagttgaacatgaaaaaaatattgtattttctgatttttgttttttctacaagcgtatgggcgggggatgcggaagacaatctgctcagcatccaatccggctatcgtgccttactgcaaaaacaaaacaatctggacggaaaaatcatcgggatgcagtcggatttggaagatgcgcgccggcgtttgcagacggctcaggcagacatcgcccgtttggaagcggaaattcctgcagcaatggcgcaaaaagcccggcaggctgaagagctgaggcaaatcggagtgcgtttggaccatgcttggaatgcggtttacggcgcagggggaacgaaagcgtcggggaattga

SEQ ID NO: 58362 - DNA, 948 bp, Neisseria meningitidis; identical to SEQ ID NO: 50784

SEQ ID NO: 58363 - DNA, 1101 bp, Neisseria meningitidis
atgactgctctgaaaaccaccccatttcatcaagcccatcaagatgcaggcgcgaagctggtcgattttgccggctgggagctgcccatccattatggttcacaaatcgccgaacacgaagccgtgcgcaccgacgccggtatgtttgacgtatcccatatgctcgttaccgacgtagcaggcgcaaatgccaaagcctttttccgcaaattgattgccaacgatgtcgccaagctcgcttttgtcggcaaagccctttattccgctttgctcaacgacaacggcggtgtgattgacgacttaatcgtttaccgcaccaatgaagccgaaacccaataccgcatcgtgtccaacggcgcgacccgcgaaaaagacacggcgcaattccacaaagtcggacaagagttcggtgtcgccttcaatccgcgctacgacctcggcatgctcgccgtacaaggccctaaagccattgaaaaactcctgaccgtcaaacccgaatgggcagatgtcgtccataacctcaaaccgttccaaggcgcggatttgggcaacgactggtttgtcgcccgcaccggctacaccggcgaagacggcgtcgaagtcatcctgcccggcaccgaagccgtcgcattcttcaaagccctgcaacaagccggcgtacagccctgcggcctcggcgcgcgcgacaccctgcgcatggaagccggcatgaacctctacggcaacgatatggacgacgacaccagcccgctcgaagcaggtatgggttggaccgttgacttgaaagacgaaagccgcgacttcgtcggcaaagccgccttgctggcattgaaagaaaaaggcgttgccgtcaaacaggtcggcctgttgctcgaaaaaggcggcatcctgcgcgcgcatatggaagtgttgaccgacaaaggccaaggcgaaaccaccagcggcgtattctccccaagcctgaaacaatccatcgccatcgcgcgcgtaccgaaagattttgacggcgataccgccaaagtgctgatgcgtggcaaagaagtggacgtgcgtgtactgaagctgccgtttgtccgcaacggacagaaacagtttgattga

SEQ ID NO: 58364 - DNA, 1257 bp, Neisseria meningitidis; identical to SEQ ID NO: 51276

SEQ ID NO: 58365 - DNA, 156 bp, Neisseria meningitidis
atgcgcaaagcctgccgcaaccgtccgctgacggaaaatcaaaccaagcgtaaccgatatttgtcgaagacccgttatgtggttgaacaaagcttcggtacgctgcaccgtaaattccgctacgctcgggcagcctatttcggactgattaagtga

SEQ ID NO: 58366 - DNA, 1254 bp, Neisseria meningitidis
atgcagacttatctcgtcggcggtgccgtccgcgattatcttttgggcttgcccgtcaaagaccgcgattgggtggtcgtcggcgcagacgcacaaaccatgctggcgcaaggcttccagccagtcggcaaagactttcccgtgtttctccatcccgaaacacacgaagaatacgccctcgcccgcaccgagcgcaaaaccgccaaaggttacgccggcttcagtttccacaccgacaaagacgttacgctggagcaggatttgatgcgccgcgacctgaccatcaacgcgatggcgcaagatgcggacggcaagattatcgaccctttcggcggacaacgggatttggcggcaggcattttgcgccacgtttccccggccttcgccgaagaccccgtccgcatcctgcgtactgcccgctttgccgcgcgttacaagtttgaaatcgccgaagaaaccataaagctgatgcggcagatggtggaaaacggcgaagcggacgcattggttgccgaacgcgtctggcaggagtttgcgaaaggtttgatggaaaaaaatccgcgcaaaatgattgaagtgttgcgcgaatgcggcgcgctcaaagtcttgctgcccgaagtcaatgccctcttcggcgtgccgcaacgcgccgactaccatcccgaaatcgacagcggcatccataccctgatgacgctgcaacgcgccgccgatatgggtttgagcctgcccgaacgctatgccgccctgctgcacgacttgggcaaagccaaaacaccgtccgacatcctgccgcgccaccacgggcacgacctcgccggtgtcgaacccgtgcgcgaagtcaatcagcggctgcgcgcgccgaaacattgcgccgagcttgccgaattggtttgccgttggcacatcatcttccatcaggttgaaaaactccgcagcaaaaccattatcgacgtattgaaaaaaaccgatgccttccgccgcccagaacgttttcagacggcattgaacgtctgcattgccgacacgcaaggccgtctgaaccgcgaacacacgccctacccgcaacgcgcgcactggctcgccttactcgaagccgccaatcaggcggattcgggcaaaatcgccgccgaatgccgcgcgcagggaaaagcgcaccttatcgccgaacaaatcgaccgggcgcggctggcacaaatcgccccattgcaaaaagcgtttcgagcggcgcaagacaaaacagaaaaacattaa

SEQ ID NO: 58367 - DNA, 1203 bp, Neisseria meningitidis
atgaagaattaccacgcacccgacgagaagggctttttcggcgaacacggcgggctgttcgtgtccgagaccctgattccggctttgcaagagctggcggatgcctataaggcagcgaaaaacgatcctgaattttgggaagcgttccgccatgatttgaaacattatgtcggcaggcccagccccgtttaccatgccgcgcgattgtccgagcatttgggtggcgcgcaaatttggttgaagcgcgaagacttgaaccacaccggcgcgcacaaagtcaacaacaccatcggtcaggcactgttggcaaaacgtatgggtaaaaaacgcgtcatcgccgaaaccggcgcgggtcagcacggcgtggcgagtgccaccgttgccgcacgcttcggtatgacttgcgacgtgtatatgggcgcggacgacatccaacgccaaatgcccaacgtgttccgtatgaaattattgggtgcgaacgtggtcggtgtagaaagcggcagccgcacgctgaaagacgcgatgaacgaagccatgcgcgaatgggtcgcccgcgtggatgacacattctacatcatcggtaccgccgccggccccacgccgtatcccgaaatggtgcgcgatttccaatgcgtgatcggcaacgaagctaaagcgcagatgcaggaagccatcggcagacagcccgacgttgccgttgcctgcgtgggcggcggctccaacgccatcggtttgttctatccctatatcgaagaagaaaacgtacgtttggtcggcgtagaagcaggcggtttgggtgtggatacccctgaccacgccgcaccgattaccagcaaagcccctatcggcgtattgcacggtttccgcagctacctgatgcaggacgaaaacggtcaagtcttgggtacacactctgtttccgcaggcttggattaccccggcatcggcccggaacacagccatctgcacgacatcaagcgcgtcgaatacaccgtcgctaaagacgacgaagcactcgaagcctttgatttgctctgccgcttcgagggaatcatccccgcgctcgaatccagccacgccgttgcttgggcggtgaaaaacgcgccgaaaatgggcaaagaccaagtgattctggtcaacctatccggtcgtggcgacaaagacatcaataccgtcgcgaagctcaaagggattaaactgtaa

SEQ ID NO: 58368 - DNA, 594 bp, Neisseria meningitidis
atggccgacagtatgggcaatctgattggctgggaaaaaacggggcttgttgccggtaagcagtggataaccgcaaaagacgacaaggtgtccgatgtctgcaatgccaacggcgagatgggcgtaatcgggctttacgagcctttctcacacggcacattgacgatacccggtcatccgaactgccgatgcgaggttgtttccgtatcgggtggcgaattgggggaatttgccgaaaaaaaggagcttcgtaaagcggctatgcagtatgcgcgggataactttatcggcaaaagctatgtcaatgaaaacagcgggcatgaactgaaggtaacttggcaaggtgtgaaacacgctacgtcaaaggcaaatcaggcggaattatccatcatgacaaaacttgatgacttattgcgctacgcaaaatatgagggttcttattcggataggaaaggtcatcctaatattattgcagcacataagtatcgtgccgttgccaaggttgggaatgagtctttaaatatcggtgtgattgtaagggaatttccagacgaccataaacattacgaccatttcatcttgaaggatgaataa

SEQ ID NO: 58369 - DNA, 1101 bp, Neisseria meningitidis
atggcaggcaacactttcggacaactcttcaccgtgaccacgttcggcgaaagccacggcgcaggtttgggctgcatcatcgacggctgcccgcccggactggcattaaccgaatcagacatccaagccgacctcgaccggcgcaaacccggcaccagccgccacgttacccaacgccgcgaagccgaccaagtcgaaatcctctccggcgtatttgaaggcaaaaccaccggcacgcccatcgccctcttaatccgcaataccgaccaacgcagcaaagactatggcaacatcgcccaaagtttccgccccggccacgccgactatacctactggcacaaatacggcacgcgcgactaccggggcggcggtaggagttccgcccgcgaaaccgccgcccgcgttgctgccggagccgttgccaaaaaatggttgaaagaaaaattcggcacggaaatcaccgcctacgttacccaagtcggcgaaaaaaaaatccggtttgaaggctgcgaacacatttcccaaaatcctttttttgccgccaaccaaagccaaattgccgagctggaaaactatatggacagtgtgcgcaaatcgttggattccgtcggagcgaagctgcatattgaagccgccaacgtccccgtcggcttgggcgaacccgttttcgaccgcctcgatgccgaaatcgcctacgcgatgatgggcatcaacgccgtaaaaggcgtggaaatcggcgcaggttttgacagcgtaacgcaacgcggcagcgaacacggcgacgaactcaccccgcaaggcttcctgtccaaccactcaggcggcatcctcggcggcatcagcaccggacaagacatctgcgtcaatatcgccatcaaacccaccagctccatcgccactccgcgccgaagcatcgacatcaacggcgaccccgtcgaactcgccacgcacggcaggcacgacccctgcgtcggactgcgcgccgcgccgattgccgaagctatgctggcattggttttaatcgaccacgccctgcgccatcgtgcgcaaaatgcggatgttgccgtggatacgcccgatatcgcccgctcggacaagtaa

SEQ ID NO: 58370 - DNA, 798 bp, Neisseria meningitidis
atgaaccgtctttacccccacccgattatcgcccgtgagggctggccgattattggcggcggtttggctttgagcctgctggtgtcgatatgttgcggctggtggtctttgccgttttgggtgtttaccgtatttgccctgcagtttttccgcgaccctgcgcgtgagattccgcaaaatcctgaagcagtgttgagtccggttgacggccgtatcgtggtggtcgagcgcgcacgcgatccgtatcgtgatgtcgatgctttgaaaatcagtatttttatgaacgtgttcaacgtgcattcgcaaaaatcgcctgccgattgtacggtaacgaaagtggtctataacaaaggcaaattcgtgaatgcggatttggacaaagccagcacggaaaacgaacgtaatgcggtgttggcgactacggcttccggtcgtgaaattacttttgttcaagtggccggtttggtggcgcgccgtattttgtgctacacccaagcaggtgcgaaactgtctcgcggcgaacgctatggctttatccgttttggctcgcgcgtggatatgtatctgcctgtcgatgcgcaggcgcaagtggcgattggcgataaagtaaacggtgtcagcactgtattggcgcgtttgccgctgactgcgccgcaaatcgaatccgagcctgaatctgagcctgctttacaaactgctccggttgaaacagcggcaaacccatctgccgaacaacggcaaattgaagcaacggcggctaagattcaagcggctgtgcaagatgtgttgaaagattaa

SEQ ID NO: 58371 - DNA, 1497 bp, Neisseria meningitidis
atgaccacggaaaaccaagccggcagtccggcatccggaatcggcacgtccgaacaaacaaaagccgcgccgaaagcaaaaaaaacattcgatccgcgagcaagcgtgattcaaatccatcccgaaggcgaacgcatccatcccaaaaaggcggaaggacggttcgccaaactgcgtatcgccgccgtattggcgacgcagtttgtgttttacgtcattccgtggttcaactggagcggcaggcaggctgtcgttttcaatatccccgaacggcatttcttcattttcggattgtcgttgggggtgggcgatttgatttaccttgccttgctgctgatgatttgcgccttcgggctgttttggtggacgacgattgccgggcgactgtggtgcggctattcctgcccgcaaacggtttacaccgaaattatgctgtggatcgacaacctggtcgaaggcgataggaacaaacggctgaaactggaaaaatcgccgtggaatttcactaaaatccgcatcaaagccaccaaatacctgctgattttccttgtctgcgcgtggacgggcatcacgtttgcaggctggtttgtccctatccgccagttcgttcccgatttattcactggagcagcaggcggcggcgcgatgtttgccacagcgttttacggctttatgaccttcttcttcgcccacattatgcgcgaaaaagtatgcctgcatatgtgtccgtatgcacgtttccaaagcgcgatgttcgacaaggacacgctgattgtttcttatgacgcggaacgcggcgaaccgcgcggcgcgcgcaagaaaacggtcaataaggaagaggcgggtttgggcgactgcatcaactgtgcgatgtgcgtccaagtctgccccgtcggcatcgacatccgcaacggtctgcaataccaatgtatcggctgcgccgcctgtatcgacgcgtgcgatgagattatggacaaaatgggctatccgcgcggattaatccgttatacgaccgaaagcgcgctggaacacgaatattctgaaaaagacattaaaaaacggctgctcagaccgcgtgtggcaggttacggcgcggtgttggcgttagttatcattgccttcctggccggtttgtccacgcgcaaaatggtcgaggtcgatattttgaaagaccgtggcgtactggtgcgcgaaaacgccaaaggctggctggaaaacgcatacagcctgcgtatcatcaacaaaagtgaaaaagaacagctcattaccgcaagtgtcaaaggctttgacgaaatcgccctgaccgggctgcccgaaggcggtatcaaggttgccccgcgcgaaacggtaacccttcccgtccaagtgtccaccattccggaatacgcggacaaaggcagccaccctatcgaatttaccttccaataccgcgaaagcggcgcgcccgacggcaagccggtcgtcttggaagaagatgcaacctttatcggagaataa

SEQ ID NO: 58372 - DNA, 942 bp, Neisseria meningitidis; identical to SEQ ID NO: 43207

SEQ ID NO: 58373 - DNA, 1413 bp, Neisseria meningitidis
atgatgccccatattaattttgacacgattccgggcagcatccgcgtgcccgggcagtatattgaatttaacacccgcaatgccgtgcaaggtttgccgcaaaatccgcaaaaggtattgatggttgcacccatgctgaccgcgggcatacagcccgccttagagccggtgcaactatttagcgatgccgaggcggccgatttgttcggacaaggctcgctggcgcatttgatggtgcgccaagcatttgccaacaacccttatttggatttgaccgttatcggtattgccgaccacagcgcaggcgtgcaggcaaccgcaaccgttaccctttccggcacggccaccgcgccgggcgtggtggaaatcacgattggcggcaagcaggtaagcacggccgttaacaccggcgagaccgccgccacagtggcagaccgtctgaaaaccgccatcactgccgccgatgtaaccgttaccgcatccggcagcggcgcagccgttacgctgacggccaaacacaaaggcgagatcggcaacgagagcggcttaaccgtgagcaccggcaataccggcctaacttatcaagccaatgcctttaccggcggtgccaaaaatgcggacattgccacggccttgtccaaagtggcgggcaagcattatcacattatttgcagcccgtttagcgatgacgccaacgccaaagccttgagcaaccatattaccaacgtatccaacgccatcgagcagcgcggctgtatcggcgtattgggtatgagtgcggccttgagcacggccaccaccgctaccggcgaaatcaacgacggccgcatgacctgtgcttggtacaaaggtgcggtagagccaaacggcatcatcgccgcaggttatgcggcggtgttggcctttgaagaagaccctgccaagccgctgaacacgctggaaatcaaagggctggccgttacacctgatgcgcaatggccgctgtttgcagaatgcaacaatgcgctgtacaacggcttgaccccgctcacagtggtcaacaaccgcgtgcagattatgcgtgccgtatccacctataccaagtcggccaacaacaccgacgacccggcactactcgacattaccaccatccgcacgctggattatgtgcgccgcagcgttaaagagcgcattgccctgcgttttccgcgcgacaaattgagcgaccgcctgctgcccaaggttaagagcgagattttggacgtgctgattaagctcgaccaagccgaaatcatcgaaaacgccgaggccaacaaaggcaagctggtggtggcgcgtgcgcaaaacgaccccaaccgtgttaatgccattatccccgccgatgtggtcaacggcctgcacgtctttgccgggcgcattgatttgattttgtaa

SEQ ID NO: 58374 - DNA, 828 bp, Neisseria meningitidis
atgaaactgattgaacaacatcaaatttttggcggttcgcaacaagtttgggcgcatcatgcccaaacgctgcaatgcgaaatgaaatttgccgtctatttgccaaataatccagaaaatcgaccgcttggtgtgatttattggctttccggcttgacgtgtacggaacaaaatttcattaccaaatcaggctttcagcgttatgcggcagaacatcaagtaattgtggtggcccccgataccagccctcgcggagagcaagtgccgaacgatgatgcttacgatttaggacagagtgcaggcttttatttgaatgcgaccgaacagccttgggcggcgaattatcaaatgtatgattacattttgaacgagctgccccgtctgattgagaaacactttcctaccaacggcaaacgttccattatgggacattcaatgggcggacacggcgcattggtattggcgctgcggaatcaggaacgttatcaaagtgtttctaccttttcgcctattttatcgccaagcctcgtgccgtggggagaaaaagcctttactgcttatttagggaaagaccgtgaaaaatggcagcaatatgatgctaactcactcattcaacaaggctataaagtgcaaggtatgcgcatcgatcaaggcttggaagatgagtttttgccgacacaattgcgtaccgaagattttatcgaaacctgccgtgcggcaaaccagccggtcgatgtgcgtttccataaaggctacgatcacagctattacttcatcgccagttttattggcgagcatattgcttatcacgccgcgtttttgaagtaa

SEQ ID NO: 58375 - DNA, 621 bp, Neisseria meningitidis
atgctgaccccgaaaagttgcgatttgttcaatatcccgtttttccagtttgcccagcttaaaaaataccagcctgaaagcattccgcaaatcaaagccgactacaaggaaaactggcagatatggcagcagctgattcagcaggttgccgccgaattgggtgcgccgtttgcgccgccgcacatcgaacgctggtgcaacggctggcaggttcgcgcccatttctttgcctacttcaaatacgaacaatataaaaattccgccgcgattttgtcgatactgctcaaccgccgccgtttgagtgtcagcttggactggcattgctacaaagccgacgtgtcgccgattgcgctgcctgattacaaccgttggttggataattttgatactgaaaaatacgcttctttcgatatgtggcacggcgcggaaagcgaatacgacgactaccgcactgtcgcgcagcaaaatgaatccgaccgaaggttgcaaaacgacgaagatttcttctgcatcggcaaacacatcgaacgcgacgatttgggcaggcaggatgtcgcgaaatggatagcggaaacggtggaagatttgctgccgctttacgaagcgtgtcacggcaaatga

SEQ ID NO: 58376 - DNA, 504 bp, Neisseria meningitidis; identical to SEQ ID NO: 50936

SEQ ID NO: 58377 - DNA, 249 bp, Neisseria meningitidis; identical to SEQ ID NO: 43100

SEQ ID NO: 58378 - DNA, 462 bp, Neisseria meningitidis; identical to SEQ ID NO: 38683

SEQ ID NO: 58379 - DNA, 378 bp, Neisseria meningitidis; identical to SEQ ID NO: 36713

SEQ ID NO: 58380 - DNA, 906 bp, Neisseria meningitidis
atgcttaccttccaacaaatcatcttcaaactgcaaaccttctgggcagacaaaggctgcaccgtcatccaacctttcgacatggaagtcggcgcaggtacttcccaccccgccacctgcttgcgcgcgctcggtcccgagccttggtttgccgcctacgtccaacccagccgccgccctaaagacggccgctacggcgacaaccccaaccgcctgcaacactattatcaattccaagtcgccctcaaacccgcccccgccaatatccaagacctctatctcgactccctgcgcgaattgggcatcgaccccaaagtgcacgatatccgctttgtcgaagacgactgggaaaaccccaccctcggcgcgtggggtttaggctgggaagtctggctcaacggcatggaagtaacccagtttacctatttccaacaagtcggcggcattgactgcacgcccgtactcggcgaaattacctacggcatcgaacgcttggcgatgtacctgcaaggcgtggaaaacgtctatgacctcgtttgggcaaaaacgccggacggcaacaccgtaagctacggcgacgtgtaccaccaaaacgaagtcgagcaatccacctacaacttcgaatacagcgatgccgattggctgctgcgccagttcaacgactacgaagcacaagccaaacgcctgctcgccgttgaaggagcaagccttgcgctgcccgcctacgagctggttctcaaagccgggcatacgttcaacctcttggacgcgcgcggcgcgatttccgttaccgagcgggcaacttatattggacgtattcgtgcattgagccgcgccgtggcgcaaaaatatgtcgaaagccgcgaaaaactgggctttcccttaatgaaggcaaacgccgcctaa

SEQ ID NO: 58381 - DNA, 165 bp, Neisseria meningitidis; identical to SEQ ID NO: 38385

SEQ ID NO: 58382 - DNA, 378 bp, Neisseria meningitidis; identical to SEQ ID NO: 36526

SEQ ID NO: 58383 - DNA, 1251 bp, Neisseria meningitidis
atgtttgttccgctggcaatgcttgcaggtatgttttcctactacgaaaccttccacgaaacggaagcgttgcaggacgacctgctccgtcaggcggcattgtacgtcgcccccgattccaaacccgaaactttgcccgagggcgacggcgatacgcgtattttggtacagatgccgcagcaggaagaccctgttgtcagcctgcctgcgcatctggcggacggtctgcacacgcttcaggcggacggggacgacgattattaccgcgtctatatccgcacgaccgaacagggacggattgccgttatgcaggaaaacgaataccgtgaagatttggcggcggatgcggcgtggcagagcgtgttgccactgctggcggcattgccgctgatgatactgctgaccgtgtggatcacgcatcaggcgatgcgccccgtccgcaaattgtcgcaaagtctcgaacaacgccgaatcaatgacctgtctgctttgagtgtggacaatattcccagtgaaatcagaggtttcgtaaccgccatcaacctgcttttgaaacgtgcggatgaagacatccgccaccgtcagcggtttgtcgccgacgcggcacacgaattgcgtacgccgatgacagccctttcccttcaggcggaacggctcaacaatatgtcgctcccacccgatgcagcgcggcagcctgccgttttgcagcagagcatcaggcgcaacaaacacctgctcgaacagcttttggcactggcgcgttcgcagtcggacgaaacccctctgacgaaaacgacattcggtctgcaaagccgtttccgccaagtgttgcaggaactgatgccgctggctttggaaaaacgtcaggacatcggtgtggcggtcagaggcgatgtcgaagtgtctgccgacgaaacagaaatctatacgctgattaaaacctttgccgataacgcggtacgttacacgccgcctgaaggcaggatagatttgggtttcacggacgaagggaaatatcttgccgtgtgggtggaagataacgggaacggcattcccgaatccgaacgcgcccgcgtcctcgatccgttttaccgtattttgggaatggagcagcaggggacggggctggggctgtccatcgccgacacgcttgccacagaatacggcagatatttggaattgtccgacagccgccggtttgggcgcgggctgctgatacgcgccttgttggacaaggaatccctgaaatag

SEQ ID NO: 58384 - DNA, 1407 bp, Neisseria meningitidis
atgaaactgttccaacgcatcttcgccacattttgcgcggttatcgtctgtgcaatctttgtggcgagtttttctttctggctggtgcagaacacccttgccgaaaaccagttcaaccaacgccgcaccatcgaaaccactttgatgggcagcatcatttccgcattccgggcacgcggggacgcgggtgcgcgcgaaatcctgacggaatggaaagacagccccgtctcatcgggcgtgtacgttatacagggcgacgagaaaaaagatatcctgaaccggtatatcgacagctataccatcgaacgcgcccggcttttcgccgccggacacccgcattccaacctcgtccatatcgaatacgaccgcttcggcgaagaatacctgttcttcaccaaagactgggacaaactccaagcccgccgcctgcccagccccctgttgatccccggcctgccgctcgccccgatttggcacgaactcatcatattgtccttcatcatcgtcgtcggactgctgatggcgtacatcctcgccggcaacattgccaaacccatcagaatcttaggcaacggcatggacagggtggcaaacggagaacttgaaacccgcatctcccaacaggtcgacgaccgcgacgacgaattgtcccatcttgccatccaattcgacaaaatggcggaaaaactcgaaaaactcgttgccaaagaacgccacctgctccaccacgtttcccacgaaatgcgctccccgcttgcccgtatgcaggcaattgtcggactgattcaggcgcagccccaaaaacaggagcaatatctcaaacggctggaaggcgaactgacccgcatggatacgctggccggggaactgttaaccctgtcccgtctcgaaacttccaatatggctttggaaaaagaaagcctgaaactcctgcccttcctgggcaacctagtagaagacaatcaaagcattgcccagaaaaacggacaaacggttaccctgtctgccgacggaaaaatccccgaaaacacaaccatccttgccaacgaaagctacctgtaccgcgccttcgacaacgtcatccgcaacgccgtcaactacagtcccgaaggcagcaccatcctgatcaacatcggacaagaccacaaacactggataatcgacgttaccgacaacggccccggcgtggacgaaatgcagctcccgcacatcttcaccgctttctaccgtgcagactccagtgccaacaaacccggaacaggactggggcttgcattgacccaacatattattgaacagcactgcggcaaaatcatcgccgaaaacatcaaaccgaacgggctgcggatgcgcttcatcctacccaagaaaaaaaccggttccaaaacagaaaaaagtgcgaactga

SEQ ID NO: 58385 - DNA, 621 bp, Neisseria meningitidis
  misc_feature 598, 599, 600, 601, 602: 'n' is a, c, g or t
atgagccacacgcaactgacccaaggcgaacgataccacatccaatacctgtcccgccactgcaccgtcaccgaaatcgccaaacagcttaaccgccacaaaagcaccatcagccgcgaaatcagacggcaccgcacccaagggcagcaatacagcgccgaaaaagcccagcggcaaagccagactatcaaacagcgtaagcgacaaccctataagctcgattcgcagctgattcagcacatcgacacccttatccgccgcaaactcagtcccgaacaagtatgcgcctacctgtgcaaacaccaccagatcacgctccaccacagcaccatttaccgctaccttcgccaagacaaaagcaacggcagcacgttgtggcaacatctcagaatatgcagcaaaccctaccgcaaacgctacggcagcacatggaccagaggcaaagtacccaaccgtgtcggcatagaaaaccgacccgctatcgtcgaccagaaatcccgtatcggcgattgggaagccgacaccattgtcggcaaaggacagaaaagcgcattattgaccttggtcgaacgcgttacccgctacaccatcatctgcnnnnncacacacttaattaattaa

SEQ ID NO: 58386 - DNA, 1470 bp, Neisseria meningitidis
atggaaaaacataatgggacttatcgggatttgcaccgtccggcttcggaatttgcgacgcgggacgaatatttggaacatgaattgcagattatgcaaccaaaacgctggcggcccaacctgccctttcgcgattaccgcttcgagtgggaggatttgattcctgcgatggcgggaacgattggaaaagtggtgatggtgggggcggtggcggcggcgtttgccgcacctttggggctgcctgacagctttgtactggaaaatgtgcgctatgagcttttaatcgccgccgcgtttatcttattggtatcgggcttttttctgcccggcgccaacctgcccggtacgcacgggccgctgattccgatgattcccatcgttgtgtcggcaggcgggcatcctttggcgttcggcatttcgattgcggttttaggtctgctgatggctttatttcgcggcggcagtattatggcgaagctgacaagcaacggcgtatgcggcggattattactctatttgggctttatcggcacgacggggcaggtaaaaaaattgttttcgtgggcaggcggttttaatatgccctacatcgcttttaccgtcattattgtaacgattgtgatgtacgctttgttggagcattggaaaaaacgctggttagccgtgcctttgggatgcttgattgccggtgtggtggcatttgcattgggtgcgccgtttgagtttcacaccgcccccggcctgcctccaatgagtcctgcttattggtggggtgaaaacagcggctggcatctggggttgccgacggcagaaagttttttggttgtctttccatttgcggtattggctgttgcaatgtggtcgcccgattttttaggacatcaagtgttccaaaaaatcagctatccggaaaaaaccgataaggtattgatgaatatagacgacaccatgacaagttgttctgtccgtcaagcagtgggttctattttagggggtgcaaattttacctcttcttggggaacttatatcgtaccggcatcgattgccaaacgccccattccgggcggtgcggttttaacggcggttttatgtattatcgccgggttatggggctatccgatggacttggcgatttggcagccggtattgagcgtagccttggtcgtaggcgtatacttaccgcttttggaagcgggcatggaaatgacgcgcaaaggcaaaaccacccaatccgccgccatcgtggtgttctcttccgccttggtcaatccggttttcggctgggcgttgacgatgctgttggataatttgggcttaatcggctgcaaagagcgcagtgcgcaattaggtttcgccggacgcgtgttgatacccgcagtaggtttcttgatcttgtgtgtggcgatgggtgcggtcgggatgctgcccggtatcccgccgtttttggaacacttcaaatctttgggctag

SEQ ID NO: 58387 - DNA, 474 bp, Neisseria meningitidis; identical to SEQ ID NO: 50616

SEQ ID NO: 58388 - DNA, 2748 bp, Neisseria meningitidis
atgcaacagcaacatttgttccgattaaatattttatgcctgtcgctgatgaccgcgctgcccgtttatgcagaaaatgtgcaagccggacaagcacaggaaaaacagttggataccatacaggtaaaagccaaaaaacagaaaacccgccgcgataacgaagtaaccggtttgggcaaattggtcaaaaccgccgacaccctcagcaaggaacaggtactcgacatccgcgacctgacgcgttacgaccccggcatcgccgtggtcgaacaggggcgcggcgcaagctcgggctactcgatacgcggtatggacaaaaaccgcgtcgccttgacggtggacggcttggcgcaaatacagtcctacaccgcgcaggcggcattgggcgggacgaggacggcgggcagcagcggcgcaatcaatgaaatcgagtatgaaaacgtcaaagctgtcgaaatcagcaaaggctcaaactcggtcgaacaaggcagcggcgcattggcaggctcggtcgcatttcaaaccaaaaccgccgacgatgttatcggggaaggcaggcagtgggggattcagagtaaaaccgcctattccggcaaaaaccgggggcttacccaatccatcgcgctggcggggcgcatcggcggtgcggaggctttgctgatccacacgggtcggcgcgcgggggaaatccgcgcccacgaagatgccggacgcggcgttcagagcttcaacaggctggtgccggttgaggataccaatcagtacgcaaatttcatcgttgaagaagaatgcgaaagcagaaattacgaaacgtgtaaagcgaatccgaaaaaagatgttgtcggcaaagacgaacgtcaaacggtttccacccgagactacacgggtcccaaccgcttcctcgccgatccgctttcatacgaaagccggtcgtggctgttccgcccgggttttcgttttgaaaacaaacggcactacatcggcggcatactcgaacgcacgcaacaaactttcgacacgcgcgatatgacggttccggcattcctgaccaaggcggtttttgatgaaaataaaaaacaggcgggttctttgtccggcaacggcaaatacgcgggcgaccacaaatacggcggtctgtttaccaacggcgaaaacggtgcgctggtgggcgcggaatacggtacgggcgtgttttacgacgagacgcacaccaaaagccgctacggtttggaatatgtctataccaatgccgataaagacacttgggtggattatgcccgcctctcttacgaccggcagggcatcggtttggacaatcattttcagcagacgcactgttctgccgacggttcggacaaaaattgccgtccgagtgccgacaagccgttttcctattacaaatccgaccgcgtgatttacggggaaagccacaggctcttgcaggcggcattcaaaaaatccttcgataccgccaaaatccgccacaacctgagtgtgaatctcggttttgaccgctttggctctaatctccgccatcaggattattattatcaaaacgccaatcgcgcctattcgtcgaaaatacccactcaaaacggcgataaaaaaatcagccccaacggcagccaagacaaaccctattgggtcagcataggcgggggaaatgtggttacggggcaaatctgccgcttgggcaataatacttatacggactgcacgccgcgcagcatcaacggcaaaagctattacgcggcagttcgggacaatgtccgtttgggcaggtgggcggatgtcggcgcgggcttgcgctacgactaccgcagcacgcattcggacgacggcagcgtttccaccggcacgcaccgcaccctgtcctggaacgccggcatcgtcctcaaacctgccaactggctggatttgacttaccgcacttcaaccggcttccgcctgccttcgtttgcggaaatgtacggctggcggtcgggcgataaaataaaagccgtcaaaatcgatccggaaaaatcgttcaacaaagaagccggcatcgtgtttaaaggcgatttcggcaacttggaggcaagttggttcaacaatgcctaccgcgatttgattgtccggggttatgaagcgcaaattaaaaacggcaaagaagaagccaaaggcgacccggcttacctcaatgcccaaagcgcgcggattaccggcatcaatattttgggcaaaatcgattggaacggcgtatgggataaattgcccgaaggttggtattctacatttgcctataatcgtgtccgtgtccgcgacatcaaaaaacgcgcagaccgcaccgatattcaatcacatctgtttgatgccatccaaccttcgcgctatgtcgtcggcttgggctatgaccaaccggaaggcaaatggggtgtgaacggtatgctgacttattccaaagccaaggaaatcacagagttgttgggcagccgggctttgctcaacggcaacagccgcaatacaaaagccaccgcgcgccgtactcgcccttggtatattgtggatgtgtccggttattacacgattaaaaaacactttaccctccgtgcgggcgtgtacaacctcctcaactaccgctatgttacttgggaaaatgtgcggcaaactgccggcggcgcagtcaatcaacacaaaaatgtcggcgtttacaaccgatatgccgcccccggccgcaactacacatttagcttggaaatgaagttttaa

SEQ ID NO: 58389 - DNA, 1749 bp, Neisseria meningitidis; identical to SEQ ID NO: 54378

SEQ ID NO: 58390 - DNA, 861 bp, Neisseria meningitidis
atgtctgatttgtctgtattgtcgccgtttgccgtgcctttggcagcggtgttcgggctgctggtcggcagtttcttaaacgtcgtcatttaccgcgtgccggtcatgatggaacgcggctggacggtatttgccaaaaaacatttaaacctgccgctgaccgaagaggaaagccgtaccttcaacctgatgaaaccggattcctgctgtcccaaatgtcgcgtgccgatacgcgcgcggcagaacatcccgattgtcagctacctgctcctgcgcggcaaatgcgcctcctgccaaaccaaaatcagcatacgctatcccttaatcgaactgctgaccggcgtattgttcgggctggttgcctggcaatacggctggtcttggattacattgggcggtttgatactgaccgcgtttctgatttccctgacctttatcgatgcggacacccaatacctgcccgactcgatgacattacccttgatttggctggggctgatatttaatttggacggcggcttcgtgcctttgcagtctgccgttttaggtgcggttgccggctatggttcgatatggcttttatgcgcggtatataaactgattaaaggcgaaatcggtatgggcaacggagatttcaaactgattgccgcattgggcgcgtggctcggcatatccgcattgcccgtgctgatttttgtttcctcgctgatcggtttggtcgcggcaatcgttatgcgcgtcgccaaggggcagcattttgccttcggccccgcactgacagtttcgggctggataatttttacggcaaacgattccgtatggcgggcggtcaactggtggctgacccatccggtgctgtaa

SEQ ID NO: 58391 - DNA, 1395 bp, Neisseria meningitidis
atgaacaaacaacccctttccctcgccgtcgtcggacacaccaacaccggcaaaacctcgctcctgcgtacccttttgcgcgacagcggtttcggcgaagtcaaaaacgccccatcgaccacgcgtcatgtcgaagaagccgccatcagcgacggcgcagacacgctggttttcctgtacgacacgcccggactcgaagacgcgggcggcgtgctggaatggctggaaaaccatacggacaatcgttcagacggcatcgaacggctgcaacagtttctcggcagccacggcgcgcaccatgatttcaatcaggaagccaaagtcttacggcaagtcttgcaaagcgatatggcaatgtacgtcatcgacgcgcgcgaacccgtcctcgacaaatacagggacgagttgaccatcctttcatggtgtgccaaaccggttatgcccgtgttcaactttaccggcggacagcttcccgaatcgtggacaaccatgctggcgaggagaaacctgcacgttttcgcagggttcgacaccgtcgcctttgattttgaaggcgaactacgcctgtgggaaaacctcgccaccatgttgcccgaacgcagcacacttgaccgcctgacagccatgcgccggcgcgaatggcagcggctggacggcgaagcgcgccgcgaaatcgccgatttcctgctcgatgccgccgccttcaggcaggaagtggacgaaaacgaggataccgccaccgtgctacaaaccatgcaggcggaaatacgccaactcgaacggcagatgcagcagcggctgtttgccctctaccgtttctaccacagcgaaatcgacggcggcgactggatgccgcaagccttccgccaagacccgttcgacagcgaattgctcaaacaatacggcatccgcaccggcacgggcgcggcaaccggcgcactcatcggcttggggctggacatcgccacactcggcggctcgctcggattgggtacggcaatcggcggctttttgggcggcatcctgcccaatacccgcaccatttccgacaaactctccggccgccaaaccttgcacaccgaccctgaaaccctgaccctgctcgccgcccgcgccctcgatttgctccacgtcctgcaaacgcgcggacacgcggcacagtcggatatcgagctgcacagccgcaaagccccgtgggacgccaccagactcccgcccgaactcaacaaagcccgcagtcattggaaatggtcgtcgctcaatacgcaccgccccgaaaccagccgcgccgaacgcgccggatatgtggagaaacttcaaatccgcctgtcgggaaaatatagtgaattaaatttaaatcaggacaaggcggcgagccgcagacagtacaaatag

SEQ ID NO: 58392 - DNA, 486 bp, Neisseria meningitidis; identical to SEQ ID NO: 50357

SEQ ID NO: 58393 - DNA, 912 bp, Neisseria meningitidis
atggttcatattatgtttaatcaggcagcacaagaattgacgactatccgcgatgttttacgttttgcagtcagccgttttaatgaggcagggctcttttttggtcatggaacggataatgcgcatgatgaagcggcttatttgattctgcatactttgaatttgcctttggatatgcttgccccatatcttgatgcaaaactcttggaagctgaaaaagaggaagtgctggcggttattgagcgtcgtgctgtcgaacacattccagccgcttatttgacacaccaggcatggcagggagagtttgatttttatgtagatgaacgcgtgattgtgccgcgctcttttatttatgaattgctgggtgacggacttcgtccttggatagaatacgatgagctggtgcataatgctttggatctttgcaccggaagcggttgccttgccattcagatggcgcatcattatcctgatgcccaaattgatgcggttgatgtgagcttggatgctttggaagtggcagggattaatgtcgaagattatggtttggaagaacgcatccggcttattcatacggatttgtttgaaggattggaaggcacttatgatttgattgtttccaatccgccttatgtggatgcggaatcggttgagttattgcctgaagagtatttgcacgaaccggaattggcattgggcagcggggcggacgggttggatgccaccaggcagattcttctgaatgcggcaaagtttctgaatcccaaaggtgtattgctggtggaaatcgggcataacagggatgtattggaagcagcgtatccggagttgccttttacttggttggaaaccagcgggggcgacggttttgttttcctcttgacgcgcgagcagttattgggtgaagagtga

SEQ ID NO: 58394 - DNA, 2385 bp, Neisseria meningitidis; identical to SEQ ID NO: 42846

SEQ ID NO: 58395 - DNA, 1212 bp, Neisseria meningitidis
atgaaccaactgaaacttgccgtttccggcgcgcagattttatttgtggcattcggcgcaatggtgctggttcccctgctgaccggtctgaatccggctcttgcgcttttgggcgcaggcttgggaacgctgctgttccaaatcacaaccaaacgcaaagtgccgatttttcttggttcttcgtttgcctttatcgcaccgattatctactccgtcggcgaatgggggctgccttccaccatgttcggactgtttgccgccggctttatgtattttgtgtttgccgcgctgatccgttggcgcggactggcagcggtacacaaactgctgcctccggtcgtcatcggccccgtcatcatggtcatcggtctgtctgttgccgtggcggcaagcagcatggcaatgggtcaggcggacggcaaacaggtcatcgactataccgattcgctgattctttccggctttacctttgccgttaccgccatcgtatcggttttcggcagcaggatgatgaagctgattcccatcttgatcggtgtcgcttcgggttatgttttggcactgctgatgggactggtggacacggcaagcattgcacacgcgccctggtttgccgttccccattttgaaacgcctcaggtcaactggcaggcggcactgtttatgctgcccgttgccgtcgcccccgccatcgagcacatcggcggcatcatggcaatcggcaatgtaacggggaaagactacacaaaagacccgggcttggacaaaacccttacgggcgacggtttgggcgtatgcgttgcgggtctgatcggcggcccgccggttacgacctacggcgaagtaacgggtgcggtgatgattaccaaaaacagcaaccccgtcatcatgacttgggcggcggtttttgccgtctgcatggcgtttttcggcaaattcaatgcgtttttggcttccattccgatgccagtaatgggcggcattatgctgctgctgttcggcacgattgcttctttgggcgtgaaaacgctgattgatgccaaagtcgatttgatgctgccgaaaaacctggtcatcgtcagctcggtactgaccacgggcatcggcggcatgacgctcaaattgggcagcttcagctttgccggcgtgggcttgtgcgccgtacttgccattatgttgaacagcctgctgcccgatccgaaagaatcctga

SEQ ID NO: 58396 - DNA, 1422 bp, Neisseria meningitidis
atggacacaaaagaaatcctcggctacgcggcaggctcgatcggcagcgcggttttagccgtcatcatcctgccgctgctgtcgtggtatttccccgccgacgacatcgggcgcatcgtgctgatgcagacggcggcgggactgactgtgtcggtattgtgcctcgggctggatcaggcatacgtccgcgaatactatgccgccgccgacaaagacaccttgttcaaaaccctgttcctgccgccgctgctgtctgccgccgcgatagccgccctgctgctttcccgcccgtccctgccgtctgaaatcctgttttcgctcgacgatgccgccgccggcatcgggctggtgctgtttgaactgagcttcctgcccatccgctttctcttactggttttgcgtatggaagggcgcgcccttgccttttcgtccgcgcaactcgtgtccaagctcgccatcctgctgctgctgccgctgacggtcgggctgctgcactttccggcgaacaccgccgtcctgaccgccgtttacgcgctggcaaaccttgccgccgccgcctttttgctgtttcaaaaccgatgccgtctgaaggccgtccggcgcgcaccgttttcatccgccgtcctgcatcgcggcctgcgctacggcataccgatcgcactaagcagcatcgcctattgggggctggcatccgccgaccgtttgttcctgaaaaaatatgccggcctagaacagctcggcgtttattcgatgggtatttcgttcggcggggcggcattattgttccaaagcatcttttcaacggtctggacaccgtatattttccgcgcaatcgaagcaaacaccccgcccgcccgcctctcggcaacggcagaatccgcctccgccctgcttgccgccgccgtctgcctgaccggcattttctcgcccctcgcctccctcctgctgccggaaaactacgccgccgtccggtttatcgtcgtatcgtgtatgctgccgccgctgttttgcacgctggtagaaatcagcggcatcggtttgaacgtcgtccgaaaaacacgcccgatcgcgctcgccaccttgggcgcgctggcggcaaacctgctgctgctggggcttgccgtaccgtccggcggcgcgcgcggcgcggcggttgcctgtgccgcctcattctggttgttttttgttttcaagacagaaagctcctgtcgcctgtggcagccgctcaaacgcctgccgctttatctgcacacattgttctgcctgacctcctcggcggcctacacctgcttcggcacgccggcaaactatcccctgtttgccggcgtatgggcggcatatctggcaggctgcatcctgcgccaccggaaagatttgcacaaactgtttcattatttgaaaaaacaaggtttcccattatga

SEQ ID NO: 58397 - DNA, 951 bp, Neisseria meningitidis
atgtacttaggaatagacgtttcaaagctcacaatagattgctgtttgattgcagacggtcaaaatcatcaaaagaagtttcagaacaacaaaggaggatttgaacaattaataaattggctacaaagtcataaagtaaacgataagctccattgcgtgtgcgaagcaacaggcacatattacgaagcattagccgaatatctttattcaagatatacaattaccgtagagaatccacgaaagataaaaggatatgcgatagcagaactacaacgatcaaaaacagatacacaagacgcaaagttgatagcccaatattgccaagaccgaaagcacaaattaaaagcatggaaaccgccgacaaaagaacagaagcaattacaggaaatcgcccgatatttagactatctgaaacagcaacgcgcaacagaaaaagctaaacaacacgaagcacccgactatatcaaatcccatattcaaacaactatttcaaacctgacagcacaaatacagatagtcgaaaagcaattactccagttctacaaagacaatccaagttataacaatctacgcaaaaggctgaaaacaataacaggcataggcgagcaagcgacagcagtattgctatcaacctataaaagacatgaatttaaaaatgcaagacagttcacggcttatctaggcctagaccctagaaaatttcaatcaggaacaagcgtgaacggaaaaagcagaatatcaaaaataggaagttcggaaataaggaaaagcctttatatgcctgcacttgttgcatatcgttgtaatgccttccctgaatttgtagggcgtctgaaaaataaagggaagcatataaaattgatattaattgccatcatgcggaaactggcggtaatagcgtttacgattttgcaaaacggccaagatttccaagtggaaagatataaataa

SEQ ID NO: 58398 - DNA, 1017 bp, Neisseria meningitidis
atgaacacacgtcccttttatttcggacttatatttatcgcgattatcgctatacttgctaactatttaggaaacactgatttttcccatcattatcatatcagtgctttaattattgctatcttgctgggaatggcaatcggcaataccatttatccgcaattttcaacacaagtggaaaaaggcgttttgtttgccaaaggcgcgcttcttcgcactggcattgtgctgtatggtttccgcctcacttttggcgatattgccgatgtaggattaaatgctgtcgtcactgatgcaatcatgctaatttcaaccttcttttttaccgtacttttaggcattcgttatctaaaaatggataaacaattggtttatctcactggggcaggttgcagcatttgcggtgcggcagcagtgatggcggcagagtctgttaccaaagcagaatcccataaagcttcagtggcgattgccatagtggtcattttcgggacgcttgctatttttacttaccccttgttctacacgtggtcacaagatttaattaacgcccatcaattcggtatttatgttggttctagtgtacacgaagtggctcaagtgtatgcgattggggaaaatattgatcctatcgtggcgaatactgccgtcatttccaaaatgatccgagtgatgatgctcgccccctttttattaatgctttcttggttattaacacgtagtgatggggtatcagaaaatacctcacacaaaattacaattccttggtttgctgtactttttattggtgttgccatttttaattcttttgatttattaccaaaagaactcgtgaaattattcgttgaaatcgattctttcttattaatttcatcaatggctgcgcttggcttaacgacgcacgcaagcgcaatcaaaaaggcaggattaaaaccgtttgttttaggaatactaacttatttatggctagtggttggtggatttttagtgaactatggaatatcaaaattaatataa

SEQ ID NO: 58399 - DNA, 258 bp, Neisseria meningitidis
atggtattgttattaattgtaaataaatattggaaggtaaatgatatgaaaaatgaaattcaaaaaatcatggacaaatataatccatggcatgaagatgattttgagtcgtatgaagacattgccaaagatgtatcgctgatgacagataaaacgttcattgaacattatttgttagaagtttattcagaagaaaacggacattttgaccaagagaatgtccatgcaatgatagaagaaattaaaaatgcaatttag

SEQ ID NO: 58400 - DNA, 1422 bp, Neisseria meningitidis; identical to SEQ ID NO: 52856

SEQ ID NO: 58401 - DNA, 2430 bp, Neisseria meningitidis
atgcggttctcaaggtttgagcccaaaggtcgtctgaaacaacaaatacggtttcagacgacctttctttcaacaagccaccacggcaatcagacaaaagcagcacatcgccacatccatgtcggcagtacggccggcacaaccaccatccgcagcggcggggataccaccctcaaaggtgcgcagctcatcggcaaaggcatacaggcagatacgcgcaacctgcatatagaaagtgtacaagatactgaaacctctcagagcaaacagcaaaacggcaatgtccaagttactgtcggttacggattcagtgcaagcggcagttacagccaaagcaaagtcaaagcagaccatgcctccgtaaccgagcaaagcggtatttatgccggagaagacggctatcaaatcaaggtcggaaaccatacagacctcaagggcggtatcatcacctccggcaagagtgccgaagacaaaggaaaaaacctttttcagacggccacccttactgccagcgacattcaaaaccacagccgctacgaaggcaaaagcttcggcataggcggcagtttcgacctgaacggcggctgggacggcacggttaccgacaaacaaggcaggcctaccgacaggataagcctggcagccggctacggcagcgacagcgacagtcaaagcagcatcacaaaaagcggcatcaacacccgcaacatacacatcaccgacgaagcgggacaacttgcccgaacaggcaggactgcaaaagaaaccgaagcgcgtatctacaccggcatcgacaccgaaactgcggatcaacacacaggccgtctgaaaaacagcttcgacaaagacgcggtcgccaaagagatcaacctgcaaagggaagtaacgaaggagttcggcagaaacgccgcccaagccgtagcggccgttgccgacaaactcggtaatacccaaagttacgaacggtatcaggaagcccgaaccctgctggaggccgaactgcaaaacacggacagcaaagccgaaaaagccgccatccgcgcatccctcggccaagtaaacgcctatcttgccgaaaaccaaagccgctacgacacctggaaagaaggcggcataggcaggagcatactgcacggggcggcaggcggactgacgaccggaagcctcggcggcatactggccggcagcggcacttcccttgctgcaccgtatttggacaaagcggcggaaaacctcggtccggcaggcaaagcggcggtcaacgcactgggcggggcggcaatcggctatgcggcgggcgggaatgtcggtacggcggcagtaggggcgaatgtcgattggaacaataggcagctgcatccgaaagaaacacaaatccttaacaaactgtcaaaaggcaaatcggctgaagaacagtaccgcctaaaagccgctgcatgtgcattaacccggtgcgcggaaagcgtacctgacttcgaccctctttataaaggactaaaaaacctccaagatgccggtaaacagtttgtagcggaacaaaacgtattgatgcggacggatgcatttaaatatggaacatggaacagcctgaatgatatacgcagcagttacgaccgtgctgccaccaaaattaagggtgcgggcaatatgggattgggtgcaacgacttttgtcggttcgggtgctataggcggaggtctgtgcagtaccgggattggctgtgcggccggtggacttattgcaacggcaggtatgaccggtggttatacacaggcctcagaaggaagccggcaattgtttggcacttaccagtccgattttggtaaaaaagttgtcctatctttgggtacaccaatagaatacgaatcgccgttagtatctgatgcgaaaaatctagccgtatggggattggaaacgctgattacgcgcaaattgggaaacttggcaacgggtgtgaaaacttccttgactccgaaaactgctgacgtacagcgaaatatcctgtcccaatccgaagtcggtatcaagtggggcaaggggattgaaggacagggaatgccttgggaggattatgtcggtaagggcttgtctgccaatgcaaggttacctaaaaattttaaaacatttgattattttgatcgtggtacaggcacggcaatcagtgccaaaactctggatacgcaaactacggcacgcctgtccaaacccgaacagctttacagtaccatgaaagggtacatcgataagacggcaaatttcaaaagttatgaattatcagaagtaccgttaagggcagacatgatcaaacagcgcgaaatccatctggccatacccgcacaaactaataaggagcaaagattgcagttgcaacgtgtggtagagtatggcaaaagtcaaaacattacagtcaaaattacggagatcgaataa

SEQ ID NO: 58402 - DNA, 1179 bp, Neisseria meningitidis
atgcgaaaaaaacttaccgccctcgtattgtccgcactgccgcttgcggccgttgccgatgtcagcctatacggcgaaatcaaagccggcgtggaaggcaggaactaccagctgcaattgactgaagcacaagccgctaacggtggagcgagcggtcaggtaaaagttactaaggccaaaagccgcatcaggacgaaaatcagtgatttcggctcgtttatcggctttaaggggagtgaggatttgggcgaagggctgaaggctgtttggcagcttgagcaagacgtatccgttgccggcggcggcgcgacccagtggggcaacagggaatcctttatcggcttggcaggcgaattcggtacgctgcgcgccggtcgcgttgcgaatcagtttgacgatgccagccaagccattgatccttgggacagcaacaatgatgtggcttcgcaattgggtattttcaaacgccacgacgatatgccggtttccgtacgctacgattctccggaattttccggtttcagcggcagcgtccaattcgttccggctcaaaacagcaagtccgcctataagccggcttattggactactgtgaataccggtagtgctactactactactttcgttccggctgttgtcggcaagcccggatcggatgtgtattatgccggtctgaattacaaaaatggcggttttgccgggaactatgcctttaaatatgcgagacacgccaatgtcggacgtgatgcttttgagttgttcttgctcggcagcgggagtgatcaagccaaaggtaccgatcccttgaaaaaccatcaggtacaccgcctgacgggcggctatgaggaaggcggcttgaatctcgccttggcggctcagttggatttgtctgaaaatggcgacaaaaccaaaaacagtacgaccgaaattgccgccactgcttcctaccgcttcggtaatgcagttccacgcatcagctatgcccatggtttcgactttatcgaacgcggtaaaaaaggcgaaaataccagctacgatcaaatcatcgccggcgttgattatgatttttccaaacgcacttccgccatcgtgtctggcgcttggctgaaacgcaataccggcatcggcaactacactcaaattaatgccgcctccgtcggtttgcgccacaaattctaa

SEQ ID NO: 58403 - DNA, 303 bp, Neisseria meningitidis; identical to SEQ ID NO: 43286

SEQ ID NO: 58404 - DNA, 1344 bp, Neisseria meningitidis
atgattaaaatcaaaaaaggtctaaacctgcccatcgcgggcagaccggagcaagtcatttatgacgggcccgtcattaccgaagtcgcgttgcttggcgaagaatatgccggtatgcgcccctcgatgaaagtcaaggaaggcgatgccgtcaaaaaaggccaagtgctgtttgaagacaaaaagaatccgggcgtggtgtttaccgcgccggtttcaggcaaaatcgccgccatccatcgcggcgaaaagcgcgtacttcagtcggtcgtgattgccgttgaaggcaacgacgaaatcgagttcgaacgctacgcgcccgaagcgttggcaaacttaagcggcgaagaagtgcgccgcaatctgatccaatccggtttgtggactgcgctgcgtacccgtccgttcagcaaaatccctgccgtcgatgccgagccgttcgccatcttcgtcaatgcgatggacaccaatccgctggctgccgaccctacggtcattatcaaagaagccgccgaggatttcagacgcggcctgttggtgttgagccgtttgaccgaacgcaaaatccatgtttgtaaggcagccggcgcagacgtgccgtctgaaaacgccgccaacatcgaaactcatgaatttggcggcccgcatcctgccggtttgagtggcacgcacattcatttcattgagcctgtcggtgcgaacaaaaccgtttggaccatcaattatcaagatgtaattgccattggccgtttgtttgcaacaggccgtctgaacaccgagcgcgtgattgctttgggtggttctcaagtcaacgaaccacgcctcttgcgtaccgttttgggtgcgaaagtatcgcaaattactgcgggcgaattggttgacgcagacaaccgcgtgatttccggttcggtattgaacggcgcgattacacaaggcgcgcacgattatttgggacgctaccacaatcagatttccgttatcgaagaaggccgcagcaaagagctgttcggctgggttgcgccgcagccggacaaatactccatcacgcgtacgaccctcggccatttcctgaaaaacaaactcttcaagttcacgacagccgtcaacggtggcgaccgcgccatggtgccgattggtacttacgagcgcgtaatgccgctagacatcctgcctaccctgcttttgcgcgatttaatcgtcggcgataccgacagcgcgcaggcattgggttgcttggaattggacgaagaagacctcgctttgtgcagcttcgtctgcccgggcaaatacgaatacggcccgctgttgcgtaaggtgctggaaaccattgagaaggaaggctga

SEQ ID NO: 58405 - DNA, 930 bp, Neisseria meningitidis
atggattccatcatcgaactgcgccacctcaagaccctgctggcacttgaagaaaccggcagcgtctcccttgccgccaaacgggttttccttacccaatctgcactttcccaccaaatccgtatgcttgaaaaccactacggcgcaccgttgttcgaacgaaaatccacgcccttgcgctttaccccggttggagaaaggctgttacgcctcgctcacgacctgttgcctcaagttaccgatgcagaacgtgatttggcacgcattatagaaggagaggcaggagaattgcggattgccgtcgaatgccatacctgtttcgactggctcatgcccgcaatgggcgaattccgcccgatatggccccaaatcgaattggatatcgtatcgggattccaagcggaccctatcggactgctgctgcaacaccgtgccgaccttgccattgtttccgaagcggaaaaacaaaacggtatttctttccaaccgctgtttgcctacgaaatggtcggcatttgcgcaccagaccatccgcttgccgccaaaaacgtttggacggcggaagactttatcggggaaaccctgattacttatcccgttcccgacgagatgctggatttgcccaaaaaaatcctgattccgaaaaacatcaacccgccgcgccgacacagcgaactgaccatcgccattatccaactggttgccagcagacgtggcattgccgcccttccctattggacagtcatgccctaccttgaaaaaggctatgtcgtccaccgccaaattactgccgacggactgcaaagcaaactgtatgccgccatccgtaccgaagatacggacaagagctatctgaacaatttttgccaaatcatacgcgaacgcggttttgcagatttgcccggactgagcgaactggaaccggtctga

SEQ ID NO: 58406 - DNA, 828 bp, Neisseria meningitidis
atggatggagaaggtatgtcggttgggcattatgaaaattttcccgtcggttcgctgattttgccgcgcaggttgaggaagccggttcatgcggtgtatgcgtttgcacggacggcggacgatatggcggacgagggcagtatgccgtctgaagccaggttggcggggttggagggtttgcggcgcgagttggacgtgttggcatcgggcggccggtcggcgcatcctttgattgcacgattggatgccgaggcggttgtgccgttcggtttggatttgcagccgttttatgatttgctttctgcattttctcaggatgtggttaaaacaaggtatggaaatttcggcgagctggccgattattgtcggcgttccgccaaccctgtcggacgcattatgctggctttgtacgggaaaacggatgcggtgtgcgtggcgcaaagcgacggcatttgtacggctttgcaactggtgaatttttggcaggatgtggctgtggattggcaaaagggcagggtttatattccgcaggacgatttgttgaaattcggtgtttccgaaggacagattgcggagggtagggcggatgcggcgtttcagcggctgatggcgtatgagtgtcggcgtgcgttccgtatgctgaaggcaggttcgcctttggcgcgcgaattgaaagggcgtatcggtttggaactccgtatgattgtgttgggggcgcagttgattttgcagaaactggacgcgtgccgatacgatgtgtttgcacaacgccccgttttggataagaaggattggttgattatgctgaaacgcgcgttgtggaaatga

SEQ ID NO: 58407 - DNA, 825 bp, Neisseria meningitidis
atgttgaaaaaaatcgtactcggcggtattgccgcattggttttggcggcctgcggcggttcggaaggcggcagcggagcatcttccgcgcctgcacaatcggcagtttccggttctttaatcgagcgcatcaacaataaaggcacggttaccgtcggcacggaaggcacttacgcaccgtttacctaccacgacaaggacggcaaactgaccggttacgatgtggaagtaacccgcgccgtggcggaaaaactgggcgtgaaagtcgagtttaaagaaacgcaatgggattcgatgatggcgggtttgaaggcggggcgtttcgacgtggtggcaaaccaagtcggtctgaccagccccgaacgccaagcgacattcgacaaatccgatccttacagctggagcggtgccgtattggttgcccgtaacgacagcaacatcaaatctatcgacgacatcaaaggcgtgaaaaccgcacaatccctgaccagcaactacggcgaaaaagccaaagctgcaggcgcagatttggtggctgttgacggtttggcgcaatcgctgaccctgattgaacaaaaacgtgccgatgcaaccctgaacgacgaattggcggttttggactatctgaagaaaaacccgaatgcgggcgtgaaaatcgtttggtccgcacctgccgatgaaaaagtcggttccggcctgattgtcaacaagggcaatgacgaagccgtggcgaaattcagtacggcaatcaacgagctgaaagccgacggcacgttgaaaaaactgggcgaacaattcttcggaaaagacatcagtgttcaataa

SEQ ID NO: 58408 - DNA, 1512 bp, Neisseria meningitidis
atgaaatggttgaaacgcctgacggtcattgtcgggactttttaccgctatcggctggcaggtctgtgtgcttcgctgatgggtagcggttggatatgcgctctgctgaaaatgatgccgcagtcgtccaaattgaaaaacgaaccgcctgctgtccgtctgcgccttgccttggaaagcctggggccgattttcatcaagttcgggcaggtattatctacgcgccccgatttgattccgcacgattacgccgtcgaactggcaaagctgcaagacaaagtgccgccttttgacgcgcggctttcgcgtgaacaaatcgaaaaatcgttgggtcagtccatcgaaaagctgtatgcggaatttgaaaccgagcccatcgccagcgcgtccatcgcccaagtacacaaagcccgcctgcattcgggcgaacgagtggcggttaaagttttgcgccccaaccttttgccccttatcgaacaggatttgtcgctgatgcgtttcggcgcggcctgggtcgaacgcttgttttcagacggcaggcgtctgaagccgctcgaagtggtggcggagttcgacaaatacctgcacgacgagttggatttgatgcgcgaagccgccaatgccggacagctcgggcgcaatttccaaaacagcaatatgctgattgtgcccaaggtgttttacgactactgcaccagcgacgtgctgacaatcgaatggatggacggcacgccggttgccgacatcgccaaactcaaagcagacggcatcgatttgcacaaactcgccgattacggcgtggaaatctttttcacgcaggtcttccgcgacggctttttccacgcggatatgcaccccggcaatattttggttgccgccgacaaccgctacatcgccctcgatttcggcatcgtcggcacgctgaccgattacgacaaacgttatctcgccatcaatttcctcgcctttttcaaccgcgattaccggcgcgtcgccaccgcccacatcgaatcgggctgggtgcctgccgacacgcgtgcggaagaattggaagccgccgtccgcgccgtgtgcgaaccggtgttcaacaaaccgatttcgcagatttccttcggcttggtgctgatgcgcctgtttgaagtcagccgccgcttcaatgtcgaaatccaaccgcagcttgtgctgctgcaaaaaacgctgctcaacatcgaaggcttgggccgccagctcgatcccgatttggacttgtggaaaaccgccaaaccgtttttggtgaaatggatgaacgggcaggtcggccctaaagccctttggcgcaacctcaaaaacgaagcccccgactgggcgcaaatcatcccttcattgccgcgcaaaatcagtgcgttgattgatgaaaaccgccagcaggaaatgcgtgatgcctatatccatttggtcaaagtgcagcagcggcaaagcctgtggctggctgtgattgcggttgttttgctgctgattttgcttttgaaatag

SEQ ID NO: 58409 - DNA, 1338 bp, Neisseria meningitidis
atgactttccaaaacaaaaaaatcctcgtcgccggacttggcggcacgggtatttccatgattgcctacctgcgcaaaaacggcgcggaggttgctgcgtatgatgcggagctgaagccggaacgcgtgtcgcaaatcggtaagatgtttgacgggctggtgttttacacgggccgtctgaaagatgcgctggacaacggtttcgatattctggcgctcagtcccggcatcagcgagcggcagccggatatcgaggcgttcaagcaaaacggcggacgcgtgttgggcgacatcgaattgctggcggacattgtgaaccgccgcggcgacaaggtaattgcgattaccggcagcaacggcaaaaccacggtaacgagcctggtcggctatctctgtatcaagtgcgggctggataccgttatcgcgggcaatatcggcacgccggttttggaggcggaatggcagcgcgaaggcaaaaaggcggacgtgtgggtgttggagctttccagcttccaactggaaaacaccgaaagcctgcgcccgactgcggcgacggtgctgaacatttccgaagaccatctcgaccgctacgacgacttgctcgactacgcgcataccaaagccaagattttccgtggcgatggcgttcaggttttgaattcagacgacgtgttctgccgcgccatgaaacgggcagggcgtgaagtgaaatggttttcgttggaacacgaagccgatttttggttggaacgcgagacaggccgcctgaaacaaggcaatgaagatttgattgccacgcaagatattccgttgcaaggcttgcacaacgccgctaacgtcatggctgccgtggctttgtgtgaggccatcggtttgtcgcgcgaagcattgctcgaacacgtcaaaaccttccaaggcctgccgcaccgcgtggaaaaaatcggcgagaaaaacggcgtggtgtttatcgacgacagcaaaggcacgaatgtcggcgcgactgccgccgcgattgccggtttgcaaaatccgctcttcgtgattttgggcggcatgggtaaagggcaggacttcacgcccctgcgcgatgcactggtaggcaaggcaaaaggcgtgttcttgattggtgtcgatgcgccgcaaatccgccgcgatttggacggctgcggcttgaatatgaccgactgcgccactttgggagaagccgttcagacggcatatgcccaagccgaagcaggcgatattgtgttgctcagccccgcctgcgcgagctttgatatgttcaaaggctacgcgcaccgttcggaagtgtttatcgaagcgtttaaggctttgtga

SEQ ID NO: 58410 - DNA, 1377 bp, Neisseria meningitidis
atgaaacacatccatattatcggtatcggcggcacgtttatgggcgggcttgccgccattgccaaagaagcggggtttgaagtcagcggttgcgacgcgaagatgtatccgccgatgagcacccagctcgaagccttgggtatagacgtgtatgaaggcttcgatgccgctcagttggacgaatttaaagccgacgtttacgttatcggcaatgtcgccaagcgcgggatggatgtggttgaagcgattttgaacctcggcctgccttatatttccggcccgcaatggctgtcggaaaacgtgctgcaccatcattgggtactcggtgtggcggggacgcacggcaaaacgaccaccgcctccatgctcgcatgggtcttggaatatgccggcctcgcgccgggcttccttattggcggcgtaccggaaaatttcggcgtttccgcccgcctgccgcaaacgccgcgccaagacccgaacagccaatcgccgtttttcgtcatcgaagccgacgaatacgacaccgcctttttcgacaaacgttctaaattcgtgcattaccgtccgcgtaccgccgtgttgaacaatctggaattcgaccacgccgacatctttgccgacttgggcgcgatacagacccagttccactacctcgtgcgtaccgtgccgtctgaaggcttaatcgtctgcaacggacggcagcaaagcctgcaagatactttggacaaaggctgctggacgccggtggaaaaattcggcacggaacacggctggcaggccggcgaagccaatgccgacggctcgttcgacgtgttgctcgacggcaaaaccgccggacgcgtcaaatgggatttgatgggcaggcacaaccgcatgaatgcgctcgccgtcattgccgccgcgcgtcatgtcggtgtcggcattcagaccgcctgcgaagccttgggcgcgtttaaaaacgtcaaacgccgcatggaaatcaaaggcacggcaaacggcatcaccgtttacgacgactttgcccaccacccgaccgccatcaaaaccacgattcaaggtttgcgccaacgcgtcggcggcgcgcgcatcctcgccgtcctcgaaccgcgttccaacacgatgaagctgggcacgatgaagtccgccttgcctgcaagcctcaaagaagccgaccaagtgttctgctacgccggcggtgtggactggaacgtcgccgaagcccttgcgcctttgggcggcaggctgcacgtcggtaaagatttcgatgccttcgttgccgaaatcgtgaaaaacgccgaagcaggcgaccatattttggtgatgagcaacggcggtttcggcggaatacacaccaaactgctggacgctttgagatag

SEQ ID NO: 58411 - DNA, 153 bp, Neisseria meningitidis; identical to SEQ ID NO: 43283

SEQ ID NO: 58412 - DNA, 591 bp, Neisseria meningitidis
atgcttttgtttatcgacaattacgacagttttacttacaacatcgtccagtatttcgcagaattggggcaggaagttgccgtgcgccgcaacgatgatattacgttggaggaaatcgaggcattgaatccgcaatatctcgttatcggccccggtccgtgttcgcccaaagaagcggggatttccgtggcggcgatgcgccatttcgccggccggctgccgattatgggcgtgtgcctcgggcatcagacgataggcgaggcgttcggcggcaggatagtccgcgccaaaacgctgatgcacggtaaggtgtcgcccgtgtcccattcgggcaagggtatgtttagggggttgcccaatccggttacctgtacgcgttatcacagcctcgttatcgatcggaatacgatgcccgaatgtttggaagtaacggcttggactgaggacggcgagattatgggtgtgcgccataaggaatatgccgtcgagggcgtgcagttccaccccgaagccctcttgaccgaacacggacatgatatgttaaacaattttttagttgaatttcaaaacttcaaaccgcaaaaaatctga

SEQ ID NO: 58413 - DNA, 546 bp, Neisseria meningitidis; identical to SEQ ID NO: 50561

SEQ ID NO: 58414 - DNA, 330 bp, Neisseria meningitidis; identical to SEQ ID NO: 42495

SEQ ID NO: 58415 - DNA, 1311 bp, Neisseria meningitidis
atgatcgtgcccgacctctttgtcgcccacttccgcgaagccgtcccctacatccgccaaatgcgcggcaaaacgctggtcgccggcatagacgaccgcctgctcgaaggtgataccttaaacaagctcgccgccgacatcgggctgttgtcgcaactgggcatcaggctcgtcctcatccacggcgcgcgccacttcctcgaccgccacgccgccgcgcaaggccgcacgccgcattattgccggggcttgcgcgttaccgacgaaacctcgctcgaacaggcgcagcagtttgccggcaccgtccgcagccgttttgaagccgcattgtgcggcagcgtttccgggttcgcgcgcgcgccttccgtcccgctcgtatcgggcaacttcctgaccgcccgtccgataggtgtgattgacggaaccgatatggaatacgcgggcgttatccgcaaaaccgacaccgccgccctccgtttccaactcgacgcgggcaatatcgtctggctgccgccgctcggacattcctacagcggcaagaccttccatctcgatatgcttcaaaccgccgcctccgtcgccgtctcgcttcaggccgaaaaactcgtttacctgaccctttcagacggcatttcccgccccgacggcacgctcgccgaaaccctctcggcacaggaagcgcaatcgctggcggaacacgccggcggcgaaacgcgacggctgatttcgtccaccgttgccgcgctcgaaggcggcgtgcatcgcgtccaaatcctcaacggtgcctccgacggcagcctgctgcaagaactcttcacccgcaacggcatcggcacatccattgccaaagaagccttcgtctccatccggcaggcgcacagcggcgacatcccgcacatcgccgccctcatccgcccgctggaagaacagggcatcctgctgcaccgcagccgcgaatacctcgaaaaccacatttccgaattttccatcctcgaacacgacggcaacctgtacggttgcgccgccctgaaaacctttgccgaagccgattgcggcgaaatcgcctgccttgccgtctcgccgcaggcacaggacggcggctacggcgaacgcctgcttgcccacattatcgataaggcgcgcagtatgggcataagcaggctgttcgccctctccacaaataccggcgaatggtttgccgaacgcggctttcagacggcatcggaagacgagttgcccgaaacgcggcgcaaagactaccgcagcaacggacgaaactcgcatattctggtacgtcgcctgcaccgctga

SEQ ID NO: 58416 - DNA, 876 bp, Neisseria meningitidis; identical to SEQ ID NO: 41604

SEQ ID NO: 58417 - DNA, 918 bp, Neisseria meningitidis; identical to SEQ ID NO: 50335

SEQ ID NO: 58418 - DNA, 141 bp, Neisseria meningitidis; identical to SEQ ID NO: 42905

SEQ ID NO: 58419 - DNA, 948 bp, Neisseria meningitidis
atgaatatcctcagtaaaatcagcagctttatcggaaaaacattttccctctgggccgcgctctttgccgccgccgcttttttcgcgcccgacaccttcaaatgggcggggccttatattccttggctgttgggcattattatgttcggtatgagtttgacgctcaaaccttccgacttcgatattttgttcaaacatcccaaagccgtcatcatcggcgtaatcgcacaattcgccattatgccggcaaccgcctggctgctgtccaaactgttgaacctgcctgccgaaatcgcggtcggcgtgattttggtcggctgctgcccgggcggtacggcttccaatgtgatggcctatctggcgcgcggcaatatggctttgtcggttgccgttacgtctgtttccaccctgatttccccattgctgactcccgccatcttcctgatgcttgccggtgaaatgctggaaatccaagcggccggtatgttgatgtccatcgtcaaaatggttttgctccccattgttttgggtttgattgtccataaggttttgggcagtaaaaccgaaaagctgaccgatgcgctgccgctggtttccgttgccgccatcgtgctgattatcggcgcggttgttggggcaagcaaaggcaagattatggaaagcggcctgctgatttttgcggttgtcgtactccacaacggcatcggctacctgctcggcttctttgccgccaaatggaccggcctgccttatgatgcacaaaaaacgctgaccatcgaagtcggtatgcaaaactcgggcctggccgccgcgcttgccgccgcacactttgccgccgcgccggtcgttgccgttccgggcgcattgttcagcgtgtggcacaatatctccggctcgctgctggcaacttattgggcggccaaagccggtaaacataaaaaaccctaa

SEQ ID NO: 58420 - DNA, 285 bp, Neisseria meningitidis; identical to SEQ ID NO: 42876

SEQ ID NO: 58421 - DNA, 780 bp, Neisseria meningitidis
atggcagcctcgcccgaagcaaaattcaccgaagaaaagattttgtgggtcaaacaccacacgccgaaactcatcactttcgccatcagccgtcccgaatcctaccgctttaaagccggacagttctcccgactcggtttctacgaaggggaaggctttatttggcgtgcctattccattgtttccgcagaatatgccgacacgctcgaatattttgccgtactcatccaagacggccccatgtcggcccgtttcgccaaaatgcaacagggcaacaccatcctgctcgataaaaatgccaccggcttcctcctgcccgaacgcttccccgacggcaaggatttggtgatgctctgcaccggctcgggcatcgcccccttcctttccattctcgaacaacccgaaatccgtcaacgtttcgataccgtcaacctgatacattccgtatcttttcccgaagaattgattttcaacgaccgactcgccgcattgactgaacatcccctggtaggcgaatacggacactctttccgtttcgtccctgttaccacccgtgccgccaacccctcgggcttaagcggaaaacgcattccggaactcttaaaaaacagcagcatcgaacaggcgctgcataccaagttcaccccggaatccacacggtttatgatttgcggcaacccggaaatggtcaaagatactttccaaacgctgcttgacatgggttacgccatgcaccgcaaccgcattcccggtcaaatcatgatggaaaacggcttctaa

SEQ ID NO: 58422 - DNA, 345 bp, Neisseria meningitidis; identical to SEQ ID NO: 39778

SEQ ID NO: 58423 - DNA, 1098 bp, Neisseria meningitidis; identical to SEQ ID NO: 42788

SEQ ID NO: 58424 - DNA, 936 bp, Neisseria meningitidis; identical to SEQ ID NO: 50208

SEQ ID NO: 58425 - DNA, 372 bp, Neisseria meningitidis; identical to SEQ ID NO: 36794

SEQ ID NO: 58426 - DNA, 1173 bp, Neisseria meningitidis
atgaaacaaattaatcaagcattgcaacaaaaactggttgaatttaaagaaaaatcaggcatgaaccaaacccaactggcacgcggtatcggtacttcgccggcatccatcagtatgtatctgaacggcacttatgcggaaaaaggcggcaattatgaaaccatcgagccgaaaatcgaggcgtttttggagatgcaggacagtaaagcgcaacgcgaagagctggtgttgggttttgtatcgactaagacgacccgccgtattgcagaagtgatgcgcgatgcgcacgaaggcggcgaaacagtggtgatctacggtcaggcgggattgggcaagactcaggcggtcaaaaactactgcgagaaaaaccctgcggccatcttgattgaggctaatccgagctttacggctttggtcttgatgcgcaagttggcgactgcggcgaaggtatcggcgatgggcagcctgaatgatttgtttgagtctgtatctgaccgcctgcgcgattcgggccgtctgattgtggtcgatgaagcggaaaacctgcctttacgcgcccttgaaattgtacgccgtctgcacgacgagactggctgcggcttggtgttgagcggtatgccccgactggtggccaacctgcgcggtaagcatggcgaactggtacagctttacagccgcgtgtctgttgcgctgaatttgggcgaatctttgccggatgacgaactctttgagattgcgaaagcggctttgcctgatgcggtcaagcatctgctccctgatagtgtacaagcgttgattacggtcatcgggtttaatgaaacgctggagctggtgcgcctgatgggcggtacgacttatcctttgcggcagggttatacgaaaaacagtcaatcccgtgttgcatacttggaagagattatcggcagtgaggcggccggtcggctggtggaggcaatggctccgtgcaatctgtttataccccgttgcgagacggccttgtatgagttgcgaaaccgtaaaatccgcagtcagtttgaccggcagacggcaggcggtacccctgcttatgaggccgttaacgatttggccttggtacaccgcctaagcgaccgccatgtgtggcgaattttaaagcaggcggataaggaagcggagcaggagaatttgttttag

SEQ ID NO: 58427 - DNA, 285 bp, Neisseria meningitidis; identical to SEQ ID NO: 38872

SEQ ID NO: 58428 - DNA, 942 bp, Neisseria meningitidis; identical to SEQ ID NO: 51024

SEQ ID NO: 58429 - DNA, 1911 bp, Neisseria meningitidis; identical to SEQ ID NO: 51665

SEQ ID NO: 58430 - DNA, 969 bp, Neisseria meningitidis
atgaaactcaccctcgccctcccctcgctcaatttggatgaagacgaaatccgaatacctctatgcctgcccgccttcaacaaaatcctgcaatacggctcgctgcaccgccaaagctgcacggcttcggcattttacgcgcgttatttgtggtgcggcagactggcggaacgcgcggcgcaaagcctgaatatgccgtctgaagccgtcgcgctcgccacgcccgtctggcaaaagatggggatgcatcaggcaaatgtgctaacggcggaatatctgaacgtcggtacggatgaagcggaacggctctgccgcgacctgtcggcgttttacggcgacattccatggcgtttcgttcccgtcctgcccgaattatggctggtttcccttccttgcgcgtaccgctggggcgcgaagcccgttttggacttgggcggattgttgggcgcggacgatcagccggacggagaagatgcgttggaatggctgcgcgtccaaaccgaaatccaaatgtggctggcggcgcaccccgtcaaccataaccgcaaaaaacgcgggctgcccgagttgaacggcttatggctttgggacggcacaaacggcggcgcgcaaggcggcacacttttcgccgatacggtttggagccgtttccaccccgaccgccgcgcattgcccgacaacttccgcgcctatgaagaaacggcggcacacctgcccgacacgcaccatatcctgtttatggacgatttgcgcctgaccgccctgacaggggacagggagcggtatgcatcggttttacagcagtgggaagaacactggttcgcaccgatctacgaagccgtccgtaccggcaaaatcaaacggctggacatcaccacggacggacaacacggcggtacgctgaccttcaaacccgccgacaggtggaaattttggcgcggcgcgaaaacctttgacggaatctggtga

SEQ ID NO: 58431 - DNA, 603 bp, Neisseria meningitidis; identical to SEQ ID NO: 51201

SEQ ID NO: 58432 - DNA, 588 bp, Neisseria meningitidis
atggaacataagctgccgcaactgccttatgaactggacgcattgtccccgcatctgagcaaagagactttggaattccactacggcaaacaccatcaaacctacatcaccaacctgaacaatcaaatcaaaggcaccgaatttgaaaacctgcctttggaagagattgtgaaaaaatcttcgggcggcgtgttcaacaacgcggcacaaacttggaaccacaccttctactggctgggtttcacgcccaaaggtcaaggcaaaccttccggcgaactggccgccgccatcgacgcgaaatggggcagcttcgagaaattccaagaagcgttcaatgcctgcgcggccggtactttcggctccggttgggcgtggctggtgaaaacccctgccggcggattggatttggtttccacttccaacgccgctacgccgctgaccactgaaaacacgccgctgctgacctgcgacgtgtgggaacacgcctattacatcgactaccgcaacagccgccccaactacctgaaaggtttttgggaaatcgtcaactgggacgaagtcgccaaacgcttcgccgccttgtcctga

SEQ ID NO: 58433 - DNA, 1065 bp, Neisseria meningitidis; identical to SEQ ID NO: 42477

SEQ ID NO: 58434 - DNA, 474 bp, Neisseria meningitidis
atgtcccgcaataccgaagagctgcaaggcatctcgcttttgggtaatcagaaaacccgatatccgaccggctacgcgcctgaaattctcgaagcattcgacaacaaacatcccgacaacgactatttcgtcaaattcgtctgcccagagttcaccagcctctgccccatgaccgggcagcccgacttcgccaccatctacatccgctacattccgcacatcaaaatggtggaaagcaaatccctgaaactctacctcttcagcttccgcaaccacggcgattttcatgaagactgcgtcaacatcatcatgaaagacctcattgccctgatggatccgaaatacatcgaagtattcggcgagttcacaccgcgcggcggcatcgccattcatccgtttgccaactacggaaaagcaggcaccgagttcgaaacattggcacgcaaacgcttgtttgagcacgacacacaataa

SEQ ID NO: 58435 - DNA, 855 bp, Neisseria meningitidis; identical to SEQ ID NO: 43427

SEQ ID NO: 58436 - DNA, 600 bp, Neisseria meningitidis; identical to SEQ ID NO: 36546

SEQ ID NO: 58437 - DNA, 366 bp, Neisseria meningitidis; identical to SEQ ID NO: 42810

SEQ ID NO: 58438 - DNA, 846 bp, Neisseria meningitidis
atgaacaaattttcccaatccggaaaaggtctgtccggtttcttcttcggtttgatactggcgacggtcattattgccggtattttgttttatctgaaccagagcggtcaaaatgcgttcaaaatcccggcttcgtcgaagcagcctgcagaaacggaaatcctgaaaccgaaaaaccagcctaaggaagacatccaacctgaaccggccgatcaaaacgccttgtccgaaccggatgctgcgacagaggcagagcagtcggatgcggaaaaagctgccgataaagccgacgaggttgaagaaaaggcgggcgagccggaacgggaagagccggacggacaggcagtgcgtaagaaagcactgacggaagagcgtgaacaaaccgtcagagaaaaagcgcagaagaaagatgccgaaacggttaaaaaacaagcggtaaaaccgtctaaagaaacagagaaaaaagcttcaaaagaagagaaaaaggcggaaaaggaaaaagttgcacccaaaccgaccccggaacaaatcctcaacagcggcagcatcgaaaaagcgcgcagtgccgccgccaaagaagtgcagaaaatgaaaacgtccgacaaggcggaagcaacgcattatctgcaaatgggcgcgtatgccgaccgccggagcgcggaagggcagcgtgccaaactggcaatcttgggcatatcttctaaggtggtcggttatcaggcgggacataaaacgctttaccgggtgcaaagcggcaatatgtctgccgatgcggtgaaaaaaatgcaggacgagttgaaaaaacatgaagtcgccagcctgatccgttctatcgaaagtaaataa

SEQ ID NO: 58439 - DNA, 1713 bp, Neisseria meningitidis; identical to SEQ ID NO: 53652

SEQ ID NO: 58440 - DNA, 309 bp, Neisseria meningitidis; identical to SEQ ID NO: 50770

SEQ ID NO: 58441 - DNA, 210 bp, Neisseria meningitidis; identical to SEQ ID NO: 39235

SEQ ID NO: 58442 - DNA, 2103 bp, Neisseria meningitidis
atgaagacagacattcaaaccgaattaacccaagccctactaccacacgaaaaagtatgggcgaacgaagaaaaaaccattttagccaaaaacatcctgttggatttggtggaaaaaaccgacccgaccattatcggtttgttattgagtaatgatgagttaaaacgccatttctttgtggaagtgaatggtgtgctggtgtttaaattgcaggatttccgttttttcttggacaaacacagcgtcaataattcctacacaaaatacgccaaccgcattggtttgacggacagcaaccgctttttgaaagacagcagtgatattgtgttggattttccgtttaaagattgtgtgttaaatggcggacaaagcaccgaggaaggcgaagaaatttattttaaacgcaataacagccagccagccagccagccagccagccagccagccagccagccagccagccagccagccagccagccagccagccagccagccagccaattatacactaaattaacccgaaaaagacaagaaatcttttttaatcaaacccttgcttttgatgaaattgatcggctttttgacgcaaaagcattctcaaaattctctcgctataccgcagacggcaaacaagccgttggcgaaatcaaacgacattcagacggcacacccgccgaaaatctcattatcaaaggcaataatctgattgccctgcattcgcttgccaagcagtttaaaggcaaagtgaagctgatttatattgacccgccatataacacgggtaatgacggttttaaatacaacgacaaatttaatcattccacttggctgacttttatgaaaaaccgtctagaaatcgccaaagagctgcttatgaaagacggttcgatttttgtgtcaattgacgacaacgaacaggcatatttgaaaattttaatggatgaagttttcggaaatgaaaatttcatctgcaattttatttgggaaaaaaagacaggtgcgtccgatgccaaacagatagcgactattacagagtttgtcttatgttactcaaagaactttaaaacagttaaattaaataaaaacacgttttcttatgatacagagagatacaaattaagtgataagtttgaacaggaaagaggcaaatattatatcgacaatttagatagagggggattgcagtatagtgacagtttgaattttgcaatccaatgtccagatggcacttttacgtatccgaatggcaggactgaatttgtcaatgatggctggatatggaaatggagtaaaaataaaattgattgggcaataacaaacggttttttggagtttagaaaatcaaagtctaaaaaatctggatggagtgtatgttataaaaactatatgttggttgataacgaaaacaagccgatagaacgttctgctccctataagaacttaatacaggatatcttaaatacacatgcgacagatgaattgaaaaaactgttcggcagcaaagtttttactactccaaaacctgagagcttattgcagtatcttattcaaattgccacatccgaatccgacatcgtcttagactaccatcttggtagtggcacaaccgccgccgttgcccacaaaatgaaccgccaatatatcggtattgaacaaatggattatattgaaacgcttgctgttgaacgcttgaaaaaagtgattgatggcgagcaaggcggtatttccaaagccgtgaattggcaaggtggtggcgaatttgtttatgccgaacttgctccatttaacgaaaccgcaaaacaacagattttggcttgcgaagattcagacggcatcaaaacgctgtttgaaggtttatgcgaacgctatttcttgaaatacaacgtcagcataaatgaatttagtcaaaccattcaagagcctgaatttcaatctttgccattagacgaacaaaaacaaatggtgcttgaaatgttggatttaaatcaaatgtatgtttcattatccgaaatggacgatgaacaatttgcaggctgtctgaatgatgacgataaagcgttaagccgtgcgttctatcaaacggagaaaaaagatggcgaataa

SEQ ID NO: 58443 - DNA, 237 bp, Neisseria meningitidis; identical to SEQ ID NO: 37424

SEQ ID NO: 58444 - DNA, 1251 bp, Neisseria meningitidis
atgaccaaactgacacgaagacaaatcatccgccgcaccgccggcacactgttcgccctaagccccatcgcatccgccgttgccaaaacggtacgcgcaccacaattcaccgccgcacggatatggccgtcgcacacctacacccgcctgacgctggaaagcacaaccgcgctcaaataccaacacttcacgctcgacaacccgggcaggttggtcgtcgacatacaaaacgcgaacatcaataccgtattgcacggactgtctcagaaggttatggcggacgacccctttatccgcagcatacgcgcgggtcagaacacgcccgacaccgtccgcctcgtcatcgatttgaaacagccttcctacgcgcaagttttttccctcccccccgtcggcggctttaaaaaccgcctcgtcgtcgatctctatccgcaagggatggatcccgacgatccgatgatggcgctgcttaacggcagcctgaacaaaacccgtcgcggctcccctgaagccgacctcgctcaaaacactcccgcacaaaccgaacgcggcaaaaacggacgcagacccgtcattatgatcgaccccggacacggcggcgaagaccccggcgccgtcagcccgggcggtttgcaggaaaaacacgtcgtcctctccatcgcccgcgaaaccaaaaaacaattggaagccttgggttacaacgtctttatgacgcgcaacgaagacgtgttcatccctttgggcgtgcgtgtcgccaaagggcgcgcacggcgggcggacgtattcgtctccatccacgccgacgctttcaccagcccctccgcgcgcggaacgggggtttatatgctgaacaccaaaggcgcgaccagctccgccgccaaattcttggaacagacgcaaaacaatgccgacgcggtcggcggcgtaccgaccagcggcaaccgcaacgtcgataccgccctgctcgatatgacccaaaccgccacgctgcgcgacagccgcaaactcggcaaactggtgcttgaagaattgggcaggctcaaccacttgcacaaaggcagggtggacgaagccaatttcgccgttttgcgcgcacccgatatgccgtctatcctggtcgaaaccgccttcctgtccaaccctgctgaagagaagttgctgggcagcgaatccttccgccggcagtgcgcccaatccattgcctcgggtgtccaacgctacatcaatacatccgtattgaagcggggttga

SEQ ID NO: 58445 - DNA, 1332 bp, Neisseria meningitidis; identical to SEQ ID NO: 51037

SEQ ID NO: 58446 - DNA, 1197 bp, Neisseria meningitidis
atgtcccaaaaattgatcttggttttgaactgcggcagctcgtccctcaaaggcgcggtcctggataacggcagcggcgaagtcctgctcagctgccttgccgaaaaactcaacctgcccgatgcctacatcacattcaaagtaaacggcgaaaaacacaaagtcgatctgtccgcacatcccgaccacaccggcgcggtcgaagccctgatggaagaactcaaagcccacggcctcgacagccgcatcggcgccatcggccaccgcgtcgtcagcggcggcgaactgtacagcgaatccatcctcgttgacgacgaagtcattgccggcatcgaaaaatgcatcccgctcgcccccctgcacaaccccgcccacctcttgggcctgcgtgccgcgcaaagcattttcaaaggcctgcccaacgtcgtcgtattcgatacctccttccaccaaaccatgcccgaagtcgcctacaaatacgccgttccgcaggagttgtatgaaaaatacggcctgcgccgttacggcgcgcacggtaccagctaccgcttcgtcgccgacgaaaccgcgcgcttcctcggcaaagacaaaaaagacctgcgtatggtcattgcccacttgggcaacggcgcgtccatcaccgccgtcgccaacggcgaatcgcgcgacaccagtatgggcctgaccccgctggaagggctggtaatgggtacgcgcagcggcgacatcgatccttccgtattcggcttcctcgccgaaaacgccaatatgaccatcgcccaaatcactgaaatgctgaacaaaaaatccggtctgctcggcatttccggcctgtccaacgactgccgcaccattgaagaagaagccgccaaggggcataaaggcgcgaaattggccttggatatgtttatctaccgccttgccaaatacatcggcagtatggcggttgccgcaggcggcttggacgcactggtctttaccggcggcatcggcgaaaactccgacatcatccgcgaacgcgtaatcggctacttgggcttcctcggtctgaacatcgaccaagaagccaacctgaaagcccgcttcggcaacgccggcgtgattaccactgccgacagcaaagccgttgccgtggtcattccgaccaacgaagagctgatgattgcccacgacactgcccgtttgagcggtctgtaa

SEQ ID NO: 58447 - DNA, 372 bp, Neisseria meningitidis
atgaataaaaccttgtctattttgccggtggcaatcttactcggcggctgcgccgccggaggcggtaacacattcggcagcttagacggtggcacaggcatgggcggcagcatcgtcaaaatggcggttgggagccaatgccgtgcggaattggacaaacgcagcgaatggcgtttgaccgcgctggcgatgagtgccgaaaaacaggcggagtgggaaaacaagatttgcgcttgtgtcgcccaagaagcacccgaacggatgaccggcaacgatgtgatgcagatgctggctccgtccacgcgcaatcaggcacttgccgccctgaccgccaaaacggtttccgcctgcttcaaacacctgtaccgctaa

SEQ ID NO: 58448 - DNA, 285 bp, Neisseria meningitidis; identical to SEQ ID NO: 42876

SEQ ID NO: 58449 - DNA, 807 bp, Neisseria meningitidis; identical to SEQ ID NO: 43004

SEQ ID NO: 58450 - DNA, 2118 bp, Neisseria meningitidis
atgcgccgttttctactgatcgcagccatatgcgccgtcgtcctgttgtacggactgacggcggcaaccggcagcaccagttcgttggcggattatttctggtggatagtcgcattcagcgcaatgctgctgctggtgttgtccgccgttttggcacgttatgtcatattgctgttgaaagacaggcgcgacggcgtattcggttcgcagattgccaaacgcctttccgggatgttcacgctggtcgccgtattgcccggcgtgtttctgttcggcgtttccgcacagttcatcaacggtacgattaattcgtggttcggcaacgacacccacgaagccctcgaacgcagcctcaatttgagcaagtccgcattgaatctggcggcagacaatgccctcagcaatgccgtccccgtccagatagacctcatcagcaccgcctccctatccggcaatatgggcagggtgctggaacattatgccagcgggtttacacagttgtccctttacaatgcggcaagcggtaaaattgaaaaaagcatcaatccgcataagcttgaccagccgtttccggataaggaacattgggagaaaatccaacaggccggctcggtcaggagcttggaaagtataggcggcgtattgtacgcgcagggctggctgctggtgggtacatacaacggacgcgattacgcgctgttttttcgtcagcccattcccaaaggcgtggcagaggatgccgtcttaatcgaaaaggcaagggcgaaatatgctgagttgagttacagcaaaaagggtttacagaccttctttctggcgacgctgcttgccgcctcgctgctgtcgatttcccttgccctggtgatggcactgtattttgcccgtcgtttcgttgagcccatcttgtcgcttgccgaaggggcgaaggcggtcgcacagggcgatttcagccagatgcgccctgtactgcgcaacgatgagttcgggcgtttgagcaagttgttcaaccatatgaccgagcagctttccattgccaagaaagcggacgagcgcaacaggaagcgcgaagaagccgccaggcattatctcgaatgtgtgttggagagcctgaccacgggtgtggtggtatttgacgaaacaggccgtctgaaaaccttcaacaaagctgcggaacatatcttgggtatgtcgcttgtgccgctgtggggtagcaaccggcacggttggcacggcgtttcggtgcagcataccttgcttgctgaagtgtttgacgccatcgatgcgacagcgagtacggacaaaccggttcaggtgggatatgccgctccggacgatgccaaaatcctgctgggtaaggcaacggtcctgcctgaagacaacgacaacggtgtggttatggtcatagacgacatcaccgtattgatacacgcgcaaaaagaagcggcgtggggcgaagtggccaaacggctggcacacgaaattcgcaatccgctcactcccatccagctttctgccgaacgtttggcgtggaaattggacgggaaactggatgagcaggatgcgcaaatcctgacgcgctcgaccgaaaccatcgtcaaacaggtggcggcattgaaggaaatggtcgaggcattccgcaattatgcgcgttccccttcgctcaaattggaaaaacaggatttgaacgtattggtcggtgatgttttggcgttgtatgaagccggtccgtgccggtttgaggcggagcttgccggagaaccgctgatggtggcggctgatacgaccgccatgcggcaggtgctgcacaatattttcaaaaatgccgccgaagcggcggaagaagccgatgtgcccgaagtcagggtaaaatcggaaacagggcaggacggtcggattgtcctgacggtttgcgacaacggcaaagggttcggcagggaaatgctgcacaacgccttcgagccgtatgtaacggacaaaccggcgggaacgggattgggtctgcctgtggtgaaaaaaatcattgaagaacacggcggccgcatcagcctgagcaatcaggatgcgggtggcgcgtgtgtcagaatcatcttgccaaaaacggtaaaaacttatgcgtag

SEQ ID NO: 58451 - DNA, 984 bp, Neisseria meningitidis
atgaaaaactttctttcccttttcgcctccatactgatgtctgccctgattgccgtgtggttcagccaaaaccccatcaacgcctactggcagcagacctaccaccgcaacagtccgctcgaaccgcttgccgcctacggatggtggcggagcggtgtggcgttgcaagaaaacgcctacgccctttcagacggcatcaaagccttcctgtccggcgaaacgccgccgacggctcaagacggcggttcggcagatatgccgtctgaagccgccgcatccgaagccgtccctcaaaccggtgaaacagaatggaaacaagacaccgaagccgccgccgtccgcagcggcgacaaagtctttttcgccggcgactcgctgatgcagggcgttgcacccttcgtgcaaaaaagcctgaaacagcaatacggcatcgaatccgtcaacctcagcaaacaaagcacggggctttcctatcccaaattcttcgactggccgaaaacgattgaagaaaccctgcaaaaacaccccgaaatcagcgtgctcgccgtcttcctcggcccgaacgacccgtgggatttccccgtcggcaaacgatacctcaaattcgcttccgacgaatgggcgcaagaatacctgaaacgcgtcgaccgcatccttgaagccgcccgcgcgcaccacgtccaagtcgtctggctcggcatcccctatatgaaaaaagccaagctcgacggacagatgcgctacctagacaaactgctttcggaacacctggaaggcaaaatcatcctgattcccaccgcgcacaccctgagcggcggggaagaccgctacacggactccgtcaacgtcaacggcaaacccgtccgctaccgcagcaaggacggcatacactttaccgccgaaggacaaaaactgctggcgacaaaaataatggaaaaaatcgtttttgaaccaagtacgcaaccatcaagtacacagccatga

SEQ ID NO: 58452 - DNA, 687 bp, Neisseria meningitidis; identical to SEQ ID NO: 53756

SEQ ID NO: 58453 - DNA, 207 bp, Neisseria meningitidis; identical to SEQ ID NO: 43230

SEQ ID NO: 58454 - DNA, 2064 bp, Neisseria meningitidis
atgatgacccaaacccttttaatcgaactccttaccgaagaacttccgcccaaagcccttaataatctaggcaaccattttgccgccgccgttgccgaaggcttggaaaaagcgcaactggttgacggcgcagccgaacttaccgcctacgcttctccgcgccgtttggcggttcaagtcaaaaacgtcaaagccgttcaagccgaccaaaaaatcgtgaaaaaaggccctgccgtggcgaatgccgtaaaagacggtgcgccgaccaaggctttggaaggttttgcacgcggtgcaggggcgaaaatcgaagacctgaccatcgtccacgacggcaagcaggatgtgtatgcctacgaatacgtccaaaccggcaaaccgttgggcgagcttttggaagacattatcaatcaagcggttaagaaattgccgattccgaaagtcatgcgttggggcagcagcacgtttacctttgtgcgccccgttcacgggctagttgtactgcacggcggcgatatcgtgaacgtcagcgttttgggtttgcaaagcggcaatcaaaccttgggacaccgcttcttgtccaacggcgaaatcactattgaaaacgccgacagctacgccgcacaaatgcgcgagcaaggcaaagtcgtcgcttcgtttgccgagcgcaaagccgcgattcagacggcattggaagggcaggcacgccgtctgaacgccgccgttgccgccgatgaagccttgttggacgaagttaccgcgttggtcgaatggcctgtggtattggaagccggttttgaggaacacttccttgccgtgccgcaagaatgcctgattctgacgatgcagcaaaaccaaaaatacttcccgctgctcgaccaaaacggcaagctgatgaaccgcttcctgctggtttccaacctgcaaactgcagacccgtcgcacatcatccgaggcaacgaacgcgtattgcgcgcgcgcctgtctgatgccgaattcttctacaaacaagaccagaaagcgactttggaaagtcgcctgcccaagctggtaaatgtggtttaccacaacaaaattggttcgcaagccgagcgcatcgaacgcctgcaaagcattgccgcccacatcgccaaagctttgggtgcggacgctgccgcagccgaacgcgccgcgcgtttggcaaaagccgacttggtaaccgaaatggtcggcgagtttcccgaactgcaaggcacgatgggcaaatactatgcccgtttggacggcgaaaccgaagaaatcgccgaagcagtcgagcagcactatcagccgcgttttgccggcgacaagctgcccgaaagcaaaattgccgccgccgtggcactggcggacaagctggaaaccctggtcggaatttggggcatcggcctgattccgaccggcgacaaagacccctacgccctgcgccgcgccgccttgggtattttgcggatgctgatgcagtacggtttggacgtgaacgaactgattcagacggcattcgacagcttccccaaaggtttgctcaacgaaaaaacgccgtctgaaaccgccgactttatgcaggcgcgccttgccgtgttgctgcaaaacgattatccgcaagacatcgttgtcgccgtactcgccaaacagccgcgccgtttggacgatttgaccgccaaactgcaggctgtcgccgcgttcaaacaactgcccgaagccgccgcgctcgccgccgccaacaaacgcgtgcaaaacctgctgaaaaaagccgatgccgcgttgggcgaagtcgatgaaagcctgttgcaacaggacgaagaaaaagccctctttgccgccgcgcaaggcttgcagccgaaaatcgccgccgccgtcgccgaaggcaatttccaaaccgccttgtccgaactggcttccgtcaagccgcaagtcgatgccttcttcgacggcgtgatggtaatggcggaagatgccgccgtaaaacaaaaccgcctgaacctgctgaaccgcttggcagagcaaatgaacgcggtagccgacatcgcgcttttgggcgagtaa

SEQ ID NO: 58455 - DNA, 465 bp, Neisseria meningitidis
atgaaagaactagataaaatcgatttccgcattcttaagatcctccaacagaatgcccgcatcccgatgacggagcttgccgagaaggtaggcttgtccaccacgcccgttacagagagggtgcgccgtttggagcgggaacattatatttccggctatcacgcccacctcaatccccatctgttgggcaaaccgctattggtttttgtcgagctgaagctgcaatccaaatcgggcaatattttcgaagatttcaaaaaagaagtgctgaaaattccgcaaattatggaatgccacttggtgtcgggcgaatacgactatctgattaaagtacgtttgcccgatatgtctgcctatcgggatatgctaggcaatatcctattgcaactgcctgtcgcttcggagagtaggagttatgttgtgatggaggaggtcaaagaaaatccggttttggatttggattga

SEQ ID NO: 58456 - DNA, 1638 bp, Neisseria meningitidis
atggattttaaaagactcacggcgtttttcgccatcgcgctggtgattatgatcggctgggaaaagatgttccccactccgaagcccgtccccgcgccccaacaggcagcacaacaacaggccgtaaccgcttccgccgaagccgcgctcgcgcccgcaacgccgattaccgtaacgaccgacacggttcaagccgtcattgatgaaaaaagcggcgacctgcgccggctgaccctgctcaaatacaaagcaaccggcgacgaaaataaaccgttcatcctgtttggcgacggcaaagaatacacctacgtcgcccaatccgaacttttggacgcgcagggcaacaacattctaaaaggcatcggctttagcgcaccgaaaaaacagtacagcttggaaggcgacaaagttgaagtccgcctgagcgcgcctgaaacacgcggtctgaaaatcgacaaagtttatactttcaccaaaggcagctatctggtcaacgtccgcttcgacatcgccaacggcagcggtcaaaccgccaacctgagcgcggactaccgcatcgtccgcgaccacagcgaacccgagggtcaaggttactttacccactcttacgtcggccctgttgtttatacccctgaaggcaacttccaaaaagtcagcttttccgacttggacgacgatgccaaatccggcaaatccgaggccgaatacatccgcaaaaccccgaccggctggctcggcatgattgaacaccacttcatgtccacctggattctccaacctaaaggcagacaaagcgtttgcgccgcaggcgagtgcaacatcgacatcaaacgccgcaacgacaagctgtacagcaccagcgtcagcgtgcctttagccgccatccaaaacggcgcgaaagccgaagcctccatcaacctctacgccggcccgcagaccacatccgtcatcgcaaacatcgccgacaacctgcaactggccaaagactacggcaaagtacactggttcgcctccccgctcttctggctcctgaaccaactgcacaacatcatcggcaactggggctgggcgattatcgttttaaccatcatcgtcaaagccgtactgtatccattgaccaacgcctcttaccgctctatggcgaaaatgcgtgccgccgcacccaaactgcaagccatcaaagagaaatacggcgacgaccgtatggcgcaacaacaggcgatgatgcagctttacacagacgagaaaatcaacccgctgggcggctgcctgcctatgctgttgcaaatccccgtcttcatcggattgtattgggcattgttcgcctccgtagaattgcgccaggcaccttggctgggttggattaccgacctcagccgcgccgacccctactacatcctgcccatcattatggcggcaacgatgttcgcccaaacctatctgaacccgccgccgaccgacccgatgcaggcgaaaatgatgaaaatcatgccgttggttttctccgtcatgttcttcttcttccctgccggtctggtattgtactgggtagtcaacaacctcctgaccatcgcccagcaatggcacatcaaccgcagcatcgaaaaacaacgcgcccaaggcgaagtcgtttcctaa

SEQ ID NO: 58457 - DNA, 309 bp, Neisseria meningitidis
atggatgtttttcccgaattgaatatccattgtttttatgatgataaaaatcagcttgaagcgatagagatatttgaaccaaataagttttttttagaagatatttcttttaattggcttggaaaaattaatgatgaaataataagctatctttataagagtggaattaatgattttgaaattgatgatttgggtattaggctccttaatattcctgtttcaactataatcaattctataggtaaagtagaatgttgttatttagatttttcaaatagagacacaaaattttatgtaaaacaagtgtag

SEQ ID NO: 58458 - DNA, 939 bp, Neisseria meningitidis
atgaaacgtaaaatgctaaacgtaccaaaaggcaattatgatggtatgaagggttttaccattattgaatttttggttgcgggcatgctcagtatgattgtcctgatggcggtcggatcgagttacttcacatcccggaaattaaatgatgcggcaaacgagcgtcttgccgcacaacaggatttgcggaatgcggcaacattgattgtccgcgatgcaagaatggcagggggcttcggttgtttcaatatgtccgagcatcctgcaactgatgttgtttccgatgtggcgccaaaaaaccgttttttttccttaaaaaggaacagtacaaataaacttatccccataacggaatcttcaaatatcaattatcagaattttttccaggttgatagcgcattgatttttcaatacggaatcgatgatcttgatgcgagtgctgagactgttgtagtcagcagctgttccaaaatagcaaaaccgggtaagaaaatatctaccttgcaagaagcaaagagtgcattacagattactaatgatgataaacaaaatggaaatatcacccgtcaaaggcatgtggtcaatgcctatgcggtcggcaggattgccggtgaggaaggtttgttccgcttccaattggatgataagggcaagtggggtaatcctcagttgctcgcgaaaaagattagacatatgaaagtgcggtatatctatgtttccgactgtcctgaagatgacgatgccggcaaagaggaaaaattcaaatatacgggtacattcgacagctccacaaatgctgttacgcccgccggggtggaggttttattgagtagcggtactgataccaagattgccgcttcttcagacaatcatatttatgcttaccgtatcgatgcgacaatacgcgggggaaatgtatgcgcaaacagaacactttga

SEQ ID NO: 58459 - DNA, 1542 bp, Neisseria meningitidis
atgaaaatcggtatcccacgcgagtcattatccggcgaaacccgcgtcgcctgcacgcccgccaccgtcgccctgctgggcaaactgggctttgaaaccgttgtcgaaagcggtgcaggtttggcggcaagtttggacgatgccgcttaccaaacagcaggcgcaaccgttgccgacaaagcggcggtttgggtctgccctttgatttataaggtcaacgcgccgtccgaacaggaactgccgcttttgaacgaaggtcaaaccatcgtcagcttcctgtggccgcgccaaaacgaggctttggtcgaagccttgcgcgccaagaaagtgaacgcgctggcgatggatatggtgccccgcatttcgcgcgcgcaggctttggacgctttgtcttcgatggcaaacatcagcggctaccgcgccgtaattgaagccgccaacgccttcggccgtttcttcaccggtcaaattaccgccgccggcaaagtgccgcccgcgcaggttttggtgattggtgcaggtgtggcaggtttggcggcgatcggtacggcaaactcgctcggcgcagtggtacgcgcgttcgatacccgcttggaagtggcggaacaaatcgaatcgatgggcggcaagttcctgaaactcgacttcccacaagaatcgggcggcagcggagacggctacgccaaagtgatgagcgacgaatttatcgcagccgagatgaagctctttgccgagcaggcgaaagaagtggacatcatcatcaccaccgccgccattccgggcaaacccgcgcccaagctgattaccaaagaaatggtggaaagcatgaaatccggctccgtcatcgtcgatttggcggcggcgacgggcggcaactgcgaactcacccgcccgggcgaattgtccgtaaccggcaacggcgtgaaaatcatcggctacaccgacatggcaaaccgccttgccggacagtcttcccagctttacgccaccaacttggtcaacctgaccaagctgttaagcccgaacaaagacggcgaaatcacgttggacttcgaagacgtgattatccgcaacatgaccgttacccacgacggcgaaatcaccttcccgcctccgccgattcaagtttccgcccagccgcagcaaacgccgtctgaaaaagccgcgcctgccgccaagcccgagccgaaacctgtttccctgtggaaaaaactcgcgcccgccgtcatcgccgccgtattggtgctgtgggtcggcgcggtcgcacccgcagcattcctgaaccactttatcgtgttcgtcctcgcctgcgtcatcgggtactacgtcgtttggaacgtcagccactcgctgcacacaccgctgatgtcggtaaccaacgccatctccggcatcatcgtcgtcggcgcgctgctgcaaatcagccaaggcaacggtttcgttaccctgcttgccttcatcgccatcctgattgccagcatcaatatcttcggcggcttcttcgtaacgcgccgcatgttgaatatgtttaagaaagggtaa

SEQ ID NO: 58460 - DNA, 876 bp, Neisseria meningitidis; identical to SEQ ID NO: 42864

SEQ ID NO: 58461 - DNA, 507 bp, Neisseria meningitidis
atgcccctactagacagtttcaaagtcgatcacacccgtatgcatgcccccgccgtacgcgtggcgaaaaccatgaccacgcccaaaggcgacaccattaccgtgttcgacctgcgcttttgcgttcccaacaaagaaatcctgcccgaaaaaggcatacacacgctggagcatttgttcgcaggttttatgcgcgaccacttgaacggcaacggcgtggaaatcatcgacatttccccgatgggctgccgcaccggtttctacatgagccttatcggcacgccttccgaacagcaggtcgccgatgcgtggctggcttcgatgcaggatgtgggcaatgtcaaagaccaaagcaaaatccccgagttgaacgaataccaatgcggcacttatcaaatgcactcgctcgccgaagcgcagcaaatcgcgcaaaacgtgttggcgcgcaaagtggcggtgaacaaaaacgaagagctgacgctggatgaagggctgctgaacgcctaa

SEQ ID NO: 58462 - DNA, 1857 bp, Neisseria meningitidis
atgttgaacaaaatattttcctggttcgagtcccgaatcgacccttatcccgaagccgccccgaaaacgccagaaaaaggcttgtggcggtttgtctggagcagcatggccggcgtgcggaaatggatagccgccctggctgcgctgaccgccggcatcggcattatggaagccctgatttttcaatttatgggcaaaatcgtggagtggctcggcaaatacgcgcccgccgaactgtttgccgaaaaaggttgggaactggcggcaatggcggcgatgatggtattttcggtcgtgtgggcgtttgccgcgtccaacgtgcgcctgcaaacccttcagggcgtgttccccatgcgcctgcgctggaacttccaccgcctgatgctgaaccaaagcctcggtttttatcaggacgaatttgccggacgcgtgtccgccaaagtcatgcagaccgcgctggcgttgcgcgacgcggtgatgacggttgccgatatggtcgtttatgtgtcggtgtatttcattacctccggcgtgattctcgcctcgctcgactcatggctgctgctgccctttatcggctggattgtcggtttcgcttcggtgatgcgcctgctgattcccaaattggggcaaaccgccgcatggcaggcggatgcccgctcgctgatgaccggccgcattaccgatgcctattccaatatcgccaccgtcaaactcttctcccacggcgcgcgtgaagccgcctatgccaagcagtcgatggaagaatttatggttacggtgcgcgcccaaatgcggctggcgacgctgctgcattcgtgcagcttcatcgtcaacacctccctgaccctctccaccgccgcactgggcatctggctttggcacaacggacaggtcggcgtgggcgcggtcgccaccgccaccgcgatggcgttgcgcgtcaacggtttgtcgcaatacattatgtgggaatccgcgcggctgtttgaaaacatcggcaccgtcggcgacggcatggcaaccctgtccaaaccgcacaccatcctcgacaagccgaacgccctgccgctgaaagtgtcgcaaggcgaaatcaagttcgaacacgtcgatttctcctacgaagcgggcaaaccgctgctcaacggcttcaacctcaccatccgcccgggcgaaaaagtcggcttgatcggacgcagcggcgcgggcaaatccaccatcgtcaacctgcttttgcgcttctacgaaccgcaaagcggcacggtttcgatcgacgggcaggacataagcggcgttacccaagaatctttacgcgcccaaatcggtttggtcacgcaagatacctcgctgctgcaccgttccgtgcgcgacaacattatttacggccgccccgacgcgaccgatgccgaaatggtttctgccgccgaacgcgccgaagccgccggcttcatccccgacctttccgatgccaaagggcggcgcggctacgacgcacacgtcggcgaacgcggcgtgaaactctccggcgggcaacgccagcgcatcgccatcgcccgcgtgatgctcaaagacgcaccgattcttcttttggacgaagccaccagcgcgctcgattccgaagtcgaagccgccatccaagaaagcctcgacaaaatgatggacggcaaaaccgtcatcgccatcgcccaccgcctctccaccatcgccgcaatggacaggctcgtcgtcctcgacaaaggccgcatcatcgaagaaggcacacacgccgaactcctcgaaaaacgcgggctttacgccaaactctgggcgcaccagagcggcggcttcctcaacgaacacgtcgagtggcagcacgactga

SEQ ID NO: 58463 - DNA, 1803 bp, Neisseria meningitidis
atgaaacggcagtcggacgagctggcggagaagatgccgaaaatgctgccccaagtcagaccggggacggcgatgtcggctcaggcactggctgaagcggccaagctgttgaacgagaaacaacggtcggtggcgaatgcgcgatgtgcggtggtggcggcggtattggggattaaatatcaatacggttgctctgcgaaggctgcggtggctcagtttttgggcttgctggcagcaggtaagttggacgcggtcacgctcggtaacttggaaaaggccaatgaccgcagccggtcggcgaaggttggcgaacgtactttagacggctggatttctgcttatttgaaagcggaaaacgcgacggagcggttggttgctttggctccgaagacgacgaaggcggtcaagccgattgaaagttacggatggttgccgatgtttatgcagtttcacaatattccgtccgcgccaaagctggcgcacagctaccgccggtttgtgcagtgggcggaagcggaaaatatgccggtcaatgatgtgcctaacttgagtatggtgcggcgcgtttgggaaaagctcccgttgattatgcaggagcgcggcaggaaaacgggggcggcttataaatcgctgctgccttatgtgaaacgtgattggggggctttgaagccgaacgatgtttggatcggcgacggccatagctttaaggcaaaggtggcgcatccggtacatggcagaccatttaagccggaagtgacggtgattattgatggttgtacgcggtttgtggtcgggttttcggtctctcttgctgaaagttgtgtggcggtatcggacgctatgcgtatcggggtcaagcattttggtttgccgattatctattactcggataacggcggcggccaaaccggcaagacgatagaccatgaaatcacgggtattacgtcccgactgggtatccgccatgaaacgggtatcgcgggcaacccgcaagggcgcggcatcattgagcgatggtggaaagacaatctgattgagatggcgcgccagtatgagacgtttgcgggtgcagggatggacagcagcacgaagaacctgatgtaccgcaagatggaaagtgcgtttaacgctttggaaaaaggcaaggatttgacggaggaacaacagaaatatttgaaaaaactgccgagctggtcgcgttttatagcggatgtggtcaagtgtatcgacgaatacaacaaccgcccgcacggcgagctgccccgacatcctgacggcgggcattatacgcctaaggcttatcgggaaatgaggctggaacaggacggtatcgcgccggatatgttgtcggcgcaagagctggcgacgatgtttatgccgcaagaggtgcgaaaggtacagcgcggttggctggatttgtttaacaactcttatttctcaaccgagctggcggagtatcacaaagacgaggtacgggtcagctacgatttgagcgatgcgtcggcggtcaatgtgtttgatatggacggcaagtttattactaaggcgcaggccaacggcaatacccgcgaggctttcccgacggctcgtatcgaccaactggcggaaaaacgtcgaaaaggcaaaataaagcgggcggaaaatgcaatcaagctcgcaaacgcggaagtcaatcctgctctggaacaggctgcggtttgggacgagctgggacatttgggcggaaacgacatcgaggcggagtatgcggtattgccgaaaacgggcacagacgattttgtgttgtttgaggcggatagataa

SEQ ID NO: 58464 - DNA, 918 bp, Neisseria meningitidis; identical to SEQ ID NO: 51420

SEQ ID NO: 58465 - DNA, 120 bp, Neisseria meningitidis; identical to SEQ ID NO: 43584

SEQ ID NO: 58466 - DNA, 291 bp, Neisseria meningitidis; identical to SEQ ID NO: 42317

SEQ ID NO: 58467 - DNA, 729 bp, Neisseria meningitidis
atgaacgctgcggctgccaaagattatatgaaaacggttgagttgaacaagtctgccggcaatgtcgataccacatccagaacagcccgcagggtgcaggcagtatttcgacgtatgctgccttatgccgatgcggcaaataataccggccataggtttgactggaaaatgacggttttcaaaaacgatgagctgaacgcgtgggcgatgcccggtggaaaaatggcgttttatacggggatagtcgacaaactcaagctgaccgatgacgaaattgccgccattatggggcatgaaatgacgcacgccctgcatgaacacggtaaaaataaggtcgggcaacaaattttgaccaatacggcggcgcagataggcacgcagattatattagacaaaaaaccggacactaatccggaattggtcggattgggtatggatattttggggacgtacggtcttaccttgccttatagccgcagcttggaagaagaagccgatgaggggggaatgatgttgatggcgcaggcaggctatcatccggcggccgctgtcagggtttgggaaaaaatgaatcaggaaaacgaccaaaacggctttatttatgctattacctctactcatccgacaaacaatgcccgtatagaaaacctaaaacggttgttgccgaccgttatgcctgtttatgagcaaagtgtcagaaataaggggcgcgttaatatagtggattaa

SEQ ID NO: 58468 - DNA, 720 bp, Neisseria meningitidis; identical to SEQ ID NO: 50970

SEQ ID NO: 58469 - DNA, 669 bp, Neisseria meningitidis
atgttaccctcgaaatatgaagataacgcactgcaaattaaagaaaaaagtacagaaagaactgctccgttttttgtactggaagttaccgcccgttctgccgccgatattttgggtatccatcccaattcggcagcactgttctaccgtaaaatccgcacggttatcaaccatcatttggccttggctgccgatgaggtttttgagggccctgtcgagccggacgaaagcgatttcggcggacggcgtaaaggcagacgtggtcgcggtgcggcaggaaaagtggttgttttcggcattctgaaacgcaacggacgggtctataccgttgtggtggataatgccaagtctgaaacgttactccctgtcatcaaaaagaaaatcatgccggatagtattgtttataccgatagtctgagcagctacgacaagttggacgtgagcggttttatccattaccgcatcaaccattccaaggagtgtgcagaccgtcagaaccacattaacgacattgagaacttttggaatcaggcaaaacgcgtcttgcgaaaatacaacggaatcgatcgtaaatctttcccgctgttcttgaaagaatgcgaatttcgatttaacttcggcacaccgtctcaacagcttaaaatcctgcgggattggtgtggaatttag

SEQ ID NO: 58470 - DNA, 798 bp, Neisseria meningitidis
atgctgaaacaacgggtaataaccgccatgtggctgctgccgctgatgctgggcatgctgttttacgcgccgcaatggttgtgggctgcattttgcggactgattgccctgattgccttgtgggaatatgcccgtatgggcggtttgtgcaaaattaaaaccaaccattacctcgccgcaaccttggttttcggcgtggttgcctatgcgggcggctggatgctgcctaatttggtttggtatgttgttttggcattttggctcgccgttatgcctttatggttgagattcaaatggaggctcaacggcggttggcaggtttatgccgtcggctggcttctggtcatgccgttttggttcgcgctcgtatccctgcgcccgcatcccgatgatgccctgccgctgctcgccgtgatgggtttggtgtgggttgccgatatttgcgcgtatttcagcggcaaggcgttcggcaaacacaaaatcgcaccggcaatcagccccggcaaaagctgggaaggtgcaatcggcggcgcggtttgcgtggccgtgtacatgaccgccgtacgaagtgccggctggacggcattcgatacaggctggttcgataccgtgttaatcggtttggtgttgaccgttgtcagcgtatgcggcgacctgttggaaagctggctcaagcgcgcggcaggcatcaaagacagcagcaacctgctgcccggacacggcggcgtgttcgaccgcaccgacagcctgattgccgtcatcagcgtctatgcggcgatgatgtcggttttaaattga

SEQ ID NO: 58471 - DNA, 936 bp, Neisseria meningitidis; identical to SEQ ID NO: 42109

SEQ ID NO: 58472 - DNA, 648 bp, Neisseria meningitidis; identical to SEQ ID NO: 42354

SEQ ID NO: 58473 - DNA, 2703 bp, Neisseria meningitidis
atgcaactgcatattctgaacaatccgaaggacgcggctttggcggcggacgcggaatttctgaaacaatccctgttcaacctcctgcacgaagaagcctcgccgttggttgtcgaaacagtcaaactcttgtccacttccgacgacagcgcggcattgattgaaaaagtattgccgcaattggacgaacaacaaacccacgatttaaccttggcctgcggcctgttcgcccagattttgaacatcgccgaagacgtgcaccacgaacgccgccgccaaatccacgaagaagccggacgcggcggcgcggaaggcagcctgacggaaaccgtccgcaggctcaaagcggggaaagccgacggcaaatcggtgcagcggcagttggacaatacgtccgttaccgccgttttgaccgcgcacccgaccgaagtgcaacgccaaaccgtcttaagcttcaaccgccgcatccgcgcactgttgccgcaacgcgaacgctgcaccaatgccgacgcgctggcacggctgcgccgcgaaatcgacactatcctgctgggcttgtggcagaccagcgaaacgcgccgccacaaactcagcgtcaacgacgaaatcaacaacggcgtgtccatcttcccgatgagctttttcgaagccctgcccaagctctaccgcaagatggaacacgactttcagacggcctatcccggcgtccgcgttccggacatcctcaaaatcggcggctggatcggcggcgaccgcgacggcaatccgtttgtttctgccgaaaccctgcgctttgccttccgccgccacgccgatgccgtgttccgcttctatcgcggcgaactcgacaaactctaccgcgaattgccgctctccatccgccgcgtcaaagtcaacggcgatgtaacggcgttgtccgacaaatcgcccgacgaagaaatcgcccgcgccgaagaaccctaccgccgcgccattgcctacattatggcgcgcgctatgggcaaagcgcgcgcgctcggtttgggcatgggctgcaaattcggctttctcgagccttatgcttcggcacaagaatttctcgatgatttgaaaaaattgcaacgttcccttatcgacaacggcagccgcctgcttgccgaaggccgtttggcagacctcatccgttccgtgtccgtgttcggcttccacatgatgccgctcgacctgcgccaacacgcaggcaaacacgccgatgtggttgccgagcttttccaacacgcaggcttggaagactacaacagcctgaacgaagagcaaaaacaagccgccctgttgcgcgaactgggccaccaacgtccgctgtacagcccgtttatcacatacagcgaccatacccgccacgaattggcgattttcaacgaagcgcgcaaaatcaaagacgaattcggcgaagatgccgtaacccaaagcattatttccaactgcgaacaacccagcgacctgctcgccttggcgttgctgctgaaagaaaccggcctgttggtggtggaaaacggcaaaccgcacagccgcatcaacatcgtgcctctgtttgaaaccatcgaagcgctcgaaaatgcctgtccggtcatggaaaccatgttccgcctcgactggtatgatgccctgctcgaaagccgcggcaacatccaagaaattatgctcggctactccgactccaacaaagacggcggctacgttaccagctcatggtgcctctatcaggcggaattgggcttggtcgaactcttcaaaaaatacggtgtccgcatgcgcctgttccacggccgcggcggcagcgtcggccgcggcggcggcccgtcttaccaagccattctcgcccaaccggcgggcagcgtggcgggacaaatccgcatcaccgaacaaggcgaagtcattaccgccaaatacgccgaccccggcaatgcccaacgcaacttggaaaccttggttgccgcgactttggaagccagcatcctgccggataaaaaagaccctgatgccaaactgatgcaggcattgtcggacgtatcgttcaaatactaccgcgaactgattacccatcccgacttcatcgactacttcctgcaaaccagcccgattcaggaaatcgccaccctcaacctcggcagccgtcccgccagccgcaaaaccttggcacggattcaggacttgcgcgcaattccgtgggtattctcatggatgcaaaaccgcctcatgctgccggcttggtacggtttcggcagcgcagtggaaaccttgtgcgaaggcagtcccgaaacccttgccgccctgcgcgaacacgctcaaagcaacccgttcttccaagccatgctctccaatatggaacaagtcatggcgaaaaccgacatcaccctggcggaaaactacgccggcttgagcgaatcgcccgataaggcaaaaatcatcttcggcatgattaaggaagaataccggcgcagccgcaaagccctgctcgacctgctgcaaaccgaagaacttttgcgcgacaaccgcagcctcgcccgttcgctcgccttgaggattccatatctgaacgcgctcaacggtttgcaagtcgccatgctcaaacgcctgcgtaaagaacccgacaatccgcacgccctgctgatggtgcacctgaccataaacggcgtggcgcaaggtttgcgcaatacaggctga

SEQ ID NO: 58474 - DNA, 831 bp, Neisseria meningitidis
atggcacattacgcaatcggcgacatacaaggctgtttcgacgaactgaccgcgctgctcgacaaaatcgacttcaaccacggtacagacaccctctggctgacgggtgatatcgtcaaccgcggcccgaaatccctcgaagcgctgcaattttgcatggaacacgaaaacagcgtgcaaatcgtcctcggcaaccatgacctgcacctgcttgccgtcggctgcggcgaaggcgcgcccaaacgcagcgacacaatcgaacccatactcaaacaccccgacgggaaaaaaatgctcgactggctgcgcgcgcaaccgctgttgatacgcgagggcagccgcgtgatggtacacgccggcatcctgccgcaatggcgcataaccaaagccgaatcgctcgccggagaagccgaagccgaactgcgcggcaaaaaatacgtcaaattcttctccaaaatgtacggcaacaaaccggccgcgtgggacgaaggtttggaaggctatgcccgcctgcgcttcatcgtcaacgccttcacgcggatgcgcgccctgacctttaaaaacgaactggatttcgactacaaatccacagtgaaaaaaatgccgccttacctgcgcccgtggttcaaagcccccgaccggcaaaacctcgaccgcaccatcatcttcggacactggtcctcgctgggctacacgaatgccgacaacgtcatctcgctggacaccggcgcgctgtggggcggacagctgaccgccgtcaacctcgaaacggaagaaattacccaagtccaagccgccggcggcatagactggaaaagcttcgcaaaataa

SEQ ID NO: 58475 - DNA, 471 bp, Neisseria meningitidis
atgtacgatgtcaatacccacgatgtccgccgctttttcgcccgcgtgtggcagcagcggctcaatccgctgcaactgagcgcactggaacagaaagccctccgcattgtcgaagcccatcccgaataccaccgttatctcgaacgcatcgaagaccatctggacaccgactggctgcccgaaaacggcgaaagcaaccccttcctgcatatgtcgctgcatctgtccgtccaagaacaggcgggcatagaccagccgcacggcatacgcgcaatccacgacaccctgtgcgccaaacgcggctggctggaagccgaacacgaaatgatggaggcactggcggaaacactgtggacggcgcaacgctacggcaccggtttggatgtcaatttctacatgacccgactgcgcaaactcatcggcttgggtgcagaagatcaagccaggttgaacccgcataaaatcgcctga

SEQ ID NO: 58476 - DNA, 1194 bp, Neisseria meningitidis
atgtaccgacacatcgaatactatccgggcgacccgattttgagtttggtcgaaaccttcaaaaacgacccgcgccctgaaaaagtcaatttgagcataggcatttatttcgacgacgaaggcaaaatgcccgtgttggaatccgtgcgccgtgccgaaaccgcccgcgccgccacgcctgcgccgtcgccctacctgccgatggaaggcttggacacttaccgcagcgcggtgcagcatttattgttcggcaaagacaaccctgcgctcgcgcaaggacgcatcgctaccgtacaaaccttgggcggctcgggcgcgctcaaagtcggggcggacttcctgcaccgctggtttcccgaagcgcgcgcctacgtcagcgacccgacttgggacaaccatcgcggcatttttgaaggcgcaggtttcgaggtcggcacttacccatattacgaccctgctgccgtcggcgtgaaattcgacgaaatgaccgcgtttttcaacaccctgcccgaaaacagcgtcctgatcctccatccctgctgccacaacccgaccggtgtggatatgtcggaacaacaatgggacgaagtgttgcacatcatcaaaacgcgcaaactgattccgtttatggacatcgcctaccaaggcttcggcggcgatttggacagcgatgcctacgccgtccgcaaagcggtggaaatggaattgcccttgttcgtcagcaattccttctcaaaaaacctgtcgctctacggcgagcgcgtcggcggcctgagcgtggtttgcccgaataaggaagaagcggatttggtgttcggacagctcaaattcaccgtccgccgcatctactccagcccgcccgcgcacggcgcgtatatcgccgccgacgtgatgaacagccccgaactttacgccttgtggcaaaacgaggtttatatgatgcgcgaccgcatccgtgcgatgcggcagaaactttatgatgtcttaactgcgcaaatccccgatcgcgatttcacttatttcatcaaacagcgcggcatgttcggctacacaggattgagcgtggaacaagtccgcaggctgcgcgacgaatttgccgtttacctgctggattccggcaggatgtgcgtcgccggactgaatacgtcgaataccgactatgttgcccgcgcatttgcggaagtcttgaaataa

SEQ ID NO: 58477 - DNA, 1194 bp, Neisseria meningitidis
atgacagaggacgaacgtttcgcgtggctgcaattggcgtttacgccctatatcggcgcggaaagcttcctgctgctgctgcgccgtttcggcagcgcgtcaaacgccctgtccgcaccggcggaacaggtcgccccggcggtgcggcacaagcaggcggccgaggcttggcgcaatgcggaaaaacgcgcctcggcgcggcaggcggcagaagcggcgttggaatgggaaatgcgggacggatgccgcctgatgctgtttcaggatgaagatttccccgaaatgctgacgcaggggctgaccgcgccgccggttttgtttttgcgcggcaacgtgcggctgctgcacaagccttccgccgccatcgtcggcagccgccatgccacgccgcaggcgatgcggattgccaaagatttcggcaagtcgttgggcgggcaaaatatccccgttgtgtcgggtatggcttccggtatcgatactgccgcccatcagggcgcactggaggcagaaggcggcaccatcgccgtgtgggggacgggtatagaccgcatttacccgccgtccaataaaaaccttgcctatgaaatcgccgaaaaaggattgattgtcagcgagtttcccatcggtacgcgcccgtatgccggcaactttccgcgccgcaaccgcctgattgccgcgctgtcgcaggttacgctggtggttgaagctgcgttggaatccggttcgctgattaccgccggcttggcggcagaaatggggcgcgaagtgatggcagtacccggttcgatagacaatccgcacagcaaaggctgccacaaactgattaaagacggcgcgaaactgacggaatgtttggacgacatcctgaacgaatgcccggggctattgcaaaatacgggtgcttcgtcatattctataaataaggatacgtccgacacgggcagccgcgccgttcagacggcatacgccccgccgccttcgcctgaaggcaaaatgccgtctgaaggggcggcatgcggcacagaccccggcggcatactggataaaatgggtttcgacccggttcatcccgacgtgcttgccgagcagcttgctatgcctgccgcagatttgtatgccgcactgttggaattggaattggacggcagcgttgccgcaatgcccggcggcagataccagcgtatccgaacttga

SEQ ID NO: 58478 - DNA, 582 bp, Neisseria meningitidis
atgaacctgcgcgatgatttgcaactgatttacgaccggatacccgaaggcagccgcgtcttggacttgggctgcggcgacggcgaactgcttgccgccttggtcgaacacaaaaaatgcagcggctacggcatcgaaatcgacaccgacaacgtgattgccgcgatgtcgcgcggcgtgaatgttatccaagccgatttggaagaaggtttaaccgcattcaacgatcaaagttttgatgtgattgtgttgagccaaaccatccaagcgatgcagaataccgaaaaaatcctgcgctgcctgatgcgcgttgccaaacaggcgattgtcagcttcccgaatttcggctactggcgcaaccgcgtccaaatcgcactcggcggacatatgccggtttccgaacgtatgccctaccattggtacgacacgcccaatatccattggtgcacgctcaaagactttgatttattgtgcgccaaaaacaacatccgcatcctcgagcgcgccgtgatgacgggcaacagacaggtcaaacatttccccaaccttttgggcagtcttgcattttaccgcgtcgggtaa

SEQ ID NO: 58479 - DNA, 1227 bp, Neisseria meningitidis; identical to SEQ ID NO: 53443

SEQ ID NO: 58480 - DNA, 729 bp, Neisseria meningitidis; identical to SEQ ID NO: 50623

SEQ ID NO: 58481 - DNA, 489 bp, Neisseria meningitidis
atgcccccgttatttagaaaagccgtttggctgctgtttgccgtttcggtctgtgcatttgccggttctttggcggcacagtatgttttgggtatggagccttgcgttttgtgtatcagtcagcggttatgcgttttggcaaccgcattgtgtacggcaattgtcctgatgtgcagaccaagaggaagggcaggcggtttgttcggtgctgtctttatcagtattccggccgttacgggtatttctgttgcggcatatcagttgtggttgcagtcgctgccgccgggtacggctccttcgtgcggtgcgccgtggacgtttcgattgaagggctggcctttgtttgattggttcgagcctgtcgtgcgcgggttcggaaattgtgccgaaccggattatctgttaggggttgctttgcctgtttggagcgcggcgtattttctggcggttgtcctgacggtttggtgggcgtgggcaagggctaaataa

SEQ ID NO: 58482 - DNA, 492 bp, Neisseria meningitidis
atgaattccctctttgtggacaatactgttttcattacacggctgaaagccgggcatatcggcaggttggttcaggcgttgtttgaggagtggcacggatttgaaccgtggtcttctgtggataagattcgtgcctattacggcagatgtttgaaggatgacgaactgccgctggcttttgcggctgtggatgatttcggaaccctgttgggttcggctgcggtcaagcggcatgatatgaaaagtttcccacagtatgaatattggttgggggatgtctttgttttacctgaatatcgcggaaaaggcattggcaggaggctggtcgcccattgcataggcgcagcgcgttcgctggggataaagttcttgtatctttatacgcctgatgtgcaaatattttatgaatcattcggctgggcggttgtcgggcgacatttccataacggtgaatgggttacggttatgcgtttggatatggataaggtttaa

SEQ ID NO: 58483 - DNA, 1161 bp, Neisseria meningitidis; identical to SEQ ID NO: 55240

SEQ ID NO: 58484 - DNA, 591 bp, Neisseria meningitidis; identical to SEQ ID NO: 36437

SEQ ID NO: 58485 - DNA, 2208 bp, Neisseria meningitidis
atgtttcccgaccaatccgcccccaacctgctgcaaggcttgaatcccgaacaactctccgccgtaacctggccgccgcaatccgcccttgtactggcgggcgcgggcagcggcaaaacgcgcgtgctgaccacgcgcatcgcatggctgttgcaaaccggtcaggcaagcgtgcacagcattatggcggtaacgtttaccaacaaagccgccaaagaaatgcagacccgtttgggcgcaatgattcccgtcaacgtccgcgccatgtggctcggcacgttccacggcctctgccaccgctttctacggctgcaccaccgcgatgccggtttgccgtcatcctttcaaatcctcgacagcggcgaccaactttccctaatcaaacgtctgctcaaaagcctcaacatcgccgaagaaatcatcgcgccgcgttcgctgcaaggctttatcaacgcgcaaaaagaatccggtttgcgcgcttccgtgttgagcgcgcccgacccgcacacgcgccgcatgattgagtgctacgccgaatacgacaaaatctgccaacgcgaaggcgtggtcgatttcgccgagcttatgctccgcagctacgaaatgctgcaaagcaacgaaattctgcgccagcattaccaaaaccgcttcaatcacattctggtcgacgaattccaagacaccaacaaactgcaatacgcctggctcaaactcatggcgggcggcaacgcggcggtatttgccgtcggcgacgacgaccaaagcatctaccgtttccgtggcgcaaacgttggcaatatgaccgcgctgatggaagaattccacatcgacgcgcccgtcaaactcgaacaaaactaccgctccgtcggcaacatccttgccgccgccaatgccgtgattgaaaacaacgacgaacgactcggcaaaaacctgcgcaccgacgccgaagcaggcgacaaaatccgctactactccgcctttaccgacctcgaagaagcccggttcatcttggacgaaaccaaagccctcgaacgcgaaggctgggatttggacgaaatcgccgtcctctaccgtagcaacgcccaatcccgcgttatcgaacaaagcctgttccgcagcggcatcccctacaaaatctacggcggcttgcgcttttacgaacgccaagaaatcaaacacgcgcttgcctatctgcgcctcgccgtcaatcccgacgacgacaacgccctcttgcgcgtgattaacttcccaccgcgcggcatcggcgcacgcaccgtcgaaaatcttcagacggcctcaaacgaacaaggcatcaccctctggcaagccgcctgcaacgccggcgcgaaagccgccaaagtcgtcgccttcgtccgcctgattgaagccctgcgcaaccaagtcggacaaatgcccctgtccgaaatcatcgtcggcatcctcaaagacagtggcttgaccgaacactaccgcacccaaaaaggcgacaaccaagaccgcctcgacaaccttgacgaactcgtcaacgccgccatcgagttcaaaccagaagacagcaactttgaaaccctgcctgaaaacatttcagacgatcccgccttccccatcctcgctttcttgagcaacgccaccctcgaatccggcgaaaatcaagcaggtgcaggcgaaaaagccgtccaactcatgaccgtccacgccgccaaaggcttggaattcaacgccgtcttcctcacaggcatggaagaaggccgcttccccagcgaaatgagcctcgccgaacgcggcggcctcgaagaagaacgccgcctcatgtatgtcgccatcacccgcgcccgcaaacgcctctacatcaccatggcgcaacaacgcatgctgcacggacaaacccaattcggcatcgtctcccgcttcgtcgaagagatcccacccgaagtattgcactacctgtccgtcaaaaagcctgcctacgacagttacggcaacacgcgccaaaccgccgcatccaaagacaaaatcatcgacgactacaaacagccccaaacctacgcaggtttccgtatcggacaaaacgtccgccacgccaaattcggcaccggcgtgattatcgatgccgcagataaaggcgaatccgcccgactgaccatcaatttcggcaaacagggcgtgaaagagttggacaccaagtttgcgaaattggaagagatgtaa

SEQ ID NO: 58486 - DNA, 3105 bp, Neisseria meningitidis
atgaataaaactttgaaaaggcaggttttccgccataccgcgctttatgccgccatcttgatgttttcccataccggcgggggggggggggcgcaggcgcaaaccagtaaatacgctattatcatgaacgaacgaaatcagctggaggtaaagcaggagggttcatattcaaccttaagggaaaaagacagggaacgcaaatttgactttaatgcgaacagagggggtggaggttctgtctttttcgacaataccgatacccttgtttcccgacaaagcggtactgccgtttttggcacagccacctacctgccgccctacggcaaggtttccggttttgatgccaacgctctgaaagagcgcaacaatgccgtcgattggattcataccacccgggccgggctggcaggctacgcctacaccaacgtcatatgcagaagcagcgaccaatgcccccaacttgtctatgagaccaaatttgccttcagcaacaaagatttggcaaacaatgcgggcaggctggataggcactcggacccaagccgcgaaaattcgcccatttacaaattgaaagatcatccatggttgggcgtatctttcaatttgggcagcgagggtaccgccaaaaatggcaaatcattcaacaaattggtatcttcttttgatgaaaacaatagtaatcaaaacctcgtctatacgacaaaaggccaccatatttcccttggcgactggcagcgcgaacataccgccatggcctattatctgaacgccaaactgcacctgctggacaaaaaagggattaaagatatcgcccaaggcaaaacagtggatttgggcaccttgagaccgcgcgtcgaggcaaaggtaaggcggggggggggggatctgctaaatttttgggctacgtggaagattgaagataaagggaacattacagtccgcctcgacctgccggaagtcaaagccgggcgctgcaccaacgccgcccaccccaatcccaaagtccaagccccttcccccgcactgactgcccccgcgctgtggttcggacctgtgcaaaatggtaaggtgcagatgtattccgcttcggtttctacctaccccgacagttcgagcagccaaattttcctgcaaaacctttcccgcaaggatgacacaagcaaaccgggccgctattccctcaaacccttgagtacgtcggagattaaaagtaaagagccgaatttcacggggcggcaaacaatcatccgattggatagcggcgtacgtgagatcaaactggatagaagcaatgaggccaccggtttaaatggaaatgacggcaaaaacgaaactttcggcattgttagtgaagggagcttcatgcctgatgtcagcgagtggaaaaaagtgctgctgccttggacggttcgggtttttgctgatgacagtaaatttaaagaattcaacaaagaagaaaaagacaacaagccaaaatacagtcaaaaataccgcagccgcgacaacaacaatcacaatttgggcgacatcgtcaacagccccatcgtggcggtcggcgaatatctagctacttccgccaacgacgggatggtgcatatcttcaaaaaaggcaacggcggggacgagcgcaactatagtctgaagctcagttatatcccgggcacgatgccgcgcaaggatattcaaaacaccgaatccacccttgccaaagagctgcgcgcctttgccgaaaaaagctatgtgggcgaccgctacggcgtggacggcggctttgtcttgcgcaaagtcgaacggaacgggaaagaccatgtgtttatgttcggcgcgatgggctttggcggcagaggcgcgtatgccttggatttaagcaaaatcgacagcggcaacggcaacctggcagacgtttccctgtttgatgtcaaacatgacaagaatggcaataacggcgtgaaattaggctacaccgtcggcacgccgcaaatcggcaaaacccacgacggcaaatacgccgctttcctcgcctccggttatgcgactaaagacattaccagcggcgacaataaaaccgcgctgtatgtgtatgatttggaaagcagcggcacgctgattaaaaaaatcgaagtacccggtggcaagggcgggctttcgtcccccacgctggtggataaagatttggacggcacggtcgatatcgcctatgccggcgatcgcggcggcagtatgtaccgctttgatttgagcaatcaagatcctaatcaatggtctgtacgcgccatttttgaaggcacaaaaccgattacttccgcgcccgctatttcccaactgaaagacaaacgcgtggttatcttcggcacgggcagtgatttgagtgaggatgatgtactcagtacgagcgaacaatatatttacggtatcttcgacgacgatacggtggcgaataacgtaaatgtaaaactcagcggtttgggaggcgggctgctcgagcaagagcttaagcaggaggataaaaccttattcctgaccgattacaagcgatccgacggatcgggcagcaaagggtgggtagtgaaattgaagggcggacagcgcgttaccgtcaaaccgaccgtggtattgcgtaccgcctttgtaaccatccataaatatacgggtacggacaaatgcggcgcggaaaccgccattttgggtatcaataccgccgacggcggcaagctgaccaagaaaagcgcgcgcccgattgtgccggccgagaatcaggctgtcgcgcaatattccggccataagaaaggcatcaacggcaaatccatccctataggttgtatgcaaaaaggcaatgaaatcgtctgcccgaacggatatgtttacgacaaaccggttaatgtgcgttatctggatgaaaagaaaacagacggattttcaacaacggcagacggcgatgcgggcggcagcggtatagaccccgccggcaagcgttccggcaaaaacaaccgctgcttctcccaaaaaggggtgcgcaccctgctgatgaacgatttggacagcttggacattaccggcccgacgtgcggtatgaaacgaatcagctggcgtgaagtcttctactga

SEQ ID NO: 58487 - DNA, 1002 bp, Neisseria meningitidis; identical to SEQ ID NO: 50863

SEQ ID NO: 58488 - DNA, 450 bp, Neisseria meningitidis
atgagtatttatgccgtcgcgcacatcgtccacctgtattgcgccattgcctttgtcggcggcgtgttttttgaagtgctggttttgtccgtcctgcatacggggcgggtgtcgcgcgagtcgcggcgcgaagtggaaaaggcaatgtcttaccgcgccgtcagggtgatgccgtttgtggtcggactgctgttcgccagcggtgtcgtgatggcggcaaaccgctatctttctatattgggcgaaccgtttgccacttccttcggtacgatgctgacgctgaaaatcctgttggcgttcagcgtgttggcgcacttcgccatcgccgtcgtcaaaatggcgcgttccacactgacggtcggctggtcgaaatacatacacgccgtcgtctttacccatatgctgctgattgtctttttggcaaaagcgatgttttatatcagctggtaa

SEQ ID NO: 58489 - DNA, 207 bp, Neisseria meningitidis; identical to SEQ ID NO: 51505

SEQ ID NO: 58490 - DNA, 786 bp, Neisseria meningitidis; identical to SEQ ID NO: 55814

SEQ ID NO: 58491 - DNA, 624 bp, Neisseria meningitidis; identical to SEQ ID NO: 37310

SEQ ID NO: 58492 - DNA, 1455 bp, Neisseria meningitidis
atgagcatcgaaccaacccctccgaaccttgaaaacgacggtatcgaaaacgatgtagaacgcgtttccgccgatttcgaccgtgtccactccctctgcgaaatcctcgaacctgcttttgaacaaatcgaaaacggtacaccgctcgaagacgcgccgctgcgcgacaagctgaccgagctgaccgtcctcttgagcgagctgcaccctgccgacgtggcggcggtgttggaatcgctgccgccgcgcgaacgcaatatcgtctggattttagtgaaacccgaagacgacggcgaagtattgctggaagtatccgacgcggtgcgcgaaacgctgatcgagtcgatggacaaggacgaattgttggcggcagttgacgatttggacgcggacgaattggcggaactggcagacgatttgccgcaccaagtggtttatgaagccttgcagacgcgcgacgaggaagagcgcgcacaagtcaaagcggcaatgtcctacgaagacaaccaagtcggtgcgattatggacttcgagttggtcagcatccgcgccgatgtcgcctgtgaagtggtgctgcgctatctgcgccgcttcgacagcctgcccgaccataccgacaagatttttgtggtcgatgaaaacgacgtactgcaaggcgtgctgcccatccgcaaacttttggtcgccgatcccgaagatttggtggaaaacgtgatggcgaaagatgtcgtgcgtttccgcgccgaagacgacgtggaagaagcggcgcaggcgtttgaacgctacgacttggtaactgcgccggttgtcgatgaaaacaaaaagctcatcggtaggatcaccattgacgaaatggtggacgtcatccgtgaagaatccgaagcggatatgttgaacatggcaggtttgcaggaagaggaagacctgttcgcccccgtcttggattccgtcaaaaaccgctggatgtggctcgccatcaacctctgcactgccttccttgccagccgcgtcatcggcgcgtttgaaggcagcatcgaaaaaatcgtcgcactcgccgcgctgatgcccatcgtcgccggcataggcggcaactcgggcaaccagacgattaccatgattgtccgcgcgatggcgatggggcagctgacggatatgcaggcggggcgtttgctgaaaaaagaagtcggcgtcgccttggtcaacggcatcatttggggaacggtcatgggcgcagtatcttggctgctttacggcagcctcggcatcggtttggtcatggttgccgcgatgacgctcaacctgctgctggcggcaaccgtcggcgtattaattcccgtggtaatggaaaagttcggacgcgatcccgcgctgggcagctcggtgctgattaccgccgttaccgactccggcggcttcctgattttcttgggtctcgccaccctgttcctgctttaa

SEQ ID NO: 58493 - DNA, 1635 bp, Neisseria meningitidis; identical to SEQ ID NO: 50544

SEQ ID NO: 58494 - DNA, 933 bp, Neisseria meningitidis; identical to SEQ ID NO: 38763

SEQ ID NO: 58495 - DNA, 1524 bp, Neisseria meningitidis; identical to SEQ ID NO: 52506

SEQ ID NO: 58496 - DNA, 1362 bp, Neisseria meningitidis; identical to SEQ ID NO: 42739

SEQ ID NO: 58497 - DNA, 2178 bp, Neisseria meningitidis
atgacacgcttcaaatattccctgctgtttgccgccctgttgcccgtgtacgcgcaggccgatgtttctgtttcagacgaccccaaaccgcaggaaagcactgaattgccgaccatcaccgttaccgccgaccgcaccgcgagttccaacgacggctacactgtttccggcacgcacaccccgctcgggctgcccatgaccctgcgcgaaatcccgcagagcgtcagcgtcatcacatcgcaacaaatgcgcgaccaaaacatcaaaacgctcgaccgcgccctgttgcaggcgaccggcaccagccgccagatttacggctccgaccgcgcgggctacaactacctgttcgcgcgcggcagccgcatcgccaactaccaaatcaacggcatccccgttgccgacgcgctggccgatacgggcaatgccaacaccgccgcctatgagcgcgtagaagtcgtgcgcggcgtggcggggctgctggacggcacgggcgagccttccgccaccgtcaatctggtgcgcaaacgcccgacccgcaagccattgtttgaagtccgcgccgaagcgggcaaccgcaaacatttcgggctgggcgcggacgtatcgggcagcctgaacaccgaaggcacgctgcgcggccgcctggtttccaccttcggacgcggcgactcgtggcggcggcgcgaacgcagccgcgatgccgaactctacggcattttggaatacgacatcgcaccgcaaacccgcgtccacgcaggcatggactaccagcaggcgaaagaaaccgccgacgcgccgctcagctacgccgtgtacgacagccaaggttatgccaccgccttcggcccgaaagacaaccccgccacaaattgggcgaacagccgccaccgtgcgctcaacctgtttgccggcatcgaacaccgcttcaaccaagactggaaactcaaagccgaatacgactacacccgcagccgcttccgccagccctacggcgtagcaggcgtgctttccatcgaccacaacaccgccgccaccgacctgattcccggttattggcacgccgacccgcgcacccacagcgccagcgtgtcattgaccggcaaataccgcctgttcggccgcgaacacgatttaatcgcgggtatcaacggttacaaatacgccagcaacaaatacggcgaacgcagcatcatccccaacgccattcccaacgcctacgaattttcccgcacgggcgcctatccgcagccatcatcgtttgcccaaaccatcccgcaatacggcaccaggcggcaaatcggcggctatctcgccacccgtttccgcgccgccgacaacctttcgttgatactcggcggcagatacagccgttaccgcaccggcagctacgacagccgcacacaaggcatgacctatgtgtccgccaaccgtttcaccccctacacaggcatcgtgttcgacctgaccggcaacctgtcgctttacggctcgtacagcagcctgttcgtcccgcaatcgcaaaaagacgaacacggcagctacctgaaacccgtaaccggcaacaatctggaagccggcatcaaaggcgaatggcttgaaggccgtctgaacgcatccgccgccgtgtaccgcgcccgtaaaaacaacctcgccaccgcagcaggacgcgacccgagcggcaacacctactaccgcgccgccaaccaagccaaaacccacggctgggaaatcgaagtcggcggccgcatcacgcccgaatggcagatacaggcaggttacagccaaagcaaaacccgcgaccaagacggcagccgcctgaaccccgacagcgtacccgaacgcagcttcaaactcttcaccgcctaccacttcgcccccgaagcccccagcggctggatcatcggcgcaggcgtgcgctggcagagcgaaacccacaccgaccctgccacgctccgcatccccaaccccgccgccaaagcccgcgccgccgacaacagccgccaaaaagcctacgccgtcgccgacatcatggcgcgttaccgcttcaatccgcgcgccgaactgtcgctgaacgtggacaatctgttcaacaaacactaccgcacccagcccgaccgccacagctacggcgcactgcggacagtgaacgcggcgtttacctatcggtttaaataa

SEQ ID NO: 58498 - DNA, 1248 bp, Neisseria meningitidis
atgttgaaacaaacgacacttttggcggcttgcgcctcctttgccgcactgttgggcggttgtgctacccagcagcctgcccccgtcattgcaggcaattcaggtatgcaggacgcgccgtcttcggcagtttacaacaacccctatggagcaacgccgtacagcccggctcctgccagcgatgcgccttatgtgccgccggtgcaaagcgcgccggtttatacgcctcctgcttatgttccgccgtctgcacctgccgtttcgggtacatacgttccttcttacgcacccgtcgacatcaacgcggcgacgcatactattgtgcgcggcgacacggtgtacaacatttccaaacgctaccatatctctcaagacgatttccgtgcgtggaacggcatgaccgacaatacgttgagcatcggtcagattgttaaagtcaaaccggcaggatatgccgcaccgaaagccgcagccgtaaaaagcaggcccgccgtaccggctgccacgcaaccgcccgtacagtccgcacccgtcgacatcaacgcggcgacgcatactattgtgcgcggcgacacggtgtacaacatttccaaacgctaccatatctctcaagacgatttccgtgcgtggaacggcatgaccgacaatatgttgagcatcggtcagattgttaaagtcaaaccggcaggatatgccgcaccgaaaaccgcagccgtagaaagcaggcccgccgtaccggctgccgtgcaaacccctgtgaaacccgccgcgcaaccgcctgtgcagtccgcgccgcaacctgccgcgcccgctgcggaaaataaagcggttcccgcgcccgccccgcaatctcctgccgcttcgccttccggcacgcgttcggtcggcggcattgtttggcagcgtccgacgcaaggtaaagtggttgccgatttcggcggcaacaacaagggtgtcgatattgccggtaatgcgggacagcccgttttggcggcggctgacggcaaagtggtttatgcaggttccggtttgaggggatacggcaatctggtcatcatccagcataattcttccttcctgaccgcatacgggcacaaccaaaaattgctggtcggcgaaggccagcaggtcaaacgcgggcagcaggtcgctttgatgggcaataccgacgcttccagaacgcagcttcatttcgaggtgcggcaaaacggcaaaccggttaatccgaacagctatatcgcgttctga

SEQ ID NO: 58499 - DNA, 1113 bp, Neisseria meningitidis; identical to SEQ ID NO: 43907

SEQ ID NO: 58500 - DNA, 297 bp, Neisseria meningitidis; identical to SEQ ID NO: 45238

SEQ ID NO: 58501 - DNA, 594 bp, Neisseria meningitidis; identical to SEQ ID NO: 50571

SEQ ID NO: 58502 - DNA, 1635 bp, Neisseria meningitidis
atgataaaaccgaacctgaggccgaagctcggctcttccgcgctgattgccttcctttccctgtattcctcgctggtattgaattacgccttttttgccaaagttgtcgagcttcatccttttaacggcaccggggcggatatcttcctctatacgatgccggtggtgctgttttttttaagtaatttcgtttttcacgtcattgccctgcctttcgtgcataaggtattgattccgttgatattggttatcagtgcggcggtgtcttaccaagaaatatttttcaatatctatttcaacaagtcgatgttgaataatgtcttgcaaactacggctgccgaaagcgcgcgcctgattacgccgggctatgtgctgtggattgtatgtttgggcgtattgcccgcgctggcgtatatcgccgtcaaggttaaataccgcgtttggtataaggagcttttgacgcgccttgtgcttgccgccgtttcctttttgtgcgcgttgggcatcgcaatgttgcaatatcaggattacgcctcgtttttccgcaacaataaatcagtaacccatctgattgtgccatctaatttcatcggcgcgggcgtgtcgaaatacaaagattggaagcgttccaatattccttatacgcaattggatatggcggtcgtgcaaaaccgcccggccggcagcctgcgccgtttcgtggtgctggtcgtgggcgagaccacgcgtgccgccaactggggtttgaacggttacagccgccaaactacgccgctgcttgccgcgcgcggcgatgaaattgtcaatttcccgcaggtcagaagctgcggcacatcgaccgcgcactccctgccgtgtatgttctcaaccttcgaccgcacggattatgacgaaatcaaagccgaacaccaagacaacctgctggacatcgtgcagcgcgccggcgtggaagttacctggttggaaaacgattccggctgcaagggcgtgtgcggcaaagtgccgaataccgacgttacctcgctcaacctgcccgaatactgccgcaacggcgaatgcctcgacaatatcctgctgactaagttcgacgaagtcctcaacaaaaacgataaagacgcggttttaatcctgcataccatcggcagccacgggccgacgtattacgaacgctataccgaagccgaacgcaaattcacgccgacctgcgacaccaacgaaatcaacaaatgcacccgcgccacgctggtcaacacttacgacaatacggttttgtatgtggaccagtttatcgacaaggttatccgcaaacttgaaaaccgcgacgatttggaaagcgtggtgcattatgtttccgaccacggcgaaagtttgggcgaaaacgggatgtacctgcacgccgcgccttacgccatcgcgccttctgggcagacgcatatcccgatggttatgtggttttccaaagccttccgccaacacgggggcatagatttccaatgcctcaaacaaaaagcggcggaaaacgaatattcgcacgaccactatttcagcacggtattggggctgatggacatttccaacagccaaacctatcggaaggaaatggatatattggcagcctgccgccgtccgcgctga

SEQ ID NO: 58503 - DNA, 447 bp, Neisseria meningitidis
atgaatttcagttttgttcccctgtttctggttacgctgattctgttgggggtggtcagcaacaacaattcgattaccatctcggcaaccatattgctgctgatgcagcagacggcattgatacagtttgtcccgttggtcgagaagcacgggttgaacctcggtatcattcttttgaccataggggttttgagtccgttggtttcaggaaaggcgcgggttcctcctgttgccgaatttttgaattttaaaatgatatccgccgtttttatcggtattttcgtggcttggctggcgggacgcggcgtgcctttgatgggacagcagcctgttttaattacagggctgttaatcgggacggttatcggggtggcatttatgggcggtatccctgtcgggccgctgattgcggccggcatcttgtcttttgtcgtcggaaagggttaa

SEQ ID NO: 58504 - DNA, 594 bp, Neisseria meningitidis; identical to SEQ ID NO: 38781

SEQ ID NO: 58505 - DNA, 759 bp, Neisseria meningitidis; identical to SEQ ID NO: 43846

SEQ ID NO: 58506 - DNA, 894 bp, Neisseria meningitidis
atggtaacgttttcaaaaatcagaccgcttttggcaatcgccgccgccgcgttgcttgccgcctgcggcacggcgggaaacaatgccgcccgcaagccggtgcaaaccgccaaacccgccgcagtggtcggtttggcactcggtggcggcgcgtctaaaggatttgcccatataggcattattaaggttttgaaagaaaacggtattcctgtaaaagtagtaaccggcacatcggcaggttcgatagtcggcagcctttttgcatcgggtatgtcgcccgaccgccttgaattggaagccgagattttaggtaaaacggatttagtcgatttaaccttgtccaccagtggttttatcaaaggcgaaaagctgcaaaattacatcaaccgaaaagtcggcggcaggcggattcagcagtttcccatcaaatttgccgctattgctactgattttgaaaccggcaaggccgtcgctttcaatcaggggaatgccgggcaggctgtgcgcgcttccgccgccattcccaatgtgttccaacccgttatcatcggcaggcatacatatgttgacggcggtctgtcgcagcccgtgcccgtcagtgccgcccggcggcagggggcgaatttcgtgattgccgtcgatatttccgcccgtccgggcaaaaacatcagccaaggcttcttctcttatctcgatcagacgctgaacgtaatgagcgtttccgcactgcaaaacgagttggggcaggcggatgtggttatcaaaccgcaggttttggatttgggtgcagtcggaggattcgatcagaaaaaacgcgccatccggttgggcgaggaggctgcacgtgccgcattgcctgaaatcaaacgcaaactggcggcataccgttattga

SEQ ID NO: 58507 - DNA, 729 bp, Neisseria meningitidis; identical to SEQ ID NO: 37361

SEQ ID NO: 58508 - DNA, 468 bp, Neisseria meningitidis; identical to SEQ ID NO: 51208

SEQ ID NO: 58509 - DNA, 1914 bp, Neisseria meningitidis
atgaacccaagccccctactcgacctgattgacagcccgcaagatttgcgccgtctggacaaaaaacagctgccgcgccttgccggcgagttgcgcgcctttctgctggaatctgtcgggcagaccggcgggcatttcgccagcaatttgggcgcggtcgaactgaccatcgccctgcactatgtgtacgatacgcccgaagacaagctggtatgggatgtcggacaccaaagctatccgcacaaaatcctgacaggcaggaaaaaccagatgcacaccatgcgccaatacggcggtttagctggcttcccaaaacgcagcgagtcggaatacgacgcgttcggcgtagggcattcttccacatccatcggcgcggcgttgggcatggcggcggcagacaaactcttgggcagcgaccgccgcagcgtcgccatcatcggcgacggcgcgatgacggcggggcaggcgtttgaagccttgaattgcgcaggcgatatggatgtggatttgctggtcgtcctcaacgacaacgaaatgtcgatttcccccaacgtcggcgcgctgccgaaataccttgccagcaacgtcgtgcgcgatatgcacggcctgttgagtaccgtcaaagcgcaaacgggcaaggtattagacaaaatacccggcgcgatggagtttgcccaaaaagtcgaacacaaaatcaaaacccttgccgaagaagccgaacacgccaaacagtcgctgtctttgtttgaaaacttcggcttccgctacaccggccccgtggacggacacaacgtcgaaaatctggtggacgtattgaaagacttgcgcagccgcaaaggccctcagcttctgcacgtcatcaccaaaaaaggcaacggctacaaactcgccgaaaacgaccccgtcaaataccacgccgtcgccaagctgcctaaagaaggcgcggcgcaaatgccgtctgaaaaagaacccaagcccgtcgccaaaccgacctatacccaagtgttcggcaaatggctgtgcgaccgggcggcggcagacgagcgtttgatcgccatcacgcccgcgatgcgcgagggcagcggactggtggagtttgaacaacgattccccgaccgttatttcgatgtcggcattgccgagcagcacgccgttacctttgccggcggtttggcgtgcgaaggcatgaagcccgtcgtggcgatttattccacctttttacaacgcgcctacgaccaactggtgcacgacatcgccctgcaaaacctgcccgttttgtttgccgtcgaccgcgcgggcatcgtcggcgcggacggcccgacccatgccggtctgtacgatttgagctttttgcgctgcattccgaatatgattgtcgccgcgccgagcgatgaaaacgaatgccgcctgctgctttcgacctgctatcaggcggatgcgcccgccgccgtccgctatccgcgcggcacgggtacgggcgcgccggtttcagacggcatggaaaccgtggaaatcggcaagggcattatccgccgcgaaggtgggaaaaccgcattcattgccttcggcagtatggtcgcccccgcattggcggtcgccggaaaactgaacgccaccgtcgtcgatatgcgctttgtcaaaccgatagacgaagagttgattgtccgccttgcccgaagccacgaccgcatcgttacccttgaagaaaacgccgaacagggcggcgcaggcggcgcggtgctggaagtattggcgaaacacggcatctgcaaacccgttttgcttttgggcgttgccgataccgtaaccggacacggcgatccgaaaaaacttttggacggtttgggtttgagtgccgaagcggtggaacggcgtgtgcgcgcgtggctgtcggatcgggatgcggcaaattaa

SEQ ID NO: 58510 - DNA, 765 bp, Neisseria meningitidis
atgagctacacgcaactgacccaaggcgaacgataccacatccaatacctgtcccgccactgcaccgtcaccgaaatcgccaaacagcttaaccgccacaaaagcaccatcagccgcgaaatcagacggcaccgcacccaagggcagcaatacagcgccgaaaaagcccagcggcaaagccagactatcaaacagcgtaagcgacaaccctataagctcgattcgcagctgattcagcacatcgacccccttatccgccgcaaactcagtcccgaacaagtatgcgcctacctgtgcaaacaccaccagatcacgctccaccacagcaccatttaccgctaccttcgccaagacaaaagcaacggcagcacgttgtggcaacatctcagaatatgcagcaaaccctaccgcaaacgctacggcagcacatggaccagaggcaaagtacccaaccgtgtcggcatagaaaaccgacccgctatcgtcgaccagaaatcccgtatcggcgattgggaagccgacaccattgtcggcaaaggacagaaaagcgcattattgaccttggtcgaacgcgttacccgctacaccatcatctgcaaattggatagcctcaaagccgaagacactgcccgggcagctgttaggacattaaaggcacataaagacagggtgcacaccatcaccatggataacggcaaagagttctaccaacacaccaaaataaccaaagcattgaaagcggagacttatttttgtcgcccttag

SEQ ID NO: 58511 - DNA, 459 bp, Neisseria meningitidis; identical to SEQ ID NO: 37875

SEQ ID NO: 58512 - DNA, 1341 bp, Neisseria meningitidis
atgttgaatccatcccgaaaactggttgagctggtccgtattttggacgaaggcggttttattttcagcggcgatcccgtacaggcgacggaggctttgcgccgcgtggacggcagtacggaggaaaaaatcatccgtcgggcggagatgattgacaggaaccgtatgctgcgggagacgttggaacgtgtgcgtgcggggtcgttctggttgtgggtggtggcggcgacgtttgcattttttaccggtttttcagtcacttatcttctaatggacaatcagggtctgaatttctttttggttttggcgggcgtgttgggcatgaatacgctgatgctggcagtatggttggcaatgttgttcctgcgtgtgaaagtggggcgttttttcagcagtccggcgacgtggtttcggggcaaagaccctgtaaatcaggcggtgttgcggctgtatgcggacgagtggcggcaaccttcggtacgttggaaaataggcgcaacgtcgcacagcctgtggctctgcacgctgctcggaatgctggtgtcggtattgttgctgcttttggtgcggcaatatacgttcaactgggaaagcacgctgttgagcaatgccgcttcggtacgcgcggtggaaatgttggcatggctgccgtcgaaactcggtttccctgtccccgatgcgcgggcggtcatcgaaggccgtctgaacggcaatattgccgatgcgcgggcttggtcggggctgctggtcggcagtatcgcctgctacggcatcctgccgcgcttcttggcttgggtggtgtgtaaaatccttttgaaaacaagcgaaaacggattggatttggaaaagccctattatcaggcggtcatccgccgctggcagaacaaaatcaccgatgcggatacgcgtcgggaaaccgtgtccgccgtttcaccgaaaatcatcttgaacgatgcgccgaaatgggcggtcatgctggagaccgagtggcaggacggcgaatggttcgagggcaggctggcgcaggaatggctggataagggcgttgccaccaatcgggaacaggttgccgcgctggagacagagctgaagcagaaaccggcgcaactgcttatcggcgtgcgcgcccaaactgtgccggaccgcggcgtgttgcggcagattgtccgactctcggaagcggcgcagggcggcgcggtggtgcagcttttggcggaacaggggctttcagacgacctttcggaaaagctggaacattggcgtaacgcgctggccgaatgcggcgcggcgtggcttgagcctgacagggcggcgcaggaagggcgtttgaaagaccaataa

SEQ ID NO: 58513 - DNA, 1809 bp, Neisseria meningitidis
atgcgtaccaactattgcggtctgattagcgagcaatacttagaccaaaccgttaccgtcaaaggctgggtacaccgtcgacgcgaccatggcggtgtgatttttatcgacctgcgcgaccgcgaaggcatcgtccaagtcgtgatcgatcccgacacgcccgaagcgtttgccgctgccgattcctcccgcaacgaatacgttttgagcattaccggccgcgtacgcaaccgtcctgaaggtaccaccaatgacaaaatgatttccggcaaaattgaaatccttgccaaagaaatcgaagtcttgaatgctgccgctacgcctccgttccaaattgacgatgaaaacatcagcgaaaacgttcgcctgaccaaccgcgttatcgacttgcgccgtcctactatgcaacgcaacctgcgtctgcgttaccaagtcgctatgggcgttcgccgctacttggacgcacaaggcttcatcgatatcgaaacgccgatgctgacccgctccactccggaaggcgcacgcgactacctcgtaccaagccgcgttcatccgggcgaattcttcgctctgccgcaatctccacaattattcaaacaattgctgatggtggccggtttcgaccgttactaccaaatcaccaaatgtttccgtgacgaagacttgcgtgccgaccgtcagcctgaatttactcaaatcgacttggaaacctcgttcttgaacgaggatgaaatcatggacatcaccgaaggcatggccaaacaagtcttcaaagatgctttaaacgtagatttaggcgacttcccgcgtatgccttacgccgaagccatgttctactacggctctgacaaaccggacatgcgtatcaacttgaaattcaccgagttgaccgacctgatgaaaacggaagaattcaaagtcttccgtggcgcggcagatatgaaaggcggccgcgtggttgccctgcgtgtgccgaacggtgcgaaattcagccgcaaagaaatcgacgaatacactaaatttgtcggcatctacggtgcgaaaggtctggcatacatcaaagtaaacgatgtgggcaacctttccaacggcgaagacagcggcctgcaatctccaatcgtaaaattcctgtctgagaatgccctgaaagaaatcatcgagcgtaccggcgcacaaaacggcgatattatcttcttcggtgcggacaaaaccaaagttgtgaacgaagccatcggcgcattgcgtattaaagtcggtttagaacacggcgcggaaaacggctacttcacagacgaatggaaacctttgtgggttgtcgacttcccgatgtttgaatacgacgaagaagccgaccgctacgttgccgtacaccatccgtttactgcgccaaaagaaggtcatgaagacctgatggtttccgacccggcaaattgtttggcacgcgcctacgacatggtattgaacggctgggaaatcggcggcggctctatccgtatccaccgtgcagacgtacaagagaaagtgtttgccgcgctgaaaatcagccctgaagagcaacaagagaaattcggcttcctcttggacaacctgaaattcggcgcacctccgcacggcggccttgcattcggcctcgaccgtttggttaccctgatgaccggcgccgaatctatccgcgacgtgattgccttcccgaaaacacaacgtgcccaatgcctgctgaccaacgcgcccaacagcgtggacgacaagcagttgcgcgaattgagcttgcgcctgcgtcaaaaggtggctgaaaccaaagaagcataa

SEQ ID NO: 58514 - DNA, 234 bp, Neisseria meningitidis; identical to SEQ ID NO: 50280

SEQ ID NO: 58515 - DNA, 822 bp, Neisseria meningitidis
atggattttctgattgtcctgaaagccctgatgatgggcttggtagaaggttttaccgaatttttaccgatttccagcaccggacatttgattgtgttcggcaatctgattggttttcacagcaatcacaaggtttttgaaattgccatccagctcggtgcggttttggcggtagtgtttgaataccggcaacgtttcagcaatgtgttgcacggcttgggaaaagaccggaaagccaaccgcttcgtccttaatcttgccattgcttttatacctgccgccgtgatggggctgttgttcggcaaacaaatcaaagagtatctgtttaaccccttgagtgttgcagtcatgctggttttgggcggtttttttattttgtgggtggagaaacgccaaagccgagcagagcctaaaattgccgatgttgatgcattgcgtccgattgatgccttgatgatcggcgttgcccaagtgtttgcactggttccgggtacgtcccgttcgggcagtacgattatgggcgggatgctttggggcatcgaacggaaaactgcgacagaattctcgtttttcttggctgtgccgatgatggttgccgcaacggcttatgatgtcctgaaacattaccgatttttcaccctgcatgatgtcggtttgattctgataggctttattgctgcctttgtttcaggcttggtagcggtaaaagcgttgctgaggtttgtttccaagaaaaattatattccttttgcctattaccgcattgtttttggtattgccatcattatattgtggctgtcaggctggataagttgggaatga

SEQ ID NO: 58516 - DNA, 2580 bp, Neisseria meningitidis
atgcgatacgacaaattaaccgccaaattccaacaagcccttgcagaagctcagagtttggcgttggctgcggacggcagctatctggaagcaggctttgtgttaaaagccctgcttgacgaccaaaacagcggagccgccgcgttgctggcgcattcgggcgtgaacgtgccgcaggtgaaacagcgtttgcagcagcatttgaacagcctgccgaaagtgtccagccagggcggcgacattctgcccagccgcgaattgcaggcggtgttgaacctgatggacaaagccgcaaccaaacgcggcgatgcctatatcgccagcgaacttttcctgcttgccttggtgcagcagaacgatgcggccggcaaaattttgaaagaagccggcgcgaccgaacaaaacatcaatgccgcaatcgatgcggtacgaggaggacaaaacgtgaacgatgccaatgccgaagaccaacgcgatgcgctgaaaaaatatacgcttgacctgacccaacgcgcccgcgacggcaaacttgaccccgttatcggtcgtgatgatgaaatccgccgcgcgattcaggtattgcaacgccgtaccaaaaacaaccctgtgctgattggtgagccgggtgtgggtaaaaccgccattgttgaaggcttggcgcaacgtatcgtcaacggcgaagtacctgaatccctgcgtaacaaacgcctgctggttttggatttggcggctttgattgccggcgcgaaataccgcggcgaatttgaagaacgcttgaaaggcgtgttgaacgatttggcgaaagacgacggcaacactctgattttcattgatgaaatccatactttggtcggcgcgggcaaaaccgacggcgcgatggacgcgggcaatatgctgaaaccggccttggcgcggggcgaactgcactgtatcggcgcgaccaccttggacgaataccgccaatacatcgaaaaagacgcggcactcgaacgccgcttccaaaaagtattggtcggcgagcccagcgtggaagacaccatcgccatcttgcgcggtttgcaggagcgttatgaaatccaccacggtatcgatattaccgaccctgctatcgttgccgcagcggagttgagcgaccgctacatcaccgaccgcttcctgcccgacaaagcgattgatttgattgatgaagccgccagccgtgtcaagatggaaaaagaaaccaagccggaagcaatggacaaaatcgaccgccgtctgattcagcttcggatggaaaaggcacacgttgaaaaagaaaaagacgatgccagcaaaaaacgtttggaactgatagacgaggaaatcaacggtctgcaaaaagaatacgccgatttagacgaaatctggaaagccgaaaaagcaatttcagacggtgctgctaatattaagaaacaaattgacgaagtcaaaattaaaatcgaacaggcaaaacggcaaggcgatttggcactggcttcaaaattgatgtatgaagatttggagcatttggaaaaacagcgtgcagccgccgaacgggcagatacggacagcacaaaaccggcaaacaaactcttgcgtaataatgtcggcgcggaggaaatcgcagaagttgtttcccgtatgaccggtattcccgtgtccaaaatgatggaaggcgaacgcgacaaactgctgaagatggaagaagtattgcaccgccgcgtggtcggtcaagatgaagccgtgcgtgccgtgtccgacgctatccgccgcagccgttccggtcttgccgatccgaacaaaccttacggcagcttcctgttcttaggcccgaccggcgtgggtaagaccgaattgtgtaaggcattggcaggcttcctgtttgacagtgaagatcatctgattcgtatcgatatgtccgaatatatggaaaaacacgccgttgcccgcctcatcggcgcgcctccgggctatgtcggctacgaagagggcggttacctgaccgaacaagtgcgccgcaaaccgtacagcgtgattcttttggacgaagtggaaaaagcccatcccgacgtgttcaacatcctgctgcaagtattggatgacggtcgtttgaccgacgggcaaggcaggacggtagattttaaaaataccgtgattgtgatgacttccaacatcggcagccagcacatccaacaaatgggcattcaggattacgaagcggtaaaagaagttgtgatggaggatgtgaaagaacatttccgtcctgaaatgatcaaccgcatcgacgaagtggtcgtgttccacggactggatcaggataatatccgcaacattgcgaaaatccagctcaaaggcttggaaaaacgtttggaaaaacaaaacctccgcctgactgtttccgatgccgcactggacatcatcgccaaagccggtttcgacccgatttacggcgcacgtccgctcaaacgcgccatccagtcggaaatcgaaaacccgctggcaaaagccctgcttgccggaaactatgcgcccgaaagcgaaatcagggtggaagccgacggcgacagactgaaatttgcctga

SEQ ID NO: 58517 - DNA, 228 bp, Neisseria meningitidis; identical to SEQ ID NO: 36999

SEQ ID NO: 58518 - DNA, 231 bp, Neisseria meningitidis
atgaacatcgttaaaaaatacgctgtaaaagcagccttggcagccggtatcttcacaccggccattgttatggcagatacctttgatgcatccgcgattggtacgcaagtagcgaatgtaatcatgggtttcgtgtcaatggtttccgccgtgggtatggcggccattaccgtgattcttgcaatccaaggcttcaaaatggcttggagcatgattaaatctgtcaaataa

SEQ ID NO: 58519 - DNA, 1077 bp, Neisseria meningitidis; identical to SEQ ID NO: 53214

SEQ ID NO: 58520 - DNA, 447 bp, Neisseria meningitidis; identical to SEQ ID NO: 50949

SEQ ID NO: 58521 - DNA, 477 bp, Neisseria meningitidis; identical to SEQ ID NO: 43468

SEQ ID NO: 58522 - DNA, 1266 bp, Neisseria meningitidis; identical to SEQ ID NO: 41052

SEQ ID NO: 58523 - DNA, 759 bp, Neisseria meningitidis
atgaaaatcacccccgtcaaagccttgaccgacaactacatctggatgatacagcacggcaaccatgccgtatgcgtcgacccttccgaaccctcgcccgtcttggaattcctcgtccgcaaccgcctcatgcttgcccaaacatgggtaacgcacccccatcccgaccacgagggcggtgcggcggcactctggcgcggctacatggaatcgcccgtttacggcgaatccgacatcgaagcagcaacccacaccgtaaccgccggcacccaattcaccttcggcgacggacaggttaccgtttgggcaacacccggccacacagaccgccacaccagctaccttctcgaaacttcagacggcatacacgtcttttgcggcgacacccttttttccgccggctgcggacgcgtgtttaccggcacaatcgaacagctttacgacagcttccaacgcttcaaccgcctgcctgaaaacaccctgttctatccggcgcacgaatacaccgccgccaacctggattttgccgcccatatcgagccggacaacgccgacattcagacggcactgaaagcggcggcgcatacgcctaccctgcccgttaccctcgcgcacgaacgccgtgtcaatccgtttttgcgcgtcgacctgccgcacgtcagagaccgcgccgaggcattgagcgggaaaacgttaaacagcagcctcgatacctttgtcgcgctgcgtgaacttaaaaaccaataccggacgaaataa

SEQ ID NO: 58524 - DNA, 783 bp, Neisseria meningitidis; identical to SEQ ID NO: 43275

SEQ ID NO: 58525 - DNA, 1065 bp, Neisseria meningitidis
atggcactcgtatccatgcgccaactgcttgatcatgctgccgaaaacagctacggcctgcccgcgttcaacgtcaacaacctcgaacaaatgcgcgccattatggaagccgccgaccaagtcaacgcgcccgtcatcgtacaggcgagtgcaggtgcgcgcaaatatgcgggcgcgccgtttttgcgccacctgattctggcggcagtcgaagaatttccgcacatccccgtcgtgatgcaccaagaccacggcgcatcgcccgacgtgtgccaacgctccatccaactgggcttttcctccgtgatgatggacggctcgctgctcgaagacggcaaaaccccttcttcttacgaatacaacgtcaacgccacccgtaccgtggttaatttctcccacgcctgcggcgtatccgttgaaggcgaaatcggcgtattgggcaacctcgaaaccggcgaagcaggcgaagaagacggtgtaggcgcagtgggcaaactttcgcacgaccaaatgctgaccagcgtcgaagatgccgtacgtttcgttaaagataccggcgttgacgcattggctattgccgtcggtaccagccacggcgcgtacaaattcacccgtccgcccacaggcgacgtattgcgtatcgaccgcatcaaagaaatccaccaagccctgcccaatacacacatcgtgatgcacggctccagctccgttccacaagaatggctgaaagtcatcaacgaatacggcggcaatatcggcgaaacctacggcgtgccggttgaagaaatcgtcgaaggcatcaaacacggcgtgcgcaaagtcaacatcgataccgacttgcgccttgcttccaccggcgcggtacgccgctaccttgccgaaaacccgtccgacttcgacccgcgcaaatacctgagcaaaaccattgaagcgatgaaacaaatctgcctcgaccgttatcttgcgttcggctgcgaaggtcaggcaggcaaaatcaaaccggtttccttggaaaaaatggcaagccgttatgccaagggcgaattgaaccaaatcgtcaaataa

SEQ ID NO: 58526 - DNA, 891 bp, Neisseria meningitidis; identical to SEQ ID NO: 39016

SEQ ID NO: 58527 - DNA, 1278 bp, Neisseria meningitidis
atgcgtagcagcgatattttaattgtagacgacgaaatcggcatccgcgacctgctgtcggaaatcctgcaggacgaaggttattcggtcgcattggcggaaaacgccgaagaggcgcgcaagctgcgccatcaggcgcgccccgcgatggtgctgctggatatttggatgcctgattgcgacggcatcacccttttgaaggagtgggcgaaaaacgggcagctcaatatgccggtggtgatgatgagcgggcatgccagcatcgataccgccgtggaagccaccaaaatcggcgcgatcgattttttggaaaaaccgatttccctgcaaaagctgctgtctgccgtcgaaaacgcgttgaagtacggtgcggcgcaaaccgaaacggggcctgtattcgacaagctgggcaacagtgcggcgattcaggaaatgaaccgtgaggtaggggctgcggtgaaatgtgcctctcccgtacttttgacgggcgaggcgggttcgccgtttgaaacggtggcacgctatttccataaaaacggtacgccgtgggtcagcccggcaagggtcgaatatctgatcgatatgccgatggaactgttgcagaaggcggagggcggcgttttgtatgtcggcgacatcgcccagtacagctgcaacatccaagccggtattgcctttattgtcggaaaggcggaacaccgccgcgtcagggtggtcgcatcgggcagcagggcggcaggttcagacggcattgcctgcgaggaaaagctggcggaactgctgtcggaatcggtcgtccgtattccgccgctgcgtatgcagcatgaagacattcccttcctgatacaggggattgcctgcaatgtggcggaaagccaaaagattgcgcctgcctcattcagtgaagaggcacttgccgcattgacccgttacgactggccgggaaatttcgaccaactgcaaagcgtcgttgcaacgctgttgttggaggcggacggacaggaaatcggcgcggcggcggtttcttcccttttggggcagaatgtgcctgccgagggagcggaagatatggtgggcgggtttaatttcaacctgcccctgcgcgaattgagggaggaggtggagcggcgttatttcgagtaccacatcgcccaagaaggtcagaatatgagcaaagtggcgcagaaggtcggtttggaacgcacgcacctttaccgcaaactcaaacagctcggcatcggcgtttcgcgccgggcgggggaaaaaaccgaagaatag

SEQ ID NO: 58528 - DNA, 1554 bp, Neisseria meningitidis
atgacacaggccaaccgcgttatcattttcgacaccaccctgcgcgacggcgaacaatcgcccggcgccgctatgaccaaagaggaaaaaatccgcgtcgcccgccagctggaaaaattgggtgtggacatcatcgaagcgggttttgccgctgccagcccgggcgatttcgaggcggtcaatgcgattgcgaaaaccattaccaaatcaacggtctgttcattgtcccgtgccatcgagcgggacatccgtcaggcgggtgaggccgttgcgcccgcgccgaaaaaactcatccacaccttcatcgccaccagccccatccatatggagtacaaattgaagatgaagccgaagcaggtgattgaggcggcggtcaaagcggtgaaaatcgctcgtgaatacaccgacgatgtggaattttcctgcgaagacgcgttgcgttcggaaatcgatttccttgccgaaatctgcggcgcggtgattgaagcgggcgcgaccaccatcaatattcccgataccgtcggctattccatcccgtataaaaccgaagaatttttccgcgaactgattgccaaaacgcccaacggcggcaaagtcgtttggtcggcacactgccacaacgatttgggcttggcggttgccaattcgcttgccgcattaaaaggcggtgcgcgtcaggtggaatgtactgtcaacggcttgggcgaacgtgcaggcaatgcttcggttgaagaaatcgtgatggcgttgaaagtgcgccacgacttgttcggcttggaaaccggcatcgataccacgcaaatcgtgccttcgtccaaactggtgtccaccattacgggctatcccgtgcagcccaacaaagccattgtcggtgccaatgccttttcgcatgaatcgggcatccatcaggacggggtgctgaaacaccgcgaaacttacgagattatgtccgccgaatcggtcggctgggcaacaaaccgtttgagcttgggcaaattgtccggccgcaacgccttcaaaaccaagctggcggatttgggcatcgagttggaaagcgaagaggcactgaacgccgcgtttgcccgcttcaaagaactcgccgacaaaaaacgcgaaatcttcgatgaagacctgcacgcactggtatccgacgaaatgggcagcatgaatgccgagagctacaaattcatctcccaaaaaatcagcaccgaaaccggcgaagagccgcgcgccgacatcgtgttcagcatcaaaggcgaagaaaaacgcgcttccgccacaggctccggccccgtggatgcgattttcaaagcgattgaaagcgtggcgcaaagcggcgcggctttgcagatttattccgtcaacgccgtcacgcaaggtacggaaagccagggcgaaaccagcgtccgtctggcgcgtggcaaccgcgttgtcaacggtcagggtgcggataccgacgttttggtcgccactgccaaagcctacctctctgccttaagcaaactggaatttggttctgccaaaccgaaagcgcaaggcagcggtacgatttga

SEQ ID NO: 58529 - DNA, 591 bp, Neisseria meningitidis
atgggtttggaactgcctttgattttgggtacgagttcggttttccgccgcgaacagatggaaaggctcggcattgcctttcaggcggcgtcccccgattttgacgaaacgccgatgttgggggagtctgcccctcagacggcattgcgccttgccgagggtaaggcgcggtcgttggccgggcgtttcccagaggcgttgattgtcggtgcggaccaggtggcgtggtgcgacggcaggcagtggggcaagccgatgaaccttgctaatgcgcacaagatgttgatgcatttgagcggcagggagattgagttttacagcgcggtcgttctgctaaatacggttacgggcaggatgcagcggcatatcgataagacggtggtcgtgatgaggaagttggacgagctacacatcctccgctatttggagcgcgagcctgatgcggtttattgctcgtgtgcgttgaagagcgaggctttgggtgcattgttgatcgaaaggattgagagtaccgatccgaatgctttaatcggtttgccggttttccgtctggttgattttttgaaaaatgagggcgtggaggttctgtaa

SEQ ID NO: 58530 - DNA, 1308 bp, Neisseria meningitidis; identical to SEQ ID NO: 40815

SEQ ID NO: 58531 - DNA, 900 bp, Neisseria meningitidis; identical to SEQ ID NO: 51131

SEQ ID NO: 58532 - DNA, 1404 bp, Neisseria meningitidis
atggatactacattgaaaaccaccttgacttctgttgcagcagccttcgcattatccgcctgcaccatgattccccaatacgagcagcccaaagtcgaagttgccgaaacgttcaaaaacgataccgccgacagcggcatccgtgcggtcgatttaggttggcatgactattttgccgacccgcgcctgcaaaagctgatcgacatcgcactcgagcgcaataccagtttgcgtaccgccgcattgaacagcgaaatctaccgcaaacaatacatgattgagcgcaacaacctcctgcccacgcttgccgccaatgcgaacgactcgcgccaaggcagcttgagcggcggcaatgtaagcagcagctacaaagtcggactgggtgcggcatcttacgaactcgatctgttcgggcgtgtacgcagcagcagcgaggcggcactgcaaggctatttcgccagcaccgccaaccgcgatgcggcacatttgagcctgattgccaccgttgccaaagcctatttcaacgaacgttacgccgaagaagcgatgtctttggcgcaacgtgttttgaaaacgcgcgaggaaacctacaagctgtccgaattacgttacaaggcaggcgtgatttccgccgtcgccctacgtcagcaggaagccctaatcgaatctgccaaagccgattatgcccatgccgcgcgcagccgcgaacaggcgcgcaatgccttggcaaccttgattaaccaaccgatacccgacgacctgcccgccggtttgccgttggacaagcagttttttgttgaaaaactgccggccggtttgagttccgaagtattgctcgaccgtcccgacatacgcgccgccgaacacgcgctcaaacaggcaaacgccaatatcggtgcggcacgcgccgcctttttcccatccatccgcctgaccggaaccgtcggtacgggttctgccgaattgggtgggttgttcaaaagcggcacgggcgtttggtcgttcgcgccgtctattaccctgccgatttttacctggggtacgaacaaggcgaaccttgatgtagccaagctgcgccaacaggcacaaatcgttgcctatgaatccgccgtccaatccgcatttcaagacgtggcaaacgcattggcggcgcgcgagcagctggataaagcctatgacgctttaagcaaacaaagccgcgcctctaaagaagcgttgcgcttggtcggcctgcgttacaagcacggcgtatccggcgcgctcgacttgctcgatgcggaacgcagcagctatgcggcggagggtgcggctttgtcggcacaactgacccgcgccgaaaaccttgccgatttgtacaaggcactcggcggcggattgaaacgggatacccaaaccgacaaataa

SEQ ID NO: 58533 - DNA, 225 bp, Neisseria meningitidis; identical to SEQ ID NO: 36622

SEQ ID NO: 58534 - DNA, 996 bp, Neisseria meningitidis
ttgaaggctgcctatcaaaatattgcaactgtctggcagggcgatttccacaatgccaaacaggtgctttccgcaatgaagaagaaggtccgcaaacctgccgccgtccgttccgatgcggatatcgccgcccttttccacgcccaccgtatgaagcaggcgcagcagagccgtattctgaatatgcttgccgttgaaatccgccccggttttgtgttggacaacaaacgcgcgcccgatatacgcgccgctttgctcgacgtgtacggagaggcggacggcaaaccgtttttcctgccgctcaatctgctgctggggtttatgggtgcgcacgagtggcataagaaaggggttgccgttccgcagctgggcggcagcatacacgttcctttcggcgtattctcgccgttgcgcggcgaatacctcgacctgctcgcccatgcgccgtcaacgggttttcagacggcattcgatatcgggacgggctcgggcgtgcttgccgccattttggcgaaacagggcattccttccgtcatcggcacggataccaatccgaaagccgtcgcctgcgcccgtgccaatattgcccgtttgggctttgaaaaacaggttgagatacgggaaaccgatctgtttcccgaagggtttgccgatctgattgtctgcaatccaccctggcttcccgccaagccgacttccgccgtcgaatccgcgttatacgaccccgaatctgcgatgctggctgcgtttttgcgggatgcgccgaaacatctgaatcccgacggagaaatccgcctgatcatttccgatcttgccgaacatctgcacctgcgtccgtccgattttctggataaggcatttgctcaggcgggtttgcgtgttgccgatatgatgaaaaccaagccgaagcacaaaaaagccgcgaatccgagcgatccgcttgcttttgcgcgaacccgggaaaccactttcctataccgtttgaaaaaggcataa

SEQ ID NO: 58535 - DNA, 129 bp, Neisseria meningitidis
ttgtgtcaaaaatgccgtctgaaagccgaatatcgtttcagacggcattttgactgtttaaagcgggggcagttctacaaacggaaagaaatgccgaaacttctgataaatttcaggatgtttttttaa

SEQ ID NO: 58536 - DNA, 252 bp, Neisseria meningitidis; identical to SEQ ID NO: 42716

SEQ ID NO: 58537 - DNA, 1113 bp, Neisseria meningitidis; identical to SEQ ID NO: 43071

SEQ ID NO: 58538 - DNA, 627 bp, Neisseria meningitidis
atgaacgttaatgttatcaaccatccgctcgtccgccacaaattaaccctgatgagggaggcggattgcagcacctacaaattccggacgcttgccatcgagctggcgcgcctgatggcatacgaggcaagccgtgattttgaaatcgaaaaataccttatcgacggatggtgcggtcagattgaaggcgatcgcatcaagggcaaaacattgaccgtcgttcccatcctgcgtgcaggtttgggtatgcttgacggcgtactcgacctgattccgactgccaaaatcagcgtagtcggactgcagcgcgacgaggaaacgctgaaacccgtttcctacttcgagaaatttgtggacagtatggacgaacgtccggctttgattatcgatcctatgctggcgacaggcggttcgatggttgccaccatcgaccttttgaaagccaagggctgcaaaaatatcaaggcactggtgctggttgccgcgcccgagggtgtgaaggcggtcaacgacgcgcaccctgacgttacgatttacaccgccgcgctcgacagccacttgaacgagaacggctacatcatccccggcttgggcgatgcgggcgacaagattttcggcacgcgctaa

SEQ ID NO: 58539 - DNA, 798 bp, Neisseria meningitidis
atgcgcgcagtccccccgccccatatctccatcacaggcctaggttacctcggcctgccgctggcacaaaaattttaccaacacggcagccgcgtcgccgccataaaacgcagcctgacttcggacgacatcaacctgcccatacacctcgataccatcgacctcaatcaagacagcgcgtttcaaagcgcgaaccttgcccgagatacaagcttttggcggcaccatgccaacaaacccgtttggttctgcctcttgccgccatcatcgctgacacattacgccgataccgtcaaacaatgggcagaacttgcccgggcgtgcaacgtgcaacacctgattttcacaagcagtaccagcgtttacggcgatacagcgcgcgaatgcgacgaaatcgccctacccgatccgcaaaccgagtccgcccgccaaatcctcgccgccgaacaacacctgctcgacagcggcgttccgaacatcgacatcctgcggctgggcgggctttattgcgccgaacgccatcccgtcagccgccttgttcaaaagcaaaacatcccgggcggcaaccgccccatcaacatcgtccaccgtaatatcgccgtcgaaagcctgtttcagacggcatttaaccccagcggcaggcggctgaaaaacattatcgaaccgcgccacccgacacgccgcgaattttttacggaagaagccgccaaactcggcctgcccgcgccggatttcgcacccgacgacagcgtgggcaaaatcatccgtaccgtttgcgataacggcttaagcctgtaa

SEQ ID NO: 58540 - DNA, 678 bp, Neisseria meningitidis; identical to SEQ ID NO: 51248

SEQ ID NO: 58541 - DNA, 1368 bp, Neisseria meningitidis; identical to SEQ ID NO: 44374

SEQ ID NO: 58542 - DNA, 999 bp, Neisseria meningitidis; identical to SEQ ID NO: 51139

SEQ ID NO: 58543 - DNA, 678 bp, Neisseria meningitidis
atgcaagccgattttaaccgtcccgtcctggctatcgataccggtacttcccatttgtcgctcgcgctgcgtgccgacggcgaaacccgtctgttccatcaggaagtcggcagccgccagtccgaactgattctgccggaaatccgcaccctattccgaaatgcaggcattaccgccgccgatttgggggcgattgtttatgcgaaaggccccggcgcgtttaccggactgcgtatcggcatcggtgtggctcagggtttggcaacgccgtttgatacccctttaatcggcgtaccctcgctcgatgccgccgcctcgctgccgccgccgcaaagctgcatccttgccgctacggacgcacgtatgggcgaagtgttttatgcatggttcgatacgctgaactgccgccgtttgagcgattatcaggtcggtagggcggcagacatcgccctccccaagggacacgtcttttcagacggcatcggcaatgcgttcgcgctggaaaactgtccgcccttctcaggcaaacccgatatgccgactgccgccgactttctcaatctggcggcggaaggcggttttcccgccgtcgctgcggcacacgccgaactgctctacgtccgcaacaaaatcgccctaaccgccaaagaacaggcggaacggaaagcccgaacatga

SEQ ID NO: 58544 - DNA, 876 bp, Neisseria meningitidis
atggcagtaggaaaagagattctcaccaaaatccgcagtgttcagaatacccaaaagatcactaaagcgatgcagatggtgtcaacctctaaaatgcggaagactcaggaacggatgcgtttggcgcgtccgtatgccgaaaaagtgcgtatggtgatgagccatcttgcgcaaaccaataccgatcatggtattccgttgctggaatctcatcgggaaatcagacgtgtcggttttattttgattacgtctgataagggtttgtgtggcggtttgaacgccaacgtgctgaaaaagtttttggcacaagttcaagagtatcggaatcaaggtattgaagaggaaatcgtatgccttggcagtaaaggtctgatggcgtgtcagagcattggtctgaatgtggttgccagtgccgtaaatttgggcgataccccaaaaatggaaatgctgctcggacctttgacagaactcttccaacggtatgagaaacatgaaattgacagaatccatctggtgtattcgggttttgtcaataccatgcgtcaggaaccgagaatggaagtattgctgcctatcggtgagaacgtgattggcgattcagctcccaaatcaccgttcagctgggaataccgctacgaaccgactgcacttgcagtgttggaatatctggttcgccgctatttagagtctgtggtttatcaggcgttgagcgacaatatggcatccgaacaggcagcccgcatggttgccatgaaagctgcaacagacaatgcaggcaatgccatcaaagagttgcgtttggtatataacaaatcgcgtcaagctgcgattaccacggaattgtcagaaattgtagcaggtgcggcggctgtctga

SEQ ID NO: 58545 - DNA, 294 bp, Neisseria meningitidis; identical to SEQ ID NO: 36355

SEQ ID NO: 58546 - DNA, 531 bp, Neisseria meningitidis; identical to SEQ ID NO: 38478

SEQ ID NO: 58547 - DNA, 297 bp, Neisseria meningitidis
atggacgctaaacatcggctgaaaaaatacgtttaccacctgttggtagccatcgaccaactgttcaacgccctaaccggcggcgcggcggacgaaaccctctcaagccgcacctatcgcggcgcgcggttcgcccaaaagcccaaaacccgctggaaggttttatacaccctgattaacggcttgtttttcgaccgccaacactgccggcaggcgtacatcagcgaactgaaaggcaggcagcacgacgcgcggttcaaccaaagccgcgccgccggggaaaaggggacgcgatga

SEQ ID NO: 58548 - DNA, 3615 bp, Neisseria meningitidis
atgtctgcacccatccaagcattcgactcgctaaccgtccccattgccggcaccaacctgattgaggcctctgccggcaccggcaaaacctacggcattgccgccctgtttacgcgcctgatcgtattagaacaaaaaaacgtcgagcgcgtattggtcgttaccttcaccaaagccgccaccgccgagttgaaaacacgcctgcgcgcacgtttggacgatgtgttgcaggttttagaaagtaaagaaattgccaaacttggagacgacacgctttcagacggcatcgccgcctattgtgcggaacaccacaaaggcgacaccttcctgcccgcactcttaaaacaggctttgcaaaaagagggccggacgcgtctgattgtccgcctcaaggccgccatcgggcaattcgacaacgccgccatctataccatccacggcttctgccaacgtatcctgcgcgactacgccttcttgtgccaagcaccgttcgatgtcgaactgaccgaagaagacggcgaccgcctgcttatcccggcgcaagatttttggcgggaacgcgtcagcaatgatccggtgcttgccgcattggcgtttaaacgcaaagctgtgccgcaaaccgtccttgcccaaatccgcgcctacctgtcccgcccgtacctgaatttccgccgtccgcaggcggatttgaaacaggcgcagcgcaacgccgaaacctcatggcaaaccgtctgccgcctgctgcccgagctggaagccggcttttggcgcatccatcccgacctcaacggcaacagttaccgcaaaaacagcttcggcaacctttttaaagaactggcacaaaaatccgccgccggacaactgccctttctggacaaagacacgcacgacagactcttgaaacttgcgtccgacaaactcgaagccggactgaaaaaaggcaaaacgcccgatgcggcagtatttgccgaattgcagaaactggcagacttcgggtacgatttgaacgcactcgaagaagcggaagaagcaacaataatccggctgcaactggatttaatcggatacctcaaccgcagccttgccgagatgaaaaaatcgcgccgcgaacgcggtttcgacgacctgctgctcgatgtccacaccgcgctgaccgacaatccgcacgccgaaaccctcgcccgcgccgttgccgaaaactgggaaaccgcgctaatcgacgagttccaagacaccgacccgctgcaatacgaaattttccaaaaaatcttcatcgcccaaaaccgcccgctgtttctggtcggcgatcccaaacaggcgatttacagctttcgcggtgcggacatttacgcctaccttcaggcggcggaagatgcgcggcaccgctacacgctcgccaccaactaccgcagccacgccgcgcttatcggcagcataggcgcgctgttccgcctcaaagaacgcccgttcgttttggaaaacatcggctattcggaagtcggtgcggcgcgtgccgaaagcaggttgtcccccgaacgtcctgccgtacaggttcgttggctgcacgaaaacgacaatgaaaaagccaacaaagacgttttgcgccgccgtgccgccgactattgcgccgacgaaatcgcccacgcgctcaacgaagccgccggaggccgtctgaatttcaaaggctgcccgttgcagtcgggcgatattgccgtgctggtacgcacgcacaacgaggcggtgatggtttccgccgccctgaaaaaacgacaggtgcaaagcgtcctgctttcacgcgaatccgtgttcgcctcgcccgaagccgccgccctgtccgcactcatcggcttctggctcgaaccgcgccgcgccggaacgctgcgctttgtcctgacaagcggcatattcggttatgacgcgcagcaattgcacgacttcaaccaaaacgaaagcgagattttgcattgggcggaatctgcccgaaccgcactcgacaactggaatcaatacggcattttcgccgctatgcagcaattttcccaaacacacggcatcgaaacgcgcctcttaagccggaacaacgggcgcagcctgaccaactatttccaactgctcgaactgcttgccgccgaagacgcgcaaaaccgcaaccccgccgcgctgcacaaatggttgcgcgaccaaatcagcctggccggcaacaacagcggcgacaaccgcgccatccgtctggaaagcgacgaagatttggtcaaaatcgttaccatgcacgcctcgaaaggtttgcagtatccgctggtgtactgcccgtttgcgtgggacgcgcaagataccgggccgtccgactggcaaatcctccaccaaagcgcaaaccgaaccgaactgttggcaaaggcgcaactgtcggaagacgaacagaaacaatacgccgatgaagaaatggcggaacgcctgcgcctgctttatgtcgcgctgacgcgtgccgaggaacagctcaacatctacgccgcctattcttccgataccgccgacaaccccctcgcctatctaatcgaaggcttgccgcaagacagccgcgaaaccgtccgccaaacctatgcccaagaaaaggacggcataacgatgctcaaacaaaactggcggcgcgtggcggacaacgccccggccggcacggatttcgccttcaccgaaaatgcgccgccccctgccgcctatcgcagcaacgccggtcaaaccgccgaatttgccgcaaacagcattcccgaacgcagattccgatttgtccgccacaccagctttaccgccttaagccgccatacccaaacgcccgacggcggcgaagaagatgcctgcccgtccttggatgccgccgaaacctcggtagcggcgatgccgtctgaaacgccgacggcttcagacggcatatcgatacacgattttccgaaaggcacgcaggcggggctgtgcctgcacgaaattcttgaagatttcaaattcggacaagcagccgccggacaggaaaccctcattgccgacaagctgaaaaaatacggttttgaagaaatatggctgcccgccgttgccgaaatggcggaagcctgccgtaaaacgccgctgacgggggcatactgcctgtccgacattccgcccgagtgccgctgtcccgaaatgggctttaccctccataccgaagacttcggcctcaaacggctgcgcgactggtttgcccgcgacgacatcaggctgcccgaagtctgccgtgccgccgccgaaacgctcgacttccacaccgtcaacggctttttaaacggctttatcgatatggtctgccaagaccccgacggcaatatctgcatcatcgactacaaatcaaaccatctcggcgcggacgcatccgcctacacgcaacaggcgatggacgaagccgtcacgcaccaccactattaccttcaggcgctgatttacgccgttgccgccgcacgctacttcaaactgcgcggacaaccgcccgccgccgtttccgtccgctacctgtttttgcgcggcacagacggcaaaggcggcggcgtttggcgttgggacatagatgccgccgctttggaacagataaaataa

SEQ ID NO: 58549 - DNA, 288 bp, Neisseria meningitidis; identical to SEQ ID NO: 43049

SEQ ID NO: 58550 - DNA, 642 bp, Neisseria meningitidis; identical to SEQ ID NO: 41835

SEQ ID NO: 58551 - DNA, 1068 bp, Neisseria meningitidis
atgggcggtaaaacctttatgctgatggcgggcggaacgggcggacatattttccccgcgctggcggtggcggattcattgcgcgcgcgcggccatcatgtgatttggctgggcagcaaggattcgatggaagagcgtatcgtgccgcaatacggcatacgcttggaaacgctggcgattaaaggcgtgcgcggcaacggcatcaaacgcaagctgatgctgccgtttactttgtatcaaaccgtccgcgaagcgcagcggattatccgcaaacaccgtgtcgagtgcgtcatcggcttcggcggcttcgttaccttccccggcggtttggcggcgaaactcttgggcgtgccgattgtgattcacgagcaaaacgccgtggcaggtttgtccaaccgccacctgtcgcgctgggcgaagcgggtgttgtacgcttttccgaaagcgttcagccacgaaggcggcttggtcggcaaccccgtccgcgccgatattagcaacctgcccgtgcctgccgaacgcttccaagggcgtgaaggccgtctgaaaattttggtggtcggcggcagtttgggcgcggacgttttgaacaaaaccgtaccgcaggcattggctttgctgcccgacaatgcgcgtctgcagatgtaccaccagtcggggcgcaacaagctgggcagcttgcaggcggattacgacgcgctgggcgtgaaagccgaatgcgtggaatttattaccgatatggtgtccgcctaccgcgatgccgatttggtgatttgccgtgccggcgcgctgacgattgccgagttgacggcggcgggattgggtgcgttgttagtgccgtatcctcacgccgttgatgaccatcaaaccgccaacgcgcgttttatggtgcaggcggaggcgggattgctgttgccgcaaacccagttgacggcggaaaaactcgccgaaatcctcggcagcctgaaccgcgaaaaatgtctcaaatgggcggaaaacgcccgtactttggcattgccgcacagcgcggacgacgttgccgaagccgcgattgcgtgtgcggcgtaa

SEQ ID NO: 58552 - DNA, 1014 bp, Neisseria meningitidis; identical to SEQ ID NO: 53143

SEQ ID NO: 58553 - DNA, 225 bp, Neisseria meningitidis; identical to SEQ ID NO: 38459

SEQ ID NO: 58554 - DNA, 1302 bp, Neisseria meningitidis; identical to SEQ ID NO: 50160

SEQ ID NO: 58555 - DNA, 198 bp, Neisseria meningitidis; identical to SEQ ID NO: 36305

SEQ ID NO: 58556 - DNA, 474 bp, Neisseria meningitidis; identical to SEQ ID NO: 51534

SEQ ID NO: 58557 - DNA, 1728 bp, Neisseria meningitidis; identical to SEQ ID NO: 51117

SEQ ID NO: 58558 - DNA, 471 bp, Neisseria meningitidis; identical to SEQ ID NO: 42963

SEQ ID NO: 58559 - DNA, 1995 bp, Neisseria meningitidis
ttgaccggcatccgctcagaaaaacagattcaacgcgaaatcatgctgacacaggctgcgtttaaccgtttggcgcgcagcggcaaggcatcacaaaatgatttggcacgggcggcggtcgctacgcgtaaccgaattcgcgagctgaacgcggaactgaaacagggcacgggatttgcggacaagatgggaaaaatcggaagattcggtgcagctgcggtggctggtggcgcggcagcgtatacggtgcttaagcctgctatggacaacagaaagcagcttgatgagaacatcaaccgcgtgtccagacaggcatttattgaggataacagtaaatcggcagcgtggattgcaactgaaggtgcgcaacagatcaaggatttggcacttgaacttgtcgagaaaaatggcgggacccacgataaggctttggatttaatcagcggcatgatgaccaccagtctgaattttgcccaaaccaagaatgaagcgcaggcggcatatgcttttgcacttgcctcagaaggcagtggcgaggatacggcaaaactgattaaaaccctgaaagatggcggcatgagcggtaaagacctgcaactcgggcttgagcacgtcttgcaatcgggtttagacggcactttcgaggtgcgggatatggttcgggagctgccgagcctgctccctgccgcgcaacaggcagggatgaatggtgtcggcggtttggactacctgctctcactcttacaatctgcggcgaataaatcgggcagtcctgccgaagcggcgactaatgtgcaaaatcttttgagtaaaactctgtcgcctgacacgataggtcgtctgaagaagatggcaaatccgaatgacccgaagaaaggtgtcgattggataggctcggttgtgcaaggcaagcaaaacggcgaaaacgcagtgcaggtgttgtcccgtcttgccgatgccatgctagtaaaggataagcaataccaagattataagaaacgcgcggctgcaggcgataagacggcggcggagcaggcaaatatgcttaagggcgcgcttttggcgcaactgctgcctgatttgcaggcaaaacaaggtttgctggctgcaacggatatgacgcaaatccgtgaatatatggcttcgttggctggcgtaacgttggataacggaaaaattgctaagaacaacgaggcgcgaatgttgtcggcagcggcgcaacaagagcaacaggaatcgctggcaatgttgcgggaaagtctgacgggaacattggtggatatggaaacctcgtttaaaaagctggcagcggaataccctaatgccactctagccctgcaagcattgacgacggcggcaacagcggcgtctgccgcaatgttattaaccgccggtggcggtaaaggtgcaggctttctgaaagatgtaggtagtaaagcgttgggatggggtaaggcttccgcaggcggcgtggcagcaggtgccacagcggcaggcggtaagttgctgtcatggggaaaatctgccggtagcgggctcatgaataatccagcgttagttaaacgggcgggtttgttaggtatgttgctgtattccgagtctttgggtgacggcacattgccaaagggtttgcgtggtaccaagacaactcctgaaatgattaatcgtctgaaaaacaacggtatccgatttgaacctgcgccgaagcgggaacaggcgcggggtggtgtccctcagtatttggctgctccgtcagcgcagcctaccgataagatgttgtctccgttgttttcaactcagacggcggcgtatcaggcagcattggcgcaggatacggctgcagttacaacaggtttggcacaagtgcaaagtgcgatggcgtcggcaagtcagaccatcaataccaatgtgagcctgaatatcgacggacgtgttatcgcgaatgaggtatcgcggtatcaagtggccatgttcggccgtggagcgggtcaataa

SEQ ID NO: 58560 - DNA, 234 bp, Neisseria meningitidis; identical to SEQ ID NO: 41393

SEQ ID NO: 58561 - DNA, 312 bp, Neisseria meningitidis; identical to SEQ ID NO: 51560

SEQ ID NO: 58562 - DNA, 609 bp, Neisseria meningitidis; identical to SEQ ID NO: 52320

SEQ ID NO: 58563 - DNA, 708 bp, Neisseria meningitidis; identical to SEQ ID NO: 43156

SEQ ID NO: 58564 - DNA, 1557 bp, Neisseria meningitidis
atggatttcagttggttggcagaaccgcatacctggataggttttgccacgcttttggtgttggaagtcgtattggggatagacaatcttgtctttgtggcgattttggcaaacaaggtccagcccgcacggcgcgaccgcgcacggattatcgggctggggctggcagtcgtcatccgcatcattatgcttgcttttatggcgcacatcatcacgctgaccgagccgctgttccaaatcggcggcctcgccgtttccggcaaggacatgattatgctcgcgggcggtattttcctgctttacaaagccaccaccgaactgcatgaacgcctcgaagggcacaaccgttttaccgttgccgacaaccaaaaaaaacacgcgccgttttggggcgtggtcgcgcaaatcctgatactggatgccgtgttttccatcgattcggtcattactgcggtggcgatggtcgatcatatcgtcgtggcgatgggtgcggtcgtcgtcgcgatggctgtaatgatttctgccagcaaactcttgaccgaatttgtcgacagacaccctaccgtcgtgatgctctgccttggttttttgttgatgatcggtttcagcctgattgccgaagccttccatttccacattcccaaaggctacctctacgccgccatcggcttctcgattttaatcgaactgtttaaccagatttcccagcgcaacagccgcaaaaacgactacatcggcagctcgtggcgcaagcgcaccgccgaaaacgttttgggtatgatgggcatacgcgaaagcgtgcttgccgatgcgggcggcgaatccggggacgacgcgcattttgaagaaaacgaaaaatcgatgatacgcagcgtgctgacgcttgccgaacgcccgattatgggggtgatgatcccacgccgcgacatcgaacggctggacatttcccaaagccgcgaagaacagtgtgcccaactgcaaaacacgccttacagccgcctgctcgttgtcggtaaggcgggcgtggacgaacctttgggctacatcaacaaaaaagacctgctgtcccaactgctggaaacaggcggtctcgacattcagacggcattgcgccagccactcgtcctgcccgacagcaccaccgcgctgggcgcaatcgaactcttccgccaaagcagcgcggattatgctttggtggtggacgagttcggcgcggtattgggcatggtaaccatgaaagacctgctcgaaaccatcgcaggcgagttccccgaagaatttgagcgcgaagaagaaccagccgttcaggggaatcccgatgaaagcctgacggtggaaggcgcgttggaatatgtggaactcgcaccgcaactcaacctgccgcagcaggaggaagatgccgatttccatacggttgccgggctgattatggaagaattgcaaaccatccccgatgtcggtgattttgccgatttccacggctggcggtttgaagtggtcgaaaaagaagggcagcgcatcgagcgggtcaaaatcaccaaattgcccgaagaataa

SEQ ID NO: 58565 - DNA, 1434 bp, Neisseria meningitidis
atggacacacaaacttacaactacaaagtggtgcgccagttcgccatcatgactgtagtttgggggattgtgggtatgttggtcggcgttatcgtcgccgcccagctttttgctcctgccctcgacttgtctaatatcggaccttggttccacttcggccgcctgcgtccgctgcacaccaatgcggttattttcgcatttggcggttgcggcctgatcggcacatcatactacgttgtccaacgtacttgtaatacccgtcttttcggcggttggctgccggcatttaccttttggggctggcaggcggtaatcgttgccgccgtcgtcagcttccctatgggttggacccaaggtaaggaatatgccgaactggaatggccgatcgatattctgattactttggtttgggtggcttacgccatcgtattcttcggtacgattgccaaacgtaagattaaacatatttacgttgccaactggttctacggcggctttattttggcggtcgcacttttacacatcgtcaacaatatcagcatcccggcagggttgatgaagtcataccccgtctattccggtgcgattgatgctatggttcaatggtggtacgggcataacgccgtgggcttcttcctgactgccggcttcttgggtatgatgtactatttcgtacccaaacaagcagcccgccccgtttactcctaccgcctgtccgtcgttcacttctgggcgttgatttttacctatatgtgggcgggtccgcaccatcttcactacactgcgctgcctgactggacgcaatctttgggtatggttctgtctttgattctgttcgcaccctcttggggcggtatgattaacggcatcatgaccttgtccggcgcgtgggacaaactgcgtacagacccgattcttaaattcctgattgtatccttgtccttctacggtatgtctacctttgaaggcccgatgatgtcgattaaaacggtcaatgcattgagccactatacggactggaccgtcgcgcacgttcatgcgggtgcgttgggctgggtaggctttgtaaccatcggttccgtctattacatgattccccgtctgttcggcaaagaacagatgcacagcaccaagctggtagaagcacatttttggattgcgaccatcggcgtggttctgtatatcgctgccatgtggattgccggtgtgatgcagggtttgatgtggagttctttgaacgatgacggtacgctgacctactcgtttgtcgaatccgtaaaacgcaccatgccttactacgtgatccgttttgcaggtggtttattgtatctgagtggtatgtgcattatggcgtacaacgtgtaccgcacagccatcggtggtaaagcagtcgatgccgaaatccctgcggtttcccaaacacagcaccactaa

SEQ ID NO: 58566 - DNA, 921 bp, Neisseria meningitidis
atgaccttaaccgaattgcggtacatcgtcgcagtcgcccaagaacgtcatttcggcagggcggcgcggcgttgttttgtcagccagcccactttgtctattgccattaagaaattggaagaagagcttgccgtctctttgtttgaccggagcagcaacgatattattacgaccgaggcgggggaacgtatcgttgcacaggcgcgtaaggtgttggaagaggcagagcttatcaggcatttggcaaatgaagaacaaaacgagctggagggtgcgttcaaactcgggctgatttttacggttgcgccgtacctgctgccgaaactgattgtctcgttgcgccgtactgcaccgaaaatgcctttgatgttggaagagaattacacgcatactttgaccgagtcgctcaaacgcggggacgttgacgcgattatcgttgccgaaccgtttcaagagccgggcattgttaccgaacccttgtatgacgaaccgtttttcgtgattgtcccgaaagggcattcatttgaggaactggatgccgtttcgccccagatgctgggtgaggagcaggttttgctgctgacggaaggcaactgtatgcgggatcaggtactctcaagctgttccgaattggcggcgaaacaacgcatacaggggttgaccaatacattgcagggcagctcgatcaatacaatccgccatatggtcgccagcggtttggcaatcagcgtgttaccggcaaccgcgctgaccgaaaacgatcatatgctgttcagcattattccgtttgaaggtacgccgccaagccggcgggtcgtattggcgtaccgccgcaattttgtccgtccgaaggcgttgtcggcgatgaaggcggcgattatgcagtcgcagcttcacggggtaagttttatccgcgactag

SEQ ID NO: 58567 - DNA, 660 bp, Neisseria meningitidis; identical to SEQ ID NO: 43147

SEQ ID NO: 58568 - DNA, 1089 bp, Neisseria meningitidis
ttgataaccggcacgcccggttcagggaaaacattaaaaatggtttccatgatggcgaatgatgaaatgtttaagcctgatgaaaacggcatacgccgtaaagtatttacgaacataaaaggcttgaaaataccgcacacctacatagaaacggacgcaaaaaagctgccgaaatcgacagatgagcagctttcggcgcatgatatgtacgaatggataaagaagcccgaaaatatcgggtctattgtcattgtagatgaagctcaagacgtatggccggcacgctcggcaggttcaaaaatccctgaaaatgtccaatggctgaatacgcacagacatcagggcattgatatatttgttttgactcaaggtcctaagcttctagatcaaaatcttagaacgcttgtacggaaacattaccacatcgcttcaaacaagatgggtatgcgtacgcttttagaatggaaaatatgcgcggacgatcccgtaaaaatggcatcaagcgcattctccagtatctatacactggataaaaaagtttatgacttgtacgaatcagcggaagttcataccgtaaataaggtcaagcggtcaaagtggttttacactctgccagtaatagtattgctgattcccgtgtttgtcggcctgtcctataaaatgttgagcagttacggaaaaaaacaggaagaacccgcagcacaagaatcggcggcaacagaacagcaggcagtacttccggataaaacagaaggcgagccggtaaataacggcaaccttaccgcagatatgtttgttccgacattgtccgaaaaacccgaaagcaagccgatttataacggtgtaaggcaggtaagaacctttgaatatatagcaggctgtatagaaggcggaagaaccggatgcgcctgctattcgcatcaagggacggcattgaaagaagtgacggagttgatgtgcaaggactatgtaaaaaacggcttgccgtttaacccatacaaagaagaaagccaagggcaggaagttcagcaaagcgcgcagcaacattcggacagggcgcaagttgccacattgggcggaaaaccgtag

SEQ ID NO: 58569 - DNA, 1026 bp, Neisseria meningitidis; identical to SEQ ID NO: 50479

SEQ ID NO: 58570 - DNA, 741 bp, Neisseria meningitidis; identical to SEQ ID NO: 42819

SEQ ID NO: 58571 - DNA, 900 bp, Neisseria meningitidis; identical to SEQ ID NO: 50342

SEQ ID NO: 58572 - DNA, 1242 bp, Neisseria meningitidis
atgagtaaattcttcaaacgcctgtttgacattgttgcctccgcctcgggactgattttcctctcgccagtatttttgattttgatatacctcatccgcaagaatctaggttcgcccgtcttcttctttcaggaacgccccggaaaggacggaaaaccttttaaaatggtcaaattccgttccatgcgcgacgcgcttgattcagacggcattccgctgcccgacggagaacgcctgacaccgttcggcaaaaaactgcgtgccgccagtttggacgaactgcctgaattatggaatatcttaaaaggcgagatgagcctggtcggcccccgcccgctgctgatgcaatatctgccgctgtacgacaacttccaaaaccgccgccacgaaatgaaacccggcattaccggctgggcgcaggtcaacgggcgcaacgcgctttcgtgggacgaaaaattcacctgcgatgtttggtatatcgaccacttcagcctgtgcctcgacatcaaaatcctactgctgacggttaaaaaagtattaatcaaggaagggatttccgcacagggcgaagccaccatgccccctttcacaggaaaacgcaaactcgccgtcgtcggtgcgggcggacacggaaaagtcgttgccgaccttgccgccgcactcggccggtacagggaaatcgtttttctggacgaccgcgcacaaggcagcgtcaacggcttttccgtcatcggcacgacgctgctgcttgaaaacagtttatcgcccgaacaatacgacgtcgccgtcgccgtcggcaacaaccgcatccgccgccaaatcgccgaaaaagccgccgcgctcggcttcgccctgcccgttctggttcatccggacgcgaccgtctcgccttctgcaacagtcggacaaggcagcgtcgttatggcgaaagccgtcgtacaggcaggcagcgtattgaaagacggcgtgattgtgaacactgccgccaccgtcgatcacgactgcctgcttaacgctttcgtccacatcagcccaggcgcgcacctgtcgggcaacacgcatatcggcgaagaaagctggataggcacgggcgcgtgcagccgccagcagatccgtatcggcagccgcgcaaccattggagcgggcgcagtcgtcgtacgcgacgtttcagacggcatgaccgtcgcgggcaatccggcaaagccgctgccgcgcaaaaaccccgagacctcgacagcataa

SEQ ID NO: 58573 - DNA, 1059 bp, Neisseria meningitidis; identical to SEQ ID NO: 42377

SEQ ID NO: 58574 - DNA, 372 bp, Neisseria meningitidis; identical to SEQ ID NO: 42581

SEQ ID NO: 58575 - DNA, 192 bp, Neisseria meningitidis; identical to SEQ ID NO: 37158

SEQ ID NO: 58576 - DNA, 486 bp, Neisseria meningitidis
atgaacgattacacagccatgccgtctgaagaccgtgaggtcggcgcattgtcgctgcctccacattcgatggaggcggaacaatccgttttgggcgggttgatgctggaaaatccggcttgggacaggattgccgatgtggtttccggtgaagacttctaccgccacgaacaccgcctgattttccgatccattgccaaactgatcaatgagagccgtcctgccgatgtcatcacggttcaggaagatttgcagcggaacgaagagctggaagcggcggggggattcgaatatctgattacgctggcgcaaaatactccgtctgccgccaacatccggcgccatgccgaaatcgtgcgcgagcgttccattatgcgccaactcgccgaagtgggaacggaaattgcccgcagcgccatacccaaaatatcggcagcggaacgggcggtagcttggagtacgaaaaattcaagcagtttcttttga

SEQ ID NO: 58577 - DNA, 150 bp, Neisseria meningitidis; identical to SEQ ID NO: 41322

SEQ ID NO: 58578 - DNA, 1458 bp, Neisseria meningitidis; identical to SEQ ID NO: 42683

SEQ ID NO: 58579 - DNA, 510 bp, Neisseria meningitidis; identical to SEQ ID NO: 43513

SEQ ID NO: 58580 - DNA, 1170 bp, Neisseria meningitidis
atgccgcaaattaaaattcccgccgtttactaccgtggcggtacatcaaaaggcgtgtttttcaaacgttccgacctgcccgaggcggcgcgggaagcgggaagcgcacgcgacaaaatcctcttgcgcgtactcggcagcccggatccctacggcaagcagatagacggtttgggcaacgccagctcgtccaccagcaaggcggtgattttggacaagtccgaacgcgccgatcacgatgtcgattaccttttcgggcaagtttccatcgacaaaccttttgtcgattggagtggcaactgcggcaacctcaccgccgccgtgggcgcatttgccatcgagcaaggcttggtcgataaaggcaagattccttcagacggcatctgcacggtcaaaatctggcagaaaaacatcggcaaaaccattattgcccatgtaccgatgcaaaacggcgcagttttggaaacaggcgattttgagctcgacggcgtaacgttcccggcagccgaagtacaaatcgaatttcttgatccagccgacggcgaaggcagtatgttcccaaccggcaatttggtcgatgaaattgatgtgccgaatataggccgtttgaaagccacgctcatcaacgcgggcattccgaccgttttcctgaatgccgccgacttgggctacacgggcaaagagttgcaagacgacatcaacaacgatgccgcggctttggaaaaattcgagaaaatccgcgcttacggtgcgctgaaaatgggtctgatcagcgacgtatccgaagctgccgctcgcgcgcacacgccgaaagtcgccttcgtcgcgcccgccgccgattacaccgcctccagtggcaaaaccgtgaatgccgccgacatcgatttgctggtacgcgccctgagcatgggcaaattgcaccacgcgatgatgggtaccgcctctgttgccattgcgaccgccgccgccgtgcccggtacgctggtcaaccttgccgcaggcggcggaacgcgtaaagaagtgcgcttcgggcatccttccggcacattgcgcgtcggtgcagccgccgaatgtcaggacggacaatggacggccaccaaagcggttatgagccgcagcgcacgcgtgatgatggaaggttgggtcagggtgccggaagattgtttttaa

SEQ ID NO: 58581 - DNA, 1056 bp, Neisseria meningitidis; identical to SEQ ID NO: 42767

SEQ ID NO: 58582 - DNA, 582 bp, Neisseria meningitidis; identical to SEQ ID NO: 37778

SEQ ID NO: 58583 - DNA, 1935 bp, Neisseria meningitidis
atgagcttgatcgaatgtaaaaacatcaaccgctatttcggcagcggcgagaaccgcgtccatattttgaaagacatcagcctgtcgatagagaagggcgattttgtcgccatcatcgggcagtccggttcgggaaagtccacgctgatgaacatcctcggctgtttggataccgccggttccggttcgtaccgaatcgacggcatcgaaactgccaaaatgcagcctgacgagctggcggcattgcgccgcgaacgcttcggtttcatcttccaacgctacaacctcttaagctcgctgaccgcaagggataacgtcgcgctgccagccgtctatatgggcgcgggcggcaaagagcgttccgcgcgggcggagaagttgttacaggatttgggtttggcaagcaaagagggcaacaagcccggcgaactctcgggcggacagcagcagcgcgtctccatcgcccgcgccctgatgaacggcggagaaatcatcttcgccgacgagccgaccggcgcactcgataccgccagcggcaaaaacgtgatggaaatcatccacaagctgcacgaagccgggcatactgtcattatggtcacgcacgaccccggcatcgccgccaatgccaaccgcgtcatcgaaatccgggacggcgaaatcatttccgacacctcgaaaaatcccgaaatccccgcaagcaatgtcgggaggattcgggaaaaagcctcgtggtcgttttattacgaccagtttgtcgaagccttcagaatgtcggtgcaagcagtattggcgcacaaaatgcgttcgcttctgacgatgctcggcatcatcatcggtatcgcttcggttgtctccgtcgtcgcattgggcaacggttcgcagaaaaaaatccttgaagacatcagttcgatagggacgaacaccatcagcatcttcccagggcgcggcttcggcgacaggcgcagcggcaggattaaaaccctgaccatagacgacgcaaaaatcatcgccaaacaaagctacgttgcttccgccacgcccatgacttcgagcggcggcacgctgacttaccgcaataccgacctgaccgcttctttgtacggcgtgggcgaacaatatttcgacgtgcgcggactgaagctggaaacggggcggctgtttgacgaaaacgatgtgaaagaagacgcgcaggtcgtcgtcatcgaccaaaatgtcaaagacaaactctttgcggactcggatccgttgggtaaaaccattttgttcaggaaacgccccttgaccgtcatcggcgtgatgaaaaaagacgaaaacgctttcggcaattccgacgtgctgatgctttggtcgccctatacgacggtgatgcaccaaatcacaggcgagagccacaccaactccatcaccgtcaaaatcaaagacaatgccaatacccaggttgccgaaaaagggctgaccgatctgctcaaagcgcggcacggcacggaagatttcttcatgaacaacagcgacagcatcaggcagatagtcgaaagcaccaccggtacgatgaagctgctgatttcctccatcgccctgatttcattggtagtcggcggcatcggcgtgatgaacatcatgctggtgtccgttaccgagcgcaccaaagaaatcggcatacggatggcaatcggcgcgcggcgcggcaatattttgcagcagtttttgattgaggcggtgttaatctgcgtcatcggcggtttggtcggcgtgggtttgtccgccgccgtcagcctcgtgttcaatcattttgtaaccgacttcccgatggacatttcggcggcatccgttatcggggcggtcgcctgctcgaccggaatcggcatcgcgttcggctttatgcctgccaataaagcagccaaactcaatccgatagacgcattggcgcaggattga

SEQ ID NO: 58584 - DNA, 1152 bp, Neisseria meningitidis
atgagtaatagagaccaactttttaaagccccgccgtttgaaaaccacagcccgctgacctggtatcaggctgcctcacaactgcccaacttcatccgcgacgacgcgcaggcagccgccatcgaacacctcgatcggctttggaccgaattgatgatgttcaaacgcaaaagaaaccgttttttaggcaggagtttgcgttccccgcaagtccccaaagggctttatttctatggcggggtcggacgcggcaaaagctttctgatggacgcttttttcggctgcctcccgtaccgccgcaaacgccgcgtccactttcatgcctttatggcagaaatccaccagcggctgaaaaccctgaaaagcgaaagcaacccgttgaaatccgttgccgccgagattgccaaagaaacccgcgtattgtgttttgacgaatttcatgtcagcgatattgcggatgcaatgattttaggccgtctgctggaaaacctgcttaacgagggcgttgttttggtggcgacttcaaactacgcgccttccgaactctacccgcaaggtcaaaaccggagcagttttcttcccacaatcgcgctcatcgagtccagcctgaccgtcttaaacgttgacggcggtgaagactaccgactgcgtaccctccgccccgccgagattttctttacgcctgccaatgaagaaaatgaggcaaaactggcaaaactgttcaaagaaatgacaggcattaccgatttgaaccccggcatcagcaccatccacggtcgggagattccccgcaaagccgagtccggccgtgccatatggtttgatttccgcgcactgtgcttcggcccccgctcacagtccgactatctgtatttggccgaacattatgaaatggtttttatttcaggtttggaacaactctcaccgcaagaaaaggcggaggcgcggcggctgacttggctgattgacgtactctacgatttccgggtcaaactgtgtgccaccggcgcggtagatgtcaaccatatctatacggaaggcgattttgccgaagaatttacccgcaccgccagccggatggtcgaaatgcagtccgaagtttatttggaacagccgcacctgaccctatctcccaaggcttcaggcggataa

SEQ ID NO: 58585 - DNA, 450 bp, Neisseria meningitidis
atggacgttcaactccccatcgaagccaaagacatccaaaaactcatcccccaccgctatccgtttctccagctcgaccgcatcaccgccttcgagccgatgaaaaccctgaccgccatcaaaaacgtcaccataaacgaaccccagttccaaggccatttccccgacctgcccgtgatgcccggcgtactcatcatcgaagcgatggcgcaggcgtgcggcacgttggcgattttgagcgaaggcgggcgcaaagaaaacgaattcttcttcttcgccggcatagacgaagcccgtttcaaacgccaagtcatccccggcgaccaactcgtctttgaagtcgagctgctgaccagccggcgcggcatcggcaaattcaacgccgttgccaaagtggacgggcaagtcgccgtcgaagccatcatcatgtgtgccaaacgcgtggtttga

SEQ ID NO: 58586 - DNA, 264 bp, Neisseria meningitidis
atggcaaacagcgcacaagcacgcaaacgtgcccgccagtccgtcaaacaacgcgcccacaacgctagcctgcgtaccgcattccgcactgcagtgaaaaaagtattgaaagcagtcgaagcaggcgataaagctgccgcacaagcggtttaccaagagtctgtcaaagtcatcgaccgcatcgccgacaagggcgtgttccacaaaaacaaagcggcacgccacaaaagccgtttgtctgcaaaagtaaaagcactggcttga

SEQ ID NO: 58587 - DNA, 291 bp, Neisseria meningitidis
ttgagaataaaaaaatccttcttcggggggcaggttgtttatttgcccagaagcattgttgattcaacaaaaatggatgcactgtatgtttccgctccattttatttcgacgatgatttccaggtctgttatggcgaacactacaatatcgttttccctttgcttgtcccgttgtataaacaggaagcagaattggtggaaaagaaaggttggaatgcttttgagcagttcttgttggataatgaagttggcaacctttcggatatgaatcggaaaccgtttacttggtaa

SEQ ID NO: 58588 - DNA, 561 bp, Neisseria meningitidis; identical to SEQ ID NO: 52597

SEQ ID NO: 58589 - DNA, 1614 bp, Neisseria meningitidis
atgtttattatcctagggcgaaattttttaaagattatcctatgctttagtttttttgtatctaaatttgcattggcatcagtaaatgctccgggtaaatttgatagggttgaagtttatgatgatggcagatatttaggtattcgaggttcagatgacaaaagaagaagaatttggaaaggtttatttgatagagaatcgggaagatatttaacttcagaagctcaagatttaaaagttaggcatgtatctactggagcatcaagtacgggtaaagttagttcggttgtatcttcatcagtttcccgcgccgccgtcttgtcaggagtcggcaaacttgtccgccaaggcgcgaaattcagcacaagggcagtcccttatgtagggacagcccttttagcccacgacgtatacgaaactttcaaagaagacatacaggcacgaggctaccaatacgacaccgaaaccgacaaatttgtaaaaggctacgaatatagtaattgcctttggtacgaagacgaaagacgtattaatagaacctatggctgctacggcgttgacagttccattatgcgccttatgtccgattacagcagattccccgaagtcaaagaattgatggaaagccgaatggaaaggcttgcccgtccgtattgggaaaagttaaggaatcgtcctgatatgtattattttaaaaactacaattttaaacgttgttatttcggattgaacggcggagattgtttagttgctaaaggtgatgatggtagaacttttatcagtttctcacttcaaggaaattcaaaatacaaagaagaaatggatgccaaaaagctggaagagattttatcgttgaaagtcgatgccaatcccgacaaatacataaaggcaaccggatatcccggttattccgaaaaagtagaagtagcacccggaacaaaagtgaatatgggtcccgtcacggacaggaacgggaatcccgttcaggttgtcgcaacattcggcagggattcgcaaggcaacaccacggtggatgttcaagtaatcccgcgtcccgacttgacccccggaagcgcggaagcaccgaacgcacagccgctgcccgaagtatcgcccgccgaaaaccccgcaaacaacccgaaccccaatgagaaccccggcacgagccccaatcccgaacccgaccccgatttgaatcccgatgcaaatcccgatacggacggacagcccggcacaagacccgattcccccgccgttccgggacgcacaaacggcagggacggaaaggacggcaaagatggcggccttttgtgcaaattcttccccgacattctcgcttgcgacaggctgcccgagcccaatccggcagaagatttaaatctgccgtctgaaaccgtcaatgtagagtttcagaaatcaggaatctttcaagattccgcacagtgtcccgcacctgtcactttcacagtgactgtgcttgattcaagcaggcagttcgcgttcagctttgagaacgcatgtaccatagccgaacggctaaggtacatgcttctcgcccttgcttgggcggttgccgcctttttttgtatccgcacagtatcccgtgaagtctag

SEQ ID NO: 58590 - DNA, 861 bp, Neisseria meningitidis; identical to SEQ ID NO: 42443

SEQ ID NO: 58591 - DNA, 1071 bp, Neisseria meningitidis; identical to SEQ ID NO: 50196

SEQ ID NO: 58592 - DNA, 1266 bp, Neisseria meningitidis
atgtctgaagcccttgcaaaagaaaccctcaatccgtttgaaatcgcgcgcaaacaggtcaaaaccgcctgcgaccggctgaaaaccgatccggccgtttatgaaatcctgaagagtccgacccgcgtgttggaagtcaatttccccgtcaaactcgacgacggcacggtcaaaaccttcacgggctaccgttcgcaacacaacaacgccgtcggcccctataaaggcggcgtgcgcttccatcccggagtgaatctggacgaagtcaaagccctgtcgatttggatgaccatcaaatgctgcgttgcgggtattccttacggcggcggcaaaggcggtattaccttggatccgcgcgattattccgaggcggaactggaacgcatcgcccgcgcttattccgaagccatttctccgctgatcggcgaaaaaatcgatattcccgcccccgatgtgaacaccaacggcaaaattatgtcgtggatggtggatgcttatgaaaacgtggtgaaacattccgcaccgggcgtatttaccggcaaaccggtcgagttcggcggctctttggcgcgtaccgaagccacgggttacggcgtgaacctcgccgccgtccaagccttggaaaaactgggcaaagacgtgaagggtgccacttacgccattcaaggtttcggtaatgtgggttaccacacaggttattacgcgcatcaatccggcgcgaaagttgttgcggtttctactgttgacgttgccatttacaacgaaaacggcttggatatggaagctttgtttaaagagttccaagaaaaaggcttcatcaccaacgaagccggttacggcaaggaaattaccaacgccgaacttttggctttggatgtggacgtactcgccccttgcgcattggaaaatcaactgacttctgaaaacgccggtaaagtccgcgcgaaaatcgtggttgaaggcgcgaacggcccgactacgcccgaagccgacgttatcctgcgtcaaaacggcgtattggtcgtgcctgatattctggcgaactgcggcggcgtggtcgtttcctatttcgagtgggtgcaaaacctgcaaggttactattgggagtttgacgaagttcaggaaaaagaaaccgtcgtcctgcgccgtgcgttccgcgatatatggaacttggcgcaagagtatgatgtcgatttgcgaaccgcgtcttacatgatgagtatccgccgtgttgaaaaagcgatgaaactgcgcggttggtattga

SEQ ID NO: 58593 - DNA, 810 bp, Neisseria meningitidis; identical to SEQ ID NO: 37887

SEQ ID NO: 58594 - DNA, 354 bp, Neisseria meningitidis
atgggaataaaaaatgaacaaataataatttgtaaaaaatataatacagaaatatatcctatttccgatgtttcaaaaatcggtgttgctgaaaatgtcaaacaggcaaacctgtatccgattaacgggttaaggcaccgtcccaaaggtgatactaacggttggtatatctgggccggtgaaaacttctcctatgataaaaattttttcctgcccttgcatactttccatttgcaaatatggcgacccgaaatcatcccctttttgacacttccgcccggttaccgttttttaattggggaaaacggttatgaagacgtatggtttgatgagttgctattaaatgataattga

SEQ ID NO: 58595 - DNA, 1044 bp, Neisseria meningitidis
atgattccggccacctacaccctgtcccaaatcaccgcgcggctcggcggcgaatggcgcggcgaggacatttccgttaccgccgtgcgcccgctcgcagacgcgcaggcggaacacatcagcttccttgccaatccgaaatacaaagccgaagtccacgacagcagcgcgggcgcggtcatcgtttccgccaaagcggcagacggatttgaagggcgcaacctgattgtcgccgacgacccctatctctatttcgccaaagtcgcccgcctgttttcacccgtcgtcaaagcgcgcggcggcatccatccgaccgccgtcgtcgaaccgggcgcgaccgttcccgcaaactgcgaaatcggcgcgaacgcctacatcggcgcaaacaccgtgctcggcgaaggctgccgcatcttggcaaacgccgtcgtccaacacgattgcaaactgggcgacgaagtcgtcctgcatcccaacgccgtcgtttattacggctgtacactgggcagacgcgtcgaaatccacagcggcgcagtcatcggcgcggacggtttcggactcgcttttgccggcgattcatggtttaaaatcccgcaaaccggcgcggtaacgctgggcgacgacgtagaaatcggctcgaacaccaacatcgaccgcggcgcgatgagcgacaccaccgtcggcaacggcaccaaaatcgacaaccaagtccaaatcggacacaactgcaaaatcggttcgcacaccgtcatcgccgccaaaaccggcatctcaggcagcgtaaccataggcagctactgcatcatcggcggtggcgtcggtacggtcggacacatcgaaatcgccgacaaaaccaccatcggcggcggcacgtccgtcacccacagcattaccgaaagcggcaaacacctcgccggcatcttcccgatgtccacccataaagaatgggcgcgcaacgctgtttacatccaccgcttaagcgaaatgaacaaacgcctcaaaacgctggaacagcagctttcagacggcaaagacacgcaataa

SEQ ID NO: 58596 - DNA, 1143 bp, Neisseria meningitidis; identical to SEQ ID NO: 41235

SEQ ID NO: 58597 - DNA, 639 bp, Neisseria meningitidis
ttgaccatcgccttatccaaggggcgcatttttgaggagacgctgccgctgcttgccgctgccggcattgttccgactgaagagcctgaaaaatcgcgcaagctgattatcgggacgaaccatgaaaacatccgccttgtcattgtccgcgcaaccgatgtgccgacttatgtccgctacggcgcggcggacttcggcattgcgggcaaagacgtgctgatcgaacacggcggcacggggctttaccggcctttggatttggagattgccaagtgccgcatgatggttgctgtgcgtaaagggtttgattacgaagcagcttcgcaacccggatgccgtctgaagattgccacgaagtatcctgaaatcgcggcatctcattttgctggcaagggtgtccatgtggacattatcaaactgtacggctcgatggaacttgcgccgctggtcggcttgagcgatgcgattgtggacttggtttcgacgggcaacaccttgaaggcaaacggcttggaagcagtcgaacacatcgtcgacatttccagccgcctggtggtcaacaaggctgctttgaaaacgaaatacgcgctgctggagccgattattcaggcgttcggcggcgcagtgaaggcgaagtaa

SEQ ID NO: 58598 - DNA, 456 bp, Neisseria meningitidis
atggtcgacacggtcgttaaaactcccgaatttttaccttttacttctgtaggaatattccgttttggtgcggatataacagagtacaaaaacatactggaaacttttatgtatgaacctcctgatgagtttagaacagaatattatgaatctcccgactcaaatttactcattgccgtcaaaaaaaacaaaattatttcgatattttgttatcaggagctatattttatgggcgttaatttaataggtctaaattttgaagattttaaacaacttttccatcaccctaaatcatacggtgttgatgaatattatttatcaaatgaatcttatccgacatatgtctatgagtttgatgaaataggggtacaagcatgggaagcaaaagggaaagttgttactatcattgccgggggtaaagacaattattcaacagaaccttactacgatgaataa

SEQ ID NO: 58599 - DNA, 897 bp, Neisseria meningitidis
atggagtctgaaaacattatttccgccgccgacaaagcgcgtatccttgccgaagcgctgccttacatccgccggttttccggttcggtcgccgtcatcaagtacggcggcaacgcgatgaccgaacctgccttgaaagaagggtttgcccgcgatgtcgtactgctgaagctggtcggcattcatcccgtcatcgttcacggcggcgggccgcagatcaatgcgatgcttgaaaaagtcggcaaaaagggggagtttgtccaaggaatgcgcgttaccgacaaagaggcgatggatattgtcgaaatggtgttgggtgggcatgtcaataaagaaatcgtgtcgatgattaacacatatggcggacacgcggtcggcgtgagcggacgcgacgatcatttcattaaggcgaagaaacttttgatcgatacgcccgaacagaatggcgtagacatcggacaggtcggtacggtggaaagcatcgatacaggtttggttaaagggctgatagaacgtggctgcattcccgtcgtcgcccccgtcggcgtaggtgaaaaaggcgaagcgttcaacatcaacgccgatttggtagcaggcaaattggcggaagaattgaacgccgaaaaactcttgatgatgacgaatatcgccggtgtgatggacaaaacgggcaatctgctgaccaaactcacgccgaaacggattgatgaactgattgccgacggcacgctgtatggcggtatgctgccgaaaatcgcttctgcggtcgaagccgccgtcaacggcgtgaaagccacgcacatcatcgacggcagggtgcccaacgcgcttttgctggaaatctttaccgatgccggtatcggttcgatgattttgggcggtggggaagatgcctga

SEQ ID NO: 58600 - DNA, 465 bp, Neisseria meningitidis; identical to SEQ ID NO: 51230

SEQ ID NO: 58601 - DNA, 1242 bp, Neisseria meningitidis; identical to SEQ ID NO: 51555

SEQ ID NO: 58602 - DNA, 732 bp, Neisseria meningitidis; identical to SEQ ID NO: 39074

SEQ ID NO: 58603 - DNA, 630 bp, Neisseria meningitidis; identical to SEQ ID NO: 50658

SEQ ID NO: 58604 - DNA, 993 bp, Neisseria meningitidis
atgaaaaaatccctgattgccctgactttggcagcccttcctattgcagcaatggctgacgttaccctgtacggcaccatcaaaaccggcgtagaaacttcccgctctgtatattacgaagacggcaaagctgctgaagttacaaccggtaccggcatcgttgatttgggttcgaaaatcggcttcaaaggccaagaagacctcggtaacggtctgaaagccatttggcaggttgagcaaaaggcatctatcgccggtactgactccggttggggcaaccgccaatccttcatcggtttgaaaggcggcttcggtaaattgcgcgtcggccgtctgaacagcgtcctgaaagataccggcgacatcaatccttgggatagcaaaagcgactatttgggtgtaaacaaaattgccgaacccgaggcacgcctcatttccgtacgctacgattctcccgaatttgccggcctcagcggcagcgtacaatacgcgcttaacgacaatgcaggcagacataacagcgaatcttaccacgccggcttcaactacaaaaacggcggcttcttcgtgcaatatggcggtgcctataaaagacatgagcagatagataacgtgaagattgagaaataccagattcaccgtttggtcagcggttacgacaatgatgccctgcacgcttccgtagccgtacaacaacaagatgccaaattggttgaagacaattattcgcacaactctcaaaccgaagttgccgctaccttggcataccgcttcggcaacgtaacgccccgcgtttcttacgcccacggcttcaaaggctcgtttgatgatgcagaccgctacaatacttacgaccaagtggttgtcggtgcggaatacgacttctccaaacgcacttctgccttggtttctgccggttggttgcaagaaggcgaaggcgaaagcaaattcgtatcgactgccggcggtgtcggtctgcgccacaaattctaa

SEQ ID NO: 58605 - DNA, 219 bp, Neisseria meningitidis; identical to SEQ ID NO: 36510

SEQ ID NO: 58606 - DNA, 789 bp, Neisseria meningitidis
atggaagatttatatataatactcgctttgggtttggttgcgatgattgccggatttatcgatgcgattgcgggcgggggtggtttgattacgctgcccgcactcttgttggcaggtattcctcccgtgtcggcaattgccaccaacaagctgcaagcagccgctgctacgttttcggctacggtttcttttgcacgcaaaggtttgattgattggaagaaaggtctcccgattgcggcagcatcgtttgcaggcggcgtggtcggtgcattatcggtcagcttggtttccaaagatattctgctggcggtcgtgccgattttgttgatatttgtcgcgctgtattttgtgttttcgcccaagctcgacggcagtaaggaaggcaaagccagaatatctttttttctattcgggctgacggttgcaccgcttttgggtttttacgacggtgtgttcggaccgggtgtcggctcgttttttctgattgcctttattgttttgctcggctgcaagctgttgaacgcgatgtcttacaccaaattggcgaacgttgcctgcaatcttggttcgctatcggtattcctgctgcacggttcgattattttcccgattgcggcaacgatggcggtcggtgcgtttgtcggtgcgaatttaggtgcgagatttgccgtccgcttcggttcgaagctgattaagccgctgctgattgtcatcagcatttcgatggctgtgaaattgttgatagacgagagaaatccgctgtatcagatgattatttcgatgttttaa

SEQ ID NO: 58607 - DNA, 837 bp, Neisseria meningitidis
atgatagacctgcactgccattccaccgtttccgacggtatgctctcccccgccgaagttgtgcgcctcgcgcatcaaaacggctgcacgctgctggcgttgaccgaccacgaccacaccggcggcatcgccgaagcgcgtgccgaagccgacaggctcggtttgcgcctgattaacggcgtggaaatctccgtaacgtggcgcgggcgtaccatacacgttgtcggcttagactttgacgaacaagacgaaaacctgcaaaacctgttggcgcaagtgcggcaaggccgtctgaaacgcctcgaagccatcgccgccaagctggaaaaacgcggcatttcgggcgcatacgacggcgcgctcgcgctggcggcaaacaaagaaatggtcagccgcacacacgtcgccgagttcctcattcgggtgggacacgtcaaaaacaagcagcaggcgttcaccaaatacttgggcgacggcaaatcctgcgccgtccgccacgaatgggcgacgctggaagactgcgtctccgccgtcaacggcgcgggcgggttggcggtcatcgcccatccgatgcgttatgatttgtccgccaccgccaagcgcaatctgtttgaagaatttaaaaaactcggcggtgcgggtatcgaagtccacagcggaaactgttgcaaaaacgaccgcctcaactacgcgcttttggcagaacgcttcggattgttggcaagcgcgggcagcgacttccaccgtttaaacgacttcagcggcggcattctcggcgcgtgtcccgaattgccggaaaactgcaaaccggtgtggacgcacttttcccgacattga

SEQ ID NO: 58608 - DNA, 375 bp, Neisseria meningitidis
atgatagtccttcacggcatcccaaattgcgatacggtcaaaaaagccaaaaaccgacttgccggatatggtatggaatttgaatttcgggatttcaaaaaacagaggccgtctgaagcggaaatctgctcgtggctggaacaagtgcctttggcaaccctgctcaacaaacgcgggacaagctggcgcaaactcgatgccgaaacacagcaaaaagtgctgtcctcgacggcggaggccgtcaaactgatgtccgaaatgccgagcctgatcaagcgtcccgtattggagtgcggcggcaaggtttacgccggcttcagcgaagaaacctacgacggcatcttcaagcggcaagccccgtgcagacagggataa

SEQ ID NO: 58609 - DNA, 300 bp, Neisseria meningitidis
atgggctatcgtgtcggcataaattgttttgatacaagattgcaggcagacgactatttattgtcgtcccttcctcctactgttacccaggacggaaaaatcatcaggccggaaagggtgggcgaaaaatggattttgaacggaaagccggtcacgctgtcttatccgaaatgttcgaattacgaacaagttaaatccggagcttatctcgggtctatggttttaattctgtttgtcgttatttacggcttcaggctgctgattaatttcttaaaagacataggcaaagtaggggcgtga

SEQ ID NO: 58610 - DNA, 1497 bp, Neisseria meningitidis
atgttttccaactacctactcagcttggcaatatggatacccatcgccgcaggcgtgctggttttggcaacggggtcggacagccgtgcgccgtttgcccgcgtgctcgccttcatgggtgcgcttgccggtttcttggtaacactgcccctgtttaccggtttcgaccgtttgagcggcggctatcaatttaccgagttccacgagtggattccgcttctgaaaatcaactacgcattgggcgtggacggtatttcagtgctctttatcatcttgaatgcgtttattacgctgttggtggtattggcaggttgggaagtcattcagaaacgtccggcgcagtatatggcggcattcctgatcatgtcgggtttgattaacggcgcgtttgccgcgcaggatgcgattctgttttatgtgttcttcgagggtatgctgattccgctgtacctgattatcggtgtatggggcggtccgcgccgcgtctatgcgtcggtcaagctcttcctctacacgctgatgggttcgctcctgatgctggttgcgatggtttacctttattatcaaacaggcagcttctctattgtcgatttccaaaacatcgaacagattccgttgggcgtacaacagcttttgtttgtggcgttcttcctgtcatttgccgtaaaagtgccgatgttccctgtgcacacttggttgccggatgcccacgttgaagcgccgaccggcggttcgatggtgttggcggccattacgctgaaactgggtgcgtatggtttcttgcgctttatcctgccgattatgccggatgcggcacgctattttgcccccgtgatcatcgtattaagtctgattgccgtgatttatatcggtatggtggctttggtgcaaaccgatatgaaaaaactggtggcgtattcgtccatcagccatatgggttttgtaacgcttgggatgtttttgtttgttgacgggcagttggacgactgggcattgaaaggcgcggtcattcagatgatttcgcacggtttcgtgtcggcggcgatgtttatgtgcatcggtgtgatgtacgaccgcctgcacacgcgcaatatcgccgattacggcggcgtggtcaacgtgatgcccaagtttgcggcgtttatgatgttgttcggtatggcgaacgccggtttgccggcgacttccggcttcgtgggcgagtttatggtgattatgggcgcggttaaagtgaatttctgggtgggcgcgttggcggctatgacgctgatttacggcgcgtcttataccctgtggatgtacaagcgcgtgatttacggcgcgatccacaatccgcacgttgccgaaatgaaagacatcaactgccgcgaatttgcgattctggcgattttggcggttgtggtattgggtatgggtctgtatccgcaagcgtttatcgaagtggtgcatcaggcggcaaacgatttgattgcccatgtggcacaaagcaagatttga

SEQ ID NO: 58611 - DNA, 738 bp, Neisseria meningitidis
atgggcggacaaaaaacgcatttcgggttcagtacggtcaacgaagatgaaaaagccggcaaagtggcggaagtgttccactccgtcgccaaaaactacgacattatgaacgatgtgatgtcggcagggctgcacagggtgtggaagcatttcaccatcaacacggcgcacctgaaaaaaggcgataaagtgttggacattgcgggcggtacgggcgatttgtcgcgcggttgggcgaaacgggtcggcaaggaaggcgaggtttggctgaccgatattaattcctctatgctgaccgtcgggcgcgaccgtctgttgaacgaaggcatgattttgcccgtatcgcttgccgatgcggaaaaactgcctttccccgacaattatttcaacttggtttccgtggcgttcggcttgcggaacatgacgcataaagatgccgcgctgaaagagatgtaccgtgttttgaaacccggcgggacattgctggtattggagttttccaaaatctacaaacctttggaaggcgcgtatgatttctattcgttcaagctgctgccggtcatgggcaaactgattgccaaagatgcggagagttatcaatatctcgccgaatccatccgtatgcaccccgatcaggaaactttgaaacagatgatgctggatgcgggctttgacagcgtggattatcacaatatgagtgcgggcatcgtcgcgctgcataagggcgtgaaattttaa

SEQ ID NO: 58612 - DNA, 1434 bp, Neisseria meningitidis
atgtctcaatatgatgtagtagtgattggtgcaggcccgggcggatacgttgccgccatccgtgccgcacaactgggtttcaaaactgcctgtgtcgatgcaggcgttaacaaagcaggcaatgcccctgcattgggcggtacttgcttgaacgtaggttgtatcccttctaaagccctgttgcaatccagcgaacatttccacgctgcgcaacacgattttgccgaacacggtatcactgtcggtgacgtaaaattcgacgcggccaaaatgattgagcgcaaagatgccatcgtgaccaaactgaccggcggcgtgaaattcctgttccaaaaaaataaagtaaccagtctgttcggtacggcttcctttgccggtaaaaatggcgatgcttaccaaatcgaagtcgataacaaaggagagaaaaccgttatcgaagccaaacacgtcatcgtagcgaccggttccgtaccgcgtccgctgccacaagtcgctatcgacaatgtgaacgtattggacaacgaaggcgcattgaacctgaccgaagtacctgccaaactcggcgtgatcggttccggtgtgattggtttggaaatgggttccgtatggaaccgcgtgggtgcggaagttaccattcttgaagccgcgccgaccttcctggctgccgccgaccaacaaatcgccaaagaagccttcaaatacttcaccaaagagcaaggtctgagcatcgaattgggcgtgaaaatcggcgacatcaagtctgaaggcaaaggtgtttccgttgcttacgaaactgctgccggcgaagccaaaaccgaagtattcgacaaactgatcgttgccatcggccgtattccaaacaccaaaggcctgaacgccgaagccgtaggcttggaaaaagacgagcgcggctttatcaaagtagatggcgaatgccgtaccaacctgcctaacgtatgggcaatcggcgacgtggttcgcggcccgatgttggcacacaaagccagcgatgaaggcgttgccgttgccgagcgcattgccggtcaaaaaccgcatatcgacttcaacaacgtaccgttcgtgatttacaccgatcctgaaatcgcttgggtgggtaaaaccgaagagcagctcaaagccgaaggcgtggagtacaaaaaaggtacttcaggttttggtgcgaatggtcgcgcattggcaatgggcaaagccaaaggtacggttaaagtgttggcagacgccaaaaccgaccgcatcttgggcgtacacatgattggtccggttgtcagcgaattggttaccgaaggcgtgactgcgctcgaattcttcgccagcagcgaagacatcgcccgcattatccatgcccacccaaccttgtccgaagtggttcacgaagctgcattggcggccgacaaacgcgctttgcacggttga

SEQ ID NO: 58613 - DNA, 396 bp, Neisseria meningitidis
atgatgtattcgtttgaagcgaatgcaaatgcagtaaaaatatctgaaactgtttcagttgataccggacaaggtgcgaaaattcataagtttgtacctaaaaatagtaaaacttattcatctgatttaataaaaacggtagatttaacacacatccctacgggcgcaaaagcccgaatcaacgccaaaataaccgccagcatttcccgcgccggcgtattggcgggggtcggcaaacttgcccgcttaggcgcgaaattcagcacaagggcggttccctatgtcggaacagcccttttagcccacgacgtatacgaaactttcaaagaagacatacaggcacgaggctaccaatacgacaccgaaaccgacaaatttgcaaaggtctcaggctaa

SEQ ID NO: 58614 - DNA, 777 bp, Neisseria meningitidis
atggcagcattcaatacccaaaaagtattgtccgtacaccactggacagacgcatattttacctttacctgcacccgcgacgaatcgttgcgctttgaaaacggacagttcgttatggtcggattgatggtggacggcaagccgctgatgcgtgcatacagcgtcgcctccgccaactgggaagaacacctcgaatttttcagcattaaagtccaagacggcccgctgaccagccgcctgcaacacctcaaagtcggcgacgacgtgttaatcagcaaaaaaccgaccggaactctggttgccggcgacctgaatccgggcaaacacctttacttgttgagcaccggtaccggcatcgcccctttcttgagcatcaccaaagaccccgagatttacgagcaatttgaaaaaatcatcctcgtacacggcgtgcgctacaaaaaagatttagcgtactacgaccgctttaccaaagaattgcccgaacacgaatacctcggcgacttggttaaagaaaaactgatttactacccgattgtttcccgagaagaattcgaacaccacggccgcctaaccgacctgatggtgagcggcaaactgtttgaagacatcggcctgcccaaaatcaacccgcaagacgaccgcgcgatgctgtgcggcagccccgcgatgctgaaagacacctgcaaagttttggacgatttcggactaaccgtttctccgaaaacaggcgtgcgcggcgattacctgattgagcgcgcgtttgtggatcaataa

SEQ ID NO: 58615 - DNA, 966 bp, Neisseria meningitidis
atgagctacacgcaactgacccaaggcgaacgataccacatccaatacctgtcccgccactgcaccgtcaccgaaatcgccaaacagcttaaccgccacaaaagcaccatcagccgcgaaatcagacggcaccgcacccaagggcagcaatacagcgccgaaaaagcccagcggcaaagccagactatcaaacagcgtaagcgacaaccctataagctcgattcgcagctgattcagcacatcgacccccttatccgccgcaaactcagtcccgaacaagtatgcgcctacctgtgcaaacaccaccagatcacgctccaccacagcaccatttaccgctaccttcgccaagacaaaagcaacggcagcacgttgtggcaacatctcagaatatgcagcaaaccctaccgcaaacgctacggcagcacatggaccagaggcaaagtacccaaccgtgtcggcatagaaaaccgacccgctatcgtcgaccagaaatcccgtatcggcgattgggaagccgacaccattgtcggcaaaggacagaaaagcgcattattgaccttggtcgaacgcgttacccgctacaccatcatctgcaaattggatagcctcaaagccgaagacactgcccgggcagctgttaggacattaaaggcacataaagacagggtgcacaccatcaccatggataacggcaaagagttctaccaacacaccaaaataaccaaagcattgaaagcggagacttatttttgtcgcccttaccattcttgggagaaagggctgaatgagaacaccaacggactcatccggcaatacttccccaaacaaaccgatttccgtaacatcagtgatcgggagatacgcagggttcaagatgagttgaaccaccgaccaagaaaaacacttggctacgaaacgccaagtgttttattcttgaatctgttccaaccactaatacactag

SEQ ID NO: 58616 - DNA, 357 bp, Neisseria meningitidis
atggataaaatctttttgcacggcatcaaggcggatacgcttatcggcgtgtacggctgggaacgcgaacggttgcagaccctgattgtcgatttggacatcggcgttcccgagaaagcgggttcggacgacgatattgccaatacggtgcattatgccgaggtatgcgaaacgctgcgccgacatctgaaagaacaggatttcctgcttttggaagcgttggcggaatatattgccgatttggttttgggatatttcggcgcggtgtgggtgcgcgtgaaaatcgtcaaaccgggtattttggaaggcgtgcgcgaggttggcgtggaaatcgagcgcggcaagcgtgaagattga

SEQ ID NO: 58617 - DNA, 702 bp, Neisseria meningitidis
atgacggaacctgcggccgaaggcggtaaagctgccaaggcgttaaaaaaatatctgattacgggcattttggtctggctgccgattgcggtaacggtttgggtggtttcctatatcgtttccgcgtccgatcagctcgtcaacctgctgccgaagcaatggcggccgcaatatgttttggggtttaatatcccggggctgggcgttatcgttgccattgctgtattgtttgtaaccggattgtttgccgcaaacgtattgggccggcagattcttgccgcgtgggacagcttgttggggcggattccggttgtgaagtccatctattcgagtgtgaaaaaagtatccgaatcgctgctgtccgacagcagccgttcgtttaaaacaccagtactcgtgccgtttccccaatcgggtatttggacaatcgcattcgtgtccggtcaggtgtcgaatgcggttaaggtcgcattgccgcaggatggcgattatctttccgtgtatgtcccgaccacgcccaacccgaccggcggttactatattatggtaaagaaaagcgatgtgcgcgaactcgatatgagcgtggacgaagcgttgaaatatgtgatttcgctgggtatggtcatccctgacgacctgcccgtcaaaacattggcaggacctatgccgtctgaaaaggcggatttgcccgaacaacaataa

SEQ ID NO: 58618 - DNA, 618 bp, Neisseria meningitidis
  misc_feature 8, 9, 10, 11, 12: 'n' is a, c, g or t
gtgtgtgnnnnntatcagatacccaaaaacaaagcactgcaaaaactgattaaccttaaaaatcaattacatcaacatcagaagcaaattaaaaaccgtcttcatagcactgaagaagacttcataaggaacatacatcaagacttgatagataccatacaggacaagatggaacaggtaaaaatagccatatccgaacaaatcaaaaaacaaacggacaataaccattaccgcaatcttcaaaccatcccgagcataggcaaagacaccgcatcagttctttatgcgcaactgacagaaaaacattttaaaaccgcaaaccagtttgtatcctatgccggattaagtcccgccatcatacaatcagggacaagcgtaagaggtcggggcagattgagccgatacggaaacagacgattaaaaagtacgctgtatatgcccgccctttgtgcttaccgttttaacgcatttccgaaattaataaataatctgaaaaaagcgggtaagccaaagatggtaatcatcgttgccatcatgcgcaaactggcgaagctcgcctattacattgttaaaaccggccagccttacgatgcggaaagacaccgattgaatcaataa

SEQ ID NO: 58619 - DNA, 1032 bp, Neisseria meningitidis; identical to SEQ ID NO: 48687

SEQ ID NO: 58620 - DNA, 150 bp, Neisseria meningitidis
atgttgtcctatccgaaatgttccaattttgagcagataaagcaaggttcttacgtaggttcgacggttttaattctgttcgtagtcatttacggtttcaggctgctgattaatttcttaaaagacataggcaaggttggtactgattga

SEQ ID NO: 58621 - DNA, 462 bp, Neisseria meningitidis; identical to SEQ ID NO: 50218

SEQ ID NO: 58622 - DNA, 726 bp, Neisseria meningitidis; identical to SEQ ID NO: 55650

SEQ ID NO: 58623 - DNA, 480 bp, Neisseria meningitidis
atgccggaaagtattttcaaacagatttcccttgatattttgaaactgcatcgggactctgtttattcgctgcttgccacttccggctgcaactgtcaggtgcatgaagcggcgtatgtcaacatcgacggcaaatattatattgcgctttcatgtgagcccgaggtgggggaagtcaaaacaggcattttgctgattgaggatgaaagccgcaaccttcgtttgagctgggtcggcagtgcgcgggaacttgaccgcaaggatagtgtctataagcgtgccttgtccgcgttgtccagaaagctggggcggtgtaaggacaggctgcatacggcggttcaaccgtttttgttggagctggtgccggagaaaggcagattttctgtcggcgatgaagaagtttggatttctcgaaacgatttagtgagggctttatatcctgtcggatacagtatgcggcaggcagtgttgcagatttaa

SEQ ID NO: 58624 - DNA, 2151 bp, Neisseria meningitidis
atgaaaaccccactcctcaagcctctgctcattacctcgcttcccgttttcgccagtgtttttaccgccgcctccatcgtctggcagctaggcgaacccaagctcgccatgcccttcgtactcggcatcatcgccggcggccttgtcgatttggacaaccgcctgaccggacggctgaaaaacatcatcaccaccgtcgccctgttcaccctctcctcgctcacggcacaaagcaccctcggcacagggctgcccttcatcctcgccatgaccctgatgaccttcggcttcaccattttaggcgcggtcgggctcaaataccgcaccttcgccttcggtgcactcgccgtcgccacctacaccacacttacctacacccccgaaacctactggctgaccaaccccttcatgattttatgcggcaccgtactgtacagcaccgccatcctcctgttccaaatcgtcctgccccaccgccccgtccaagaaagcgtcgccaacgcctacgacgcactcggcggctacctcgaagccaaagccgacttcttcgaccccgatgaggcagcctggataggcaaccgccacatcgacctcgccatgagcaacaccggcgtcatcaccgccttcaaccaatgccgttccgccctgttttaccgccttcgcggcaaacaccgccacccgcgcaccgccaaaatgctgcgttactactttgccgcccaagacatacacgaacgcatcagctccgcccacgtcgattatcaggaaatgtccgaaaaattcaaaaacaccgacatcatcttccgcatccaccgtctgctcgaaatgcagggacaagcctgccgcaacaccgcccaagccctgcgcgcaagcaaagactacgtttacagcaaacgcctcggccgcgccatcgaaggctgccgccaatcgctgcgcctcctttcagacagcaacgacagtcccgacatccgccacctgcgccgccttctcgacaacctcggcagcgtcgaccagcagttccgccaactccagcacaacggcctgcaggcagaaaacgaccgcatgggcgacacccgcatcgccgccctcgaaaccagcagcctcaaaaacacctggcaggcaatccgtccgcagctaaacctcgaatcaggcgtattccgccatgccgtccgcctgtccctcgtcgttgccgccgcctgcaccatcgtcgaagccctcaacctcaacctcggctactggatactactgaccgcccttttcgtctgccaacccaactacaccgccaccaaaagccgcgtccgccagcgcatcgccggcaccgtactcggcgtaatcgtcggctcgctcgtcccctacttcaccccgtctgtcgaaaccaaactctggattgtcatcgccagtaccaccctctttttcatgacccgcacctacaaatacagtttctccaccttcttcattaccattcaagccctgaccagcctctccctcgcaggtttggacgtatacgccgccatgcccgtacgcatcatcgacaccattatcggcgcatcccttgcctgggcggcagtcagctacctgtggccagactggaaatacctcacgctcgaacgcaccgccgcccttgccgtatgcagcaacggtgcctatctcgaaaaaatcaccgaacgcctcaaaagcggcgaaaccggcgacgacgtcgaataccgcgccacccgccgccgcgcccacgaacacaccgccgccctcagcagcaccctttccgacatgagcagcgaacccgcaaaattcgccgacagcctgcaacccggctttaccctgctcaaaaccggctacgccctgaccggctacatctccgccctcggcgcataccgcagcgaaatgcacgaagaatgcagccccgactttaccgcacagttccacctcgccgccgaacacaccgcccacatcttccaacacctgcccgaaaccgaacccgacgactttcagacagcactggatacactgcgcggcgaactcgacaccctccgcacccacagcagcggaacacaaagccacatcctcctccaacagctccaactcatcgcccgacagctcgaaccctactaccgcgcctaccgccaaattccgcacaggcagccccaaaatgcagcctga

SEQ ID NO: 58625 - DNA, 597 bp, Neisseria meningitidis
atgcgcaaacagaacactttgacgggaatcccgacttctgacggacagagggggtttgcactgtttatcgtgctgatggtgatgatcgtcgtggcttttttggttgtaactgccgcgcagtcttacaataccgagcagcggatcagtgccaacgaatcagacaggaaattggctttgtctttggccgaggcggctttgcgggaaggcgaacttcaggttttggatttggaatatgatacggacagtaaggttacatttagcgaaaactgtgcaaaaggtctgtgtaccgcagtgaatgtgcggacaaataatactggtaatgaagaggcttttgacaatatcgtggtgcaaggcaatcccaccgttgaggcggtgaagcgttcttgccctgcaaattctaccgacctgtgcattgacaagaaagggatgaaatataagaaaggcacgagaagcgtcagcaaaatgccacgttatattatcgaatatttgggcgtgaagaacggagaaaatgtttatcgggttactgccaaggcttggggtaagaatgccaataccgtggtcgtccttcaatcttatgtaagcaataatgatgagtaa

SEQ ID NO: 58626 - DNA, 1200 bp, Neisseria meningitidis
atgtccgaccaactcatcctcgttctgaactgcggcagttcatcgctcaaaggcgccgttatcgaccgaaaaagcggcagcgtcgtcctaagctgcctcggcgaacgcctgaccacgcccgaagccgtcattacgttcaacaaagacggcaacaaacgccaagttcccctgagcggccgaaattgccacgccggcgcggtgggtatgcttttgaacgaactggaaaaacacggtctgcacgaccgcatcaaagccatcggccaccgcatcgcccacggcggcgaaaaatacagtgagtctgttttgatcgaccaggccgtaatggacgaactcaatgcctgcattccgcttgcgccgctgcacaaccccgccaacatcagcggcatccttgccgcacaggaacatttccccggtctgcccaatgtcggcgtgatggatacttcgttccaccaaaccatgccggagcgtgcctacacttatgccgtgccgcgcgagttgcgtaaaaaatacgctttccgccgctacggtttccacggcaccagtatgcgttacgttgcccctgaagccgcacgcatcttgggcaaacctctggaagacatccgcatgattattgcccacttaggcaacggcgcatccattaccgccatcaaaaacggcaaatccgtcgataccagtatgggtttcacgccgatcgaaggtttggtaatgggtacacgttgcggcgacatcgatccgggcgtatacagctatctgacttcccacgccgggatggatgttgcccaagtggatgaaatgctgaacaaaaaatcaggtttgctcggtatttccgaactttccaacgactgccgcaccctcgaaatcgccgccgacgaaggccacgaaggcgcgcgcctcgccctcgaagtcatgacctaccgcctcgccaaatacatcgcttcgatggctgtgggctgcggcggcgttgacgcactcgtgttcaccggcggtatcggcgaaaactcgcgtaatatccgtgccaaaaccgtttcctatcttgatttcttgggtctgcacatcgacaccaaagccaatatggaaaaacgctacggcaattcgggcattatcagcccgaccgattcttctccggctgttttggttgtcccgaccaatgaagaactgatgattgcctgcgacactgccgaacttgccggcatcttgtag

SEQ ID NO: 58627 - DNA, 1860 bp, Neisseria meningitidis
atgccagaataccgctccaaaacctccacccacggtcgcaatatggcgggcgcgcgcgcgttgtggcgcgccaccggcgtgatggaaaccgacttcggcaaaccgattatcgccgttgccaactcgttcacccaattcgtgccaggtcatgtccacctgcacaatatgggccagctggttgcccgcgaaatcgaaaaagccggcgccatcgccaaagaattcaacaccatcgccatcgacgacggcatcgctatgggacacagcggtatgctgtattccctgcccagccgcgatttgattgccgactccatcgaatatatggtcaatgcccactgcgccgacgcgctggtgtgcatttccaactgcgacaaaatcaccccgggaatgctgattgccgcgatgcgcctgaacatccccaccatcttcgtctccggcggtccgatggaagcaggtaaagttatcggcgtggcaaacatccagcccgaacgccgtttggacttgattgacgcgatgattgaatcggcggacgacaatgtcagcaaccggcaagttgaagaagtcgaacaaaacgcctgcccgacctgcggctcgtgttcgggtatgtttacggcaaactcgatgaactgcctgaccgaagcactcggtctgtccctacccggcaacggttcgtatttggcgacccacgccggccgcaaagaattgttcctcgaagccggccgtatgattgtcgaaatcaccaaacgctattacgagcaaaacgatgaaaccgtgttaccgcgcagcattgccaccaaaaaagcgtttgaaaacgctatgacgatggatattgcgatgggcggcagcaccaacactattttgcatttactcgccgttgccaacgaagcgggcgtggatttcaaaatggcagacatcgaccgcttaagccgcgttgtgccctgcatctgcaaaaccgcacccaacaaccacgactactatatggaagacgtgcaccgagccggcggcatcttcgccatcctgaaagaattggacaaagcgggcaagctgcacaccgacgtgcacactatccacgcaccgacgctgaaagacgcgattgaaaaatgggacgtaaccaaccctgaaaacacccgcgccatcgaacgcttcaaagccgcgcccggcggcgtacgcaccacgcaagcgttctcgcaaaaccgtatgtggaaaaccctcgacctcgaccgcgaaaaaggctgtatccgcgacgtggcacacgcctactcgcaagacggcggtttggcggtcttgttcggcaacatcgccgaacgcggctgcgtggtaaaaaccgcaggcgtggatgagagcatcctcaaattcaccggccgcgcccgcgtgtttgaaagccaagaagacgcagtagaaggcattttgggcaaccaaatcgtcgccggcgacatcgtcatcatccgctacgaaggcccgaaaggcggcccgggtatgcaggaaatgctgtacccaacctcctacctgaaatccaaaggtttgggcaaagcctgtgccctcctgaccgacggacgcttttccggcggcacatcaggtttgtccatcggacacgcctcgcccgaagcggcggaaggtggcgcgatcggtttggtacacgaaggcgatacgattgaaatcgacatccccaaccgcagcatccaccttgttatttccgatgaagagcttgccgcacgccgtgccgaaatggaagtgcgcggcagcaaagcgtggaagccggaaaaccgcgaccgctacgtctccgccgcattaagggcttacggcgcgatggcgacttccgctgataaaggcgcggtgcgcgacgtatcgcaaatcgaaagataa

SEQ ID NO: 58628 - DNA, 456 bp, Neisseria meningitidis; identical to SEQ ID NO: 40384

SEQ ID NO: 58629 - DNA, 1386 bp, Neisseria meningitidis; identical to SEQ ID NO: 46406

SEQ ID NO: 58630 - DNA, 1215 bp, Neisseria meningitidis
atggaatgggaattcaacagttattacacactgattgccgccacgctcgtgttgctggttggtaaatttctggttcaaaaaatcaaattcttacgagacttcaatattcccgagccggtcgctggcggtttggttgccgcgattatcctgtttgcgctgcacgaggcgtacggcgtgagcttcaaatttgagaaaccgctgcaaaatgcgtttatgctgatttttttcacgtccatcggcttgagcgcagatttttcccgtttgaaggcgggcggtttgccgctggtggtttttaccgcgattgtgggcggatttatcttggtgcaaaactttgtcggggtcggactggctacggctttgggtttggacccgctcatcggtctgattaccggttcggtgtcgctgacgggcggacacggtacgtcaggtgcgtggggacctaattttgaaacgcaatacggcttggtcggcgcaaccggtttgggtattgcatcggctactttcgggctggtgttcggcggtctgatcggcgggccggttgcgcgccgcctgatcaacaaaatggggcgcaaaccggttgaaaacacaaaacaggatcaggacgacaacgcggacgacgtgttcgagcaggcaaaacgcacccgcctgattacggcggaatctgccgttgaaacgcttgccatgtttgccgcgtgtctggcgtttgccgagattatggacggcttcgacaaagaatacctgttcgacctgcccaaattcgtgtggtgtctgtttggcggcgtggtcatccgcaacatcctcactgccgcattcaaggtcaatatgttcgaccgcgccatcgatgtgttcggcaatgcttcgctttcgcttttcttggcaatggcgttgctgaatttgaaactgtgggagctgaccggtttggcggggcctgtaaccgtgattcttgccgtacaaaccgtggtgatggttttgtacgcgacttttgttacctatgtctttatggggcgcgactatgatgcggcagtattggctgccggccattgcggtttcggcttgggtgcaacgccgacggcggtggcaaatatgcagtccgtcacgcatactttcggcgcgtcgcataaggcgtttttgattgtgcctatggtcggcgcgttcttcgtcgatttgattaatgccgcgattctcaccggttttgtgaatttctttaaaggctga

SEQ ID NO: 58631 - DNA, 2433 bp, Neisseria meningitidis
atgcacatccctttcaagcccgtattggctgccgccgccatcgcccaagcgtttcccgcctttgcggcagaccccgcgccgcagtccgcccaaacgctgaacgaaatcaccgttaccggcacgcacaaaacccaaaaactcggcgaagaaaaaatccgccgcaaaactttagacaagctcttggtcaacgacgaacacgacctggtgcgctacgaccccggcatttccgtcgtcgaaggcggcagggcgggttctaacggctttaccatacgcggcgtggacaaagaccgcgtcgccatcaacgttgacgggctggcgcaggcggaaagccgctcttccgaagccttccaagaattgttcggcgcgtacggcaacttcaacgccaaccgcaacacttccgagccggaaaacttttccgaagtaaccatcaccaaaggcgcggactcgctcaaatccggcagcggcgcattgggcggcgcagtcaattaccaaaccaaatccgcaagcgattatgtttccgaagacaagccctaccatttggggataaagggcggcagcgtcggcaaaaacagccaaaaattcagcagcatcaccgccgccggcaggctctttggtttggatgccttattggtttatacccgccgcttcggcaaagaaaccaaaaaccgctcgaccgagggcgatatcgaaattaaaaacgacggatatgtctataacccgaccgatacaggcggacccagcaagtacctgacctatgtagccacaggggttgcgcgctcccaacccgacccgcaagaatgggtaaacaaaagcaccttgttcaagctgggctacaacttcaacgatcaaaaccgtatcggctggatttttgaagactcgcgcaccgaccgttttaccaacgagctgtctaatttgtggacgggtacgaccacgtctgccgcaacgggcgactaccgccaccgccaagacgtgagctaccgccgccgctccggtgtcgaatacaaaaacgaattggaacacggcccgtgggacagcctcaagctgcgctacgacaagcagcgcatcgatatgaacacttggacttgggacatcccgaaaaattacgatttgcgcggcatcaacggcgaggtttaccattcgttccggcatatccgccaaaacaccgcgcaatggactgccgattttgaaaaacaactcgacttttccaaagccgtttgggcggcgcaatacggcttgggcggcggcagaggggacaatgccaactcggattacagctatttcgcaaaactgtacgcccccaaaatcctcgcttccaaccaagccaaaatcacaatgctgatcgaaaaccggtcgaaatataaatttgcctattggaacaatgcgtttcacttgggcggcaacgaccgcttccgcctgaatgcgggcatacgctacgacaaaaacagcagcagcgcgaaagacgatccgaaatacaccaccgccatccgggggcagattccccatttgggttcggaacgcgcgcacgcgggcttcagctacggcacggggttcgactggcggtttaccaagcatctgcacttgttggcaaaatacagcaccggcttccgcgcaccgacttcggacgaaacctggctgctgttcccacaccccgatttctacctgaaagccaacccaaacctgaaagccgaaaaagccaaaaactgggaattgggtctggcgggcagcggcaaagcgggcaacttcaagctctcgggcttcaaaaccaaataccgcgactttatcgaattgacgtatatgggcgtttcgtcaaacgaccctaaaaaacccacctacgccccgctttcagacggcaccgaattggtcagctcgcccgtttggcaaaaccaaaaccgcaccgccgcctgggtgaaaggcatagagtttaacggcacttggaacctcgacagcatcggcctgcccaaagggctgcacaccggcctcaacgtcagctacatcaagggcaaggcaacgcaaaacaacggcaaagaaacgcccatcaacgcgctttcgccgtggacggcggtttacagcttgggctatgacgcaccttccaaacgctggggcatcaacgcctacgccacacgcaccgccgccaaaaagccgtccgacaccgtccacagcaacgacgacttgaacaacccgtggccttatgccaaacacagcaaggcctatacgctgttcgacctttccgcctacctcaacatcggcaaacaggttacgctccgcgccgccgcgtacaacattaccaacaagcagtactacacttgggaatctttacgcagcatccgcgagttcggcacggtcaaccgcgttgacaacaaaacccacgccggcatccaacgctttacctcgccgggcaggagctacaatttcaccatcgaagcgaagttctaa

SEQ ID NO: 58632 - DNA, 771 bp, Neisseria meningitidis
atgaccacgaccgaacacgacaacgacgacgaactcctgctgcggtacagccgccacatcctcttggacgaaatcggcatcgaagggcagcagaaactttccgacgcacatattttggtcgtcggatgcggcggtttgggtgccgccgcactgccctaccttgccgcttcgggtgtcggcacgctgaccatagccgattccgacacggtcgagctgcacaacctgcaacgccaagtcgcatttgacgagggcgatgtcggcaagcccaaagccgaagccttggcaggccgcctgaaacgcatcaaccataccgtcaacgtccacaccgtcaacgaaaaacttgacggctgccgcctgaccggtttggttcaaaccgccgacatcgttttagactgctgcgacaactacgccacgcggcaagccgtcaaccgtgcctgcgtgcaaacgaaaacaccgctggtttcaggggcggcggtacgctttgaagggcaacttgccgtgtaccgtcccgacttgcccgactcgccgtgttacgcctgcctgtttgacggcggatcggcttcagacggcatctgttccctcttcggcgtattctcgccgctggtcggcatcatcggctgcacgcaggcggcggaagctctgaaaatcctgctagacgtgggcgaaccgtcgcacggcaggctggcggtttaccgtgccttggaagggggctggcaatatttcgacctgccgcgcaaccccgaatgcccgatttgcggcacggaacggtaa

SEQ ID NO: 58633 - DNA, 339 bp, Neisseria meningitidis; identical to SEQ ID NO: 39659

SEQ ID NO: 58634 - DNA, 1911 bp, Neisseria meningitidis; identical to SEQ ID NO: 43610

SEQ ID NO: 58635 - DNA, 3918 bp, Neisseria meningitidis
atgacctaccccatccccaaaccccgtgaaaaatcccgttggcccaatctttcgcaaggctcgctgcccttggctttggcgcgttatctgccgcacaagcggctcaaggtcgtgctgacccaagatgcggaacaggcgttgcgccttcagacggcatggcggtttttccgtccgcacgacacggcggtgttcctgccggactgggaaacgctgccttacgagcgtttttcgccgcatcaggatttggtgtcggagcggctgtcggcgttgtggcagattaaaagcggcgcggcggatgtgttgttcgtgccggttgccacggcgatgcagaagctgccgcccgtgccgtttctggcagggcgcacgttttggctgaaaacggggcagactttggatataggccgtctgaaaagtgatttggtggatgcgggctacaaccatgtttcccacgttgtcgcggcgggcgaatttgccgtgcgcggcggtatagtcgatttgttcccgatgggcagcgaaatgccgtaccgcatcgatttgtttgacgatgaaatcgacagcatcaaaaccttcgataccgaaacgcaacgcaccatttcccccgtttccgaaatccgcctgctgccggcgcacgagttccccaccgacagcgaggcgcaaaaaatcttccgcagccgcttccgcgaggaagtcgatggtaatccgaacgatgcggctgtgtacaaagccgtcagcaacggtcatttcggcgcgggcgtggaatactacctgccgctgttttttgaaaacgagttggaaacgctgtttgactatatcggcgaagatgcgctgtttgtctctttagacgatgttcatgccgaggcaaaccgtttttggagcgatgtcaaatcgcgttacgcgatggcgcagggcgacgaaacctatccgcctttgcttccacagtatttgtatctctctgccgatgtgttcgcaggccgtctgaaaaactacggacaggtgctgcccgatgtttccggcaaggaatacaccctgcccgaccttgccgtcaaccgccaagcagatgagccgttgcaggcattgaaggattttcagacggcgtttgacggacggattttgctgtgcgccgaaagtttgggacggcgcgaaactatgctcggtttcttgcagcaaaacggtttgaaagccaaacccgtgtccgactggcagggctttttatcggcacacgagccgctgatgattacagtggcgccgttggcatacgggttcaaactgggcggactgcaatcgccgaaccaacagcaacctactccctcccccgtgggggagggttggggagagggcaaagcagttgccgctcaaaccgaatttcccgcatccgcaacaaaccctctccctagccctctcccacaggagagggaacaaagtgcagccgccgtttcagacgacctgaaaaccaaaagcagcctgcatcccgtcgcaaataatctgcacgggcaaatccgacagcaacctactccctcccccgtgggggagggttggggagagggcaaagcagttgccgctcaaaccgaattttccgcagccgcaacaaaccctctccctagccctctcccacaggagagggaacaaagtgcagccgtcgtttcagacagtctgaaagcagccgccgtttcaaccgaaagcagcctgccccccggtaaaagtaatctgcacgggcaaatccaacagcaacctgccccctcccccgtgggggagggttggggagagggcaaagcagttgccgctcaaagtgccatcgccgtcatcaccgaatccgatctctaccaatacgtcgcccgttcgcgcatccacaaccgccgcaagaaacacgccgccgtttcagacgggctgttgcgcgaccttgccgaaatcaatatcggcgaccccgtcgtgcacgaagaacacggcatcgggcggtatatgggcttggtaacgatggacttgggcggcgaaaccaacgaaatgatgttgctcgaatacgcaggcgaagcgcagctttatgtgcctgtttcgcaactgcatttaatcagccgctactccggtcaggcgcatgaaaacattgccctgcacaagctcggcagtggcgcgtggaacaaggcgaagcgcaaagccgccgaaaaagcgcgcgacaccgccgccgaattgctcaacctctacgcccaacgcgccgcccaatcgggacacaagtttgaaatcaacgagttggactatcaggcgtttgccgacggcttcggctacgaggaaaccgaagaccaggccgccgccatcgccgccgtgattaaagatttgacgcaagcgaagccgatggatcgccttgtgtgcggcgatgtcggcttcggcaaaaccgaagtcgccctgcgcgccgcgtttgtggcggtgatgggcggcaaacaggtcgccgtacttgctccgaccacgcttttggtcgagcagcacgcgcaaaacttcgccgaccgtttcgccgatttccccgtgaaagtcgccagcctttcgcgtttcaacaacagcaaagccaccaaagccgcgctggaaggcatggcagacggcacggtcgatattgttatcggtacgcacaaactggtgcaggacgacatcaaattcaaaaacttaggtttagtgattatcgacgaagaacaccgcttcggcgtgcgtcagaaagagcagctcaaacgcctgcgcgccaatgttgatatccttaccatgaccgccacgccgattccgcgtactttaagtatggcgttggaaggactgcgcgacttctcgctgattaccaccgcgcccagccgccgcctcgccgtcaaaacctttgtcaaaccctttagcgaaggcagcgtgcgcgaagccgtgttgcgcgaactcaaacgcggaggacaggtatttttcctgcacaatgaagtagatacgattgaaaatatgcgcgagcggctggaaaccctgctgcccgaagcccgcatcggcgtggcgcacggacaactgcgcgagcgcgagctggaacaagtcatgcgcgactttttgcagcaacgatttaacgtgttgctctgttccaccatcatcgaaaccggtatcgatatccccaacgccaacaccatcatcatcaaccgcgccgacaaattcggactggcgcaactgcaccagcttcgcgggcgcgtcggccgcagccatcaccaagcctacgcctacctgctcacgcccgaatacatcactaaagacgcagaaaaacgcctcgatgccattgcggcggcagacgaactcggcgcaggttttaccctagccatgcaggatttggaaatccgtggtgcaggcgaaatccttggcgaaggacaatccggcgaaatgatacaggtcggcttcacgctctacaccgaaatgctcaaacaagccgttcgcgacctcaaaaaaggccgccagcccgacctcgacgcaccgttgggcatcaccaccgaaatcaaactgcacagccccgccctgctgcccgaagattactgccccgacatccacgaacggctcgtcctctacaaacgcctcgccgtctgcgaaaccgtgcaacaaatcaacaccatacacgaagaactcgtcgaccgcttcggcctgcccgaacaacccgtcaaaacccttatcgaaagccaccacttacggcttatggcaaaagaattgggtatcgatgccattgatgcggccggcgaagcggtaacggtaacctttggtaaaaacaataatgtcgatccaaccgaaatcatcctgctgattcagaacgacaaaaaataccgccttgccggcgccgataagctgcggtttaccgcagagatggaaaatatcgaggtcagaatcaacaccgtaaaaaacgttttaaaaaccttgcaaaacagatgcctgcccaaataa

SEQ ID NO: 58636 - DNA, 624 bp, Neisseria meningitidis; identical to SEQ ID NO: 37513

SEQ ID NO: 58637 - DNA, 372 bp, Neisseria meningitidis; identical to SEQ ID NO: 39100

SEQ ID NO: 58638 - DNA, 618 bp, Neisseria meningitidis
atggtcattgcagccattatggcgatgatagccctccccaatatgagccaatggattgcatcccgccgcattgccagtcacgcggagcggattgccaaccttttgcgtttctccaggggcgaagccgtccggctcaatctccctgtctatatctgtcctgttcaagttaaaaaagacggtacggccaacaataaatgtgactccggcaagaaggggcagggaatgttggctttcggcgacaaaaacggcaataagggatatgacaatgatacggcggatgttcttctccgcagtgtggtattgaatgatgatatcaatgataagcggattaattatgccttcaaccatatcgctttcggtcagactcagccgaccgctgaccgtgtagtttggacattcaatcaaaacgggacgttcggttattctaccaatcaggatctcacgaatacttccaaatttgtttactccgacggttatatccaaatcgtgctgacagatgcgagagcagtttcagatgccgataagaaattccgttcggcggtggttttgattgacagcagcggcagggttgaggtttgtcctagaaacgataggcgtaccgtatgccaatataaatga

SEQ ID NO: 58639 - DNA, 729 bp, Neisseria meningitidis; identical to SEQ ID NO: 45317

SEQ ID NO: 58640 - DNA, 678 bp, Neisseria meningitidis; identical to SEQ ID NO: 48978

SEQ ID NO: 58641 - DNA, 1746 bp, Neisseria meningitidis
atgttgattaagagcgaatataagcctcggatgctgcccaaagaagagcaggtcaaaaagccgatgaccagtaacggacggatcagcttcgtcctgatggcaatagcggtcttgtttgccggtctgattgctcgcggactgtatctgcagacggtaacgtataactttttgaaagaacagggcgacaaccggattgtgcggactcaaacattgccggctacacgcggtacggtttcggaccggaacggtgcggttttggcgttgagtgcgccgacggagtccctgtttgccgtgcctaaagagatgaaggaaatgccgtctgccgcacaattggaacgcctgtccgagcttgtcgatgtgccggttgatgttttgaggaacaagctcgaacagaaaggcaagtcgtttatctggattaagcggcagctcgatcccaaggttgccgaagaggtcaaagccttgggtttggaaaactttgtatttgaaaaagaattaaaacgccattacccgatgggcaacctgtttgcacacgtcatcggatttaccgatattgacggcaaaggtcaggaaggtttggaactttcgcttgaagacagcctgcatggcgaagacggcgcggaagtcgttttgcgggaccggcagggcaatattgtggacagcttggactccccgcgcaataaagccccgaaaaacggcaaagacatcatcctttccctcgatcagaggattcagaccttggcctatgaagagttgaacaaggcggtcgaataccatcaggcaaaagccggaacggtggtggttttggatgcccgcacgggggaaatcctcgccttggctaacacgcccgcctacgatcccaacaggcccggccgggcagacagcgaacagcggcgcaaccgtgccgtaaccgatatgatcgaacccggttcggcaatcaaaccgtttgtgattgcgaaagcattggatgcgggcaaaaccgatttgaacgaacggctgaatacgcagccttataaaatcggaccgtctcccgtgcgcgatacccatgtttacccctctttggatgtgcgcggcatcatgcagaaatcgtccaacgtcggcacaagcaaactgtctgcgcgtttcggcgccgaagaaatgtatgacttctatcatgagttgggcatcggtgtgcgtatgcactcgggctttccgggcgaaactgcaggtttgttgagaaattggcgcaggtggcggcctatcgaacaggcgacgatgtctttcggttacggcctgcaattgagcctgctgcaattggcgcgcgcctataccgcactgacgcacgacggcgttttgctgccggtcagctttgaaaaacaggcggttgcgccgcaaggcaaacgcatattcaaagaatcgaccgcgcgcgaggtacgcaatctgatggtttccgtgaccgagccgggcggcaccggtacggcgggtgcggtggacggtttcgatgtcggcgcgaaaaccggcacggcgcgcaagttcgtcaacgggcgttatgccgacaacaaacacatcgctacctttatcggttttgcccccgccaaaaacccccgtgtgattgtggcggtaaccattgacgaaccgactgcccacggttattacggcggcgtagtggcagggccgcccttcaaaaaaattatgggcggcagcctgaacatcttgggcatttccccgaccaagccactgaccgccgcagccgtcaaaacaccgtcttaa

SEQ ID NO: 58642 - DNA, 381 bp, Neisseria meningitidis; identical to SEQ ID NO: 42684

SEQ ID NO: 58643 - DNA, 219 bp, Neisseria meningitidis
atgttcccagaataccgtgatttgatttccaaattgaaacaggaaaattctcgcttcgcccgtctgttcgacgaacacaacgagctggacgataaaattaccggtctggtcaacaatccggttaccagcggtgcggaaaccatcgatgagctgaaaaaagccaaattgaaactgaaagacgagttgtacgccatcctgcaaaaagcagcgggaaaataa

SEQ ID NO: 58644 - DNA, 930 bp, Neisseria meningitidis
atgattcacgtttcggcagtgcaggcaccggcgcatattcaggataccggacgctacggacatcggcgttacggcatcggtcatgccggtgcgatggacacggttgctttggcggcgggcaatattttattgggcaacgacgaaggcacggccgcaatcgaaatcgctttgggcgggataatgctggtgtttgaacgggatacgccgttttgtctcaccggtgccgtgtatcaggcggaattggacggcgaaccggtctattcgtattggcgttataccgcccgcaaagggcagaccttgaaactggtgcgtgccgtgcagggcatgtacggctatgtgtgcgtggcgggcggatttgatgtgccggaagtgatgggttcgagaagcaccgacctgaaagccggtttcggcggccatcagggcagaatgctgcaaaaaggcgattgtctccccatcggcaaaggtgcgcaggaattgtccaaagtcggcattgccccgataccgtttaccgataccgtccaccttgttccttcgtcggaatatgccgctttcagtgaaaaagggcgtctgaatctggaacgggaaacgtggacgctgcaaagcgatagcaaccgcatgggctaccgcttcgacggacagccgctgaccctgtcgcaacctttggaaatgctgtcccacgctgttcaggcaggaaccgtgcaggtgccgcccggcggcaaaccgattatcctgctggccgatgcgcaaaccaccggcggttatccgaaaatcgctaccgttgccgccgccgatttgggcaggctggcacaggtgcgcttcggcagcaaagtcaaattcaaaataatcggcttgaaagaagccaccgccctgcggcgcaaaaaccaagtctatctgaaccaaatacggagaatcacccatgaagcaggttga

SEQ ID NO: 58645 - DNA, 729 bp, Neisseria meningitidis
atgggagggaaaatgtccgacaaaaaatataatgtcgatgagggggaaatcgccaaattcagccggattgccgacaaatggtgggacaagtcgggcgagttcaaaaccttgcacgacatcaatccgctgcggctggattatatcgacggacacgcggatttgcgcggcaaacgggttttggatgtgggctgcggcggcggcatcttggcggaaagtatggcgcggcgcggcgcggcgtttgtaaagggtatcgacatggcggagcagtcgctggaaaccgcccgcctgcacgcggctttgaacaatgtcgccgatatcgaatacgaatgtatccgcgtggaagaccttgccgaggcggaaccgcactcgttcgatgtggtaacgtgcatggaaatgatggaacacgtccccgatcccgccgccatcgtgcgtgcttgtgccaatctggtcaaaccggacggcatggtgtttttttccaccatcaataaaaacccgaaatcgtacctgcatctgattgtggcggcggaatatctgttgaagtttgtccccaaaggcacgcacgactggaaaaaattcatcgcacctgccgagctggcgcggatgtgccgtcaggcgggcttggatgtggcggatacgaagggtatgacttaccatgttttgtcgcaaacttatgccctgtgcgattcgaccgatgtgaattatatgtttgcctgccgtccggcgttctga

SEQ ID NO: 58646 - DNA, 684 bp, Neisseria meningitidis; identical to SEQ ID NO: 51293

SEQ ID NO: 58647 - DNA, 822 bp, Neisseria meningitidis
atgtctttgcaaaacatcatcgaaaccgcctttgaaaaccgcgcggacatcaccccgaccaccgttgccccagaagttaaagaagccgtgttggaaaccatccgccagctcgattcaggcaaactgcgcgttgccgaacgcttgggcgtgggcgaatggaaagtcaacgaatgggcgaaaaaagccgtgttgctgtccttccgcatccaagacaacgaagtcctcaacgacggcgtgaacaaatacttcgacaaagtgccgaccaagtttgccgattggtctgaagacgagttcaaaaacgcaggcttccgcgcagttccgggtgcggttgcccgacgcggcagctttgtggcgaaaaatgtcgtgctgatgccgtcttacgtcaacatcggtgcatacgttgacgaaggtgcgatggtcgatacttgggcgaccgtcggctcttgcgcgcaaatcggtaaaaacgtccacttgagcggcggtgtcggcatcggcggcgtactcgaacccctgcaggccagcccgaccattattgaagacaactgcttcatcggtgcgcgttctgaaatcgttgagggcgtgattgtcgaagaaggcagcgtgatttctatgggcgtgttcatcggtcaatccaccaaaatctttgaccgtacaaccggcgaaatctaccaaggccgcgtaccggcaggttcggttgtcgtatccggcagtatgccttccaaagacggcagccacagcctttactgcgccgtcatcgtcaaacgcgtggacgcgcaaacccgtgcgaaaaccagcgtcaacgaattgttgcgcggcatctga

SEQ ID NO: 58648 - DNA, 819 bp, Neisseria meningitidis
atgaaaggtatggataaattgagataccaacaggattttttaaatatccgccccatttttacagccggcgaacaagaatacctgaccggattgtccgatcggcttcctttatctgttttaacgggctccgtgcgtaatattgaagaaatcggtatcgattttgtatatagttctgccaaattggaaggaaacacttataatcaatacgatacgcaggcattgcttaaactcgggcaaaccgcaggcgggaagttatattcggatgccgtaatgttaatcaacctgagggaaagttaccggcacctgctgtccggtttggacagccccgagccgtttgactggttggatttcttaaaaaccacccacagcctgatttcggaaaacttactggaaaaaggctccggcggcgtagtccgccgcgacagcgttactataagcgggacagactacacgcctttatccaacccgcaaagtttggatacggaattaaaatggttgcttcaagaagccccaaaaataggaaatcccttcgaccgcgccgtttatctccataataatttggcgtatcttcaatattttaaagattgcaataaacgtactgccagaaactgtatgaccttgtcgctgatgcgctccggtttttttccttgcgtattcgcccccgacagttatcccgcctatgccgaggctgtcgtagcctattacgaaaccggcgattacggtttattcaagaaatattttatttcggcatacgaaaataccgtaaataagtacggtccccagcctgatgtggatattttccgcaacttctccctttaa

SEQ ID NO: 58649 - DNA, 231 bp, Neisseria meningitidis; identical to SEQ ID NO: 44466

SEQ ID NO: 58650 - DNA, 1230 bp, Neisseria meningitidis
atggcgttcggcaaatccttatttcatgcgatcggccgcgtcagcctggtcaggcagattgccgccggtttggcgttgggcatcgtaatcggttcggtttccccgcaactgggcttggcggcaggcttgttcggcagcctgtttgtcggcgcgctcaaagcggtcgcgccggttttggtatttattttggtggcggccacaatcgcgcagcaccaaaaaggcaacaaggcgcatatcaggccgattatcatcctttacctcatcggtacgttttccgcagccctgaccgccgtcatcgctggtatggttttcccgacgcacattgttttggcgggcgcgggcgatgtgtccgccgcgccgccttccggcattgtggaagtattgaaatcgctgctgatgaacctggtcgccaacccgattaacgcgattgccaatgccaactatatcggcattttggcttgggctttggttttgggcgcggcgttgcggaatcacggttcggacgttacgcggcaggtcgttgccgatttggcggaagcggtttccaccgtcgtgaaatggattatccgttttgcccctttgggcattttcgggctggtgtcgtccacaatcgcggagacgggtttcggcgcgctggcggggtatgcgaagctgcttgcggtgctgttgggctgtatggcgtttatcgcgctggcggtcaatcccgccatcgtgtggtggaaaatccgccgcaacccttatccgctggtgtttacctgcctgcgcgaaagcggcgtgtatgccttctttacccgttcttccgccgccaatatccccgtgaatatggctttggcgaaaaaactggggctgcacgaagacacttattcgatttccatcccgttgggggcgaccgtcaatatgggcggcgcggcgattacgattaccgttttggctatggcggcggcgcacacccaaggcatacaggttgattttgccaccgcgctgctgttgagcctggtggcgacggtcagcgcgtgcggcgcgtccggcgtggcgggcggttcgctgctgctgattccgctggcgtgcagcctgttcggcatcagcaacgatgtcgccatgcaggtggttgccgtcggctttatcatcggcgtgattcaggattcggcggaaacggcgttgaattcttcaaccgatgttttgtttaccgctgccgccgatttgggccgacagagaaaccgggcggaataa

SEQ ID NO: 58651 - DNA, 486 bp, Neisseria meningitidis; identical to SEQ ID NO: 40302

SEQ ID NO: 58652 - DNA, 681 bp, Neisseria meningitidis; identical to SEQ ID NO: 43758

SEQ ID NO: 58653 - DNA, 657 bp, Neisseria meningitidis; identical to SEQ ID NO: 42090

SEQ ID NO: 58654 - DNA, 1116 bp, Neisseria meningitidis; identical to SEQ ID NO: 51133

SEQ ID NO: 58655 - DNA, 1254 bp, Neisseria meningitidis
gtggacaaactgaaaatctccgcaaacggcccgctcaacggggaaataacggtctcgggcgcgaaaaacgcggcattgccgctgatgtgcgcgggtttgctgacatcgggtacgttgcgcctgaaaaacgtccctatgctggcagatgtcaaaaccacgcaaaaactgcttcaggggatgggcgcgcgcgtcctgaccgacaatatcagcgaatttgaaatcaacggcggtacggtcaacaacacgtgcgccccttacgagttggttcggacgatgcgcgcttcgattttggtgctgggcccgacgctggcgcgtttcggcgaggcgcaagtcagcctgccgggcggctgcgccatcggttcgcgccccgtcgatcagcatttgaaaggcttggaagcgatgggggcggaaatcgtcatcgaacacggttacgtcaaggctaagggtaaactcaaaggtacgcgcgtggcgatggatgtcgttaccgtcggcggcacggaaaacctgctgatggcggcgacgctggcggaaggtacgacggttttggaaaactgcgccatcgagcctgaagtggtcgatttggcggaatgcctggttaaaatgggcgcgaaaatcagcggcatcggaacatcgaccatgatcgtggaaggtgtggacgagctgcacggctgcgaacacagcgtcgtccccgaccggatcgaggcggggacgttcctgtgcgcggtggcgataaccggcggcagggtggttttgcggaatgccgccccgaaaacgatggaagtggtgttggacaaactggttgaggcaggtgcggtgattgaggcgggcgacgattggatcgccatcgatatgcggcagcgtccgaaggcggtggacatccgtacggtcgtccaccccggcttccccacggatatgcaggcgcagtttatggcattgaatgccgtggcggagggaagctgccgcgtggtggaaacgatttttgaaaaccgctttatgcacgtccccgagttgaaccggatgggggcgaacatcacaaccgagggcaatacggcatttgtgcagggtgtggaacagctttccggcgcggtcgtcaaggcgacggatttgcgtgcgtccgcaagcctcgttatcgccggtttggcggcgcgaggcgaaaccgtggtcgaacagatttaccacttggatcgcggttatgaacatattgaaaaaaaactcggcagcgtcggcgcgaaaatcgagcgcgtatccggctga

SEQ ID NO: 58656 - DNA, 525 bp, Neisseria meningitidis
atgaaaaaagcacttgccacactgattgccctcgctctcccggccgccgcactggcggaaggcgcatccggcttttacgtccaagccgatgccgcacacgcaaaagcctcaagctctttaggttctgccaaaggcttcagcccgcgcatctccgcaggctaccgcatcaacgacctccgcttcgccgtcgattacacgcgctacaaaaactataaagccccatccaccgatttcaaactttacagcatcggcgcgtccgccatttacgacttcgacacccaatcgcccgtcaaaccgtatctcggcgcgcgcttgagcctcaaccgcgcctccgtcgacttgggcggcagcgacagcttcagccaaacctccaccggcctcggcgtatttgcgggcgtaagctatgccgttaccccgaatgtcgatttggatgccggctaccgctacaactacatcggcaaagtcaacactgtcaaaaacgtccgttccggcgaactgtccgtcggcgtgcgcgtcaaattctga

SEQ ID NO: 58657 - DNA, 483 bp, Neisseria meningitidis; identical to SEQ ID NO: 36693

SEQ ID NO: 58658 - DNA, 1785 bp, Neisseria meningitidis
atgagcttagttgaattgaaagtgcccgacattggcggacacgaaaatgtagatattatcgcggttgaagtaaacgtgggcgacaccatcgccgttgacgacaccctgattaccttggaaaccgataaagcgacgatggacgtacctgctgaagttgcaggcgtagtcaaagaagttaaagttaaagtcggcgacaaaatctctgaaggtggtttgattgttgtcgttgaagctgaaggcacggctgccgctcctaaagccgaagcggctgccgccccggcgcaagaagcccctaaagctgctgctccttctccgcaagccgcgcaattcggcggttctgccgatgccgagtacgacgtggtcgtattgggcggcggtcccggcggttactccgctgcatttgccgctgccgatgaaggcttgaaagtcgccatcgtcgaacgttacaaaactttgggcggcgtttgcctgaacgtcggctgtatcccttccaaagccctattgcacaatgctgccgttatcgacgaagtgcgccacttggctgccaacggtatcaaataccccgagccggaactcgacatcgatatgcttcgcgcctacaaagacggcgtggtttcccgcctcacgggcggtttggcaggtatggcgaaaagccgtaaagtggacgttatccaaggcgacgggcaattcttagatccgcaccacttggaagtgtcgctgactgccggcgacgcgtacgaacaggcagcccctaccggcgagaaaaaaatcgttgccttcaaaaactgtatcattgcagcaggcagccgcgtaaccaaactgcctttcattcctgaagatccgcgcatcatcgattccagcggcgcattggctctgaaagaagtaccgggcaaactgctgattatcggcggcggcattatcggcctcgagatgggtacggtttacagcacgctgggttcgcgtttggatgtggttgaaatgatggacggcctgatgcaaggcgcagaccgcgatttggtaaaagtatggcaaaaacaaaacgaataccgttttgacaacattatggtcaacaccaaaaccgttgcagttgagccgaaagaagacggcgtttacgttacctttgaaggcgcgaacgcgcctaaagagccgcaacgctacgatgccgtattggttgccgccggccgcgcgcccaacggcaaactcatcagcgcggaaaaagcaggcgttgccgtaaccgatcgcggcttcatcgaagtggacaaacaaatgcgtaccaatgtgccgcacatctacgccatcggcgacatcgtcggtcagccgatgttggcgcacaaagccgttcacgaaggccacgttgccgccgaaaactgcgccggccacaaagcctacttcgacgcgcgcgtgattccgggcgttgcctacacttcccccgaagtggcgtgggtgggcgaaaccgaactgtccgccaaagcctccggccgcaaaatcaccaaagccaacttcccgtgggcggcttccggccgtgcgattgccaacggttgcgacaacggctttaccaagctgatttttgatgccgaaaccggccgcatcatcggcggcggcattgtcggtccgaacggtggcgatatgatcggcgaagtctgccttgccatcgaaatgggctgcgacgcggcagacatcggcaaaaccatccacccgcacccgaccttgggcgaatccatcggtatggcggcggaagtggcattgggtacttgtaccgacctgcctccgcaaaagaaaaaataa

SEQ ID NO: 58659 - DNA, 798 bp, Neisseria meningitidis
atggataccgcacaaaaacaacgctgggcaataaccctatcctatgacggcagccgcttttacggctggcagaaacaggctgacggcgtaccgaccgttcaggcggcattggaaaacgcacttgcccaaatagcaggggaagcggtttccaccattgttgccggcaggaccgacaccggcgtgcatgccaccgcccaagtcgtccacttcgacacaactgccgcccgtccccaacaggcatggatacgcggcgtaaatgcccacctgcccgaaggcattgccgttttgcacgcccgacaggtcgcccccgaatttcatgcacgatttgacgcatacggacggcactaccgctacctgctcgaatccgcccccgtccgttcccccctgctcaaaaacagggcaggctggacacacctcaaactcgacatcgaaccgatgcgtcgggctgccgcctatttgatcggcgaacaagacttctccagcttccgcgccgccgaatgccaagcaaaatcccccgtcaaaaccatctaccgcgccgaccttacccaaagcgcaggactcgtccgcctcgatttgcacggcaacgcctttttgcaccacatggtacgcaacatcatgggcgcgctcgtctatgtcggcagcggcagactcagcgtcgaaggcttcgccgcactgattcaagaacgcagtcgcctcaaagccccaccgacctttatgcccgacgggctttacctgaccggcgtcgactatcccgaggcatacggcatcatccgcccccaaatccccgaatggctttaa

SEQ ID NO: 58660 - DNA, 117 bp, Neisseria meningitidis; identical to SEQ ID NO: 42842

SEQ ID NO: 58661 - DNA, 489 bp, Neisseria meningitidis; identical to SEQ ID NO: 44020

SEQ ID NO: 58662 - DNA, 1674 bp, Neisseria meningitidis
atgcttctaacactttctttgcgtgattttgtcattgttgaaaatctgaatctggattttcaaagcggctttaccgtattgaccggagaaactggcgcgggcaagtccattactttggatgcgattggtctgctgttgggcgataaagccgattacagccaagtccgcagcggcgcaaaagaagcgcagttgtcggcattgttcgatatttcccatttgcctactttaaaagcagaattgtatgaacaggggcttttaaacgacggagaagaagaactcagtatccgccgcattatcgatgccaaaggcaaaagccgcagctttatcaacaatcaggccgctaccttggcgcaactcaaagccgtcggcagccagcttatcgacatccacgggcaaaacgcccatcattcgcttaatcaggaagccgcccagcgcgaattgttggacgcatttgcgggcagcagggcgcaggcggaaaccgtcaggcagctttatcaaaactgggcaaactcaaaaaaagcattgcaggaagcgcaggaacaggcagaaaacattgcactcgaacaagagcgtctggaatggcagtttaacgaattgaatcagttggacattaaacaaggcgaatgggaagctctcagccaaagccacgacagccttgcccattctgccgagctgttgcaggctgccgaagaagtcggaagcaagattgacggcgacaacggcatccaacgccatatctatcaatgtcaaaaactattggccaatctgcaaaacatcgagccgcgctttgccgagagcctgaatatgttggcaagcatcgaagccgaattgggcgaaatcagtgccaatatgcgcgatgtggcaggacgcagcgacatcaaccccaatgaattggcggcacaggaacagcgtatgggcgaactgatggggatggcgcggaaataccggatcgagcctgaagagttgcctgccaagttggcagaaatcgaagaacgcctgcaaagcctgcaagctgccgccgatttggacgcgctcgagcataatgttgcccacaattttgccgaatatcaggaagctgcccacatcctttctgccatgcgccatcaggcggcagagcgtttgagcggcgaaacgaccgagcatatgcaacaccttgccatgaaaggtgcacgtttcgacatcgtcctgttgccctcgtcgccgacggcacacggtttggagcaggttcaatttcaagttgccgccaacaaaggcaatccgccccgtccgctgaataaagttgcctccggcggcgaattggcgcgtatcagccttgccttacaggttgttgccagccaatatacccaagttcccaccctgatttttgatgaggtcgataccggtattggagggggagtggctgaaatggtcggcaaggcattacgttcgttgggcagaaaacatcaggtgcttgccgttacccatcttccgcaagtcgcatcctgcggcgaaaaccactggcgggtgcgcaagcacagcgagggagagcaaaccgtcagcgaaatcagtatattggataaaatccaacgggtcgaagaggttgcccgtatgttgggcggagaagtcattaccgatacgacgcggcaacatgcggcagaattgctgcaacttgcgtcgaaaaatagtttattttaa

SEQ ID NO: 58663 - DNA, 411 bp, Neisseria meningitidis; identical to SEQ ID NO: 53256

SEQ ID NO: 58664 - DNA, 1314 bp, Neisseria meningitidis
atgctgacgtttatcggactgctgattatcggggtcatcgtatggttgctgctgacggaaaaagtgtcgcccatcatcgcattaatcttggtgccgctgtttggggcgttgctggcggggtttgatgtatcccaattaaaagaattttattcgggcggcaccaaatcggtgatgcagattgtgattatgtttatgttttccattttgttttttggaatcatgaacgatgtggggctgtttcgtccgatgataggcggtttgattaagctgactcggggtaatatcgtggcagtgagtgtggggacggtcttggtgtcggtggtggcgcagttggacggggcgggtgcgacgacgtttttattggtcgtccccgcccttttgccgctttacaagcgtctgcatatgaatccttacctgctgtttttgctgctaacttccagtgcgggattgattaaccttctgccgtggggcgggccgactgggcgggttgcaagcgtgttgggcgcagatgtgggcgaattgtataaacctttgttgacggtgcaaattatcggtgtagtgtttatccttgcgctgtccctgcttttgggtgtgcgtgaaaaaaggcggattgtccgggagttgggcgcgttgcccgccgtggcggatttgataaagccggtgcctttgtcggaagaagaacaaaaattggcgcgtccgaaactgttttggtggaatgtcctgctgtttttggcggcgatgagcctgcttttttcgggcatcttcccgccgggttatgtatttatgctggctgcaacggcggcgttgcttttgaattaccgcagcccgcaggaacagatggagcggatttatgcccacgccggcggcgcggtgatgatggcgtccattattttggcggcaggtacgtttttggggattttgaagggtgcggggatgttggacgcgatttccaaagacattgtgcatatcctgccggacgcgctgctgccttatctgcatattgccatcggtgtgttgggcattccgcttgagttggttttgagtacggacgcttattatttcggactgtttccgattgtggagcagattacctcgcaggcgggcgtggcgcctgaagcagcaggttatgcgatgttgatcggcagtatcgtcggcacttttgttacgccgctttcgccggctttgtggatgggcttgggtttggcgaaattgtcgatgggcaaacacatccgttattcgtttttctgggcgtggggtttgtcgctggcgatattggccagttcgatagcggcaggaatcgtgcctctgccgtaa

SEQ ID NO: 58665 - DNA, 366 bp, Neisseria meningitidis; identical to SEQ ID NO: 53193

SEQ ID NO: 58666 - DNA, 483 bp, Neisseria meningitidis
atggctatcgtgaaaaattccgtggtttcgctgcattatgagatgtatgatgccaacaatcagcttttggacaaaaccgaagaaccgattgcgtatctgcacggcggttacgacggcattttccctttggtggaagaggcgttgcacggtaaggatgccggcgatacggtcgatgtggcgctttcgcccgacgatgcgttcggcgagcaggatccggagttggtccgtattgaagatgcgggcgtgttccctgttgaagtcgaagtcggcatgatgtttgaagccgacgatcctgaaaccggcgatgttgtcgtctatcgtgtaaccgatgttgccgacggcaaggcggtggtggacggcaaccatcctttggcaggcatgaaaatccgctttaaggctacggttgaaagcgtgcgcgatgcatccgatgaggaaatcgcacacggtcatgtccacggcccgcacggtcatcaccaccactga

SEQ ID NO: 58667 - DNA, 558 bp, Neisseria meningitidis
atgatcaacgatattcaaaaaacagccgaaggcaaaatgcagcgttcggtcgaagtactgaaagaaaatctggcgaaagtgcgtaccggccgcgcgcataccggcctgctcgaccaagtggaagtcgaatactggggcagcatggtccccgtcagccaagttgccaacgtaacgcttctggacgcgcgcaccatcggcgtgaaaccgtttgagggcaatatggctgccaaagtcgagaaagccatccgcgattcaaacttggggctgaacccggcagctgtcggcgacctgatccgcgtgccgatgcccatgctgaccgaagaacgccgcaaagacctgattaaagtcgtacgcggcgaagcggaagaaggccgcgtctccatccgcaacgtgcgccgcgatgccaacgaccacatcaaaaaactcctcaaagacaaagaaatttccgaagacgaggcacgtcgcggcgaagaagcggttcaaaaactgaccgacaaatacattaccgaagccgacaaactcctgactaccaaagaagaagatttgatggcaatttaa

SEQ ID NO: 58668 - DNA, 504 bp, Neisseria meningitidis; identical to SEQ ID NO: 51804

SEQ ID NO: 58669 - DNA, 441 bp, Neisseria meningitidis
atgaacatccgccgcccctcaccgtccgactgcgccgcactcgccgcgctcgatgccgtctgcaacccgtccgcgtggacgcaacgccaatttgagtccgcactggtttcgccgtccgaagaggttttccttgcggaaaaagacggcgggattgccgcctttatcgtttggcagaacctgcccgacgaatccgaactgcacctgattgccaccgcgcccgaatgccgccgccaaggaattgcgtccgccctgctcgaatattggtacgcacacctgcccgaaggcacgcaacgcctgctgctcgaagtccgcgcaggcaacgccgccgcacaggcactgtacacggcgcacggcttcagcattgcgggcaggcggaaaaactattaccgcgccaccgacgggcaaaccgaagatgccgtcttgatggagaaaatatgttaa

SEQ ID NO: 58670 - DNA, 462 bp, Neisseria meningitidis
gtgagcggcgagcaaactttggaaacggcggccttgatgtgcgaaatcccgcagaccactgcgcgtgcgtggaaacgtgcggataaggaaaaaggcgacgactgggataagatgcgcgccgcttacactttggccgacggcggtattgaagacttgagccgtgcgatgttggccggttttatggtgcagtacaacagcacgatgacgatgctgcaggattcgagtaccgaagatttgccgccatcggaccgcgccaagctgttggccagcctggccgatgcgtttacgaaaaccgtatccgccaatgcgcgtgtgatgccggaaacgtcaaaactggcgacggctttggaattgattgagttcttgatggcgtttgtgcaagaaaaacatcccaaacatttgcctgcttttgtggaggtattggagccgtttggggtggaagtggagaagaagtttggttag

SEQ ID NO: 58671 - DNA, 438 bp, Neisseria meningitidis
atggaccaaaccgtttacctttacaccgacggcgcgtgcaaaggcaatcccggcgcgggcggctggggcgtgttaatgcgctacggtagccacgaaaaagaacttttcggcggcgaagcgcaaaccaccaacaaccgcatggaactgactgccgtcatcgaaggactgaaatcgctcaaacgccgctgcaccgtcatcatctgcaccgactcgcaatacgtcaaaaatggcatggaaaactggatacacggttggaagcgcaacggctggaaaaccgcctccaaacagcccgtcaaaaacgacgacttgtggaaagaactcgacgctctagtcggacggcatcaagtcagttggacttgggtgaaaggacacgcgggacacgccgaaaacgaacgcgccgacgatttggcaaaccgtggcgcagcgcagttttcctga

SEQ ID NO: 58672 - DNA, 480 bp, Neisseria meningitidis; identical to SEQ ID NO: 40550

SEQ ID NO: 58673 - DNA, 954 bp, Neisseria meningitidis
atgcatcaatattatgacgcagtaattttatcggttggaaatgggttgttaaaaaggttctttaagcagaatgcgcaattaaatattgcttcaaggccattgattattaccttgtttccaggtgtagtattcggtgatcaggcaagtattctatctcgtatgggggctgatattgttttatataataataagcatgattttagaattgcagaggaatataagaaacaatataaattaagttgtcaaaatatactttatggttatccaatttttcgccacgcatcaaaaggtcgtcatggagagaaaatttactttattgaccaagttaaaatcccatttaaaaaagaagaaagaatttacacattaaaaaaattgattaccttggctgaaaaataccctgagaaagaatttactattttgctaagggttgcagataaagatattactgtgcatcaggataaacattcgtatatagagctggcaaagcagtttcagttgccgagtaatttgacaatagagcgaaaaagtaccgcgcaagccttccaagaaatggggtattgtttatcttattcatctactatgctttttgaagctgaatgtaagggtatccctgttggtgttgttgcagacttaggcttttctaaatcctatgcaaatcagcattttttaggtagtggggttttagtttattttgatcaaatagatttcacttccccaaaaatagcagatccggattggcttgattgctatgctactaaaaaggtgattacaactgatgagtttaataagctattaaagcaggttgtgccattgcaacatgattaccaagaatatttatctgcggtgaatagtatagaatcaactaaaactatttttttaagaaaatttaaaaagttaattagggatcctaaaaagtttttttatgattctaaatggttgagaaaggtgatttaa

SEQ ID NO: 58674 - DNA, 1173 bp, Neisseria meningitidis
ttgataaccggcacgcccggttcagggaaaacattaaaaatggtttccatgatggcgaatgatgaaatgtttaagcctgatgaaaacggcatacgccgtaaagtatttacgaacataaaaggcttgaaaataccgcacacctacatagaaacggacgcaaaaaagctgccgaaatcgacagatgagcagctttcggcgcatgatatgtacgaatggataaagaagcccgaaaatatcgggtctattgtcattgtagatgaagctcaagacgtatggccggcacgctcggcaggttcaaaaatccctgaaaatgtccaatggctgaatacgcacagacatcatggcattgatatatttgtattgacacaaggtcctaaactcttagatcagaacttgcgaacattggttaaaagacattaccacattgcggccaacaaaatgggtttgcgtaccctgcttgaatggaaagtatgcgcggatgacccggtaaaaatggcatcttctgcattttccagtatctacacactggataaaaaagtttatgacttgtacgaatcagcagaaattcacacggtaaacaaagtcaagcgttcaaaatggttttatgcattgcccgtcatcatattattgattccgctatttgtcggtttgtcttacaaaatgttgagcagttacggaaaaaaacaggaagaacccgcagcacaagaatcggcggcaacagaacagcaggcagtacttccggataaaacagaaggcgagccggtaaataacggcaaccttaccgcagatatgtttgtcccgacattgacggaaaaacccgaaagcaagccgatttataacggtgtaaggcaggtaagaacctttgaatatatagcaggctgtgtagaaggcggaagaaccggatgcacatgctattcgcatcaagggacggcattgaaagaaattacaaaggaaatgtgcaaggattacgcaagaaacggattgccgtttaacccatataaagaagaaagccaagggcgggatgtccagcaaagtgagcagcaccattcggacagaccgcaagttgccacgttgggcggaaagccgtggcaaaatcttatgtatgataattggcaggagcgcggaaaaccgtttgaaggaatcggcgggggcgtggtcggatcggcaaactga

SEQ ID NO: 58675 - DNA, 1404 bp, Neisseria meningitidis; identical to SEQ ID NO: 44608

SEQ ID NO: 58676 - DNA, 1413 bp, Neisseria meningitidis; identical to SEQ ID NO: 50239

SEQ ID NO: 58677 - DNA, 807 bp, Neisseria meningitidis; identical to SEQ ID NO: 42698

SEQ ID NO: 58678 - DNA, 2076 bp, Neisseria meningitidis
atgctgtgcgtgttggcgggcgcggcttacggcgtattcaggacggaggcggcattgtcttcccaatggtgggcagaagccgtttcaggcgtgcctttgacggtggaagtggcggatatgccgaggtcggacgggcggcgtgtgcagtttgcggcaaaggctgtggacagcggtggtcggacgtttgatttgctgctgtcggactacaaacggcgcgaatgggcggtcgggagcagatggcggataacggcacgtgtgcaccctgtcgtcggggagttgaacctgcgcggtttgaaccgtgaggcgtgggcattatccaacggaataggcggcgcggggacggtcggtgcggacagggttttgctgcatggcggaagcggttgggggattgcggtttggcgcagccgcatcagccgtaattggcagcaggcggatgcggacggcgggctttcagacggcatcgggctgatgcgcgcgttgagcgtgggcgaacagtcggcattgcgccccgaattgtggcaggcgttccggccgttggggctgacgcatttggtcagtatttcgggtttgcacgttacgatggtggcggtaatgtttgcgtggctggcgaagcggctgcttgcctgttccccgcgccttcctgcccggccgcgcgcgtgggttttggcggcggggtgtgcaggcgcgctgttttacgcgctgcttgccggtttttccgtgccgacgcagcgcagcgttttgatgttggcggcgtttgcgtgggcttggcgcaggggaagattgtcggcgtgggcgacgtggtggcaggcgttggcggcggtgctgctgttcgacccgtcggcggtcttgggtgtggggacttggctgtctttcggtttggtggcggccctgatatgggcgtgctcggggcgtttgcacgagggaaaacggcaaactgctttgcgcgggcagtgggcggcttcggtgttgtcgctggttttgctcggttatctgtttgcttcgctgcctttaatcagccctttggtcaatgcggtggcaattccgtggttttcttgggtattgacgccgctggcgttgctgggttcggtcgtgccgtttgcgcctttgcaacagttgggggcatttttggcggaatatactttgcggtttttggtgtggcttgccgatgtgtcgcccgagtttgccgttgcctccgcacctttgccgctgttggtgttggcggtgtgtgccgctttgctgttgctgctgccgcgcggcttgggtttgcgtccgtgggcggtgttgctgttggcagggtttgtgttttaccgttcacccggcgtgccggaaaatgaggttgcggttacggtttgggatgcggggcagggtttgtcggtgtcggttcagacggcaaatcatcatcttttgtttgacaccggaacggcagcggcggcgcagatggggattgtgccgagtttgaatgcggcgggtgtccgccgtttggacaagctggttctgtcgcatcacgacagcgaccacgacggcggttttcaggcagtcggcaagataccgaacggcgggatttatgccggacagccggaattttatgagggggcgcggcattgtgcggaacagcgttggcaatgggacggcgtggattttgagtttttgatgccgtctgaacgcaaaaacatcgatgataatgggaaaagttgtgttttgcgtgttgtggcgggcggtgcggcactgctggtaacgggcgatttggatacgaagggcgaggaaagcctggtcggcaagtatggaggcaacctgtacagccaggttttggttttgggacatcacggcagcaatacgtcctcgtcgggcgtgttcctcaatgccgtctcgcccgaatatgccgttgcttcaagcggttatgccaacgcctacaaacatccgaccgaagcggtgcagaaccgtgtccgcgcacacggcatcaaattgctgcgtaccgatttgtcgggcgcactgcaattcggcttgggacgcggcggcgtgaaggctcaacgtttgagagggtataaattctattggcagaaaaaaccgtttgaatga

SEQ ID NO: 58679 - DNA, 1155 bp, Neisseria meningitidis
atgactgaaactactcaaaccccgactttcaaacctaaaaaatccgttgcgctttcaggcgttgcggccggtaataccgctttgtgtaccgttggccgtaccggcaacgatttgagctatcgcggttacgacatcttggatttggcacaaaaatgcgagtttgaagaagtcgcccacctgctgattcacggtcatctgcccaacaaattcgagctggccgcttataaaaccaagctcaaatccatgcgcggcctgcctatccgtgtgattaaagttttggaaagcctgcctgcacatacccatccgatggacgtaatgcgtaccggcgtatccatgctgggctgcgttcatcctgaacgtgaaagccatccggaaagtgaagcgcgcgacatcgccgacaaactgatcgccagcctcggcagcatcctcttgtactggtatcaatattcgcacaacggcaaacgcattgaggttgaaagcgacgaagagaccatcggcggtcatttcctgcaactgttgcacggcaaacgcccaagcgaatcacacatcaaagccatgcacgtttcactgattctgtatgccgaacacgagttcaacgcttctacctttaccgcccgcgtgatcgccggtacaggctctgatatgtactccagcattaccggagcaatcggcgcgttgaaaggtccgaaacacggcggcgcgaacgaagtggcttacgatattcaaaaacgctaccgcaatgccgacgaagctgaagccgacatccgcgaacgcatcggccgcaaagaaatcgtgatcggtttcggtcatccggtgtacaccatttccgaccctcgcaacgttgtcattaaagaagtggcacgcggtttgagcaaagaaaccggcgatatgcgcctctttgacattgccgaacgtttggaaagcgtgatgtgggaagagaaaaaaatgttcccgaatctggactggttctctgccgtttcctaccaaaaattgggcgtaccgaccgctatgttcacaccgctgttcgtaatttcccgtacaaccggttggagcgcacacgttcttgagcaacgcaaagacggcaaaatcatccgtccgagcgcaaactacacaggccctgaagatttggcgtttgtggagattgaagaacgataa

SEQ ID NO: 58680 - DNA, 957 bp, Neisseria meningitidis
atgaacaccgccgccatctaccgccagtaccaaacctatgtccgctccgataaatccggctgggcgttggacggctgttccgacagcgcgctcattgcgcaggcaaaacagcccggtttgcatctggaaatgtgcatcaaccgcttcgactcgggcatcaccttgtcgcggatgcgcggcggcggaacgggcgcgtttcccaccgaaatccacaatttcagccacaactgcgccttgttcgtcatggtgtcggggcagaaccggttacaaatgggcggcagggaataccgcccgtctgccggcgaaatctggctggtacgcggcgagttggcggacgtatccgaaaccctgttgcccgacaacagcggcatgtgcgcgctgcatttggatttttcgctggaaaaactgcgccgctggcacgacgaaggcttgctggacgaacgcctgttttcgccgcaaacgataggccgattcaccctgcaacggctggcgcaaaacgcagcggcactgacggcggcggcctgcccactgctgcaacgcccgttcgaatcggacggcttcggcctgcttgccgacgaagccgccgcgctggaactctccgcccgattattgcgcttcaccttccgccgccacgacaacggttaccgccgtcggcgcatagacgaagccgccgacatcctgcaacacgaattcgtccgtccgctgaccatcgccgaaatcgcccgccgcgtcggactgaacgaatgctacctgaaacgctatttcaaagcgcaaaccggcgaaaccgtcgccggatgcctgcgccgcctgcggctggaacacgcgctcgccctcatcgaatccggcagcaccgtccaagccgccatgcacttttgcggctaccgccacgcgggacggttcaacgaagcgttcagacggcattacggatttttgccttcggatgtgaagaagtgctga

SEQ ID NO: 58681 - DNA, 1386 bp, Neisseria meningitidis; identical to SEQ ID NO: 42586

SEQ ID NO: 58682 - DNA, 183 bp, Neisseria meningitidis; identical to SEQ ID NO: 44130

SEQ ID NO: 58683 - DNA, 1197 bp, Neisseria meningitidis; identical to SEQ ID NO: 39631

SEQ ID NO: 58684 - DNA, 1032 bp, Neisseria meningitidis; identical to SEQ ID NO: 36792

SEQ ID NO: 58685 - DNA, 714 bp, Neisseria meningitidis; identical to SEQ ID NO: 50887

SEQ ID NO: 58686 - DNA, 912 bp, Neisseria meningitidis; identical to SEQ ID NO: 43497

SEQ ID NO: 58687 - DNA, 501 bp, Neisseria meningitidis; identical to SEQ ID NO: 39468

SEQ ID NO: 58688 - DNA, 1056 bp, Neisseria meningitidis; identical to SEQ ID NO: 51603

SEQ ID NO: 58689 - DNA, 225 bp, Neisseria meningitidis
atggacgcggttcaagagttggaacaccgcatcacagagctggaaatccaatctgcgcttcaggaggacgtaatcgccggcctgaacgcgatggtggcggaattgcggcagacgctggatttgcagcaggctcagttgaggctgctgtatcaaaaaatgcaggacaggaatcccgacgcgcaagagccgtattccctgcgcgacgagattccgccgcattattga

SEQ ID NO: 58690 - DNA, 1254 bp, Neisseria meningitidis
atgtccgaacaacatatttcgacttggaaaagtaaaatcaacgcattgggtccggggatcatgatggcttcggcggcggtcggcggttcgcacctgattgcctcgacgcaggcgggcgcgctttacggctggcagatcgcgctcatcatcatcctgaccaacctcttcaaatacccgtttttccgcttcagcgcgcattacacgctggacacgggcaagagcctgattgaaggttatgccgagaaaagccgcgtttatttgtgggtattcctgattttgtgcatcctctccgccacgattaacgcgggcgcggtcgccattgtcaccgccgccatcgtcaaaatggcgattccctcgctgatgtttgatgccggcacggttgccgccttgattatggcatcctgcctgattattttggtgagcggacgttaccgcgctttggatcgcgtttccaaaatcatcatcgttactttgagtatcgccacgcttgccgccgccggcatcgctatgtcgcgcggtatgcagatgcagcccgattttatcgagccgacaccgtggacgcttgccggtttgggcttcctgatcgcgctgatgggctggatgcccgcgccgattgaaatttccgccatcaattctttgtgggtaaccgaaaaacaacgcatcaatccttccgaataccgcgacgggatttttgatttcaacgtcggttatatcgccagtgcggttttggctttggttttccttgcactgggcgcgtttgtgcaatacggcaacggcgaagcagtgcagatggcgggcggcaaatatatcgggcaattgatcaatatgtacgccgttaccatcggcggctggtcgcgcccgctggtggcgtttatcgcgtttgcctgtatgtacggcacgacgattaccgtcgtggacggctatgcccgtgccattgccgaacccgtgcgcctgctgcgcggaaaagacaaaacgggcaacgccgaattctttgcctggaatatttgggtggcgggcagcggtttggcggtgattttctggtttgacggcgtaatggcgaatctgctcaaatttgcgatgattgccgcttttgtgtccgcccccgtgtttgcctggctgaattaccgtttggtcaaaggtgatgaaaaacacaaactcacatcaggtatgaatgcccttgcattggcaggcttgatttatctgaccggttttaccgttttgttcctattgaatttggcgggaatgttcaaatga

SEQ ID NO: 58691 - DNA, 1449 bp, Neisseria meningitidis
atgaaaggcgatattggcgtaatcggtttggcggttatggggcaaaacctgattttgaatatgaacgattgcggatttaaggttgtcgcctacaaccgaacaatcggtaaggtggacgaatttttaaacggcgcggctaagggaacggatattgtcggcgcgtattccctgcaagacttggtcgataagctggcaaaaccgagaaaaatcatgatgatggttcgcgcaggttcggtcgtcgacgactttatcgaacaactgctgcccctgttggacgaggaagacatcattatcgacggcggcaatgccaattaccccgacacgacacggcggacacattaccttgccgaaaaagggattttgtttgtcggcgcgggcgtatctggcggcgaagaaggcgcgcggcacggcccgtccattatgccgggcggggataagcgcgcttgggaagccgtcaagccgatttttcaggcgattgccgccaaaacgccgcagggcgaaccgtgttgtgactgggtcggcagggacggcgcggggcattttgtcaaaatggtgcataacggcatcgaatacggcgatatgcagttgatttgcgaagcgtaccagtttatgaaagacggcttggggctgtcttacgacgaaatgcaccgcgtgtttgccgcgtggaacaaaaccgagctggattcttatctgattgaaatcacagcggcaattttgggctataaggacgaaggcggcgaaccgctggtcgagaaaatcctcgatatggcagggcaaaaaggcacgggcaagtggacgggcatcaatgctttggatttgggtattccgctgacgctgatttccgaagccgtattcgcccgctgcgtttcgtcgttcaaagaacagcgcgtgcagaccggcaagctgttcgcccgaaccgttacgcccgtcgaaggcggcaaacaagaatgggttgaggcgttgagacaggctctacttgcatccaaaatcatttcctacgcacaaggctttatgctgatccgcgaagcgggcgaaagttacggctgggatttggactacggcaacactgcgctgctgtggcgtgaaggctgtattatccgcagcgcgtttttgggcaatatccgcgatgcctatgaaaacaatcccgatttggtgttcttgggtgtggatccgtatttcaaaaatattttggaaaactgcctgccggcatggcgcaaggtggttgccaaggcggtcgaatgcggcatccctatgccctgcatggcttcggcgattacgttcttggacggctacacgaccgaacgtctgcctgccaacctcttgcaggcacagcgcgactacttcggcgcgcacacttacgagcgcaccgacaaaccgcgcggcgagtttttccataccaactggacgggcaagggcggagataccgcttcgacaacctacgatatttga

SEQ ID NO: 58692 - DNA, 642 bp, Neisseria meningitidis
atgcaaaaacccgaaaccatacacatatccggtcctgccggcattttagaaaccatccatatcccgtccgaacaagtaccggcacgcggtgttgccgtcatcaatcatcccaaccccctccagggcggaacaaacaccaacaaagttatccaaactgccgccaaagccttaagcaaactcggcttccactgctacctgcccaaccttcgcggcgtaggcggcagcggaggcacacatgattacggacgcggcgaaacgcaagactgcctcgccgtcatcgattatgcccgcgcccaacaccccgaagcccccgaatttgccttatccggcttctccttcggcggttatgtcgccacatttgccgcacaagcgcgcacacccgatttattgctgctcatcggcgcggcagtctgccactataccgaccgtccggaaccgtccgccgttcccaacgttgcaaaaacgctgatgatacacggcgcggaagacgaagtcgtcgaaatcgaaaaagccctgaaatgggcggaaccgcaagatttgcccgtcattaccatcgccggttccacgcatttctttcacggcaaactcatcgtcttgcgcgacaccatcctccgcttcgcgcccgtatgcctgaacggataa

SEQ ID NO: 58693 - DNA, 345 bp, Neisseria meningitidis
atgtactaccaagtcggaaataaatgtcttgagaagcaccaggctgaaaacctttatttcagcttggtagtaccaagaatcaaagaaaacggacagattgtcaggccggaatataacggcagcctgtggaagatgtcggacggtcagccgctaaggcttttattggcggaatgcagtccgaaagacaacctgcaaagcggtcttgaaacaggctggatagtattcggcatcctcgcgtccgtttactttgtttccctgctgaaaaagtttgaaatgatggatttttatttttatctcggcgtttccgtacccgtattaatcggggcggttctgtttaagaattga

SEQ ID NO: 58694 - DNA, 966 bp, Neisseria meningitidis
atgagctacacgcaactgacccagggcgaacgataccacatccaatacctgtcccgccactgcaccgtcaccgaaatcgccaaacagctgaaccgccacaaaagcaccatcagccgcgaaatcagacggcaccgcacccaagggcagcaatacagcgccgaaaaagcccagcggcaaagccagactatcaaacagcgtaagcgacaaccctataagctcgattcgcagctgattcagcacatcgacacccttatccgccgcaaactcagtcccgaacaagtatgcgcctacctgtgcaaacaccaccagatcacgctccaccacagcaccatttaccgctaccttcgccaagacaaaagcaacggcagcacgttgtggcaacatctcagaatatgcagcaaaccctaccgcaaacgctacggcagcacatggaccagaggcaaagtacccaaccgtgtcggcatagaaaaccgacccgctatcgtcgaccagaaatcccgtatcggcgattgggaagccgacaccattgtcggcaaaggacagaaaagcgcattattgaccttggtcgaacgcgttacccgctacaccatcatctgcaaattggatagcctcaaagccgaagacactgcccgggcagctgttagggcattaaaggcacataaagacagggtgcacaccattaccatggataacggcaaagagttctaccaacacaccaaaataaccaaagcattgaaagcggagacttatttttgtcgcccttaccattcttgggagaaagggctgaatgagaacaccaacggactcatccggcaatacttccccaaacaaaccgatttccgtaacatcagtgatcgggagatacgcagggttcaagatgagttgaaccaccgaccaagaaaaacacttggctacgaaacgccaagtgttttattcttgaatctgttccaaccactaatacactag

SEQ ID NO: 58695 - DNA, 1284 bp, Neisseria meningitidis; identical to SEQ ID NO: 50738

SEQ ID NO: 58696 - DNA, 621 bp, Neisseria meningitidis; identical to SEQ ID NO: 37903

SEQ ID NO: 58697 - DNA, 627 bp, Neisseria meningitidis; identical to SEQ ID NO: 53660

SEQ ID NO: 58698 - DNA, 474 bp, Neisseria meningitidis; identical to SEQ ID NO: 47715

SEQ ID NO: 58699 - DNA, 729 bp, Neisseria meningitidis
atggcaggccatagcaagtgggcgaatatccagcataaaaaagcccgtcaggatgccaaacgcggcaaaatcttcacccgtttaatcaaagaaatcaccgttgcggcgcgtatgggcggcggcgatcccggtgccaacccgcgcctgcgcctggctttggaaaaagcagccgaaaacaatatgcccaaagacaatgtgcaacgcgccatcgacaaaggtacgggcaacttggaaggcgtggaatacatcgagttgcgctacgaaggctacggcatcggcggcgcggctttgatggtggactgcctgaccgacaacaaaacccgcaccgttgcggacgtacgccacgcgtttaccaaaaacggcggcaacttgggtaccgacggctgcgtggcgttcaacttcgttcatcaaggctatttggtgtttgaaccgggcgttgacgaagatgcgctgatggaagcggctttggaagccggtgcagaagacgtggttaccaacgacgacggttcgattgaagtcattaccgcgccaaacgattgggcgggcgtaaaatctgctttggaggcggcaggttacaaatccgttgacggcgacgttacgatgcgcgcccaaaacgaaaccgaactctccggcgacgatgccgtcaaaatgcaaaaactgattgacgcgctggaagacttggacgacgtgcaagacgtttacacttccgccgtattgaatctggactga

SEQ ID NO: 58700 - DNA, 183 bp, Neisseria meningitidis; identical to SEQ ID NO: 51542

SEQ ID NO: 58701 - DNA, 939 bp, Neisseria meningitidis
atgtccatccatactctgaaacgcctgccctcatcgctgctgctcggtctctgcctttccctgccgtcagcccacctttttgccgacaacgacattttagggcaatttttagaacagaacatgcttacctcctccgatccgatagaaatattcgccgaaagcacgatacaccccaccaacacccaagccattacaggtggtctgattctctcctcacagtctgccctggtcgtcaacaacaaaaccggacagatactgtatcagaaaaacgccgacaggattatgcccatcgcctccatttccaaactgatgagcgcgatggtcgttttggatgcaaacttggacatgaacgaaaccgttaccattacgcccgacgaaatcgaccgcatcaaagggaccggcagccgtcttgccataggtacggcacttacacgcaaagaactgctgcacctgagcctgatgagcagcgaaaaccgcgccacccatgcattgggcagaacctaccccggcggcatgggcgcatttgtcgccgccatgaaccgcaaagcccaaagcctcggtatgtacggcagccgcttttacgaaccgaccggactcaacttccaaaacgtttccaccgccaaagacctgagccttatggtcaacgccgccgcccaatatccgcaaatccgcaccaactcgacttccaactacgcctcggtacagaccaaaaacgggcagcagaactacaaaaactccaatgcgctggtcagggaaggcatgtggaacatcgaattgcagaaaaccggctacatacgcgaagcaggcaggtctatggttgtcaaagccaacattcaaaatcaacccgttaccatcgtattgctgaactcgcccacatccgccacacgcgtcaacgacgcccgcaaaatcgaatcgtggatgctgcagcaacgctcctga

SEQ ID NO: 58702 - DNA, 729 bp, Neisseria meningitidis
atgaccaaacagctgaaattaagcgcattattcgttgcattgctcgcttccggcactgctgttgcgggcgaggcgtccgttcagggttacaccgtaagcggccagtcgaacgaaatcgtacgcaacaactatggcgaatgctggaaaaacgcctactttgataaagcaagccaaggtcgcgtagaatgcggcgatgcggttgctgcccccgaacccgagccagaacccgaacccgcacccgcgcctgtcgtcgttgtggagcaggctccgcaatatgttgatgaaaccatttccctgtctgccaaaaccctgttcggtttcgataaggattcattgcgcgccgaagctcaagacaacctgaaagtattggcgcaacgcctgagtcgaaccaatatccaatctgtccgcgtcgaaggccataccgactttatgggttctgacaaatacaatcaggccctgtccgaacgccgcgcatacgtagtggcaaacaacttggtcagcaacggcgtacctgtttctagaatttctgctgtcggcttgggcgaatctcaagcgcaaatgactcaagtttgtgaagccgaagttgccaaactgggtgcgaaagtctctaaagccaaaaaacgtgaggctctgattgcatgtatcgaacctgaccgccgtgtggatgtgaaaatccgtagcatcgtaacccgtcaggttgtgccggcacacaatcatcaccaacactaa

SEQ ID NO: 58703 - DNA, 3024 bp, Neisseria meningitidis
atgaacgcgcaaaatctgcccgaggtaaagtggggggatcaatatcagtcattgacgcacaaaagcaatgaacgcgaagttatccatacgagtggttttggtttggcaaaaaagagcattagtttctcattcaataataccgatgaagttgttgctgaaaaaaaagatactgtcgttttcggcgcggcgacctacctgccgccctacggaaaggtttccggttttgataccgctaagctgaccgagcgcaaaaatgcccttgatcagattggtacgaccaaaacggggctggtaggctacagctacgaaggtagcacatgctccagcggaggttgtcctacagttgcctatagaacccaatttaccttcggcaattccagtttggcaaaaaagacaaacggcggcgggctggatatatacgaagacaaaagccgcgacaattcgcccatttacaaattgaaggatcatccttggttgggcgtgtctttcaatttgggcggagagagctccttcaaaccaaagagacaaggttctttggtatcttcttttagcgaggacgtgacgcagcaaaatggtgcgggcagccaacacaaagacaaaaacctcgtttatacgacagacgattacaagagtcagaataataaaaaccatcaggacaaacaccacgccgtcgccttttatctgaacgccaagctgcacctgctggataaaaaacacattaaaaatatcgtgcaaggtaaaacagttaatttgggtatcttgaaaacacgcatcgagccgacggaagcatggaaaagacggaatagtaacttttttaacggtagttggacgtatgaagagaaaggaacagtcagcgtcaaactcaaattgccggaagtcaaagcaggccgctgcatcaacgcaaataaccccaataagagtaccaaagccccttcccccgcactgactgcccccgcgctgtggttcggacctgtgcaaaatggtaaggtgcagatgtattccgcttcggtttctacctaccccgacagttcgagcagccaaattttcctgcaaaacctttcccgcaaggatgacacaagcaaaccgggccgctattccctcaaacccttgagtacgtcggagattaaaagtaaagagccgaatttcacggggcggcaaacaatcatccgattggatagcggcgtacgtgagatcaaactggatagaagcaatgaggccaccggtttaaatggaaatgacggcaaaaacgaaactttcggcattgttagtgaagggagcttcatgcctgatgtcagcgagtggaaaaaagtgctgctgccttggacggttcgggtttttgctgatgacagtaaatttaaagaattcaacaaagaagaaaaagacaacaagccaaaatacagtcaaaaataccgcagccgcgacaacaacaatcacaatttgggcgacatcgtcaacagccccatcgtggcggtcggcgaatatctagctacttccgccaacgacgggatggtgcatatcttcaaaaaaggcaacggcggggacgagcgcaactatagtctgaagctcagttatatcccgggcacgatgccgcgcaaggatattcaaaacaccgaatccacccttgccaaagagctgcgcgcctttgccgaaaaaagctatgtgggcgaccgctacggcgtggacggcggctttgtcttgcgcaaagtcgaacggaacgggaaagaccatgtgtttatgttcggcgcgatgggctttggcggcagaggcgcgtatgccttggatttaagcaaaatcgacagcggcaacggcaacctggcagacgtttccctgtttgatgtcaaacatgacaagaatggcaataacggcgtgaaattaggctacaccgtcggcacgccgcaaatcggcaaaacccacgacggcaaatacgccgctttcctcgcctccggttatgcgactaaagacattaccagcggcgacaataaaaccgcgctgtatgtgtatgatttggaaagcagcggcacgctgattaaaaaaatcgaagtacccggtggcaagggcgggctttcgtcccccacgctggtggataaagatttggacggcacggtcgatatcgcctatgccggcgatcgcggcggcagtatgtaccgctttgatttgagcaatcaagatcctagtcaatggtctgtacgcgccatttttgaaggcacaaaaccgattacttccgcgcccgctatttcccaactgaaagacaaacgcgtggttatcttcggcacgggcagtgatttgagtgaggatgatgtactcagtacgagcgaacaatatatttacggtatcttcgacgacgatacggtggcgaataacgtaaatgtaaaactcagcggtttgggaggcgggctgctcgagcaagagcttaagcaggaggataaaaccttattcctgaccgattacaagcgatccgacggatcgggcagcaaagggtgggtagtgaaattgaagggcggacagcgcgttaccgtcaaaccgaccgtggtattgcgtaccgcctttgtaaccatccataaatatacgggtacggacaaatgcggcgcggaaaccgccattttgggtatcaataccgccgacggcggcaagctgaccaagaaaagcgcgcgcccgattgtgccggccgagaatcaggctgtcgcgcaatattccggccataagaaaggcatcaacggcaaatccatccctataggttgtatgcaaaaaggcaatgaaatcgtctgcccgaacggatatgtttacgacaaaccggttaatgtgcgttatctggatgaaaagaaaacagacggattttcaacaacggcagacggcgatgcgggcggcagcggtatagaccccgccggcaagcgttccggcaaaaacaaccgctgcttctcccaaaaaggggtgcgcaccctgctgatgaacgatttggacagcttggacattaccggcccgacgtgcggtatgaaacgaatcagctggcgtgaagtcttctactga

SEQ ID NO: 58704 - DNA, 1887 bp, Neisseria meningitidis; identical to SEQ ID NO: 42634

SEQ ID NO: 58705 - DNA, 279 bp, Neisseria meningitidis; identical to SEQ ID NO: 36597

SEQ ID NO: 58706 - DNA, 771 bp, Neisseria meningitidis; identical to SEQ ID NO: 42798

SEQ ID NO: 58707 - DNA, 441 bp, Neisseria meningitidis; identical to SEQ ID NO: 38836

SEQ ID NO: 58708 - DNA, 882 bp, Neisseria meningitidis; identical to SEQ ID NO: 52234

SEQ ID NO: 58709 - DNA, 1776 bp, Neisseria meningitidis
gtggctaaaacatatttattgactgcattgataatgtctatgacaatctctggatgtcaagtcatccatgccaatcaaggtaaggttaatactcattctgctgtcatcacaggtgcagacgctcacacgcctgaacatgcaacgggactgaccgaacaaaagcaggtgattgcaagtgattttatggtagcgtcagccaatccattagcaacacaagctggctatgatatcttaaagcaaggcggtagcgctgcagatgcgatggtggcggtgcagacgacactaagcttggtagagccacagtcgtcaggcttgggcggtggtgcatttgtgttgtattgggataataccgccaaaacattgaccacatttgatgggcgtgagacggcaccgatgcgtgcgacgccggaattatttttggataaagatggtcaaccattgaaatttatggaagcggtggtcggtggtcgctcggtgggtacgcctgctatccctaaactgatggagacaatacatcagcgatacggtgtattgccttggggaaaattatttgatacaccgatccgcttggcaaaacaaggctttgaggtgtcgccaaggcttgccatctcggttgagcaaaatcagcagcatttggcacgctatccaaaaacagccgcttattttttgccgaatggtgtgccgctacaagcaggcagcttgctgaaaaatttagaatttgctgacagtgttcaggcgttagcagctcaaggtgcaaaagctctgcatactggtaaatatgcccaaaatatcgtttcagttgtccaaaatgctaaggataaccccggtcaattatccttacaagatttatctgattatcaagtggtggaacgcccgcctgtttgtgtgacttatcgtatttatgaagtatgcggtatgggtgcaccaagctcaggtgggattgctgtgggtcagattttggggattttaaatgaattttcacccaatcaggtggggtatgatgctgaaggtttacgtctcttgggcgacgcttctaggcttgcgtttgcggatcgtgatgtatatttgggcgaccctgattttgtaccagtacccattcgccagttgatttctaaagactacctaaaacatcgcagccagctgcttgagcagtcggataaggcattgcctagcgtatctgcaggcgattttattcatgagtgggtgtcctcacaagcgattgagttaccttctaccagtcatatatcaattgtggataaggcgggcaatgtgctatcaatgacgacttccattgaaaatgcgtttggctcaactttgatggcaaatggctacctgctgaataatgagctgacagactttagttttgagccaataaagcagggcaaacaggtcgccaatcgtgtcgagcccggcaagagaccacgctcctcaatggcaccaaccatcgtatttaaagcaggcaagccttatatggcaatcggctccccaggtggtagccgtatcattggctatgtcgctaagacgattgtggcacatagtgactggaatatggatatccaagatgccatcagtgcacccaatttattaaatcgctttggtagctatgaactagaaacgggtacaaccgccctccagtggcaacaagcattaaatgatttgggctataagactgacgtgcgtgagctaaattcaggtgttcaagccattattatcgagccaagcaggctggttggtggtgccgatccacgccgagaaggtcgagtgatgggtgattag

SEQ ID NO: 58710 - DNA, 654 bp, Neisseria meningitidis
atgaagataacgcactgcaaattaaagaaaaaagtacagaaagaactgctccgtttttttgtactggaagttaccgcccgttctgccgccgatattttgggtatccatcccaattcggcagtactgttctaccgtaaaatccgcacggttatcaaccatcatttggccttggctgccgatgaggtttttgagggccctgtcgagcaggacgaaagcgatttcggcggacggcgtaaaggcagacgtggtcgcggtgcggcaggaaaagtggttgtcttcggcattctgaaacgcaacggacgggtctataccgttgtggtggataatgccaagtctgaaacgttactccctgtcatcaagaagaaaatcatgccggacagtattgtttataccgatagtctgagcagctgcgacaagttggacgtgagcggtttcatttattaccgcatcaaccattccaaggaatttgcagaccgtcagaaccacattaacggcattgagaatttttggaatcaggcaaaacgtgtcttgcgaaaatacaatggaatcgatcgcaaatctttcccgctgttcttgaaagaatgcgaatttcgatttaacttcggcacaccgtctcaacagcttaaaatcctgcgggattggtgtgggatttag

SEQ ID NO: 58711 - DNA, 789 bp, Neisseria meningitidis
atgctcaccctatacggagaaactttcccctcgcggctgctgctcggcacggctgcctacccgacccctgaaatcctcaaacaatccgtccgtatcgcccaacccgcgatgattaccgtctcgctgcgccgcacgggaagcggcggcgaggcgcacggtcaggggttttggtcgctgcttcaagaaaccggcgttcccgtcctgccgaacacggcaggctgccaaagcgtgcaggaagcggtaacgacggcgcaaatggcgcgcgaagtgtttgaaaccgattggattaaactcgaactcatcggcgacgacgacaccttgcagccggatgtgttccaacttgtcgaagcggcggaaatcctgattaaagacggcttcaaagtgctgccttattgcaccgaagacctgattgcctgccgccgcctgctcgatgtgggctgtcaggcgttaatgccgtgggcggctccgatcggcacgggtttgggcgcggttcacgcctacgcgttgaacgtcctgcgcgaacgcctgcccgacacgccgctgattatcgacgcgggcttgggtttgccctcacaggcggcacaagtgatggaatggggctttgacggcgtgcttttgaacaccgccgtttcccgcagcggcgatccggtcaatatggcgcgcgccttcgcactcgccgtcgaatccggacggctggcatttgaagccggaccggtcgaggcgcgaaccaaagcccaagccagcacgccgacagtcggacaaccgttttggcattcggcggaatattga

SEQ ID NO: 58712 - DNA, 174 bp, Neisseria meningitidis; identical to SEQ ID NO: 50939

SEQ ID NO: 58713 - DNA, 1548 bp, Neisseria meningitidis; identical to SEQ ID NO: 51241

SEQ ID NO: 58714 - DNA, 939 bp, Neisseria meningitidis; identical to SEQ ID NO: 42264

SEQ ID NO: 58715 - DNA, 1479 bp, Neisseria meningitidis; identical to SEQ ID NO: 44572

SEQ ID NO: 58716 - DNA, 480 bp, Neisseria meningitidis; identical to SEQ ID NO: 42783

SEQ ID NO: 58717 - DNA, 240 bp, Neisseria meningitidis; identical to SEQ ID NO: 43117

SEQ ID NO: 58718 - DNA, 1128 bp, Neisseria meningitidis; identical to SEQ ID NO: 46291

SEQ ID NO: 58719 - DNA, 966 bp, Neisseria meningitidis
atgagctacacgcaactgacccaaggcgaacgataccacatccaatacctgtcccgccactgcaccgtcaccgaaatcgccaaacagcttaaccgccacaaaagcaccatcagccgcgaaatcagacggcaccgcacccaagggcagcaatacagcgccgaaaaagcccagcggcaaagccagactatcaaacagcgtaagcgacaaccctataagctcgattcgcagctgattcagcacatcgacccccttatccgccgcaaactcagtcccgaacaagtatgcgcctacctgtgcaaacaccaccagatcacgctccaccacagcaccatttaccgctaccttcgccaagacaaaagcaacggcagcacgttgtggcaacatctcagaatatgcagcaaaccctaccgcaaacgctacggcagcacatggaccagaggcaaagtacccaaccgtgtcggcatagaaaaccgacccgctatcgtcgaccagaaatcccgtatcggcgattgggaagccgacaccattgtcggcaaaggacagaaaagcgcattattgaccttggtcgaacgcgttacccgctacaccatcatctgcaaattggatagcctcaaagccgaagacactgcccgggcagctgttagggcattaaaggcacataaagacagggtgcacaccattaccatggataacggcaaagagttctaccaacacaccaaaataaccaaagcattgaaagcggagacttatttttgtcgcccttaccattcttgggagaaagggctgaatgagaacaccaacggactcatccggcaatacttccccaaacaaaccgatttccgtaacatcagtgatcgggagatacgcagggttcaagatgagttgaaccaccgaccaagaaaaacacttggctacgaaacgccaagtgttttattcttgaatctgttccaaccactaatacactag

SEQ ID NO: 58720 - DNA, 957 bp, Neisseria meningitidis
atgaatataatcgggctggacatctcaaaggataccatagacgcaacattgcataaaacaaacggaagtatccattacattaaatttaagaataatgatgatggattaaaacagtttagattgtggataaagggaaacagaatcagaaaagcctatatcggcatggaggcaacaggcatctattacgaaaaggcagcagatatgctttcttcctactatactgtttacgttattaatcccttaaaaatcaaggactacggaaaaagcaggtttaaccgtaccaaaaccgacaaagcagattcaaacctgatagcagactacataaaaaggcatcaagatacattgataccgtatcagatacccaaaaacaaagcactgcaaaaactgattaaccttaaaaatcaattacatcaacatcagaagcaaattaaaaaccgtcttcatagcactgaagaagacttcataaggaacatacatcaagacttgatagataccatacaggacaagatggaacaggtaaaaatagccatatccgaacaaatcaaaaaacaaacggacaataaccattaccgcaatcttcaaaccatcccgagcataggcaaagacaccgcatcagttctttatgcgcaactgacagaaaaacattttaaaaccgcaaaccagtttgtatcctatgccggattaagtcccgccatcatacaatcagggacaagcgtaagaggtcggggcagattgagccgatacggaaacagacgattaaaaagtacgctgtatatgcccgccctttgtgcttaccgttttaacgcatttccgaaattaataaataatctgaaaaaagcgggtaagccaaagatggtaatcatcgttgccatcatgcgcaaactggcgaagctcgcctattacattgttaaaaccggccagccttacgatgcggaaagacaccgattgaatcaataa

SEQ ID NO: 58721 - DNA, 273 bp, Neisseria meningitidis
gtgaacaattcagtcatcaccgtcatcggcaaagaccgcgtcggcatcgtgtacgatgtttccaaaattttggcggaaaaccgaatcaacatccttaatatcagccaacagctgatggatgatttttttaccatgattatcttggtggatacctcgaaatgccccaaatctcggcaggaggttttggatttgtttgcggaagagagcaaaaaactcgcgcttgatatccgtatgcaaaatgaagaaatcttccaagcgatgcaccgcatttga

SEQ ID NO: 58722 - DNA, 618 bp, Neisseria meningitidis
atgccctatacggaagatatgcgcccgggcgataccgctaatccttatggcgcatccaaagcgatggtggaacggatgttaaccgacatccaaaaggccgatccgcgttggagcgtgattttgttgcgctatttcaacccgattggggcgcacgaaagcggcttgatcggcgaacagcccaacggtattcccaacaaccttttgccctatatctgccaagtggcttcgggcaggctgccgcaactgtcggtattcggcggcgattatccgacccccgacggtacgggaatgcgcgactacattcatgtgatggatttggcagaagggcatatcgcggcaatgaaggcaaaaggcggcgttgccggcgtacatttgttcaacttgggttcggggcgcgcctattccgttttggaaatcatccgtgcctttgaagccgcatccggcttaaatattccctatcaaatccaaccccgacgcgccggagacttggcgtgttcctttgccgacccgtcccataccaaacaacaaaccggctgggaaaccaaacgcggcttgcagcaaatgatggaagattcgtggcgttgggtcagccgcaaccccaacggatatggggattaa

SEQ ID NO: 58723 - DNA, 648 bp, Neisseria meningitidis
atgaaaacaaaattttacaattatcaaggcgaacatttaatcctgtattttgcaggttggggaacgccgcccgatgctgtaaatcatttgattttgccggaaaatcacgatttattgatttgctatgattatcaagatttaaatttggattttgatttttccgcctatcggcacatccgtttggtggcgtggtcaatgggcgtttgggcggcagagagggcattgcaaggaataagattaaaatccgcaacggcagtgaatggcacaggtttgccttgcgatgataatttcggtatcccttgcgccgtttttaaaggcacattggagaacctcacggaaaacacccgtttaaaatttgaacgcagaatgtgtggcgataaagcatcttttgaagattaccaacaatttcccgcccgtccgtttgacgaaattcatcaagaacttatcgcactttttgcgatgatcgggcaagataggcgcgcagatttgattcgctggacaaatgccttggtcggatcgggcgataaaatttttatgcctgccaatcagcaccgatattggacagcgcgttgcaccgttcgggaaattgacggcggacattacctgttttcaagattcacccattggtcggcactatggaatcactga

SEQ ID NO: 58724 - DNA, 1839 bp, Neisseria meningitidis
atgtgcggtatcgtcggcgccatccgcgcccatcacaacgtcgtcgattttctgaccgacggtctcaaacgcctcgaataccggggttatgactcatcaggcattgccgtcaacaccgacggcaaaatcaaacgtgtgcgccgcgtcggacgcgtgcagcttatggaggacgcggcacgcgaaaaaggcatcagcggcggcatcggcatcggacatacgcgttgggcgacacacggcggcgttactgagccgaacgcccacccgcacatcagcggcggtatgattgcggtcgtacacaacggcatcatcgaaaactttgaaagcgaacgcaaacgtttggaaggtttgggataccgttttgaatcgcaaacggataccgaagtcatcgcacacagcatcaatcacgaatacgcgcaaaacggcggcaggctgtttgaagcggtacaagaagcggtcaaacgtttccacggcgcatacgccatcgcggttattgcccaagacaagcctgatgaattagttgtggcgcgtatgggctgcccgcttttggtcgctttgggcgacgatgaaacctttatcgcttcggacgtatccgccgtcatcgcctttacgcgccgcgtggcgtacctcgaagacggcgacatcgcgctgctggcttcagacggcatcaaaaggctgaccgataaaaacggcctgcctgccgaacgcaaagtcaaggtatccgaactctcgctcgcctctttggaactgggaccgtacagccactttatgcaaaaggaaatccatgagcagccgcgcgcgattgcagacacggcggaggttttcctcgacggcggcttcatccccgaaaacttcggcaaaaacgccaaaagcgtgtttgaaagcatccgcagcgtcaaaatccttgcctgcggcacgtcctattacgccgcgctgaccgccaaatattggttggaatccatcgccaaaatcccggccgatgtcgaaatcgccagcgaataccgataccgcagcgtgattgccgatccggaccaactggtcattaccatttcccaatccggcgaaacgctggacacgatggaggcgttgaaatacgccaaatctttgggacaccgccacagcctctccatctgcaacgtgatggaatccgccctgccgcgcgaaagcagcctcgtgctttatacccgtgccggtgcggaaatcggcgtcgcctcaaccaaagcatttaccacgcagctggttgcgctgttcggtttggcggtaacgctggcgaaagtgcgcggtttggtttccgaagaagacgaagcacgttacaccgaagaactccgccagcttcccggcagcgtgcagcacgctttgaacctcgaaccgcaaattgccgcttgggcgcaacagtttgccaagaaaaccagcgcgctgtttttagggcgcggcatccattacccgattgccctcgaaggtgcgttaaagctgaaggaaatcacctacatccacgccgaagcctatcctgccggcgaactgaagcacgggccgcttgccttagtggacgaaaacatgcccgtcgtcgtcatcgcgcccaacgacagcctattggacaaagtcaaagccaatatgcaggaagtcggcgcgcgcggcggcaaacttttcgtctttgccgacctcgacagcaattttaatgccaccgaaggcgtgcacgttatccgtgcgccgcgccatgtcggcgaactgtcccccgtcgtgcataccatccccgtgcagctcctttcctaccacaccgccctcgcgcgcggcacggatgtagacaagccgcgcaatctggcgaaatccgtaaccgtcgaataa

SEQ ID NO: 58725 - DNA, 2484 bp, Neisseria meningitidis
  misc_feature 6, 7, 8, 9, 10: 'n' is a, c, g or t
gtgtgnnnnngcgcgccgtatgccaatgaaaacagccgcatcctgctgagcaccacggatatcagttcggaaaacggcaaaatcaaactgcaatcctacggcgaccagttctactacgccggacagggtgagctctacaccttcgataaacgcagctataaaaccggtaagtggtacaaactaaaacatgttactgaaatcaaagagcataaaaacgccaaagccgacccggtgagcctcagtgcgtcacaaggtattgaaatcaaatccggcggcaatatcggtgcccacgccaccttgtttgatgcaccccgcggctccgttaaaatcgaagccggacgtgggctggttctctatgccgtggaagatctcaactacgacaaacttgacacccgtaccaagcgcaaatttatcggcattacctacgacaaggtgcacgacaccaccacccacaccatgaaaaccgccctgccctcaagggtagttgcagaatcggccaacctgcaatcaggctgggacgccaaactgcaaggcacccagtttgaaaccacgctgggcggcgcagccatccgtgcaggtgtaggcgatcaggcacgagcagatgccaagattattcttgaaggcatcaaaagtagtgtgcgcactgaaacagtaagcagtagcaaatctgccctctggcagaaacaggccggacgcggcagcaatatcgaaaccttgcaactgccaagtttcacaggctccgttgcgcccgtactctctgcccccggcggctatatcgttgatattccgaaaggcaatctgaaaaccgaaatcgaaaagctggccaaacagcccgaatacgcctacctgaaacagcttcagacggccaagaacgtcgattggaaacaggtgcagcttgtctacgacaagtgggactataaagccgaaggcctgaccggagccggagccgccattatcgcactggccgttaccgtggtcacctcaggcgcaggaaccggagccgtattgggattaaacggtgcggccgccgccgcaaccgatgcagcattcgcctctttggccagccaggcttccgtatcgttcatcaacaacaaaggcaatatcggtaacaccctgaaagagctgggcagaagcagcacggtgaaaaatctggtggttgccgccgctaccgcaggcgtagccgacaaaatcggcgcttcggcattgaacaatgtcagcgataagcagtggatcaacaacctgaccgtcaacctggccaatgcgggcagtgccgcactgattaataccgctgtcaacggcggcagcctgaaagacaatctggaagcgaatatccttgcggctttggtgaatactgcgcatggagaggcagcaagtaaaatcaaacaattggatcagcactacatagtccacaagattgcccatgccatagcgggctgtgcggcagcggcggcgaataagggcaagtgtcaggatggcgcgataggcgctgcagtcggtgagattgttggtgaggctttggttaagaatactgatttcagtcgtatgagtgcgaccgaaatcgaaaaatctaaagcgaagattactgcctattcaaaactggttgccggcactgcgtctgccgttgtaggcggggatgtgaatacagcggcgaatgcggcacagatagcggtggagaataatactttgtatcctagatgcgttggtgcaaagtgtgatgaatttcaaaaggaacaacaaaaatggatacgtgaaaatcctgaagaatatcgagaagttttgcttcttcagacaggatttattccaattatcggtgatatacagagttttgtacaagcacagaccgctgccgatcacctgtttgctttgctgggtgtggttccgggtatcggtgaatcgatacaggcctataaagtagcgaaagcggcaaaaaatttacaaggcatgaaaaaagccttggacaaggcagcaaccgttgccactgcacagggctatgtcagtaaaaccaaaatcaaaatcggtcaaactgaattaagggttactgcagcaactgacaaacaattgctgaaagctattggcgaaggaagggacacgacaggtaaaatgaccgagcagttatttgactctttagctaaacaaaatggcttcagagtgctttcgggcggcaaatacggcggaaataacggttttgatcatgtatggcaggctgccgatggtagtgtcgttttgattgtagaaagtaagcagattaggaacggtacggtacagctgaatccgaatggtgcgggtggatatacgcaaatgagtgaggattggattaaacaagttgcaaatagcttacctgatggtagtcctgctaaagctgctgtcttcaaagcggagcgggaaggcaaattaaaaacggcaatagcaggcgttgatcgtcaaacaggtaaggccgttattctttctgtcaaagttccttctaaaaccaatataaggagataa

SEQ ID NO: 58726 - DNA, 618 bp, Neisseria meningitidis; identical to SEQ ID NO: 38574

SEQ ID NO: 58727 - DNA, 126 bp, Neisseria meningitidis; identical to SEQ ID NO: 42488

SEQ ID NO: 58728 - DNA, 531 bp, Neisseria meningitidis; identical to SEQ ID NO: 43484

SEQ ID NO: 58729 - DNA, 540 bp, Neisseria meningitidis
atgaacatcattgataccgccattcctgacgtaaaactgcttgagccccaagtcttcggcgacgcgcgcggcttttttatggaaaccttccgcgacgagtggtttaaaacccaagtctgcgaacgcaccttcgtgcaggaaaaccactccaaatccggcaaaggcgtattgcgcggcctgcactaccaaaccgaaaacacacaaggcaaactcgtacgcgtagttgtcggcgaagtgttcgacgtggccgtcgatatgcgcgaaggttcgccgactttcggcaaatgggcgggtgcaaccctgtccgcgcaaaaccaatgccagctttggatacccgaaggcttcgcacacggtttttacgttttgagcgacacggccgaacttacctacaaatgcacagactattacaagccagaagccgaacaggttttaatatggaacgacccggcaataggcatagactggccgctacaaggcgagccgaacctgtcgcctaaagacttggccggcaaagtattggctgaagcggtcacgttttaa

SEQ ID NO: 58730 - DNA, 1272 bp, Neisseria meningitidis
atgttccaatggctttatgatgtattgtggctgcttgcgccgatatggatacggcgttatttggacaaacgctccggaagtgccccggcatatcgggcgcatcggggcgagcgtttcggcaagccgtatccgaatcccgttaccggcgcggtttggatacacgccgtttcggtcggagaaacgcgtgccgcccagcccttgatacgcgagttgcggcagcgttttcccgatgcgccgctgctgatgacgcagatgaccccgacgggacgggaaaccgcgcaagttctgtttcctgatgcacaatgccgttatcttccgtatgacaaaaaaacgtgggtacggcagtttttgcgcgaacaccgcccgatgttcggcattttgatggaaaccgaaatctggcccaacctgatgaaggaatgccggcgcgcgggtgtgccgctgtttttggcgaatgcgcggctgtcggaaaaatcgttgagcggttatctgaaagtccgccgcctgatccgtcctgccgccgcttcgctgacgggttgtctggcgcagacggaggcggatgcggcgcggttggcgaaattgggcgcggcatccgtgcaggtgtgcggcaataccaaatacgacctgatgccgtcggaacagatgaaaacgctggcggggcagtttgaaaaacgcatcggaggcagaccggttgccgtgtgcggcagcacgcgcgtttatcggggcgaagacgaggcggagaaactgctggcggcgtggcaacaatatcgcggcgatgccctgctggtcgtcgtgccgcgccatcccgagcattttcagacggtatttgaaacggcaaaacgcttcgggtttaaggttcagcggcgcagcgacggtttgccggtcgaacctgatacgcaggtgtggataggcgacagtatgggcgagctgtatgcgtattacctgtgcgccgatgtcgcttttgtcggcggcagtctggtcgattcgggctgtcagaacattatcgaaccgctttcctgcggcgttccgacgatattcggcttttcaacctacaatttttccgaagcctgccggcacgccttggcatcgggggcggcggttcgggttgagtcggcggacgcgtggcgggaagccgttgaaaaaaccttatcgtccgaggggggcggaatgcagatgcaggcgcacgtggacggctttatcgcacaacatcgcggagcgggcgcgagaatcgccgaggcggtacgggaagcggtatgcggacatcggggacgatag

SEQ ID NO: 58731 - DNA, 528 bp, Neisseria meningitidis; identical to SEQ ID NO: 51148

SEQ ID NO: 58732 - DNA, 285 bp, Neisseria meningitidis; identical to SEQ ID NO: 42100

SEQ ID NO: 58733 - DNA, 783 bp, Neisseria meningitidis
atgaaaaccaagttaatcaaaatcttgaccccctttaccgtcctcccactgctggcttgcgggcaaacgcccgtttccaatgccaacgccgaacccgccgtcaaagccgagtccgccggcaaatccgttgccgcctctttgaaagcgcgtttggaaaaaacctattccgcccaagatttgaaagtgttgagcgtcagcgaaacaccggtcaaaggcatttacgaagtcgtcgtcagcggcaggcagattatctacaccgatgccgaaggcggctatatgttcgtcggcgaactcatcaacatcgacacgcgcaaaaacctgaccgaagaacgcgccgccgatttgaacaaaatcgacttcacctccctgcctttggacaaagccatcaaagaagtgcgcggcaacggcaagctgaaagtcgccgtcttctccgaccccgattgtccgttctgcaaacgcttggaacacgagtttgaaaaaatgaccgacgtgacggtttacagctttatgatgcccattgccggcctgcaccccgatgccgcgcgcaaggcgcaaatcttatggtgtcagcccgaccgcgccaaagcgtggacggattggatgcgtaaaggcaaattcccggtcggcggcagcatctgcgacaatcccgtcgcggaaaccacttccttgggcgaacaattcggcttcaacggcacgccgaccctcgtcttccccaacgggcgcagccaaagcggctacagcccgatgccccaactggaggaaatcatccgcaaaaatcaataa

SEQ ID NO: 58734 - DNA, 471 bp, Neisseria meningitidis; identical to SEQ ID NO: 39685

SEQ ID NO: 58735 - DNA, 591 bp, Neisseria meningitidis; identical to SEQ ID NO: 38699

SEQ ID NO: 58736 - DNA, 408 bp, Neisseria meningitidis
atgaaaaaattattgattgccgcaatgatggcggctgccttggcagcttgttcgcaagaagccaaacaggaggttaaggaagcggttcaagccgttgagtccgatgttaaagacactgcggcttctgccgccgagtctgccgcttctgccgtcgaagaagcgaaagaccaagtcaaagatgctgcggctgatgcaaaggcaagtgccgaggaagctgtaactgaagccaaagaagctgtaactgaagccaaagaagctgtaactgaagccaaagaagctgtaactgaagccaaagaagctgtaactgaagccaaagaagctgtaactgaagcagctaaagatactttgaacaaagctgccgatgcgactcaggaagcggcagacaaaatgaaagacgctgccaaataa

SEQ ID NO: 58737 - DNA, 1986 bp, Neisseria meningitidis; identical to SEQ ID NO: 44981

SEQ ID NO: 58738 - DNA, 240 bp, Neisseria meningitidis; identical to SEQ ID NO: 44857

SEQ ID NO: 58739 - DNA, 957 bp, Neisseria meningitidis
atgattttaacaccgccggacacgccctttttcctccgcaacggcaatgccgacacgattgccgccaaattcctgcaacgccccgcacccacataccgccgcgagctgcttcccgacagcacgggtaaaaccaaagtcgcctacgatttttcagacggcatttcgcccgatgcgccgctggtcgtgctgtttcacggtttggaaggaagcagccgcagccattacgcggtcgaactgatgctcgcggtacgcagccgcggttggcacggcgcagtcgtccatttccgcagctgcggcggcattgccaacaccgctccggtgttctaccacttgggcgataccgccgaaatcgcctttactttggacacgcttgccgcgcgttaccgtgaaatatacgccgtcggcgtatcgctgggcggcaacgcgctggcaaaatatttgggcgaacggagcgaaaacgcgctgccgcaagccgctgccgccgtatccgcccccgtcgatgcagaggcggcaggcagacgcttcgacagcggcatcacgcggctgctctacacgcgctacttcctccgcaccctgatacccaaagcacggtcgctccacggttttcagacggcatttgccgcagggtgcaaaacactgggcgagtttgacgaccgtttcaccgcaccgctgcacggctttgccgaccggcacgactactaccgccaaacttcctgcaaaccgctgctcaaacacgttgccaaaccgctgctcctgctcaatgccgtcaacgaccccttcctgccgcccgaagccctgccccgcgcagacgaagtatccgaagccgttaccctgttccagccggcatatggtggtcatgtcggctttgtcagcagcaccggcggcaggctgcacctgcaatggctgccgcagaccgtcctgtcctatttcgacagcttccgcacaaacaggcgttaa

SEQ ID NO: 58740 - DNA, 951 bp, Neisseria meningitidis; identical to SEQ ID NO: 43319

SEQ ID NO: 58741 - DNA, 183 bp, Neisseria meningitidis; identical to SEQ ID NO: 42652

SEQ ID NO: 58742 - DNA, 774 bp, Neisseria meningitidis; identical to SEQ ID NO: 51816

SEQ ID NO: 58743 - DNA, 687 bp, Neisseria meningitidis; identical to SEQ ID NO: 50296

SEQ ID NO: 58744 - DNA, 7509 bp, Neisseria meningitidis
gtggtagccgttgctgaaactaccaagcgcgaaggtaaaagctgtgccgatagtgattcaggcagcgctcatgtgaaatctgttccttttggtactactcatgcacctgtttgtcgttcaaatatcttttctttttctttattgggcttttctttatgtttggctgtaggtacggccaatattgcttttgctgatggcattattgctgataaagctgctcctaaaactcaacaagccacgattctgcaaacaggtaacggcataccgcaagtcaatattcaaacccctacttcggcaggggtttctgttaatcaatacgcccagtttgatgtgggtaatcgcggggcgattttaaacaacagccgcagcaacacccaaacacagctaggcggttggattcaaggtaatccttggttggcaaggggcgaagcacgtgtggttgtaaaccaaatcaacagcagccattcttcacaaatgaatggctatattgaagtgggcggacgacgtgcagaagtcgttattgccaatccggcagggattgcagtcaatggtggtggttttatcaatgcttcccgtgccactttgacgacaggccaaccgcaatatcaagcaggagaccttagcggctttaagataaggcaaggcaatgttgtaatcgccggacacggtttggatgcccgtgataccgatttcacacgtattctcagttatcattccaaaattgatgcacccgtatggggacaagatgttcgtgtcgtcgcgggacaaaacgatgtggtcgcaacaggtaatgcacattcgcctattctcaataatgctgctgccaatacgtcaaacaatacagccaacaacggcacacatatccctttatttgcgattgatacaggcaaattaggaggtatgtatgccaacaaaatcaccttgatcagtacggccgagcaagcaggcattcgtaatcaagggcagttgtttgcttcttccggtaatgtggcgattgatgcaaatggccgtttagtcaatagtggcacgatggctgccgccaatgcgaaagatacggataatacagcggaacacaaagtcaatatccgcagtcagggcgttgaaaacagcggtacggcggtatcgcaacaaggcactcaaattcacagtcagtcgattcaaaacactggcacattattgtcctcaggcgaaatattgattcacaattcgggcagcctgaaaaatgaaacatcaggcaccattgaagccgctcgtttggctattgataccgacacacttaataatcaaggcaaactctctcaaacaggttcacaaaaactccatattgatgcacaaggcaaaatggataaccgtggccgcatgggtttacaagataccgcaccaaccgcgtcaaatggttcaagcaatcaaaccggcaatagttacaatgcatctttccattcatccactaccacaccaacaacggcaacaggtacgggtactgcaaccgtttctatatcaaacataactgcgcctacctttgctgatgggacaattcgcactcatggtgcactggataattcaggcagtattattgccaatggtcaaacagatgttagtgcgcaacaaggtttaaataatgcaggacaaatagacattcatcagttaaatgcaaaaggttcggcgtttgacaatcacaatggaacaattatcagtgatgcggtccacattcaagccggcagcctgaataatcaaaatggcaacatcacaacacgccaacagttagagattgaaaccgatcaactggataacgctcatggcaagttattatcagcagaaatagcggatttagccgtttcaggcagcctgaacaatcaaaatggcgaaatagcgaccaatcaacaactgattattcacgatggtcagcaatctaccgctgtcattgataatacgaatggcacgatacaatcaggccgtgatgttgctattcaggcaaaatcgttatccaacaacggcacacttgccgctgataataaactggatattgcgttacaagatgatttttatgtagaacgcaatatcgtggcgggcaatgaattgtcgctcagtacacgaggcagcctgaaaaattcacatactttgcaagcaggaaaacgcattcggattaaagcaaataaccttgataatgcagcacaaggcaacattcaatccggcggtacgacagacattggcacgcagcacaatttaaccaatagaggcttgattgacggacaacaaaccaaaatccaagccgggcaaatgaataatatcggtacaggtcggatttatggcgacaatatcgctattgcggctacccgcttagacaatcaagatgaaaacggtacaggtgccgccattgcggcacgtgaaaacctgaatttaggcatcggacaattaaacaaccgtgaaaacagtctgatttacagcggtaacgatatggcggttggcggcgcattagataccaatggccaagccacaggcaaagcccaaaggatacacaatgccggcgcaaccattgaagctgcaggcaaaatgcgtttaggtgtagaaaagctgcacaataccaatgagcatttgaaaacgcagttggtagaaacagggcgcgagcatattgttgatcacgaagcatttggacgacacgaattattgcgagaaggcacgcaacatgaattaggctggtctgtctataacgatgaatcagaccacttacgcacccctgatggagcggcgcatgaaaattggcataaatacgattatgaaaaagtcacccaaaaaacccaagttacccaaactgcgccagccaaaatcatttcaggtaatgatttaaccattgatggtaaagaagtatttaataccgatagccaaatcattgctggtggcaatctcattgtacaaacagaaaaagacggtttgcataacgagcaaacctttggcgaaaagaaagtattcagtgaaaatggcaaattacacagctattggcgtgagaaacataaaggacgagactcaacgggacatagcgaacaaaattacactttgccggaggaaatcacacgcaacatttcactgggttcatttgcctatgaatcgcatcgcaaagcattaagccatcatgcgcccagccaaggcactgagttgccgcaaagcaacggtatttcgctaccctatacgtccaattcttttaccccattacccagcagcagcttatacattatcaatcctgtcaataaaggctatcttgttgaaaccgatccacgctttgccaactaccgtcaatggttgggtagtgactatatgctggacagcctcaaactagacccaaacaatttacataaacgtttgggtgatggttattacgagcaacgtttaatcaatgaacaaatcgcagagctgacagggcatcgtcgtttagacggttatcaaaacgacgaagaacaatttaaagccttaatggataatggcgcgactgcggcacgttcgatgaatctcagcgttggcattgcattaagtgccgagcaagtagcgcaactgaccagcgatattgtttggttggtacaaaaagaagttaagcttcctgatggcggcacacaaaccgtattggtgccacaggtttatgtacgcgttaaaaatggcgacatagacggtaaaggtgcattgttgtcaggcagcaatacacaaatcaatgtttcaggcagcctgaaaaactcaggcacgattgcagggcgcaatgcgcttattatcaataccgatacgctagacaatatcggtgggcgtattcatgcgcaaaaatcagcggttacggccacacaagacatcaataatattggcggcatgctttctgccgaacagacattattgctcaacgcaggcaacaacatcaacagccaaagcaccaccgccagcagtcaaaatacacaaggcagcagcacctacctagaccgaatggcaggtatttatatcacaggcaaagaaaaaggtgttttagcagcgcaggcaggcaaagacatcaacatcattgccggtcaaatcagcaatcaatcagagcaagggcaaacccggctgcaagcagggcgcgacattaacctagatacggtacaaaccggcaaacatcaagcaacccattttgatgccgataaccatgttattcgcggttcaacgaacgaagtcggcagcagcattcaaacaaaaggcgatgttaccctattgtcagggaataacctcaatgccaaagctgccgaagtcagcagcgcaaacggtacactcgctgtgtctgccaaaaatgacatcaacatcagcgcaggcatcaacacgacccatgttgatgatgcgtccaaacacacaggcagaagcggtggtggcaataaattgattattaccgacaaagcccagagccacaacgaaaccgctcaaagcagcacctttgacggcaggcaagttgtattgcaggcaggaaacgatgccaacatccttggcagcaatgttatttccgataatggcacccggattcaagcaggcaatcatgttcgcattggtacaacccaaactcaaagccaaagcgaaacctatcatcaaacccagaaatcaggattgatgagtgcaggtatcggcttcactattggcagcaagacaaacacacaagaaaaccaatcccaaagcaacgaacatacaggcagtaccgtaggcagcttgaaaggcgataccaccattgttgcaggcaaacactacgaacaaatcggcagtaccgtttccagcccagaaggcaacaatatcatccatgcccaaagcatagacattcaagcggcacacaacaaattaaacagtaataccacccaaacctatgaacaaaaaggcttaacggtggcattcagttcgcccgttaccgatttggcacaacaagcgattgccgtcgcacaaagcagcaaacaagtcggacaaagcaaaaatggtcgtgtcaatgccatggcagctgccaatgcaggctggcaagcctatcaaacaggtaagagtgcacaaaacttagccaatggtacaaccaatgccaaacaagtcagcatctccataacctacggcgaacagcaaaaccgacaaaccacccaagttcaagcaagccaagcccaagcgagtcaaattcaagcaggcggtaaaaccacattaatcgccacaggcgcagcagaacaatccaatatcaacatcgcaggctcagatattgccggcaaagcaggcacaatcctgattgccgataacgacatcacactccaatcagccgagcaaagcaataccgaacgcagccaaaacaaatcgacaggttggaacgcaggtgctgccgtatcattcggacaaggaggctggtcattaggcgttaccgcaggcggcaatgtcggcaaaggctacggcaatggcgatagcgtaacccaccgccatagccatattggcgacaaaggcagccaaacccttatccaaagcggtggcgacactaccatcaaaggcgcgcaagtacgcggcaaaggcgtacaagtcaatgccaaaaacctaagtattcaaagcgtacaagatagagaaacttatcaaagcaaacaacaaaacgccagtgcacaagtgaccgtaggttatggcttcagtgccagtggcgattacagtcaaagcaaaatccgagccgaccatgcttcagtaaccgagcaaagcggtatttatgccggagaagacggctatcaaatcaaggtcggaaaccatacagacctcaaaggcggcatcatcaccagcagccaaagcgcagaagacaagggtaaaaaccgctttcagacggccacccttactaccagcgacattcaaaattacagccaataccaaggaaaaagttttggattgggtgccagcgttgccgtaagcggcaaaacactgggacagggcgcacaaaataaacctcaaaacaaacacctgacaagcgtagccgataaaaacggcgcaagttcatcagtgggttatggcagcgacagcgacagtcaaagcagcatcacgaaaagcggcatcaacacccgcaacatacacatcaccgacgaagcgggacaaatcaggctgacaggcaaaacagcggcacaaaccaaagccgatattgatacaaacgtaaccacagacaccgccgaacgacattcgggcagcttgaagaacaccttcaacaaagaagcggtgcaaagtgaactggatttacaaagggaagtaacccaagagtttgataaaactagacaaggagtgaaacaagaactttatgcagtagtagatagcaaacgagagcaagccacaaaagagagactcaaaaatggtggatatgacaatgataaatctagagcattaaataaggaagctaatgaattagatgaaaaaattcgttggcttgatgcgggattaggactcgtttggggagcagggagttctgatatggcttggagtatgtttgccacaacccaagccgatagagcggtaaggtctgcaactgcacctaaagaaatgtggttccataagaagataatagatgaaaaaacaggtaaagtatcctttgataccagacaaatttggtcattgaatgatttaagcaaggaagaactggcaagcattcaagacacaaatggcaaagttattactgtgtctaatcctggtattttcaataatcgagaagattcattaagcaatgcagcaaaacaaaatcgtaatagtacaaacggtagtggtgttattgcagttatgaatcctccaacagggaaatataaatctgattctaataacaaaataaaagattctttatggctcagttcaagtcttgtttctgaactgatgtatgtcggttacgaccaattaaataataaagtgttccaaggctatttacccaaaaccaattcagaaaaactgaatcaagatatttatcgagaggttcaaaaaatggataatggctggtctgttgataccagtaaccacagtcgtgggggaattacagcaagcgtttccctaaaagattgggtaaacaataaagagcaaaatggcattgccccaatcagaaaagcacgtttctatggtacagccacaaatgtgaagaatgattacgccgatgttttacagaaaaacggctatacctatacgggtgcagacggtaaaacttataacagcggagcctactcaatcgtgcatgataaagattttgtggggaacaaatggatacctttcttgctaggaaccaataacaccacacaaggtgcatgtaaggggttgtgctattcgcatagcagttattttgcggaagtgcctgagcagtatcaaagagatgaaaatgggaatattaaaatggaaaatgggaaacctgttgaaacagaaaactgggaagattacacaaaaaaatggggaatccctaaaacaggtgctgatggtaaatatataaatcatgctattccaaaattagtcaatcccaataatccgaatggagaaaaatatgaaacaaatcctttttaa

SEQ ID NO: 58745 - DNA, 939 bp, Neisseria meningitidis
atgcttgaactgaacggactctgcaaacgcttcggcggcaaaacggttgccgacaacatctgcctgactgtcgggcgcggcaaaatactcgccgttttggggcggtcgggctgcggaaaatccaccctgctgaatataattgcggggattgtccggccggacggcggggaaatatggctgaacggagaaaacattacccgtatgccgcccgaaaaacgccgtatctcgctgatgtttcaagattacgcgctgtttccccatatgagtgcgctggaaaatgcggcattcggtttgaaaatgcaaaaaatgccgaaagccgaagccgaacgcctcgccatggcggcacttgccgaagtcggactggaaaacgaggcgcaccgcaagcctgaaaaactttccggaggcgagaagcaacggctggcgttggcgcgcgctttggttgtccgcccttccctgctgctgttggacgaatcgttttccagtttggacacgcatttgcgcggcacgctgcgccgtatgactgccgaacgtatccgaaacggcggcatccctgccgttttggtaacgcattcgcccgaagaagcctgtacgacggcagacgaaatcgccgtgatgcataaagggaggattctacaatacggtacgcccgaaacattggtcaaaacaccatcctgcgtgcaggtcgcccgactgatgggtttgcccaataccgacgataaccgccatattccgcaacatgcggtgcgtttcgaccaagacggcatggagtgccgcgtattatcccgtacctgtttgcccgaatcgttcagcctgtccgtcctccatccggaacacggcatcctgtggctgaacctcgatatgcggcacgccggggcggtatcgggcaaggatacggtacgcatccatatcgaagaacgggaaatcgtccgcttccgctga

SEQ ID NO: 58746 - DNA, 1455 bp, Neisseria meningitidis; identical to SEQ ID NO: 43531

SEQ ID NO: 58747 - DNA, 1215 bp, Neisseria meningitidis; identical to SEQ ID NO: 50951

SEQ ID NO: 58748 - DNA, 762 bp, Neisseria meningitidis
atgatgggcgattccgtcatttattatgtagaacaggcagacgaaccggtaaaccgtgccggcgaacgcgcccgtaaaacattcaaatacttttggcgcgaacttttttgggaacgccgccgcattattcccgccctggattttgccatggtcaaagtcccttttttccaagacggcgaagacggcgaaatttgcgaacatatgtggatcgacgatatttattttgacggtctttacatttacggtgtgctgaacaatgaacccggcgaactgaccaatatcgaacaaggcgaaagcatttgcgttccggttgacgacatcagcgactggatgttcgtgtgcaacggcattccctacggcggctttaccatacaggcaatgcgcgggcagatgacggaagaggagcgtaccgaacacgatgccgcatggggaatcgatttcggcgatcccgggcaggtattgctggtgtatgaagaaaaagaacatcccgaaaatctggaagagcatccgatgtgccggaactgtattgacgattttcggcaacagttgtcccaaaatccggattttctgcatgagcaggacgaagacggctatacgccgcttcatcatgaagccatcgcaggaaatgcacttatggttcaagccatgcttgaatacggcgcaaatcctgcctcaaagacatcggaaggctataccgccctcgattttgcccgcctgacgggctggcaaaatgttgccgacctgctcgaaccgcgacattag

SEQ ID NO: 58749 - DNA, 465 bp, Neisseria meningitidis; identical to SEQ ID NO: 44908

SEQ ID NO: 58750 - DNA, 1035 bp, Neisseria meningitidis; identical to SEQ ID NO: 42242

SEQ ID NO: 58751 - DNA, 2115 bp, Neisseria meningitidis
atgttcctcttttcagacggcctacaatctattaataacaataatcgacgaaaacgcattgtgaaaaacgcctacatcccctctcgcggcatccgcaaaatcccccatctctccaccctattgcccgagtttcatatctacaaagacggaaaaggagcagaggctgttgtcggctggggtttgcgcccgacgacacacaaagcgcgtgcttttgccaccgaacaccagcttccctttattgctttggaagacggctttttacgctcgctcggactgggcgtctccggttatcccccctactccatcgtctatgacgacatcggcatctactacgacactacccgcccttctcgtttggaacaactgattcttgccgccgataccatgccgtctgaaaccttggctcaggcgcaacagacgatggatttcatcctgcaacaccacctgtccaaatacaaccacgcgcccgaactttcagacgatcatcctttacgctccccatccaagcctgaaactgtcctcattatcgaccaaaccttcggcgatatggccatccaatatggcggcgcagacgcctctacgtttgaactgatgtttcagacggccttgaatgaaaacccgcaagccgatatctgggtaaaaacccatcccgatgttttgtgcggcaaaaaacaaggctatctgacccaactggcgcagcaacaccgcgtccatcttctggcagaagacatcaacccgatttctttgttgcaaaacgtcgataaagtttattgcgttacctcgcaaatgggttttgaggcacttttgtgcggcaagccgctgaccaccttcggcctgccgtggtatgccggatggggcgtgagcgacgaccgccatcctgaaatcaaccgccttgttcaaacccaacgccgcgccacccgcaacttgctgcagctcttcgccgcagcctatctgcaatacagccgctacctcaaccccaataccggcgaagcaggcagcctctttgatgtcatcgactatctggcgacggtcaaacgtaaaaacgacaaattgcgtggcgagttatattgcgtcggtatgtctttgtggaaacgcgcggttgccaaaccgttctttaacgtaccctcttgccgtctgaaatttatctcttccacccaaaaactggcaagggtcaaactgtccgacgatgcacgcatcctggcttggggcaacggcaaagaggccatcgtccgctttgccgaacaacaccacatccccctgctgcgcatggaagacggctttatccgctcggtcggactcggctccaacttagtgccgccgctgtcgctcgttaccgacgatatgggtatttacttcaatgccgaagccccatcccgccttgaacacatcctgcaaaaccaaaacttcgacgatcaagactttcagacggccttgaagttgcaaaaaatgctgaccgaaaaccatatcagcaaatacaacgtcggcaactcagactttaccgccccatcaaccgacaaaaccgtgatcctcgttcccggtcaggttgaggatgatgcgtctatccgctatggttcgccccaaatctatcacaatctggatttgctccgtaccgtacgcgaacgaaaccccaatgcctatatcatctacaaaccgcatcccgatgtagtcagcggtaaccgcatcggccatatttcccctgaagatgctgcacgatatgccgaccaaaccgccgaacaagccgacatcctgacctgtctccaatacgcagacgaaatacataccatgacttcgctgaccggttttgaagccttgttgcgcggcaaaaaagtcagctgctacggcctgcctttttacgcaggctgggggcttacccaagatctgctccccatcccgcgccgtagccgcagacttgagctttggcagctgattgccggcacgctcatccactatcccgactacatccaccccgaaacccatcaggccataaatgcggaaactgcagcccaaatcctgatacgacaaaaaaatatgcaaaaaaacaacaacggattacatcgcgggtactttgctaaaaaattaggtaaaatcaaacaactatatcgatctttcaaataa

SEQ ID NO: 58752 - DNA, 1296 bp, Neisseria meningitidis
atggcacaaaaaatccaatccgtcaaaggcatgaacgaccttctgcctgtcgagcaaaaagatttcaaactgacggctgcgttttggcaggcgtttgaagatacggtcggccgctggacacgcgcttacggttatcggcaaatccgtacgccgattgtcgagcaaaccggtttgtttgtccgctccatcggcgaggaaaccgatgtggtcggcaaggaaatgtacaccttttccgattcaaacgattctttgagtttgagcctgcgtcctgaaggtacggcttcttgtctgcgcgcggtggtcgaacacaaccttctctacaacagcccgcaaaagctgtggtatatggggccgatgttccgccgtgagcgtccgcaaaaaggtcgttatcgtcagttccatcaggtcggtatcgaggctttgggttttgaaggggcggatatcgatgcggaaatcgtcgcgatgtctgccgacttgtgggaaaaattgggtattcgcgaatacctgactttggaaatcaacagcttgggcaaccgtgaggaacgcgcggcacaccgtgcggcattggttgaatatctgacccgttatgaagataaattggatgaagacagcaaacgccgtctgaaaaccaatcctttgcgcgttttggatacgaaaaaccctgatttgcaggaaatctgcaacgcggcgccgcgtctggtggattacttgggcgaggcttcgcaaaaccactatgcacgcttcaaggcgatgttggacggtttgggtatccaatatgttgaaaatccgcgcttggtccgcggtttggattattacaatcagacagtttttgagtggacgaccgataaactcggcgcgcaggcgactgtgtgcggcggcggccgttacgatggtttgattgaagagcttggcggcaaacctgcgccgtctatcggctttgcaatgggtattgagcgcctgctgcttttggtgagcgaatacggctcgctggaagtgaacgctgcgcctgatgtctatgcaatgcaccaaggcgaaggtgcggacttgcaggtgatgaaatacgcgcaagccttgcgcgcgcaaggtttcaatgtaatgcagcattccggctatcaaagcctgaaagcgcaaatgaaaaaagccgacaacagcggcgcgcgctttgccctgattgtcgcgcaagacgaactggcgaacggtacggttacgctcaaagacatgaacggcgcacacggtcagcaaactgtcgccgccgaggatttaacccatactttacaacaatggaagaacgcataa

SEQ ID NO: 58753 - DNA, 1215 bp, Neisseria meningitidis
atgagtgaagttgaatatttctcacactttatatcggacggaaaagggaagcttttagaaattccgcagcgaagaggtaagcaagacggggtttttgttgattggatttcattcacattccatgaagatactttactgaaagtttccggttgccctttattttctgatgctgaatacatgtatgtattaagcagaaagctggaagaaattctaggttttggcataacgcgcaaatgcaaatcaaggggcaacaaattctatgaatccatgtataggttaggttcggatgatgttgattatggagaggtgcatttcggaggtcagcgcaatactgttttagttgagttgaaaggtactggttgcagcgttgcaagtccgggttgggagttgaggctaaagcagtttctcgatgattcgataaggacaagaataacgcgaattgacctagcacttgatttttttgatggagagtacacgccggatcaggcgttgttagatcacgataatggtttttttgataacagcaatcaaaggccgaaatctgaaacgatcggtacggcttggcggaatgaggacgggagcggcaagacattttatgtaggtcgcaagaaaaattctcgttttgttcgtgtttatgagaaaggcaggcagcttggagataaagaaagcaaatgggtaaggttcgagatccagtttaattatggagatatagaaatacccttggatattttaataaatcagggttcgtatttctgtggagcttttccaatttgtagaaaatttaaaaatatgccggttcccgaaaggtttgatcagagaaagaaaaagcttaatttaactttcgagcataaattgcattacgcgaaaaacgcggttggaaaactggtcaatttcatgattgaaatgggttttgataatagcgaaattgtggaatctttaaaggcagattcgggatttcccaaaggattagaacctgaaaaatatgctctggaaatgttaagggacggtttgaaacacggttttattcatgaacagccggatattgatttggaaattgaacttgatgaattgggggttattgcttttaaaaattctgacaaattcgatagggaaaaaaggctttttagtcctgattatgatgtcgagaaagaaaggaaatatcaggaatatttaagtaaagtttatcatcaaaatgtagattatgattatttttaa

SEQ ID NO: 58754 - DNA, 537 bp, Neisseria meningitidis; identical to SEQ ID NO: 44233

SEQ ID NO: 58755 - DNA, 372 bp, Neisseria meningitidis; identical to SEQ ID NO: 42883

SEQ ID NO: 58756 - DNA, 873 bp, Neisseria meningitidis; identical to SEQ ID NO: 54212

SEQ ID NO: 58757 - DNA, 216 bp, Neisseria meningitidis
atgaaagaatacaaagtcgtcatttatcaggaaagcctgttgtccagcctgtttttcggcgcggcaaaggtcaaccccgtcaatttcagcgcgttcctcaacaaacaaacccccgaaggctggcgggttgtaacgatggaaaaagatttgcgccgtatgctgctgtttttcaaacgcgaggcctacgtcgtcattttggagcgggatcgtgtttaa

SEQ ID NO: 58758 - DNA, 666 bp, Neisseria meningitidis
atgacgtttaccgctgtgctcttcgatctcgacggtgtcatcaccgataccgccgaataccattaccgcgcatggaaaaagctcgccgaagaactgggcatcggcatagaccgcaagtttaacgagcagctcaaaggcgtgtcgcgcgacgattcgctcaaacgcatcctcgcgcacggcggcaaaaccgtcggcgaagccgagtttgccgaactgacccgctacaaaaacgacaactacgtcgagatgattcaggcagtcaaacccgaagacgtgtaccccggcattttgccgctgctggaagcattgaaagcaaacggcaaaaaaatcgccctcgcgtccgccagtaaaaacggccccttcctgctcgaacgcatggggctgaccgacttcttcgacgccattgccgaccctgccgccgtcgcgcattccaaacccgcccccgacatcttcctcgccgccgccgagggcgtgggcgcagacatccgccgctgcatcggcattgaagacgccgccgcaggtgtagccgccatcaaagccgccggcgccttgcccatcggcgtgggcaaagccgaggacttgggcagcgacatcgcgctggtgtccggcatcgccgagctgacctacgcctacctgcaaaacgtgtgggcacagtcgggcaggtaa

SEQ ID NO: 58759 - DNA, 324 bp, Neisseria meningitidis; identical to SEQ ID NO: 53749

SEQ ID NO: 58760 - DNA, 264 bp, Neisseria meningitidis; identical to SEQ ID NO: 37542

SEQ ID NO: 58761 - DNA, 324 bp, Neisseria meningitidis; identical to SEQ ID NO: 51379

SEQ ID NO: 58762 - DNA, 342 bp, Neisseria meningitidis; identical to SEQ ID NO: 39758

SEQ ID NO: 58763 - DNA, 1620 bp, Neisseria meningitidis; identical to SEQ ID NO: 51835

SEQ ID NO: 58764 - DNA, 270 bp, Neisseria meningitidis
atggcaatgaacaaattgaatttccttctgctgcttgcggtgtgcgtttccgctttttccgttgtgatgcagcaaaaccagtacaggctcaacttcacagctttggacaaggcgaaaaaacaggaaatcgccttggagcaggattatgcgcaaatgaggctgcaacaggcgcgtttggcgaaccacgaagcgatcagggcggcggcagaaaaacaaaacctccatccgccggtttcgggcaatacctttatggtggagcatcaaagatag

SEQ ID NO: 58765 - DNA, 606 bp, Neisseria meningitidis; identical to SEQ ID NO: 51171

SEQ ID NO: 58766 - DNA, 1170 bp, Neisseria meningitidis
atgagcaaaaaactccatccgcaaacgctcgccatacgcggcggcaaagaacaaaccggataccgcgaacacaatcaggcattgttcctgaccagcagtttcatgtgggacaacgcccaacacgctgccgatttgttttcaaaaaaaatcaaaggcttcacttatacccgtaccgccaacccgaccaccgccgcctttgaaaaacgcatcgccgctttggaaggtgcggaacgcgcggtcgccacttcgaccggcatgtctgcgattcaggcggcgtttttcacctttttgcaggcgggcgaccacgtggtttccagccgcagcctgttcggcacgaccgtcggctttatcaataacatcgttaccaaattcggcatcgaagtgagccacgtgtcgccgactgatataaacgaatggaaagccgccgtcaaagccaacaccaaactgctgtttttggaaacgccgtccaatcccttgggcgaagtggccgacttggaagccttggcggaattggcgcacggcatcggcgcgattttggtggtggacaacagcctgctgtcgcccgtcggctcgcagcctttgaaacacggcgcggatatttccgtttcctccgcgaccaaagccatagacggacacgggcgcgtgatgggcggcgtgttggcgggttcggaagagctgatggcgcaggtcgctatgtattgcaactcttgcgggctggcaatgtcgccgtttaatgcgtggcagttgttgagcggcgtggaaaccctgtcgctgcgtatggaaaaacagttcgacaacgccctgaaaatcgcgcaatggctgcaagcgcagccgcaggttcaagccgtgtactacaccggattgcccgaccatccgcaggcggcgcttatccgcaaacagcaaaacggcggcggcatcgtcatcggctttgaagttgccgaccaagcagccgcgtggaaagtcgtggacggcgtggaactcttttcccgtaccgccaacctcggcgacgtgcgctcgaccatcacccatccgtggacaaccacgcacggcaggatgcagcccgaagaaaaactcgccgccaacatccgccccggattggtgcgcctgtcggtcggtttggaatatgttggcgatttgattgacgatttgaaacaggcactcgcgcgctga

SEQ ID NO: 58767 - DNA, 300 bp, Neisseria meningitidis
atgaaaatatttgaaaatatagaagatgttaaagccatccgtaaaaagaccgggctgaaccagatagacttctggggcaaggtcggcgttacccagtccggaggatcgcgctacgaaaccggccgcaaaatgcccaaacccgtacgcgaactgctccgcctcgtccatatcgaatgcatcgatttagcgaaagtcaacaaaaaagatatggaaatcgccgccctgttgaaaaaacaccatcccgacctgtatgccgaattgtccaaacagaccaagtccgaaagaaaaaaacaaagttaa

SEQ ID NO: 58768 - DNA, 579 bp, Neisseria meningitidis
atgtcaaacacaatcaaaatggttgtcggcttgggcaacccgggcaaagaatacgaacagacacgccacaatgcgggtttttggttcctcgacgaactggcgtggaaatggaaggcttcatttaaagaagaaaaaaaattcttcggcgaagtcgcccgtgctaccctgcccgacggcgatgtctggctgctcaagccgaccacgttcatgaaccgttccggacaggcagttgccgcccttgcgcagttttataaaatcaaacccgaagaaatcctcgtcgtccacgacgaactcgacattccctgcggacggatcaaattcaaactcggcggcggcaacggtggacacaacggcttgaaagacattcaggcaaaactcggcacggcagactattaccgcctgcgcctcggcatcggccacccgggcgaccgcaacctcgtcgtcggctatgtcctgaacaaacccagtacggaacaccgccgacagattgacgatgccgtcgccaaatccctgcaagccatacccgacatccttgccgacaaatgtgaagaggcaacccgcttcctgcacagcaaatga

SEQ ID NO: 58769 - DNA, 192 bp, Neisseria meningitidis
ttgcaaaggtctcgggctttaattgcggcaaaaatagaccaagcggagatttctgattcagaaaaaagctggttgaaaaaagaattagggaaaatcaaggacactgcattaagtacgcttacggaaaatgcaattaatgctatccctgccgccaccctcattactcttttaaaaaaatttgttggcctctaa

SEQ ID NO: 58770 - DNA, 1680 bp, Neisseria meningitidis
atggaaaattttgctcagctgttggaagaaagctttaccctgcaagaaatgaacccgggtgaggtgattaccgctgaagtagtggcaatcgaccaaaacttcgttaccgtaaacgcaggtctgaaatcagaatccctgattgatgtagctgaattcaaaaacgctcaaggcgaaattgaagttaaagtcggcgacttcgttaccgttaccatcgaatccgtcgaaaacggcttcggcgaaaccaaactgtcccgcgaaaaagccaaacgcgctgccgattggattgccctggaagaagccatggaaaacggcaacatcctgtccggcatcatcaacggcaaagtcaaaggcggcctgaccgttatgattagcagcatccgcgcattcctgccgggttctttggtcgacgtacgtcctgtaaaagacacttctcacttcgaaggtaaagaaattgaattcaaagtgatcaaactggacaaaaaacgcaacaacgttgttgtgtcccgccgcgccgttctggaagctaccttgggtgaagaacgcaaagccctgctggaaaacctgcaagaaggctccgtcatcaaaggcatcgttaaaaacattaccgattacggtgcattcgttgacttgggcggcatcgatggtctgctgcacatcaccgacttggcatggcgccgtgtgaaacacccgagcgaagttctggaagtcggtcaagaagtagaagctaaagtcctgaaattcgaccaagacaaacaacgcgtttctctgggtatgaaacaactgggcgaagatccttggagcggcctgacccgtcgttacccgcaaggtacccgcctgttcggtaaagtatccaacctgaccgactacggtgcgttcgttgaaatcgaacaaggcatcgaaggcttggtgcacgtttccgaaatggattggaccaacaaaaatgtacacccgagcaaagttgtacaattgggcgacgaagtcgaagtaatgatcctcgaaatcgatgaaagccgccggcgtatctctttgggtatgaaacaatgccaagccaatccttgggaagaatttgccgccaaccacaacaaaggcgacaaaatctccggcgcggttaaatccattaccgatttcggcgtattcgtcggtctgcctggcggcatcgacggtttggttcacctgtccgacctgtcctggaccgaatccggcgaagaagccgtacgcaaatacaaaaaaggcgaagaagtcgaagccgtcgtattggcaatcgacgtggaaaaagaacgcatctccttgggtatcaaacaactggaaggcgatccgttcggcaacttcatcagcgtgaacgacaaaggttctttggttaaaggttccgtgaaatctgttgacgccaaaggtgctgttatcgccctgtctgacgaagtagaaggctacctgcctgcttccgaatttgcagccgaccgcgttgaagatttgaccaccaaactgaaagaaggcgacgaagttgaagccgtcatcgttaccgttgaccgcaaaaaccgcagcatcaaactttccgttaaagccaaagatgccaaagaaagccgcgaagcactgaactccgtcaatgccgccgccaatgcgaatgccggcaccaccagcttgggcgacctgctgaaagccaaactctccggcgaacaagaataa

SEQ ID NO: 58771 - DNA, 1500 bp, Neisseria meningitidis; identical to SEQ ID NO: 41070

SEQ ID NO: 58772 - DNA, 498 bp, Neisseria meningitidis; identical to SEQ ID NO: 50290

SEQ ID NO: 58773 - DNA, 645 bp, Neisseria meningitidis
atgaagctcaaacatctgttgccgctgctgctgtcggcagtgttgtccgcgcaggcatatgccctgacggaaagggaagactatcttgtgttggataaacccattcctcaagaacagtcgggcaaaattgaggttttggaatttttcggctatttctgcgtacattgccatcatttcgatcctttgttattgaaattgggcaaggcattgccgtctgatgcctatttgaggacggagcacgtggtctggcagcctgaaatgctcggtctggccaggatggcggccgccgtcaatttgtcgggtttgaaatatcaggcaaaccctgctgtgtttaaagcagtttacgaacaaaaaatccgcttggaaaacagggctgttgccggaaaatgggctttgtctcaaaaaggctttgacggcaaaaaactgatgcgcgcctatgattcccccgaagctgccgccgccgcattaaaaatgcagaaactgacggaacaataccgcatcgacagcacgccgaccgttattgtcggcggaaaataccgcgttatcttcaataacggctttgacggcggcgttcatacgattaaagaattggttgccaaagtcagggaagaacgcaagcgtcagacccctgctgtacagaaatag

SEQ ID NO: 58774 - DNA, 219 bp, Neisseria meningitidis; identical to SEQ ID NO: 43520

SEQ ID NO: 58775 - DNA, 1392 bp, Neisseria meningitidis; identical to SEQ ID NO: 50257

SEQ ID NO: 58776 - DNA, 2163 bp, Neisseria meningitidis; identical to SEQ ID NO: 52590

SEQ ID NO: 58777 - DNA, 477 bp, Neisseria meningitidis; identical to SEQ ID NO: 42862

SEQ ID NO: 58778 - DNA, 996 bp, Neisseria meningitidis; identical to SEQ ID NO: 42282

SEQ ID NO: 58779 - DNA, 966 bp, Neisseria meningitidis; identical to SEQ ID NO: 42327

SEQ ID NO: 58780 - DNA, 492 bp, Neisseria meningitidis; identical to SEQ ID NO: 50762

SEQ ID NO: 58781 - DNA, 342 bp, Neisseria meningitidis; identical to SEQ ID NO: 43005

SEQ ID NO: 58782 - DNA, 369 bp, Neisseria meningitidis; identical to SEQ ID NO: 51518

SEQ ID NO: 58783 - DNA, 840 bp, Neisseria meningitidis; identical to SEQ ID NO: 55776

SEQ ID NO: 58784 - DNA, 2130 bp, Neisseria meningitidis
atggcctatcaagttctcgcccgaaaatggcggcccaaaaccttttccgacctagtcggtcaggaacacgtcgtcaaagccctgcaaaatgccttggacgaaggcaggctgcaccacgcctacctgctgaccggtacgcgcggcgtgggcaaaaccaccatcgcccgcatccttgccaaaagcctcaactgcgaaaacgcgcaacacggcgaaccttgcggcgtatgcgaaagctgtacgcagatcgatgccggacgctatgtcgacctgctcgaaatcgacgccgcctccaacacaggcatcgacaacatccgcgaagtcttggaaaacgcccaatacgcgccgaccgccggcaaatacaaagtctatatcatcgacgaagtgcatatgctttccaaaagcgcgttcaacgctatgctcaaaacgctggaagagccgcccgaacacgtcaaattcatccttgccacgaccgatccgcacaaagtccccgttaccgtattaagccgctgcctgcaattcgtcttacgcaatatgaccgcgcagcaggttgccgaccaccttgcccacgtcctcgacagcgaaaaaatcgcctacgccccccccgccctgcaacttttgggacgcgccgccgccggatcgatgcgcgatgccttgagcctgctcgaccaagccatcgccatgggttcgggcagcgttgccgaacaagacgtccgccaaatgatcggtgcggtcgataaacaatacctgtacgaactgctgacaggcatcgtcaaccaagacggcgaagccctgctggcaaaagcacaggaaatggctgcgtgtgccgtcggctttgacaacgccttgggcgaacttgccatactgctgcaacacctcgccctgatacaggcagtgccgaatgccttggcgcacgacgaccccgattccgatattttgcaccgcctcgcccaaaccataagcggcgaacaaatccagctttactaccaaatcgccgtccacggcaaacgcgacctcagcctcgcccccgacgaatacgccggctttatgatgaccctgctgcgtatgctggcgtttgcgcccttggcggcagcatcgtgtgatgcaaatgccgtgattgaaaataccgaactaaaatccccatcggcacaaaccgccgaaaaggaaacctccgcaaaaaagccccaaccgcgccctgaaacggaaaccgcccaaacgcccgttcagacggcatccgcagcggcaatgccgtctgaaggcaaaaccgccgaacccgtttccaatcaagaaaacaacgatgttccgccttgggaagacgcgccggacgaagcccaagccgcagccggcacggcgcaaacgtcggcaaaaagcattcagacggcatccgaagccgaaacgccgcccgaaaaccaagtttccaagaacaaggcagccgacaacgaaaccaatgcccccttgtccgaagtgccgtctgaaaaccccattcagacaacaccgaataatgaagcccttgaaacggaagcatttgcgcacgaagctcctgcaaaacctttcaacggttacagctttccggatgatgactgccccgtagaagacaacgcggaaatcccgccgcccgattgggaacacgccgcccctgccgataccgcaggcggaggcgcggacgaagaagcagaagcagacggcatcggcggaaacaacacaccgtccgccccaccgcccgagttttccaccgaaaactgggcagccatcgtccggcatttcgcccgcaaactcggcgcggcgcaaatgccggcgcaacactccgcgtggacggaataccatcccgacaccggcctgatggttttggcaatgaccgccgaagcacgcgccaccgccgacaaaaaacgtctcgacaaaatccgcgacacccttgcccaagcctacgggctgcaactcaccctgcaaacccaagactggcaggacgaatccggcagagaaacccccgcgatgcaggacaagcgcgtccaagccgaggacaggcaaaaagcacaagcattgctcgaagccgaccccgccgcacaaaaaatcctccaagcattcggcgcgcaatggcagcccgaatcactggaattggcggcaaaccggccataa

SEQ ID NO: 58785 - DNA, 729 bp, Neisseria meningitidis; identical to SEQ ID NO: 45642

SEQ ID NO: 58786 - DNA, 1278 bp, Neisseria meningitidis
atgtttgaacgcagtgtgattgcaatggcttgtatttttgccctttcagcctgtgggggcggcggtggcggatcgcccgatgttaaatcggcggacacgctgtcaaaaccggccgctcctgttgttgctgaaaaagagacagaggtaaaagaagatgcgccacaggcaggttctcaaggacagggtgcgccatccacacaaggcagccaagatatggcggcagtttcggcagaaaatacaggcaatggcggtgcggcaacaacggacaaacccaaaaatgaagacgagggaccgcaaaatgatatgctgcaaaattccgccgaatccgcaaatcaaacagggaacaaccaacccgccgattcttcagattccgcccccgcgtcaaaccctgcacctgcgaatggcggtagcaattttggaagggttgatttggctaatggcgttttgattgatgggccgtcgcaaaatataacgttgacccactgtaaaggcgattcttgtgatggcgataatttattggatgaagaagcaccgtcaaagtcagaatttgacaatttaagtgaatctgaacgaatggagaaatacaagaaagatgggaaaagcgataaatttactggctttgtcgctgataagttacagatgaaagggaccaatcaatatattattttttacaaacctaaaaccacttcatctgcgcgatttaggcgttctgcacggttgaggcggtcgcttccggctgagatgccgctgatccccgtcaatcaggcggatacgctgattgtcgatggggaagcggtcagcctgacggggcattccggcaatatcttcgcgcccgaagggaattaccggtatctgacttacggggcagaaaaattgtccggaggatcgtatgccctcagtgtgcaaggcgaaccggcaaaaggcgaaatgcttgctggcacggccgtgtacaacggcgaagtgctgcatttccatacggaaaacggccgtccgtacccgtccagaggcaggtttgccgcaaaagtcgatttcggcagcaaatctgtggacggcattatcgacagcggcgatgatttgcatatgggtacgcaaaaattcaaagccgccatcgatggaaacggctttaaggggacttggacggaaaatggcggcggggatgtttccggaaggttttatggcccggccggcgaggaagtggcggggaaatacagctatcgcccgacagatgcggaaaagggcggattcggcgtgtttgccggcaaaaaagagcaggattga

SEQ ID NO: 58787 - DNA, 633 bp, Neisseria meningitidis; identical to SEQ ID NO: 42193

SEQ ID NO: 58788 - DNA, 231 bp, Neisseria meningitidis; identical to SEQ ID NO: 44466

SEQ ID NO: 58789 - DNA, 867 bp, Neisseria meningitidis
atgaaaggcatcatactggcaggcggcagcggcacgcgcctctaccccatcacgcgcggcgtatccaaacagctcctgcccgtgtacgacaaaccgatgatttattaccccttgtcggttttgatgctggcgggaatccgcgatattttggtgattaccgcgcctgaagacaacgcctctttcaaacgcctgcttggcgacggcagcgatttcggcatttccatcagttatgccgtgcaacccagtccggacggcttggcacaggcatttatcatcggcgaagaatttatcggcaacgacaatgtttgcttggttttgggcgacaatattttttacggtcagtcgtttacgcaaacattgaaacaggcggcagcgcaaacgcacggcgcaaccgtgtttgcttatcaggtcaaaaaccccgaacgtttcggcgtggttgaatttaacgaaaacttccgcgccgtttccatcgaagaaaaaccgcaacggcccaaatccgattgggcggtaaccggcttgtatttctacgacaaccgcgccgtcgagttcgccaaacagctcaaaccgtccgcacgcggcgaattggaaatttccgacctcaaccggatgtatttggaagacggctcgctctccgttcaaatattgggacgcggtttcgcgtggctggacaccggcacgcacgaaagcctgcacgaggcggcttcgttcgtccaaaccgtgcaaaacatccaaaacctgcacatcgcctgcctggaagaaatcgcttggcgcaacggttggctttccgatgaaaaactggaagaattggcgcgcccgatggcgaaaaaccaatacggccaatatttgctgcgcctgttgaaaaaataa

SEQ ID NO: 58790 - DNA, 693 bp, Neisseria meningitidis
atgaccgcctttgtccacaccctttcagacggcatggaactgaccgtcgaaatcaagcgccgtgccaagaaaaacctgattatccgccccgccggcacacataccgtccgcatcagcgtcccaccctgcttctccgtctccgctctaaaccgctggctgtatgaaaacgaagccgtcctgcggcaaacactggcgaaaacaccgccgccgcaaactgccgaaaaccggctgcccgaatccatcctcttccacggcagacagcttgccctcaccgcccatcaagacacgcaaatcctgctgatgccgtctgaaatccgtgttcccgaaggcgcacccgaaaaacagcttgcgctgctgcgggactttttggaacggcaggcgcacagttacctgattccccgcctcgaacgccacgcccgcaccacacaactgttccccgccccctcctcgctgacctctgccaaaaccttctggggcgtgtgccgcaaaaccacaggcatacgcctcaaccggcggctggtcggcgcaccggaatacgttgccgattatgtctgcatacacgaactctgccacctcgcccacgccgaccacagccgcgcgttctgggcactgacccgccgcttcgcaccctacacgcccgaagcgaaacagtggctcaaaatccacggcagggaacttttcgccttaggctga

SEQ ID NO: 58791 - DNA, 2004 bp, Neisseria meningitidis
ttggtatcggtgttggggtttcatggtttttatacggatttgcgccatttaagggcgcgtttttctttgtcgcttaaaggcgcaacattggcggatttggtacggtttgctaatagcatgaatttaaccgctcgggctgttcggttggatttagatgagttagcaaatttgcgcgtaccctgtattttgcattgggatttaaatcattttgtggtgttgcatgaagttcatcgcaatcacattatgattatgaaccctgcttcgggttggcaaaaagtgcgtatggaagaagtctcgcgctgttttacaggtgtagcgttggaactatttcctaacacgcaatttgaagagaaacacgaaacgcgtaaaattcgcgtactaccgatgttgcgcggagtggtgggattaaaaaggtctttatttcagcttctgctgctggcggcagtattacaggtgtttgctttggcaagccctttttttatgcaatgggtaatagaccatgccattgtatcggcagaccgtgatttattgatgacattggcattgtgttttggcttgttgatgattgtgcggcagttagtgtcattgttgcaaacttgggcgggtatgtacttatctacctctttgaatattcaatggaaagctaatgtattacgccgcttaatggatttgcctgtttcttatttcgctaaacgacatttgggcgatgtggtttcacgttttggctcagtggacagtattcaaagtacgctcacttctactttctttgtgttggtgctcaacagcattatggcggtatttacattagggttgatgtatttgtatagcccaagtttaacgacagttgtactggttgttttgctgatttatattggtattcgttgggtggcatattatccattacgccatgcaactcaagaaaatattgttcatgctgccaagcagagcagttatttcatggaaaccatacgtggtattcaaactgttaaattatttgataaaaatgcacaacgccatgcggcttggctgaacttgtttattgacacgattaacacaggtttaatgacacaaaaactttccgcgctgttcggttttacgaatggccttttgtttggtatcgctaatattttaattgtgtattttggtgcggtttctgtattgaacggtggttttaccgttggggcgttaatggcgtttatgtcctacaaaagtcagtttgagagtaaagcaggttcattgattgaccagtttgtacaaatcaaaatgctaggattacacgcggaacgcttggcggatattgtgctagaagaaacggaaaatgaacaaaacaacgatttcagtctgcctaaaaatttagaacattttgatattcaaatagaaaatgtatcatttagctatgctgaaaatgaaccatacattttgcaaaatttcagtttaatcatcaaacaaggaacagccattgcgtttgctggacattcaggctgtgggaaatctacgctcattcaaattctgacaggcagtctgaaacctgaaagcggtcatgtgttattaggtgggcatgacattcatgcgttaccacctgcatttatccgcacatggagcgcaagtgtgatgcaaaatgatgtgttatttactggctcaatcgcagaaaacatcagtttttttgatgatacgcccaatatggaaaaaatcgcattttgcgctcaaatggcgaatattcatcatgaaattgtcgctatgcctatggcgtatgaaacattgattggcgacatggggagtgcattgagtggtgggcaaaagcagcgcatcgtactagctcgtgctttatatcgtgaaccaaaaattttgtttttagatgaagccagtagccatttggacatcaacaatgaacgtgtgattaacgataatctacgccaactcaacattaccaaaatcatggtcgcgcatcgtcaggaaactttaaatactgctgatagcgtagtttatttagacaaggtagcctga

SEQ ID NO: 58792 - DNA, 144 bp, Neisseria meningitidis
ttggatgatgccgcgaatatcatccatacggttaccccaccaatttttattggtgtatcgttaatcatttatttcaaaaaagttatttattatcatattatcagggagcaggtcgttaaaaaaaaacccctcaaattccattaa

SEQ ID NO: 58793 - DNA, 567 bp, Neisseria meningitidis; identical to SEQ ID NO: 45282

SEQ ID NO: 58794 - DNA, 363 bp, Neisseria meningitidis; identical to SEQ ID NO: 43221

SEQ ID NO: 58795 - DNA, 1194 bp, Neisseria meningitidis; identical to SEQ ID NO: 50631

SEQ ID NO: 58796 - DNA, 516 bp, Neisseria meningitidis; identical to SEQ ID NO: 42639

SEQ ID NO: 58797 - DNA, 246 bp, Neisseria meningitidis; identical to SEQ ID NO: 39751

SEQ ID NO: 58798 - DNA, 1245 bp, Neisseria meningitidis
atgtccaacgaaaaccgtacttgttccttttgcggaaaatccaaatcacacgtcaaacatttaattgagggcgaaaacgcctttatctgtgacgaatgcgtctcaaactgtattgaaatattgcatgaagacggaaatgacggcacgccttcggaaagtgccggaggggagccggaagaatccggcaagctgcccacgcccgccgaaatcgtcgccaacctcaacgaccacgttatcggtcaggaacaagccaagaaagccttggcggtgtcggtgtacaaccattacaaacgcctgcgccatcctaaagcaggagctaatgtcgaattgtcgaaatccaacatcctgcttatcggcccgaccggatcgggtaaaaccctgctggcgcaatctttggcgcgcaaactggatgtgccgttcgtgatggcggatgccacaactttgactgaagcaggttatgtcggcgaagacgtcgagcaaatcattaccaagcttttgggcaaatgtgatttcgatgtcgaaaaagcccagcgcggcattgtctatatcgacgaaatcgataaaatttcacgcaaaagcgacaacccgtcgattacccgcgacgtatccggcgaaggtgtgcaacaagccttgttgaaactgattgaaggtacagtggccagcgttccgccccaaggcggccgcaagcatccgaatcaggaatttatcaacgtcgataccaccaacatcctgtttatctgcggcggcgcgtttgcaggcttggaaaaagtcatccgccagcgtactgaaaaaggcggtatcggtttcggtgcgtccgttcacagcaaggacgaaaatgccgacattaccaagctgttcggcatcgtcgaaccggaagacttgattaaattcggtctgattccagaattaatcggacgtttgcctgtgattgcaactttagaagaattggacgaagacgcgctgattaatattttgaccgagccgaaaaatgctttggtcaagcagtatcaggcgttgttcggtatggaaaatgtcgaactggagtttgaagaaggcgcattgcgttccatcgcacgtcaggcaatggaacgcaaaaccggcgcgcgcggcctgaggtccatcgtcgaacgctgcctgctcgatacgatgtaccgcctgcctgatttgaaaggcttgaaaaaagtggtggtcggtaaggcagtcatcgaagagggcagggaaccggaattggtgttcgagtcctga

SEQ ID NO: 58799 - DNA, 564 bp, Neisseria meningitidis
atgccttggaatctccccatcttcctcacatggttgagggtcttgctcattcctgtcatgacagcccttttttacctgccttttccgtggttcgcggaggaaacgattaatctcaccgccgccgtcatttttgccgttgccgccttgaccgactggtttgacggatttttggcaaggttgtggaaacagacctcggatttcggcgccttcctcgatcccgttgccgacaagctgatggtcgccgtctctttgcttttactggtcaaactcgaccggacctatgttttgtttgccatgatcatcatcggcagggaaattaccatttccgcattgcgcgaatggatggcgcaaatgggcaaaaggaacagcgttgccgtcgccaccgtcggtaagtttaaaaccgccgcgcaaatgctggcaattttcctgctgctgctgaatattcccgatttttacggatttaatcttgttgttatcggcaacatattgatgtttatcgcatctttgctgacagtctggtcgatgctgtattatctgaaaatggcgtggaaagaaatcgcctga

SEQ ID NO: 58800 - DNA, 567 bp, Neisseria meningitidis; identical to SEQ ID NO: 43403

SEQ ID NO: 58801 - DNA, 627 bp, Neisseria meningitidis; identical to SEQ ID NO: 42121

SEQ ID NO: 58802 - DNA, 1662 bp, Neisseria meningitidis; identical to SEQ ID NO: 42890

SEQ ID NO: 58803 - DNA, 1362 bp, Neisseria meningitidis
atgggcaatgtcgaagtcccgtccgaagcctattggggcgcgcagacccagcgcagccgcaacaatttcaaaatcggcggcgaaaccctgccgcagccgctgatttatgctttggcgctggtgaaaaaagccgctgccgccaccaatgtttccctcggcaggattaagcccgaacaggcggatttgattacgcaggcggcggatgatgtgttgaacggcaggcttgacggacagtttcctttagtggtttggcagaccggctccggcacgcagtccaatatgaacatgaacgaagtgctggcgaaccgcgccaacgaaattgcaggtacaggtttggcggcgtatcagcccgtccatcccaacgaccatgtgaaccacgcgcaatcgaccaacgacgcattcccgaccgccatccacgttgccgccgcgattgaaatcaaccgccacctcatccccgccgtaaaagccctgcgcgacacgttggacaaaaaagcccaagctttcgcccctatcgtcaaaatcggccgcacccacttgcaagacgcgacgccgctgactttgggacaggaattttccggctacgtttcccagcttgatcacggtttaggccgtctgaacgatgcgcttaaagacttgtatgaacttgctttgggcggtacggcggtcggcacgggtttgaacagccatcccgaatacgccgaaaaagctgctgctaaactcgccgaactgtctggcttgccgtttgtcagcgcgccgaacaaatttgaagccttaggcggacgcgatgccgccgttgccgcttcgggcgcattgaaaacgctggcggcaagcctgaataaaatcgccaacgacatccgctggctggcaagcggcccgcgttgcggtttgggcgaaatcaaaatccccgaaaacgagccgggttcgtccatcatgccgggcaaagtcaacccgacccaatgcgaagcaatgacgatggtgtgctgccaagtgttcggcaacgacgttaccatcggtatggcgggcgcgtcgggcaatttcgagctgaacgtctatatgcccgttatcgcctacaacctcttgcaatccatccgcctcttgggcgacgcgtgcaacagcttcaacgaacactgcgccgtcggcatcgaacccgtaccggaaaaaatcgactatttcctgcaccattccctgatgctcgttaccgcgttgaaccgcaaaatcggttacgaaaacgccgccaaagtcgccaaaaccgcctacaaaaacaacaaatcgttgcgcgaaaccgccgttgagctgggcttgctgacgggcgaagaatttgacgaactggtcgttcctgccgatatggttcatccgcgctaa

SEQ ID NO: 58804 - DNA, 456 bp, Neisseria meningitidis; identical to SEQ ID NO: 39491

SEQ ID NO: 58805 - DNA, 285 bp, Neisseria meningitidis; identical to SEQ ID NO: 42100

SEQ ID NO: 58806 - DNA, 663 bp, Neisseria meningitidis; identical to SEQ ID NO: 37498

SEQ ID NO: 58807 - DNA, 378 bp, Neisseria meningitidis
atgacccaattcaggcctattctgaatcaggcgaatattaccgatcagcaatggcggattatccgtcttttggcggaaaacggcacgctggactttcaagatttggcgaatcaggcgtgtattctgcgccccagcctgaccggtatcctgacccgccttgaaaaagcgggtttggtcgtccgcctgaaaccttccaacgaccaacgacgtgtttttctgaagctgactgccgagggcgagaagctgtatgaggaaatcggcgaagaagtggacgagcgttacgacgctatcgaggaagtgctgggccgcgagaaaatgctgctgcttaaagacctgttggcagaacttgccaaaatcgaggatgcgttgaactcgtaa

SEQ ID NO: 58808 - DNA, 246 bp, Neisseria meningitidis; identical to SEQ ID NO: 53977

SEQ ID NO: 58809 - DNA, 390 bp, Neisseria meningitidis
atgtccaaaaccatcatccacaccgacaaagcccccgccgccatcggcgcgtacagccaagccgtccgagcaggcgacaccgtttacatgagcggtcaaatccccctcgatcccgccaccatgaccgttgtcggcaacggagacttccgcgccgaagcgcgccaggtctttaaaaacctgcaggccgtcgccgaagcggcaggcggttcgctggccgacatcgtcaaactcaacgcctatctgaccgaccttgccaacttcgccgtcttcaacgaagtgatggcggaatttatcgccgagcccttccccgcccgcgccgccgtcggcgttgcctcgctgcccaaaggcgtgcaggtcgaagccgaagccgtcctcgttttgaacgcataa

SEQ ID NO: 58810 - DNA, 1257 bp, Neisseria meningitidis; identical to SEQ ID NO: 43860

SEQ ID NO: 58811 - DNA, 792 bp, Neisseria meningitidis; identical to SEQ ID NO: 51732

SEQ ID NO: 58812 - DNA, 789 bp, Neisseria meningitidis; identical to SEQ ID NO: 43877

SEQ ID NO: 58813 - DNA, 1173 bp, Neisseria meningitidis; identical to SEQ ID NO: 58674

SEQ ID NO: 58814 - DNA, 780 bp, Neisseria meningitidis; identical to SEQ ID NO: 50489

SEQ ID NO: 58815 - DNA, 372 bp, Neisseria meningitidis; identical to SEQ ID NO: 51227

SEQ ID NO: 58816 - DNA, 957 bp, Neisseria meningitidis
atgaatataatcgggctggacatctcaaaggacaccatagacgcaacattgcataaaacaaacggaagtatccattacattaaatttaagaataatgatgatggattaaaacagtttagattgtggataaagggaaacagaatcagaaaagtctatatcggcatggaggcaacaggcatctattacgaaaaggcagcagatatgctttcttcctactatactgtttacgttattaatcccttaaaaatcaaggactacggaaaaagcaggtttaaccgtaccaaaaccgacaaagcagattcaaacctgatagcagactacataaaaaggcatcaagatacattgataccgtatcagatacccaaaaacaaagcactgcaaaaactgattaaccttaaaaatcaattacatcaacatcagaagcaaattaaaaaccgtcttcatagcactgaagaagacttcataaggaacatacatcaagacttgatagataccatacaggacaagatggaacaggtaaaaatagccatatccgaacaaatcaaaaaacaaacggacaataaccattaccgcaatcttcaaaccatcccgagcataggcaaagacaccgcatcagttctttatgcgcaactgacagaaaaacattttaaaaccgcaaaccagtttgtatcctatgccggattaagtcccgccatcatacaatcagggacaagcgtaagaggtcggggcagattgagccgatacggaaacagacgattaaaaagtacgctgtatatgcccgccctttgtgcttaccgttttaacgcatttccgaaattaataaataatctgaaaaaagcgggtaagccaaagatggtaatcatcgttgccatcatgcgcaaactggcgaagctcgcctattacattgttaaaaccggccagccttacgatgcggaaagacaccgattgaatcaataa

SEQ ID NO: 58817 - DNA, 285 bp, Neisseria meningitidis; identical to SEQ ID NO: 42100

SEQ ID NO: 58818 - DNA, 138 bp, Neisseria meningitidis; identical to SEQ ID NO: 40349

SEQ ID NO: 58819 - DNA, 2037 bp, Neisseria meningitidis
atgactgacaacgcactgctccatttgggcgaagaaccccgttttgatcaaatcaaaaccgaagacatcaaacccgccctgcaaaccgccattgccgaagcgcgcgaacaaatcgccgccatcaaagcccaaacgcacaccggctgggcaaacactgtcgaacccctgaccggcatcaccgaacgcgtcggcaggatttggggcgtggtgtcgcacctcaactccgtcgccgacacgcccgaactgcgcgccgtctataacgaactgatgcccgaaatcaccgtcttcttcaccgaaatcggacaagacatcgagctgtacaaccgcttcaaaaccatcaaaaactcccccgagttcgacaccctctcccccgcgcaaaaaaccaaactcaaccacgatctgcgcgatttcgtcctcagcggcgcggaactgccgcccgaacagcaggcagaactggcaaaactgcaaaccgaaggcgcgcaactttccgccaaattctcccaaaacgtcctagacgcgaccgacgcgttcggcatttactttgacgatgccgcaccgcttgccggcattcccgaagacgcgctcgccatgtttgccgccgccgcgcaaagcgaaagcaaaacaggctacaaaatcggcttgcagattccacactacctcgccgtcatccaatacgccgacaaccgcgaactgcgcgaacaaatctaccgcgcctacgttacccgcgccagcgaactttcagacgacggcaaattcgacaacaccgccaacatcgaccgcacgctcgcaaacgccctgcaaaccgccaaactgctcggcttcaaaaactacgccgaattgtcgctggcaaccaaaatggcggacacccccgaacaagttttaaacttcctgcacgacctcgcccgccgcgccaaaccctacgccgaaaaagacctcgccgaagtcaaagccttcgcccgcgaaagcctcggcctcgccgatttgcaaccgtgggacttgggctacgccagcgaaaaactgcgcgaagccaaatacgcgttcagcgaaaccgaagtcaaaaaatacttccccgtcggcaaagtattaaacggactgttcgcccaaatcaaaaaactctacggcatcggatttaccgaaaaaaccgtccccgtctggcacaaagacgtgcgctattttgaattgcaacaaaacggcaaaaccataggcggcgtctatatggacctctacgcccgcgaaggcaagcgcggcggcgcgtggatgaacgactacaaaggccgccgccgtttttcagacggcacgctgcaactgcccaccgcctacctcgtctgcaacttcgccccacccgtcggcggcagggaagcccgcctgagccacgacgaaatcctcatcctcttccacgaaaccggacacgggctgcaccacctgcttacccaagtggacgaactgggcgtatccggcatcaacggcgtagaatgggacgcggtcgaactgcccagccagtttatggaaaatttcgtttgggaatacaatgtcttggcacaaatgtcagcccacgaagaaaccggcgttcccctgccgaaagaactcttcgacaaaatgctcgccgccaaaaacttccaacgcggcatgttcctcgtccggcaaatggagttcgccctctttgatatgatgatttacagcgaagacgacgaaggccgtctgaaaaactggcaacaggttttagacagcgtgcgcaaaaaagtcgccgtcatccagccgcccgaatacaaccgcttcgccttgagcttcggccacatcttcgcaggcggctattccgcaggctattacagctacgcgtgggcggaagtattgagcgcggacgcatacgccgcctttgaagaaagcgacgatgtcgccgccacaggcaaacgcttttggcaggaaatcctcgccgtcggcggatcgcgcagcgcggcagaatccttcaaagccttccgcggccgcgaaccgagcatagacgcactcttgcgccacagcggtttcgacaacgcggtctga

SEQ ID NO: 58820 - DNA, 540 bp, Neisseria meningitidis; identical to SEQ ID NO: 47703

SEQ ID NO: 58821 - DNA, 1539 bp, Neisseria meningitidis
atgttccattccatcgaaaaatacagaacgcccgcccaagtccttttgggcctgattgcattaaccttcgtcggcttcggggtcagcacggtatcccatccgggtgccgactacatcgtccaagtgggcgacgaaaaaatcagcgaccactccatcaacaacgccatacagaacgaacaggcggacggcggcggcccttcgcgcgacgcggtgttccaatccctgctgcaacgcgcctacctgaaacagggcgcgaagctgatgggcatttcggtttcttccgaacaaatcaagcagattatcgtggacgatcccaatttccacgacgcaaacggcaaattcgaccacgcgcttttaaaccgctacctttcccaacgccatatgtctgaagaccagtttgtcgaagaaatccgcgatcagtttgccttgcagaatttggtaaacctcgtccaaaacagcgtattggtcggcgacgcgcaggcggaacagctgatcaggctgacgcaggtcaaccgcaccatccgttcgcacactttcaaccccgacgaattcatcgcccaagtcaaagtgtctgaagccgatttgcagaagttttataacgcaaacaaaaaagactacctgcttcccaaagcggtcaaattggaatatgtcgccttgaatctgaaagactttgcagacaaacagaccgtcagcgaaacagaagtgaaaaatgcgtttgaagagcgcgtggcgcgtttgccggcaaatgaagccaaaccttctttcgagcaggaaaaagccgccgtcgaaaacgaattgaaaatgaaaaaggcggttgccgacttcaataaggcaaaagaaaagctgggcgatgacgcgttcaaccatccttcctcgcttgccgaagccgccaaaaacagcggtttgaaagtcgaaacccaagaaacttggctgagcaggcaggatgcgcaaatgtccggtatgcccgaaaacctgatcaatgccgtattcagcgacgacgtattgaagaaaaaacacaattccgaagtgctgaccatcaacagcgaaaccgcgtgggtcgtccgcgccaaagaagtccgcgaagagaaaaccctgccgtttgccgaagccaaagacgcggtacgtcaggcttatatccgtaccgaagccgccaaacttgccgaaaacaaggcaaaagacgtgcttacccaactgaacggcggcaaggctgttgacgtgaaatggtcggaagtgtccgttttgggcgcgcagcaggcaaggcagtccatgccgcccgaggcttatgcggaactgctgaaagcaaaaccggcaaacggcaaacccgcctacgtcaggctgatcggtctgccggcacccgtgattgtcgaagtacaggctgtaaccccgccggatgatatcgccgcacagcttccgcttgcaaaacaggctttggcgcaacagcagtctgccaatactttcgacttgttgatacgttatttcaacggcaaaatcaaacagaccaaaggagcgcaatcggtcgacaacggcgacggtcagtaa

SEQ ID NO: 58822 - DNA, 411 bp, Neisseria meningitidis
atgcctgtctatttccgcaccccaagcaggaaacgcctgcacaaaatgaaccgccgccagcataaaaagctacatttgggcgagtttcaaacattgattttcggcgttcaaggcagtttgcaccaagctgaggacgatgccgaagcgttcggccgctttatggacgagctgattgcgtatcttgcggtaaacggcttagaaatggcgggcgggggcgattgcggcgatttttcgtgcctgtttcaaaaatccggcaccagaagcttgggcgaaaccgagaaaaaagccattatctcttggctggcaggtcgcgaagatgtcgccactttgtacgccaccccgctggttgacggtttttacggggatgacggctgggaaagttacagcgaaacctataaacaggcagattaa

SEQ ID NO: 58823 - DNA, 468 bp, Neisseria meningitidis; identical to SEQ ID NO: 42615

SEQ ID NO: 58824 - DNA, 1518 bp, Neisseria meningitidis
atgttgtatttcagatacggctttttggttgtttggtgtgcggcaggtgtttctgccgcctatggggcggatgcgcctgcaattttggatgacaaagctttgtcgcaggtgtggcggtcggtgtcggataaatgggcggaatcggattggaaagttgaaaatgatgccccgcgcgtggttgacggggattttttgttggcgcacccgaaaatgttggaacatagtttgcgcgacgcgctcaacggcaatcaggcggatttaatcgcttcgttggcggatttgtatgccaagctgccggattatgatgcagttttgtacggcagggcgcgggctttgctggcgaaattggcgggaaggccagcggaggcggtggcgcggtatcggaagctgcacggggaaaatgcggcagacgagcggattttgctggatttggcggcggcggagtttgacgatttccggctgaagtcggcagaaaggcattttgccgaggcggaaaaattggatttgccggcgccggttttggaaaatgtggggcgttttcggaaaaaagcggaggggctgacgggctggcgtttttcgggcggtatcagcccggcggtcaatagaaatgccaataatgccgcgccgcagtattgctggcaaaacggaggccggcagatatgcagtgtcagccgggcggagcgggcggcagggttgaattatgaaatcgaggcggaaaagctgacggcgttggcggacaatcattatttgttgttccgttccaatatcggcggcacgagctattatttcagtaaaaaatcagcttatgatgacgggttcggcagggcgtatttgggttggcagtataaaaatgcgcggcagacggcggggattttgccgttttatcaggtgcagttgtcgggcagcgacggctttgatgcgaaaacaaaacgggtaaacaaccgccgcctgccgccgtatatgctggcgcacggagtcggcgtgcagctgtcccatacttaccgaccaaacccgggatggcaattttcggtcgcgctggaacattaccgccaacgctaccgcgaacaggatagggcggaatacaataacggcaggcaggacgggttttatgtttcgtcggcaaaacgtttgggcgaatcggcaactgtgttcggcggctggcagtttgtgcggtttgtgccgaaacgcgaaacggtgggcggcgcggtcaataatgccgcctaccggcgcaacggtgtttatgccggctgggcgcaggagtggcggcagttgggcggtttgaacagtcgggtttccgcgtcttatgcccgccgcaactataagggcgttgcggctttctcgacagaggcgcaacgcaaccgcgaatggaatgtctcgctggctttgagccacgacaagttgtcgtataaaggtatcgtgcccgcgttgaattatcgtttcggcaggacggaaagtaatgtgccgtatgcgaaacgccgcaacagcgaggtgtttgtgtcggcggattggcggttttga

SEQ ID NO: 58825 - DNA, 471 bp, Neisseria meningitidis; identical to SEQ ID NO: 55860

SEQ ID NO: 58826 - DNA, 612 bp, Neisseria meningitidis; identical to SEQ ID NO: 51707

SEQ ID NO: 58827 - DNA, 519 bp, Neisseria meningitidis; identical to SEQ ID NO: 37817

SEQ ID NO: 58828 - DNA, 990 bp, Neisseria meningitidis
atgagcaccttcttccggcaaaccgcccaagccatgattgccaagcacatcgaccgtttcccgctattgaagttggaccaggtgattgattggcagccgatcgaacaatacctgaatcgtcaaaaaacccgttaccttagagatcaccgcggccgtcccgcctatcccctgttgtccatgttcaaagccgtcctgctcggacaatggcacagcctctccgatcccgaactcgaacacagcctcattacccgcatcgatttcaacctgttttgtcgttttgacgaactgagcatccccgattacagcaccttatgccgctaccgcaactggctggcgcaagacgacaccctgtccgaactgttggaactgattaactgccaactgaccgaaaaaggcttaaaagtagagaaagcatccgccgccgtcattgacgccaccattattcagaccgctggcagcaaacagcgtcaggccatagaagttgacgaagaaggacaaatcagcggccaaaccacaccgagtaaggacagcgatgcccgttggatcaagaaaaacggcctctacaaactcggttacaaacaacatacccgtaccgatgcggaaggctatatcgagaaactgcacattacccccgccaatgcccatgagtgcaaacacctgtcgcctttgctggaagggatagccgaaggtacgaccgtctatgccgacaaaggctacgacagtgcggaaaaccggcaacatctggaagaacatcagttgcaggacggcattatgcgcaaagcctgccgcaaccgtccgctgacggaggcacaaaccaaacgcaaccgttatgtggtcgaacaaagcttcggtacgctgcaccgtaaattccgctacgcccgggcagcctatttcggactgattaaagtgagtgcgcaaagccatctgaaagcgatgtgtttgaacctgttgaaagccgccaacaggctaagtgcgcccgctgccgcctaa

SEQ ID NO: 58829 - DNA, 1011 bp, Neisseria meningitidis
atgtccatcaaaatcctgattatttctcccagttggataggcgactgcgtgatgacccagcccttgttccgccgtttgaaggaacttcaccccggttgcacgattgatgtgttcgcaccgaagtggtcgatggcggtgttcgagcgtatgccggaagtgaatgaaattcttgaaaatccgttcggacacggtgcgttggagttgaaacgccgttggcgggtcggtagggatttggggcggcgcggatacgatcaggttattgtgttgcccggttctttgaaatcggcaatcatcgcgctggcgacaggtatcggtaaaaggacgggttatgtcggtgaaagccgttattttctgttgaacgatatacgcaggctggataaggaacgtctgcctttgatggtggacagatatacggctctcgcgcatccgagccaggaggattttgacgggcattcgggattccccgagttttccattgatgaacggcggcgggaaatttctgtcgaaacctttggcttggatattggaaagcctgttctggctttttgtccgggtgcggaattcgggccggcaaagcgttggccgacaaggtattttgccgagttgggcaaacattattcggcggcgggttggcaggtttggctgttcggttcgcaaaaagatgatgaaattgccgaggaaatcaactgcctttcagacggtatgtgtgtgaatttatgcggaaagaccgatttgtcgcaggcaatggatttgctgtcgttggcggacacggtcgtgtgcaacgacagcgggctgatgcacttggcggcggcattgggcaggaaggtggtggcggtttacggttcttccagcccgacgcatacgccgcctttgagcgacagggcgaaaatcgtcagcctgcacttggaatgttcgccctgttttaagcgggaatgtccgctggggcataccgactgcctcaacaggctgtatcccgagaagattgtgcaggcggttgaagaggcggtatga

SEQ ID NO: 58830 - DNA, 1407 bp, Neisseria meningitidis
atgaacgattacacagctatgccgtctgaagaccgtgaggtcggcgcattgtcgctgcctccacattcgatggaggcggaacaatccgttttgggcgggttgatgctggaaaatccggcttgggacaggattgccgatgtggtttccggtgaagacttctaccgccacgaacaccgcctgattttccgatccattgccaaattaatcaatgagagccgtcccgcagatgtgattacggttcaggaagatttgcagcggaacgaagaattggaagcggcaggcggattcgaatatctgattacgctggcgcaaaacaccccgtctgccgccaacatccgccgctacgccgaaatcgtgcgcgagcgttccattatgcgccaactcgccgaagtggggacggaaatcgcccgcagcgcctacaatccgcaaggcagggacgcggggcagcttttggacgaggcggaaaacaaagtattccaaatcgccgaaagcaccgccaaatccaagcagggctttttggagatgcccgatttgctgaaagaagtcgtacagcgcatcgatatgctctactcgcgcgacaatcccgatgaagttaccggcgtgccgacggggttcatcgacctcgacaaaaaaacctcgggtctgcaacccggcgacctgattatcgttgccggtcgtccgtctatgggtaagaccgccttttccatcaatatcgccgaacacgttgccgtagaaggcaagctgccggttgccgtcttctcaatggagatgggcggtgcgcaactggtcatgcgtatgctcggctcggtcggacgcttggatcaaagcgtcctgaaaaccggcaggctcgaagacgaacactggggtcgtctgaacgaagcagtcgtcaaactctccgacgcgcccgtgtacatcgacgagaccccgggtttgactgcgctcgaactgcgcgcccgcgcccgccgtctcgcccgtcaatttaacaataagctgggattgatcgtcatcgactacctgcaactgatggcgggatccggccgttccgacaaccgagcttcagagctgggcgaaatttcacgttcgctcaaagcgttggcgaaagaattgcaagtccccatcatcgccctgtcgcaactgagccgcacggtcgaatcgcgtaccgacaaacgcccgatgatgtccgaccttcgcgagtccggcgcaatcgagcaggatgccgacctgattatgttcatgtaccgcgacgaatactacaaccaggactcacccatgaaaggccttgccgaatgtatcatcggcaaacaccgcaacggtcccgtcggtaaaatcttcctcacatggacgggacaattcaccaaattcgacaatgctgcctatattcccgaggaggcaaagatagaggattaa

SEQ ID NO: 58831 - DNA, 651 bp, Neisseria meningitidis; identical to SEQ ID NO: 49015

SEQ ID NO: 58832 - DNA, 1458 bp, Neisseria meningitidis; identical to SEQ ID NO: 50942

SEQ ID NO: 58833 - DNA, 966 bp, Neisseria meningitidis
gtgaaaccgcgtttttattgggcagcctgcgccgtcctgctgaccgcctgttcgcccgaacctgccgccgaaaaaactgtatccgccgcatccgcatctgccgccacactgaccgtgccgaccgcgcggggcgatgccgttgtgccgaagaatcccgaacgcgtcgccgtgtacgactgggcggcgttggatacgctgaccgaattgggcgtgaatgtgggcgcaaccaccgcgccggtgcgcgtggattatttgcagcctgcatttgacaaggcggcaacggtggggacgctgttcgagcccgattacgaagccctgcaccgctacaatcctcagcttgtcattaccggcgggccgggcgcggaagcgtatgaacagttggcgaaaaacgcgaccaccatagatctgacggtggacaacggcaatatccgcaccagcggcgaaaagcagatggagaccttggcgcggattttcggcaaggaagcgcgcgcggcggaattgaaggcgcagattgacgcactgttcgcccaaacgcgcgaagccgccaaaggcaaaggacgcgggctggtgctgtcggttacgggcaacaaggtgtccgccttcggcacgcagtcgcggttggcaagttggatacacggcgacatcggcctaccgcctgtagacgaatctttacgcaacgaggggcacgggcagcctgtttccttcgaatacatcaaagagaaaaaccccgattggattttcatcatcgaccgtaccgccgccatcgggcaggaagggccggcggctgtcgaagtattggataacgcgctggtacgcggcacgaacgcttggaagcgcaagcaaatcatcgtcatgcctgccgcgaactacattgtcgcgggcggcgcgcggcagttgattcaggcggcggagcagttgaaggaggcgtttgaaaaggcagaacccgttgcggcggggaaagagtag

SEQ ID NO: 58834 - DNA, 645 bp, Neisseria meningitidis; identical to SEQ ID NO: 43086

SEQ ID NO: 58835 - DNA, 969 bp, Neisseria meningitidis
atgactgccaaacctttttccctcaacctgaccaacctcctgctgctggcggcgttgtttgccgtcagcctgtcggtgggcgttgccgatttccgctggtcggatgtgttttcgctatccgacagccagcaggttatgttcatcagccgcctgccgcgcacgtttgcgattgtgctgacgggcgcgtcgatggcggtggcggggatgattatgcagattctgatgcgtaaccgttttgtcgaaccttctatggcaggcgcgggtcagagtgcggctttgggtttgcttctgatgtccctgctgctgcctgccgcgccgctgccggtcaaaatgtcggttgccgccgttgccgcgctaatcgggatgctggtgtttatgctgcttatccgccgtctgccgccgacggcgcaactgatggtgccgctggtggggattattttcggcggcgtggttgaggcggtggcgacgtttgtcgcgtatgaaaacgaaatgctgcaaatgttgggcgtgtggcagcagggcgatttttcgagcgtgctgctggggcggtacgagctgctttggattacgggcggtttggcggtgtttgcctatctgattgccgaccggctgacgattttggggctgggcgagacggtcagcgtgaatttgggtctgaaccggacggtggtgttgtggtcggggctgattattgtggctttgattacgtcgctggttatcgttacggtcggcaatattccgtttgtcgggctggtcgtgccgaacatcatcagccgcctgataggcgacaggctgcgccaaagcctgcctgcggtggctttgttgggcgcgtctttggtgttgctgtgcgatattttgggacgcgtgattgtgtttccgtttgaaattccggtctctacggtttttggtgtgttgggtacggctttgtttttgtggcttttgttaaggaaacctgctcatgccgtctga

SEQ ID NO: 58836 - DNA, 1479 bp, Neisseria meningitidis
atgttcagcaagttaacccctttggctgaaaccggcatcccgaccctgtcgtgtgcaaacgcagcagggcgtttgttgcattcagacagccgccaaatcaaacaaggcgatattttcgttgcctgtccgggcgaatatgccgacggccgcagttatatccccgccgccgttgccaacggcgcggcttttgttttttgggacgacgacggcaaattcgcgtggaatcccgaatggaaagtccccaatcaaggcatcaaagatttgaaacaccgtgccggcatattggcggcgcaagtttacggcaacgtttcagacggtctcaaattctggggcgtaaccggaaccaacggcaaaacctccatcacgcaatggctggcgcaagctgccgatttgttgggcgaaaaaaccgccattgtcggcacggtcggcaacggcttttggggtgcattggaagaaaccacgcataccacacccgcccccgtcgatgtccaaaccctgctctaccgtttccgtcaacaaggcgcaacagccgccgcgatggaagtctccagccacggtcttgaccagtcgcgcgtcaacggcgtgccattccgcagcgcaatctttaccaatctcacccgagaccacctcgactaccacggcacgatggaagcctatggcgccatcaagtcgcgcctgttttactggcatggcttgaaacacgccgttatcaatgtagatgacggatacggcgcagaactcataggccgtctgaaaaaagactgccccgatttggccgtttatagctacggcttcagcgaacacgccgacatccgcattaccgactttaccgcctcttcagacggcatagaagccgtattccgaaccccgtggggtgaagggaaatgccgcacgcgcctgctcggacggttcaacgcgcaaaacctcgccgcctgcatcgccttgctgtgcgccaacggctatccgcttgataatgtattggatgtgctggcaaaaatccgtcccgcttcagggcgcatggactgcatcatgaacagcggcaaacctttggtcgttgtcgattatgcccacacgcccgacgcattggaaaaagcactcgccaccttgcaggaaatcaaaccgcagggtgcggctttgtggtgcgtattcggttgcggcggtaaccgcgatcgcggcaaacgcccgctgatgggcgcggcagccgtacagggcgcggataaagtcgtcgtcaccagcgacaacccgcgcttggaaaatccgcacgacatcatcaacgacatcctgcctgccgttcccgcgcccgaatgcgtcgaagccgaccgtgccgccgccatccgttatgcggttgaacaagccgccgcaaacgacatcatcctgattgccggcaaagggcatgaaaactatcaggatgtacaaggcgtgaagcaccgtttttccgatcttgaaatcgtcggacaggctttgttaactcgtaaataa

SEQ ID NO: 58837 - DNA, 1458 bp, Neisseria meningitidis
atgaaacccaccatcgcgcttgtcggccgccccaacgtcggcaaatctactttattcaaccgtttgacgcgcaccaaagacgcgctcgtacacgacctgcccggtctgacgcgcgaccgccattacggacacggcaaagttggcagcaaaccttatttggtcatcgataccggaggtttcgagccggttgtggacagcggcattttgcacgaaatggcaaaacaaaccttgcaggctgtcgatgaggccgatgcggttgtgtttttggtggatggtcgcaccggtttgacaccgcaagacaagattattgccgaccgtttgcgccaaagtccgcgccctgtttatctggcggtaaacaaaggcgaaggcggcaacagggccgtgcttgctgccgagttctacgaacttgctttgggcgacccttatgttatttccggtgcgcacggcgacggcgtgtattacctgattgaagaaattttagaaaacttccccgagccggaagtcgaagaagccgatgcaaaacatcccgtttttgccgtcatcggtcgtccgaacgtcggcaaatccacgctggtaaacgccattctcggcgaagagcgcgtgattgccttcgatatggccggcacgacgcgcgacagtatccatatcgatttcgagcgcgaaggcaaaccgttcaccatcatcgataccgcaggtgtgcgccgtcgcggcaaagtcgatgaagcggtggaaaagttctccgttatcaaagcgatgcaggcggttgaagcggcaaacgtcgctgttttggtattggacgcgcagcaggacatcgccgaccaagatgcgacgattgcaggtttcgctttggaggcaggccgtgctttggtggtggcggtcaataaatgggacggcatcagcgaagaacgtcgcgagcaagtgaaacgcgatatcaaccgcaaactgtatttccttgattttgctaaattccactttatttccgcattgaaagaacgcggcatagacggattgttcgacagcattcaggctgcctacaacgcggcgatgattaagatgccaacaccgaaaatcacgcgcgtcctgcaaagcgcgatcgagcgtcagcaaccgccgcgtgccggcttggtgcgtccgaaaatgcgctatgcccaccaaggcggcatgaatccgccggtgattgtggtacacggcaattcgctgcacgcaatttccgacagctatacgcgctacctgacccaaacattccgcaaagccttcaatctgcaaggcacgccgctcagaattcaatacaatgtttcagaaaacccctatgaaaatgcggaagacaaaccgaagaaaaaaccgctgcgccgtgtcagcctgagcaaccgtattgagaaacgcgaagaccgcaaagaagagaaaaaccgcttcaagaagaaaaccaaagtcagtgtgaaaaaacaattcagcaaataa

SEQ ID NO: 58838 - DNA, 891 bp, Neisseria meningitidis
atgaatcctaaatcccctttatttttacgactgtccgaccgtttggatgtgtacctgcgcctgatgcgggcggacaagcccattggggcgctgcttttgctgtggccgacctactgggcattgtggctggcttcagacggcattcccgatttggcggtattggcggcgtttacaatcggcacgtttttaatgcgcagtgccggctgcgtcatcaacgactttgccgaccgcgattttgacggtgctgtcgagcgtacaaaaaaccgtccgttcgcacagggcagggtcaagaaaaaagaagcgctgctgctgacggcatttttgtgcctgcttgccgcattgtgcctgattccgctgaatcatctgacttggctgatgagcctgcccgcgctgtttcttgcgctgacttacccgtttaccaaacgtttttttccgattccccaactctatctcgggcttgccttttccttcggtatcccgatggcgtttgccgccgttgccggaaacgtgccgcctcaagcgtggatactctttgccgccaatgtgttatggactctggcgtatgacacggtttatgcaatggcggacaaagaagacgatttgaaaatcggcatcaaaacctccgccgtcacgttcgggcgttacgacatcgccgccgttatgctgtgtcacggaggctttaccctgctgatggcagtattgggtgcggttatcggtgcggcatgggcatattggacggcaatccccatcgtcctgctgctgcaataccgccaatatgccgccatcaaaagccgcgtccggcaaatctgttttgaaacgtttttggcaaacaacagaattggttgggtgtggtttaccgccatttttgcccatacgtttttcgcgaaataa

SEQ ID NO: 58839 - DNA, 510 bp, Neisseria meningitidis; identical to SEQ ID NO: 53055

SEQ ID NO: 58840 - DNA, 792 bp, Neisseria meningitidis; identical to SEQ ID NO: 50488

SEQ ID NO: 58841 - DNA, 657 bp, Neisseria meningitidis
atggattttgaaaaagcgcggttcaatatggtcgaacagcaaatccgtccgtgggatgtattggattttgatgtgttggacgctttggcggagattccgcgcgagctttttgtcgatgaggacttgcagggtttggcgtatgcggatatggcgctgccgcttgccaacggtcataagatgctcgagccgaaagtcgtggcgcggctggcgcagggcttgaagctgacgaaaaacgatacggttttggaaatcggcacgggttcgggctatgcgaccgcgctgttggcaaaattggctggtcgtgtggtgtcggacgacatcgatgccgaacagcaaaaccgcgccaaagcggtgttggacggcttgggtttggacaatatcgattatgtgcaaaacaacgggttgaccgaactttccgcaggtgcgccgtttgatgcggtttatgtcggcggtgcggtaaaccttgtgcctgaagtgttgaaagaacagttgaaagatggcggacgcatggtggttatcgtaggtcgcaagcctgttcaacgcgcgcttttgattacgcgcaggggcgatgtgtttgaagagaaggtgctgttcgataccttggtggcgcatttggatgataaggatgccgatccgtttggcggtttcgatttttaa

SEQ ID NO: 58842 - DNA, 1185 bp, Neisseria meningitidis
atgaccgaaccgacctcccgccgccgttttctgaaaacctgcaccgccgctgccggcgcggggctgcttcaggcttgcggcacatccgccacatccgttccgccccttccctcttcccattccgttgtgaaagcccgaaccgtgcctctccaaacgccacgccgtcaaagttcggacggcaaccttctgcgcgttgtcgcttcgtcaggatttgccgaagacaccaaccgcgtcaacacagccttaacccgcctttacaatgtcggttttaccgtaaccaaccaacaggcgggcagccgccgcttccaacggtttgctggtacggacgcacaacgtgtcgccgatttccaagaggtcgcttccggccgcgtcgccacgcctaaagtgctgatgggcttgcgcggcggttacggtgcggcgcggattctgccgcatatcgattttgcttcgctcggcgcaaggatgcgcgaacacggcacgctgtttttcggattcagcgacgtatgcgccgtccagctggcattgttggcaaaaggcaatatgatgagttttgccggcccgatggcttatagcgattttggcaaacccgcccccggtgcgtttacgatggatgcctttatcaagggtgcaacccaaaaccgcctgaccgttgatgttccttatatccaacgcgccgatgtcgaaaccgaaggcatattgtggggcggcaacttaagcgtcctcgcctcgctcgccggcacgccttatatgcccgacatcgacggcggcattttgttcctcgaagatgtcggcgaacagccctaccgcatcgaacgtatgctcaatacgctgtatctttcgggtattttgaagaaacagcgcgccatcgtgttcggcaatttccgtatggaaaaaattcgagatgtctatgatccgtcttatgatttttctgccgttgccaaccatgtttcgcgcacggcgaaaatccccgtgctgacgggcttcccgttcggacacattgccgacaaaatcactttccctctaggcgcgcacgcccgaatccgtatgaatggaaacggcggttatgcggtcgcgtttgaaggctaccccacactcgatgcgtccgccctgactttggataccctgctcccgccgccggatttgcctatcttccccgaaagcggtgttgccgatatttcggaataa

SEQ ID NO: 58843 - DNA, 354 bp, Neisseria meningitidis
atgtctgaaatcaaaattttccacaatccgcgttgcagcaaatcgcgtgccgccttgtccctattggaagaacgcggcattgctgccgaagtggtcaaatatttggatacgccgcccgacttgtccgaattgaaggatattttcaacaaattgggtttggcatcggagcgcgggatgatgcgcgtgaaagatgatttgtacaaggaattgggtttggacaaccccgatttggacaatgacgcgctgctgcgtgccatcgccgatcatcccgccctgttggagcgtccgattgttttggcgaacggtaaggcggctgtcggcaggccgttggaaaatatcgaagcggtattgtga

SEQ ID NO: 58844 - DNA, 612 bp, Neisseria meningitidis
atgaaacctttgattttagggcttgccgccgtgttggcgctgtctgcctgccaagttcaaaaagcgcccgatttcgactacacgtcattcaaggaaagcaaaccggcttcaattttggtggttccgccgctgaacgaatcgcccgatgtcaacggaacatggggtgtactggcttcgaccgccgctccgctttccgaagccggctattacgtcttccccgccgcagtcgtggaggaaaccttcaaagaaaacggcttgaccaatgccgccgatattcacgccgtccgaccggaaaaactgcatcagattttcggcaatgatgcggttttgtacattacggttaccgaatacggcacttcatatcaaattttagacagcgtgacgaccgtatccgccaaagcacggctggtcgattcccgtaacggaaaagagttgtggtcgggttcggccagcatccgcgaaggcagcaacaacagcaacagcggcctgttgggggctttggtcagcgcagtggtcaatcagattgccaacaacctgaccgaccgcggttatcaagtttccaaaaccgccgcatacacctgctgtcgccctattctcacaacggcatcttga

SEQ ID NO: 58845 - DNA, 270 bp, Neisseria meningitidis; identical to SEQ ID NO: 55979

SEQ ID NO: 58846 - DNA, 1257 bp, Neisseria meningitidis
atgaaagtgcttgttttaggtgcgggtgttgccggcgtgtcttccgcgtggtatctggcagaggcaggacatgaagtaacggtcatcgaccgcgccgagggtgtggcgatggaaaccagttttgccaacgcaggccagctttcttacggctataccacgccttgggctgcacccggtatcccgaccaaagcgctgaaatggctgtttaaaagccatccgcctttgctgtttcgccccgacggcagcctgtatcaaatcgaatggctgtggcaaatgctgcaaaactgcacggcagcgcactatcaaaccaataaagagcgcatggtcaggatttccgaatatagccgtgaaatgttccgccgttttgaagcgcaaaccggcatgaattttgaggaacgcaaaaaagggacgttgcagattttccgccaaaccaaagaagtcgaagcggcagaacaagacattgccgttttggaacgctacggcgtgccgtaccgccgtctgaaacccgaagaatgtgcagaatttgagcctgcgctggcacgcgttacctccaaaattgccggcggcctgcacctgcctgcagatgcgaccggcgactgccacctcttcactgaaaacctatacaaattgtgtcaggaaaagggcgtacagtttcatttcaaccaaaccatcagccgcatcgaccataacgggctgcgcatcaaagccgttgaaaccgaaacagggcggtttgaagcagatgccgttgtctgtgcgctcggctgcttcagtaggactgtgttggcgcagttagacctcgatctgccgatttatcccgtcaaaggctattccttgaccctgccggtcaccaattcagacggcgcgccggtgtccaccgttttggatgaaagctacaaagtcgctatcacgcgctttgacaacagaatccgcgtcggcggcatggcagaattgtcgggctacgaaatcaaactgcccgaaaaacgccgcgaaaccttggctttggtcgtcaacgatttgttcccggaaggcggcgatttgagccaagcattgttctggagcggcctcagaccgatgacgcccgacagcacgccgttaatcggccgcacccgctttgaaaacttattcttgaatacaggccacggcactttgggctggaccatgtcgctgggttcggcaaaattaaccgccgatatcgtgagcggcaaagacaccgaaatccgaagcgacgatttgagcctgtcgcgctatcaggcttaa

SEQ ID NO: 58847 - DNA, 1335 bp, Neisseria meningitidis; identical to SEQ ID NO: 38700

SEQ ID NO: 58848 - DNA, 1356 bp, Neisseria meningitidis; identical to SEQ ID NO: 43735

SEQ ID NO: 58849 - DNA, 444 bp, Neisseria meningitidis
atgccgttgcgcctgcttttagggatattgtgcgacctatcgatggttgcccccgtatatgcacaggggcagccggatgcggtcaatgcctatatccaaaagaaaaaagtcatcgtcgatacatccaaagcggaactctgtttcgctgacgaccgtcagtgccaccccgtcctcatcggcactgccacgcccaaggggacgttcgggctgacgctgaacagtaccgacaagcccggatacggcggcgaagtcatcggtttcaagcaggagggtgattttcttttcgccctgcaccgcgtttggaatcagataccgtcggaaagacggagcgaacgtatcgcatcttcggttgtgtccgacaggattatgaccaacggctgcatcaacgtcagcgatgcggtgtacgaaaaactgcgccattattttgtgttggaagtgatttga

SEQ ID NO: 58850 - DNA, 864 bp, Neisseria meningitidis
atgaaaaccttcttcaaaaccctttccgccgccgcactcgcgctcatcctcgccgcctgcggcggtcaaaaagacagcgcgcccgccgcatccgcttctgccgccgccgacaacggcgcggagaaaaaagaaatcgtcttcggcacgaccgtcggcgacttcggcgatatggtcaaagaacaaatccaagccgagctggagaaaaaaggctacaccgtcaaactggtcgagtttaccgactatgtacgcccgaatctggcattggctgagggcgagttggacatcaacgtcttccaacacaaaccctatcttgacgacttcaaaaaagaacacaatctggacatcaccgaagtcttccaagtgccgaccgcgcctttgggactgtacccgggcaagctgaaatcgctggaagaagtcaaagacggcagcaccgtatccgcgcccaacgacccgtccaacttcgcccgcgtcttggtgatgctcgacgaactgggttggatcaaactcaaagacggcatcaatccgctgaccgcatccaaagcggacatcgccgagaacctgaaaaacatcaaaatcgtcgagcttgaagccgcgcaactgccgcgtagccgcgccgacgtggattttgccgtcgtcaacggcaactacgccataagcagcggcatgaagctgaccgaagccctgtttcaagaaccgagctttgcctatgtcaactggtctgccgtcaaaaccgccgacaaagacagccaatggctcaaagacgtaaccgaggcctacaactccgacgcgttcaaagcctacgcgcacaaacgcttcgagggctacaaataccctgccgcatggaatgaaggcgcagccaaataa

SEQ ID NO: 58851 - DNA, 1428 bp, Neisseria meningitidis; identical to SEQ ID NO: 50933

SEQ ID NO: 58852 - DNA, 525 bp, Neisseria meningitidis
atgtcattgaacaaagtcatcctcatcggccgcctcggacgcgatcccgaagtgcgctatatgcccaacggcgaggcggtgtgtaatttcagcgtcgccaccagcgaaacttggaacgaccgcaacggccaacgtgtagagcgtactgagtggcacaacatcaccatgtaccgcaaactggcggaaattgccgggcaatacctcaaaaaaggcgggctggtttatctggaaggcagaatccaaagccgcaaataccaaggcaaagacggcatcgaacgcaccgcttacgatattgtcgccaacgaaatgaaaatgttgggcgggcgcaatgaaaacagcggcggcgcgccttacgaggaaggttacggtcagagtcaggaggcttaccaacgccccgcgcagcaaagccggcagcccgcctccgacgcgccgtcccatccccaagaagcaccagccgcgccgcgccgccaacccgtgcctgccgccgccccggtcgaggacattgacgacgatatcccgttctga

SEQ ID NO: 58853 - DNA, 624 bp, Neisseria meningitidis
atgaaacgattgactttattggcctttgttttggctgccggtgcggtttccgcatctcccaaagcagacgtggaaaaaggcaaacaggttgccgcaacggtttgtgcggcttgccatgcagcagacggtaatagcggcattgcgatgtatccacgtttggcggcacagcatactgcttacatctatcatcaaactatcggcatccgcgacggcaaacgtacccacggttcggcagctgtgatgaaaccggtggtaatgaatttgagcgatcaggatattttgaacgtatccgcattctatgccaaacagcagcccaaatccggtgaagccaatcctaaggaaaatcccgaattgggtgcgaaaatctatcgcggcggtttgagcgataaaaaagtgccggcgtgtatgtcctgccacggtccgagcggtgcgggtatgccgggaggcggaagcgaaattcaggcttatccgcgtttgggcggtcagcatcaggcatatattgttgaacagatgaatgcctacaagtccggtcagcgtaaaaataccatcatggaagatattgcaaaccgtatgtctgaagaagatttgaaagcggtcgccaactttatccaaggtttgcgttaa

SEQ ID NO: 58854 - DNA, 267 bp, Neisseria meningitidis; identical to SEQ ID NO: 42299

SEQ ID NO: 58855 - DNA, 633 bp, Neisseria meningitidis
atgacggtatgggtcggactgaccggcggaatcggcagcggcaaatcggcagccgcgcaatgttttgccgatttgggcgtgccgcgcatcgatgcggacgcggcggcgcactcgctgacggcttcagacggcatcgccctgccggaaatcaggcggctgttcggcgacaccgttttcgacacacagggtttgttgcggcgcgacatattgcgtaaagaagtctttgcctccccatcgcgaaaagccttgctcgaatccgtgatgttgccgctgattttctcagaaatcaaaaaacagcaagaaacctttaccgatgcggcttacggcattgtcgaaattccgctgctgacggaaaagcgtcaatttatcagcctgatacggcgtgtcctgaccataagcgcacctttggaaaaacgtatcggcagggtgatggcccgcagcgggctgacgcgcggcgaggtggctgccgtcatcagccatcaggcatccgaatccgaacgcctgctgcttgcagacgatgtgctgctcaatgacggcagcctcaaaagcctgcgtgagaaaacaatgcgcctgcacgcgttttattcagggattttcgcctcaaaaccaacacaaggaaaacacaatggctga

SEQ ID NO: 58856 - DNA, 348 bp, Neisseria meningitidis; identical to SEQ ID NO: 39706

SEQ ID NO: 58857 - DNA, 921 bp, Neisseria meningitidis; identical to SEQ ID NO: 37480

SEQ ID NO: 58858 - DNA, 936 bp, Neisseria meningitidis; identical to SEQ ID NO: 51277

SEQ ID NO: 58859 - DNA, 2301 bp, Neisseria meningitidis; identical to SEQ ID NO: 43098

SEQ ID NO: 58860 - DNA, 258 bp, Neisseria meningitidis; identical to SEQ ID NO: 51697

SEQ ID NO: 58861 - DNA, 561 bp, Neisseria meningitidis; identical to SEQ ID NO: 54242

SEQ ID NO: 58862 - DNA, 522 bp, Neisseria meningitidis
atgtcctgtttttcaatcaaacgtatgtccgcgtttcgggcgcggataacagtgttttttaccgcctttgtctttttgacggcggcactgcccgcttatgcggagcgtctgcctgattttctggcgaaaatacagccttcggaaatttttccgggtgcggaccgttacagcaagccggaaggtaagcctatggttgcccgcgtttacaaaggcgatgagcagttgggcttggtctatatcacgaccgatgcggtcaatacgcgcggttattcgagcaaaccgatcgatacgctgatggctttggcaaatgacggcacgatagccggagcgaaactggtcgatcatcacgaaccgattatgctgatcggtatcccgcatttgcccgcgcccgggcgggcgatacgcttaaactggcttccggcgtatatcaaaccaaactttatatcgacaaaccgattacgattgaagggcctgccgaccgttccgcaaccatcgaaggagacaggagcgggcgtaccatag

SEQ ID NO: 58863 - DNA, 198 bp, Neisseria meningitidis; identical to SEQ ID NO: 55598

SEQ ID NO: 58864 - DNA, 918 bp, Neisseria meningitidis; identical to SEQ ID NO: 49476

SEQ ID NO: 58865 - DNA, 465 bp, Neisseria meningitidis
atgtttaccatcgttttataccagccggaaatcccgccgaacacgggcaacatcatccgcctgtgcgccaataccggcgcggatttgcaccttgtcaaaccgctcggcttcccattggattccgccaaaatgaaacgcgccgggctcgactaccacgagttcgccagcctgacggtgcacgaaaacttcgacgactgcctcaaggcactcgcaggcaggcgcattttcgccctgaccaccaaaggcacagcgcgccccgatgaaaccgcgtttcagaaaggcgatgttttactgttcgggccggaaacgcgcggactgcctgccgacatcctcgacagcctgcccgccgcgcaaaaaatccgcctgcccatgcagcccggcagtcggagtatgaacctttccaataccgttgccgtgattctctttgaagcgtggcggcaacacggttacgcaggcggcgtttga

SEQ ID NO: 58866 - DNA, 375 bp, Neisseria meningitidis
ttggctgaaggtcaaaaatcagccgtcaccgagtattacctgaatcacggcgaatggcccggcaacaacagttctgccggcgtggcaacctccgccaacatcaaaggcaaatatgttgagaaagttgaagtcaaaaacggcgtcgttaccgccacaatgctttcaaccggcgtaaacaacgaaatcaaaggcaaaaaactctccctgtgggccaagcgtcaagacggttcggtaaaatggttctgcggacagccggttaagcgcgacaacgccagcgccgacgccgtcaaagccgacaccgccgccaacggcaagcagatcgacaccaagcacctgccgtcaacagcatcgacaagaaaatcgacaccaaactag

SEQ ID NO: 58867 - DNA, 231 bp, Neisseria meningitidis; identical to SEQ ID NO: 43676

SEQ ID NO: 58868 - DNA, 261 bp, Neisseria meningitidis; identical to SEQ ID NO: 42753

SEQ ID NO: 58869 - DNA, 861 bp, Neisseria meningitidis; identical to SEQ ID NO: 46330

SEQ ID NO: 58870 - DNA, 1074 bp, Neisseria meningitidis
atgagtatcaccatccaaaacttaaacaaacacttcggcaattttcacgcgctgaaaaacatcaacctcaacgtccccaccggcaaactcgtttccctgctcggcccgtccggctgcggcaaaaccacacttttacgcattatcgccggactggaaaacgccgacggcggcaatatcctgtttgacgggcaagacgtaaccgccaaacatgtgcgcgagcgcaaagtcggcttcgtgttccaacactacgcccttttccgccatatgaacgtgtttgacaacgtcgctttcggtttgaccgtattgcccaagtccgaacgcccgtccaaagaacaaatctgcactaaagtcgaagaattgctgaaactcgtacaactctcgcatttggcaaaatcctatccgcaccaactctccggcgggcaacgccagcgcatcgccctcgcccgtgcgcttgcggtcgaaccgaaactcctgcttttggacgaacccttcggcgcgttggacgccaaagtacgcaaagaattacgcacctggctgcgcgatatccatcacaacctgggtgtaaccagcattctggttacgcacgaccaagaagaagccctcgaagtttccgacgaaatcgtcgtgatgaaccacggcaaaatcgaacaaaccggcagcgccgaagctatttaccgcaaacccgaaaatgccttcgttaccgagttcctcggcgaaaccgacgcttttgaaggacgcatcgaaaaaggcttctggcattataacggcttcgcgtggaaattggacgcgcactacaaatggcaggaacaaaccgccaccggctatatccgcccgcacgaatggcagatcgccgccgaacacgaaacaccgatgatttgtgccgaaatcgaaaaagtccacgccgtcggggcattgacgcatattttggtgaaacacggcaaacaagacgtgcatatcacgctggctggcagcgatgccgcgcgttacccaatcgccgaaggcaaagaattgaagctgattccgaaacaggtttatgtcttctctcaaaacgaactgattgaatattcgatttaa

SEQ ID NO: 58871 - DNA, 1173 bp, Neisseria meningitidis
  misc_feature 1158, 1159, 1160, 1161, 1162: 'n' is a, c, g or t
atgtttattatcctagggcgaaattttttaaagattatcctatgctttagtttttttgtatctaaatttgcattggcatcagtaaatgctccgggtaaatttgatagggttgaagtttatgatgatggcagatatttaggtattcgaggttcagatgacaaaagaagaagaatttggaaaggtgtatttgatagagaatcgggaagatatttaacttcagaagctcaagatttaaaagttaggcatgtatctactggagcatcaagtacgggtaaagttagttcggttgtatcttcatcagtttcccgcgccgccgtcttgtcaggagtcggcaaacttgcccgcttaggcgcgaaattaagcacaagggcagttccttatgtcggaaccgcccttttagcccatgacgtatacgaaactttcaaagaagacatacaggcacaaggctaccaatacgaccccgaaaccgacaaatttgtaaaaggctacgaatatagtaattgcctttggtacgaagacgaaagacgtattaatagaacctatggctgctacggcgttgacagttcgattatgcgccttatgtccgattacagcagattccccgaagttaaagaattgatggaaagccaaatgtataggctggcacgtccgttttggaattggcataaagaagaactgaataaattaagttctttggattggaataattttgttttaaatagttgcacatttaattggaacggcggagattgttcggtcaataaaggtgatgattacagaaatggggctgatttttcccttatccgcaatccgaaatacaaagaagaaatggatgccaaaaagctggaagagattttatcgttgaaagtcgatgccaatcccgacaaatacataaaggcaaccggttatcccggttattccgaaaaagtagaagtcgcacccggaacaaaagtgaatatgggtcccgtcacggacaggaacgggaatcccgttcaggttgtcgcaacattcggcagggattcgcaaggcaacaccacagtggatgttcaagtaatcccgcgtcccgatttaacccctggaagtgcggaagcaccgaacgcacagccgctgcccgaagtatcgcccgccgaaaaccccgcaaacaacccgaaccccaannnnncacacacttaa

SEQ ID NO: 58872 - DNA, 936 bp, Neisseria meningitidis
atggggcacaatatgatgaccacccaaaaatggtatgagcatattactaatgtaatcataggcaatactgctaatttcaatagcggttgccctgaagctatagattatgtagatgaaagaaaaggcgttccgcttgcagcgatgagacatattttaatgtatactgaagctgcggcttcccatgcctatctatttgaacatgatcttaataaattcaagcaatatgcttatgttgcaggaaagctgggtattttgcggagtgtaaattctacagaccctgaacccttcttctttccctgtgacatgctcaacattcaaaatccgatgtttctgatgctgatgagcgacagcccacagctgcgcgagtttctggtgcgcaatatcgacaacatcgccaacgatacagaagcctttataaaccgctacgacctcaaccgtcatatgatttacaatactctgctgatggtggagggtaagcagcttgatcggttgaaacaacgtagcgagaaagtcttggcgcatcccacccctagcaaatggctgcaaaagcggttgtacgattaccgcttcttcctcgctttcgccgaacaggatgccgaggcaatgaaagccgccttagagccgcttttcgataaaaaaaccgcgcgtatggctgccaaagaaacattgtcctatttcgatttctacctgcagccgcaaatcgttacctatgccaaaatcgcatccatgcacggtttcgatttgggcatagaccacgaaatcgcaccgagggatttgattgtttacgatccgctgccagcagacgaatatcaagacatcttcgattttatgaaacagtatgacttgtcttacccgtatgaatatctgcaggattggatagattactatacgttcaaaaccgataagctggtatttggtaacgcgaagcgagagtga

SEQ ID NO: 58873 - DNA, 327 bp, Neisseria meningitidis; identical to SEQ ID NO: 42598

SEQ ID NO: 58874 - DNA, 702 bp, Neisseria meningitidis
atgttcagacggcatcggcatttgaaaaatatgcagattaaaaaaatcatgaaatggcttcccgtcgccttgtcgcttttgggtgcgttgggttatacggggtacggcagcgaggcggtgcggacggcggttgccgtactcgacgtactcggcgcggcaggggacgcgggttccgacgcgcccgcccgccgccgagcatcggcgaaatccggccaccgctacacaggcacggtgtccaaagtctatgacggcgacacccttcacgttatcgacggcgacggcgcgaaacacaaaatccggatggcgtatatcgacgcgccggagatgaaacaggcttacggcacgcgttcgcgcgacaacctgcgcgcggcggcggaaggcaggaaagtcagcgtgcgcgtgttcgacaccgaccgctaccagcgcgaagtggcgcaggtttctgtcggcaaaaccgatttgaacctgatgcaggtgcaggacggggcggcgtggcattataaaagttatgctaaagaacagcaggataaggcggattttgccgattatgccgacgctcaaattcaggcggaaagggaacgcaaaggattgtggaaagctaaaaatccgcaagcgccgtgggcgtaccgccgggcaggcaggagcggcgggggcaataaggattggatggatgccgtgggcgaatggttgggcatttggtaa

SEQ ID NO: 58875 - DNA, 231 bp, Neisseria meningitidis; identical to SEQ ID NO: 36464

SEQ ID NO: 58876 - DNA, 1515 bp, Neisseria meningitidis; identical to SEQ ID NO: 51153

SEQ ID NO: 58877 - DNA, 510 bp, Neisseria meningitidis; identical to SEQ ID NO: 40753

SEQ ID NO: 58878 - DNA, 2604 bp, Neisseria meningitidis
atgagcaaaaccgtgcattatctcaaagactatcaaacgcccgcctaccatattctcaaaaccgatttacattttgatattaatgaaccgcaaaccgtcgtgaagtcgcgtttgacggttgagccgcagagggtaggggagccgctggtgttggacggttcggcgaaacttttgtccgtcaaaattaacggggcggcggcggattatgtgttggaaggcgagacgctgacgattgcaggcgtgccatccgaacgcttcaccgttgaagtggaaaccgaaatcctgccggtggaaaacaaatcgctgatggggctgtatgcttccggcggcaatctatttacccagtgcgagccggagggcttccgcaaaatcacgttctacatcgaccgtccggatgtgatgtccaaattcacaaccaccatcgttgcggacaaaaaacgctatcccgttttgctttccaacggcaacaaaatcgacggcggcgagtattcaggcggccgccattgggtgaaatgggaagacccgtttgccaaaccgagctatctgtttgctttggtcgcgggcgatttggcggtaacggaagactatttcaccaccatgagcggcagaaacgtcaaaatcgagttttacaccaccgaagcggacaagcccaaggtcggctttgccgtggaatcgctgaaaaacgcaatgaagtgggacgaaacgcgcttcggtttggaatacgacttggatattttcatggtcgtcgccgtgggcgatttcaatatgggcgcgatggaaaacaaggggctgaacatttttaataccaagttcgtccttgccgacagccgtaccgccaccgataccgatttcgaaggcatcgaatccgtggtcggacacgaatatttccacaactggacgggcaaccgcgtaacctgccgcgactggttccagctttcgctgaaggaagggttgaccgtgttccgcgaccaagaattttccggcgaccgcgccagccgcgccgtgcgccgtatcgaaaacatccgcctgctgcgccagcaccagttccctgaagacgcaggtccgaccgcacatccggtgcgccccgccagctatgaggagatgaacaatttttacaccatgaccgtttatgaaaaaggcgcggaagtggtgcggatgtatcacaccttgctcggcgaagagggcttccaaaaaggtatgaagctctatttccaacgccacgacggacaggctgttacctgcgacgatttccgcgcggcgatggcggacgcgaacggcatcaatctcgaccagtttgccttgtggtacagccaggcgggcacgcccgttttggaagcggaaagccgtctgaaaaacaatattttcgagttgaccatcaaacaaaccgtgccgcccacgcccgatatggcggacaagcagccgatgatgattcccgtcaaagtcggactgttgaaccgcaacggcgaagcgatggcattcgattatcagggcaaacgcgcaaccgaagccgtgttactgctgaccgaagccgaacagaccttccagttcgaaagcgtaaccgaagccgtcgttccctcgctgctgcgcgggttcagcgcgccggtgcatttgaactatccgtacagcgacgacgacctgctgcttctgctcgcccatgacagcgacgccttcacgcgctgggaagccgcacaaacgctctaccgccgtgccgttgccgccaaccttgccgcgctttcagacggtattgaactgccgaaacacgaaaaactgcttgccgccgtcgaaaaagtcatttcagacggcctcttggacaacgccttcaaagccctgcttttgggtgtgccgtctgaagccgaactgtgggacggcgcagaaaacatcgacccgctgcgctaccatcaggcgcgcgaagccttgttggatacgcttgccgtccgcttcctgccgaaatggcacgaattgaaccgtcaggcggcgaagcaggaaaaccaaagctacgagtacagccccgaagctgccggctggcgcacgctgcgcaacgtctgccgcgccttcgtcctgtgcgccgaccccgcgcacatcgaaaccgttgccgaaaaatacggcgaaatggcgcaaaacatgacccacgaatggggcatcctgtccgccgttaacggcaacgaaagcgatacgcgcaaccgcctgctggctcagtttgccgacaagttttcagacgacgcgctggtgatggacaaatatttcgccctcgtcggcttaagccgccgcagcgacaccctgcaacaggttcaaaccgccttgcagcatccgaaattcagcctcgaaaaccccaacaaagcccgctcgcttatcggcagcttcagccgcaacgtcccgcatttccacgcagaagacggcagcggctaccgcttcatcgccgacaaagtcatcgaaatcgaccgctttaacccgcaggtcgccgcccgcctagtgcaggcgttcaatctctgcaataagctcgagccgcaccgcaaaaacttggtgaaacaagcattgcagcgcattcgggcgcaggaaggattgtcgaaagacgtgggcgaaatcgtcggcaaaattttggattga

SEQ ID NO: 58879 - DNA, 990 bp, Neisseria meningitidis
atgagcaccttctttcaacaaaccgcgcaagccatgattgccaaacacatcgaccgtttcccgctattgaagttggaccaggtgattgattggcagccgatcgaacaatacctgaaccgtcaaaaaacccgttaccttagagaccaccgcggccgtcccgcctatcccctgttgtccatgttcaaagccgtcctgctcggacaatggaacagcctctccgatcccgaactcgaacacagcctcatcacccgcatcgatttcaacctgttttgccgttttgacgaactgagcatccccgattacagcaccttatgccgctaccgcaactggctggcgcaagacgacaccctgtccgaattgctcaaactgattaaccgacaactgaccgaaaaaggcctaaaaatagagaaagcatccgccgccgtcgttgatgccaccattatccagaccgccggcagcaaacagcgtcaggccatagaagttgacgaagaaggacaaatcaacggtcaaaccacaccgagtaaggacaaagatgcccgttggataaagaaaaacggcctctacaaactcggttacaaacaacatacccgtaccgatgcggaaggctatatcgagaaactgcacattactcccgccaatgcccatgagtgcaaacacctgtcgcctttgctggaaggactgcccaaaggtacgaccgtctatgtcgacaaaggctacgacagtgcggaaaaccggcaacatctggaagaacatcagttgcaggacggcattatgcgcaaagcctgccgcaaccgtccgctgacggaggcacaaaccaaacgcaaccgttatgtggtcgaacaaagcttcggtacgctgcaccgtaaattccgctacgcccgggcagcctatttcggactgattaaagtgagtgcgcaaagccatctgaaagcgatgtgtttgaacctgttgaaagccgccaacaggctaagtgcgcccgctgccgcctaa

SEQ ID NO: 58880 - DNA, 342 bp, Neisseria meningitidis; identical to SEQ ID NO: 37907

SEQ ID NO: 58881 - DNA, 1140 bp, Neisseria meningitidis
atgaaaaaaacactggtggcggcggcgatcctgagcctcgccttgactgcgtgcggcggcggaagcgataccgccgcccaccccccctccgccaagcccgaagccggacaatcgggcaaactcaatatctacaactggtcggattatgtcgatcccgaaaccgtcgccgcctttgaaaaagaaaccggcatcaagacgcgttccgattattacgacagcaacgaaacactggaggcaaaagtcctgaccggcaaatccggctacgacctgaccgcgccgtccatcgccaacgtcggccggcaaatcaaagcgggcgcgtatcagaaaatcgacaaggcgcaaatcccccattacggcaacatcgataaagatttgctgaaaatgatggaagccgtcgatccgggcaacgaatatgccgtgccttatttctggggaatcaatactttggcaatcaatacccagcaggtgaaaaaggcattgggtacggacaagctacccgaaaacgagtgggatttggtgttcaaacccgaatacaccgccaaactcaaatcctgcggcatcagctatttcgacagcgcaatcgaacagattcccttggcgttgcactatttgggcaaagaccccaacagtgaaaatcctgaagacatcaaagccgccgtcgatatgatgaaagccgtccgaggcgacgtgaaacgcttcagctcttccggctatatcgacgatatggcggcgggcaacctgtgtgccgccatcggttacggcggcgatttgaacattgccaaaacccgtgccgaagaagccgcaaacggcgtggaaatcaaagtattgaccccgaaaaccggcgtgggcgtgtgggtggattcctttatgattccgcgcgacgcgcaaaacgttgccaacgcccaccgctatatcgactacacgctcctgcccgaggtggcggcgaaaaacggcagcttcgttacctacgcacccgccagccgccccgcgcgcgagctgatggatgaaaaatacacctccgacgcatcgattttcccgaacaaagaactgatggaaaaaagtttcatcgtatcgcccaaatccgcagaatccgccaaactgggcgtgaagctgtggcaagggctcaaggccggaaaataa

SEQ ID NO: 58882 - DNA, 687 bp, Neisseria meningitidis; identical to SEQ ID NO: 55941

SEQ ID NO: 58883 - DNA, 798 bp, Neisseria meningitidis; identical to SEQ ID NO: 38316

SEQ ID NO: 58884 - DNA, 1305 bp, Neisseria meningitidis; identical to SEQ ID NO: 44037

SEQ ID NO: 58885 - DNA, 2226 bp, Neisseria meningitidis
atgactcaaaaatccaccattgtttatacccataccgacgaagcccccgcgctggcgacccaatcgctgctgccgattgtgcaggcttttacccgccacgccgatattgatgtcaaaactgccgacatttccctgtccggccgtattttggcggcattccccgaatatctgaccgaagcgcaacgcgtacccgacgcgcttgccgaattgggcgaactggtaaaacaacccgatgcaaacgtaatcaaactgccgaacatcagcgcatccgtaccgcaactgaccgccgcgattaaagaattgcagtctaaaggctttgccgttcccgattatcctgccgacccgcaaaccgatgaagaaaaagccgtgcgcgaacgctacgaccgcatcaaaggcagcgcggtaaaccctgtcctgcgtgaaggcaactccgaccgtcgcgcccccaaagcggtgaaaaactttgccaaaaaaaatccgcacagcatgggcgcatggacaaaagactccaaaacccacgttgccaccatgcaaagcggcgactttttccataacgaacaatccgttaccgtacctgaagcgacttccgtatccatcgtgttcaccgacaaacaaggcaataaaaaagagctgcgcgcgcctgttgccctgaaagccggcgaaatcatcgacgcgaccgtgatgagtaaaaaagccctgctcgccttccttgccgaacaagtaaaagatgcgaaagcaaaaggcgtgttgttctcgctgcacatgaaagccactatgatgaaagtgtccgacccgattatcttcggacacgccgtcaaagtattcttcgcgcctgtttttgaaaaattcggcgacaaactggctgctgccggcgtcaacgttaacaacggcttcggcaacctgcttgccaatctggacaaactggatgcggacacccgcaccgccgtcgaagccgaaatcgccgccgtttacgccgccaaccccgatttggcgatggtcgattccgataaaggcattaccaacctgcacgttcccagcgatgtcatcgttgatgcttctatgcctgcgatgattcgtaactccggccgtatgtgggataaagacggcaaagcgcaagacaccaaagccgtgattcccgacagcagctacgccggcgtttaccaagcaaccatcgacttctgccgcgaacacggcgcatttgacccgacaaccatgggtactgtgcccaacgtcggactgatggcgcaagcggcggaagaatacggctcgcacaacaaaacctttgaaatcgaagccgacggccaagtccaagtcattgatgcggcaggaaaagtcctaatgcagcacgacgttgaagccggcgacatctggcgtatgtgccaaaccaaagacgctccggttaaagactgggtacaacttgccgtcaaccgcgcccgtctgagcaacacgcctgccgtgttctggctcgacgaaaaccgtccgcacgacaagagcctgctcgccaaggttaaagcctaccttgccgaactggataccaatggcctcgacatccgcgtcctcgctcctgaagaagccgccaagttcagcttgggtcgtctgaaaaacggcgaagacaccatctccgtaaccggtaatgtcttgcgcgactacctgaccgacttgttcccaattttggaactcggcacaagcgcgaaaatgctgtctatcgttccattgatgaacggcggcggtatgtttgaaaccggcgcgggcggttctgcaccgaaacatgttcaacaattcctcgaagaaaaccatttgcgctgggactcgctgggcgaattcctcgcactcgccgtatcgtttgaacatttggcgcaaaaaaccggcaatgccaaagcccaagtcctcgccgacactttggatgcagccaccgaaaaactgctgttgaacgacaaatcgcctaaacgtaaagccggcgaactcgacaaccgcggcagccatttctacctcaccctctactgggcgcaagaattggcggcgcaagacaaagatgccgaactgaaagccgcatttacgccattggcagccgctttgaccgccgacgaagcgaaaatcgttgccgagctttccgccgtacaaggcaaagcggccgacatcggcggctactacgccgccaatcctgaaaaagccgcacaagtgatgcgtccgagcgtaacctttaatcaggcactaaacgccttataa

SEQ ID NO: 58886 - DNA, 948 bp, Neisseria meningitidis; identical to SEQ ID NO: 42869

SEQ ID NO: 58887 - DNA, 309 bp, Neisseria meningitidis
gtggaagggattatgctgttgaaggtagtacctgagcgtaccgtttcggcagatgcaaaaaccagagacccgatgtgggacaatgcggctttacagaccagcgaaggcgtaaattttattgctcgtttcctaggattttttagcgatggggaataccgctatgtggatgtcctgcaacccaaccattccgatattattcggtattcaggtaaagattttcctctaaatcaaatacttaaccatatacaccccgcccgttatgcggtaacgttcgaaaacaatgtcgattccaagctgcgcaggcactga

SEQ ID NO: 58888 - DNA, 276 bp, Neisseria meningitidis
atgaacgcgtcaaactggagcgtttacctgatattgtgtgaaaacagcgcgttctattgcggcatcagcccgaatccgcaacagcggcttgccgcccacacaaccggtaaaggcgcgaaatatacccgcgtattcaaaccggtggcgatgcgtatcgttgcaggcgggatggataaaggcactgcgctcaaacaggaaatcgccgtcaaaaaactgaccgccgcacaaaaacggaaattgtgggaacaggcggaaaaaatgccgtctgaaacctga

SEQ ID NO: 58889 - DNA, 1056 bp, Neisseria meningitidis; identical to SEQ ID NO: 42642

SEQ ID NO: 58890 - DNA, 234 bp, Neisseria meningitidis; identical to SEQ ID NO: 51696

SEQ ID NO: 58891 - DNA, 780 bp, Neisseria meningitidis; identical to SEQ ID NO: 45496

SEQ ID NO: 58892 - DNA, 978 bp, Neisseria meningitidis
atgatttatccgtggcataatgagcaatggcggcagattgcggaacattgggagcgtcgtcccaatgcatggctgtttgccggcaaaaaagatacggggaaaactacatttgcccgctttgcggcgaaggcactgttgtgcgaaacccctgcaccgggctgcaaaccctgtggcgaatgtatgtcctgccatctgtttggacagggaagccatcccgatttttacgaaatcacccccttgtcggacgaacccgaaaacggacgcaaactgttgcagatcaaaatcgatgccgtcagggaaatcatcgataatgtgtacctgacttcggtacggggcggtttgcgcgtgattctgattcatcctgcggaaagtatgaatgtccaagccgccaacagtttgttgaaagtgttggaagagccgccgccacaagtggtctttttgctggtcagccacgcggcggacaaggttttaccgaccattaaaagccgctgccggaagatggttttgcccgcgccttcccatgaagaggcattggcatatctgcgtgaaaggggtgtggcggaacctgaggaacgtctggctttccattccggagcgccgctgtttgatgaggcggacggtgtccgtgcgttgcggattaaactgttggatattttggcagaaccaaggttgttgaagattttggattacgccgcgcttttcgataaggaaaaacttccgctcgccgtatttgtcgggtggatgcagaaatggctggtcgatttgggattgtgcctgcaacacatgaaacccgtctattatcccgcttatgaagacaggctgcttcagacggtatccggtttccgcccgcgcaatgtatttgcggcggaggatatgctcaaacagcttgccccttacgggtttcatactttaaatgtcaaaatgcagatcgagcatctgctcatcaattatttggaattgaagaaagagaacgggtga

SEQ ID NO: 58893 - DNA, 996 bp, Neisseria meningitidis
atgaaaacatctatccgatacgcactgcttgccgcagccctgaccgccgcaacccccgcgctggcagacattaccgtgtacaacggccaacacaaagaagcagcacaagccgttgcagatgcctttacccgggctaccggcatcaaagtcaaactcaacagcgccaaaggcgaccagcttgccggtcaaatcaaagaagaaggcagccgaagccccgccgacgtattctattccgaacaaatcccggcactcgccaccctttccgcagccaacctcctagagcccctgcccgcctccaccatcaacgaaacacgcggcaagggcgtgccggttgccgccaaaaaagactgggtggcactgagcggacgttcgcgcgtcgtcgtttacgacacccgcaaactgtctgaaaaagatttagaaaaatccgtcctgaattacgccacgccgaaatggaaaaaccgcatcggttacgcccccacttccggcgcgttcttggaacaggttgtcgccatcgtcaaactgaaaggcgaagcggccgcattgaaatggctcaaaggtctgaaagaatacggcaagccttacgctaaaaactccgtcgcccttcaagcggttgaaaacggcgaaatcgatgccgccctcatcaacaactactactggcacgcttttgcgcgtgaaaaaggcgtacaaaatgtccacacccgcctgaatttcgtccgccacagagatcccggcgcactcgttacctattccggcgcagccgtgttaaaatcctcccaaaacaaggatgaggcgaaaaaattcgtcgccttcctcgccagcaaggaaggacagcgcgccctgaccgccgtccgtgccgaatatcctttgaatccgcacgtggtatccactttcaatttggaacccatcgccaagttggaagcaccccaagtgtccgccaccactgtttccgaaaaagaacacgccacccggctgcttgagcaagccggtatgaaataa

SEQ ID NO: 58894 - DNA, 510 bp, Neisseria meningitidis; identical to SEQ ID NO: 55037

SEQ ID NO: 58895 - DNA, 195 bp, Neisseria meningitidis; identical to SEQ ID NO: 55922

SEQ ID NO: 58896 - DNA, 228 bp, Neisseria meningitidis; identical to SEQ ID NO: 44482

SEQ ID NO: 58897 - DNA, 303 bp, Neisseria meningitidis; identical to SEQ ID NO: 42310

SEQ ID NO: 58898 - DNA, 699 bp, Neisseria meningitidis
atgagttttgaaatttaccgttacaacccggatgttgatgccaagccttatatgcagcgttacgagttggaattggaaccgaccgacgtgaaacttttggacgctttagtgcgcctgaaagcacaagacgataccttgtctttccgccgctcctgccgcgaagggatttgcggttctgacggtatgaacatcaacggcaaaaacggcttggcgtgtttgaccgatctgcgtggcttgaaacagccggttaaaattcgtcctctgccaggtctgcctgttatccgcgacctgattgtggatatgacccagttcttcaaacaataccattccgtcaaaccttatgttgtcaacgataatccgattgatgcggacaaagagcgtctgcaaactcaggaagagcgtaaagagttggacggtttgtacgagtgtattttgtgcgcctgctgttcgactgcctgcccgtcattttggtggaaccctgataaattcgtcggtccgtccggtttgctgaatgcttaccgtttcattgcggacagccgtgataccatcactaatgagcgtttggataatctgaacgacccataccgtttgttccgttgccacaccattatgaactgcgtagacgtatgtcctaaacacttgaatccgacccgagccatcggtaagattaaagagattatgttgaaacgggccgtttaa

SEQ ID NO: 58899 - DNA, 1347 bp, Neisseria meningitidis
atgtcggataacgttccaacgattgcggcagtcgctaccgcacccgggcgcggcggcgtgggcgtgatacgcatatcggggaaaaacctgctgccgatggcagaggctttgtgtgggaaaacgcccaagccgcgcgtggcaacctatgctgattttacggacgcggacggtcaggcaatcgacagcgggcttttgctgttttttgccgcaccggcaagttttacgggcgaagatgttatcgagcttcagggacacggcgggccggtagtgatggatatgctgctgaaccgctgtttggaattgggcgcgcgccttgccgaaccgggcgagtttacgaagcgtgcgtttttaaacgacaaactggacttggcacaggcggaaggcgtggcggatttgattgacgcatccagccgttcggcggcgcgtctggcgttgcgctcgctcaagggcgatttttcgcggcggatacacggtctggtcgaagacttgattaccttacggatgctggtcgaagcgacgctggattttcccgaggaagacatcgattttctcgaagcggcagacgcacgcggcaaactggacggcttgcgccgcgccgtggatgatgtgcttgccaacgcgcagcagggcgcgattttgcgcgaaggtctgaatgtcgtattggtcggcgcgccgaatgtgggcaagtccagcctgctgaacgcgttggcgggcgacgaagtggcgattgttaccgatattgccggaacgacgcgcgacgcggtcagggaacgtatcctgattgacggcgtgccggtgcatattgtcgatacggcaggtttgcgcgagacggacgacgtggtcgagcgtatcggcatcgaacgcagccgcaaagccgtatccgaagccgatgtcgcgctggtgttggtcgatccgcgcgagggtttgaatgaaaagacacgggcgattttggacgcgttgccgccggagttgaaacgcatcgaaatccacagcaaatccgatttgcacgcacacgcggcaggcgggttcggtacgggcgcggaaaccgtcatcgcgttgtcggcgaaaaccggcgacggcttggacgcgctgaaacggacgttgttgcgcgaggccggttggcagggcgaaagcgaagggttgtttttggcgcggacgcggcacgtcaacgcactcaaagcagcgcaggaagaattgtcgctggcggcattgtgcggcaaccatcaaatcgagctgtttgccgaacacttgcgcttggcgcaggtcgcatgcggcgaaatcacgggcgagtttacggcggacgacctgctcggcgtgattttttcgaggttttgtatcggaaaataa

SEQ ID NO: 58900 - DNA, 693 bp, Neisseria meningitidis; identical to SEQ ID NO: 50966

SEQ ID NO: 58901 - DNA, 822 bp, Neisseria meningitidis
atgatgcggatattttcgacaggaggaaaaatggatacgcaggcagttatcacacatatcgcccgatggttggacgaatacgccgcccgggcaaatgcaaaagggtttgtcgtgggcgtttccggcggcatcgattccgccgtcgtctccgcactcgccgcccgcaccggccgccccacgctgcttctggatatgccgatacgccaacaccccggccagcttgagcgggcaaggctgcacatccgcaatctgcaacggcaatatgccaatgtaagcgcgcaaacggtcgatctgaccgacaccttccagacctttgaacaaaccgtcggcactcatcagacggcatttgccaatcagccgctttccctcgccaacgccagaagccgcctgcgtatgctgaccctgtactactacgggcagatacacggactgctggttacggggacaggtaataagattgaagatttcggcgtgggcttttttactaaatacggcgacggcggcgtggacatcagcccgattgccgacctgaccaaaacgcaggtttaccggcttgccgaagcattgggcgtggacgaggcgattcaaaaagccccgccgaccgacggcctgtgggatacggaacgcaccgacgaagaacagatgggcgcaagctatcccgaactggagtgggcaatgggcgtgtacggcacgcgcaaacccgaagattttgaagggcggcagcgcgaagttctggaaatctatacgcggctgcaccgcgcgatgcagcacaaaatcaacccgattcccgtgtgccgcattccgcccgaattgttgggctga

SEQ ID NO: 58902 - DNA, 1260 bp, Neisseria meningitidis; identical to SEQ ID NO: 42957

SEQ ID NO: 58903 - DNA, 669 bp, Neisseria meningitidis; identical to SEQ ID NO: 50388

SEQ ID NO: 58904 - DNA, 1851 bp, Neisseria meningitidis
atgtacctaccctctatgaagcattccctgccgctgctggcggccctggtgcttgccgcgtgttcttcgacaaacacactgccagccgacaagaccccggcagacaatatagaaactgccgacctttcggcaagcgttcccacccgccctgccgaacccgaaggaaaaacgttggcagattacggcggctacccgtccgcactggatgcagtgaaacagaaaaacgatgccgccgtcgccgcctatttggaaaacgccggcgacagcgcgatagcggaaaatgtccgcaacgagtggctgaagtctttgggcgcacgcaaacagtggacgctgtttgcacaggaatacgccaaactcgaacctgaagggcgcgcccaagaagtcgaatgctacgccgattcgagccgcaacgactatacgcgtgccgccgaactggttaaaaatacgggcaaactgccttcgggctgcaccaaactgttggaacaggcagccgcatccggcttgttggacggcaacaatgcctggaggcgcgtgcgcggactgctggccggccgccaaaccacagacgcacgcaaccttgccgccgcattgggcagcccgtttgacggcggcacacaaggttcgcgcgaatatgccctgttgaacatcatcggcaaagaagcacgcaaatcgccgaatgccgccgccctgctgtccgaaatggaaagcggtttaagcctcgaacagagcagtttcgcgtggggcgtattggggcattatcagtcgcaaagcctcaatgtgcctgccgccttggactattacggcaaggttgccgaccgccgccaactgaccgacgaccaaatcgagtggtacgcccgcgccgccttgcgcgcccgacgttgggacgagctggcttccgtgatctcgcatatgcccgaaaaactgcaaaaaagcccgacctggctctactggctggcacgcagtcgcgccgcaacgggcaacacgcaagaggcggaaaaactttacaaacaggcggcagcgacgggcaggaatttttatgcggtgctggcgggggaagagttggggcgcaaaatcgatacgcgcaacaatgtgcccgatgccggcaaaaacagcgtcctccgtatggcggaagacggcgcgattaagcgcgcgctggtgctgttccgaaacagccgaaccgccggcgatgcgaaaatgcgccgtcaggctcaggcggaatggcgtttcgccacacgcggcttcgatgaagacaagctgctgaccgccgcgcaaaccgcgttcgaccacggtttttacgatatggcggtcaacagcgcggaacgcaccgaccgcaaactcaactacaccttgcgctacatttcgccgtttaaagacacggtaatccgccacgcgcaaaatgttaatgtcgatccggcgtgggtttacgggctgattcgtcaggaaagccgcttcgttatgggcgcgcaatcccgcgtaggcgcgcaggggctgatgcaggttatgcctgccaccgcgcacgaaatcgccggcaaaatcggtatggatgccgcacaactttacaccgccgacggcaatatccgtatggggacgtggtatatggcggacaccaaacgccgcctgcaaaacaacgaagtcctcgccaccgcaggctataacgccggtcccggcagggcgcgccgatggcaggcggacacgcccctcgaaggcgcggtatatgccgaaaccatcccgttttccgaaacgcgcgactatgtcaaaaaagtgatgaccaacgccgcctactacgccgccctcttcggcgcgccgcacatcccgctcaaacagcgtatgggcattgttcctgcacgctga

SEQ ID NO: 58905 - DNA, 813 bp, Neisseria meningitidis
atggaaaatatcggcaggcagcgacccatcggcgtttttgactcgggaatcggcggtttgaccaatgtgcgcgcgctgatggagcggctgccgatggagaacatcatttatttcggcgacacggcgcgcgtgccttacgggacgaaatctaaggcgaccatcgaaaatttctcgatgcagattgtcgattttttattggaacacgatgttaaggcgatggttatcgcgtgcaacacgattgcggcggttgtggggcagaaaatccgtcaaaagacgggcaatatgcctgtgttggacgtgatttccgccggcgcgaaagccgcgctgtcaaccacgcgcaacaacaaaatcggcattatcgccaccaataccacagttaacagcaatgcttatgcgcgcgccatccatagggacaaccccgacacgctcgtccgcacgcaggccgcgccgctgctcgtccccttggtggaggaaggttggttggaacacgaagttacccgcctgaccgtatgcgaatacctcaaaccattgcttgcagacggcatcgatacgctggtgttgggctgcacgcactttcccttgctcaaacccttaatcggcagggaggcgggcaatgtcgcgttggttgattctgcaattacgactgccgaagaaaccgcacgtgtgctggcacaggaagggttgctcaataccgacaacaacaatcccgactaccgtttttatgtcagcgatattcctttgaaattcagaaccataggcgagcgttttctgggcaggacgatggagcagattgaaatggtgtctttgggttaa

SEQ ID NO: 58906 - DNA, 1179 bp, Neisseria meningitidis
atggcaaaaatgatgaaatgggcggctgttgcggcggtcgcggcggcagcggtttggggcggatggtcttatctgaagcccgagccgcaggctgcttatattacggaagcggtcaggcgcggcgacatcagccggacggtttctgcaacaggggagatttcgccgtccaacctggtatcggtcggcgcgcaggcatcggggcagattaagaaactttatgtcaaactcgggcaacaggttaaaaagggcgatttgattgcggaaatcaattcgacctcgcagaccaatacgctcaatacggaaaaatccaagttggaaacgtatcaggcgaagctggtgtcggcacagattgcattgggcagtgcggagaagaaatataagcgtcaggcggcgttatggaaggaaaacgcgacttccaaagaggatttggaaagcgcgcaggatgcgcttgccgccgccaaagccaatgttgccgagctgaaggctctaatcagacagagcaaaatttccatcaataccgccgagtcggaattgggctacacgcgcattaccgcaacgatggacggcacggtggtggcgattctcgtggaagaggggcagactgtgaacgcggcgcagtctacgccgacgattgtccaattggcgaatctggatatgatgttgaacaaaatgcagattgccgagggcgatattaccaaggtgaaggcggggcaggatatttcgtttacgattttgtccgaaccggatacgccgattaaggcgaagctcgacagcgtcgaccccgggctgaccacgatgtcgtcgggcggttacaacagcagtacggatacggcttccaatgcggtctactattatgcccgttcgtttgtgccgaatccggacggcaaactcgccacggggatgacgacgcagaatacggttgaaatcgacggcgtgaaaaatgtgctgattattccgtcgctgaccgtgaaaaatcgcggcggcaaggcgtttgtgcgcgtgttgggtgcggacggcaaggcggcggaacgcgaaatccggaccggtatgagagacagtatgaataccgaagtaaaaagcgggttgaaagagggggacaaagtggtcatctccgaaataaccgccgccgagcaacaggaaagcggcgaacgcgccctaggcggcccgccgcgccgataa

SEQ ID NO: 58907 - DNA, 522 bp, Neisseria meningitidis; identical to SEQ ID NO: 43029

SEQ ID NO: 58908 - DNA, 966 bp, Neisseria meningitidis
atgagctacacgcaactgacccaaggcgaacgataccacatccaatacctgtcccgccactgcaccgttaccgaaatcgccaaacagctgaaccgccacaaaagcaccatcagccgcgaaatcagacggcaccgcacccaagggcagcaatacagcgccgaaaaagcccagcggcaaagccagactatcaaacagcgtaagcgacaaccctataagctcgattcgcagctgattcagcacatcgacccccttatccgccgcaaactcagtcccgaacaagtatgcgcctacctgtgcaaacaccaccagatcacgctccaccacagcaccatttaccgctaccttcgccaagacaaaagcaacggcagcacgttgtggcaacatctcagaatatgcagcaaaccctaccgcaaacgctacggcagcacatggaccagaggcaaagtacccaaccgtgtcggcatagaaaaccgacccgctatcgtcgaccagaaatcccgtatcggcgattgggaagccgacaccattgtcggcaaaggacagaaaagcgcattattgaccttggtcgaacgcgttacccgctacaccatcatctgcaaattggatagcctcaaagccgaagacactgcccgggcagctgttaggacattaaaggcacataaagacagggtgcacaccatcaccatggataacggcaaagagttctaccaacacaccaaaataaccaaagcattgaaagcggagacttatttttgtcgcccttaccattcttgggagaaagggctgaatgagaacaccaacggactcatccggcaatacttccccaaacaaaccgatttccgtaacatcagtgatcgggagatacgcagggttcaagatgagttgaaccaccgaccaagaaaaacacttggctacgaaacgccaagtgttttattcttgaatctgttccaaccactaatacactag

SEQ ID NO: 58909 - DNA, 876 bp, Neisseria meningitidis
atgtttcagaaacacttgcagaaagcctccgacagcgtcgtcggagggacattatacgtggttgccacgcccatcggcaatttggcggacattaccctgcgcgctttggcggtattgcaaaaggcggacatcatctgtgccgaagacacgcgcgttaccgcgcagcttttgagcgcgtacggcattcagggcaaacttgtcagcgtgcgcgaacacaacgaacggcagatggcggacaagattgtcggctatctttcagacggcatggttgtggcacaggtttccgatgcgggtacgccggccgtgtgcgacccgggcgcgaaactcgcccgccgcgtgcgtgaggtcgggtttaaagttgtccctgttgtcggcgcaagcgcggtgatggcggctttgagtgtggccggtgtggcgggatccgatttttatttcaacggttttgtaccgccgaaatcgggagagcgcaggaaactgtttgccaaatgggtgcgggcggcgtttcccgtcgtgatgtttgaaacgccgcaccgcatcggtgcgacgcttgccgatatggcggaactgttccccgaacgccgattaatgctggcgcgcgaaattacgaaaacgtttgaaacgttcttaagcggcacggttggggaaattcagacggcattgtctgccgacggcaaccaatcgcgcggcgagatggtgttggtgctttatccggcgcaggatgaaaaacacgaaggcttgtccgagtccgcgcaaaacatcatgaaaatcctcacagccgagctgccgaccaaacaggcggcggagcttgccgccaaaatcacgggcgagggaaaaaaagctttgtacgatctggcactgtcttggaaaaacaaatga

SEQ ID NO: 58910 - DNA, 747 bp, Neisseria meningitidis; identical to SEQ ID NO: 50910

SEQ ID NO: 58911 - DNA, 348 bp, Neisseria meningitidis; identical to SEQ ID NO: 51281

SEQ ID NO: 58912 - DNA, 1011 bp, Neisseria meningitidis
atgaacgacaacacgcaaacccttcccccgcgccacctgtccgtcgccccgatgctcgactggacggacaggcactaccgttaccttgcccgccagattacccgaaatacttggctgtacagcgaaatggtcaatgccggtgcgattgtttacggcgacaaagaccgctttttgatgttcaacgaaggtgagcagcccgtcgccctgcaactgggcggcagcgatccgtccgatttggcgaaagcggccaaagccgccgaagtatacggctacaacgaggtcaacctcaactgcggctgccccagtccgcgcgtgcagaaaggctcgttcggcgcgtgtctgatgaacgaagtcgggctggttgccgactgcctcaacgccatgcaggatgcggtcaagattcccgttaccgtcaaacaccgcatcggtgtggacaggcagaccgaataccaaaccgttgccgatttcgtcggcacgctgcgcgacaaaaccgcctgcaaaacctttatcgtccacgcccgcaacgcttggctggacggtctttcccccaaagaaaaccgcgacgttcccccgttgaaatacgattacgtttaccgcctcaagcaggagtttcccgggctggaaatcatcatcaacggcggcatcaccaccaacgaagcaatcgccggacacctgcaacacgttgacggcgtgatggtcgggcgcgaggcgtaccacaacccgatggtgatgcgcgaatgggacaggctgttttacggcgatacccgcagcccgattgaatacgccgatttggtgcagcgtctctacacatacagccaagcccaaatccaagccggacgcggcacaatcttgcgtcacatcgtccgccacagccttgggctgatgcacggtctgaaaggcgcgcggacttggcggcgtatgctttccgacgcaacgctcttgaaagacaacgacggcagcctgattctcgaagcgtggaaagaggtcgaacgggcaaatatgcgcgaatag

SEQ ID NO: 58913 - DNA, 570 bp, Neisseria meningitidis; identical to SEQ ID NO: 45138

SEQ ID NO: 58914 - DNA, 246 bp, Neisseria meningitidis; identical to SEQ ID NO: 42999

SEQ ID NO: 58915 - DNA, 420 bp, Neisseria meningitidis
atggacaataagaccaaactgcgcttgggcggcctgattttactgaccaccgccgttttaagcctcattatcgtattgattgtcgactcctggccgcttgccatcctgcttgccgccgtcatcgtcgccgccgctgcgggcggttttgtttggacatcccgccgacagcaacgccagtttatcgaacgcctgaaaaaattcgacatcgatcccgaaaaaggcagaatcaacgaggcaaacctgcgccgtatgtaccacagcggcggacaacaccagaaagatgcgattaccctgatctgcctgtcgcaaaaatgttcggtggacgaggcgcacgctatgttcaaaaaacgcccgacacgtcaggaaatcaatcaaatggcggcaaaacagtcgcgcggtcagaaacgtccgcaccgttaa

SEQ ID NO: 58916 - DNA, 651 bp, Neisseria meningitidis; identical to SEQ ID NO: 51339

SEQ ID NO: 58917 - DNA, 600 bp, Neisseria meningitidis; identical to SEQ ID NO: 44985

SEQ ID NO: 58918 - DNA, 282 bp, Neisseria meningitidis; identical to SEQ ID NO: 43562

SEQ ID NO: 58919 - DNA, 642 bp, Neisseria meningitidis; identical to SEQ ID NO: 53928

SEQ ID NO: 58920 - DNA, 390 bp, Neisseria meningitidis; identical to SEQ ID NO: 51660

SEQ ID NO: 58921 - DNA, 171 bp, Neisseria meningitidis; identical to SEQ ID NO: 36504

SEQ ID NO: 58922 - DNA, 384 bp, Neisseria meningitidis
atgttccgtaccatgcttggcggaaaaatccaccgcgccaccgttaccgaagccgatttgaactatgtcggcagtattaccgtcgatcaagacctgttagacgcggcaggcatctaccccaacgaaaaagtcgccattgtcaacaacaacaacggcgaacgttttgaaacctataccattgcagggaaacgcggcagcggcgtgatttgtctgaacggtgctgcagccaggctggtacagaaaggcgatatcgtcatcatcatgtcttacgtccaactctccgaacccgaaatcgccgcacacgaacccaaagtcgtcttggtagacggaaacaacaaaatccgcgacatcatctcctacgagccgccgcacaccgtgctgtaa

SEQ ID NO: 58923 - DNA, 2019 bp, Neisseria meningitidis; identical to SEQ ID NO: 57434

SEQ ID NO: 58924 - DNA, 1194 bp, Neisseria meningitidis; identical to SEQ ID NO: 50684

SEQ ID NO: 58925 - DNA, 960 bp, Neisseria meningitidis; identical to SEQ ID NO: 42610

SEQ ID NO: 58926 - DNA, 2559 bp, Neisseria meningitidis
atgcctgcaaacctgtcttcagcactggaaaccttcaaacggcagcgcgatgccgccgaagcgcattatttgaaagccaaccgcgtgtcggtatttttcagggaatatacggcggcagtcgaaaccttactggcggcattgtgggtagaacattttcaaaacagcgcgttatgcctgatggcggtgggcggcttcgggcgcggcgaactgtatccctgttcggatgtggatttggcggttgtctcccctgccccgctttcagacggcattcaggaacagattgcccggtttgttcaaaccctatgggactgcaaactgatgccgtctgtaaaaagcggcggcattggcgaactgtgcgaaagcgtgcgcgacgatattacgggggacacggcgtttttagaggcccgttttttgttcggcaaccgccaaacggcggacgaactggcgaaaaaaatgaacgcgcagcgcaatgtgccggcgtttgtcgaggcaaaactggtggagatggaacaccgccacgccaaatcgcaaggctcaggggcggtattggaaccaaacatcaaaagctgtccgggcggtctgcgcgacatccacaccctgctttggatagcgaaggcgcaaggcttggcgaccgacctgcccgacctgctcaaacagcggattttgacgcgtgccgaagccggtatgctttcgcacggctaccgccgcctcgcccacatccgcatccatctgcatttaaacgccaagcgcgccgaagaccgcctgctgttcgatttgcagccgcaagtcgccgaaagcatgggttatgaaggcttgaacctccgccgccaaagcgaagaactgatgcgcgtgttttaccgcgcgattaaaaccgtcaaacaactgggcggcatcctcacgcctatgctgcaaagccgcgtttcctccaccccgttgcgcgttaccctgcggattgacgacgactacatccaagtcaacaaccaaattgccgcgcggcacaccgatatttttttcagacggcccgaacacattttcaaaatcgtcgaaatcatgcagcagcgcaacgatattaccgcgctcgaaccgcaaaccctgcgcgcatggtggggcgcgacgcgcaaaatcaaccgcagcttctaccaaaattctgaaaaccgccaccgcttcgccggctttttccgcaacggcaacggactgacccaaaccctgcgcttcctcaacctctacggcgtattgggacgctacctgcccgcgtgggaaaaaatcgtcggcctgctccagcacgacctgttccacatctatcccgtggacgaccacatcctcaccgtcgtccgcaacgtccgccgccttgccttggatatgcacagccacgagctgccctacgcctctgcactgatgcagtcctttgaaaaacaagacatcctctaccttgccgcctttttccatgacatcgccaaaggacgcggcggcgaccatgccatacaaggcatcgcagacgcgcgccaatttgccgccgaccacttcctgaccgaagaagaaagcgacctgctcgcctggctggttgaaaaccatcttcttatgtccaccgtcgcccaaaaagaagacatccaagaccccagcgtactcgatgccttctgcaaacgcgtccaaacccacgaacgcctcagcgcgctctaccttctgaccatttccgacatacgcggtaccaatcccaagctgtggaacgcatggcgcgccagcctgctggaaagcctcttccatgccgccggccgctaccttacaggcaacggcggcaacccgcacaccctcttcggccgccgccggcaggaagccgccgacttactcacccgcgccgccgtccccgaaaaacagcagaaaaaactatggaacgcgctcggttccgcctacttcgcccgccaccagtcccgcgaaatcctgtggcacgccgccaacctagtccacgactttgaaacccccatcgtccgcagccgcatcctgcccaaaagcgacagctttcaagtcatggttttcatgcccaacggcccgcgcctgttcgcccgcctctgccgcatcttcagccgccacggcttcgatatcctcgccgcccgcgcctttattaccgaacacgactacatcctcgacaccttcatcgtgcaaatcccctcgcagcacgctcccgaagactaccccgacatccaaagcgcgctcgaagccgaactcaacagctttatccacggacacaccgttgccgaaatctccagccatagccgccgcatcagccgccgcagccgctacatgccgatcgcgccaagcatcaccatcacccccgaagaagactatccggactggtactccgtcgaaattaccgccgtcaaccgccccttcctgctcgccgatatggcggaagtctttttcgcccacaacgtcagcctgcgctatgccaaaatctccacactggatgaacgcgccgaagacagttttaccgtttttagcctagacctgaaaaacccaaaaatccagtcctcattgaagcagacgctgctggaacaattatcataa

SEQ ID NO: 58927 - DNA, 129 bp, Neisseria meningitidis; identical to SEQ ID NO: 45231

SEQ ID NO: 58928 - DNA, 585 bp, Neisseria meningitidis
atgatcagcagactgaccggcaaactggttgaaaaaaaccctccgcaaatcgtcatcgatgtcaacggtgtcggctatgaggccgacgtatcgatgcagaccttctacaacctgccgcccgtgggtgaaagcgtacaactgtttacccagcttatcattcgggaagacgcacatcttttatttggttttgccactgcggaagaacgcaagaccttccgccaactgattaaggtcggcggcatcggcgcgaaaacggctttgggcattttgtcagcgatgacggcagacgagctggcgcgggcggttgccgaagaagatgtcaaacgcctgtcttccgcgccgggaatcggcaaaaaaaccgccgaacgtatggtcttggaactgcgcggcaagctggtcgcgcatgcggtaacggacgggctgtttgccgccgcacccgccgccgacgaaacggaagacatcgtcagcacgctgcttgcgctgggttacagcgaacgcgaagcaaaagcggcggtcaaaggcgttccggaggggacggacgtgggcgaaggcgtgcgccttgctttgaaaaacctgctgaaataa

SEQ ID NO: 58929 - DNA, 1080 bp, Neisseria meningitidis; identical to SEQ ID NO: 43538

SEQ ID NO: 58930 - DNA, 996 bp, Neisseria meningitidis; identical to SEQ ID NO: 51261

SEQ ID NO: 58931 - DNA, 1248 bp, Neisseria meningitidis
atgcaacttaccgctgtcggactcaatcatcaaaccgcacctttaagcatacgggaaaagctggcgtttgccgccgccgccctgcctaaagccgtccgcaatcttgcccgaagcaatgcggcaacggaggcggtaatcctttctacctgcaaccgcaccgagctttactgcgtcggtgattcggaagaaatcatccgatggcttgccgattaccacagtttgccgattgaagaaatccgtccgtatctgtacgcgctggatatgcaggagactgtgcgccatgctttccgcgtcgcctgcgggctggattcgatggtgttgggcgagccgcagattttaggacagattaaggatgccgttagggttgctcaagagcaggaaagtatgggtaagaaactcaatgccctgttccaaaaaaccttttccgttgctaaagaggtccgtaccgatactgccgtcggcgaaaactcggtttccatggcttccgcttccgtcaaattggcggaacagatttttcccgacatcggcgatttgaatgtcttgtttatcggcgcaggcgaaatgattgagctggttgccacttattttgccgccaaaagtccccggctgatgacggttgccaaccggacgctggcgcgtgcacaggagttgtgcgacaagctcggtgtcaacgccgaaccgtgcctgctgtccgatctgcctgccattctgcacgattacgacgtagtggtttcttcaacggcaagccagttgcccattgtcggcaaaggcatggtggagcgtgcattgaaacaaaggcagagtatgccgttgtttatgcttgacttggccgtgccgcgagacattgaggcggaagtcggagatttgaacgatgcctatctttatacggtggacgatatggtcaatatcgtccaaagcggcaaggaggcaaggcagaaggccgccgccgccgccgaaacgctggtgtccgagaaggttgccgaatttgtccggcagcagcagggcaggaagagcgtccccttgattaaagccttgcgggacgagggcgagaaagcgcgcaagcaggtgttggaaaatgcgatgaaacagcttgctaaaggcgcaacggcagaagaggttttggaacggctgtccgtccaactgaccaacaagctgctgcattcgccgacccaaactttgaataaggcgggggaagaagataaggatttggttcatgccgtcgcgcagatttatcatttggacaaataa

SEQ ID NO: 58932 - DNA, 1041 bp, Neisseria meningitidis
atgcaacccatccgataccgaaccgacctcaccccctacaacaccttcggtcttcgcgcccaagcccgagcctttattgcgcttgaacacgccgacgagttgtgcgacatcgtccgactgcccgagttcgaccgcgatactgttttatggctgggcggcggcagcaacatccttttgatgcaggattacgccggactggtcgtacacatggaaaacaaaggcatacgcgagattgcgcgttcagacggcattgttcgcatcgaagcgcaggcgggcgaaatctggcacgattttgtcctgcacaccgtcgcgctgggcttgaatgggctggaaaacctgagcctgattccgggtacggtcggcgcgtcgcccgtgcagaacatcggcgcatacggcgtagagacgaaagatgtgattcacagcgtgcgctgcttcgatttggatacggaaacctttgtaaccctttccaatgccgactgccgcttcgcctaccgcgaaagcctgttcaagcaggaaggtaaagggcgttatgtgattgtttcggtcgtatttgcattaaaaacgcattttgtgccgaacttggattacggcgatttggcggccgccgttgccgaactgagcgcgggcagggtgccgacggcgaaagatgtttccgatgcagtgtgtgcaatccgcaacagtaaacttcctaatcctaacgtgcttggtaatgtcggcagtttctttaaaaatcccgtcatcggcgcggaaaaagctgccgccctgttggagcagcatcccgatatgccgcattatccgcagccggacggttcggtcaaactcgccgccggctggctgatcgaccaatgtcgtctgaaaggcttccaaatcggcggcgcggcggtacatgacaggcaggctttggtcttagtgaacaaaaacaacgcctcggcaaacgatgtccggcagttggcgcaacacatcaaatttacagtatttgctcggtttcaggtagaattgcacgccgaacccaattggctgcctgcttcgttcagcctgtaa

SEQ ID NO: 58933 - DNA, 1143 bp, Neisseria meningitidis
atgaatactttatatacacttttcgccacctgcccgcgcggcttggaaaccgttttatctcaagaactcggaagcctcggctgtaccgatgttcaagcgtttgacggcggcgtttcctgccggggcggattggaacaggcctacgccgccaacctgcactcgcgcaccgccagccgtatcctgctgcgtctgaccaaaggcacataccgcaatgagcgcgacatctacaaacttgccaaaaacatcaactggttcaactggtttaccttgcagcagacgttcaaagtcaaagtcgaggcaaagcgtgccaacgttaagagcatccaatttgtcggactgaccgtcaaagatgccgtctgcgatgccttccgcgacatttacgacgcacgtccgagcgtggacaaagccgcgcccgatgtccgcatccacgcctttttggacgaacgcaatgttgaaatcttcatcgacacttcgggcgaagccctgttcaaacgcggctaccgcctggataccggcgaagccccgctgcgcgaaaaccttgccgccggattgctgctctcggcaggctacgacggcacgcagccgtttcaagacccgttttgcggcagcggcacgattgctatcgaagccgcttggattgccgcccgccgcgcgccgggtatgatgcgccgtttcggttttgaaaaactgcaaaatttcgataaaacgctgtggtcggatttgcgccgccgtgccgaagcgcaggttaaaccggcttttgcaccgatttcgggcagcgacagcgaccgccgcatcattcagacggcattggccaacgcacgcagtgccggggtggacgacatcgtttccttcagcgttgccgacgcgcaatccgtccgtccgaacggcgtgggcggcattatggtgtccaatccgccctacggtgtgcgccttgaggaagtccgcgctttgcaggcactgtatccgcagctggggacgtggttgaaaaaacactatgccggctggcaggtcggtatgtttaccggcgacagggaaatgcccaaattcatgcgcctgtcgcccaagcggaaaattccgctttataacggcaacctcgactgccgcctgttcctgattgatatggtgcagggatcgaaccgttga

SEQ ID NO: 58934 - DNA, 918 bp, Neisseria meningitidis
atggttttggacgggtttgcggcgcattttgacgcttatttggaaaacatcgtgcgcgagggcaagtcggagcacacagtggcggcataccggcgcgatttggaagaactgtttgcgctgttggcacaaatgccgtctgaagctgaaggcggcgtgccgcaggacttgtcgcggcgcgattttacggcggcgttgcggcggctgtcgcagcgcggtttgaatgcgcggacgctggcgcgcaagctgtcgtcttggcggcagtattgtgtttggctggtggaacgcggtctgctgcataccgacccggccgccgacatcaaaccgccgaagcagcccgagcgcgtacccaaagccctgccgcaggaatggctgaaccggatgctggatttgcccgtggacggcggcgacccgctggcggtgcgcgaccacgctctgttcgagctgatgtacggcagcggtttgcgcgtgagcgagatacacggcttgaatgcagatgatgtctatttggacgaggcgtgggtacacgttaccggcaaagggcgcaagcagcggcaggtgccgctgaccggcaaaagcgtggaagccctgaaaaactatctgccgctgcgtcagacggcatcggacggcaaagccctgtttaccggcaggaacggcacgcgcctgagccaacgccaaatccaaaaacgtttggcgcaatgggcggcgcaaaacggcgacggcaggcacgtttcgccgcatatgatgcgccacagctacgccggacacctgttgcaggcttcgcgcgacatcagggcggtgcaggagctgctcgggcacagcagcctttcgaccacgcagatttataccaagctcgatttcgaccacatcgcccgcctgtatgacgaagcccacccgcgcgccaagcggcaggacgaatga

SEQ ID NO: 58935 - DNA, 1287 bp, Neisseria meningitidis; identical to SEQ ID NO: 51267

SEQ ID NO: 58936 - DNA, 612 bp, Neisseria meningitidis; identical to SEQ ID NO: 55932

SEQ ID NO: 58937 - DNA, 621 bp, Neisseria meningitidis; identical to SEQ ID NO: 50724

SEQ ID NO: 58938 - DNA, 120 bp, Neisseria meningitidis
atgtgccacgccgagctgtcggcatggtttgaagacatcctgtcgagcctgggcataaaaacgccgaaggaagagggagtgattgtgtcgaaacggctgagaaagccggagggaaaataa

SEQ ID NO: 58939 - DNA, 381 bp, Neisseria meningitidis; identical to SEQ ID NO: 49318

SEQ ID NO: 58940 - DNA, 321 bp, Neisseria meningitidis; identical to SEQ ID NO: 51943

SEQ ID NO: 58941 - DNA, 2088 bp, Neisseria meningitidis
atggattatttatcaagactgtcctttggatttaacaaaaagctacctgtcattctgcaaacagaagttgctgaatgtggtttagcatgcctgacatccatcttgtcctattatggctttcacactgatttaagaacgttactccaaaaatacaccctgtcattaaagggcgcaaatcttgcagacatcatgagatttggcaatgaaatgaatttaacgccacgagctttgcgtttagagttagatgagctgtcaaatttacaactaccctgcattctccattggaacttaaaccattttgttgtactttgttccatttccaaagacagtatcgtcattatggaccctgctgtcggtatgcgaaaaatcaaaatggacgaagtttcacaaaaattcacagggattgccctagaattattccccaatacccattttgaagagaaaaaagaaacaaagaaaatcaaaatattatctctattaagggggatttcaggcttaaaacgctctttaattcaaatgcttatattagctatttctttggaagtctttgcattggttagtccattctttatgcaatgggtaatagaccatgtcattgtaactgctgataaaaatttattactgacccttactttgggatttggtttactggctatcctgcaacagttaattagcctgttacaagcatgggtaggtatgcacctatctacaactcttaatttacaatggaaagccaatatatttaaaaggttacttgacttacctaatgactatttcagtaaacgacatttaggagatgtgatttcaagatttggttcaatagatcatatccaagaaacactaacttctactttttttgttttagttttaaatagcttaatggctgtttttactttcgtgttaatgacaatttacagcactcaattatcgctgattgttcttttaacacttgttttgtacatactaattcgttggcttgcatattacccattaagaaatgcaacagaagaaaatattgttcatgaagccaaacaaaactcatatttcatggaaaccattcgtggtatccaatcagttaaattatttgataaacattatcaaagacatggcacttggatgagcctatttgtgaatacagtcaataccaagctgacaacagataaactctctgctttatttgaattttcaaataaactgttgtttagcatggaaaatattatcataatttatcttggtgcaagcgcaattttagatggttcatttacagtcggtgttctgatggcttttttggcttataaagggcaatttgaaagcagaacagcttctctcgttgaccaatacatccaaatcaaaatgttagggcttcatgctgaacgtttggctgacattactttaaatgaaacagaaactgaaattattaagtataatcatatacctaaattagataatgaacaactggttcttaaagttgaaaacgtctcattcagatatgctgataatgagccatatctttttgaaaacattaatttggaatttaaagataatgaagcagttgttttaacaggacaatctggtcgggggaagtccactttgttaaacattttaacaggtagcctaaaacctgaaactggtacagttagtattaatgggcatgatatatatcaagtttctccatcctttattaggggattgagcgggattgttcgccaagatgatgtcctttttgcaggttctattggggaaaatatttcattttttgatgaaagcccaaatatggagctcattgaacaatgtgcaaaaatggcacaaatacatgacgatatacttaaaatgccaatgggctatgagaccttgattggcgatatgggaaatatcttatcaggtggacaaaagcagagagttatcttggctcgtgcattgtataaacgacccaaaattctatttttagacgaagcaagtagccatttagatgtagaaaatgaacaaaaaattaaccataacctaaaaagtcttggtattatgaaaataatggttgcacaccgccaagaaacaattcaatcggcagataaaattctgaatttaggttga

SEQ ID NO: 58942 - DNA, 1443 bp, Neisseria meningitidis; identical to SEQ ID NO: 50876

SEQ ID NO: 58943 - DNA, 657 bp, Neisseria meningitidis
atgaccattaaaattatcctgatagacgaccataccctcttccgcagcggcattaaagcccttttgtcgcgccaacacggttttgaagtcatcggcgaagccgcagacggcctctcgggcatcaaaatgattagtcggctgcaacccgatgtcgtcctgctcgatttggatatgcccggcatgaacggacgcgaagcactctcccaaatcatcagcatcaatccgcagcaggcagtgattatgctgaccgtttccgaagacagcgacgacttgaccgaatgtattcgcatcggcgcgcgcggttacctgctgaaaaacatcaacgctgactttctgctcgaaagcatacgcaaagtcgccgaaggcgataatgtattctcgcccgagatgaccgccaaactcgttaaaagcctgatttccccccaacctgcccaagggacacaggcactctcctcacttacccctcgcgaactggaaatcttgggctatctcgccgcaggacacagcaacaaaatcatcgcccgccacctcgatcttgccgaatccaccgtcaaagtccacgttcaaaacctgctccgcaaactcaacctcagcagccgggtgcaggccgccgtttacgccatccggcacaacgtcccccaacccgtgctggaataa

SEQ ID NO: 58944 - DNA, 126 bp, Neisseria meningitidis; identical to SEQ ID NO: 51925

SEQ ID NO: 58945 - DNA, 198 bp, Neisseria meningitidis; identical to SEQ ID NO: 51876

SEQ ID NO: 58946 - DNA, 579 bp, Neisseria meningitidis; identical to SEQ ID NO: 43267

SEQ ID NO: 58947 - DNA, 489 bp, Neisseria meningitidis; identical to SEQ ID NO: 50761

SEQ ID NO: 58948 - DNA, 306 bp, Neisseria meningitidis; identical to SEQ ID NO: 42487

SEQ ID NO: 58949 - DNA, 234 bp, Neisseria meningitidis; identical to SEQ ID NO: 42120

SEQ ID NO: 58950 - DNA, 633 bp, Neisseria meningitidis
atgagaaaaaccaaaaccgaagccttgaaaaccaaagaacacctgatgcttgccgccttggaaaccttttaccgcaaagggattgcgcgcacctcgctcaacgaaatcgcccaagccgccggcgtaacgcgcggcgcgctctattggcatttcaaaaataaggaagacttgttcgacgcgctgttccaacgtatctgcgacgacatcgaaaactgcatcgcgcaagatgccgaagatgccgaaggagggtcttgggcggtattccgccacacgctgctgcactttttcgagcggctgcaaagcaacgacatctactacaaattccacaacatcctgtttttaaaatgcgaacacacggaacaaaacgccgccgttatcgccattgcccgcaagcatcaggcaatctggcgcgagaaaattaccgccgttttgaccgaagcggtggaaaatcaggatttggctgacgatttggacaaggaaacggcggtcatcttcatcaaatcaaccttggacgggctgatttggcgttggctctcttccggagaaaatttcgatttgggcaaaaccgccccacgcatcatcgggataatgatggacaacttggaaagccatccctgcctgcgccggaaataa

SEQ ID NO: 58951 - DNA, 390 bp, Neisseria meningitidis; identical to SEQ ID NO: 51646

SEQ ID NO: 58952 - DNA, 1791 bp, Neisseria meningitidis; identical to SEQ ID NO: 42942

SEQ ID NO: 58953 - DNA, 360 bp, Neisseria meningitidis; identical to SEQ ID NO: 43172

SEQ ID NO: 58954 - DNA, 1527 bp, Neisseria meningitidis
atgaacacgccccttccttattccaattacctcatccgcatcctgacggcatctgtctatgatgtcgcggtcgaaacgcctttggaaccggcacgcagcctttctgtacgtttgaaaaacaacatccttttgaaacgcgaagatttgcagccggttttttcgttcaaaatacgcggcgcgtacaacaaaatgtccaagttgccgaaagatgcgctcgcttgcggcgtgattgcggcaagcgcgggcaatcatgctcaaggcgtggcattgtccgcacagcgtttgggctgccgtgccgttatcgttatgccggagactacgccgaaaatcaaagtggatgcggttaagagccgtggcggcgaggtggttttgcggggcgtttcatacaacgatgcctacgattatgcgatggagttggcggaaaaagaagggttaacctatatcgcgccgtttgatgatcctgatgtgattgcgggacaggggacggtggggatggaaattgtcagccagcatcccgatccaatccgcgccgtattcgtaccgataggcggtggcggtttggcggcgggcgtggcggcatttatcaagcaggtccgccccgaaatcaaagttatcggcgttcagaccaacgattcctgctgtatgaagcagtcggtcgaagcgggtgaaatcgtccatttgaaggatgtcgggctgttttcagacggcacggcggtcaaagtcgtcggaaacgaaaccttccgtctctgcaaagaacttttggatgaaatcattacagtcgataccgatgcggtttgcggcgcggtcaaggatattttcgatgacacgcgcagcattaccgagccggcgggcgcgttggcgttggcgggtctgaaagcctatatcgcccgagaaggcgcggaaaaccaaaccctgattgccgttaccagcggtgcgaatatgaattttcaccgtttgcgccacgtttcggaacggagcgaattgggcgagggcaacgaaggtatttttgccgttaccatccccgaagagcgcggcagcttccttaagtttgtcaatatattgggaaataggaatattaccgagttcaactaccgctacggggacgatgaaaaagcgcatatctttgtcggacttcaagcggcaggcccgcaggatttggcggttatcggcagccggttggatgaggcgggattgcccaatgtcgacctgaccgatgatgagattgccaaaatccatatccgctatatggtcggagggcggacggacaaagtagaaaacgagcgtctggtcagttttgagtttccggagcgtccgggggcgttggcgcgttttttgaaccatatgcagggcggttggaacattacgctcttccattaccgcaaccacggtgcggattacgggcggattttggtcggtatcgatgtgccgccgcacgatgccgccgcatttgacggtttcttggaaagtctgggatacagctatcacgaggaaacgcaaaatgccgcgtacaagctgtttcttgcctga

SEQ ID NO: 58955 - DNA, 477 bp, Neisseria meningitidis; identical to SEQ ID NO: 51448

SEQ ID NO: 58956 - DNA, 480 bp, Neisseria meningitidis
atgaaacacatactccccctgattgccgcatccgcactctgcatttcaaccgcttcggcacatcctgccagcgaaccgtccacccaaaacgaaaccgctatgaccacgcataccctcacctcaaaatacagttttgacgaaaccgtcagccgccttgaaaccgccataaaaagcaaagggatggacatttttgccgtcatcgaccatcaggaagccgcccgccgaaacggcttaacgatgcagccggcaaaagtcatcgtcttcggcacgcccaaagccggtacgccgctgatggtcaaagaccccgccttcgccctgcaactgcccctgcgcgtcctcgttaccgaaacagacggcaaagtacgcgccgcctataccgatacgcgcgccctcatcgccggcagccgcatcggttttgacgaagtggcaaacactttggcaaacgccgaaaaactgatacaaaaaaccgtaggcgaataa

SEQ ID NO: 58957 - DNA, 423 bp, Neisseria meningitidis; identical to SEQ ID NO: 51460

SEQ ID NO: 58958 - DNA, 1347 bp, Neisseria meningitidis
  misc_feature 6, 7, 8, 9, 10, 1328, 1329, 1330, 1331, 1332: 'n' is a, c, g or t
gtgtgnnnnnaacagcccgaatacgcctacctgaaacagcttcagacggccaagaacgtcgattggaaacaggtgcagctggcctacgacaaatgggactataaacaggaaggcttgaccggagccggtgcagcgattgtggtgattattgtaaccgctctaacttatggatacggagcggctgcagcgggtagcgtaactgccgcaggaagtagtacagccgcagctgcaacaacgacagcggcagcaactaccactgtttctactgcagctgccatgcaaaccgcagctttagcctccttgtatagccaagcagctgtagccatcatcaataataaaggcgatgtaggcaaagcattaaaagatctcggcaccagtgatacggtcaagcagattgttacttccgcactgacggcgggtgcattaaaccagatgggcgcagatattgcccaattgaacagcaaggtaagaaccgaactgttcagcagtacgggcaatcaaaccattgccaaccttggaggcagattggccaccaacctcagcaatgcaggtatctcagctggtatcaataccgccgttaacggcggcagcttgaaagacaacttaggcaatgccgcattgggagcattggttaatagcttccaaggggaagccgccagcaaaatcaaaacaaccttcagcgacgattatgttgccaaacagttcgcccacgctttggcgggttgtgttagcggactggtacagggaaaatgtaaagatggggcaattggcgcagcagttggggaaatcgtagctgaatccatacttggcggcagaaaccctgctacactcagcgatgcagaaaagcataaagttatcagttactcgaagattattgcgggcagcgtggcggcactcaacggcggcgatgtgaatactgcggcgaatgcggctgaggtagctgtggtgaataatgctttgaattttgacagtacccctaccaatgcgaaaaagcatcaaccgcagaagcccgacaaaaccgcactggaaaaaatcatccaaagtattatgcctgcacatgcggcaggtgcgatgactaatccgcaggataaggatgctgccatttggataagcaatatccgtaatggcatcacaggcccgattgtgattaccagctatggggtttatgctgcaggttggacagctccgctgatcggtacagcgggtaaattagctatcagcacctgcatggctaatccttctggttgtactgtcatggtcactcaggctgccgaagcgggcgcgggaatcgccacgggtgcggtaacggtaggcaacgcttgggaagnnnnncacacacttaattaa

SEQ ID NO: 58959 - DNA, 1374 bp, Neisseria meningitidis; identical to SEQ ID NO: 51498

SEQ ID NO: 58960 - DNA, 645 bp, Neisseria meningitidis; identical to SEQ ID NO: 42084

SEQ ID NO: 58961 - DNA, 810 bp, Neisseria meningitidis
atgagaccatatgctactaccatttatcaactttttattttgtttattgggagtgtttttactatgacctcatgtgaacctgtgaatgaaaagacagatcaaaaagcagtaagtgcgcaacaggctaaagaacaaaccagtttcaacaatcccgagccaatgacaggatttgaacatacggttacatttgattttcagggcaccaaaatggttatcccttatggctatcttgcacggtatacgcaagacaatgccacaaaatggctttccgacacgcccgggcaggatgcttactccattaatttgatagagattagcgtctattacaaaaaaaccgaccaaggctgggtgctcgaaccatacaaccagcagaacaaagcacactttattcaatttctacgcgatggtttggatagcgtggacgatattgttatccgaaaagatgcgtgtcatttgaatcaagacttaggaaaatcgttgcttgatttgggatttaaaaaaatcccgtctgtctatcctgaatatgaagcttatgaagataaaaggtcgattcctgaaaacccatatattcatgaactacagtatattaagaaaggagaaaatccggcgattattactcatcagaactatcataggtatggagagaacgattacagtactgatataggttcctgtattaacggtttcacggtacagtattacccgtttattcgggaaaagcagcagctcacacagcaggagttggtaggttatcaccaacaagtagagcaattggtacagagttttgtaaacaattcaagtaaaaaataa

SEQ ID NO: 58962 - DNA, 3606 bp, Neisseria meningitidis
atgtttcattttgcatttccggcacaaactgccctgcgccaagcgataaccgatgcctaccgccgtaatgaaatcgaagccgtacaggatatgttgcaacgtgcacagatgagcgacgaagagcgcaacgccgcctccgagcttgcccgccgtttggttacccaagtccgcgccggccgcaccaaagccggcggcgtggatgcgctgatgcacgagttttcactctccagcgaagaaggcatcgcgctgatgtgtctggcagaagccctgctgcgtatccccgacaacgccacgcgcgaccgcctgattgccgacaagatttcagacggcaactggaaaagccatttgaacaacagcccttccctcttcgtcaatgctgccgcctggggtctgctgattaccggcaaactaaccgccacaaacgacaaacaaatgagttccgcactcagccgcctgatcggcaaaggtggtgcccccctcatccgccaaggcgtaaattacgccatgcgcctgttgggcaaacagttcgtcaccggacagaccattgaagaagccctgcaaaacggcaaagaacgcgaaaaaatgggctaccgcttctccttcgatatgttgggcgaagccgcctacacccaagccgatgccgaccgctactaccgcgactatgtcgaagccatccacgccatcggcaaagatgcggcaggacaaggcgtttacgaaggcaacggcatttccgtcaaactttccgccatccatccgcgctactcgcgcgcccaacacggccgtgtgatgggcgaactgttgccgcgcctgaaagagctgttccttttgggtaaaaaatacgatatcggtatcaacatcgatgccgaagaagccaaccgtctggagctgtctttggatttgatggaggcactcgtttccgatcccgatttggcaggctacaaaggcatcggtttcgttgttcaagcctaccaaaaacgttgtccgttcgttatcgactacctgatcgaccttgcccgccgcaacaaccaaaaactaatgatccgcctcgtcaaaggcgcgtattgggacagcgaaatcaaatgggcgcaagtggacggcttgaacggctatccgacctacacccgcaaagtccacaccgacatctcctacctcgcctgcgcgcgcaaactgctttccgcgcaagacgccgtgttcccgcaatttgccacgcacaacgcctacactttgggcgcgatttaccaaatgggcaaaggcaaagattttgaacaccaatgcctgcacggcatgggcgaaaccctgtacgaccaagtcgtcggtccgcaaaacttagaccgccgcgtgcgcgtgtacgccccggtcggcacacacgaaaccctgctcgcctacttggtgcgccgcctgttggaaaacggcgcgaactcgtctttcgtgaatcaaatcgttgatgaaaacatcagcatcgaccgcctgattaagagcccgttcgacaccatcgccgaacaaggcatccacctgcacaacgccctgccgctgccgcgtgatttgtacggaaaaggccgtctgaattcccaaggcgtcgatttcagcaacgaaaccgtgttacaacagcttcaagaacagatgaacaaagccgccgcgcaagacttccacgccgcctccatcgtcaacggcaaagcccgcgatgtcggcgaagcgcaaccgattaaaaaccctgccgaccacggagatgttgtcggtacggtcagctttgccgatgccgcgcttgcccaagaagcggttggtgcagccgttgccgcgttccccgaatggagtgcgacacctgccgccgaacgcgccgcctgcctgcgccgtttcgccgacctgctcgaacagcacacccccgcgctgatgatgcttgccgtgcgcgaagcgggcaaaacgctgaacaacgccattgccgaagtgcgcgaagccgtcgatttctgccgctactacgcaaacgaagccgaacacaccctgcctcaagacgcaaaagccgtcggcgcgattgtcgccatcagcccgtggaacttcccgctcgccatctttaccggcgaagtcgtgtccgcattggcggcaggcaataccgttatcgccaaacccgccgaacaaaccagcctgattgccggttatgccgtttccctcatgcacgaagccggcatcccgacttccgccctgcaactcgtcctcggcgcaggcgacgtgggtgcggcattgaccaacgatgcccgtatcggcggcgtaattttcacaggctcgaccgaagtggcgcgcctgatcaacaaagcccttgccaaacgcggcgacaatcccgtcctgattgccgaaaccggcggacaaaacgccatgattatcgattccaccgcacttgccgagcaagtctgcgccgacgtattgaactccgccttcgacagcgcgggacaacgctgctccgccctgcgcattttgtgcgtccaagaagacgttgccgaccgtatgctcgacatgatcaaaggcgcgatggacgaactcgtcgtcggcaaaccgattcagctcaccaccgatgtcggccccgtcatcgatgccgaagcacagcaaaacctgttgaaccacatcaacaaaatgaaaggcgttgccaagtcttaccacgaagtcaaaaccgctgccgatgtcgattccgaaaaatccacgttcgtccgccccatcctgtttgaattgaacaacctcaacgaactgcaacgcgaagtcttcggtcccgtcctgcacgtcgtccgctaccgcgccgacaaactcgacagcgtcatcgaccaaatcaacagcaaaggctacgccctgacccacggcgtacacagccgcatcgaaggcacagtacgccacatccgcagccgcatcgaagccggcaacgtttacgtcaaccgcaacatcgtcggcgcagtcgtcggcgtacagcccttcggcggacacggtctgtccggcacaggccccaaagcaggcggttcgttctacctgcaaaaactgacccgcatccccgaatgggttgccccgaccctgagccaaatcggacaggcagacgaagccgcgctcaaacgcctcgaagcactggttcacaaactgccgttcaacgccgaagagaaaaaagccgcagcggccgctttgggacacgcccgcatccgcaccctgcgccgtgccgaaaccgtccttaccggaccgaccggcgagcgcaacagcatctcatggcacgcgcccaaacgcgtttggatacacggcggcagcacggttcaagcctttgccgcactgaccgaacttgccgcctccggcatacaggcagtggtcgaacccgacagccccttggcttcctacactgccgacttggaaggtctgctgctggtcaacggcaaacccgaaaccgccggcatcagccacgttgccgccctgtcgcctttggacagcgcgcgcaaacaggaacttgccgcccacgacggcgcactcatccgcatcctcccttcggaaaacggactcgacatcctgcaagtgtttgaagaaatctcttgcagcgtcaacaccacagccgccggcggcaacgccagcctgatggcggtcgccgactga

SEQ ID NO: 58963 - DNA, 1428 bp, Neisseria meningitidis
atgatacacaccgaaccgagcgcgcagccgtcaactatggacacggctgcttttttaaagcacatcgaatccgcattccgccgcattttttcagacggtatcgacctgatgcgatacctgcccgaagacaaatggcttgccttgaagcaggcgggtttgctgttgcccttcctcgacaaaaaatacggcgggcgcaagggcagccagtttgaaatccaagaagtcctgcggattgcggggcattacggcgtgcccgttacgctgcgtaccggcatcgaaggcgcgctggtgttgcagccactgcaagagttcggcgatgaagcgcaagtcgcgcaaggtttggagatgattttcaaaggcgagggcggcggtttgggtgttaccgaacccgaaacctccggcgcggcgattgcacgcgaaatgcagtcctactacgaatatatcgacggacaaaccatttacgtcaacgccgcgaaatactggcagggcaactcgcaaagcgacttcctcctcgttgccgccaaagagcgcaaaaacggcaaactcgccaaagtcatcgacctgctgctcgtccccaaaacatacatccgctgcgaaaccctcgcatccgaaggcttgcgcgccgtccgttacgccgtcaaccgcatcgatgccgaaatgcctgcaaccgccgtgatgaaactctcccagagcgacgctgccggtttgcgcgcgttccaaaacatctttatccgcagccgcctgcaactgatcggcatgacgcacggcattatggaatacatccttgaaaatctggaacgatacgtccgcaacgacatcaaattcgtcgattacgaacgccgcgaaatccggcgccgccatcaggtttccgagattctttaccgctacgtctgccattccgtttcgcctgttgcccccgtcgcccatcagctgatggaggcgaacatcgtcaaaaccctcgccacggaatacacttacgccgccgcgcaaatgttgcaaaaactcttgggtgcgaagggttttgaacgcggacacaccgccggcaatatcgctatcgacatccgccccttcacgatttttgaaggcccgaacgatatgctttatgccgaaatttacgaccagtttgtccgcgccaccgccgaagaaaaagaagcaggcatgaagttggacaaaaaccaaaccctgctcgaccgcctgcaaaccgatgcccgctttgccgccgtcgcccgcgactacactttgcctgaagacatccgcagcttcctgcaggaacacaccctgaccgatgcctgcgccctgcaaaaagtctttatcggcaaaatcatcgcccgactctttgtcttcgtacaggcgaaacacgaagacaccgcagccttcctgctgaacgacatccgcaaagatatattggactgccgatattgcgggtag

SEQ ID NO: 58964 - DNA, 471 bp, Neisseria meningitidis
ttgaacatcaccgttttggcagtcggcaccaaaatgccgcgctgggttgatgaggccgtcgccgaatacgccaaacgcttcggacgcgacgtcgcctacgcactcaaagaaatcaaacccgaaaaacgcggcgcgggcgtgaatgccgcccaaggtatggcggcggaagaaaaacgcatccttgaagccattccgcaaggcgcgttcctcgtcgttcttgacgaacgcggcaaagcaccgacctccgtcgagctggcggaacacctcaaaagctggcagcaaaacggcgaacacgtctgcttcgtcatcggcggcgcggacggtatgaccgaccgcctcaaacagcaggcacgcatgatgatgcgcctgtccagcctgaccctgccgcacgggatggtgcgcgtccttctgaccgagcagctctaccgcgccgcctccatcctgcacaaccatccctatcatcgggaataa

SEQ ID NO: 58965 - DNA, 519 bp, Neisseria meningitidis; identical to SEQ ID NO: 43810

SEQ ID NO: 58966 - DNA, 423 bp, Neisseria meningitidis; identical to SEQ ID NO: 45387

SEQ ID NO: 58967 - DNA, 876 bp, Neisseria meningitidis
atgccgaccgtccgttttaccgaatccgtcagcaaacacgaccttgatgccctgttcgagtgggcaaaagcaagttacggtgcagaaagttgctggaaaacgctgtatctgaaccgtctgcctttgggcaatctgtcgccggaatgggcggagcgcgtcaaaaaagactgggaggcaggctgctcggagtcttcagacggcattttcctgaatgcggacggctggtcagatatgggcggccgcttgcagcacctcgcccgcacatggaacaaggcggggctgcttcacggatggcgcaacgagtgtttcgacctgaccgacggcggcggcaaccccttgttcacgctcgaacgcgccgctttccgtccgttcggactgctcagccgcgccgtccatctcaacggactgaccgaatcggacggccgatggcatttctggataggcaagcgcagtccgcacaaagcagtcgatcccgacaaactcgacaatattgccgccggcggtgtttccggcggcgaaatgccgtctgaagccgtgtgccgcgaaagcagcgaagaagccggtttggataaaacgctgtttccgtttatccgtccggtatctcggctgcacagcctgcgccccgtcagccggggtgtgcacaatgaaatcctgtatgtattcgatgccgtcctacccgaaaccttcctgcctgaaaatcaggacggcgaggttgcgtgttttgaaaaaatggacatcggcagcttggttgccaccatgttgtcgggaaacatgatgcacgacgcgcaactggttacgctggacgcgttttgccgttacggtctgattgatgccgcccatccgctgtccgagtggctggacggcatacgtttatag

SEQ ID NO: 58968 - DNA, 2157 bp, Neisseria meningitidis; identical to SEQ ID NO: 42189

SEQ ID NO: 58969 - DNA, 1113 bp, Neisseria meningitidis
atgagcaccttcttccaacaaaccgcgcaagccatgattgccaaacacatcgaccgtttcccgctattgaagttggatcaggtaattgattggcagccgatcgagcagtacctgaaccgtcaaaaaaaccgttacctccgagaccaccgcggccgtcctgcctatcccctgctgtccatgttcaaagccgtcctgcccggacaatggcacagcctctccgatcccgaactcgaacacagcctcatcacccgcatcgatttcaacctgttttgccgtttcgacgaactgagcatccctgattacagcaccttatgccgctaccgcaactggctggcgcaagacgacaccctgtccgaattgctcaaactgattaaccgacaactgaccgaaaaaggtttaaaaatagagaaagcatccgccgctgtcgttgacgccaccattattcagaccgccggcagcaaacagcgtcagaccatagaagtcgatgaggaaggacaaatcagcggccaaaccacaccgagtaaagacagcgatgcccgttggataaagaaaaacggcctctacaaactcggttacaaacaacatacccgtaccgatgcggaaggctatatcgagaaactgcacattacccccgccaatgcccatgagtgcaaacacctgtcgccgttgttggaaggtctgcccaaaggtacgaccgtctatgctgataaaggctatgacagtgcggaaaaccggcaacatctggaagagtgtcagttgttagacggcattatgcgcaaagcctgccgcaaccgtccgctggcggaggcgcaaaccaaacgcaaccggtatttgtcgaagacccgttatagtggattaaatttaaatcaggacaaggcgacgaagccgcagacagtacaaatagtacggcaaggcgaggcaacgccgtactggtttaaatttaatccactatatgtggtcgaacagagcttcggtacgctgcaccgtaaattccgctacgctcgggcagcctatttcggactgattaaagtgagtgcgcaaagccacctgaaagcgatgtgtttgaacctgttgaaagcggccaacaggttaagtgcgcccgctgccgcctaa

SEQ ID NO: 58970 - DNA, 714 bp, Neisseria meningitidis
ttgggcgcgtgcagcacttcctaccgcccctcgcgggcagaaaaagccaatcaggtttccaatatcaaaacccagttggcaatggaatatatgcgcggtcaggactaccgtcaggcgacggcaagtattgaagacgccttgaaatcagaccctaaaaacgagcttgcctggctggtccgtgccgaaatctatcaatacctgaaagttaacgacaaggcgcaggaaagtttccggcaagccctctccatcaaacccgacagtgccgaaatcaacaacaactacggctggttcctgtgcggcaggctcaaccgccctgccgaatctatggcatatttcgacaaagccctggccgaccccacctacccgaccccttatattgccaacctgaataaaggcatatgcagcgcaaaacaggggcaattcggattggcggaagcctatttgaaacgttccctcgccgcccagccgcagttcccacccgcatttaaagaactggcgcgcaccaaaatgctggccgggcagttgggcgatgccgattactactttaaaaaataccaaagcagggtagaagtccttcaggccgatgatttgctgctaggctggaaaattgccaaagccctcggcaacgcgcaggcggcatacgaatatgaagcacaattgcaggcgaatttcccctactcggaagaattgcaaaccgtcctcaccggtcaataa

SEQ ID NO: 58971 - DNA, 903 bp, Neisseria meningitidis; identical to SEQ ID NO: 38685

SEQ ID NO: 58972 - DNA, 810 bp, Neisseria meningitidis
atgagaccatatgctactaccatttatcaactttttattttgtttattgggagtgtttttactatgacctcatgtgaacctgtgaatgaaaagacagatcaaaaagcagtaagtgcgcaacaggctaaagaacaaaccagtttcaacaatcccgagccaatgacaggatttgaacatacggttacatttgattttcagggcaccaaaatggttatcccctatggctatcttgcacggtatacgcaagacaatgccacaaaatggctttccgacacgcccgggcaggatgcttactccattaatttgatagagattagcgtctattacaaaaaaaccgaccaaggctgggttcttgagccatacaaccagcaaaacaaagcacactttatccaatttctacgcgacggtttggatagcgtggacgatattgttatccgaaaagatgcgtgtagtttaagcacgactatgggagaaagattgcttacttacggggttaaaaaaatgccatctgcctatcctgaatatgaagcttatgaagataaaagacatattcctgaaaatccatattttcatgaattttactatattaaaaaaggagaaaatccggcgattattactcatcggaactatcataggtatggagagaacgattacagcactagcgtaggttcctgtattaacggtttcacggtacggtattacccgtttattcgggaaaagcagcagctcacacagcaggagttggtaggttatcaccaacaagtagagcaattggtacagagttttgtaaacaattcaagtaaaaaataa

SEQ ID NO: 58973 - DNA, 342 bp, Neisseria meningitidis
atgcccaaaatcaccgtacttccacacacgacattatgccccgaaggcgcggttatcgacgacgcgccggaaggcaaaaccgtcctcgacgtactgctcgaccatgatatcgaagtcgatcacgcctgcgaaaaatcctgcgcctgcaccacctgccacgtcatcatccgcaaaggtttcgacagtttggaagaaccgaccgaattggaagaagacctgctcgaccaagcatggggtttggaagccgattcgcgcctgagttgtcaggcggttgtcgccggcgaggatttgattgtggaaatccccaaatacaccatcaaccacgcgcgagaagaacactga

SEQ ID NO: 58974 - DNA, 2274 bp, Neisseria meningitidis
atgaacattactcaaattctttcccaagaactctccgcgactgccgcgcaaatcaccgccgccgtcgagcttttggacgacggcgcgaccgtgccgtttatcgcccgctaccgcaaggaagcgacgggcgggttggacgatacgcagttgcgccggcttgccgagcggctgcaatatctgcgcgagttggaagagcgcaaagccgttgttttaaaaagcattgaagagcaaggcaagctttcagacgacctcagggcgcaaatcgaagccgccgataacaaaaccgcgctggaagacctgtatctgccctacaaacccaaacgccgcaccaaagcgcaaatcgcgcgcgaacacggtttgcagccgctggcggacgtgttgcttgccgagcagccgctggacgtggaagctgccgcgcaaggctacctgaacgaaaacgtccccgatgccaaagccgcgttggacggtgcgcgtgcgattctgatggagcagtttgccgaagacgcggaactcatcggcacgctgcgtgataagttgtggaacgaagccgaaatccatgcgcaagttgttggaggcaaagaaaccgaaggcgaaaaattcagcgattattttgaccaccgcgaacctattcgtgcgatgcccagccatcgtgcgctagcggttttgcgcggacgcaacgaaggcgtgttgaacatcgcgctcaaatatcagcccgacgacacgccgattacgcagcaaagcgaatacgagcaaatcatcgcccgccgcttcaaagtttcagacggccacaaatggctgcgcgacaccgtgcgcctgacttggcgcgcgaaaatctttttgtcgttggaacttgaagctctcaatcgtttgaaagaagccgccgacaccgacgcgattaccgtgttcgcccgcaatctcaaagacttgctgcttgctgcgcccgccggacggctgaccacgctgggtctcgaccccggctaccgcaacggcgtgaaatgcgccgtggtggacgacaccggcaagctgctggataccgtcatcgtctatttgcatcaagaaaacaatatgttggcaacgctgtcgcgcctgattaaacagcacggcgtgaagctcatcgccatcggtaacggcaccgccagccgtgaaaccgacaaaatcgcgggcgaactggtgcgtgaaatgtcgaaaatggggctgcataaaatcgtcgtgtccgaagccggcgcgtcgatttattccgcgtccgaactggcggcgcgcgagttccccgacttggacgtttccctgcgcggcgcggtgtccatcgcccgcaggctacaagacccgcttgccgagttggtcaaaatcgaccccaaatccatcggcgtggggcagtatcagcacgacgtgaaccaaagccagctcgccaaatcgctggacgcggtggtcgaagactgcgtgaacgccgtcggcgtggacgtgaacaccgcctccgccccgctcttggcgcgaatttccggtttgaatcaaacccttgcccaaaacatcgttgcctaccgcgatgaaaacggcgcgttcgacagccgcaaaaaattgctgaaagtaccgcgtttgggcgaaaaaaccttcgagcaggcggcaggctttttgcggattaacggcggtaaagagccgttggacgcgagcgccgtccaccccgaagcctatcccgtcgtcgccaaaatgctggcgcaacaaggcattagcgccgccgaactcatcggcaaccgcgagcgcgtgaagcaaatcaaagcgtccgacttcaccgacgaacgcttcggcctgccgaccattttggacatcctgtccgaactggaaaaacccggccgtgatccgcgcggcgagtttcagacggcatcgtttgccgaaggtatccacgaaatcagcgacttgcaagtcggtatgatactcgaaggcgtggtttccaacgtcgccaacttcggcgcgttcgtggacatcggcgtccatcaggacggcttggtgcacatctccgccctgtccaacaagttcgtccaagacccgcgcgaagtggtgaaagctggcgacgtggtgaaagtgaaagtgctggaagtcgatgctgcacgcaaacgcatcgcgctgaccatgcgcttggatgacgaaccgggcggcgcaaaacataaaatgccgtctgaaaaccgcagccgcgaacggacagccggccgcaaaccccaacgcaacgaccgcgccccagccaattcggcgatggcggatgcgtttgcgaagctgaagcggtaa

SEQ ID NO: 58975 - DNA, 483 bp, Neisseria meningitidis
atgatgaaaaagatactggccgtatcggcactatgcctgatgactgcggcggcacgggctgccgatacttacggctatctcgccgtttggcagaatccgcagaatgcggacgatgttttgcaggttaaaaccacaaaagaagattcgacgaaaagcgaagcgtttgccgagttggaagccttctgtaaaggtcaggacacgcttgcgggcattgctgaagacgagccgaccggatgccggtcggtcgtgtcgctgaacaatacctgtgttgcgctggcatacccgaaagccttgggtgcgatgcgcgttgaaaacgccgtcgtgattacttctccgcgttttacgagcgttcatcaggtcgcactcaaccagtgcatcaaaaaatacggcgtacagggacaatgcggcttggaaacagtgtattgcacatcttcttcttattacggcggaactgtgcgctctttgattcaaaatctcaaataa

SEQ ID NO: 58976 - DNA, 1065 bp, Neisseria meningitidis; identical to SEQ ID NO: 50499

SEQ ID NO: 58977 - DNA, 339 bp, Neisseria meningitidis; identical to SEQ ID NO: 52199

SEQ ID NO: 58978 - DNA, 1701 bp, Neisseria meningitidis
atgtccgtcaaaatccaaacccgctccgtcaataccgacgtttttaatcatttgcttaccgccggtgccgatcctttaatcgcccggctttgtgcctcgcgcggtgtgcaaagtcctgccgaattggacgacaaactcgcttccctcctgccttatcaaacgctgacaaactgcgaagccgccgccggccgtttggcggatgcggttgaacgcaaggaaaaaatcctgattgtcgccgactatgatgccgacggcgcgacggcgtgttccgtcggtatgagcggtttggcggcgatgggggcgaaagtggatttccttgtgcccaaccgctttgagcacggctacggcttaacgcccgagctggctgaaatcgcggcagagcaaggtgtggatttgctgattacggttgataacggtatcgccagcatcgcaggtgtggcgagggcgcaggctctgggtttggatgtcatcgttaccgaccaccatctgcctgccgagaccgtgcccgactgcatcatcgtcaatccgaaccaaaaaggctgcggttttccaagcaaaagcttggcgggcgtgggcgtgattttttatgtattgatggcgttgcgtgccgaattgcgccgccgcaattatttttcagacggcatcaaagagccgaatctgggcgaacttttggatttggtcgcactcggcacggttgccgatgtcgtccctctcgaccacaacaaccgtatcctcgtgtcgcaaggtttgaaacggatgcgttccggcaaaatgcgccccggtatccgcgccttgtttgaagtggcgcggcgcgattggcgcaaagcgcagcctttcgatatgggctttgcgttgggcccgcgcatcaacgccgccggacggctggacgatatgtcggtcggcattgcctgtctgttggcgcaagatgatgccgaggcgcaggaactggcggctcagttgaacaacctcaatatcgaacgccgcgaaattgagcagtctatgctgcaagacgctctgaacgcctttcccgaaaccctccctccgggtcagacgaccctagtcgcctatcgcgacgacttccatcaaggcgtggtcggtattgttgccagccgcctcaaagaccgtttttatcgtccgaccatcgtgtttgcgcctgccgacaacggcgaagtgcgcggttcgggacgctccattcccaatctgcacctgcgcgatgctttggacttggtgtccaaacgccatcccgatttgattttgaaatttggcggacacgcgatggcggcaggtttgagcatactcgaacacaatatccccgcgtttcagacggcatttgaagaagccgtgcgcgagatggtgtgcgaagacgatttgtcgcaaacattcatcaccgacggcagcctgcctgcccgcgacattacgctggaacaggcgcagaaccttgcccgacacgtttgggggcagggcttcgcgccgccgagttttaccgacgaatttcacgttgtccgccagcagcctttgggcgcggaaggcaaacataaaaaagtctggttgcaaaaagacggctacgaatttgaagccatgttttggcgttgcagcgaagacattcccgaatacatccgcacggtgtaccgcctcgttgccaacgaatggcggaataatctcgaattgcagctttatatcgattactgggaagccgcgtag

SEQ ID NO: 58979 - DNA, 294 bp, Neisseria meningitidis; identical to SEQ ID NO: 37088

SEQ ID NO: 58980 - DNA, 714 bp, Neisseria meningitidis; identical to SEQ ID NO: 42984

SEQ ID NO: 58981 - DNA, 1389 bp, Neisseria meningitidis; identical to SEQ ID NO: 51589

SEQ ID NO: 58982 - DNA, 573 bp, Neisseria meningitidis
atgacttatgaaattcaagcctctgttcgtgaagcacaaggcactggtgcgagccgccgcctgcgtcgcgaaggccaaatccccggcattctgtacggtgaaggtcaagagcctgttgcaatcgctgtggatcacaaaaccgtattctacgcattggaaaaagaatctttccataccgcgttgattaaattgtctctgaacggcgaaaccaaagacgttatcgtccgtgatttccaaatgcacccgttccgccgcgaagttcaacacatcgacttccaagctgtgaaagccgatcaacttgtacgcatccgtgttcccctgcacatcgttaacgctgaaaattcccaagcggtcaaactgcaaggcggccgtgtatctctgttgaacacgactgttgaagtgcttgcattgcctgccaatatccctgctttcttggatttggattgtgccgaagtggttgccggcgacattctgcatctgtccgacatcaaactgcctgaaggtgtagaaagcgtttccttgaaacgtaacgaaaatctggctgttgccaccgttaccggtaaaaaacgctaa

SEQ ID NO: 58983 - DNA, 303 bp, Neisseria meningitidis; identical to SEQ ID NO: 43912

SEQ ID NO: 58984 - DNA, 606 bp, Neisseria meningitidis; identical to SEQ ID NO: 54648

SEQ ID NO: 58985 - DNA, 393 bp, Neisseria meningitidis
atgtattcgtttgaagcgaatgcaaatgcagtaaaaatatctgaaactgtttcagttgataccggacaaggtgcgaaaattcataagtttgtacctaaaaatagtaaaacttattcatctgatttaataaaaacggtagatttaacacacatccctacgggcgcaaaagcccgaatcaacgccaaaataaccgccagcatttcccgcgccggcgtattggcgggggtcggcaaacttgcccgcttaggcgcgaaattcagcacaagggcggttccctatgtcggaacagcccttttagcccatgacgtatacgaaactttcaaagaagacatacaggcacgaggctaccaatacgaccccgaaaccgacaaatttgcaaaggtctcaggctaa

SEQ ID NO: 58986 - DNA, 312 bp, Neisseria meningitidis; identical to SEQ ID NO: 36570

SEQ ID NO: 58987 - DNA, 444 bp, Neisseria meningitidis; identical to SEQ ID NO: 38644

SEQ ID NO: 58988 - DNA, 252 bp, Neisseria meningitidis; identical to SEQ ID NO: 41525

SEQ ID NO: 58989 - DNA, 651 bp, Neisseria meningitidis; identical to SEQ ID NO: 41065

SEQ ID NO: 58990 - DNA, 534 bp, Neisseria meningitidis
atgtttccccccgacaaaacccttttcctctgtctcagcgcactgctcctcgcctcatgcggcacgacctccggcaaacaccgccaaccgaaacccaaacagacagtccggcaaatccaagccgtccgcatcagccacatcgaccgcacacaaggttcgcaggaactcatgctccacagcctcggactcatcggcacgccctacaaatggggcggcagcagcaccgcaaccggcttcgattgcagcggcatgatccaattcgtttacaaaaacgccctcaacgtcaagctgccgcgcaccgcccgagacatggcggcggcaagccgcaaaatccccgacagccgcctcaaggccggcgacctcgtattcttcaacaccggcggcgcacaccgctactcacacgtcggactctacatcggcaacggcgaattcatccatgcccccagcagcggcaaaaccatccgaaccgaaaaactttctacaccgttttacgccaaaaactacctcggcgtacatactttctttacagaatga

SEQ ID NO: 58991 - DNA, 348 bp, Neisseria meningitidis
atgcgcctaaaccacaaacagggcgaggcaggggaagatgccgcgcttgccttcctccaatcccaaggctgcacactgcttgcccgcaactggcactgcgcctacggcgaaatcgacctgattgtcaaaaacggcggcatgattctgtttgttgaagtaaaataccgcaaaaatcggcaattcggcggtgtcgcatacagcatttccccatccaaattattgaaactgcaacgaagtgtagagtattatctgcaacagaacaggttgacaaacgtaccgtgccgcctcgacgcggtactcatcgaaggcagccgcccgcccgagtggatacagaatattacaggttga
